United States Patent Application Publication US 2026/0337666 A1 - sequence listing, part 13

SEQ ID NO: 18268 - DNA, 7284 bp, Homo sapiens
  source 1..7284: mol_type = unassigned DNA
tatgcaggcaacatagcccttcatagcaaagcagtctgaaaaattggcacctgcaggatttgcatgtgaaaaaaacggagtcagttgcattttgccggagtctattactaaaagattgatctctgggctggtgaacataatctctgtcccagtcagaaaaggagagaggaaattagcagagcgattggtggagaatgatatctgtcaaaagaaacacttggagagcactgagtttagtaataggtgactgccggaaaaaagggaactttgaatattgtcaagatcgtactgagaagcactccacaatgccagactcacctgtggatgtgaagacgcaatctaggctgactcctccaacaatgccacctcccccaactactcaaggagctccaagaaccagttcatttacaccgacaacgttaactaatggcacgagccattctcctacagccttgaatggcgccccctcaccacccaatggcttcagcaatgggccttcctcttcttcctcctcctctctggctaatcaacagctgcccccagcctgtggtgccaggcaactcagcaagctgaaaaggttccttactaccctgcagcagtttggcaatgacatttcacccgagataggagaaagagttcgcaccctcgttctgggactagtgaactccactttgacaattgaagaatttcattccaaactgcaagaagctactaacttcccactgagaccttttgtcatcccatttttgaaggccaacttgcccctgctgcagcgtgagctcctccactgcgcaagactggccaaacagaaccctgcccagtacctcgcccagcatgaacagctgcttctggatgccagcaccacctcacctgttgactcctcagagctgcttctcgatgtgaacgaaaacgggaagaggcgaactccagacagaaccaaagaaaatggctttgacagagagcctttgcactcagaacatccaagcaagcgaccatgcactattagcccaggccagcggtacagtccaaataacggcttatcctaccagcccaatggcctgcctcaccctaccccacctccacctcagcattaccgtttggatgatatggccattgcccaccactacagggactcctatcgacaccccagccacagggacctcagggacagaaacagacctatggggttgcatggcacacgtcaagaagaaatgattgatcacagactaacagacagagaatgggcagaagagtggaaacatcttgaccatctgttaaactgcataatggacatggtagaaaaaacaaggcgatctctcaccgtactaaggcggtgtcaagaagcagaccgggaagaattgaattactggatccggcggtacagtgacgccgaggacttaaaaaaaggtggcggcagtagcagcagccactctaggcagcagagtcccgtcaacccagacccagttgcactagacgcgcatcgggaattccttcacaggcctgcgtctggatacgtgccagaggagatctggaagaaagctgaggaggccgtcaatgaggtgaagcgccaggcgatgacggagctgcagaaggccgtgtctgaggcggagcggaaagcccacgacatgatcacaacagagagggccaagatggagcgcacggtcgccgaggccaaacggcaggcggcggaggacgcactggcagttatcaatcagcaggaggattcaagcgagagttgctggaattgtggccgtaaagcgagtgaaacctgcagtggctgtaacacagcccgatactgtggctcattttgccagcacaaagactgggagaagcaccatcacatctgtggacagaccctgcaggcccagcagcagggagacacacctgcagtcagctcctctgtcacgcccaacagcggggctgggagcccgatggacacaccaccagcagccactccgaggtcaaccaccccgggaaccccttccaccatagagacaacccctcgctagacgtgaactcagaactgtcggaggaaagacaacacaaccaacgcgaaaccaattcctcatcctcagatgctcaaagttgttttttttgtttgtttgtttattagatgaattatcctatttcagtacttcagcaagagagaacctaactgtatcttgaggtggtagtaaaacacagagggccagtaacgggtcgtaatgacttattgtggataacaaagatatcttttctttagagaactgaaaagagagcagagaatataacatgaaatgatagatttgacctcctccctgttattttcaagtagctgggattttaaactagatgacctcattaaccgatgctttaccaaacagcaaaccaagagattgctaattgctgttgaaagcaaaaatgctaatattaaaagtcacaatgttctttatatacaataatggaaaaaaaaaaaagaggaaaaccctcaagggcatgagcattggatacagcagtagacattttaacaagaagatgaatggcgtccgtgggttgctaactgaactttgaagacccgctacaaaacgcgcagatgtgcagcagattggaaggagacacagatgttcggtttttttcctgtttctgaaaagaaataataatatccaggtcaacagaatgaaaaatgaaagatgatttgcaatgggatgtatgaatacagcagcaagaaaaaaaaatgccataatacaaaaggctccatatatatatatatatatatatatatacacacacacacacgcacatatacacacacacacacacacacacacacacacacacacacacacacacacacacacaagtaagagactcagcctgcagttaattagcattctggcagttttgacatcagccagctgccctaaataacccttcaacgtttcttcacttttgcaaggttccacagagtaagacattgggtctattccagctcattcattttatattgaaaaaaataattttaaaaatggtggcttcagctccagcccctttccaaaatttttcaaccccaccctgtttggatttttaattaaaaactagtagttctcttggtgttaaaacacttctgtcctgtgaggtttcccaatggtgtttttcttgtaaatgtgttggacaaatgtgaagatgcattgtagtttaaccatatgcccacatttagtctctttattcctagttggtgagaaacctgtatctttctatgctgcttttatatctgtatgtattagtgatatttctctagtagttaaaaaaaaaaaaaggaaaaaaagactctttttggttgtcctcaagaaaagaaaagaagaaaagctatctttcggagctgctatttcactctcttataggatttttttttttcctgaaaaccagcatgcttcacggaatgctaacatattggtgtttttgtaagagggatgtacataaatgtattttgcactgtcacaatgactccctaggcatgctttttgtttttttttttttttttttgagcaaattctttttaaatatgctagagccatttcatcaagtttagctgtagcatagagtagtcgtggaatttttcttttttttttttttaaatcattattagggacttttttaaaaaaataaaataacaagatatcctactttaaaaaaaaaggacagtgcatgcatattgctgtaaggtcgtttaagtatttctaattttacaaaagtaaaaatcattagagctccaaatgctgaggtgtagattgacagctttaacactgctgaatgccaggttatacagtattcttacaaaaagggaagtcagccaaagactgatctgatggaccaaaatcggaattttgaaaagcaccagtactactttccaaatgatcagcaggttaaacatgttcagcaaggtatagtatgaatccattaacccttcgttgtccagggtccagaccagaactacttgttagttttgaaaacagtagcccaggatgtggttgtgtgctttaggaaagtcagcagtgctgcaggctgtgtagacaaccaaagtttacaaggctgggaagacacttctccaaatacatatacaccaggcatttctttaaaatcaaaaacaatccattagctttggggcggggggtggggggagggttaaatgtaggccttggaaacagttttaagtggcttttaagtatctgcatagaggcaatcctaaggtttgctttaagtctcttaaatctaacatttttaaaagcatttcttccctgtattttcatatacaagttggttttaattttgtttgggtggtgttattttttttaaatgactttttagtttagaaagttctgatgagcaaataaatacatctatctacatgttggaagtccatctgccagcacacctgcttaaagtgaaatgaaagcacataaccaggctctgaatgggttatattttatcatggtgctcccagaatcctttgacctcactctgctttctagtctgcttgtgacactggacagtcctttcttacagagctattatatgttctaggctacgaagggttaaataatcccaaaaatgaggtatgtcatacccacacgtctttatctctagaagctgtgatgtatgtgaaacagcactgttattcttaacactagtgtgtaaaataaggattagtacagtacgtctcattactttttaattcagggcaccctgagtgaaaacaaatacaaaaaaaaatccctaactctgagctctatctctgattcctcttcctccttcccctcttcctcctcttcctctcctcctgttttgctacattctcctcagtggcaaaaagtttcactctacctctgacagcatgtatattgcaccagtagctaacaaaaactggtctagtcaaaccaaatgggcacaaaagaaccaggataccaaaagttaagctcatacagctgcaaaccatatcacttcttggtaacaatgcagacctcataaacctaaagaagagaaagaaaagaaaacttttgttactttccttttttgcttgtcacttatatacaggctatgtgagaatataatttgtaggtataacacattaagaaaaagttatcttcattggatagaattgaatggtggtcgctgataggaatagggcgtcctctagctcttatctctgtctcttactcttttctctttctctttttctctgtcatgagactgtgtgtgacagggccacctgtcttttttttttcttaaattttttttttttttatgtgtaggtgcatgtcttggggatttaaaaatttcaaggctggtttacttatgcaaagcatgcctacgtctggaatacttagggaaagaaagcgactccatgttgtccgaattcctcaagggacagaaaaaaaattggagactgttgaaatgcagatttgaagtaatttttttaaaatattattttgggttctgcgacattgtgaaaaattaaagttgttgtgcaatacttaattcagacatgtaccacaagttaatggtagactaacactggggggtggggtctaggcatcatgcttttgtcagcatactcttgagcttttaagtctactatgtctgaactgtggtttcttgtttatccttttttccttagttggactgtaatgtatggtctgtcaacctgtgaatctttaaagtatgattcaggtattgttgtattctttactgtgtaataaaaaagttgaaaaaaatctggatcctctgtctccctcgtccccggtgtgccatggttgcccaccagtgaccccagcctgaggagtccatcctccatggtgctgaatcaaatctgtagagtttattcagctacaaagcgtggctctgtaacaggagttggcttatccatgcgtgttgagtagggaatgatgtcagaactttgcaaaagtcgagctcattcataaggggatgtttctcaggcaggaggagtaggaagagtgggaggagaattactaccttccataggaaaggagagcttggcttgcctagattagctgctgcatagatagcagaggcccttttggctgtgttttgataaaattagaaatgagtacctaaatctggatcactctgctcagagaggttcgtgccaacctcatgaggctctgactcttgtcaggttgcttggctgccttgtgcatacccgaatggcagatcagctgacatgacatggaactgctctatctgccttgtcccctctcctctaattaaaagtcgctaccattgtcactcttggttatgtagttaatatccactgtggctatctccaacttgctgggacatccagttatctcctctgacacatattttttcattctctagttacaaagtttgttagagtttgaaaaacaaacccttctcccctaccctgtgaatgctgttagtttttatgtgtagttttcaaaacacagattatcttatatactgtgttgtagcagaaattcctgtttcctctgaatgttctgactttatagaccaaaataatcgttgcaaaaaatcaaggatggcacagcaggtgcatgagcccgtgtctggagaaaggttatgaaggtgaatgctggttacatgggagggtgacttggagccctctagtttccttcttgtgccagctgggttcctgtttcaaggccaggcttctctaacttgtcttcctgggaaatgtagcttttccaagaatttggtagtgcacaccaggaaaaactaggtatcagaacagatttttttttaaatagtggaaacaccctcactcccacactttggacagttagggttggatatttaatttcatagttactctttttttccacagaagaaaggccagcctgacccaagttgcctatttttaatgtgttactgcatcttattttctcttcaaagtgaaaaaggccagaaactagcagatagaaatggaacccgttgacttagttcccttataagaagttcttgcaaacacctctgtgacgttttcattcaagtggatatgttggacaaataggaaacagttttagtttacgcgaacagtatgagacttccaggtggtggacgccatttttttagaagtgttgatgatgtatttgataacattataaaagtatgtgtctcccgtgaaagaacattgagctatttccctggaatggatggggaagaaatgagcaaaggagtgctgttctgtatgggtgtctatacccttattccaaggtgaataaataaagttgtgtttgcctaatcatg

SEQ ID NO: 18269 - DNA, 2009 bp, Homo sapiens
  source 1..2009: mol_type = unassigned DNA
gtgtcccggccccgcctcggccgtgagacctccagggggcggagcttgccgctgcgctttacggaaacgagtggccttcagctctgtcaatctggagctggaggcctcaaagtggggaggaggaggagggtgggataaagaggaaaggagcgtggaggacgtgtggttactcaaagaacagctaagaattttgcaatcggcctgagcggggcggtggtggggctgagcaaaaggaggaggagccaggagacattgggaatggacccaggagttccggacgcccgtcttccagcgcagcctcggtgggagggcggggcataaagtcccgccacgcccccacaatatttacatatttatgaggaaccatcgagatctttgaagaaccagctagcctagaggagccagaacatctcgctcctcgcgcgtttccgtttccgctaggactctggcagttggtgagcatcatggcaaccgttacagccacaaccaaagtcccggagatccgtgatgtaacaaggattgagcgaatcggtgcccactcccacatccggggactggggctggacgatgccttggagcctcggcaggcttcgcaaggcatggtgggtcagctggcggcacggcgggcggctggcgtggtgctggagatgatccgggaagggaagattgccggtcgggcagtccttattgctggccagccgggcacggggaagacggccatcgccatgggcatggcgcaggccctgggccctgacacgccattcacagccatcgccggcagtgaaatcttctccctggagatgagcaagaccgaggcgctgacgcaggccttccggcggtccatcggcgttcgcatcaaggaggagacggagatcatcgaaggggaggtggtggagatccagattgatcgaccagcaacagggacgggctccaaggtgggcaaactgaccctcaagaccacagagatggagaccatctacgacctgggcaccaagatgattgagtccctgaccaaggacaaggtccaggccggggacgtgatcaccatcgacaaggcgacgggcaagatctccaagctgggccgctccttcacacgcgcccgcgactacgacgctatgggctcccagaccaagttcgtgcagtgcccagatggggagctccagaaacgcaaggaggtggtgcacaccgtgtccctgcacgagatcgacgtcatcaactctcgcacccagggcttcctggcgctcttctcaggtgacacaggggagatcaagtcagaagtccgtgagcagatcaatgccaaggtggctgagtggcgcgaggagggcaaggcggagatcatccctggagtgctgttcatcgacgaggtccacatgctggacatcgagagcttctccttcctcaaccgggccctggagagtgacatggcgcctgtcctgatcatggccaccaaccgtggcatcacgcgaatccggggcaccagctaccagagccctcacggcatccccatagacctgctggaccggctgcttatcgtctccaccaccccctacagcgagaaagacacgaagcagatcctccgcatccggtgcgaggaagaagatgtggagatgagtgaggacgcctacacggtgctgacccgcatcgggctggagacgtcactgcgctacgccatccagctcatcacagctgccagcttggtgtgccggaaacgcaagggtacagaagtgcaggtggatgacatcaagcgggtctactcactcttcctggacgagtcccgctccacgcagtacatgaaggagtaccaggacgccttcctcttcaacgaactcaaaggcgagaccatggacacctcctgagttggatgtcatcccccgaccccaccctgttttccaccagagttctgacactgtgactctgtataaaatggttgggaagctgcacccaccctgtgtatgtgtggttgccctgagcccacagaaagacacctccagagtgcggattgagaagcc

SEQ ID NO: 18270 - DNA, 1641 bp, Homo sapiens
  source 1..1641: mol_type = unassigned DNA
gggaggaggaggagggtgggataaagaggaaaggagcgtggaggacgtgtggttactcaaagaacagctaagaattttgcaatcggcctgagcggggcggtggtggggctgagcaaaaggaggaggagccaggagacattgggaatggacccaggagttccggacgcccgtcttccagcgcagcctcggtgggagggcggggcataaagtcccgccacgcccccacaatatttacatatttatgaggaaccatcgagatctttgaagaaccagctagcctagaggagccagaacatctcgctcctcgcgcgtttccgtttccgctaggactctggcagttgacagccacaaccaaagtcccggagatccgtgatgtaacaaggattgagcgaatcggtgcccactcccacatccggggactggggctggacgatgccttggagcctcggcaggcttcgcaaggcatggtgggtcagctggcggcacggcgggcggctggcgtggtgctggagatgatccgggaagggaagattgccggtcgggcagtccttattgctggccagccgggcacggggaagacggccatcgccatgggcatggcgcaggccctgggccctgacacgccattcacagccatcgccggcagtgaaatcttctccctggagatgagcaagaccgaggcgctgacgcaggccttccggcggtccatcggcgttcgcatcaaggaggagacggagatcatcgaaggggaggtggtggagatccagattgatcgaccagcaacagggacgggctccaaggtgggcaaactgaccctcaagaccacagagatggagaccatctacgacctgggcaccaagatgattgagtccctgaccaaggacaaggtccaggccggggacgtgatcaccatcgacaaggcgacgggcaagatctccaagctgggccgctccttcacacgcgcccgcgactacgacgctatgggctcccagaccaagttcgtgcagtgcccagatggggagctccagaaacgcaaggaggtggtgcacaccgtgtccctgcacgagatcgacgtcatcaactctcgcacccagggcttcctggcgctcttctcaggtgacacaggggagatcaagtcagaagtccgtgagcagatcaatgccaaggtggctgagtggcgcgaggagggcaaggcggagatcatccctggagtgctgttcatcgacgaggtccacatgctggacatcgagagcttctccttcctcaaccgggccctggagagtgacatggcgcctgtcctgatcatggccaccaaccgtggcatcacgcgaatccggggcaccagctaccagagccctcacggcatccccatagacctgctggaccggctgcttatcgtctccaccaccccctacagcgagaaagacacgaagcagatcctccgcatccgggtacagaagtgcaggtggatgacatcaagcgggtctactcactcttcctggacgagtcccgctccacgcagtacatgaaggagtaccaggacgccttcctcttcaacgaactcaaaggcgagaccatggacacctcctgagttggatgtcatcccccgaccccaccctgttttccaccagagttctgaca

SEQ ID NO: 18271 - DNA, 682 bp, Homo sapiens
  source 1..682: mol_type = unassigned DNA
actcaaagaacagctaagaattttgcaatcggcctgagcggggcggtggtggggctgagcaaaaggaggaggagccaggagacattgggaatggacccaggagttccggacgcccgtcttccagcgcagcctcggtgggagggcggggcataaagtcccgccacgcccccacaatatttacatatttatgaggaaccatcgagatctttgaagaaccagctagcctagaggagccagaacatctcgctcctcgcgcgtttccgtttccgctaggactctggcagttggtgcccactcccacatccggggactggggctggacgatgccttggagcctcggcaggcttcgcaaggcatggtgggtcagctggcggcacggcgggcggctggcgtggtgctggagatgatccgggaagggaagattgccggtcgggcagtccttattgctggccagccgggcacggggaagacggccatcgccatgggcatggcgcaggccctgggccctgacacgccattcacagccatcgccggcagtgaaatcttctccctggagatgagcaagaccgaggcgctgacgcaggccttccggcggtccatcggcgttcgcatcaaggaggagacggagatcatcgaaggggaggtggtggagatccagattgatcgaccagcaacagggacg

SEQ ID NO: 18272 - DNA, 572 bp, Homo sapiens
  source 1..572: mol_type = unassigned DNA
gactctggcagttggtgagcatcatggcaaccgttgaactccaactttcaaaatcatcttggcgcaacggccggttccgcagtccttggcgccagtgtgtgatgaggagggttgtaggaccttgcgcttcgagccatttgggagccttggattgttagtggtgccaatggcacttgagttccaagctggaagcacaggcaggtgtggtggtgcaggcctgtaatcccagctactcagaaggctgaggcaggagaatcgcttgaacctgggaggcagaagttgcagtgagccaagatcgcgccactgcattccagcctgggcgacaaagcgagactctgtctccaaaaaaaaaaagacagccacaaccaaagtcccggagatccgtgatgtaacaaggattgagcgaatcggtgcccactcccacatccggggactggggctggacgatgccttggagcctcggcaggcttcgcaaggcatggtgggtcagctggcggcacggcgggcggctggcgtggtgctggagatgatccgggaagggaagattgccggtcgggcagtccttattgctg

SEQ ID NO: 18273 - DNA, 959 bp, Homo sapiens
  source 1..959: mol_type = unassigned DNA
actctggcagttggtgagcatcatggcaaccgttacagccacaaccaaagtcccggagatccgtgatgtaacaaggattgagcgaatcggtgcccactcccacatccggggactggggctggacgatgccttggagcctcggcaggcttcgcaaggcatggtgggtcagctggcggcacggcgggcggctggcgtggtgctggagatgatccgggaagggaagattgccggtcgggcagtccttattgctggccagccgggcacggggaagacggccatcgccatgggcatggcgcaggccctgggccctgacacgccattcacagccatcgccggcagtgaaatcttctccctggagatgagcaagaccgaggcgctgacgcaggccttccggcggtccatcggcgttcgcatcaaggaggagacggagatcatcgaaggggaggtggtggagatccagattgatcgaccagcaacagggacgggctccaaggtgggcaaactgaccctcaagaccacagagatggagaccatctacgacctgggcaccaagatgattgagtccctgaccaaggacaaggtccaggccggggacgtgatcaccatcgacaaggcgacgggcaagatctccaagctgggccgctccttcacacgcgcccgcgactacgacgctatgggctcccaggtgcggccgggactcccgggatcccctcgcccccagcactggggtgttttcatctcctccatcacccccttgacccatggggtctggatcttcctgttaccctgactgtttgtcctggtactcctgggtcttccctgtaaccctaggacagcagggcccctcagcctggcactatagcttcgcatggccacatgtggcctgtggcttctaaggtcctccgggagcccccgtgaccctcagcgctctggaatgtccctagtcctgactacctcct

SEQ ID NO: 18274 - DNA, 497 bp, Homo sapiens
  source 1..497: mol_type = unassigned DNA
agttggtgagcatcatggcaaccgtttatttcacacgggctacgtctcagtgtaaatgctcaataaattatcacttgaatatttgaatgaatgaatacatgtgaatgaaggagaggccaggaaacttggcctggcacctgctcaattacctgaataaagaagcgattttggcctggcgtggtggctcatgcctgtaatcccagcactttgggaggccgaggcgggcggatcacttcaggtcaggagttcgtggccaacattgcgaaaccccgtctctattaaaaatacaaaaattagccaggtgtggtggtgcaggcctgtaatcccagctactcagaaggctgaggcaggagaatcgcttgaacctgggaggcagaagttgcagtgagccaagatcgcgccactgcattccagcctgggcgacaaagcgagactctgtctccaaaaaaaaaaagccacaaccaaagtcccggagatccgtgatgtaacaaggattg

SEQ ID NO: 18275 - DNA, 1563 bp, Homo sapiens
  source 1..1563: mol_type = unassigned DNA
agttggtgagcatcatggcaaccgttacagccacaaccaaagtcccggagatccgtgatgtaacaaggattgagcgaatcggtgcccactcccacatccggggactggggctggacgatgccttggagcctcggcagcttcctgatgtggtagaaatgccatggtagccccacaggaaatcacctcatgtgcgcctcccacccacaggcttcgcaaggcatggtgggtcagctggcggcacggcgggcggctggcgtggtgctggagatgatccgggaagggaagattgccggtcgggcagtccttattgctggccagccgggcacggggaagacggccatcgccatgggcatggcgcaggccctgggccctgacacgccattcacagccatcgccggcagtgaaatcttctccctggagatgagcaagaccgaggcgctgacgcaggccttccggcggtccatcggcgttcgcatcaaggaggagacggagatcatcgaaggggaggtggtggagatccagattgatcgaccagcaacagggacgggctccaaggtgggcaaactgaccctcaagaccacagagatggagaccatctacgacctgggcaccaagatgattgagtccctgaccaaggacaaggtccaggccggggacgtgatcaccatcgacaaggcgacgggcaagatctccaagctgggccgctccttcacacgcgcccgcgactacgacgctatgggctcccagaccaagttcgtgcagtgcccagatggggagctccagaaacgcaaggaggtggtgcacaccgtgtccctgcacgagatcgacgtcatcaactctcgcacccagggcttcctggcgctcttctcaggtgacacaggggagatcaagtcagaagtccgtgagcagatcaatgccaaggtggctgagtggcgcgaggagggcaaggcggagatcatccctggagtgctgttcatcgacgaggtccacatgctggacatcgagagcttctccttcctcaaccgggccctggagagtgacatggcgcctgtcctgatcatggccaccaaccgtggcatcacgcgaatccggggcaccagctaccagagccctcacggcatccccatagacctgctggaccggctgcttatcgtctccaccaccccctacagcgagaaagacacgaagcagatcctccgcatccggtgcgaggaagaagatgtggagatgagtgaggacgcctacacggtgctgacccgcatcgggctggagacgtcactgcgctacgccatccagctcatcacagctgccagcttggtgtgccggaaacgcaagggtacagaagtgcaggtggatgacatcaagcgggtctactcactcttcctggacgagtcccgctccacgcagtacatgaaggagtaccaggacgccttcctcttcaacgaactcaaaggcgagaccatggacacctcctgagttggatgtcatcccccgaccccaccctgttttccaccagagttctgacactgtgactctgtataaaatggttgggaagctgcaccc

SEQ ID NO: 18276 - DNA, 1478 bp, Homo sapiens
  source 1..1478: mol_type = unassigned DNA
gttggtgagcatcatggcaaccgttacagccacaaccaaagtcccggagatccgtgatgtaacaaggattgagcgaatcggtgcccactcccacatccggggactggggctggacgatgccttggagcctcggcaggcttcgcaaggcatggtgggtcagctggcggcacggcgggcggctggcgtggtgctggagatgatccgggaagggaagattgccggtcgggcagtccttattgctggccagccgggcacggggaagacggccatcgccatgggcatggcgcaggccctgggccctgacacgccattcacagccatcgccggcagtgaaatcttctccctggagatgagcaagaccgaggcgctgacgcaggccttccggcggtccatcggcgttcgcatcaaggaggagacggagatcatcgaaggggaggtggtggagatccagattgatcgaccagcaacagggacgggctccaaggtgggcaaactgaccctcaagaccacagagatggagaccatctacgacctgggcaccaagatgattgagtccctgaccaaggacaagggacgtgatcaccatcgacaaggcgacgggcaagatctccaagctgggccgctccttcacacgcgcccgcgactacgacgctatgggctcccagaccaagttcgtgcagtgcccagatggggagctccagaaacgcaaggaggtggtgcacaccgtgtccctgcacgagatcgacgtcatcaactctcgcacccagggcttcctggcgctcttctcaggtgacacaggggagatcaagtcagaagtccgtgagcagatcaatgccaaggtggctgagtggcgcgaggagggcaaggcggagatcatccctggagtgctgttcatcgacgaggtccacatgctggacatcgagagcttctccttcctcaaccgggccctggagagtgacatggcgcctgtcctgatcatggccaccaaccgtggcatcacgcgaatccggggcaccagctaccagagccctcacggcatccccatagacctgctggaccggctgcttatcgtctccaccaccccctacagcgagaaagacacgaagcagatcctccgcatccggtgcgaggaagaagatgtggagatgagtgaggacgcctacacggtgctgacccgcatcgggctggagacgtcactgcgctacgccatccagctcatcacagctgccagcttggtgtgccggaaacgcaagggtacagaagtgcaggtggatgacatcaagcgggtctactcactcttcctggacgagtcccgctccacgcagtacatgaaggagtaccaggacgccttcctcttcaacgaactcaaaggcgagaccatggacacctcctgagttggatgtcatcccccgaccccaccctgttttccaccagagttctgacactgtgactctgtataaaatggttgggaagctgca

SEQ ID NO: 18277 - DNA, 813 bp, Homo sapiens
  source 1..813: mol_type = unassigned DNA
tcatggcaaccgttacagccacaaccaaagtcccggagatccgtgatgtaacaaggattgagcgaatcgagatggagtttccccgtgttagccaggatggtctcgatctcctgacctcgtgatccgcccgcctcggcctcccaaagtgctggaattacaggcatgagccaccgcgcctggccaaaaaacaataaaaaattaaaaaaaaaaaaaaaggatgaagagccaagcaccgcttgtgagctgaggacccagtagagactagctgcacccaggagcctcccttggggtgctcacagtcaagcactggggtgcccactcccacatccggggactggggctggacgatgccttggagcctcggcaggcttcgcaaggcatggtgggtcagctggcggcacggcgggcggctggcgtggtgctggagatgatccgggaagggaagattgccggtcgggcagtccttattgctggccagccgggcacggggaagacggccatcgccatgggcatggcgcaggccctgggccctgacacgccattcacagccatcgccggcagtgaaatcttctccctggagatgagcaagaccgaggcgctgacgcaggccttccggcggtccatcggcgttcgcatcaaggaggagacggagatcatcgaaggggaggtggtggagatccagattgatcgaccagcaacagggacgggctccaaggtgggcaaactgaccctcaagaccacagagatggagaccatctacgacctgggcaccaagatgattgagtccctgaccaaggacaaggtccaggccgg

SEQ ID NO: 18278 - DNA, 1853 bp, Homo sapiens
  source 1..1853: mol_type = unassigned DNA
acagccacaaccaaagtcccggagatccgtgatgtaacaaggattgagcgaatcggtgcccactcccacatccggggactggggctggacgatgccttggagcctcggcaggcttcgcaaggcatggtgggtcagctggcggcacggcgggcggctggcgtggtgctggagatgatccgggaagggaagattgccggtcgggcagtccttattgctggccagccgggcacggggaagacggccatcgccatgggcatggcgcaggccctgggccctgacacgccattcacagccatcgccggcagtgaaatcttctccctggagatgagcaagaccgaggcgctgacgcaggccttccggcggtccatcggcgttcgcatcaaggaggagacggagatcatcgaaggggaggtggtggagatccagattgatcgaccagcaacagggacgggctccaaggtgggcaaactgaccctcaagaccacagagatggagaccatctacgacctgggcaccaagatgattgagtccctgaccaaggacaaggtccaggccggggacgtgatcaccatcgacaaggcgacgggcaagatctccaagctgggccgctccttcacacgcgcccgcgactacgacgctatgggctcccaggtgcggccgggactcccgggatcccctcgcccccagcactggggtgttttcatctcctccatcacccccttgacccatggggtctggatcttcctgttaccctgactgtttgtcctggtactcctgggtcttccctgtaaccctaggacagcagggcccctcagcctggcactatagcttcgcatggccacatgtggcctgtggcttctaaggtcctccgggagcccccgtgaccctcagcgctctggaatgtccctagtcctgactacctcctgggcctggggtttccagatgaccccatttagcctcccagctccatttcctggagctccagtctcccccagacagagggctttaggggcccccttcatgcccttccctgccctgtctccgccgttcttcccccacccccgccccatagaccaagttcgtgcagtgcccagatggggagctccagaaacgcaaggaggtggtgcacaccgtgtccctgcacgagatcgacgtcatcaactctcgcacccagggcttcctggcgctcttctcaggtgacacaggggagatcaagtcagaagtccgtgagcagatcaatgccaaggtggctgagtggcgcgaggagggcaaggcggagatcatccctggagtgctgttcatcgacgaggtccacatgctggacatcgagagcttctccttcctcaaccgggccctggagagtgacatggcgcctgtcctgatcatggccaccaaccgtggcatcacgcgaatccggggcaccagctaccagagccctcacggcatccccatagacctgctggaccggctgcttatcgtctccaccaccccctacagcgagaaagacacgaagcagatcctccgcatccggtgcgaggaagaagatgtggagatgagtgaggacgcctacacggtgctgacccgcatcgggctggagacgtcactgcgctacgccatccagctcatcacagctgccagcttggtgtgccggaaacgcaagggtacagaagtgcaggtggatgacatcaagcgggtctactcactcttcctggacgagtcccgctccacgcagtacatgaaggagtaccaggacgccttcctcttcaacgaactcaaaggcgagaccatggacacctcctgagttggatgtcatcccccgaccccaccctgttttccaccagagttctgacact

SEQ ID NO: 18279 - DNA, 546 bp, Homo sapiens
  source 1..546: mol_type = unassigned DNA
ttcagacgcagggaattttcatccctcaggttggcttctgtatcatccagcctggcctatagtaggtatcagtaaatctctcttgacttaagtagatgctgttaggtccaccttacagataaagaaactgaggaatgaagaggctgggcccacaacaaggagatggccaggcaggatttgaacccaggcaatctggcccagaatgccctcccctcacatgccacactctgctgcctagagcatggaggtggcatacgctggggtctgtgccttgagcctcacggagaggggcccaactgaggactcgccctccccctccagggtacagaagtgcaggtggatgacatcaagcgggtctactcactcttcctggacgagtcccgctccacgcagtacatgaaggagtaccaggacgccttcctcttcaacgaactcaaaggcgagaccatggacacctcctgagttggatgtcatcccccgaccccaccctgttttccaccagagttctgacactgtgactctgtataaaatggttgggaagctgca

SEQ ID NO: 18280 - DNA, 1065 bp, Homo sapiens
  source 1..1065: mol_type = unassigned DNA
atggtgggtcagctggcggcacggcgggcggctggcgtggtgctggagatgatccgggaagggaagattgccggtcgggcagtccttattgctggccagccgggcacggggaagacggccatcgccatgggcatggcgcaggccctgggccctgacacgccattcacagccatcgccggcagtgaaatcttctccctggagatgagcaagaccgaggcgctgacgcaggccttccggcggtccatcggcgttcgcatcaaggaggagacggagatcatcgaaggggaggtggtggagatccagattgatcgaccagcaacagggacgggctccaaggtgggcaaactgaccctcaagaccacagagatggagaccatctacgacctgggcaccaagatgattgagtccctgaccaaggacaaggtccaggccggggacgtgatcaccatcgacaaggcgacgggcaagatctccaagctgggccgctccttcacacgcgcccgcgactacgacgctatgggctcccagaccaagttcgtgcagtgcccagatggggagctccagaaacgcaaggaggtggtgcacaccgtgtccctgcacgagatcgacgtcatcaactctcgcacccagggcttcctggcgctcttctcaggtgacacaggggagatcaagtcagaagtccgtgagcagatcaatgccaaggtggctgagtggcgcgaggagggcaaggcggagatcatccctggagtgctgttcatcgacgaggtccacatgctggacatcgagagcttctccttcctcaaccgggccctggagagtgacatggcgcctgtcctgatcatggccaccaaccgtggcatcacgcgaatccggggcaccagctaccagagccctcacggcatccccatagacctgctggaccggctgcttatcgtctccaccaccccctacagcgagaaagacacgaagcagatcctccgcatccgggtacagaagtgcaggtggatgacatcaagcgggtctactcactcttcctggacgagtcccgctccacgcagtacatga

SEQ ID NO: 18281 - DNA, 153 bp, Homo sapiens
  source 1..153: mol_type = unassigned DNA
ttgcacccccagacagccacaaccaaagtcccggagatccgtgatgtaacaaggattgagcgaatcggtgcccactcccacatccggggactggggctggacgatgccttggagcctcggcagcttcctgatgtggtagaaatgccatggtag

SEQ ID NO: 18282 - DNA, 120 bp, Homo sapiens
  source 1..120: mol_type = unassigned DNA
ttgcacccccagacagccacaaccaaagtcccggagatccgtgatgtaacaaggattgagcgaatcgagatggagtttccccgtgttagccaggatggtctcgatctcctgacctcgtga

SEQ ID NO: 18283 - DNA, 2735 bp, Homo sapiens
  source 1..2735: mol_type = unassigned DNA
aaccacaagatcataggccctaaagcagaaacaagcttaaactatggaggaatagaaagaagacaatgtgagtagggtgtgaagcaagggagaaagtcgtagggaatcgagactggacagacagaggcaacaaaaaccattgagaaccttgtacgtgttggacatatctagaaggagtcatctttgaagcagagagaaagccctctccagataccaaatctgctggcaccttgatcctggattcccagcctccagaactatcatctaacctatactgactgataagccttctaaaagcaaaaggaagaaaacagctttgttaatcgaggcctcttctgcaaagttcaccatagtttctcatgggggtggacaggatgtcaagtgctcccttggctatttcccctgtgggaacatcacaaagtgcttgcctcagctcctgcactgtaacggtgtggacgactgcgggaatcaggccgatgaggacaactgtggagacaacaatggatggtctctgcaatttgacaaatattttgccagttactacaaaatgacttcccaatatccttttgaggcagaaacacctgaatgtttggtcggttctgtgccagtgcaatgtctttgccaaggtctggagcttgactgtgatgaaaccaatttacgagctgttccatcggtttcttcaaatgtgactgcaatgtcacttcagtggaacttaataagaaagcttcctcctgattgcttcaagaattatcatgatcttcagaagctgtacctgcaaaacaataagattacatccatctccatctatgctttcagaggactgaatagccttactaaactgtatctcagtcataacagaataaccttcctgaagccgggtgtttttgaagatcttcacagactagaatggctgataattgaagataatcacctcagtcgaatttccccaccaacattttatggactaaattctcttattctcttagtcctgatgaataacgtcctcacccgtttacctgataaacctctctgtcaacacatgccaagactacattggctggaccttgaaggcaaccatatccataatttaagaaatttgacttttatttcctgcagtaatttaactgttttagtgatgaggaaaaacaaaattaatcacttaaatgaaaatacttttgcacctctccagaaactggatgaattggatttaggaagtaataagattgaaaatcttccaccgcttatattcaaggacctgaaggagctgtcacaattgaatctttcctataatccaatccagaaaattcaagcaaaccaatttgattatcttgtcaaactcaagtctctcagcctagaagggattgaaatttcaaatatccaacaaaggatgtttagacctcttatgaatctctctcacatatattttaagaaattccagtactgtgggtatgcaccacatgttcgcagctgtaaaccaaacactgatggaatttcatctctagagaatctcttggcaagcattattcagagagtatttgtctgggttgtatctgcagttacctgctttggaaacatttttgtcatttgcatgcgaccttatatcaggtctgagaacaagctgtatgccatgtcaatcatttctctctgctgtgccgactgcttaatgggaatatatttattcgtgatcggaggctttgacctaaagtttcgtggagaatacaataagcatgcgcagctgtggatggagagtactcattgtcagcttgtaggatctttggccattctgtccacagaagtatcagttttactgttaacatttctgacattggaaaaatacatctgcattgtctatccttttagatgtgtgagacctggaaaatgcagaacaattacagttctgattctcatttggattactggttttatagtggctttcattccattgagcaataaggaatttttcaaaaactactatggcaccaatggagtatgcttccctcttcattcagaagatacagaaagtattggagcccagatttattcagtggcaatttttcttggtattaatttggccgcatttatcatcatagttttttcctatggaagcatgttttatagtgttcatcaaagtgccataacagcaactgaaatacggaatcaagttaaaaaagagatgatccttgccaaacgttttttctttatagtatttactgatgcattatgctggatacccatttttgtagtgaaatttctttcactgcttcaggtagaaataccaggtaccataacctcttgggtagtgatttttattctgcccattaacagtgctttgaacccaattctctatactctgaccacaagaccatttaaagaaatgattcatcggttttggtataactacagacaaagaaaatctatggacagcaaaggtcagaaaacatatgctccatcattcatctgggtggaaatgtggccactgcaggagatgccacctgagttaatgaagccggaccttttcacatacccctgtgaaatgtcactgatttctcaatcaacgagactcaattcctattcatgactgactctgaaattcatttcttcgcagagaatactgtgggggtgcttcatgagggatttactggtatgaaatgaataccacaaaattaatttataataatagctaagataaatattttacaaggacatgaggaaaaataaaaatgactaatgctctt

SEQ ID NO: 18284 - DNA, 751 bp, Homo sapiens
  source 1..751: mol_type = unassigned DNA
aaagaaggagattaggacatttagagaaggagggcggggaggagagatcctgagaatagaaaggaggaaagaaaaaaagaggaatggaaagagacagagaaaggaaatgggagtggaaggagggaggactgctttgtaactgctaagattgcagacagaaatagcacacaaccactgtgagctgtatgcgattcagaaaccaagaccaaattttgctcactttcattaatcagttgctcagatagaaggaaatgacatctggttctgtcttcttctacatcttaatttttggaaaatatttacttcctcctgaagaatgaactttcaaacttttttattaacactccatctcccacctagaatcaaatagtattacaacagctggtactgcctcttccttcgacacagaagaaaacctaaaatccagtaagacagagtggcatgccaaatttgcccatcaatttattggcacattcaagaataaagcaaaactctactgaatatcgatatagtagtatctgcctctgaggattcttggtgcatatttttgcattctgccatgtttcgtccattttgcccctaccttgggcatttaaatataaagattcccatgagatcggatcaattcagctgtttatttctagaaatgtctataaagagaagaactaacaagagaaccatctttttatttttttaatttacttcctaaatataaatgaaggagaatctagaaccactgtcttcattggaa

SEQ ID NO: 18285 - DNA, 3842 bp, Homo sapiens
  source 1..3842: mol_type = unassigned DNA
aaagaaggagattaggacatttagagaaggagggcggggaggagagatcctgagaatagaaaggaggaaagaaaaaaagaggaatggaaagagacagagaaaggaaatgggagtggaaggagggaggactgctttgtaactgctaagattgcagacagaaatagcacacaaccactgtgagctgtatgcgattcagaaaccaagaccaaattttgctcactttcattaatcagttgctcagatagaaggaaatgacatctggttctgtcttcttctacatcttaatttttggaaaatatttttctcatgggggtggacaggatgtcaagtgctcccttggctatttcccctgtgggaacatcacaaagtgcttgcctcagctcctgcactgtaacggtgtggacgactgcgggaatcaggccgatgaggacaactgtggagacaacaatggatggtctctgcaatttgacaaatattttgccagttactacaaaatgacttcccaatatccttttgaggcagaaacacctgaatgtttggtcggttctgtgccagtgcaatgtctttgccaaggtctggagcttgactgtgatgaaaccaatttacgagctgttccatcggtttcttcaaatgtgactgcaatgtcacttcagtggaacttaataagaaagcttcctcctgattgcttcaagaattatcatgatcttcagaagctgtacctgcaaaacaataagattacatccatctccatctatgctttcagaggactgaatagccttactaaactgtatctcagtcataacagaataaccttcctgaagccgggtgtttttgaagatcttcacagactagaatggctgataattgaagataatcacctcagtcgaatttccccaccaacattttatggactaaattctcttattctcttagtcctgatgaataacgtcctcacccgtttacctgataaacctctctgtcaacacatgccaagactacattggctggaccttgaaggcaaccatatccataatttaagaaatttgacttttatttcctgcagtaatttaactgttttagtgatgaggaaaaacaaaattaatcacttaaatgaaaatacttttgcacctctccagaaactggatgaattggatttaggaagtaataagattgaaaatcttccaccgcttatattcaaggacctgaaggagctgtcacaattgaatctttcctataatccaatccagaaaattcaagcaaaccaatttgattatcttgtcaaactcaagtctctcagcctagaagggattgaaatttcaaatatccaacaaaggatgtttagacctcttatgaatctctctcacatatattttaagaaattccagtactgtgggtatgcaccacatgttcgcagctgtaaaccaaacactgatggaatttcatctctagagaatctcttggcaagcattattcagagagtatttgtctgggttgtatctgcagttacctgctttggaaacatttttgtcatttgcatgcgaccttatatcaggtctgagaacaagctgtatgccatgtcaatcatttctctctgctgtgccgactgcttaatgggaatatatttattcgtgatcggaggctttgacctaaagtttcgtggagaatacaataagcatgcgcagctgtggatggagagtactcattgtcagcttgtaggatctttggccattctgtccacagaagtatcagttttactgttaacatttctgacattggaaaaatacatctgcattgtctatccttttagatgtgtgagacctggaaaatgcagaacaattacagttctgattctcatttggattactggttttatagtggctttcattccattgagcaataaggaatttttcaaaaactactatggcaccaatggagtatgcttccctcttcattcagaagatacagaaagtattggagcccagatttattcagtggcaatttttcttggtattaatttggccgcatttatcatcatagttttttcctatggaagcatgttttatagtgttcatcaaagtgccataacagcaactgaaatacggaatcaagttaaaaaagagatgatccttgccaaacgttttttctttatagtatttactgatgcattatgctggatacccatttttgtagtgaaatttctttcactgcttcaggtagaaataccaggtaccataacctcttgggtagtgatttttattctgcccattaacagtgctttgaacccaattctctatactctgaccacaagaccatttaaagaaatgattcatcggttttggtataactacagacaaagaaaatctatggacagcaaaggtcagaaaacatatgctccatcattcatctgggtggaaatgtggccactgcaggagatgccacctgagttaatgaagccggaccttttcacatacccctgtgaaatgtcactgatttctcaatcaacgagactcaattcctattcatgactgactctgaaattcatttcttcgcagagaatactgtgggggtgcttcatgagggatttactggtatgaaatgaataccacaaaattaatttataataatagctaagataaatattttacaaggacatgaggaaaaataaaaatgactaatgctcttacaaagggaagtaattatatcaataatgtatatatattagtagacattttgcataagaaattaagagaaatctacttcagtaacattcattcatttttctaacatgcatttattgagtacccactactatgtgcatagcattgcaatatagtcctggaagtagacagtgcagaacctttcaatctgtagatggtgtttaatgacaaaagactatacaaagtccatctgcagttcctagtttaaagtagagctttacctgtcatgtgcatcagcaagaatcataggcacttttaaataaaggtttaaagttttggaatactcagtgtatttgcatcatagaaaatgtctgactgtttgcaaaataatattctgttttaagaatccatcttacctctctttaagtttccatacacttgagagccaacacaacatatttattactaaaaagatgctttgctagaaactcaaaaacagcacttcttttggcacttcctgcccagttttctctttgctttaaatgaacatcatcatatggaattggaataggagagtatgagtacggcagagaagtggatcagaaaaactagaatgaggataaacatttacattagtggaaactcctgaaataaatccttgtattgtcagttaactgattttcaacaaggatgccaagacaaaaaggcttttcaacaaaccgtgctgttttaagaacagacctaagtggtttaattcacccactttagatgggtgaatgttatggtgtgtgaaatatctcagtaaagcagttaaaaggaaaaagagctggaatgcactgattcaggaacttaatttcaggaaggaaaggtctgtatgtacacatttcactttaagcagaaaatctttcttcaagaaatgactttactttctctttgcactgccagcacgtgagatactaactttttaactagttgttcttctctagtctctacgttattagaattttttgctttcataatgtgaaacctttaagcaggagaagaaaatgttttcagatagtttcaaatacaccaaaaatgtttgaaacacaaaaatactggaatcaaaccataatgcacttattgaatatatagttgtatagatttgttctgaaaataaattatctgaaatttaactattaaaaa

SEQ ID NO: 18286 - DNA, 3676 bp, Homo sapiens
  source 1..3676: mol_type = unassigned DNA
aatgacatctggttctgtcttcttctacatcttaatttttggaaaatatttttctcatgggggtggacaggatgtcaagtgctcccttggctatttcccctgtgggaacatcacaaagtgcttgcctcagctcctgcactgtaacggtgtggacgactgcgggaatcaggccgatgaggacaactgtggagacaacaatggatggtctctgcaatttgacaaatattttgccagttactacaaaatgacttcccaatatccttttgaggcagaaacacctgaatgtttggtcggttctgtgccagtgcaatgtctttgccaaggtctggagcttgactgtgatgaaaccaatttacgagctgttccatcggtttcttcaaatgtgactgcaatgtcacttcagtggaacttaataagaaagcttcctcctgattgcttcaagaattatcatgatcttcagaagctgacactctaaagaacaatggtgacctgcactcagaacatgaaggcagccttgaaatccttactttatcattcccgcaatctggggtacctgcaaaacaataagattacatccatctccatctatgctttcagaggactgaatagccttactaaactgtatctcagtcataacagaataaccttcctgaagccgggtgtttttgaagatcttcacagactagaatggctgataattgaagataatcacctcagtcgaatttccccaccaacattttatggactaaattctcttattctcttagtcctgatgaataacgtcctcacccgtttacctgataaacctctctgtcaacacatgccaagactacattggctggaccttgaaggcaaccatatccataatttaagaaatttgacttttatttcctgcagtaatttaactgttttagtgatgaggaaaaacaaaattaatcacttaaatgaaaatacttttgcacctctccagaaactggatgaattggatttaggaagtaataagattgaaaatcttccaccgcttatattcaaggacctgaaggagctgtcacaattgaatctttcctataatccaatccagaaaattcaagcaaaccaatttgattatcttgtcaaactcaagtctctcagcctagaagggattgaaatttcaaatatccaacaaaggatgtttagacctcttatgaatctctctcacatatattttaagaaattccagtactgtgggtatgcaccacatgttcgcagctgtaaaccaaacactgatggaatttcatctctagagaatctcttggcaagcattattcagagagtatttgtctgggttgtatctgcagttacctgctttggaaacatttttgtcatttgcatgcgaccttatatcaggtctgagaacaagctgtatgccatgtcaatcatttctctctgctgtgccgactgcttaatgggaatatatttattcgtgatcggaggctttgacctaaagtttcgtggagaatacaataagcatgcgcagctgtggatggagagtactcattgtcagcttgtaggatctttggccattctgtccacagaagtatcagttttactgttaacatttctgacattggaaaaatacatctgcattgtctatccttttagatgtgtgagacctggaaaatgcagaacaattacagttctgattctcatttggattactggttttatagtggctttcattccattgagcaataaggaatttttcaaaaactactatggcaccaatggagtatgcttccctcttcattcagaagatacagaaagtattggagcccagatttattcagtggcaatttttcttggtattaatttggccgcatttatcatcatagttttttcctatggaagcatgttttatagtgttcatcaaagtgccataacagcaactgaaatacggaatcaagttaaaaaagagatgatccttgccaaacgttttttctttatagtatttactgatgcattatgctggatacccatttttgtagtgaaatttctttcactgcttcaggtagaaataccaggtaccataacctcttgggtagtgatttttattctgcccattaacagtgctttgaacccaattctctatactctgaccacaagaccatttaaagaaatgattcatcggttttggtataactacagacaaagaaaatctatggacagcaaaggtcagaaaacatatgctccatcattcatctgggtggaaatgtggccactgcaggagatgccacctgagttaatgaagccggaccttttcacatacccctgtgaaatgtcactgatttctcaatcaacgagactcaattcctattcatgactgactctgaaattcatttcttcgcagagaatactgtgggggtgcttcatgagggatttactggtatgaaatgaataccacaaaattaatttataataatagctaagataaatattttacaaggacatgaggaaaaataaaaatgactaatgctcttacaaagggaagtaattatatcaataatgtatatatattagtagacattttgcataagaaattaagagaaatctacttcagtaacattcattcatttttctaacatgcatttattgagtacccactactatgtgcatagcattgcaatatagtcctggaagtagacagtgcagaacctttcaatctgtagatggtgtttaatgacaaaagactatacaaagtccatctgcagttcctagtttaaagtagagctttacctgtcatgtgcatcagcaagaatcataggcacttttaaataaaggtttaaagttttggaatactcagtgtatttgcatcatagaaaatgtctgactgtttgcaaaataatattctgttttaagaatccatcttacctctctttaagtttccatacacttgagagccaacacaacatatttattactaaaaagatgctttgctagaaactcaaaaacagcacttcttttggcacttcctgcccagttttctctttgctttaaatgaacatcatcatatggaattggaataggagagtatgagtacggcagagaagtggatcagaaaaactagaatgaggataaacatttacattagtggaaactcctgaaataaatccttgtattgtcagttaactgattttcaacaaggatgccaagacaaaaaggcttttcaacaaaccgtgctgttttaagaacagacctaagtggtttaattcacccactttagatgggtgaatgttatggtgtgtgaaatatctcagtaaagcagttaaaaggaaaaagagctggaatgcactgattcaggaacttaatttcaggaaggaaaggtctgtatgtacacatttcactttaagcagaaaatctttcttcaagaaatgactttactttctctttgcactgccagcacgtgagatactaactttttaactagttgttcttctctagtctctacgttattagaattttttgctttcataatgtgaaacctttaagcaggagaagaaaatgttttcagatagtttcaaatacaccaaaaatgtttgaaacacaaaaatactggaatcaaaccataatgcacttattgaatatatagttgtatagatttgttctgaaaataaattatctgaaatttaactattaaaaa

SEQ ID NO: 18287 - DNA, 1775 bp, Homo sapiens
  source 1..1775: mol_type = unassigned DNA
atgacatctggttctgtcttcttctacatcttaatttttggaaaatatttttctcatgggggtggacaggatgtcaagtgctcccttggctatttcccctgtgggaacatcacaaagtgcttgcctcagctcctgcactgtaacggtgtggacgactgcgggaatcaggccgatgaggacaactgtggagacaacaatggatggtctctgcaatttgacaaatattttgccagttactacaaaatgacttcccaatatccttttgaggcagaaacacctgaatgtttggtcggttctgtgccagtgcaatgtctttgccaaggtctggagcttgactgtgatgaaaccaatttacgagctgttccatcggtttcttcaaatgtgactgcaatgtcacttcagtggaacttaataagaaagcttcctcctgattgcttcaagaattatcatgatcttcagaagctgtacctgcaaaacaataagattacatccatctccatctatgctttcagaggactgaatagccttactaaactgtccagagcagtaaaggatggctctgaaaaatgaagaggactgggcaaaacaggtatctcagtcataacagaataaccttcctgaagccgggtgtttttgaagatcttcacagactagaatggctgataattgaagataatcacctcagtcgaatttccccaccaacattttatggactaaattctcttattctcttagtcctgatgaataacgtcctcacccgtttacctgataaacctctctgtcaacacatgccaagactacattggctggaccttgaaggcaaccatatccataatttaagaaatttgacttttatttcctgcagtaatttaactgttttagtgatgaggaaaaacaaaattaatcacttaaatgaaaatacttttgcacctctccagaaactggatgaattggatttaggaagtaataagattgaaaatcttccaccgcttatattcaaggacctgaaggagctgtcacaattgaatctttcctataatccaatccagaaaattcaagcaaaccaatttgattatcttgtcaaactcaagtctctcagcctagaagggattgaaatttcaaatatccaacaaaggatgtttagacctcttatgaatctctctcacatatattttaagaaattccagtactgtgggtatgcaccacatgttcgcagctgtaaaccaaacactgatggaatttcatctctagagaatctcttggcaagcattattcagagagtatttgtctgggttgtatctgcagttacctgctttggaaacatttttgtcatttgcatgcgaccttatatcaggtctgagaacaagctgtatgccatgtcaatcatttctctctgctgcttcagaattcagtcattattctatcataggaacttgtgaattactttctccaagattttatatgacaccttgagcttgttgcgttgggagaatttcagtggaagagcagaaccaagtaatgccatcctcatctgagtccctaactgaatgctctacgtgattgcattttgttcatttattcgacacttctatgtgatgggtctagaacaatagacaagatctgtgctgttagagacttgcactttaaaggaaaatgaagaaatgattgcataattaactgtagagagtaactttgagagtggttaccaaagagagtctatgaatagatcctcatctgtaaatgaattattaggagaataaaaattacctcttcct

SEQ ID NO: 18288 - DNA, 2130 bp, Homo sapiens
  source 1..2130: mol_type = unassigned DNA
atgacatctggttctgtcttcttctacatcttaatttttggaaaatatttttctcatgggggtggacaggatgtcaagtgctcccttggctatttcccctgtgggaacatcacaaagtgcttgcctcagctcctgcactgtaacggtgtggacgactgcgggaatcaggccgatgaggacaactgtggagacaacaatggatggtctctgcaatttgacaaatattttgccagttactacaaaatgacttcccaatatccttttgaggcagaaacacctgaatgtttggtcggttctgtgccagtgcaatgtctttgccaaggtctggagcttgactgtgatgaaaccaatttacgagctgttccatcggtttcttcaaatgtgactgcaatgtcacttcagtggaacttaataagaaagcttcctcctgattgcttcaagaattatcatgatcttcagaagctgtacctgcaaaacaataagattacatccatctccatctatgctttcagaggactgaatagccttactaaactgtatctcagtcataacagaataaccttcctgaagccgggtgtttttgaagatcttcacagactagaatggctgataattgaagataatcacctcagtcgaatttccccaccaacattttatggactaaattctcttattctcttagtcctgatgaataacgtcctcacccgtttacctgataaacctctctgtcaacacatgccaagactacattggctggaccttgaaggcaaccatatccataatttaagaaatttgacttttatttcctgcagtaatttaactgttttagtgatgaggaaaaacaaaattaatcacttaaatgaaaatacttttgcacctctccagaaactggatgaattcagcctagaagggattgaaatttcaaatatccaacaaaggatgtttagacctcttatgaatctctctcacatatattttaagaaattccagtactgtgggtatgcaccacatgttcgcagctgtaaaccaaacactgatggaatttcatctctagagaatctcttggcaagcattattcagagagtatttgtctgggttgtatctgcagttacctgctttggaaacatttttgtcatttgcatgcgaccttatatcaggtctgagaacaagctgtatgccatgtcaatcatttctctctgctgtgccgactgcttaatgggaatatatttattcgtgatcggaggctttgacctaaagtttcgtggagaatacaataagcatgcgcagctgtggatggagagtactcattgtcagcttgtaggatctttggccattctgtccacagaagtatcagttttactgttaacatttctgacattggaaaaatacatctgcattgtctatccttttagatgtgtgagacctggaaaatgcagaacaattacagttctgattctcatttggattactggttttatagtggctttcattccattgagcaataaggaatttttcaaaaactactatggcaccaatggagtatgcttccctcttcattcagaagatacagaaagtattggagcccagatttattcagtggcaatttttcttggtattaatttggccgcatttatcatcatagttttttcctatggaagcatgttttatagtgttcatcaaagtgccataacagcaactgaaatacggaatcaagttaaaaaagagatgatccttgccaaacgttttttctttatagtatttactgatgcattatgctggatacccatttttgtagtgaaatttctttcactgcttcaggtagaaataccaggtaccataacctcttgggtagtgatttttattctgcccattaacagtgctttgaacccaattctctatactctgaccacaagaccatttaaagaaatgattcatcggttttggtataactacagacaaagaaaatctatggacagcaaaggtcagaaaacatatgctccatcattcatctgggtggaaatgtggccactgcaggagatgccacctgagttaatgaagccggaccttttcacatacccctgtgaaatgtcactgatttctcaatcaacgagactcaattcctattcatga

SEQ ID NO: 18289 - DNA, 2175 bp, Homo sapiens
  source 1..2175: mol_type = unassigned DNA
atgacatctggttctgtcttcttctacatcttaatttttggaaaatatttttctcatgggggtggacaggatgtcaagtgctcccttggctatttcccctgtgggaacatcacaaagtgcttgcctcagctcctgcactgtaacggtgtggacgactgcgggaatcaggccgatgaggacaactgtgtggtcggttctgtgccagtgcaatgtctttgccaaggtctggagcttgactgtgatgaaaccaatttacgagctgttccatcggtttcttcaaatgtgactgcaatgtcacttcagtggaacttaataagaaagcttcctcctgattgcttcaagaattatcatgatcttcagaagctgtacctgcaaaacaataagattacatccatctccatctatgctttcagaggactgaatagccttactaaactgtatctcagtcataacagaataaccttcctgaagccgggtgtttttgaagatcttcacagactagaatggctgataattgaagataatcacctcagtcgaatttccccaccaacattttatggactaaattctcttattctcttagtcctgatgaataacgtcctcacccgtttacctgataaacctctctgtcaacacatgccaagactacattggctggaccttgaaggcaaccatatccataatttaagaaatttgacttttatttcctgcagtaatttaactgttttagtgatgaggaaaaacaaaattaatcacttaaatgaaaatacttttgcacctctccagaaactggatgaattggatttaggaagtaataagattgaaaatcttccaccgcttatattcaaggacctgaaggagctgtcacaattgaatctttcctataatccaatccagaaaattcaagcaaaccaatttgattatcttgtcaaactcaagtctctcagcctagaagggattgaaatttcaaatatccaacaaaggatgtttagacctcttatgaatctctctcacatatattttaagaaattccagtactgtgggtatgcaccacatgttcgcagctgtaaaccaaacactgatggaatttcatctctagagaatctcttggcaagcattattcagagagtatttgtctgggttgtatctgcagttacctgctttggaaacatttttgtcatttgcatgcgaccttatatcaggtctgagaacaagctgtatgccatgtcaatcatttctctctgctgtgccgactgcttaatgggaatatatttattcgtgatcggaggctttgacctaaagtttcgtggagaatacaataagcatgcgcagctgtggatggagagtactcattgtcagcttgtaggatctttggccattctgtccacagaagtatcagttttactgttaacatttctgacattggaaaaatacatctgcattgtctatccttttagatgtgtgagacctggaaaatgcagaacaattacagttctgattctcatttggattactggttttatagtggctttcattccattgagcaataaggaatttttcaaaaactactatggcaccaatggagtatgcttccctcttcattcagaagatacagaaagtattggagcccagatttattcagtggcaatttttcttggtattaatttggccgcatttatcatcatagttttttcctatggaagcatgttttatagtgttcatcaaagtgccataacagcaactgaaatacggaatcaagttaaaaaagagatgatccttgccaaacgttttttctttatagtatttactgatgcattatgctggatacccatttttgtagtgaaatttctttcactgcttcaggtagaaataccaggtaccataacctcttgggtagtgatttttattctgcccattaacagtgctttgaacccaattctctatactctgaccacaagaccatttaaagaaatgattcatcggttttggtataactacagacaaagaaaatctatggacagcaaaggtcagaaaacatatgctccatcattcatctgggtggaaatgtggccactgcaggagatgccacctgagttaatgaagccggaccttttcacatacccctgtgaaatgtcactgatttctcaatcaacgagactcaattcctattcatga

SEQ ID NO: 18290 - DNA, 569 bp, Homo sapiens
  source 1..569: mol_type = unassigned DNA
gagaaatatgtctatttacatacatcatgtttgtttctgaccttgtgggacaataacttggaatgccctgagcaacaaaaacataaaacactctgatgagacagcatctcatccttgcactgaaggatttcaaaagagggacagatcacccagaatggacatggtcatagaggaatttctcatgggggtggacaggatgtcaagtgctcccttggctatttcccctgtgggaacatcacaaagtgcttgcctcagctcctgcactgtaacggtgtggacgactgcgggaatcaggccgatgaggacaactgtggtgagtgaagcccctgcagtcacggtgagagaaaggagcagaaaggactgaaggtgaagtcgctgagacttctctcaacaaaaagacaaaactaaattgaaatacaaaacatatgttgcttaaggaaatcttacacttatttcagtagcttaaaatatccactcttttcttttcttgtttttgtttttttttgagacggagtctcgctctgttgccagtctggagtgcagtggcgtgatctcggctcactgcaacc

SEQ ID NO: 18291 - DNA, 3771 bp, Homo sapiens
  source 1..3771: mol_type = unassigned DNA
gtgcgtgtgtgtaaagaaggagattaggacatttagagaaggagggcggggaggagagatcctgagaatagaaaggaggaaagaaaaaaagaggaatggaaagagacagagaaaggaaatgggagtggaaggagggaggactgctttgtaactgctaagattgcagacagaaatagcacacaaccactgtgagctgtatgcgattcagaaaccaagaccaaattttgctcactttcattaatcagttgctcagatagaaggaaatgacatctggttctgtcttcttctacatcttaatttttggaaaatatttttctcatgggggtggacaggatgtcaagtgctcccttggctatttcccctgtgggaacatcacaaagtgcttgcctcagctcctgcactgtaacggtgtggacgactgcgggaatcaggccgatgaggacaactgtggtgagtgaagcccctgcagtcacgtggtcggttctgtgccagtgcaatgtctttgccaaggtctggagcttgactgtgatgaaaccaatttacgagctgttccatcggtttcttcaaatgtgactgcaatgtcacttcagtggaacttaataagaaagcttcctcctgattgcttcaagaattatcatgatcttcagaagctgtacctgcaaaacaataagattacatccatctccatctatgctttcagaggactgaatagccttactaaactgtatctcagtcataacagaataaccttcctgaagccgggtgtttttgaagatcttcacagactagaatggctgataattgaagataatcacctcagtcgaatttccccaccaacattttatggactaaattctcttattctcttagtcctgatgaataacgtcctcacccgtttacctgataaacctctctgtcaacacatgccaagactacattggctggaccttgaaggcaaccatatccataatttaagaaatttgacttttatttcctgcagtaatttaactgttttagtgatgaggaaaaacaaaattaatcacttaaatgaaaatacttttgcacctctccagaaactggatgaattggatttaggaagtaataagattgaaaatcttccaccgcttatattcaaggacctgaaggagctgtcacaattgaatctttcctataatccaatccagaaaattcaagcaaaccaatttgattatcttgtcaaactcaagtctctcctagaagggattgaaatttcaaatatccaacaaaggatgtttagacctcttatgaatctctctcacatatattttaagaaattccagtactgtgggtatgcaccacatgttcgcagctgtaaaccaaacactgatggaatttcatctctagagaatctcttggcaagcattattcagagagtatttgtctgggttgtatctgcagttacctgctttggaaacatttttgtcatttgcatgcgaccttatatcaggtctgagaacaagctgtatgccatgtcaatcatttctctctgctgtgccgactgcttaatgggaatatatttattcgtgatcggaggctttgacctaaagtttcgtggagaatacaataagcatgcgcagctgtggatggagagtactcattgtcagcttgtaggatctttggccattctgtccacagaagtatcagttttactgttaacatttctgacattggaaaaatacatctgcattgtctatccttttagatgtgtgagacctggaaaatgcagaacaattacagttctgattctcatttggattactggttttatagtggctttcattccattgagcaataaggaatttttcaaaaactactatggcaccaatggagtatgcttccctcttcattcagaagatacagaaagtattggagcccagatttattcagtggcaatttttcttggtattaatttggccgcatttatcatcatagttttttcctatggaagcatgttttatagtgttcatcaaagtgccataacagcaactgaaatacggaatcaagttaaaaaagagatgatccttgccaaacgttttttctttatagtatttactgatgcattatgctggatacccatttttgtagtgaaatttctttcactgcttcaggtagaaataccaggtaccataacctcttgggtagtgatttttattctgcccattaacagtgctttgaacccaattctctatactctgaccacaagaccatttaaagaaatgattcatcggttttggtataactacagacaaagaaaatctatggacagcaaaggtcagaaaacatatgctccatcattcatctgggtggaaatgtggccactgcaggagatgccacctgagttaatgaagccggaccttttcacatacccctgtgaaatgtcactgatttctcaatcaacgagactcaattcctattcatgactgactctgaaattcatttcttcgcagagaatactgtgggggtgcttcatgagggatttactggtatgaaatgaataccacaaaattaatttataataatagctaagataaatattttacaaggacatgaggaaaaataaaaatgactaatgctcttacaaagggaagtaattatatcaataatgtatatatattagtagacattttgcataagaaattaagagaaatctacttcagtaacattcattcatttttctaacatgcatttattgagtacccactactatgtgcatagcattgcaatatagtcctggaagtagacagtgcagaacctttcaatctgtagatggtgtttaatgacaaaagactatacaaagtccatctgcagttcctagtttaaagtagagctttacctgtcatgtgcatcagcaagaatcataggcacttttaaataaaggtttaaagttttggaatactcagtgtatttgcatcatagaaaatgtctgactgtttgcaaaataatattctgttttaagaatccatcttacctctctttaagtttccatacacttgagagccaacacaacatatttattactaaaaagatgctttgctagaaactcaaaaacagcacttcttttggcacttcctgcccagttttctctttgctttaaatgaacatcatcatatggaattggaataggagagtatgagtacggcagagaagtggatcagaaaaactagaatgaggataaacatttacattagtggaaactcctgaaataaatccttgtattgtcagttaactgattttcaacaaggatgccaagacaaaaaggcttttcaacaaaccgtgctgttttaagaacagacctaagtggtttaattcacccactttagatgggtgaatgttatggtgtgtgaaatatctcagtaaagcagttaaaaggaaaaagagctggaatgcactgattcaggaacttaatttcaggaaggaaaggtctgtatgtacacatttcactttaagcagaaaatctttcttcaagaaatgactttactttctctttgcactgccagcacgtgagatactaactttttaactagttgttcttctctagtctctacgttattagaattttttgctttcataatgtgaaacctttaagcaggagaagaaaatgttttcagatagtttcaaatacaccaaaaatgtttgaaacacaaaaatactggaatcaaaccataatgcacttattgaatatatagttgtatagatttgttctgaaaataaattatctgaaatttaactatt

SEQ ID NO: 18292 - DNA, 3930 bp, Homo sapiens
  source 1..3930: mol_type = unassigned DNA
gtgcgtgtgtgtaaagaaggagattaggacatttagagaaggagggcggggaggagagatcctgagaatagaaaggaggaaagaaaaaaagaggaatggaaagagacagagaaaggaaatgggagtggaaggagggaggactgctttgtaactgctaagattgcagacagaaatagcacacaaccactgtgagctgtatgcgattcagaaaccaagaccaaattttgctcactttcattaatcagttgctcagatagaaggaaatgacatctggttctgtcttcttctacatcttaatttttggaaaatatttttctcatgggggtggacaggatgtcaagtgctcccttggctatttcccctgtgggaacatcacaaagtgcttgcctcagctcctgcactgtaacggtgtggacgactgcgggaatcaggccgatgaggacaactgtggagacaacaatggatggtctctgcaatttgacaaatattttgccagttactacaaaatgacttcccaatatccttttgaggcagaaacacctgaatgttcttttcatttctttcttttcattaccctcctcttcctggtccctcactgtcatcatgccttaccacttccccttgattcagtggtcggttctgtgccagtgcaatgtctttgccaaggtctggagcttgactgtgatgaaaccaatttacgagctgttccatcggtttcttcaaatgtgactgcaatgtcacttcagtggaacttaataagaaagcttcctcctgattgcttcaagaattatcatgatcttcagaagctgtacctgcaaaacaataagattacatccatctccatctatgctttcagaggactgaatagccttactaaactgtatctcagtcataacagaataaccttcctgaagccgggtgtttttgaagatcttcacagactagaatggctgataattgaagataatcacctcagtcgaatttccccaccaacattttatggactaaattctcttattctcttagtcctgatgaataacgtcctcacccgtttacctgataaacctctctgtcaacacatgccaagactacattggctggaccttgaaggcaaccatatccataatttaagaaatttgacttttatttcctgcagtaatttaactgttttagtgatgaggaaaaacaaaattaatcacttaaatgaaaatacttttgcacctctccagaaactggatgaattggatttaggaagtaataagattgaaaatcttccaccgcttatattcaaggacctgaaggagctgtcacaattgaatctttcctataatccaatccagaaaattcaagcaaaccaatttgattatcttgtcaaactcaagtctctcagcctagaagggattgaaatttcaaatatccaacaaaggatgtttagacctcttatgaatctctctcacatatattttaagaaattccagtactgtgggtatgcaccacatgttcgcagctgtaaaccaaacactgatggaatttcatctctagagaatctcttggcaagcattattcagagagtatttgtctgggttgtatctgcagttacctgctttggaaacatttttgtcatttgcatgcgaccttatatcaggtctgagaacaagctgtatgccatgtcaatcatttctctctgctgtgccgactgcttaatgggaatatatttattcgtgatcggaggctttgacctaaagtttcgtggagaatacaataagcatgcgcagctgtggatggagagtactcattgtcagcttgtaggatctttggccattctgtccacagaagtatcagttttactgttaacatttctgacattggaaaaatacatctgcattgtctatccttttagatgtgtgagacctggaaaatgcagaacaattacagttctgattctcatttggattactggttttatagtggctttcattccattgagcaataaggaatttttcaaaaactactatggcaccaatggagtatgcttccctcttcattcagaagatacagaaagtattggagcccagatttattcagtggcaatttttcttggtattaatttggccgcatttatcatcatagttttttcctatggaagcatgttttatagtgttcatcaaagtgccataacagcaactgaaatacggaatcaagttaaaaaagagatgatccttgccaaacgttttttctttatagtatttactgatgcattatgctggatacccatttttgtagtgaaatttctttcactgcttcaggtagaaataccaggtaccataacctcttgggtagtgatttttattctgcccattaacagtgctttgaacccaattctctatactctgaccacaagaccatttaaagaaatgattcatcggttttggtataactacagacaaagaaaatctatggacagcaaaggtcagaaaacatatgctccatcattcatctgggtggaaatgtggccactgcaggagatgccacctgagttaatgaagccggaccttttcacatacccctgtgaaatgtcactgatttctcaatcaacgagactcaattcctattcatgactgactctgaaattcatttcttcgcagagaatactgtgggggtgcttcatgagggatttactggtatgaaatgaataccacaaaattaatttataataatagctaagataaatattttacaaggacatgaggaaaaataaaaatgactaatgctcttacaaagggaagtaattatatcaataatgtatatatattagtagacattttgcataagaaattaagagaaatctacttcagtaacattcattcatttttctaacatgcatttattgagtacccactactatgtgcatagcattgcaatatagtcctggaagtagacagtgcagaacctttcaatctgtagatggtgtttaatgacaaaagactatacaaagtccatctgcagttcctagtttaaagtagagctttacctgtcatgtgcatcagcaagaatcataggcacttttaaataaaggtttaaagttttggaatactcagtgtatttgcatcatagaaaatgtctgactgtttgcaaaataatattctgttttaagaatccatcttacctctctttaagtttccatacacttgagagccaacacaacatatttattactaaaaagatgctttgctagaaactcaaaaacagcacttcttttggcacttcctgcccagttttctctttgctttaaatgaacatcatcatatggaattggaataggagagtatgagtacggcagagaagtggatcagaaaaactagaatgaggataaacatttacattagtggaaactcctgaaataaatccttgtattgtcagttaactgattttcaacaaggatgccaagacaaaaaggcttttcaacaaaccgtgctgttttaagaacagacctaagtggtttaattcacccactttagatgggtgaatgttatggtgtgtgaaatatctcagtaaagcagttaaaaggaaaaagagctggaatgcactgattcaggaacttaatttcaggaaggaaaggtctgtatgtacacatttcactttaagcagaaaatctttcttcaagaaatgactttactttctctttgcactgccagcacgtgagatactaactttttaactagttgttcttctctagtctctacgttattagaattttttgctttcataatgtgaaacctttaagcaggagaagaaaatgttttcagatagtttcaaatacaccaaaaatgtttgaaacacaaaaatactggaatcaaaccataatgcacttattgaatatatagttgtatagatttgttctgaaaataaattatctgaaatttaactatt

SEQ ID NO: 18293 - DNA, 3861 bp, Homo sapiens
  source 1..3861: mol_type = unassigned DNA
gtgcgtgtgtgtaaagaaggagattaggacatttagagaaggagggcggggaggagagatcctgagaatagaaaggaggaaagaaaaaaagaggaatggaaagagacagagaaaggaaatgggagtggaaggagggaggactgctttgtaactgctaagattgcagacagaaatagcacacaaccactgtgagctgtatgcgattcagaaaccaagaccaaattttgctcactttcattaatcagttgctcagatagaaggaaatgacatctggttctgtcttcttctacatcttaatttttggaaaatatttttctcatgggggtggacaggatgtcaagtgctcccttggctatttcccctgtgggaacatcacaaagtgcttgcctcagctcctgcactgtaacggtgtggacgactgcgggaatcaggccgatgaggacaactgtggagacaacaatggatggtctctgcaatttgacaaatattttgccagttactacaaaatgacttcccaatatccttttgaggcagaaacacctgaatgtttggtcggttctgtgccagtgcaatgtctttgccaaggtctggagcttgactgtgatgaaaccaatttacgagctgttccatcggtttcttcaaatgtgactgcaatgtcacttcagtggaacttaataagaaagcttcctcctgattgcttcaagaattatcatgatcttcagaagctgacactctaaagaacaatggtgacctgcactcagaacatgaaggcagccttgaaatccttactttatcattcccgcaatctggggtacctgcaaaacaataagattacatccatctccatctatgctttcagaggactgaatagccttactaaactgtatctcagtcataacagaataaccttcctgaagccgggtgtttttgaagatcttcacagactagaatggctgataattgaagataatcacctcagtcgaatttccccaccaacattttatggactaaattctcttattctcttagtcctgatgaataacgtcctcacccgtttacctgataaacctctctgtcaacacatgccaagactacattggctagtgatgaggaaaaacaaaattaatcacttaaatgaaaatacttttgcacctctccagaaactggatgaattggatttaggaagtaataagattgaaaatcttccaccgcttatattcaaggacctgaaggagctgtcacaattgaatctttcctataatccaatccagaaaattcaagcaaaccaatttgattatcttgtcaaactcaagtctctcagcctagaagggattgaaatttcaaatatccaacaaaggatgtttagacctcttatgaatctctctcacatatattttaagaaattccagtactgtgggtatgcaccacatgttcgcagctgtaaaccaaacactgatggaatttcatctctagagaatctcttggcaagcattattcagagagtatttgtctgggttgtatctgcagttacctgctttggaaacatttttgtcatttgcatgcgaccttatatcaggtctgagaacaagctgtatgccatgtcaatcatttctctctgctgtgccgactgcttaatgggaatatatttattcgtgatcggaggctttgacctaaagtttcgtggagaatacaataagcatgcgcagctgtggatggagagtactcattgtcagcttgtaggatctttggccattctgtccacagaagtatcagttttactgttaacatttctgacattggaaaaatacatctgcattgtctatccttttagatgtgtgagacctggaaaatgcagaacaattacagttctgattctcatttggattactggttttatagtggctttcattccattgagcaataaggaatttttcaaaaactactatggcaccaatggagtatgcttccctcttcattcagaagatacagaaagtattggagcccagatttattcagtggcaatttttcttggtattaatttggccgcatttatcatcatagttttttcctatggaagcatgttttatagtgttcatcaaagtgccataacagcaactgaaatacggaatcaagttaaaaaagagatgatccttgccaaacgttttttctttatagtatttactgatgcattatgctggatacccatttttgtagtgaaatttctttcactgcttcaggtagaaataccaggtaccataacctcttgggtagtgatttttattctgcccattaacagtgctttgaacccaattctctatactctgaccacaagaccatttaaagaaatgattcatcggttttggtataactacagacaaagaaaatctatggacagcaaaggtcagaaaacatatgctccatcattcatctgggtggaaatgtggccactgcaggagatgccacctgagttaatgaagccggaccttttcacatacccctgtgaaatgtcactgatttctcaatcaacgagactcaattcctattcatgactgactctgaaattcatttcttcgcagagaatactgtgggggtgcttcatgagggatttactggtatgaaatgaataccacaaaattaatttataataatagctaagataaatattttacaaggacatgaggaaaaataaaaatgactaatgctcttacaaagggaagtaattatatcaataatgtatatatattagtagacattttgcataagaaattaagagaaatctacttcagtaacattcattcatttttctaacatgcatttattgagtacccactactatgtgcatagcattgcaatatagtcctggaagtagacagtgcagaacctttcaatctgtagatggtgtttaatgacaaaagactatacaaagtccatctgcagttcctagtttaaagtagagctttacctgtcatgtgcatcagcaagaatcataggcacttttaaataaaggtttaaagttttggaatactcagtgtatttgcatcatagaaaatgtctgactgtttgcaaaataatattctgttttaagaatccatcttacctctctttaagtttccatacacttgagagccaacacaacatatttattactaaaaagatgctttgctagaaactcaaaaacagcacttcttttggcacttcctgcccagttttctctttgctttaaatgaacatcatcatatggaattggaataggagagtatgagtacggcagagaagtggatcagaaaaactagaatgaggataaacatttacattagtggaaactcctgaaataaatccttgtattgtcagttaactgattttcaacaaggatgccaagacaaaaaggcttttcaacaaaccgtgctgttttaagaacagacctaagtggtttaattcacccactttagatgggtgaatgttatggtgtgtgaaatatctcagtaaagcagttaaaaggaaaaagagctggaatgcactgattcaggaacttaatttcaggaaggaaaggtctgtatgtacacatttcactttaagcagaaaatctttcttcaagaaatgactttactttctctttgcactgccagcacgtgagatactaactttttaactagttgttcttctctagtctctacgttattagaattttttgctttcataatgtgaaacctttaagcaggagaagaaaatgttttcagatagtttcaaatacaccaaaaatgtttgaaacacaaaaatactggaatcaaaccataatgcacttattgaatatatagttgtatagatttgttctgaaaataaattatctgaaatttaactatt

SEQ ID NO: 18294 - DNA, 15377 bp, Homo sapiens
  source 1..15377: mol_type = unassigned DNA
atctacctcgcgggtgcctctggtgtctccagaggtctccgaccccagcccgcccccagccctcccgcccagcccgcagccccctccctctgttccccgacctcagaccctgggcttccgacctcgacatcatgggtgacgcagaaggcgaagacgaggtccagttcctgcggacggacgatgaggtggtcctgcagtgcagcgctaccgtgctcaaggagcagctcaagctctgcctggccgccgagggcttcggcaaccgcctgtgcttcctggagcccactagcaacgcgcagaatgtgccccccgatctggccatctgttgcttcgtcctggagcagtccctgtctgtgcgagccctgcaggagatgctggctaacacggtggaggctggcgtggagtcatcccagggcgggggacacaggacgctcctgtatggccatgccatcctgctccggcatgcacacagccgcatgtatctgagctgcctcaccacctcccgctccatgactgacaagctggccttcgatgtgggactgcaggaggacgcaacaggagaggcttgctggtggaccatgcacccagcctccaagcagaggtctgaaggagaaaaggtccgcgttggggatgacatcatccttgtcagtgtctcctccgagcgctacctgcacctgtcgaccgccagtggggagctccaggttgacgcttccttcatgcagacactatggaacatgaaccccatctgctcccgctgcgaagagggcttcgtgacgggaggtcacgtcctccgcctctttcatggacatatggatgagtgtctgaccatttcccctgctgacagtgatgaccagcgcagacttgtctactatgaggggggagctgtgtgcactcatgcccgctccctctggaggctggagccactgagaatcagctggagtgggagccacctgcgctggggccagccactccgagtccggcatgtcactaccgggcagtacctagcgctcaccgaggaccagggcctggtggtggttgacgccagcaaggctcacaccaaggctacctccttctgcttccgcatctccaaggagaagctggatgtggcccccaagcgggatgtggagggcatgggcccccctgagatcaagtacggggagtcactgtgcttcgtgcagcatgtggcctcaggactgtggctcacctatgctgctccagaccccaaggccctgcggctcggcgtgctcaagaagaaggccatgctgcaccaggagggccacatggacgacgcactgtcgctgacccgctgccagcaggaggagtcccaggccgcccgcatgatccacagcaccaatggcctatacaaccagttcatcaagagcctggacagcttcagcgggaagccacggggctcggggccacccgctggcacggcgctgcccatcgagggcgttatcctgagcctgcaggacctcatcatctacttcgagcctccctccgaggacttgcagcacgaggagaagcagagcaagctgcgaagcctgcgcaaccgccagagcctcttccaggaggaggggatgctctccatggtcctgaattgcatagaccgcctaaatgtctacaccactgctgcccactttgctgagtttgcaggggaggaggcagccgagtcctggaaagagattgtgaatcttctctatgaactcctagcttctctaatccgtggcaatcgtagcaactgtgccctcttctccacaaacttggactggctggtcagcaagctggatcggctggaggcctcgtctggcatcctggaggtcctgtactgtgtcctcattgagagtccagaggttctgaacatcatccaggagaatcacatcaagtccatcatctccctcctggacaagcatgggaggaaccacaaggtcctggacgtgctatgctccctgtgtgtgtgtaatggtgtggctgtacgctccaaccaagatcttattactgagaacttgctgcctggccgtgagcttctgctgcagacaaacctcatcaactatgtcaccagcatccgccccaacatctttgtgggccgagcggaaggcaccacgcagtacagcaaatggtactttgaggtgatggtggacgaggtgactccatttctgacagctcaggccacccacttgcgggtgggctgggccctcaccgagggctacaccccctaccctggggccggcgagggctggggcggcaacggggtcggcgatgacctctattcctacggctttgatggactgcatctctggacaggacacgtggcacgcccagtgacttccccagggcagcacctcctggcccctgaagacgtgatcagctgctgcctggacctcagcgtgccgtccatctccttccgcatcaacggctgccccgtgcagggtgtctttgagtccttcaacctggacgggctcttcttccctgttgtcagcttctcggctggtgtcaaggtgcggttcctccttggtggccgccatggtgaattcaagttcctgcccccacctggctatgctccatgccatgaggctgtgctccctcgagagcgactccatcttgaacccatcaaggagtatcgacgggaggggccccgggggcctcacctggtgggccccagtcgctgcctctcacacaccgacttcgtgccctgccctgtggacactgtccagattgtcctgccgccccatctggagcgcattcgggagaagctggcggagaacatccacgagctctgggcgctaacccgcatcgagcagggctggacctacggcccggttcgggatgacaacaagaggctgcacccgtgtcttgtggacttccacagccttccagagcctgagaggaactacaacctgcagatgtctggggagacgctcaagactctgctggctctgggctgccacgtgggcatggcggatgagaaggcggaggacaacctgaagaagacaaaactccccaagacgtatatgatgagcaatgggtacaagccggctccgctggacctgagccacgtgcggctgacgccggcgcagacgacactggtggaccgtctggcagaaaatgggcacaacgtgtgggcccgagaccgcgtgggccagggctggagctacagcgcagtgcaggacatcccagcgcgccgaaaccctcggctggtgccctaccgcctgctggatgaagccaccaagcgcagcaaccgggacagcctctgccaggccgtgcgcaccctcctgggctacggctacaacatcgagcctcctgaccaggagcccagtcaggtggagaaccagtctcgttgtgaccgggtgcgcatcttccgggcagagaaatcctatacagtgcagagcggccgctggtacttcgagtttgaagcagtcaccacaggcgagatgcgcgtgggctgggcgaggcccgagctgaggcctgatgtagagctgggagctgacgagctggcctatgtcttcaatgggcaccgcggccagcgctggcacttgggcagtgaaccatttgggcgcccctggcagccgggcgatgtcgttggctgtatgatcgacctcacagagaacaccattatcttcaccctcaatggcgaggtcctcatgtctgactcaggctccgaaacagccttccgggagattgagattggggacggcttcctgcccgtctgcagcttgggacctggccaggtgggtcatctgaacctgggccaggacgtgagctctctgaggttctttgccatctgtggcctccaggaaggcttcgagccatttgccatcaacatgcagcgcccagtcaccacctggttcagcaaaggcctgccccagtttgagccagtgccccttgaacaccctcactatgaggtatcccgagtggacggcactgtggacacgcccccctgcctgcgcctgacccaccgcacctggggctcccagaacagcctggtggagatgcttttcctgcggctgagcctcccagtccagttccaccagcacttccgctgcactgcaggggccaccccgctggcacctcctggcctgcagccccccgccgaggacgaggcccgggcggcggaacccgaccctgactacgaaaacctgcgccgctcagctgggggctggagcgaggcagagaacggcaaagaagggactgcgaaggagggcgcccccgggggcaccccgcaggcggggggagaggcgcagcccgccagggcggagaatgagaaggatgccaccaccgagaagaacaagaagagaggcttcttattcaaggccaagaaggtcgccatgatgacccagccaccggccacccccacgctgccccgactccctcacgacgtggtgcctgcagacaaccgcgatgaccccgagatcatcctcaacaccaccacgtactattactccgtgagggtctttgctggacaggagcccagctgcgtgtgggcgggctgggtcacccctgactaccatcagcacgacatgagcttcgacctcagcaaggtccgggtcgtgacggtgaccatgggggatgaacaaggcaacgtccacagcagcctcaagtgtagcaactgctacatggtgtggggcggagactttgtgagtcccgggcagcagggccggatcagccacacggaccttgtcattgggtgcctggtggacttggccactggcttaatgacctttacagccaatggcaaagagagcaacacctttttccaggtggaacccaacactaagctatttcctgccgtcttcgtcctgcccacccaccagaacgtcatccagtttgagctggggaagcagaagaacatcatgccgttgtcagccgccatgttccaaagcgagcgcaagaacccggccccgcagtgcccaccgcggctggagatgcagatgctgatgccagtgtcctggagccgcatgcccaaccacttcctgcaggtggagacgaggcgtgccggcgagcggctgggctgggccgtgcagtgccaggagccgctgaccatgatggcgctgcacatccccgaggagaaccggtgcatggacatcctggagctgtcggagcgcctggacctgcagcgcttccactcgcacaccctgcgcctctaccgcgctgtgtgcgccctgggcaacaatcgcgtggcgcacgctctgtgcagccacgtagaccaagctcagctgctgcacgccctggaggacgcgcacctgccaggcccactgcgcgcaggctactatgacctcctcatcagcatccacctcgaaagtgcctgccgcagccgccgctccatgctctctgaatacatcgtgcccctcacgcctgagacccgcgccatcacgctcttccctcctggaaggagcacagaaaatggtcacccccggcatggcctgccgggagttggagtcaccacttcgctgaggcccccgcatcatttctcgcccccctgtttcgtggccgctctgccagctgctggggcagcagaggccccggcccgcctcagccctgccatcccgctggaggccctgcgggacaaggcactgaggatgctgggggaggcggtgcgcgacggtgggcagcacgctcgcgaccccgtcgggggctccgtggagttccagtttgtgcctgtgctcaagctcgtgtccaccctgctggtgatgggcatctttggcgatgaggatgtgaaacagatcttgaagatgattgagcctgaggtcttcactgaggaagaagaggaggaggacgaggaggaagagggtgaagaggaagatgaggaggagaaggaggaggatgaggaggaaacagcacaggaaaaggaagatgaggaaaaagaggaagaggaggcagcagaaggggagaaagaagaaggcttggaggaagggctgctccagatgaagttgccagagtctgtgaagttacagatgtgccacctgctggagtatttctgtgaccaagagctgcagcaccgtgtggagtccctggcagcctttgcggagcgctatgtggacaagctccaggccaaccagcggagccgctatggcctcctcataaaagccttcagcatgaccgcagcagagactgcaagacgtacccgcgagttccgctccccaccccaggaacagatcaatatgctattgcaattcaaagatggtacagatgaggaagactgtcctctccctgaagagattcgacaggatttgcttgactttcatcaagacctgctggcacactgtggaattcagctagatggagaggaggaggaaccagaggaagagaccaccctgggcagccgcctcatgagcctgttggagaaagtgcggctggtgaagaagaaggaagagaaacctgaggaggagcggtcagcagaggagagcaaaccccggtccctgcaggagctggtgtcccacatggtggtgcgctgggcccaagaggacttcgtgcagagccccgagctggtgcgggccatgttcagcctcctgcaccggcagtacgacgggctgggtgagctgctgcgtgccctgccgcgggcgtacaccatctcaccgtcctccgtggaagacaccatgagcctgctcgagtgcctcggccagatccgctcgctgctcatcgtgcagatgggcccccaggaggagaacctcatgatccagagcatcgggaacatcatgaacaacaaagtcttctaccaacacccgaacctgatgagggcgctgggcatgcacgagacggtcatggaggtcatggtcaacgtcctcgggggcggcgagtccaaggagatccgcttccccaagatggtgacaagctgctgccgcttcctctgctatttctgccgaatcagccggcagaaccagcgctccatgtttgaccacctgagctacctgctggagaacagtggcatcggcctgggcatgcagggctccacgcccctggacgtggctgctgcctccgtcattgacaacaatgagctggccttggcattgcaggagcaggacctggaaaaggttgtgtcctacctggcaggctgtggcctccagagctgccccatgcttgtggccaaagggtacccagacattggctggaacccctgtggtggagagcgctacctggacttcctgcgctttgctgtcttcgtcaacggcgagagcgtggaggagaacgccaatgtggtggtgcggctgctcatccggaagcctgagtgcttcggacccgccctgcggggtgagggtggctcagggctgctggctgccatcgaagaggccatccgcatctccgaggaccctgcgagggatggcccaggcatccgcagggaccggcggcgcgagcactttggtgaggaaccgcctgaagaaaaccgggtgcacctgggacacgccatcatgtccttctatgccgccttgatcgacctgctcggacgctgtgcaccagagatgcatctaatccaagccggcaagggtgaggccctgcggatccgcgccatcctccgctcccttgtgcccttggaggaccttgtgggcatcatcagcctcccactgcagattcccaccctgggcaaagatggggctctggtgcagccaaagatgtcagcatccttcgtgccggaccacaaggcgtccatggtgctcttcctggaccgtgtgtatggcatcgagaaccaggacttcttgctgcacgtgctggacgtggggttcctgcccgacatgagggcagccgcctcgctggacacggccactttcagcaccaccgagatggcgctggcgctgaaccgctacctgtgcctggccgtgctgccgctcatcaccaagtgtgcgccgctctttgcgggcacagaacaccgcgccatcatggtggactctatgctgcataccgtgtaccgcctgtctcggggtcgttcgctcaccaaggcgcagcgtgacgtcatcgaggactgcctcatgtcgctctgcaggtacatccgcccgtcgatgctgcagcacctgttgcgccgcctggtgttcgacgtgcccatcctcaacgagttcgccaagatgccactcaagctcctcaccaaccactatgagcgctgttggaagtactactgcctacccacgggctgggccaacttcggggtcacctcagaggaggagctgcacctcacacggaaactcttctggggcatctttgactctctggcccataagaaatacgacccggagctgtaccgcatggccatgccttgtctgtgcgccattgccggggctctgccccccgactatgtggatgcctcatactcatctaaggcagagaaaaaggccacagtggatgctgaaggcaactttgatccccggcctgtggagaccctcaatgtgatcatcccggagaagctggactccttcattaacaagtttgcggagtacacacacgagaagtgggccttcgacaagatccagaacaactggtcctatggagagaacatagacgaggagctgaagacccaccccatgctgaggccctacaagaccttttcagagaaggacaaagagatttaccgctggcccatcaaggagtccctgaaggccatgattgcctgggaatggacgatagagaaggccagggagggtgaggaggagaagacggaaaagaaaaaaacgcggaagatatcacaaagtgcccagacctatgatcctcgagaaggctacaaccctcagccccccgaccttagtgctgttaccctgtcccgggagctgcaggccatggcagaacaactggcagaaaattaccacaacacgtggggacggaagaagaagcaggagctggaagccaaaggcggtgggacccaccccctgctggtcccctacgacacgctcacggccaaggagaaggcacgagatcgagagaaggcccaggagctactgaaattcctgcagatgaatggctacgcggttacaagaggccttaaggacatggaactggactcgtcttccattgaaaagcggtttgcctttggcttcctgcagcagctgctgcgctggatggacatttctcaggagttcattgcccacctggaggctgtggtcagcagtgggcgagtggaaaagtccccacatgaacaggagattaaattctttgccaagatcctgctccctttgatcaaccagtacttcaccaaccactgcctctatttcttgtccactccggctaaagtgctgggcagcggtggccacgcctctaacaaggagaaggaaatgatcaccagcctcttctgcaaacttgctgctctcgtccgccaccgagtctctctctttgggacagacgccccagctgtggtcaactgtcttcacatcctggcccgctccctggatgccaggacagtgatgaagtcaggccctgagatcgtgaaggctggcctccgctccttcttcgagagtgcctcggaggacatcgagaagatggtggagaacctgcggctgggcaaggtgtcgcaggcgcgcacccaggtgaaaggcgtgggccagaacctcacctacaccactgtggcactgctgccggtcctcaccaccctcttccagcacatcgcccagcaccagttcggagatgacgtcatcctggacgacgtccaggtctcttgctaccgaacgctgtgcagtatctactccctgggaaccaccaagaacacttatgtggaaaagcttcggccagccctcggggagtgcctggcccgtctggcagcagccatgccggtggcgttcctggagccgcagctgaacgagtacaacgcctgctccgtgtacaccaccaagtctccgcgggagcgggccatcctggggctccccaacagtgtggaggagatgtgtcccgacatcccggtgctggagcggctcatggcagacattggggggctggccgagtcaggtgcccgctacacagagatgccgcatgtcatcgagatcacgctgcccatgctatgcagctacctgccccgatggtgggagcgcgggcccgaggcacccccttccgccctgcccgccggcgcccccccaccctgcacagctgtcacctctgaccacctcaactccctgctggggaatatcctgagaatcatcgtcaacaacctgggcattgacgaggcctcctggatgaagcggctggctgtgttcgcacagcccattgtgagccgtgcacggccggagctcctgcagtcccacttcatcccaactatcgggcggctgcgcaagagggcagggaaggtggtgtccgaggaggagcagctgcgcctggaggccaaggcggaggcccaggagggcgagctgctggtgcgggacgagttctctgtgctctgccgggacctctacgccctgtatccgctgctcatccgctacgtggacaacaacagggcgcagtggctgacggagccgaatcccagcgcggaggagctgttcaggatggtgggcgagatcttcatctactggtccaagtcccacaacttcaagcgcgaggagcagaactttgtggtccagaatgagatcaacaacatgtccttcctgactgctgacaacaaaagcaaaatggctaagtccggtggctcggaccaggaacgcaccaagaagaagcgccggggggaccggtactctgtgcagacgtcactgatcgtggccacactgaagaagatgctgcccatcggcctgaatatgtgtgcgcccaccgaccaagacctcatcacgctggccaagacccgttacgccctgaaagacacagatgaggaggtccgggaatttctgcacaacaaccttcaccttcagggaaaggtcgaaggctccccgtctctgcgctggcagatggctctgtaccggggcgtcccgggtcgcgaggaggacgccgatgaccccgagaaaatcgtgcgcagagtccaggaagtgtcagccgtgctctactacctggaccagaccgagcacccttacaagtctaagaaggccgtgtggcacaagcttttgtccaaacagcgccggcgggcagtcgtggcctgtttccgtatgacgcccctgtacaacctgcccacgcaccgggcatgtaacatgttcctggagagctacaaggctgcatggatcctgactgaagaccacagttttgaggaccgcatgatagatgacctttcaaaagctggggagcaggaggaggaggaggaagaggtggaagagaagaagccagaccccctgcaccagttggtcctgcacttcagccgcactgccctgacggaaaagagcaaactggatgaggattacctgtacatggcctatgctgatatcatggcaaagagctgccacctggaggagggaggggagaacggtgaagctgaagaggaggttgaggtctcctttgaggagaaacagatggagaagcagaggctcttgtaccagcaagcacggctgcacacccggggggcggccgagatggtgctgcagatgatcagtgcctgcaaaggagagacaggtgccatggtgtcctccaccctgaagctgggcatctccatcctcaatggaggcaatgctgaggtccagcagaaaatgctggattatcttaaggacaagaaggaagttggcttcttccagagtatccaggcactgatgcaaacatgcagcgtcctggatctcaatgcctttgagagacagaacaaggccgaggggctgggcatggtgaatgaggatggcactgtcatcaatcgccagaacggagagaaggtcatggcggatgatgaattcacacaagacctgttccgattcctacaattgctctgtgaggggcacaataatgatttccagaactacctacggacacagacagggaacacgaccactattaacatcatcatttgcactgtggactacctcctgcggctgcaggaatccatcagcgacttctactggtactactcgggcaaggatgtcattgaagagcagggcaagaggaacttctccaaagccatgtcggtggctaagcaggtgttcaacagcctcactgagtacatccagggtccctgcaccgggaaccagcagagcctggcgcacagtcgcctatgggacgcagtggtgggattcctgcacgtgttcgcccacatgatgatgaagctcgctcaggactcaagccagatcgagctgctgaaggagctgctggatctgcagaaggacatggtggtgatgttgctgtcgctactagaagggaacgtggtgaacggcatgatcgcccggcagatggtggacatgctcgtggaatcctcatccaatgtggagatgatcctcaagttcttcgacatgttcctgaaactcaaggacattgtgggctctgaagccttccaggactacgtaacggatccccgtggcctcatctccaagaaggacttccagaaggccatggacagccagaagcagttcagcggtccagaaatccagttcctgctttcgtgctccgaagcggatgagaacgaaatgatcaactgcgaagagttcgccaaccgcttccaggagccagcacgcgacatcggcttcaacgtggcggtgctgctgaccaacctgtcggagcatgtgccgcatgaccctcgcctgcacaacttcctggagctggccgagagcatccttgagtacttccgcccctacctgggccgcatcgagatcatgggcgcgtcacgccgcatcgagcgcatctacttcgagatctcagagaccaaccgcgcccagtgggagatgccccaggtgaaggagtccaagcgccagttcatcttcgacgtggtgaacgagggcggcgaggctgagaagatggagctcttcgtgagtttctgcgaggacaccatcttcgagatgcagatcgccgcgcagatctcggagcccgagggcgagccggagaccgacgaggacgagggcgcgggcgcggcggaggcgggcgcggaaggcgcggaggagggcgcggcggggctcgagggcacggcggccacggcggcggcgggggcgacggcgcgggttgtggcggccgcaggccgggccctgcgaggcctcagctaccgcagcctgcggcggcgcgtgcggcggctgcggcggcttacggcccgcgaggcggccaccgcagtggcggcgctgctctgggcagcagtgacgcgcgctggggccgctggcgcgggggcggcggcgggcgcgctgggcctgctctggggctcgctgttcggcggcggcctggtggagggcgccaagaaggtgacggtgaccgagctcctggcaggcatgcccgaccccaccagcgacgaggtgcacggcgagcagccggccgggccgggcggagacgcagacggcgagggtgccagcgagggcgctggagacgccgcggagggcgctggagacgaggaggaggcggtgcacgaggccgggccgggcggtgccgacggggcggtggccgtgaccgatgggggccccttccggcccgaaggggctggcggtctcggggacatgggggacacgacgcctgcggaaccgcccacacccgagggctctcccatcctcaagaggaaattgggggtggatggagtggaggaggagctcccgccagagccagagcccgagccggaaccagagctggagccggagaaagccgatgccgagaatggggagaaggaagaagttcccgagcccacaccagagccccccaagaagcaagcacctccctcaccccctccaaagaaggaggaagctggaggcgaattctggggagaactggaggtgcagagggtgaagttcctgaactacctgtcccggaacttttacaccctgcggttccttgccctcttcttggcatttgccatcaacttcatcttgctgttttataaggtctcagactctccaccaggggaggacgacatggaaggctcagctgctggggatgtgtcaggtgcaggctctggtggcagctctggctggggcttgggggccggagaggaggcagagggcgatgaggatgagaacatggtgtactacttcctggaggaaagcacaggctacatggaacccgccctgcggtgtctgagcctcctgcatacactggtggcctttctctgcatcattggctataattgtctcaaggtgcccctggtaatctttaagcgggagaaggagctggcccggaagctggagtttgatggcctgtacatcacggagcagcctgaggacgatgacgtgaaggggcagtgggaccgactggtgctcaacacgccgtctttccctagcaactactgggacaagtttgtcaagcgcaaggtcctggacaaacatggggacatctacgggcgggagcggattgctgagctactgggcatggacctggccacactagagatcacagcccacaatgagcgcaagcccaacccgccgccagggctgctgacctggctcatgtccatcgatgtcaagtaccagatctggaagttcggggtcatcttcacagacaactccttcctgtacctgggctggtatatggtgatgtccctcttgggacactacaacaacttcttctttgctgcccatctcctggacatcgccatgggggtcaagacgctgcgcaccatcctgtcctctgtcacccacaatgggaaacagctggtgatgaccgtgggccttctggcggtggtcgtctacctgtacaccgtggtggccttcaacttcttccgcaagttctacaacaagagcgaggatgaggatgaacctgacatgaagtgtgatgacatgatgacgtgttacctgtttcacatgtacgtgggtgtccgggctggcggaggcattggggacgagatcgaggaccccgcgggtgacgaatacgagctctacagggtggtcttcgacatcaccttcttcttcttcgtcatcgtcatcctgttggccatcatccagggtctgatcatcgacgcttttggtgagctccgagaccaacaagagcaagtgaaggaggatatggagaccaagtgcttcatctgtggaatcggcagtgactactttgatacgacaccgcatggcttcgagactcacacgctggaggagcacaacctggccaattacatgtttttcctgatgtatttgataaacaaggatgagacagaacacacgggtcaggagtcttatgtctggaagatgtaccaagagagatgttgggatttcttcccagctggtgattgtttccgtaagcagtatgaggaccagcttagctgacacacccccagctggccctccacccccacctcaagtgccttattctcacagcaagccccttagtccccaagcccctccccctaaggcagctgggggagaggtgacctagtactggaaaataaatctgtgctacgccccccagca

SEQ ID NO: 18295 - DNA, 15117 bp, Homo sapiens
  source 1..15117: mol_type = unassigned DNA
atgggtgacgcagaaggcgaagacgaggtccagttcctgcggacggacgatgaggtggtcctgcagtgcagcgctaccgtgctcaaggagcagctcaagctctgcctggccgccgagggcttcggcaaccgcctgtgcttcctggagcccactagcaacgcgcagaatgtgccccccgatctggccatctgttgcttcgtcctggagcagtccctgtctgtgcgagccctgcaggagatgctggctaacacggtggaggctggcgtggagtcatcccagggcgggggacacaggacgctcctgtatggccatgccatcctgctccggcatgcacacagccgcatgtatctgagctgcctcaccacctcccgctccatgactgacaagctggccttcgatgtgggactgcaggaggacgcaacaggagaggcttgctggtggaccatgcacccagcctccaagcagaggtctgaaggagaaaaggtccgcgttggggatgacatcatccttgtcagtgtctcctccgagcgctacctgcacctgtcgaccgccagtggggagctccaggttgacgcttccttcatgcagacactatggaacatgaaccccatctgctcccgctgcgaagagggcttcgtgacgggaggtcacgtcctccgcctctttcatggacatatggatgagtgtctgaccatttcccctgctgacagtgatgaccagcgcagacttgtctactatgaggggggagctgtgtgcactcatgcccgctccctctggaggctggagccactgagaatcagctggagtgggagccacctgcgctggggccagccactccgagtccggcatgtcactaccgggcagtacctagcgctcaccgaggaccagggcctggtggtggttgacgccagcaaggctcacaccaaggctacctccttctgcttccgcatctccaaggagaagctggatgtggcccccaagcgggatgtggagggcatgggcccccctgagatcaagtacggggagtcactgtgcttcgtgcagcatgtggcctcaggactgtggctcacctatgctgctccagaccccaaggccctgcggctcggcgtgctcaagaagaaggccatgctgcaccaggagggccacatggacgacgcactgtcgctgacccgctgccagcaggaggagtcccaggccgcccgcatgatccacagcaccaatggcctatacaaccagttcatcaagagcctggacagcttcagcgggaagccacggggctcggggccacccgctggcacggcgctgcccatcgagggcgttatcctgagcctgcaggacctcatcatctacttcgagcctccctccgaggacttgcagcacgaggagaagcagagcaagctgcgaagcctgcgcaaccgccagagcctcttccaggaggaggggatgctctccatggtcctgaattgcatagaccgcctaaatgtctacaccactgctgcccactttgctgagtttgcaggggaggaggcagccgagtcctggaaagagattgtgaatcttctctatgaactcctagcttctctaatccgtggcaatcgtagcaactgtgccctcttctccacaaacttggactggctggtcagcaagctggatcggctggaggcctcgtctggcatcctggaggtcctgtactgtgtcctcattgagagtccagaggttctgaacatcatccaggagaatcacatcaagtccatcatctccctcctggacaagcatgggaggaaccacaaggtcctggacgtgctatgctccctgtgtgtgtgtaatggtgtggctgtacgctccaaccaagatcttattactgagaacttgctgcctggccgtgagcttctgctgcagacaaacctcatcaactatgtcaccagcatccgccccaacatctttgtgggccgagcggaaggcaccacgcagtacagcaaatggtactttgaggtgatggtggacgaggtgactccatttctgacagctcaggccacccacttgcgggtgggctgggccctcaccgagggctacaccccctaccctggggccggcgagggctggggcggcaacggggtcggcgatgacctctattcctacggctttgatggactgcatctctggacaggacacgtggcacgcccagtgacttccccagggcagcacctcctggcccctgaagacgtgatcagctgctgcctggacctcagcgtgccgtccatctccttccgcatcaacggctgccccgtgcagggtgtctttgagtccttcaacctggacgggctcttcttccctgttgtcagcttctcggctggtgtcaaggtgcggttcctccttggtggccgccatggtgaattcaagttcctgcccccacctggctatgctccatgccatgaggctgtgctccctcgagagcgactccatcttgaacccatcaaggagtatcgacgggaggggccccgggggcctcacctggtgggccccagtcgctgcctctcacacaccgacttcgtgccctgccctgtggacactgtccagattgtcctgccgccccatctggagcgcattcgggagaagctggcggagaacatccacgagctctgggcgctaacccgcatcgagcagggctggacctacggcccggttcgggatgacaacaagaggctgcacccgtgtcttgtggacttccacagccttccagagcctgagaggaactacaacctgcagatgtctggggagacgctcaagactctgctggctctgggctgccacgtgggcatggcggatgagaaggcggaggacaacctgaagaagacaaaactccccaagacgtatatgatgagcaatgggtacaagccggctccgctggacctgagccacgtgcggctgacgccggcgcagacgacactggtggaccgtctggcagaaaatgggcacaacgtgtgggcccgagaccgcgtgggccagggctggagctacagcgcagtgcaggacatcccagcgcgccgaaaccctcggctggtgccctaccgcctgctggatgaagccaccaagcgcagcaaccgggacagcctctgccaggccgtgcgcaccctcctgggctacggctacaacatcgagcctcctgaccaggagcccagtcaggtggagaaccagtctcgttgtgaccgggtgcgcatcttccgggcagagaaatcctatacagtgcagagcggccgctggtacttcgagtttgaagcagtcaccacaggcgagatgcgcgtgggctgggcgaggcccgagctgaggcctgatgtagagctgggagctgacgagctggcctatgtcttcaatgggcaccgcggccagcgctggcacttgggcagtgaaccatttgggcgcccctggcagccgggcgatgtcgttggctgtatgatcgacctcacagagaacaccattatcttcaccctcaatggcgaggtcctcatgtctgactcaggctccgaaacagccttccgggagattgagattggggacggcttcctgcccgtctgcagcttgggacctggccaggtgggtcatctgaacctgggccaggacgtgagctctctgaggttctttgccatctgtggcctccaggaaggcttcgagccatttgccatcaacatgcagcgcccagtcaccacctggttcagcaaaggcctgccccagtttgagccagtgccccttgaacaccctcactatgaggtatcccgagtggacggcactgtggacacgcccccctgcctgcgcctgacccaccgcacctggggctcccagaacagcctggtggagatgcttttcctgcggctgagcctcccagtccagttccaccagcacttccgctgcactgcaggggccaccccgctggcacctcctggcctgcagccccccgccgaggacgaggcccgggcggcggaacccgaccctgactacgaaaacctgcgccgctcagctgggggctggagcgaggcagagaacggcaaagaagggactgcgaaggagggcgcccccgggggcaccccgcaggcggggggagaggcgcagcccgccagggcggagaatgagaaggatgccaccaccgagaagaacaagaagagaggcttcttattcaaggccaagaaggtcgccatgatgacccagccaccggccacccccacgctgccccgactccctcacgacgtggtgcctgcagacaaccgcgatgaccccgagatcatcctcaacaccaccacgtactattactccgtgagggtctttgctggacaggagcccagctgcgtgtgggcgggctgggtcacccctgactaccatcagcacgacatgagcttcgacctcagcaaggtccgggtcgtgacggtgaccatgggggatgaacaaggcaacgtccacagcagcctcaagtgtagcaactgctacatggtgtggggcggagactttgtgagtcccgggcagcagggccggatcagccacacggaccttgtcattgggtgcctggtggacttggccactggcttaatgacctttacagccaatggcaaagagagcaacacctttttccaggtggaacccaacactaagctatttcctgccgtcttcgtcctgcccacccaccagaacgtcatccagtttgagctggggaagcagaagaacatcatgccgttgtcagccgccatgttccaaagcgagcgcaagaacccggccccgcagtgcccaccgcggctggagatgcagatgctgatgccagtgtcctggagccgcatgcccaaccacttcctgcaggtggagacgaggcgtgccggcgagcggctgggctgggccgtgcagtgccaggagccgctgaccatgatggcgctgcacatccccgaggagaaccggtgcatggacatcctggagctgtcggagcgcctggacctgcagcgcttccactcgcacaccctgcgcctctaccgcgctgtgtgcgccctgggcaacaatcgcgtggcgcacgctctgtgcagccacgtagaccaagctcagctgctgcacgccctggaggacgcgcacctgccaggcccactgcgcgcaggctactatgacctcctcatcagcatccacctcgaaagtgcctgccgcagccgccgctccatgctctctgaatacatcgtgcccctcacgcctgagacccgcgccatcacgctcttccctcctggaaggagcacagaaaatggtcacccccggcatggcctgccgggagttggagtcaccacttcgctgaggcccccgcatcatttctcgcccccctgtttcgtggccgctctgccagctgctggggcagcagaggccccggcccgcctcagccctgccatcccgctggaggccctgcgggacaaggcactgaggatgctgggggaggcggtgcgcgacggtgggcagcacgctcgcgaccccgtcgggggctccgtggagttccagtttgtgcctgtgctcaagctcgtgtccaccctgctggtgatgggcatctttggcgatgaggatgtgaaacagatcttgaagatgattgagcctgaggtcttcactgaggaagaagaggaggaggacgaggaggaagagggtgaagaggaagatgaggaggagaaggaggaggatgaggaggaaacagcacaggaaaaggaagatgaggaaaaagaggaagaggaggcagcagaaggggagaaagaagaaggcttggaggaagggctgctccagatgaagttgccagagtctgtgaagttacagatgtgccacctgctggagtatttctgtgaccaagagctgcagcaccgtgtggagtccctggcagcctttgcggagcgctatgtggacaagctccaggccaaccagcggagccgctatggcctcctcataaaagccttcagcatgaccgcagcagagactgcaagacgtacccgcgagttccgctccccaccccaggaacagatcaatatgctattgcaattcaaagatggtacagatgaggaagactgtcctctccctgaagagattcgacaggatttgcttgactttcatcaagacctgctggcacactgtggaattcagctagatggagaggaggaggaaccagaggaagagaccaccctgggcagccgcctcatgagcctgttggagaaagtgcggctggtgaagaagaaggaagagaaacctgaggaggagcggtcagcagaggagagcaaaccccggtccctgcaggagctggtgtcccacatggtggtgcgctgggcccaagaggacttcgtgcagagccccgagctggtgcgggccatgttcagcctcctgcaccggcagtacgacgggctgggtgagctgctgcgtgccctgccgcgggcgtacaccatctcaccgtcctccgtggaagacaccatgagcctgctcgagtgcctcggccagatccgctcgctgctcatcgtgcagatgggcccccaggaggagaacctcatgatccagagcatcgggaacatcatgaacaacaaagtcttctaccaacacccgaacctgatgagggcgctgggcatgcacgagacggtcatggaggtcatggtcaacgtcctcgggggcggcgagtccaaggagatccgcttccccaagatggtgacaagctgctgccgcttcctctgctatttctgccgaatcagccggcagaaccagcgctccatgtttgaccacctgagctacctgctggagaacagtggcatcggcctgggcatgcagggctccacgcccctggacgtggctgctgcctccgtcattgacaacaatgagctggccttggcattgcaggagcaggacctggaaaaggttgtgtcctacctggcaggctgtggcctccagagctgccccatgcttgtggccaaagggtacccagacattggctggaacccctgtggtggagagcgctacctggacttcctgcgctttgctgtcttcgtcaacggcgagagcgtggaggagaacgccaatgtggtggtgcggctgctcatccggaagcctgagtgcttcggacccgccctgcggggtgagggtggctcagggctgctggctgccatcgaagaggccatccgcatctccgaggaccctgcgagggatggcccaggcatccgcagggaccggcggcgcgagcactttggtgaggaaccgcctgaagaaaaccgggtgcacctgggacacgccatcatgtccttctatgccgccttgatcgacctgctcggacgctgtgcaccagagatgcatctaatccaagccggcaagggtgaggccctgcggatccgcgccatcctccgctcccttgtgcccttggaggaccttgtgggcatcatcagcctcccactgcagattcccaccctgggcaaagatggggctctggtgcagccaaagatgtcagcatccttcgtgccggaccacaaggcgtccatggtgctcttcctggaccgtgtgtatggcatcgagaaccaggacttcttgctgcacgtgctggacgtggggttcctgcccgacatgagggcagccgcctcgctggacacggccactttcagcaccaccgagatggcgctggcgctgaaccgctacctgtgcctggccgtgctgccgctcatcaccaagtgtgcgccgctctttgcgggcacagaacaccgcgccatcatggtggactctatgctgcataccgtgtaccgcctgtctcggggtcgttcgctcaccaaggcgcagcgtgacgtcatcgaggactgcctcatgtcgctctgcaggtacatccgcccgtcgatgctgcagcacctgttgcgccgcctggtgttcgacgtgcccatcctcaacgagttcgccaagatgccactcaagctcctcaccaaccactatgagcgctgttggaagtactactgcctacccacgggctgggccaacttcggggtcacctcagaggaggagctgcacctcacacggaaactcttctggggcatctttgactctctggcccataagaaatacgacccggagctgtaccgcatggccatgccttgtctgtgcgccattgccggggctctgccccccgactatgtggatgcctcatactcatctaaggcagagaaaaaggccacagtggatgctgaaggcaactttgatccccggcctgtggagaccctcaatgtgatcatcccggagaagctggactccttcattaacaagtttgcggagtacacacacgagaagtgggccttcgacaagatccagaacaactggtcctatggagagaacatagacgaggagctgaagacccaccccatgctgaggccctacaagaccttttcagagaaggacaaagagatttaccgctggcccatcaaggagtccctgaaggccatgattgcctgggaatggacgatagagaaggccagggagggtgaggaggagaagacggaaaagaaaaaaacgcggaagatatcacaaagtgcccagacctatgatcctcgagaaggctacaaccctcagccccccgaccttagtgctgttaccctgtcccgggagctgcaggccatggcagaacaactggcagaaaattaccacaacacgtggggacggaagaagaagcaggagctggaagccaaaggcggtgggacccaccccctgctggtcccctacgacacgctcacggccaaggagaaggcacgagatcgagagaaggcccaggagctactgaaattcctgcagatgaatggctacgcggttacaagaggccttaaggacatggaactggactcgtcttccattgaaaagcggtttgcctttggcttcctgcagcagctgctgcgctggatggacatttctcaggagttcattgcccacctggaggctgtggtcagcagtgggcgagtggaaaagtccccacatgaacaggagattaaattctttgccaagatcctgctccctttgatcaaccagtacttcaccaaccactgcctctatttcttgtccactccggctaaagtgctgggcagcggtggccacgcctctaacaaggagaaggaaatgatcaccagcctcttctgcaaacttgctgctctcgtccgccaccgagtctctctctttgggacagacgccccagctgtggtcaactgtcttcacatcctggcccgctccctggatgccaggacagtgatgaagtcaggccctgagatcgtgaaggctggcctccgctccttcttcgagagtgcctcggaggacatcgagaagatggtggagaacctgcggctgggcaaggtgtcgcaggcgcgcacccaggtgaaaggcgtgggccagaacctcacctacaccactgtggcactgctgccggtcctcaccaccctcttccagcacatcgcccagcaccagttcggagatgacgtcatcctggacgacgtccaggtctcttgctaccgaacgctgtgcagtatctactccctgggaaccaccaagaacacttatgtggaaaagcttcggccagccctcggggagtgcctggcccgtctggcagcagccatgccggtggcgttcctggagccgcagctgaacgagtacaacgcctgctccgtgtacaccaccaagtctccgcgggagcgggccatcctggggctccccaacagtgtggaggagatgtgtcccgacatcccggtgctggagcggctcatggcagacattggggggctggccgagtcaggtgcccgctacacagagatgccgcatgtcatcgagatcacgctgcccatgctatgcagctacctgccccgatggtgggagcgcgggcccgaggcacccccttccgccctgcccgccggcgcccccccaccctgcacagctgtcacctctgaccacctcaactccctgctggggaatatcctgagaatcatcgtcaacaacctgggcattgacgaggcctcctggatgaagcggctggctgtgttcgcacagcccattgtgagccgtgcacggccggagctcctgcagtcccacttcatcccaactatcgggcggctgcgcaagagggcagggaaggtggtgtccgaggaggagcagctgcgcctggaggccaaggcggaggcccaggagggcgagctgctggtgcgggacgagttctctgtgctctgccgggacctctacgccctgtatccgctgctcatccgctacgtggacaacaacagggcgcagtggctgacggagccgaatcccagcgcggaggagctgttcaggatggtgggcgagatcttcatctactggtccaagtcccacaacttcaagcgcgaggagcagaactttgtggtccagaatgagatcaacaacatgtccttcctgactgctgacaacaaaagcaaaatggctaaggcgggagatatacagtccggtggctcggaccaggaacgcaccaagaagaagcgccggggggaccggtactctgtgcagacgtcactgatcgtggccacactgaagaagatgctgcccatcggcctgaatatgtgtgcgcccaccgaccaagacctcatcacgctggccaagacccgttacgccctgaaagacacagatgaggaggtccgggaatttctgcacaacaaccttcaccttcagggaaaggtcgaaggctccccgtctctgcgctggcagatggctctgtaccggggcgtcccgggtcgcgaggaggacgccgatgaccccgagaaaatcgtgcgcagagtccaggaagtgtcagccgtgctctactacctggaccagaccgagcacccttacaagtctaagaaggccgtgtggcacaagcttttgtccaaacagcgccggcgggcagtcgtggcctgtttccgtatgacgcccctgtacaacctgcccacgcaccgggcatgtaacatgttcctggagagctacaaggctgcatggatcctgactgaagaccacagttttgaggaccgcatgatagatgacctttcaaaagctggggagcaggaggaggaggaggaagaggtggaagagaagaagccagaccccctgcaccagttggtcctgcacttcagccgcactgccctgacggaaaagagcaaactggatgaggattacctgtacatggcctatgctgatatcatggcaaagagctgccacctggaggagggaggggagaacggtgaagctgaagaggaggttgaggtctcctttgaggagaaacagatggagaagcagaggctcttgtaccagcaagcacggctgcacacccggggggcggccgagatggtgctgcagatgatcagtgcctgcaaaggagagacaggtgccatggtgtcctccaccctgaagctgggcatctccatcctcaatggaggcaatgctgaggtccagcagaaaatgctggattatcttaaggacaagaaggaagttggcttcttccagagtatccaggcactgatgcaaacatgcagcgtcctggatctcaatgcctttgagagacagaacaaggccgaggggctgggcatggtgaatgaggatggcactgtcatcaatcgccagaacggagagaaggtcatggcggatgatgaattcacacaagacctgttccgattcctacaattgctctgtgaggggcacaataatgatttccagaactacctacggacacagacagggaacacgaccactattaacatcatcatttgcactgtggactacctcctgcggctgcaggaatccatcagcgacttctactggtactactcgggcaaggatgtcattgaagagcagggcaagaggaacttctccaaagccatgtcggtggctaagcaggtgttcaacagcctcactgagtacatccagggtccctgcaccgggaaccagcagagcctggcgcacagtcgcctatgggacgcagtggtgggattcctgcacgtgttcgcccacatgatgatgaagctcgctcaggactcaagccagatcgagctgctgaaggagctgctggatctgcagaaggacatggtggtgatgttgctgtcgctactagaagggaacgtggtgaacggcatgatcgcccggcagatggtggacatgctcgtggaatcctcatccaatgtggagatgatcctcaagttcttcgacatgttcctgaaactcaaggacattgtgggctctgaagccttccaggactacgtaacggatccccgtggcctcatctccaagaaggacttccagaaggccatggacagccagaagcagttcagcggtccagaaatccagttcctgctttcgtgctccgaagcggatgagaacgaaatgatcaactgcgaagagttcgccaaccgcttccaggagccagcacgcgacatcggcttcaacgtggcggtgctgctgaccaacctgtcggagcatgtgccgcatgaccctcgcctgcacaacttcctggagctggccgagagcatccttgagtacttccgcccctacctgggccgcatcgagatcatgggcgcgtcacgccgcatcgagcgcatctacttcgagatctcagagaccaaccgcgcccagtgggagatgccccaggtgaaggagtccaagcgccagttcatcttcgacgtggtgaacgagggcggcgaggctgagaagatggagctcttcgtgagtttctgcgaggacaccatcttcgagatgcagatcgccgcgcagatctcggagcccgagggcgagccggagaccgacgaggacgagggcgcgggcgcggcggaggcgggcgcggaaggcgcggaggagggcgcggcggggctcgagggcacggcggccacggcggcggcgggggcgacggcgcgggttgtggcggccgcaggccgggccctgcgaggcctcagctaccgcagcctgcggcggcgcgtgcggcggctgcggcggcttacggcccgcgaggcggccaccgcagtggcggcgctgctctgggcagcagtgacgcgcgctggggccgctggcgcgggggcggcggcgggcgcgctgggcctgctctggggctcgctgttcggcggcggcctggtggagggcgccaagaaggtgacggtgaccgagctcctggcaggcatgcccgaccccaccagcgacgaggtgcacggcgagcagccggccgggccgggcggagacgcagacggcgagggtgccagcgagggcgctggagacgccgcggagggcgctggagacgaggaggaggcggtgcacgaggccgggccgggcggtgccgacggggcggtggccgtgaccgatgggggccccttccggcccgaaggggctggcggtctcggggacatgggggacacgacgcctgcggaaccgcccacacccgagggctctcccatcctcaagaggaaattgggggtggatggagtggaggaggagctcccgccagagccagagcccgagccggaaccagagctggagccggagaaagccgatgccgagaatggggagaaggaagaagttcccgagcccacaccagagccccccaagaagcaagcacctccctcaccccctccaaagaaggaggaagctggaggcgaattctggggagaactggaggtgcagagggtgaagttcctgaactacctgtcccggaacttttacaccctgcggttccttgccctcttcttggcatttgccatcaacttcatcttgctgttttataaggtctcagactctccaccaggggaggacgacatggaaggctcagctgctggggatgtgtcaggtgcaggctctggtggcagctctggctggggcttgggggccggagaggaggcagagggcgatgaggatgagaacatggtgtactacttcctggaggaaagcacaggctacatggaacccgccctgcggtgtctgagcctcctgcatacactggtggcctttctctgcatcattggctataattgtctcaaggtgcccctggtaatctttaagcgggagaaggagctggcccggaagctggagtttgatggcctgtacatcacggagcagcctgaggacgatgacgtgaaggggcagtgggaccgactggtgctcaacacgccgtctttccctagcaactactgggacaagtttgtcaagcgcaaggtcctggacaaacatggggacatctacgggcgggagcggattgctgagctactgggcatggacctggccacactagagatcacagcccacaatgagcgcaagcccaacccgccgccagggctgctgacctggctcatgtccatcgatgtcaagtaccagatctggaagttcggggtcatcttcacagacaactccttcctgtacctgggctggtatatggtgatgtccctcttgggacactacaacaacttcttctttgctgcccatctcctggacatcgccatgggggtcaagacgctgcgcaccatcctgtcctctgtcacccacaatgggaaacagctggtgatgaccgtgggccttctggcggtggtcgtctacctgtacaccgtggtggccttcaacttcttccgcaagttctacaacaagagcgaggatgaggatgaacctgacatgaagtgtgatgacatgatgacgtgttacctgtttcacatgtacgtgggtgtccgggctggcggaggcattggggacgagatcgaggaccccgcgggtgacgaatacgagctctacagggtggtcttcgacatcaccttcttcttcttcgtcatcgtcatcctgttggccatcatccagggtctgatcatcgacgcttttggtgagctccgagaccaacaagagcaagtgaaggaggatatggagaccaagtgcttcatctgtggaatcggcagtgactactttgatacgacaccgcatggcttcgagactcacacgctggaggagcacaacctggccaattacatgtttttcctgatgtatttgataaacaaggatgagacagaacacacgggtcaggagtcttatgtctggaagatgtaccaagagagatgttgggatttcttcccagctggtgattgtttccgtaagcagtatgaggaccagcttagctga

SEQ ID NO: 18296 - DNA, 548 bp, Homo sapiens
  source 1..548: mol_type = unassigned DNA
gacctgagccacgtgcggctgacgccggcgcagacgacactggtggaccgtctggcagaaaatgggcacaacgtgtgggcccgagaccgcgtgggccagggctggagctacagcgcagtgcaggacatcccagcgcgccgaaaccctcggctggtgccctaccgcctgctggatgaagccaccaagcgcagcaaccgggacagcctctgccaggccgtgcgcaccctcctgggctacggctacaacatcgagcctcctgaccaggagcccagtcaggtggagaaccagtctcgttgtgaccgggtgcgcatcttccgggcagagaaatcctatacagtgcagagcggccgctggtacttcgagtttgaagcagtcaccacaggcgagatgcgcgtgggctgggcgaggcccgagctgaggcctgatgtagagctgggagctgacgagctggcctatgtcttcaatgggcaccgcgtgggtacctccctgggcaccattctgccaggtcctgtggtctctcccacagcttgtctactctggccctgcct

SEQ ID NO: 18297 - DNA, 6263 bp, Homo sapiens
  source 1..6263: mol_type = unassigned DNA
gaacatcatgaacaacaaagtcttctaccaacacccgaacctgatgagggcgctgggcatgcacgagacggtcatggaggtcatggtcaacgtcctcgggggcggcgagtccaaggagatccgcttccccaagatggtgacaagctgctgccgcttcctctgctatttctgccgaatcagccggcagaaccagcgctccatgtttgaccacctgagctacctgctggagaacagtggcatcggcctgggcatgcagggctccacgcccctggacgtggctgctgcctccgtcattgacaacaatgagctggccttggcattgcaggagcaggacctggaaaaggttgtgtcctacctggcaggctgtggcctccagagctgccccatgcttgtggccaaagggtacccagacattggctggaacccctgtggtggagagcgctacctggacttcctgcgctttgctgtcttcgtcaacggcgagagcgtggaggagaacgccaatgtggtggtgcggctgctcatccggaagcctgagtgcttcggacccgccctgcggggtgagggtggctcagggctgctggctgccatcgaagaggccatccgcatctccgaggaccctgcgagggatggcccaggcatccgcagggaccggcggcgcgagcactttggtgaggaaccgcctgaagaaaaccgggtgcacctgggacacgccatcatgtccttctatgccgccttgatcgacctgctcggacgctgtgcaccagagatgcatctaatccaagccggcaagggtgaggccctgcggatccgcgccatcctccgctcccttgtgcccttggaggaccttgtgggcatcatcagcctcccactgcagattcccaccctgggcaaagatggggctctggtgcagccaaagatgtcagcatccttcgtgccggaccacaaggcgtccatggtgctcttcctggaccgtgtgtatggcatcgagaaccaggacttcttgctgcacgtgctggacgtggggttcctgcccgacatgagggcagccgcctcgctggacacggccactttcagcaccaccgagatggcgctggcgctgaaccgctacctgtgcctggccgtgctgccgctcatcaccaagtgtgcgccgctctttgcgggcacagaacaccgcgccatcatggtggactctatgctgcataccgtgtaccgcctgtctcggggtcgttcgctcaccaaggcgcagcgtgacgtcatcgaggactgcctcatgtcgctctgcaggtacatccgcccgtcgatgctgcagcacctgttgcgccgcctggtgttcgacgtgcccatcctcaacgagttcgccaagatgccactcaagctcctcaccaaccactatgagcgctgttggaagtactactgcctacccacgggctgggccaacttcggggtcacctcagaggaggagctgcacctcacacggaaactcttctggggcatctttgactctctggcccataagaaatacgacccggagctgtaccgcatggccatgccttgtctgtgcgccattgccggggctctgccccccgactatgtggatgcctcatactcatctaaggcagagaaaaaggccacagtggatgctgaaggcaactttgatccccggcctgtggagaccctcaatgtgatcatcccggagaagctggactccttcattaacaagtttgcggagtacacacacgagaagtgggccttcgacaagatccagaacaactggtcctatggagagaacatagacgaggagctgaagacccaccccatgctgaggccctacaagaccttttcagagaaggacaaagagatttaccgctggcccatcaaggagtccctgaaggccatgattgcctgggaatggacgatagagaaggccagggagggtgaggaggagaagacggaaaagaaaaaaacgcggaagatatcacaaagtgcccagacctatgatcctcgagaaggctacaaccctcagccccccgaccttagtgctgttaccctgtcccgggagctgcaggccatggcagaacaactggcagaaaattaccacaacacgtggggacggaagaagaagcaggagctggaagccaaaggcggtgggacccaccccctgctggtcccctacgacacgctcacggccaaggagaaggcacgagatcgagagaaggcccaggagctactgaaattcctgcagatgaatggctacgcggttacaagaggccttaaggacatggaactggactcgtcttccattgaaaagcggtttgcctttggcttcctgcagcagctgctgcgctggatggacatttctcaggagttcattgcccacctggaggctgtggtcagcagtgggcgagtggaaaagtccccacatgaacaggagattaaattctttgccaagatcctgctccctttgatcaaccagtacttcaccaaccactgcctctatttcttgtccactccggctaaagtgctgggcagcggtggccacgcctctaacaaggagaaggaaatgatcaccagggacagacgccccagctgtggtcaactgtcttcacatcctggcccgctccctggatgccaggacagtgatgaagtcaggccctgagatcgtgaaggctggcctccgctccttcttcgagagtgcctcggaggacatcgagaagatggtggagaacctgcggctgggcaaggtgtcgcaggcgcgcacccaggtgaaaggcgtgggccagaacctcacctacaccactgtggcactgctgccggtcctcaccaccctcttccagcacatcgcccagcaccagttcggagatgacgtcatcctggacgacgtccaggtctcttgctaccgaacgctgtgcagtatctactccctgggaaccaccaagaacacttatgtggaaaagcttcggccagccctcggggagtgcctggcccgtctggcagcagccatgccggtggcgttcctggagccgcagctgaacgagtacaacgcctgctccgtgtacaccaccaagtctccgcgggagcgggccatcctggggctccccaacagtgtggaggagatgtgtcccgacatcccggtgctggagcggctcatggcagacattggggggctggccgagtcaggtgcccgctacacagagatgccgcatgtcatcgagatcacgctgcccatgctatgcagctacctgccccgatggtgggagcgcgggcccgaggcacccccttccgccctgcccgccggcgcccccccaccctgcacagctgtcacctctgaccacctcaactccctgctggggaatatcctgagaatcatcgtcaacaacctgggcattgacgaggcctcctggatgaagcggctggctgtgttcgcacagcccattgtgagccgtgcacggccggagctcctgcagtcccacttcatcccaactatcgggcggctgcgcaagagggcagggaaggtggtgtccgaggaggagcagctgcgcctggaggccaaggcggaggcccaggagggcgagctgctggtgcgggacgagttctctgtgctctgccgggacctctacgccctgtatccgctgctcatccgctacgtggacaacaacagggcgcagtggctgacggagccgaatcccagcgcggaggagctgttcaggatggtgggcgagatcttcatctactggtccaagtcccacaacttcaagcgcgaggagcagaactttgtggtccagaatgagatcaacaacatgtccttcctgactgctgacaacaaaagcaaaatggctaagtccggtggctcggaccaggaacgcaccaagaagaagcgccggggggaccggtactctgtgcagacgtcactgatcgtggccacactgaagaagatgctgcccatcggcctgaatatgtgtgcgcccaccgaccaagacctcatcacgctggccaagacccgttacgccctgaaagacacagatgaggaggtccgggaatttctgcacaacaaccttcaccttcagggaaaggtcgaaggctccccgtctctgcgctggcagatggctctgtaccggggcgtcccgggtcgcgaggaggacgccgatgaccccgagaaaatcgtgcgcagagtccaggaagtgtcagccgtgctctactacctggaccagaccgagcacccttacaagtctaagaaggccgtgtggcacaagcttttgtccaaacagcgccggcgggcagtcgtggcctgtttccgtatgacgcccctgtacaacctgcccacgcaccgggcatgtaacatgttcctggagagctacaaggctgcatggatcctgactgaagaccacagttttgaggaccgcatgatagatgacctttcaaaagctggggagcaggaggaggaggaggaagaggtggaagagaagaagccagaccccctgcaccagttggtcctgcacttcagccgcactgccctgacggaaaagagcaaactggatgaggattacctgtacatggcctatgctgatatcatggcaaagagctgccacctggaggagggaggggagaacggtgaagctgaagaggaggttgaggtctcctttgaggagaaacagatggagaagcagaggctcttgtaccagcaagcacggctgcacacccggggggcggccgagatggtgctgcagatgatcagtgcctgcaaaggagagacaggtgccatggtgtcctccaccctgaagctgggcatctccatcctcaatggaggcaatgctgaggtccagcagaaaatgctggattatcttaaggacaagaaggaagttggcttcttccagagtatccaggcactgatgcaaacatgcagcgtcctggatctcaatgcctttgagagacagaacaaggccgaggggctgggcatggtgaatgaggatggcactggagagaaggtcatggcggatgatgaattcacacaagacctgttccgattcctacaattgctctgtgaggggcacaataatgatttccagaactacctacggacacagacagggaacacgaccactattaacatcatcatttgcactgtggactacctcctgcggctgcaggaatccatcagcgacttctactggtactactcgggcaaggatgtcattgaagagcagggcaagaggaacttctccaaagccatgtcggtggctaagcaggtgttcaacagcctcactgagtacatccagggtccctgcaccgggaaccagcagagcctggcgcacagtcgcctatgggacgcagtggtgggattcctgcacgtgttcgcccacatgatgatgaagctcgctcaggactcaagccagatcgagctgctgaaggagctgctggatctgcagaaggacatggtggtgatgttgctgtcgctactagaagggaacgtggtgaacggcatgatcgcccggcagatggtggacatgctcgtggaatcctcatccaatgtggagatgatcctcaagttcttcgacatgttcctgaaactcaaggacattgtgggctctgaagccttccaggactacgtaacggatccccgtggcctcatctccaagaaggacttccagaaggccatggacagccagaagcagttcagcggtccagaaatccagttcctgctttcgtgctccgaagcggatgagaacgaaatgatcaactgcgaagagttcgccaaccgcttccaggagccagcacgcgacatcggcttcaacgtggcggtgctgctgaccaacctgtcggagcatgtgccgcatgaccctcgcctgcacaacttcctggagctggccgagagcatccttgagtacttccgcccctacctgggccgcatcgagatcatgggcgcgtcacgccgcatcgagcgcatctacttcgagatctcagagaccaaccgcgcccagtgggagatgccccaggtgaaggagtccaagcgccagttcatcttcgacgtggtgaacgagggcggcgaggctgagaagatggagctcttcgtgagtttctgcgaggacaccatcttcgagatgcagatcgccgcgcagatctcggagcccgagggcgagccggagaccgacgaggacgagggcgcgggcgcggcggaggcgggcgcggaaggcgcggaggagggcgcggcggggctcgagggcacggcggccacggcggcggcgggggcgacggcgcgggttgtg

SEQ ID NO: 18298 - DNA, 2200 bp, Homo sapiens
  source 1..2200: mol_type = unassigned DNA
aaacttgctgctctcgtccgccaccgagtctctctctttggacagtgatgaagtcaggccctgagatcgtgaaggctggcctccgctccttcttcgagagtgcctcggaggacatcgagaagatggtggagaacctgcggctgggcaaggtgtcgcaggcgcgcacccaggtgaaaggcgtgggccagaacctcacctacaccactgtggcactgctgccggtcctcaccaccctcttccagcacatcgcccagcaccagttcggagatgacgtcatcctggacgacgtccaggtctcttgctaccgaacgctgtgcagtatctactccctgggaaccaccaagaacacttatgtggaaaagcttcggccagccctcggggagtgcctggcccgtctggcagcagccatgccggtggcgttcctggagccgcagctgaacgagtacaacgcctgctccgtgtacaccaccaagtctccgcgggagcgggccatcctggggctccccaacagtgtggaggagatgtgtcccgacatcccggtgctggagcggctcatggcagacattggggggctggccgagtcaggtgcccgctacacagagatgccgcatgtcatcgagatcacgctgcccatgctatgcagctacctgccccgatggtgggagcgcgggcccgaggcacccccttccgccctgcccgccggcgcccccccaccctgcacagctgtcacctctgaccacctcaactccctgctggggaatatcctgagaatcatcgtcaacaacctgggcattgacgaggcctcctggatgaagcggctggctgtgttcgcacagcccattgtgagccgtgcacggccggagctcctgcagtcccacttcatcccaactatcgggcggctgcgcaagagggcagggaaggtggtgtccgaggaggagcagctgcgcctggaggccaaggcggaggcccaggagggcgagctgctggtgcgggacgagttctctgtgctctgccgggacctctacgccctgtatccgctgctcatccgctacgtggacaacaacagggcgcagtggctgacggagccgaatcccagcgcggaggagctgttcaggatggtgggcgagatcttcatctactggtccaagtcccacaacttcaagcgcgaggagcagaactttgtggtccagaatgagatcaacaacatgtccttcctgactgctgacaacaaaagcaaaatggctaaggcgggagatatacagtccggtggctcggaccaggaacgcaccaagaagaagcgccggggggaccggtactctgtgcagacgtcactgatcgtggccacactgaagaagatgctgcccatcggcctgaatatgtgtgcgcccaccgaccaagacctcatcacgctggccaagacccgttacgccctgaaagacacagatgaggaggtccgggaatttctgcacaacaaccttcaccttcagggaaaggtcgaaggctccccgtctctgcgctggcagatggctctgtaccggggcgtcccgggtcgcgaggaggacgccgatgaccccgagaaaatcgtgcgcagagtccaggaagtgtcagccgtgctctactacctggaccagaccgagcacccttacaagtctaagaaggccgtgtggcacaagcttttgtccaaacagcgccggcgggcagtcgtggcctgtttccgtatgacgcccctgtacaacctgcccacgcaccgggcatgtaacatgttcctggagagctacaaggctgcatggatcctgactgaagaccacagttttgaggaccgcatgatagatgacctttcaaaagctggggagcaggaggaggaggaggaagaggtggaagagaagaagccagaccccctgcaccagttggtcctgcacttcagccgcactgccctgacggaaaagagcaaactggatgaggattacctgtacatggcctatgctgatatcatggcaaagagctgccacctggaggagggaggggagaacggtgaagctgaagaggaggttgaggtctcctttgaggagaaacagatggagaagcagaggctcttgtaccagcaagcacggctgcacacccggggggcggccgagatggtgctgcagatgatcagtgcctgcaaaggagagacaggtgccatggtgtcctccaccctgaa

SEQ ID NO: 18299 - DNA, 421 bp, Homo sapiens
  source 1..421: mol_type = unassigned DNA
gctgttcaggatggtgggcgagatcttcatctactggtccaagtcccacaacttcaagcgcgaggagcagaactttgtggtccagaatgagatcaacaacatgtccttcctgactgctgacaacaaaagcaaaatggctaaggtcggggcttggttctgggaggagcacttggcagagagggcgggagcaccctctaggacttcctacctggcctgtcctcacccagccagcccgtcctgggcgcaatccctgcagtcctcagagcagcccctcttacctcctctccctctcccttcctccccagctccttcctcctcctgtatcttctccctcctcccatctccctcctcctctccatctccctcttctctcatctctgtctccttcctcctcctgtatcttctccctcctcccatttcc

SEQ ID NO: 18300 - DNA, 863 bp, Homo sapiens
  source 1..863: mol_type = unassigned DNA
cgtggtcctggctctgtgggacctggcctaggatggaaacttaggtctggaggcggagtcaggaccctgactctgttggtggagacaaggttttccttctgccgtaccgagcacccttacaagtctaagaaggccgtgtggcacaagcttttgtccaaacagcgccggcgggcagtcgtggcctgtttccgtatgacgcccctgtacaacctgcccacgcaccgggcatgtaacatgttcctggagagctacaaggctgcatggatcctgactgaagaccacagttttgaggaccgcatgatagatgacctttcaaaagctggggagcaggaggaggaggaggaagaggtggaagagaagaagccagaccccctgcaccagttggtcctgcacttcagccgcactgccctgacggaaaagagcaaactggatgaggattacctgtacatggcctatgctgatatcatggcaaagagctgccacctggaggagggaggggagaacggtgaagctgaagaggaggttgaggtctcctttgaggagaaacagatggagaagcagaggctcttgtaccagcaagcacggctgcacacccggggggcggccgagatggtgctgcagatgatcagtgcctgcaaaggagagacaggtgccatggtgtcctccaccctgaagctgggcatctccatcctcaatggaggcaatgctgaggtccagcagaaaatgctggattatcttaaggacaagaaggaagttggcttcttccagagtatccaggcactgatgcaaacatgcagcgtcctggatctcaatgcctttgagagacagaacaaggccgaggggctgggcatggtgaatgagga

SEQ ID NO: 18301 - DNA, 515 bp, Homo sapiens
  source 1..515: mol_type = unassigned DNA
gagaagcagaggctcttgtaccagcaagcacggctgcacacccggggggcggccgagatggtgctgcagatgatcagtgcctgcaaaggagagacaggtgccatggtgtcctccaccctgaagctgggcatctccatcctcaatggaggcaatgctgaggtccagcagaaaatgctggattatcttaaggacaagaaggaagttggcttcttccagagtatccaggcactgatgcaaacatgcagcgtcctggatctcaatgcctttgagagacagaacaaggccgaggggctgggcatggtgaatgaggatggcactggagagaaggtcatggcggatgatgaattcacacaagacctgttccgattcctacaattgctctgtgaggggcacaataatggcgctctgcagtggctgccaaagttctatacacgtggtggatttctgtactttaggtccagaaaagacctaagggaaaaaactgcctggcatttaaaaataaatctattagaatc

SEQ ID NO: 18302 - DNA, 843 bp, Homo sapiens
  source 1..843: mol_type = unassigned DNA
cacggctgcacacccggggggcggccgagatggtgctgcagatgatcagtgcctgcaaaggagagacaggtgccatggtgtcctccaccctgaagctgggcatctccatcctcaatggaggcaatgctgaggtccagcagaaaatgctggattatcttaaggacaagaaggaagttggcttcttccagagtatccaggcactgatgcaaacatgcaggagagaaggtcatggcggatgatgaattcacacaagacctgttccgattcctacaattgctctgtgaggggcacaataatgatttccagaactacctacggacacagacagggaacacgaccactattaacatcatcatttgcactgtggactacctcctgcggctgcaggaatccatcagcgacttctactggtactactcgggcaaggatgtcattgaagagcagggcaagaggaacttctccaaagccatgtcggtggctaagcaggtgttcaacagcctcactgagtacatccagggtccctgcaccgggaaccagcagagcctggcgcacagtcgcctatgggacgcagtggtgggattcctgcacgtgttcgcccacatgatgatgaagctcgctcaggactcaagccagatcgagctgctgaaggagctgctggatctgcagaaggacatggtggtgatgttgctgtcgctactagaagggaacgtggtgaacggcatgatcgcccggcagatggtggacatgctcgtggaatcctcatccaatgtggagatgatcctcaagttcttcgacatgttcctgaaactcaaggacattgtgggctctgaagccttccaggac

SEQ ID NO: 18303 - DNA, 432 bp, Homo sapiens
  source 1..432: mol_type = unassigned DNA
aggagctcccgccagagccagagcccgagccggaaccagagctggagccggagaaagccgatgccgagaatggggagaaggaagaagttcccgagcccacaccagagccccccaagaagcaagcacctccctcaccccctccaaagaaggaggaagctggaggcgaattctggggagaactggaggtgcagagggtgaagttcctggtctcagactctccaccaggggaggacgacatggaaggctcagctgctggggatgtgtcaggtgcaggctctggtggcagctctggctggggcttgggggccggagaggaggcagagggcgatgaggatgagaacatggtgtactacttcctggaggaaagcacaggctacatggaacccgccctgcggtgtctgagcctcctgcatacactggtggcctttctct

SEQ ID NO: 18304 - DNA, 16562 bp, Homo sapiens
  source 1..16562: mol_type = unassigned DNA
ccgagcggaccgccggctgcaggcagcgagcgcggctgggctgcggggctgcttccccgcgtcctccgggcccgggccgccctcctcccgcacagtgcggagcagggaggccccgcgcctcgaccacccgcgcccgagcgtccgcgcctcctcctccgctctgcaggcggggaccgcccggcgctcggcacccggcagcgcggccccctccagcccccggctcccggcagcagaagcagaaggcagcgccaggggccgccgccgccgccgagctccgcggggctcgggagccggccccggcgaggaggcgcggaaccatggccgatgggggcgagggcgaagacgagatccagttcctgcgaactgatgatgaagtggttctgcagtgcaccgcaaccatccacaaagaacaacagaagctatgcttggcagcagaaggatttggcaacagactttgtttcttggagtccacttccaattccaagaatgtgcccccagacctctccatctgcacctttgtgctggagcagtccctctctgtccgggcgctgcaggagatgctggctaacaccgtggagaaatcagaagggcaagttgatgtggaaaaatggaaattcatgatgaagactgctcaaggtggtggtcatcgaacactcctctacggacatgccatattgctgcgccattcctatagtggcatgtatctgtgctgcctgtccacctcccggtcttcaactgataagctggcttttgatgttggcttgcaagaggacaccacaggggaggcttgttggtggaccatacaccctgcctctaagcagcgatcagaaggagaaaaagtacgagttggagatgacctcatcttagttagcgtgtcctctgaaaggtacttgcacttgtcttatggcaacggcagcttacacgtggatgccgctttccagcagactctctggagcgtggccccaatcagctcaggaagtgaggcagcccaagggtatctcattggtggtgatgtcctcaggttgctgcatggacacatggacgagtgtctcactgtcccttcaggagaacatggtgaagagcagcggagaactgttcattatgaaggtggcgctgtgtctgttcatgcacgttccctttggagactagagacgctaagagttgcgtggagtggaagccacataagatggggacagccattccgactacgccatgtcacaacaggaaaatacttgagtctcatggaagacaaaaaccttctactcatggacaaagagaaagctgatgtaaaatcaacagcatttaccttccggtcttccaaggaaaaattggatgtaggggtgagaaaagaagtagatggcatgggaacatctgaaataaaatacggtgactcagtatgctatatacaacatgtagacacaggcctatggcttacttaccagtctgtggacgtgaaatccgtgagaatgggatctatacaacgtaaggctattatgcatcatgaaggccacatggatgatggcataagtttgtcgagatcccagcatgaagaatcacgcacagcccgagttatccggagcacagtcttccttttcaatagatttataaggggccttgatgctctcagcaagaaagcgaaggcttccacagtcgatttgcctatagagtccgtaagcctaagtctgcaggatctcattggctacttccaccccccagatgagcatttagagcatgaagacaaacagaacagactacgagccctgaagaatcggcaaaatctcttccaggaagagggaatgatcaacctcgtgcttgagtgcatagaccgtttgcacgtctacagcagtgcagcacactttgctgatgttgctgggcgagaagcaggagagtcttggaaatccattctgaattctctgtatgagttgctggcggctctaattagaggaaatcgtaaaaactgtgctcaattttctggctccctcgactggttgatcagcagattggaaagactggaagcttcttcaggcattctggaagttttacactgtgttttagtagaaagtccagaagctctaaatattattaaagaaggacatattaaatctattatctcacttttagacaaacatggaagaaatcacaaggttctggatgtcttgtgctcactctgtgtttgccacggggttgcagtccgttctaaccagcatctcatctgtgacaatctcctaccaggaagagacttgttattgcagacacgtcttgtgaaccatgtcagcagcatgagacccaatatttttctgggcgtcagtgaaggttctgctcagtataagaaatggtactatgaattgatggtggaccacacagagccctttgtgacagctgaagcaactcacctgcgagtgggctgggcttccactgaaggatattctccctaccctggagggggcgaagagtggggtggaaatggtgttggagatgatctcttctcctatggatttgatggccttcatctctggtcaggttgtattgctcgtactgtaagctcaccaaaccaacatctgttaagaactgatgatgtcatcagttgctgtttagatctgagtgccccaagcatctcgttccgaattaatggacaacctgttcaaggaatgtttgagaatttcaacatcgatggcctcttctttccagtcgttagtttctctgcaggaataaaagtacgctttctgcttggagggcgacatggagaattcaaatttcttcctccacctgggtatgctccttgttatgaagctgttctgccaaaagaaaagttgaaagtggaacacagccgagagtacaagcaagaaagaacttacacacgcgacctgctgggccccacagtttccctgacgcaagctgccttcacacccatccctgtggataccagccagatcgtgttgcctcctcatctagaaagaataagagaaaaactggcagagaatatccatgaactctgggttatgaataaaattgagcttggctggcagtatggtccggttagagatgacaacaagagacaacacccatgcctggtggagttctccaagctgcctgaacaggagcgcaattacaacttacaaatgtcgcttgagaccctgaagactttgttggcattaggatgtcatgtgggtatatcagatgaacatgctgaagacaaggtgaaaaaaatgaagctacccaagaattaccagctgacaagtggatacaagcctgcccctatggacctgagctttatcaaactcaccccatcacaagaagcaatggtggacaagttggcagaaaatgcacataatgtgtgggcgcgggatcgaatccggcagggctggacttatggcatccaacaggacgtaaagaacagaagaaatcctcgccttgttccctacactcttctggatgaccgaaccaagaaatccaacaaggacagcctccgcgaggctgtgcgcacgctgctggggtacggctacaacttggaagcaccagatcaagatcatgcagccagagccgaagtgtgcagcggcaccggggaaaggttccgaatcttccgtgccgagaagacctatgcagtgaaggccggacggtggtattttgaatttgagacggtcactgctggagacatgagggttggttggagtcgtcctggttgtcaaccggatcaggagcttggctcagatgaacgtgcctttgcctttgatggcttcaaggcccagcggtggcatcagggcaatgaacactatgggcgctcttggcaagcaggcgatgtcgtggggtgtatggttgacatgaacgaacacaccatgatgttcacactgaatggtgaaatccttcttgatgattcaggctcagaactggctttcaaggactttgatgttggcgatggattcatacctgtgtgtagccttggagtggctcaagtgggtaggatgaactttggaaaggatgtcagcaccttgaaatatttcaccatctgtggcttacaagagggctatgaaccatttgccgttaatacaaacagggatattaccatgtggctgagcaagaggcttcctcagtttcttcaagttccatcaaaccatgaacatatagaggtgaccagaatagacggcaccatagacagttccccatgtttaaaggtcactcagaagtcttttggttctcagaacagcaacactgatatcatgttttatcgcctgagcatgccgatcgagtgcgcggaggtcttctccaagacggtggctggagggctccctggggctggcctttttgggcccaagaatgacttggaagattatgatgctgattctgactttgaggttctgatgaagacagctcatggccatctagtgcccgatcgtgttgacaaagacaaagaagctactaaaccagagtttaacaaccacaaagattatgcccaggaaaagccctctcgtctgaaacaaagatttttgcttagaagaacaaagccagattacagcacaagccattctgcaagactcaccgaagatgtccttgctgatgatcgggatgactatgatttcttgatgcaaacgtccacgtactattactcagtgagaatctttcctggacaagaacctgctaatgtctgggtgggctggattacatcagatttccatcagtatgacacaggctttgacttggacagagttcgcacagtaacagttactctaggagatgaaaaaggaaaagtgcatgaaagcatcaaacgcagcaactgctatatggtatgtgcgggtgagagcatgagccccgggcaaggacgcaacaataatggactggagattggctgtgtggtggatgctgccagcgggctgctcacattcattgccaatggcaaggaactgagcacatactatcaggtggaaccgagtacaaaattatttcctgcggtttttgcacaagctacaagtcccaatgttttccagtttgagttgggaagaataaagaatgtgatgcctctctcggcgggattattcaagagtgagcacaagaaccccgtgccgcagtgccccccgcgcctccacgtgcagttcctgtcacacgtcctgtggagcagaatgcccaaccagtttttgaaggtagatgtgtctcgaataagtgaacgccaaggctggttggtgcagtgtttggatcctctgcagttcatgtctcttcatatccctgaggaaaacagatctgttgacatcttagagttgacagagcaggaggaattgctgaaatttcactatcacactctccggctctactcagccgtctgtgctcttgggaaccaccgggtggcccatgccctgtgcagccatgtggatgaacctcagctcctctatgccattgagaacaagtacatgcctggtttgctgcgtgctggctactatgacctgctgattgacatccacctgagctcctatgccactgccaggctcatgatgaacaacgagtacattgtccccatgacggaggagacgaagagcatcaccctgttccctgatgagaacaaaaaacacggccttccagggatcggcctcagcacctccctcaggccacggatgcagttttcctcccccagttttgtaagcattagtaatgaatgttaccagtacagtccagagttcccactggacatcctcaagtccaaaaccatacagatgctgacagaagctgttaaagagggcagtcttcatgcccgggacccagttggagggactactgaattcctctttgtacctctcatcaagcttttctataccctgctgatcatgggcatctttcacaacgaggacttgaagcacatcttgcagttgattgagcccagtgtgtttaaagaagctgccactccggaggaggagagtgacacgctggagaaagagctcagtgtggacgatgcaaagctgcaaggagctggtgaggaagaagccaaggggggcaagcggcccaaggaaggcctgctccaaatgaaactgccagagccagttaaattgcagatgtgcctactgcttcagtacctctgtgactgccaggtccggcaccggatagaagccattgtagccttttcagatgattttgtggctaagctccaagacaatcaacgtttccgatacaacgaagtcatgcaagccttaaacatgtcagctgcactcacagccaggaagacaaaggaatttagatcaccacctcaagaacagatcaatatgcttctcaattttaaggatgacaaaagtgaatgtccatgtccagaagaaattcgtgaccaactattggatttccatgaagatttgatgacacattgtggaattgagctggatgaagatgggtctctggatggaaacagtgatttaacaattagagggcgtctgctatccctggtagaaaaggtgacatatctgaagaagaagcaagcagaaaaaccagttgagagtgactccaaaaagtcctccactctgcagcagctgatttctgagaccatggtccgatgggctcaggagtctgtcattgaagaccccgagctggtgagggccatgtttgtgttgctccatcggcagtatgacggcattgggggtcttgttcgggccctgccaaagacctacacgataaatggtgtgtccgtggaggacaccatcaacctgctggcatcccttggtcagattcggtccctgctgagtgtgagaatgggcaaagaagaagagaagctcatgattcgtggattaggggatattatgaataacaaagtgttttaccagcaccctaatctcatgagggcactggggatgcacgagactgtgatggaggtcatggtgaacgtccttggaggtggagagtccaaggaaatcacctttcccaagatggtggccaactgttgccgttttctctgttacttctgtcgtataagtaggcagaatcaaaaagctatgtttgatcatctcagttatttactggaaaacagcagtgttggtcttgcctccccagctatgagaggttcaacaccactggatgtggctgcagcttcggtgatggataataatgaactagcattagctctgcgtgagccggatctagaaaaggtagttcgttatttggctggttgtggactgcaaagttgccagatgctggtgtctaagggctatccagacattgggtggaacccagttgaaggagagagatatcttgactttcttagatttgctgtcttctgtaatggggagagtgtggaggaaaatgcaaatgtcgtggtgagattgctcattcggaggcctgagtgttttggtcctgctttgagaggagaaggtgggaatgggcttcttgcagcaatggaagaagccatcaaaatcgccgaggatccttcccgagatggtccctcaccaaatagcggatccagtaaaacacttgacacagaggaggaggaagatgacactatccacatggggaacgcgatcatgaccttctattcagctttgattgacctcttgggacgctgtgctcctgagatgcatttgattcatgccgggaagggagaagccatcagaattaggtccattttgagatccctcattcccctgggagatttggtgggcgttatcagcatcgcttttcagatgccaacaatagccaaagatgggaatgtggtggaacctgacatgtctgcggggttttgcccagatcacaaggcagccatggttttattccttgacagggtctatgggattgaggttcaagacttcctcctccatcttcttgaggttggctttctgccagatctccgggcggctgcttctttagatacggcagctttgagtgctacagacatggccttggccctcaatcggtacctttgcacagccgtcttgccattgttaacaagatgtgctcctctctttgctggcacagagcaccacgcttctctcattgactcattacttcatactgtgtatagactttctaagggctgttcacttaccaaagctcagcgggattccatagaagtttgtttactctctatttgtggacaactgagaccttctatgatgcagcacttactcagaagattagtatttgatgttccattattaaatgaacacgcaaagatgcctcttaaactgctgacaaatcattatgaaagatgctggaaatattactgcctgcctggagggtggggaaactttggtgctgcctcagaagaagaacttcatttatcaagaaagttgttctggggcatttttgatgccctgtctcaaaagaaatatgaacaagaacttttcaaactggcactgccttgcctgagtgcagttgcgggagctttgcctccagactacatggagtcaaattatgtcagtatgatggaaaaacagtcatcaatggattctgaagggaactttaacccacaacctgttgatacctcaaatattacaattcctgagaaattggaatacttcattaacaaatatgcagaacactcccatgacaaatggtcaatggacaagttggcaaatggatggatttatggagaaatatattcagactcttctaaggttcagccattaatgaagccatataagctattgtctgaaaaggaaaaagaaatttatcgctggccaatcaaagaatctttaaaaactatgctggcttggggctggagaattgaaagaactcgggagggagacagcatggccctttacaaccggactcgtcgtatttctcagacaagccaggtttctgtggacgctgcccatggttacagtccccgggccattgacatgagcaatgttacactatctagagacctgcatgctatggcagaaatgatggctgaaaactaccataatatatgggcaaagaaaaagaaaatggagttggagtccaaaggaggaggaaaccatcctctgctggtgccctatgatacactgacagccaaagagaaagccaaggatagagaaaaagcacaggacatcctcaagttcttgcagatcaatggatatgctgtatccagaggatttaaggacctggaactggacacgccttctattgagaaacgatttgcctatagtttcctccaacaactcattcgctatgtggatgaagcccatcagtatatcctggagtttgatggtggcagcagaggcaaaggagaacatttcccttatgaacaagaaatcaagttctttgcaaaagtcgttcttcctttaattgatcagtatttcaaaaaccatcgtttatacttcttatctgcagcaagcagacctctctgctctggaggacatgcttccaacaaagagaaagaaatggtgactagcctattctgcaaacttggagttcttgtcaggcataggatttcactatttggcaatgatgcaacatcaattgtcaactgtcttcatattttgggtcagactttggatgcaaggacagtgatgaagactggcctggagagtgttaaaagtgcactcagagcttttctggacaacgctgcagaggatctggagaagaccatggaaaacctcaagcagggccagttcactcacacccgaaaccagcccaaaggggttactcagattatcaattacaccacagtggccctgctgccaatgctgtcttcattatttgaacatattggccagcatcagttcggagaagacctaatattggaagatgtccaggtgtcttgttatagaattctgactagcttatatgctttgggaaccagcaagagtatttacgtggagaggcaacgttctgcattaggagaatgtctagctgcctttgctggtgcttttcctgtagcatttttggaaactcatctggacaaacataatatttactccatctacaataccaagtcttcacgagaaagagcagctctcagtttgccaactaatgtggaagatgtttgtccaaacataccgtctttggagaaactcatggaagaaatcgtggaattagccgagtccggcattcgctacactcaaatgccacatgtcatggaagtcatactgcccatgctttgcagctacatgtctcgttggtgggagcatggacctgagaacaatccagaacgggccgagatgtgctgcacagccctgaactcagagcacatgaacacacttctagggaacatattgaaaatcatatataataacttggggattgatgagggagcctggatgaagaggctagcagtgttttcccagcctataataaataaagtgaaacctcagctcttgaaaactcatttcttgccgttaatggagaaactcaagaaaaaggcagctacggtggtgtctgaggaagaccacctgaaagctgaggccaggggggacatgtcggaggcagaactcctcatcctagatgagttcaccacactggccagagatctctatgccttctaccctctcttgattagatttgtggactataacagggcaaagtggctaaaggagcctaacccagaagcagaggagctcttccgcatggtggctgaagtgtttatctactggtcgaagtcccataatttcaaaagagaagagcagaacttcgttgtacagaatgaaatcaacaatatgtctttccttattactgataccaagtcaaagatgtcaaaggcagctgtttctgatcaggaaaggaagaaaatgaagcgcaaaggagatcggtattccatgcagacctctctgattgtagcagctctgaagcggttactgcccattgggttgaacatctgtgcccctggggaccaggagctcattgctctggccaaaaatcgatttagcctgaaagataccgaggatgaagtacgagatataatccgcagcaatattcatttacaaggcaagttggaggatcctgctattagatggcaaatggctctttacaaagacttaccaaacaggactgatgatacctcagatccagagaagacggtagaaagagtattggatatagcaaatgtgctttttcatcttgaacagaagtctaaacgtgtgggtcggagacattactgtctggtggaacatcctcagagatctaaaaaggctgtatggcataaactactgtccaagcagaggaaaagggctgttgtagcctgcttccggatggcccccttatataatctgccaaggcatcgggctgtcaatctctttcttcagggatatgaaaagtcttggattgaaacagaagaacattactttgaagataaactgatagaagatttagcaaaacctggggctgaacctccagaagaagatgaaggcactaagagagttgatcctctacatcagctgatccttctgtttagtcggacagctttaacagagaaatgcaaactggaggaagattttttatatatggcctatgcagatattatggcaaagagttgtcatgatgaggaagatgacgatggtgaagaggaagtgaagagttttgaagaaaaagaaatggaaaagcaaaagcttctataccagcaagcccgactccacgatcgtggcgcggctgagatggtgctacagacaatcagtgccagcaaaggtgaaactggaccaatggtagcagctactctgaaacttggaattgctattttaaatggtgggaactccacagtacagcagaaaatgcttgactacctcaaggagaaaaaggatgtgggcttctttcagagcctggccggcctgatgcagtcatgtagtgtccttgacctaaatgcatttgagcgacaaaacaaagctgaaggtcttgggatggtgacagaggaaggatcaggagaaaaggttctgcaggacgatgagttcacctgtgacctcttccgattcctgcaactactctgtgagggacacaactcagattttcagaattatctgagaactcagactggcaataatacaactgtcaacataattatctccactgtagactacctactgagagttcaggaatcaattagtgacttttattggtattactctgggaaagatgttattgatgaacaaggacaacggaatttctccaaagctatccaagtggcaaaacaagtctttaacactcttacagagtatattcagggtccttgcactgggaatcaacagagtttggcacacagcaggctgtgggatgctgtggtcggctttcttcatgtgtttgcccatatgcagatgaagctgtcgcaggattccagtcaaattgagctattaaaagaattaatggatctgcagaaggatatggtggtcatgttgctgtccatgttagaaggtaatgttgttaatggaacgattggcaaacagatggtggatatgcttgtggaatcttccaacaacgtggagatgattctcaaattttttgacatgttcttaaaactaaaggatttgacgtcgtctgatacttttaaagaatatgaccccgatggcaagggagtcatttccaagagggacttccacaaagcgatggagagccataagcactacacgcagtcagaaacggaatttcttttgtcttgtgcggagacggatgagaatgaaaccctcgactacgaagagttcgtcaaacgcttccacgaacctgcgaaggacatcggcttcaacgtcgccgtccttctgacaaacctctctgagcacatgcccaacgatacccgacttcagacttttctggaattagcagagagcgtcctgaattatttccagccctttctgggccgcatcgaaatcatgggaagcgccaaacgcatcgagagggtctattttgaaatcagtgagtccagccgaacccagtgggagaagccccaggtcaaggagtccaaaagacagttcatatttgacgtggtcaacgaaggcggagagaaagagaagatggaactctttgtgaacttctgcgaggacaccatctttgaaatgcagctggcggctcagatctcggagtcggacttgaacgagaggtcagcgaataaggaagaaagcgagaaggagaggccggaagagcaggggccgaggatggctttcttctccattctgacggtcaggtcggccctgtttgcgctcaggtacaatatcttgacccttatgcgaatgctcagtctgaagagcctgaagaagcagatgaaaaaagtaaaaaagatgaccgtgaaggacatggtcacggccttcttttcatcctactggagtattttcatgaccctcttgcacttcgtggccagcgttttcagaggctttttccgcatcatttgcagcctgctgcttgggggaagcctcgtcgaaggtgctaaaaagatcaaagttgcagaactgttagccaacatgccagaccccactcaggatgaggttagaggagatggggaggagggagagaggaaacccctggaagccgccctgccctccgaggatctgaccgacttaaaggagctgacagaggaaagtgaccttctttcggacatctttggcctggatctgaagagagaaggaggacagtacaaactgattcctcataatccaaatgctgggctcagtgacctcatgagcaacccagtccccatgcctgaggtgcaggaaaaatttcaggaacagaaggcaaaagaagaagaaaaggaagaaaaagaagaaaccaaatctgaacctgaaaaagccgagggagaagatggagaaaaagaagagaaagccaaggaagacaagggcaaacaaaagttgaggcagcttcacacacacagatacggagaaccagaagtgccagagtcagcattctggaagaaaatcatagcatatcaacagaaacttctaaactattttgctcgcaacttttacaacatgagaatgttagccttatttgtcgcatttgctatcaatttcatcttgctcttttataaggtctccacttcttctgtggttgaaggaaaggagctccccacgagaagttcaagtgaaaatgccaaagtgacaagcctggacagcagctcccatagaatcatcgcagttcactatgtactagaggagagcagcggctacatggagcccacgttgcgtatcttagctattctgcacacggtcatttctttcttctgcatcattggatactactgcttgaaagtcccattggttatttttaagcgagaaaaggaagtggcacggaaattggaatttgatgggctttatattacagaacagccttcagaagatgatattaaaggccagtgggatagactcgtaatcaacacacagtcatttcccaacaactactgggacaaatttgttaaaagaaaggttatggataaatatggagagttctacggccgagacagaatcagtgaattacttggcatggacaaggcagctctggacttcagtgatgccagagaaaagaagaagccaaagaaagacagctccttatcagctgtactgaactccattgatgtgaagtatcagatgtggaaactaggagtcgttttcactgacaactccttcctctacctagcctggtatatgactatgtctgttcttggacactataacaactttttttttgccgctcaccttctcgacattgctatgggattcaagacattaagaaccatcttgtcctcagtaactcacaatggcaaacagctcgtattaaccgttggcttattagctgttgttgtatacctatacactgtggtggcattcaattttttccgaaaattctacaataaaagtgaagatggtgatacaccagatatgaaatgtgacgatatgctaacatgctatatgttccacatgtatgttggagttcgtgctggaggagggatcggggatgaaatcgaagacccagcaggagatgaatatgagatctatcgaatcatctttgacatcactttcttcttctttgttattgtcattctcttggccataatacaaggtctaattattgatgcttttggagaactaagagaccaacaggaacaagtcaaagaagacatggagaccaaatgcttcatctgtgggataggcaatgattacttcgacacagtgccacatggctttgaaacccacactttacaggagcacaacttggctaattacttgttttttctgatgtatcttataaacaaagatgaaacagaacacacaggacaggaatcttatgtctggaagatgtatcaagaaaggtgttgggaatttttcccagcaggggattgcttccggaaacagtatgaagaccagctaaattaaactcagacccaatcacctctaaaaaccaaaaccctacccctctctctccctctctcaatttctctgctctcttggaaacattttgctgattttgtgaattgccagcgttgtgtgttttctgggagcatcgaagctctgtttcggaagagctgtttcctccccccaccttttgtatttactttgagactaaagactgaagaataatctaaattcatactcagacaaaaaaaggaattctggaaagaaaaccattctggacactgtcataacacacatagatagattttcttctgagactcccggagtcttctcgagctacgagaccttcacagagacacgtggcagccacactcacccagcctctttatttcaccatcctggaaggaaactgtctgtctaatggtcacagagcactgtagcacttaacagattgccatggacaccagttgcgaagggaaatagtgccttactatatgtgggttgagctatgcagaagatacgtgcatgaaaaaacatctttattttctttatgtcgacctttcttttcttagattgattttgtgaggttttttttttttcctttagtcttttctttagtgggggagggtaagaaaagcagtttgcacttaaaaagaaaaaaaaaaaacgggtggtgtgtctcaggacaaaaggaggctcttctcattcagctaaattcacatttgccccccccccccgcccccgcccccatatgctcctgctattattttggtaatgctctgatgcaacattgcaactttatgaaatctttgtatgaaaacaaaaagactgcaaaaaatacactttcaaaagaaaccattcattgcatgtttattatgcaagtttaaatgaacaaagaaaaccttcagaaacaagttgatcaacgtgagagaaatttcatgataattattcatagtaataaagtgtcgtgggcttaattgtatatctggagccagtgtcatccaccaacaatgtgatacaatatgaacttgacagtagttttgggttttgctcattctttcagccacctgtgatcagttttgttgattaaggacttcttgtcaggccattttttaatatcaaagctgaagcaatatccattcagggatttcatcagttgcatcacaaaacacggatgataatatacatcactccattttttccattttgagtccttttaaatgtaatgctaacctttacaattaaaaagtcagattcagaatggaaacaaggtcattttgcaaacattggagctcttttattacaagtctgcttgttaattttagaactgtaaaaccgctctgattaaactatttaactaac

SEQ ID NO: 18305 - DNA, 4523 bp, Homo sapiens
  source 1..4523: mol_type = unassigned DNA
tattgagaaacgatttgcctatagtttcctccaacaactcattcgctatgtggatgaagcccatcagtatatcctggagtttggtcgttcttcctttaattgatcagtatttcaaaaaccatcgtttatacttcttatctgcagcaagcagacctctctgctctggaggacatgcttccaacaaagagaaagaaatggtgactaggcaatgatgcaacatcaattgtcaactgtcttcatattttgggtcagactttggatgcaaggacagtgatgaagactggcctggagagtgttaaaagtgcactcagagcttttctggacaacgctgcagaggatctggagaagaccatggaaaacctcaagcagggccagttcactcacacccgaaaccagcccaaaggggttactcagattatcaattacaccacagtggccctgctgccaatgctgtcttcattatttgaacatattggccagcatcagttcggagaagacctaatattggaagatgtccaggtgtcttgttatagaattctgactagcttatatgctttgggaaccagcaagagtatttacgtggagaggcaacgttctgcattaggagaatgtctagctgcctttgctggtgcttttcctgtagcatttttggaaactcatctggacaaacataatatttactccatctacaataccaagtcttcacgagaaagagcagctctcagtttgccaactaatgtggaagatgtttgtccaaacataccgtctttggagaaactcatggaagaaatcgtggaattagccgagtccggcattcgctacactcaaatgccacatgtcatggaagtcatactgcccatgctttgcagctacatgtctcgttggtgggagcatggacctgagaacaatccagaacgggccgagatgtgctgcacagccctgaactcagagcacatgaacacacttctagggaacatattgaaaatcatatataataacttggggattgatgagggagcctggatgaagaggctagcagtgttttcccagcctataataaataaagtgaaacctcagctcttgaaaactcatttcttgccgttaatggagaaactcaagaaaaaggcagctacggtggtgtctgaggaagaccacctgaaagctgaggccaggggggacatgtcggaggcagaactcctcatcctagatgagttcaccacactggccagagatctctatgccttctaccctctcttgattagatttgtggactataacagggcaaagtggctaaaggagcctaacccagaagcagaggagctcttccgcatggtggctgaagtgtttatctactggtcgaagtcccataatttcaaaagagaagagcagaacttcgttgtacagaatgaaatcaacaatatgtctttccttattactgataccaagtcaaagatgtcaaaggcagctgtttctgatcaggaaaggaagaaaatgaagcgcaaaggagatcggtattccatgcagacctctctgattgtagcagctctgaagcggttactgcccattgggttgaacatctgtgcccctggggaccaggagctcattgctctggccaaaaatcgatttagcctgaaagataccgaggatgaagtacgagatataatccgcagcaatattcatttacaaggcaagttggaggatcctgctattagatggcaaatggctctttacaaagacttaccaaacaggactgatgatacctcagatccagagaagacggtagaaagagtattggatatagcaaatgtgctttttcatcttgaacagaagtctaaacgtgtgggtcggagacattactgtctggtggaacatcctcagagatctaaaaaggctgtatggcataaactactgtccaagcagaggaaaagggctgttgtagcctgcttccggatggcccccttatataatctgccaaggcatcgggctgtcaatctctttcttcagggatatgaaaagtcttggattgaaacagaagaacattactttgaagataaactgatagaagatttagcaaaacctggggctgaacctccagaagaagatgaaggcactaagagagttgatcctctacatcagctgatccttctgtttagtcggacagctttaacagagaaatgcaaactggaggaagattttttatatatggcctatgcagatattatggcaaagagttgtcatgatgaggaagatgacgatggtgaagaggaagtgaagagttttgaacacgatattatcaaagatttaagaaacaaatttgccagcctcggcgagaactctctggaaaaagaaatggaaaagcaaaagcttctataccagcaagcccgactccacgatcgtggcgcggctgagatggtgctacagacaatcagtgccagcaaaggtgaaactggaccaatggtagcagctactctgaaacttggaattgctattttaaatggtgggaactccacagtacagcagaaaatgcttgactacctcaaggagaaaaaggatgtgggcttctttcagagcctggccggcctgatgcagtcatgtagtgtccttgacctaaatgcatttgagcgacaaaacaaagctgaaggtcttgggatggtgacagaggaaggatcaggagaaaaggttctgcaggacgatgagttcacctgtgacctcttccgattcctgcaactactctgtgagggacacaactcagattttcagaattatctgagaactcagactggcaataatacaactgtcaacataattatctccactgtagactacctactgagagttcaggaatcaattagtgacttttattggtattactctgggaaagatgttattgatgaacaaggacaacggaatttctccaaagctatccaagtggcaaaacaagtctttaacactcttacagagtatattcagggtccttgcactgggaatcaacagagtttggcacacagcaggctgtgggatgctgtggtcggctttcttcatgtgtttgcccatatgcagatgaagctgtcgcaggattccagtcaaattgagctattaaaagaattaatggatctgcagaaggatatggtggtcatgttgctgtccatgttagaaggtaatgttgttaatggaacgattggcaaacagatggtggatatgcttgtggaatcttccaacaacgtggagatgattctcaaattttttgacatgttcttaaaactaaaggatttgacgtcgtctgatacttttaaagaatatgaccccgatggcaagggagtcatttccaagagggacttccacaaagcgatggagagccataagcactacacgcagtcagaaacggaatttcttttgtcttgtgcggagacggatgagaatgaaaccctcgactacgaagagttcgtcaaacgcttccacgaacctgcgaaggacatcggcttcaacgtcgccgtccttctgacaaacctctctgagcacatgcccaacgatacccgacttcagacttttctggaattagcagagagcgtcctgaattatttccagccctttctgggccgcatcgaaatcatgggaagcgccaaacgcatcgagagggtctattttgaaatcagtgagtccagccgaacccagtgggagaagccccaggtcaaggagtccaaaagacagttcatatttgacgtggtcaacgaaggcggagagaaagagaagatggaactctttgtgaacttctgcgaggacaccatctttgaaatgcagctggcggctcagatctcggagtcggacttgaacgagaggtcagcgaataaggaagaaagcgagaaggagaggccggaagagcaggggccgaggatggctttcttctccattctgacggtcaggtcggccctgtttgcgctcaggtacaatatcttgacccttatgcgaatgctcagtctgaagagcctgaagaagcagatgaaaaaagtaaaaaagatgaccgtgaaggacatggtcacggccttcttttcatcctactggagtattttcatgaccctcttgcacttcgtggccagcgttttcagaggctttttccgcatcatttgcagcctgctgcttgggggaagcctcgtcgaaggtgctaaaaagatcaaagttgcagaactgttagccaacatgccagaccccactcaggatgaggttagaggagatggggaggagggagagaggaaacccctggaagccgccctgccctccgaggatctgaccgacttaaaggagctgacagaggaaagtgaccttctttcggacatctttggcctggatctgaagagagaaggaggacagtacaaactgattcctcataatccaaatgctgggctcagtgacctcatgagcaacccagtccccatgcctgaggtgcaggaaaaatttcaggaacagaaggcaaaagaagaagaaaaggaagaaaaagaagaaaccaaatctgaacctgaaaaagccga

SEQ ID NO: 18306 - DNA, 108 bp, Homo sapiens
  source 1..108: mol_type = unassigned DNA
gacggtagaaagagtattggatatagcaaatgtgctttttcatcttgaacaggtggaacatcctcagagatctaaaaaggctgtatggcataaactactgtccaagca

SEQ ID NO: 18307 - DNA, 1425 bp, Homo sapiens
  source 1..1425: mol_type = unassigned DNA
agcttagccatctaattttttagcatgcattggaatcctcagaatttttggttgaataagaatgaattttaaaagtctccacttcttctgtggttgaaggaaaggagctccccacgagaagttcaagtgaaaatgccaaagtgacaagcctggacagcagctcccatagaatcatcgcagttcactatgtactagaggagagcagcggctacatggagcccacgttgcgtatcttagctattctgcacacggtcatttctttcttctgcatcattggatactactgcttgaaagtcccattggttatttttaagcgagaaaaggaagtggcacggaaattggaatttgatgggctttatattacagaacagccttcagaagatgatattaaaggccagtgggatagactcgtaatcaacacacagtcatttcccaacaactactgggacaaatttgttaaaagaaaggttatggataaatatggagagttctacggccgagacagaatcagtgaattacttggcatggacaaggcagctctggacttcagtgatgccagagaaaagaagaagccaaagaaagacagctccttatcagctgtactgaactccattgatgtgaagtatcagatgtggaaactaggagtcgttttcactgacaactccttcctctacctagcctggtatatgactatgtctgttcttggacactataacaactttttttttgccgctcaccttctcgacattgctatgggattcaagacattaagaaccatcttgtcctcagtaactcacaatggcaaacagctcgtattaaccgttggcttattagctgttgttgtatacctatacactgtggtggcattcaattttttccgaaaattctacaataaaagtgaagatggtgatacaccagatatgaaatgtgacgatatgctaacatgctatatgttccacatgtatgttggagttcgtgctggaggagggatcggggatgaaatcgaagacccagcaggagatgaatatgagatctatcgaatcatctttgacatcactttcttcttctttgttattgtcattctcttggccataatacaaggtctaattattgatgcttttggagaactaagagaccaacaggaacaagtcaaagaagacatggaggttttttctgatgtatcttataaacaaagatgaaacagaacacacaggacaggaatcttatgtctggaagatgtatcaagaaaggtgttgggaatttttcccagcaggggattgcttccggaaacagtatgaagaccagctaaattaaactcagacccaatcacctctaaaaaccaaaaccctacccctctctctccctctctcaatttctctgctctcttggaaacattttgctgattttgtgaattgccagcgttgt

SEQ ID NO: 18308 - DNA, 567 bp, Homo sapiens
  source 1..567: mol_type = unassigned DNA
ggtggggtcagcctcaccgaaacaaacagcatggctgccacctacggactgaactccattgatgtgaagtatcagatgtggaaactaggagtcgttttcactgacaacgtaagcctacttcattatcacaaaagaaaatgcactctgattagataagactgtgggagttctgcagatggaaggctggttatttagaaaatgtttcgaataccaattcatttcatacagaccagatctggagagagacccacagaatgatatgattaatgagcccatctctcattccatttctttcaatagctgaaatagtaaaatgaaaatatatgaaaaactgagatgcagatttgtgagtacgttcattaaggttttaattggacaatggcatacttcagttttatagatgttaaaaagaaactcctaaataattttaaaagaacattaattgtgctaaatttaggttttccccaaattaagtacattaacttatggagttttattttattttttttattctccttttaccaaagagcctttggagactaaatatagggccgtaatatatatcca

SEQ ID NO: 18309 - DNA, 802 bp, Homo sapiens
  source 1..802: mol_type = unassigned DNA
aactgtagatgggatgtctcatagcttggtatttgatttggccttttctaaaggaaagtaatctgtacctattcccccttggtcgtccgactttgtttgggtgggtactaagtttgtagtttcagttgaagacacagttaatcctgcttagataactttagtcaatgtcatgaacaagagttgatcactaagcctggacattttcacctaggctagagaaaggaagagacgttgcttttcagccatcatcatcatcatcttgttccctgtctgcgtctgctacttcttgctgctggtacctgtgtcatttaagccaacaccaagatatagttacagcgacagttccatttatattcgtgggcttggcacagcctccatgtgatgatctttgacgtgtattgagtgaaccaaataatagctgcccctacatggcgagttgtgttttccttttgttttgctttctgaactctgacgttaatatttccctttgttttctagaccaaatgcttcatctgtgggataggcaatgattacttcgacacagtgccacatggctttgaaacccacactttacaggagcacaacttggctaattacttgttttttctgatgtatcttataaacaaagatgaaacagaacacacaggacaggaatcttatgtctggaagatgtatcaagaaaggtgttgggaatttttcccagcaggggattgcttccggaaacagtatgaagaccagctaaattaaactcagacccaatcacctctaaaaaccaaaaccctacccctctctctccctctct

SEQ ID NO: 18310 - DNA, 14850 bp, Homo sapiens
  source 1..14850: mol_type = unassigned DNA
gatgatgaagtggttctgcagtgcaccgcaaccatccacaaagaacaacagaagctatgcttggcagcagaaggatttggcaacagactttgtttcttggagtccacttccaattccaagaatgtgcccccagacctctccatctgcacctttgtgctggagcagtccctctctgtccgggcgctgcaggagatgctggctaacaccgtggagaaatcagaagggcaagttgatgtggaaaaatggctcttctctctaaagactgctcaaggtggtggtcatcgaacactcctctacggacatgccatattgctgcgccattcctatagtggcatgtatctgtgctgcctgtccacctcccggtcttcaactgataagctggcttttgatgttggcttgcaagaggacaccacaggggaggcttgttggtggaccatacaccctgcctctaagcagcgatcagaaggagaaaaagtacgagttggagatgacctcatcttagttagcgtgtcctctgaaaggtacttgcacttgtcttatggcaacggcagcttacacgtggatgccgctttccagcagactctctggagcgtggccccaatcagctcaggaagtgaggcagcccaagggtatctcattggtggtgatgtcctcaggttgctgcatggacacatggacgagtgtctcactgtcccttcaggagaacatggtgaagagcagcggagaactgttcattatgaaggtggcgctgtgtctgttcatgcacgttccctttggagactagagacgctaagagttgcgtggagtggaagccacataagatggggacagccattccgactacgccatgtcacaacaggaaaatacttgagtctcatggaagacaaaaaccttctactcatggacaaagagaaagctgatgtaaaatcaacagcatttaccttccggtcttccaaggaaaaattggatgtaggggtgagaaaagaagtagatggcatgggaacatctgaaataaaatacggtgactcagtatgctatatacaacatgtagacacaggcctatggcttacttaccagtctgtggacgtgaaatccgtgagaatgggatctatacaacgtaaggctattatgcatcatgaaggccacatggatgatggcataagtttgtcgagatcccagcatgaagaatcacgcacagcccgagttatccggagcacagtcttccttttcaatagatttataaggggccttgatgctctcagcaagaaagcgaaggcttccacagtcgatttgcctatagagtccgtaagcctaagtctgcaggatctcattggctacttccaccccccagatgagcatttagagcatgaagacaaacagaacagactacgagccctgaagaatcggcaaaatctcttccaggaagagggaatgatcaacctcgtgcttgagtgcatagaccgtttgcacgtctacagcagtgcagcacactttgctgatgttgctgggcgagaagcaggagagtcttggaaatccattctgaattctctgtatgagttgctggcggctctaattagaggaaatcgtaaaaactgtgctcaattttctggctccctcgactggttgatcagcagattggaaagactggaagcttcttcaggcattctggaagttttacactgtgttttagtagaaagtccagaagctctaaatattattaaagaaggacatattaaatctattatctcacttttagacaaacatggaagaaatcacaaggttctggatgtcttgtgctcactctgtgtttgccacggggttgcagtccgttctaaccagcatctcatctgtgacaatctcctaccaggaagagacttgttattgcagacacgtcttgtgaaccatgtcagcagcatgagacccaatatttttctgggcgtcagtgaaggttctgctcagtataagaaatggtactatgaattgatggtggaccacacagagccctttgtgacagctgaagcaactcacctgcgagtgggctgggcttccactgaaggatattctccctaccctggagggggcgaagagtggggtggaaatggtgttggagatgatctcttctcctatggatttgatggccttcatctctggtcaggttgtattgctcgtactgtaagctcaccaaaccaacatctgttaagaactgatgatgtcatcagttgctgtttagatctgagtgccccaagcatctcgttccgaattaatggacaacctgttcaaggaatgtttgagaatttcaacatcgatggcctcttctttccagtcgttagtttctctgcaggaataaaagtacgctttctgcttggagggcgacatggagaattcaaatttcttcctccacctgggtatgctccttgttatgaagctgttctgccaaaagaaaagttgaaagtggaacacagccgagagtacaagcaagaaagaacttacacacgcgacctgctgggccccacagtttccctgacgcaagctgccttcacacccatccctgtggataccagccagatcgtgttgcctcctcatctagaaagaataagagaaaaactggcagagaatatccatgaactctgggttatgaataaaattgagcttggctggcagtatggtccggttagagatgacaacaagagacaacacccatgcctggtggagttctccaagctgcctgaacaggagcgcaattacaacttacaaatgtcgcttgagaccctgaagactttgttggcattaggatgtcatgtgggtatatcagatgaacatgctgaagacaaggtgaaaaaaatgaagctacccaagaattaccagctgacaagtggatacaagcctgcccctatggacctgagctttatcaaactcaccccatcacaagaagcaatggtggacaagttggcagaaaatgcacataatgtgtgggcgcgggatcgaatccggcagggctggacttatggcatccaacaggacgtaaagaacagaagaaatcctcgccttgttccctacactcttctggatgaccgaaccaagaaatccaacaaggacagcctccgcgaggctgtgcgcacgctgctggggtacggctacaacttggaagcaccagatcaagatcatgcagccagagccgaagtgtgcagcggcaccggggaaaggttccgaatcttccgtgccgagaagacctatgcagtgaaggccggacggtggtattttgaatttgagacggtcactgctggagacatgagggttggttggagtcgtcctggttgtcaaccggatcaggagcttggctcagatgaacgtgcctttgcctttgatggcttcaaggcccagcggtggcatcagggcaatgaacactatgggcgctcttggcaagcaggcgatgtcgtggggtgtatggttgacatgaacgaacacaccatgatgttcacactgaatggtgaaatccttcttgatgattcaggctcagaactggctttcaaggactttgatgttggcgatggattcatacctgtgtgtagccttggagtggctcaagtgggtaggatgaactttggaaaggatgtcagcaccttgaaatatttcaccatctgtggcttacaagagggctatgaaccatttgccgttaatacaaacagggatattaccatgtggctgagcaagaggcttcctcagtttcttcaagttccatcaaaccatgaacatatagaggtgaccagaatagacggcaccatagacagttccccatgtttaaaggtcactcagaagtcttttggttctcagaacagcaacactgatatcatgttttatcgcctgagcatgccgatcgagtgcgcggaggtcttctccaagacggtggctggagggctccctggggctggcctttttgggcccaagaatgacttggaagattatgatgctgattctgactttgaggttctgatgaagacagctcatggccatctagtgcccgatcgtgttgacaaagacaaagaagctactaaaccagagtttaacaaccacaaagattatgcccaggaaaagccctctcgtctgaaacaaagatttttgcttagaagaacaaagccagattacagcacaagccattctgcaagactcaccgaagatgtccttgctgatgatcgggatgactatgatttcttgatgcaaacgtccacgtactattactcagtgagaatctttcctggacaagaacctgctaatgtctgggtgggctggattacatcagatttccatcagtatgacacaggctttgacttggacagagttcgcacagtaacagttactctaggagatgaaaaaggaaaagtgcatgaaagcatcaaacgcagcaactgctatatggtatgtgcgggtgagagcatgagccccgggcaaggacgcaacaataatggactggagattggctgtgtggtggatgctgccagcgggctgctcacattcattgccaatggcaaggaactgagcacatactatcaggtggaaccgagtacaaaattatttcctgcggtttttgcacaagctacaagtcccaatgttttccagtttgagttgggaagaataaagaatgtgatgcctctctcggcgggattattcaagagtgagcacaagaaccccgtgccgcagtgccccccgcgcctccacgtgcagttcctgtcacacgtcctgtggagcagaatgcccaaccagtttttgaaggtagatgtgtctcgaataagtgaacgccaaggctggttggtgcagtgtttggatcctctgcagttcatgtctcttcatatccctgaggaaaacagatctgttgacatcttagagttgacagagcaggaggaattgctgaaatttcactatcacactctccggctctactcagccgtctgtgctcttgggaaccaccgggtggcccatgccctgtgcagccatgtggatgaacctcagctcctctatgccattgagaacaagtacatgcctggtttgctgcgtgctggctactatgacctgctgattgacatccacctgagctcctatgccactgccaggctcatgatgaacaacgagtacattgtccccatgacggaggagacgaagagcatcaccctgttccctgatgagaacaaaaaacacggccttccagggatcggcctcagcacctccctcaggccacggatgcagttttcctcccccagttttgtaagcattagtaatgaatgttaccagtacagtccagagttcccactggacatcctcaagtccaaaaccatacagatgctgacagaagctgttaaagagggcagtcttcatgcccgggacccagttggagggactactgaattcctctttgtacctctcatcaagcttttctataccctgctgatcatgggcatctttcacaacgaggacttgaagcacatcttgcagttgattgagcccagtgtgtttaaagaagctgccactccggaggaggagagtgacacgctggagaaagagctcagtgtggacgatgcaaagctgcaaggagctggtgaggaagaagccaaggggggcaagcggcccaaggaaggcctgctccaaatgaaactgccagagccagttaaattgcagatgtgcctactgcttcagtacctctgtgactgccaggtccggcaccggatagaagccattgtagccttttcagatgattttgtggctaagctccaagacaatcaacgtttccgatacaacgaagtcatgcaagccttaaacatgtcagctgcactcacagccaggaagacaaaggaatttagatcaccacctcaagaacagatcaatatgcttctcaattttaaggatgacaaaagtgaatgtccatgtccagaagaaattcgtgaccaactattggatttccatgaagatttgatgacacattgtggaattgagctggatgaagatgggtctctggatggaaacagtgatttaacaattagagggcgtctgctatccctggtagaaaaggtgacatatctgaagaagaagcaagcagaaaaaccagttgagagtgactccaaaaagtcctccactctgcagcagctgatttctgagaccatggtccgatgggctcaggagtctgtcattgaagaccccgagctggtgagggccatgtttgtgttgctccatcggcagtatgacggcattgggggtcttgttcgggccctgccaaagacctacacgataaatggtgtgtccgtggaggacaccatcaacctgctggcatcccttggtcagattcggtccctgctgagtgtgagaatgggcaaagaagaagagaagctcatgattcgtggattaggggatattatgaataacaaagtgttttaccagcaccctaatctcatgagggcactggggatgcacgagactgtgatggaggtcatggtgaacgtccttggaggtggagagtccaaggaaatcacctttcccaagatggtggccaactgttgccgttttctctgttacttctgtcgtataagtaggcagaatcaaaaagctatgtttgatcatctcagttatttactggaaaacagcagtgttggtcttgcctccccagctatgagaggttcaacaccactggatgtggctgcagcttcggtgatggataataatgaactagcattagctctgcgtgagccggatctagaaaaggtagttcgttatttggctggttgtggactgcaaagttgccagatgctggtgtctaagggctatccagacattgggtggaacccagttgaaggagagagatatcttgactttcttagatttgctgtcttctgtaatggggagagtgtggaggaaaatgcaaatgtcgtggtgagattgctcattcggaggcctgagtgttttggtcctgctttgagaggagaaggtgggaatgggcttcttgcagcaatggaagaagccatcaaaatcgccgaggatccttcccgagatggtccctcaccaaatagcggatccagtaaaacacttgacacagaggaggaggaagatgacactatccacatggggaacgcgatcatgaccttctattcagctttgattgacctcttgggacgctgtgctcctgagatgcatttgattcatgccgggaagggagaagccatcagaattaggtccattttgagatccctcattcccctgggagatttggtgggcgttatcagcatcgcttttcagatgccaacaatagccaaagatgggaatgtggtggaacctgacatgtctgcggggttttgcccagatcacaaggcagccatggttttattccttgacagggtctatgggattgaggttcaagacttcctcctccatcttcttgaggttggctttctgccagatctccgggcggctgcttctttagatacggcagctttgagtgctacagacatggccttggccctcaatcggtacctttgcacagccgtcttgccattgttaacaagatgtgctcctctctttgctggcacagagcaccacgcttctctcattgactcattacttcatactgtgtatagactttctaagggctgttcacttaccaaagctcagcgggattccatagaagtttgtttactctctatttgtggacaactgagaccttctatgatgcagcacttactcagaagattagtatttgatgttccattattaaatgaacacgcaaagatgcctcttaaactgctgacaaatcattatgaaagatgctggaaatattactgcctgcctggagggtggggaaactttggtgctgcctcagaagaagaacttcatttatcaagaaagttgttctggggcatttttgatgccctgtctcaaaagaaatatgaacaagaacttttcaaactggcactgccttgcctgagtgcagttgcgggagctttgcctccagactacatggagtcaaattatgtcagtatgatggaaaaacagtcatcaatggattctgaagggaactttaacccacaacctgttgatacctcaaatattacaattcctgagaaattggaatacttcattaacaaatatgcagaacactcccatgacaaatggtcaatggacaagttggcaaatggatggatttatggagaaatatattcagactcttctaaggttcagccattaatgaagccatataagctattgtctgaaaaggaaaaagaaatttatcgctggccaatcaaagaatctttaaaaactatgctggcttggggctggagaattgaaagaactcgggagggagacagcatggccctttacaaccggactcgtcgtatttctcagacaagccaggtttctgtggacgctgcccatggttacagtccccgggccattgacatgagcaatgttacactatctagagacctgcatgctatggcagaaatgatggctgaaaactaccataatatatgggcaaagaaaaagaaaatggagttggagtccaaaggaggaggaaaccatcctctgctggtgccctatgatacactgacagccaaagagaaagccaaggatagagaaaaagcacaggacatcctcaagttcttgcagatcaatggatatgctgtatccagaggatttaaggacctggaactggacacgccttctattgagaaacgatttgcctatagtttcctccaacaactcattcgctatgtggatgaagcccatcagtatatcctggagtttgatggtggcagcagaggcaaaggagaacatttcccttatgaacaagaaatcaagttctttgcaaaagtcgttcttcctttaattgatcagtatttcaaaaaccatcgtttatacttcttatctgcagcaagcagacctctctgctctggaggacatgcttccaacaaagagaaagaaatggtgactagcctattctgcaaacttggagttcttgtcaggcataggatttcactatttggcaatgatgcaacatcaattgtcaactgtcttcatattttgggtcagactttggatgcaaggacagtgatgaagactggcctggagagtgttaaaagtgcactcagagcttttctggacaacgctgcagaggatctggagaagaccatggaaaacctcaagcagggccagttcactcacacccgaaaccagcccaaaggggttactcagattatcaattacaccacagtggccctgctgccaatgctgtcttcattatttgaacatattggccagcatcagttcggagaagacctaatattggaagatgtccaggtgtcttgttatagaattctgactagcttatatgctttgggaaccagcaagagtatttacgtggagaggcaacgttctgcattaggagaatgtctagctgcctttgctggtgcttttcctgtagcatttttggaaactcatctggacaaacataatatttactccatctacaataccaagtcttcacgagaaagagcagctctcagtttgccaactaatgtggaagatgtttgtccaaacataccgtctttggagaaactcatggaagaaatcgtggaattagccgagtccggcattcgctacactcaaatgccacatgtcatggaagtcatactgcccatgctttgcagctacatgtctcgttggtgggagcatggacctgagaacaatccagaacgggccgagatgtgctgcacagccctgaactcagagcacatgaacacacttctagggaacatattgaaaatcatatataataacttggggattgatgagggagcctggatgaagaggctagcagtgttttcccagcctataataaataaagtgaaacctcagctcttgaaaactcatttcttgccgttaatggagaaactcaagaaaaaggcagctacggtggtgtctgaggaagaccacctgaaagctgaggccaggggggacatgtcggaggcagaactcctcatcctagatgagttcaccacactggccagagatctctatgccttctaccctctcttgattagatttgtggactataacagggcaaagtggctaaaggagcctaacccagaagcagaggagctcttccgcatggtggctgaagtgtttatctactggtcgaagtcccataatttcaaaagagaagagcagaacttcgttgtacagaatgaaatcaacaatatgtctttccttattactgataccaagtcaaagatgtcaaaggcagctgtttctgatcaggaaaggaagaaaatgaagcgcaaaggagatcggtattccatgcagacctctctgattgtagcagctctgaagcggttactgcccattgggttgaacatctgtgcccctggggaccaggagctcattgctctggccaaaaatcgatttagcctgaaagataccgaggatgaagtacgagatataatccgcagcaatattcatttacaaggcaagttggaggatcctgctattagatggcaaatggctctttacaaagacttaccaaacaggactgatgatacctcagatccagagaagacggtagaaagagtattggatatagcaaatgtgctttttcatcttgaacagaagtctaaacgtgtgggtcggagacattactgtctggtggaacatcctcagagatctaaaaaggctgtatggcataaactactgtccaagcagaggaaaagggctgttgtagcctgcttccggatggcccccttatataatctgccaaggcatcgggctgtcaatctctttcttcagggatatgaaaagtcttggattgaaacagaagaacattactttgaagataaactgatagaagatttagcaaaacctggggctgaacctccagaagaagatgaaggcactaagagagttgatcctctacatcagctgatccttctgtttagtcggacagctttaacagagaaatgcaaactggaggaagattttttatatatggcctatgcagatattatggcaaagagttgtcatgatgaggaagatgacgatggtgaagaggaagtgaagagttttgaagaaaaagaaatggaaaagcaaaagcttctataccagcaagcccgactccacgatcgtggcgcggctgagatggtgctacagacaatcagtgccagcaaaggtgaaactggaccaatggtagcagctactctgaaacttggaattgctattttaaatggtgggaactccacagtacagcagaaaatgcttgactacctcaaggagaaaaaggatgtgggcttctttcagagcctggccggcctgatgcagtcatgtagtgtccttgacctaaatgcatttgagcgacaaaacaaagctgaaggtcttgggatggtgacagaggaaggatcaggagaaaaggttctgcaggacgatgagttcacctgtgacctcttccgattcctgcaactactctgtgagggacacaactcagattttcagaattatctgagaactcagactggcaataatacaactgtcaacataattatctccactgtagactacctactgagagttcaggaatcaattagtgacttttattggtattactctgggaaagatgttattgatgaacaaggacaacggaatttctccaaagctatccaagtggcaaaacaagtctttaacactcttacagagtatattcagggtccttgcactgggaatcaacagagtttggcacacagcaggctgtgggatgctgtggtcggctttcttcatgtgtttgcccatatgcagatgaagctgtcgcaggattccagtcaaattgagctattaaaagaattaatggatctgcagaaggatatggtggtcatgttgctgtccatgttagaaggtaatgttgttaatggaacgattggcaaacagatggtggatatgcttgtggaatcttccaacaacgtggagatgattctcaaattttttgacatgttcttaaaactaaaggatttgacgtcgtctgatacttttaaagaatatgaccccgatggcaagggagtcatttccaagagggacttccacaaagcgatggagagccataagcactacacgcagtcagaaacggaatttcttttgtcttgtgcggagacggatgagaatgaaaccctcgactacgaagagttcgtcaaacgcttccacgaacctgcgaaggacatcggcttcaacgtcgccgtccttctgacaaacctctctgagcacatgcccaacgatacccgacttcagacttttctggaattagcagagagcgtcctgaattatttccagccctttctgggccgcatcgaaatcatgggaagcgccaaacgcatcgagagggtctattttgaaatcagtgagtccagccgaacccagtgggagaagccccaggtcaaggagtccaaaagacagttcatatttgacgtggtcaacgaaggcggagagaaagagaagatggaactctttgtgaacttctgcgaggacaccatctttgaaatgcagctggcggctcagatctcggagtcggacttgaacgagaggtcagcgaataaggaagaaagcgagaaggagaggccggaagagcaggggccgaggatggctttcttctccattctgacggtcaggtcggccctgtttgcgctcaggtacaatatcttgacccttatgcgaatgctcagtctgaagagcctgaagaagcagatgaaaaaagtaaaaaagatgaccgtgaaggacatggtcacggccttcttttcatcctactggagtattttcatgaccctcttgcacttcgtggccagcgttttcagaggctttttccgcatcatttgcagcctgctgcttgggggaagcctcgtcgaaggtgctaaaaagatcaaagttgcagaactgttagccaacatgccagaccccactcaggatgaggttagaggagatggggaggagggagagaggaaacccctggaagccgccctgccctccgaggatctgaccgacttaaaggagctgacagaggaaagtgaccttctttcggacatctttggcctggatctgaagagagaaggaggacagtacaaactgattcctcataatccaaatgctgggctcagtgacctcatgagcaacccagtccccatgcctgaggtgcaggaaaaatttcaggtaatttatctcgtcacagcagcattctctcggagagcttatgttttgtttgtttgttttcataggggagaagatggagaaaaagaagagaaagccaaggaagacaagggcaaacaaaagttgaggcagcttcacacacacagatacggagaaccagaagtgccagagtcagcattctggaagaaaatcatagcatatcaacagaaacttctaaactattttgctcgcaacttttacaacatgagaatgttagccttatttgtcgcatttgctatcaatttcatcttgctcttttataaggtctccacttcttctgtggttgaaggaaaggagctccccacgagaagttcaagtgaaaatgccaaagtgacaagcctggacagcagctcccatagaatcatcgcagttcactatgtactagaggagagcagcggctacatggagcccacgttgcgtatcttagctattctgcacacggtcatttctttcttctgcatcattggatactactgcttgaaagtcccattggttatttttaagcgagaaaaggaagtggcacggaaattggaatttgatgggctttatattacagaacagccttcagaagatgatattaaaggccagtgggatagactcgtaatcaacacacagtcatttcccaacaactactgggacaaatttgttaaaagaaaggttatggataaatatggagagttctacggccgagacagaatcagtgaattacttggcatggacaaggcagctctggacttcagtgatgccagagaaaagaagaagccaaagaaagacagctccttatcagctgtactgaactccattgatgtgaagtatcagatgtggaaactaggagtcgttttcactgacaactccttcctctacctagcctggtatatgactatgtctgttcttggacactataacaactttttttttgccgctcaccttctcgacattgctatgggattcaagacattaagaaccatcttgtcctcagtaactcacaatggcaaacagctcgtattaaccgttggcttattagctgttgttgtatacctatacactgtggtggcattcaattttttccgaaaattctacaataaaagtgaagatggtgatacaccagatatgaaatgtgacgatatgctaacatgctatatgttccacatgtatgttggagttcgtgctggaggagggatcggggatgaaatcgaagacccagcaggagatgaatatgagatctatcgaatcatctttgacatcactttcttcttctttgttattgtcattctcttggccataatacaaggtctaattattgatgcttttggagaactaagagaccaacaggaacaagtcaaagaagacatggagaccaaatgcttcatctgtgggataggcaatgattacttcgacacagtgccacatggctttgaaacccacactttacaggagcacaacttggctaattacttgttttttctgatgtatcttataaacaaagatgaaacagaacacacaggacaggaatcttatgtctggaagatgtatcaagaaaggtgttgggaatttttcccagcaggggattgcttccggaaacagtatgaagaccagctaaat

SEQ ID NO: 18311 - DNA, 15591 bp, Homo sapiens
  source 1..15591: mol_type = unassigned DNA
ggaggaggagaaagagcgcagcagcagtcagcgcacgccgagcggctgccgggggaagcagaggcgccggaggctggggcaccgccgacgcctcgggagccatggccgaagggggagaaggaggcgaggacgagatccagtttctgaggactgaggatgaagtggtactccagtgcatcgccaccattcataaggagcagaggaagttctgcctggcagccgagggacttgggaatcgcctgtgcttcttggaacccacttcagaagccaagtacattcctccagatctctgcgtctgcaattttgtgctggaacagtccctatctgtcagagccctgcaggaaatgcttgccaacacaggtgaaaatggcggcgaaggggcagcacaaggaggtggccacaggaccctgttatacggccatgcagttctcctgaggcactctttcagcggaatgtatctaacatgcttgactacatcaagatcccagacagacaaacttgcctttgatgtaggtctacgggaacatgccacaggagaagcctgttggtggactatacatcctgcttccaaacagaggtccgaaggagagaaagttcgaattggcgatgacctcatcctcgtcagcgtgtcctctgaaagataccttcatctctcagtatcaaatggtaacatacaagtggatgcctcctttatgcaaacactctggaatgtacatcctacgtgctcaggaagtagcatcgaagaaggatacctacttggtgggcatgtagtacgtcttttccatggtcatgatgaatgtttgacgataccatctacagaccagaatgattcccagcacaggaggatattctacgaagctgggggagctgggactcgagccaggtctctttggagagtggaaccccttcggataagctggagtggcagtaacatcagatggggccaggctttccgactccggcatctcaccacaggccactacctggccttgacagaagaccaaggccttatactgcaagaccgggcaaagtcagacaccaagtccacagctttctctttccgggcatcaaaggaactcaaggagaaattagactccagtcacaagcgagacatagaaggcatgggagttccagaaatcaagtatggagattctgtctgctttgtgcagcatatagccagtggtctgtgggtgacctacaaagcacaagacgccaaaacttcccgcctgggacctctaaaaagaaaggtcatactccatcaggaaggccacatggatgatggattaacactgcagagatgccagcgtgaggagtcccaggctgctcggatcatccggaacactacagccttattcagccagtttgtcagcggaaacaatcgcacagctgcccccatcaccctgcctatagaagaagtcctgcagaccctacaggacttgatcgcctacttccagcccccagaggaggagatgcgacatgaagacaagcagaacaagctccgctcactcaaaaacagacaaaatcttttcaaggaagagggaatgttggcccttgtcttaaattgcattgaccgcttaaatgtctacaatagcgtagcacactttgcagggattgcaagggaagagagtggcatggcctggaaagaaattctgaacctcctctacaaattgctggctgctctcattcgcggaaacagaaacaattgcgctcaattctccaataaccttgattggctcatcagtaaattggacagactagaatcttcctcaggtatcttggaagttttgcactgcatcttaactgaaagcccagaagccttaaatctgatagcggagggccacatcaagtcgatcatctccctgttggataagcacgggcggaatcacaaggttctggatatcctgtgctccctctgtctctgcaatggggttgcagtgagagccaaccagaatctgatctgtgacaacttgctgccccggagaaacctactcctgcagacacgactgattaacgatgtaaccagtatccggccaaacatcttcctgggagtcgcggagggctcagcccagtacaagaagtggtacttcgagctgattatcgaccaggtggaccccttcctaacagcagagcccacacatctgcgggtgggctgggcctcttcttcaggctatgccccatacccaggaggtggagaaggatggggaggcaatggtgttggtgacgacctgtactcctatggctttgatggacttcacctttggtcaggccggatacccagagctgtggcttccatcaaccagcacctcctgagatcggatgacgtggtaagctgctgcctggacctcggggtgcccagcatctcattccgcatcaatgggcagcccgtgcaggggatgtttgagaacttcaacacagacgggctcttcttccctgtgatgagcttttcagcaggtgtcaaagtacgtttcctgatgggtggacgtcatggagagtttaagttcctgcctccctctggctatgccccttgctatgaagccttacttccaaaagagaagatgagattggagcctgtcaaagaatataaacgtgatgctgatggcattagagatctcttgggtaccacccagttcctctcccaagcctctttcatcccatgccccgtagacaccagtcaggttattttgccacctcacctagaaaagatccgagacagactagctgaaaacatccatgagctttggggaatgaataaaatagaacttggctggactttcggcaagatacgagatgacaataaaagacaacacccttgccttgtggagttttcaaagctcccagaaactgagaagaactataacctgcaaatgtcaactgaaaccttaaaaaccctcttggccctggggtgccacattgctcatgttaacccagctgctgaggaggatctcaagaaggtcaaactgcccaaaaactatatgatgtccaacggctataagccagcccctttggatttgtctgatgtgaagctgttacctcctcaagaaattttagtggataagcttgcagaaaatgcacacaatgtttgggcaaaagacagaataaaacaaggatggacctatggcatccaacaggatttgaagaacaaaagaaatccccgtctggtgccatatgcattactggatgagcgtaccaagaagtcaaacagggacagcctgcgggaagctgtgcgcacttttgttggttacgggtataacattgagccatcagaccaagaactagctgactcggctgtggagaaggtcagcatagacaagatccgatttttccgggtagagcgatcttatgcagtgagatctggaaagtggtattttgagtttgaagtggtgactggaggagacatgcgagtcggctgggcgaggccaggctgtcgacctgatgtcgagctgggggccgatgaccaagcctttgtgtttgaaggcaacaggggccagcgttggcatcaaggaagtgggtattttgggcgtacctggcagccaggggatgtggtcggatgtatgattaacctggatgatgcttcaatgatcttcacactgaatggggagctgctgatcaccaacaaaggctctgaacttgccttcgctgactacgagattgagaatggcttcgtgcccatctgctgtctgggtctatctcagatcggccgcatgaatctcgggacagatgccagtaccttcaagttttataccatgtgcggtctccaagagggctttgagccttttgctgtcaacatgaacagagatgttgctatgtggttcagcaagcgcctcccgacgtttgtcaacgtgccaaaggatcatccacacatagaggtcatgaggattgatggcaccatggacagccctccgtgtctcaaggtgacgcataagacatttggcacacagaatagcaatgccgacatgatctattgccgcttgagcatgcctgtcgagtgccactcctccttcagccacagcccctgtctggacagtgaagctttccagaaaaggaaacagatgcaagaaatactctctcatacaacaacacagtgctactacgccatccgcatctttgctggacaggatccatcctgtgtctgggtcggatgggtgactccagactatcacttgtacagtgaaaagtttgacctgaataaaaactgcacagtgactgtcaccctaggggatgaaagaggccgggtccatgaaagtgtgaaacgcagcaactgctacatggtctggggtggagacattgtagccagttcccagagatcaaatcggagcaacgtggacctggagatcggctgtctcgtggatctggccatgggcatgttgtccttctcagccaatggaaaggaactgggcacctgctaccaggtggagcctaataccaaagtgtttccagcagtcttcctgcagcctacaagtacttctttgtttcagtttgaacttggaaagctgaagaacgcaatgcccctgtcagcggccatattcaggagtgaagagaagaacccagtcccacagtgtccacctcggctggacgtccaaaccatccagcccgtgctctggagccgcatgcccaacagcttcctgaaggtggagaccgagcgtgtgagcgagcgccacggctgggtggtgcagtgcctggagcccctgcagatgatggcgctccacatccccgaggagaacaggtgtgtggatatcctggagctctgtgagcaggaggacctgatgcggttccattaccacacgctgaggctctacagcgcggtgtgcgccctgggaaacagccgcgtggcctacgccctgtgcagccacgtggacctctcccagctcttctatgccattgacaacaagtacctccccggcctccttcgatctggtttctatgacctgctcatcagcatccacctggccagcgccaaggagaggaagctgatgatgaagaacgagtacatcatccccattaccagcaccaccaggaatatccgcctcttcccggacgagtccaagaggcatggactgcctggggtgggcctgagaacatgtctcaagcccgggttcaggttctccaccccttgctttgttgtgactggtgaggatcaccaaaagcagagccccgagattcccttggagagtctcaggacgaaggctctgagtatgctgacagaggcagtgcagtgcagcggggcccacatccgagaccctgtaggggggtctgtggagttccagtttgtgcctgtgctgaaactcattggaaccctgctggtcatgggcgtgtttgatgatgatgatgttcggcagatcctcctcctgattgatccctctgtgtttggggagcatagtgcggggacagaggagggagcagaaaaggaggaagtgacccaggtggaggagaaggctgtggaggctggggagaaggccggcaaggaggctcctgtcaaaggcttgttgcagactcgattacccgaatccgtcaagctgcagatgtgtgagctcctcagctatctctgcgactgtgagctgcagcaccgagtggaggccattgtggcatttggtgacatttatgtctccaagctgcaggcaaatcagaagttccgctacaatgagctcatgcaggccctgaacatgtctgcggccctgactgcccggaagaccaaggagttccgctcacccccacaggagcagatcaacatgctgcttaactttcaactgggagagaactgcccctgcccagaggagattcgggaggagctgtatgatttccatgaggaccttctccttcactgtggggttcctttggaagaagaggaagaggaggaggaggacacctcctggacaggaaaactctgtgccttggtttacaaaatcaaaggcccacccaagccagagaaggagcagccgacggaggaggaggagagatgccccacaacattgaaggaactcatctcacagacgatgatctgctgggcccaggaggaccagatccaggattcagagctggtccgaatgatgttcaacctcctccggaggcagtatgacagcattggggagctgctgcaggcgctgcggaagacctacaccatcagccacacctctgtaagcgacaccatcaacctgctggctgccctgggccaaatccgctccctcctcagtgtcaggatgggcaaggaagaggagttgctcatgatcaatgggctgggagacataatgaacaacaaggtgttttaccagcatcccaacctcatgagagtcctgggcatgcacgagacggtgatggaggtgatggtgaacgtgttgggtacagagaaatctcagattgcatttccaaagatggttgctagctgctgccgtttcctttgctatttctgtcgaattagccggcaaaatcagaaggccatgtttgagcatctgagttatcttctggagaatagcagtgttggcctagcctccccgtcgatgaggggatccaccccgctggatgtggcagcttcctctgtgatggacaacaatgagttagcgctgagcttagaggaaccagacctcgagaaggtggtgacctacttggcaggctgtggcctacagagctgccccatgcttctggccaaaggataccctgatgtcggctggaaccccattgaaggggaacgctacctgtccttcctgaggtttgctgtcttcgtgaacagtgagagtgtggaagaaaacgccagcgttgtggtcaagctgctcatcagacgcccagagtgcttcggcccggccctgcggggtgaggggggaaacgggctcttggcagccatgcagggtgccattaagatctctgagaacccagcgctcgacctcccctctcaaggatacaaaagagaagtcagcacgggggacgatgaagaggaagaagaaatcgtgcatatgggcaatgcaattatgtcattttattcggcccttatagatctactgggccgctgtgctcctgaaatgcacctcatccagacaggaaagggggaagccatccgcatcaggtccatcctgcgctccctggtccccacagaagacctggttgggatcatcagcatccccttgaaactgccctccctcaacaaagatgggtcggtcagtgagccagatatggcggccaatttctgccctgaccacaaggcacctatggtgctgttcttggaccgcgtttatggcattaaggatcaaacttttctgctccacttgctggaggttggatttttacctgacctaagagcttctgcctctctagatacagtttccctaagcaccacagaggctgcgcttgcactaaataggtatatatgttctgctgtgctcccgctcctcacaagatgtgcccctctctttgccggaacagaacactgcacctctctgattgattccacactgcagacaatatacaggctatccaagggacgttccctcaccaaagcacaaagggacactatagaagaatgtttgcttgccatttgcaatcacttgaggccttccatgttacagcaactcctgcgacgcctcgtttttgatgtgccgcaactcaatgaatactgcaaaatgcctctcaagcttctgacgaatcactatgaacagtgttggaagtattactgcctgccttcaggatgggggagctacgggctagctgtggaagaagagctgcacctaacggagaagcttttctgggggatttttgactcgctctcccataagaaatatgacccagatcttttccgaatggccctgccttgtctcagtgctatagctggggccttgccaccagattatttagataccagaatcacagccacgttggagaaacagatctcagtggatgcggatggcaactttgacccaaaacctattaacaccatgaatttttccttgcctgaaaaattggaatacatcgtcaccaagtatgctgagcattcacatgataaatgggcctgtgacaagagtcagagtggatggaaatatgggatttccctggatgaaaatgtgaagacccacccactgataaggcctttcaagacattaacggagaaggagaaggaaatttatcgctggcctgcgcgagagtccctgaaaaccatgctggctgtgggctggactgtggagaggaccaaagagggagaagctttggttcaacagcgggaaaatgagaagcttcgaagtgtgtcccaggccaaccagggcaacagctacagtcctgctcccctcgacctctcaaacgttgtgctctccagagagctccagggaatggtggaggtcgtggctgagaactatcacaatatctgggccaagaagaagaagctggagctggagagcaaaggtggtggcagccaccctcttctggtaccatatgacaccttgactgccaaggaaaagttcaaggaccgggagaaggcacaggacctgtttaagttcctccaagtgaatggcatcatagtttccaggggtatgaaggatatggagctggatgcctcctccatggagaagaggtttgcctataagttcttgaagaagatcctgaaatacgttgattctgctcaagaatttattgcccatttagaagccattgtcagcagtgggaaaactgaaaagtctccccgtgaccaggagatcaaattctttgccaaagttctcctcccgctggttgaccagtacttcaccagtcattgcctctacttcttgtcatcccctctgaagccccttagcagcagcggatatgcctcccataaggagaaagaaatggtggccggcctgttctgcaaacttgccgctctcgttagacacagaatttccctctttggtagtgattctactacaatggtgagctgtcttcacatcttagctcagacacttgacacaaggactgtcatgaagtcaggctcagagctggtgaaggctgggttacgagcattctttgaaaatgctgcagaagatttggagaagacttcagaaaacctgaaacttgggaagttcacccattcccgaacgcagattaaaggcgtttctcagaatattaactacactacagtggctctgctccccatcctgacgtccatctttgagcacgtcactcagcatcagtttggaatggatctactcttgggtgatgtgcagatttcatgctaccacatactgtgcagcctctactcccttgggacgggaaagaacatttatgttgaaaggcaacgccctgcccttggagaatgtctggcctcgctggcagctgccataccagtggcattcctggagcccacccttaatcgctacaatccactctcggtcttcaacaccaaaacccccagggagaggtctattctggggatgccagacacggtagaagacatgtgtcctgacatcccccagctggaaggcctgatgaaggaaatcaacgacctggccgagtcaggggcccggtacacagagatgccccatgtcatcgaggtgatcttacccatgctctgcaactacttgtcctactggtgggagcggggtcctgagaacctgccccccagcacagggccatgctgcaccaaggtcacctctgaacacctcagtctcatcctgggcaacattctgaaaatcatcaacaacaacctgggcatcgatgaggcctcctggatgaagcgcattgcagtgtatgcacagcccatcatcagcaaagccaggcccgacctgctgagaagccacttcatcccaactctggagaagctgaagaaaaaggctgtcaagacggtgcaggaggaggagcagttgaaagccgatggcaaaggggacacccaggaggcagaactcctcatcctggacgagttcgcggtcctctgcagagatctctatgccttctaccccatgctgatccgctacgtggacaacaacagatctaactggctgaaaagtcctgatgctgattctgaccagctcttccgcatggtggcagaagtcttcattctgtggtgtaaatctcataacttcaagagagaagagcaaaattttgtgattcagaatgaaattaataatttggcatttttaactggagacagcaaaagcaagatgtcaaaagccatgcaagtaaagtctggaggacaagaccaggagcggaagaagacaaagcggcggggagacttgtattccatccagacctccctcatcgtggctgcactcaagaaaatgctgcccattggtttgaatatgtgtactccaggcgaccaggagctgatctccctcgcaaaatcgcgatacagccatagggacacagatgaagaggtcagagaacatctgcggaacaacttgcacttgcaggaaaagtctgatgacccagctgtaaaatggcaactgaacctctacaaggatgttctgaagagtgaagaacctttcaatccggaaaagacagtggagcgtgtgcagagaatttcagcagctgtcttccacctggaacaggtggaacagcctttgaggtccaagaaggccgtctggcacaaactgttatcaaagcaacggaaacgggcagtggtggcctgtttcaggatggcccctctctacaacctgcccaggcaccgctctattaacctcttcctccatggctatcagagattttggatagaaacagaggagtattcctttgaagagaaactagtacaggatttggctaaatctccaaaggtggaagaggaggaggaggaagagacagaaaaacaacctgacccactacatcagatcattctctattttagccgcaacgctctcacggagaggagcaaattggaagacgaccctttgtacacctcctattccagcatgatggccaagagttgtcaaagtggtgaggatgaagaagaagatgaagacaaggaaaaaacattcgaagagaaagagatggagaagcaaaaaaccctctatcagcaagctcggctgcatgagcgtggtgctgcagagatggtccttcagatgataagcgctagcaaaggtgagatgagccccatggtggttgagacgctgaagctggggatcgccattctgaacggaggcaatgctggtgtgcaacagaaaatgctagattacctaaaggagaaaaaggatgctggattctttcaaagcctttctggtcttatgcagtcttgcagtgtccttgatttgaatgcatttgagaggcagaataaagctgaaggcctggggatggtgactgaagaaggaacactcattgttcgggaacgtggtgaaaaagtactccagaatgacgagttcacgcgtgatctctttagattcctacagttactttgtgagggacataacagtgactttcagaacttcctgcggactcagatgggcaacaccaccaccgtgaatgtcatcatcagcactgtggactaccttctgcgtctgcaggaatcaatcagtgatttctactggtattattcagggaaggacatcattgatgaatctggacagcacaatttttccaaagctctggcagtcaccaagcagattttcaattctcttacagaatacatccagggcccttgcattggtaatcaacagagcctggctcacagcaggctgtgggacgcagtggttggcttcctccatgtctttgctaatatgcagatgaaactctctcaggattccagtcagatcgagctgctgaaggaactcttggatctccttcaggacatggtggtgatgcttctgtccctcctggaagggaatgtggtaaatggcaccattggcaagcagatggttgacacactggtagaatcatctaccaatgtagaaatgatcttgaaattctttgacatgttcttgaaacttaaagacttaaccagctcagacaccttcaaagaatatgacccagatggtaaaggaattatctccaaaaaagaattccagaaggccatggaagggcaaaaacagtacacgcagtcagagattgactttctcctgtcgtgtgcagaagctgatgagaatgacatgtttaattacgttgattttgtagaccggttccatgagccagccaaggacatagggtttaatgtggctgtgttattgacaaatctttctgaacacatgccaaacgattcccgcctgaagtgtctgttggacccagcagaaagtgtgctaaattacttcgaaccctacctaggacgcatcgagatcatgggtggggccaagaagattgagcgtgtttattttgagatcagtgaatccagtcgcactcagtgggagaagccccaggtgaaggaatctaagcgacagttcatttttgatgttgtcaatgaaggtggggagcaggaaaagatggagctgtttgtgaacttctgtgaggacaccatctttgaaatgcagttagcatctcagatctctgaatccgattcagctgacaggccagaagaggaggaagaagatgaagattcttcttacgtgttagaaattgcgggtgaagaggaagaagacgggtctcttgagccggcctctgcatttgctatggcctgtgcctctgtgaagaggaatgtcaccgacttcctgaagagagcaaccctgaagaacctcaggaagcagtacaggaacgtgaaaaagatgactgcgaaggagctggtgaaggtgctcttctcctttttctggatgctgttcgtggggctattccagttgctcttcaccatcctgggaggaatctttcagatcctctggagcacagtgtttggagggggcctggtagaaggggcaaagaacatcagagtgaccaagatcctgggtgacatgcctgacccaacccaatttggtatccatgatgacactatggaggctgagagggcagaggtgatggagccaggtatcaccactgaactagtacacttcataaagggggagaagggagatacagatatcatgtcagacctctttggactccacccaaagaaagagggcagcttaaagcatgggcctgaagtgggtttgggtgacctctcagaaattattggcaaggatgaaccccctacattagagagtactgtacagaagaagaggaaagctcaggcagcagaaatgaaagcagcaaatgaagcagaaggaaaagtagaatccgagaaggcagacatggaagatggagagaaggaagacaaagacaaagaagaggagcaagctgagtacctgtggacagaagtgacaaaaaagaagaagcggcggtgtggtcagaaggttgagaagccggaagctttcacagccaatttctttaaagggctggaaatctatcagaccaagttactgcattacctggccaggaatttctacaacctgaggttccttgctctgtttgtagccttcgctatcaacttcatcctgcttttttataaggtcactgaagaacctttagaagaagagacagaggatgttgcaaacctatggaattcctttaatgacgaggaagaggaagaagcgatggtattctttgtccttcaggagagcaccgggtatatggcaccaaccctgcgtgccctggccatcatccataccatcatctctctagtctgtgtggtgggctactactgcctgaaggtgcctttggtggttttcaaaagggaaaaagaaatcgccaggaagctggagtttgatggcctatatatcaccgaacagccatctgaagatgacatcaaggggcagtgggaccgcttggtgatcaacacaccatcttttcctaataactactgggacaagtttgtaaagagaaaggtgatcaacaagtatggagatctctacggagcagaacgcattgctgaacttctgggtttggacaaaaatgctcttgactttagcccagtagaagagaccaaagcagaagcggcttctctggtgtcatggctaagttccatagacatgaagtaccatatctggaagcttggagttgtttttactgacaactcctttctctaccttgcctggtatacaaccatgtcagtcctgggccactacaataacttcttctttgctgctcacctattggacatcgcaatgggcttcaagacactgaggaccattctgtcatctgtaactcacaatggcaaacagttggttctgactgtcggtctcctggccgtggtggtttatctctatactgtggtggctttcaacttcttccgcaagttctacaacaaaagcgaagacgatgacgagcccgatatgaagtgcgacgacatgatgacgtgttaccttttccacatgtacgtgggagtgagagcaggaggtggcattggtgatgaaattgaagaccctgctggtgatccttatgaaatgtatcgcattgtctttgacattacctttttcttcttcgtcattgtcatcttgctggccatcattcaaggtcttattattgatgctttcggagagctaagagaccagcaggaacaagtacgagaagatatggagactaaatgtttcatctgtgggattggcaatgactactttgacacaacccctcatggttttgaaacacatacattacaagagcacaacttagccaactacttgttctttctgatgtatttgattaataaagatgaaacagagcacacgggtcaggaatcttatgtctggaagatgtaccaagaaaggtgttgggatttcttcccagccggtgactgctttcgtaaacaatatgaagatcagcttggataaatctgaatcaaagaagcgcgacaattctggacagtcaacttcccatgaaataaagtcccctttttacagttctgcaacatatctgaaatgtgacattttctaaatgcctcccttaaaaaaaaaactgctgaaaatctgtgctattttgaaattgatttggctttttgtgcctaatggacatacactgtgggagagaacctgtcaaaatgtcgaagaaggaaggcgaagaatcaagtaatctctaggcaaatgccttcaagttttccagttctgaggtaactagttcagtttgttgggatggaagcatgaaggaaagggctagagaagtatgaaatctcgaatgtgtaatacctgaaaatttaaacacttgaatgtcatcatggtatccaacttgtgactcatagggtctgaactcactccaaaagataataactgcagtctaatttttcccatggtacttgctagtgactgtatccagaaaagctttaagcagttaaagaaacagaaaaaaaccgacactttgtcgacactgaaatatcgattaagtgccttaaaacctctttagacatagctatgcaagttttttatgtttgtgttccagaaggacagttccattcattagttgtgatcttccgtcttactttatgaaactgcacttgaaggttattcatacaagtttttttagtaacagctgtcagtcaactgctgttattagaagaaaagtactgtactgaaaattcagaaaaaaaatctcaaccttatgccaaaatggagtaatgctttatggtcccttgtaagtagtggagctgctctgtttaggtgaatctcctcaaatacaatgaagtgcccactgcaataaagtaatacgtaccaatac

SEQ ID NO: 18312 - DNA, 15557 bp, Homo sapiens
  source 1..15557: mol_type = unassigned DNA
gcagcagcagtcagcgcacgccgagcggctgccgggggaagcagaggcgccggaggctggggcaccgccgacgcctcgggagccatggccgaagggggagaaggaggcgaggacgagatccagtttctgaggactgaggatgaagtggtactccagtgcatcgccaccattcataaggagcagaggaagttctgcctggcagccgagggacttgggaatcgcctgtgcttcttggaacccacttcagaagccaagtacattcctccagatctctgcgtctgcaattttgtgctggaacagtccctatctgtcagagccctgcaggaaatgcttgccaacacaggtgaaaatggcggcgaaggggcagcacaaggaggtggccacaggaccctgttatacggccatgcagttctcctgaggcactctttcagcggaatgtatctaacatgcttgactacatcaagatcccagacagacaaacttgcctttgatgtaggtctacgggaacatgccacaggagaagcctgttggtggactatacatcctgcttccaaacagaggtccgaaggagagaaagttcgaattggcgatgacctcatcctcgtcagcgtgtcctctgaaagataccttcatctctcagtatcaaatggtaacatacaagtggatgcctcctttatgcaaacactctggaatgtacatcctacgtgctcaggaagtagcatcgaagaaggatacctacttggtgggcatgtagtacgtcttttccatggtcatgatgaatgtttgacgataccatctacagaccagaatgattcccagcacaggaggatattctacgaagctgggggagctgggactcgagccaggtctctttggagagtggaaccccttcggataagctggagtggcagtaacatcagatggggccaggctttccgactccggcatctcaccacaggccactacctggccttgacagaagaccaaggccttatactgcaagaccgggcaaagtcagacaccaagtccacagctttctctttccgggcatcaaaggaactcaaggagaaattagactccagtcacaagcgagacatagaaggcatgggagttccagaaatcaagtatggagattctgtctgctttgtgcagcatatagccagtggtctgtgggtgacctacaaagcacaagacgccaaaacttcccgcctgggacctctaaaaagaaaggtcatactccatcaggaaggccacatggatgatggattaacactgcagagatgccagcgtgaggagtcccaggctgctcggatcatccggaacactacagccttattcagccagtttgtcagcggaaacaatcgcacagctgcccccatcaccctgcctatagaagaagtcctgcagaccctacaggacttgatcgcctacttccagcccccagaggaggagatgcgacatgaagacaagcagaacaagctccgctcactcaaaaacagacaaaatcttttcaaggaagagggaatgttggcccttgtcttaaattgcattgaccgcttaaatgtctacaatagcgtagcacactttgcagggattgcaagggaagagagtggcatggcctggaaagaaattctgaacctcctctacaaattgctggctgctctcattcgcggaaacagaaacaattgcgctcaattctccaataaccttgattggctcatcagtaaattggacagactagaatcttcctcaggtatcttggaagttttgcactgcatcttaactgaaagcccagaagccttaaatctgatagcggagggccacatcaagtcgatcatctccctgttggataagcacgggcggaatcacaaggttctggatatcctgtgctccctctgtctctgcaatggggttgcagtgagagccaaccagaatctgatctgtgacaacttgctgccccggagaaacctactcctgcagacacgactgattaacgatgtaaccagtatccggccaaacatcttcctgggagtcgcggagggctcagcccagtacaagaagtggtacttcgagctgattatcgaccaggtggaccccttcctaacagcagagcccacacatctgcgggtgggctgggcctcttcttcaggctatgccccatacccaggaggtggagaaggatggggaggcaatggtgttggtgacgacctgtactcctatggctttgatggacttcacctttggtcaggccggatacccagagctgtggcttccatcaaccagcacctcctgagatcggatgacgtggtaagctgctgcctggacctcggggtgcccagcatctcattccgcatcaatgggcagcccgtgcaggggatgtttgagaacttcaacacagacgggctcttcttccctgtgatgagcttttcagcaggtgtcaaagtacgtttcctgatgggtggacgtcatggagagtttaagttcctgcctccctctggctatgccccttgctatgaagccttacttccaaaagagaagatgagattggagcctgtcaaagaatataaacgtgatgctgatggcattagagatctcttgggtaccacccagttcctctcccaagcctctttcatcccatgccccgtagacaccagtcaggttattttgccacctcacctagaaaagatccgagacagactagctgaaaacatccatgagctttggggaatgaataaaatagaacttggctggactttcggcaagatacgagatgacaataaaagacaacacccttgccttgtggagttttcaaagctcccagaaactgagaagaactataacctgcaaatgtcaactgaaaccttaaaaaccctcttggccctggggtgccacattgctcatgttaacccagctgctgaggaggatctcaagaaggtcaaactgcccaaaaactatatgatgtccaacggctataagccagcccctttggatttgtctgatgtgaagctgttacctcctcaagaaattttagtggataagcttgcagaaaatgcacacaatgtttgggcaaaagacagaataaaacaaggatggacctatggcatccaacaggatttgaagaacaaaagaaatccccgtctggtgccatatgcattactggatgagcgtaccaagaagtcaaacagggacagcctgcgggaagctgtgcgcacttttgttggttacgggtataacattgagccatcagaccaagaactagctgactcggctgtggagaaggtcagcatagacaagatccgatttttccgggtagagcgatcttatgcagtgagatctggaaagtggtattttgagtttgaagtggtgactggaggagacatgcgagtcggctgggcgaggccaggctgtcgacctgatgtcgagctgggggccgatgaccaagcctttgtgtttgaaggcaacaggggccagcgttggcatcaaggaagtgggtattttgggcgtacctggcagccaggggatgtggtcggatgtatgattaacctggatgatgcttcaatgatcttcacactgaatggggagctgctgatcaccaacaaaggctctgaacttgccttcgctgactacgagattgagaatggcttcgtgcccatctgctgtctgggtctatctcagatcggccgcatgaatctcgggacagatgccagtaccttcaagttttataccatgtgcggtctccaagagggctttgagccttttgctgtcaacatgaacagagatgttgctatgtggttcagcaagcgcctcccgacgtttgtcaacgtgccaaaggatcatccacacatagaggtcatgaggattgatggcaccatggacagccctccgtgtctcaaggtgacgcataagacatttggcacacagaatagcaatgccgacatgatctattgccgcttgagcatgcctgtcgagtgccactcctccttcagccacagcccctgtctggacagtgaagctttccagaaaaggaaacagatgcaagaaatactctctcatacaacaacacagtgctactacgccatccgcatctttgctggacaggatccatcctgtgtctgggtcggatgggtgactccagactatcacttgtacagtgaaaagtttgacctgaataaaaactgcacagtgactgtcaccctaggggatgaaagaggccgggtccatgaaagtgtgaaacgcagcaactgctacatggtctggggtggagacattgtagccagttcccagagatcaaatcggagcaacgtggacctggagatcggctgtctcgtggatctggccatgggcatgttgtccttctcagccaatggaaaggaactgggcacctgctaccaggtggagcctaataccaaagtgtttccagcagtcttcctgcagcctacaagtacttctttgtttcagtttgaacttggaaagctgaagaacgcaatgcccctgtcagcggccatattcaggagtgaagagaagaacccagtcccacagtgtccacctcggctggacgtccaaaccatccagcccgtgctctggagccgcatgcccaacagcttcctgaaggtggagaccgagcgtgtgagcgagcgccacggctgggtggtgcagtgcctggagcccctgcagatgatggcgctccacatccccgaggagaacaggtgtgtggatatcctggagctctgtgagcaggaggacctgatgcggttccattaccacacgctgaggctctacagcgcggtgtgcgccctgggaaacagccgcgtggcctacgccctgtgcagccacgtggacctctcccagctcttctatgccattgacaacaagtacctccccggcctccttcgatctggtttctatgacctgctcatcagcatccacctggccagcgccaaggagaggaagctgatgatgaagaacgagtacatcatccccattaccagcaccaccaggaatatccgcctcttcccggacgagtccaagaggcatggactgcctggggtgggcctgagaacatgtctcaagcccgggttcaggttctccaccccttgctttgttgtgactggtgaggatcaccaaaagcagagccccgagattcccttggagagtctcaggacgaaggctctgagtatgctgacagaggcagtgcagtgcagcggggcccacatccgagaccctgtaggggggtctgtggagttccagtttgtgcctgtgctgaaactcattggaaccctgctggtcatgggcgtgtttgatgatgatgatgttcggcagatcctcctcctgattgatccctctgtgtttggggagcatagtgcggggacagaggagggagcagaaaaggaggaagtgacccaggtggaggagaaggctgtggaggctggggagaaggccggcaaggaggctcctgtcaaaggcttgttgcagactcgattacccgaatccgtcaagctgcagatgtgtgagctcctcagctatctctgcgactgtgagctgcagcaccgagtggaggccattgtggcatttggtgacatttatgtctccaagctgcaggcaaatcagaagttccgctacaatgagctcatgcaggccctgaacatgtctgcggccctgactgcccggaagaccaaggagttccgctcacccccacaggagcagatcaacatgctgcttaactttcaactgggagagaactgcccctgcccagaggagattcgggaggagctgtatgatttccatgaggaccttctccttcactgtggggttcctttggaagaagaggaagaggaggaggaggacacctcctggacaggaaaactctgtgccttggtttacaaaatcaaaggcccacccaagccagagaaggagcagccgacggaggaggaggagagatgccccacaacattgaaggaactcatctcacagacgatgatctgctgggcccaggaggaccagatccaggattcagagctggtccgaatgatgttcaacctcctccggaggcagtatgacagcattggggagctgctgcaggcgctgcggaagacctacaccatcagccacacctctgtaagcgacaccatcaacctgctggctgccctgggccaaatccgctccctcctcagtgtcaggatgggcaaggaagaggagttgctcatgatcaatgggctgggagacataatgaacaacaaggtgttttaccagcatcccaacctcatgagagtcctgggcatgcacgagacggtgatggaggtgatggtgaacgtgttgggtacagagaaatctcagattgcatttccaaagatggttgctagctgctgccgtttcctttgctatttctgtcgaattagccggcaaaatcagaaggccatgtttgagcatctgagttatcttctggagaatagcagtgttggcctagcctccccgtcgatgaggggatccaccccgctggatgtggcagcttcctctgtgatggacaacaatgagttagcgctgagcttagaggaaccagacctcgagaaggtggtgacctacttggcaggctgtggcctacagagctgccccatgcttctggccaaaggataccctgatgtcggctggaaccccattgaaggggaacgctacctgtccttcctgaggtttgctgtcttcgtgaacagtgagagtgtggaagaaaacgccagcgttgtggtcaagctgctcatcagacgcccagagtgcttcggcccggccctgcggggtgaggggggaaacgggctcttggcagccatgcagggtgccattaagatctctgagaacccagcgctcgacctcccctctcaaggatacaaaagagaagtcagcacgggggacgatgaagaggaagaagaaatcgtgcatatgggcaatgcaattatgtcattttattcggcccttatagatctactgggccgctgtgctcctgaaatgcacctcatccagacaggaaagggggaagccatccgcatcaggtccatcctgcgctccctggtccccacagaagacctggttgggatcatcagcatccccttgaaactgccctccctcaacaaagatgggtcggtcagtgagccagatatggcggccaatttctgccctgaccacaaggcacctatggtgctgttcttggaccgcgtttatggcattaaggatcaaacttttctgctccacttgctggaggttggatttttacctgacctaagagcttctgcctctctagatacagtttccctaagcaccacagaggctgcgcttgcactaaataggtatatatgttctgctgtgctcccgctcctcacaagatgtgcccctctctttgccggaacagaacactgcacctctctgattgattccacactgcagacaatatacaggctatccaagggacgttccctcaccaaagcacaaagggacactatagaagaatgtttgcttgccatttgcaatcacttgaggccttccatgttacagcaactcctgcgacgcctcgtttttgatgtgccgcaactcaatgaatactgcaaaatgcctctcaagcttctgacgaatcactatgaacagtgttggaagtattactgcctgccttcaggatgggggagctacgggctagctgtggaagaagagctgcacctaacggagaagcttttctgggggatttttgactcgctctcccataagaaatatgacccagatcttttccgaatggccctgccttgtctcagtgctatagctggggccttgccaccagattatttagataccagaatcacagccacgttggagaaacagatctcagtggatgcggatggcaactttgacccaaaacctattaacaccatgaatttttccttgcctgaaaaattggaatacatcgtcaccaagtatgctgagcattcacatgataaatgggcctgtgacaagagtcagagtggatggaaatatgggatttccctggatgaaaatgtgaagacccacccactgataaggcctttcaagacattaacggagaaggagaaggaaatttatcgctggcctgcgcgagagtccctgaaaaccatgctggctgtgggctggactgtggagaggaccaaagagggagaagctttggttcaacagcgggaaaatgagaagcttcgaagtgtgtcccaggccaaccagggcaacagctacagtcctgctcccctcgacctctcaaacgttgtgctctccagagagctccagggaatggtggaggtcgtggctgagaactatcacaatatctgggccaagaagaagaagctggagctggagagcaaaggtggtggcagccaccctcttctggtaccatatgacaccttgactgccaaggaaaagttcaaggaccgggagaaggcacaggacctgtttaagttcctccaagtgaatggcatcatagtttccaggggtatgaaggatatggagctggatgcctcctccatggagaagaggtttgcctataagttcttgaagaagatcctgaaatacgttgattctgctcaagaatttattgcccatttagaagccattgtcagcagtgggaaaactgaaaagtctccccgtgaccaggagatcaaattctttgccaaagttctcctcccgctggttgaccagtacttcaccagtcattgcctctacttcttgtcatcccctctgaagccccttagcagcagcggatatgcctcccataaggagaaagaaatggtggccggcctgttctgcaaacttgccgctctcgttagacacagaatttccctctttggtagtgattctactacaatggtgagctgtcttcacatcttagctcagacacttgacacaaggactgtcatgaagtcaggctcagagctggtgaaggctgggttacgagcattctttgaaaatgctgcagaagatttggagaagacttcagaaaacctgaaacttgggaagttcacccattcccgaacgcagattaaaggcgtttctcagaatattaactacactacagtggctctgctccccatcctgacgtccatctttgagcacgtcactcagcatcagtttggaatggatctactcttgggtgatgtgcagatttcatgctaccacatactgtgcagcctctactcccttgggacgggaaagaacatttatgttgaaaggcaacgccctgcccttggagaatgtctggcctcgctggcagctgccataccagtggcattcctggagcccacccttaatcgctacaatccactctcggtcttcaacaccaaaacccccagggagaggtctattctggggatgccagacacggtagaagacatgtgtcctgacatcccccagctggaaggcctgatgaaggaaatcaacgacctggccgagtcaggggcccggtacacagagatgccccatgtcatcgaggtgatcttacccatgctctgcaactacttgtcctactggtgggagcggggtcctgagaacctgccccccagcacagggccatgctgcaccaaggtcacctctgaacacctcagtctcatcctgggcaacattctgaaaatcatcaacaacaacctgggcatcgatgaggcctcctggatgaagcgcattgcagtgtatgcacagcccatcatcagcaaagccaggcccgacctgctgagaagccacttcatcccaactctggagaagctgaagaaaaaggctgtcaagacggtgcaggaggaggagcagttgaaagccgatggcaaaggggacacccaggaggcagaactcctcatcctggacgagttcgcggtcctctgcagagatctctatgccttctaccccatgctgatccgctacgtggacaacaacagatctaactggctgaaaagtcctgatgctgattctgaccagctcttccgcatggtggcagaagtcttcattctgtggtgtaaatctcataacttcaagagagaagagcaaaattttgtgattcagaatgaaattaataatttggcatttttaactggagacagcaaaagcaagatgtcaaaatctggaggacaagaccaggagcggaagaagacaaagcggcggggagacttgtattccatccagacctccctcatcgtggctgcactcaagaaaatgctgcccattggtttgaatatgtgtactccaggcgaccaggagctgatctccctcgcaaaatcgcgatacagccatagggacacagatgaagaggtcagagaacatctgcggaacaacttgcacttgcaggaaaagtctgatgacccagctgtaaaatggcaactgaacctctacaaggatgttctgaagagtgaagaacctttcaatccggaaaagacagtggagcgtgtgcagagaatttcagcagctgtcttccacctggaacaggtggaacagcctttgaggtccaagaaggccgtctggcacaaactgttatcaaagcaacggaaacgggcagtggtggcctgtttcaggatggcccctctctacaacctgcccaggcaccgctctattaacctcttcctccatggctatcagagattttggatagaaacagaggagtattcctttgaagagaaactagtacaggatttggctaaatctccaaaggtggaagaggaggaggaggaagagacagaaaaacaacctgacccactacatcagatcattctctattttagccgcaacgctctcacggagaggagcaaattggaagacgaccctttgtacacctcctattccagcatgatggccaagagttgtcaaagtggtgaggatgaagaagaagatgaagacaaggaaaaaacattcgaagagaaagagatggagaagcaaaaaaccctctatcagcaagctcggctgcatgagcgtggtgctgcagagatggtccttcagatgataagcgctagcaaaggtgagatgagccccatggtggttgagacgctgaagctggggatcgccattctgaacggaggcaatgctggtgtgcaacagaaaatgctagattacctaaaggagaaaaaggatgctggattctttcaaagcctttctggtcttatgcagtcttgcagtgtccttgatttgaatgcatttgagaggcagaataaagctgaaggcctggggatggtgactgaagaaggaacactcattgttcgggaacgtggtgaaaaagtactccagaatgacgagttcacgcgtgatctctttagattcctacagttactttgtgagggacataacagtgactttcagaacttcctgcggactcagatgggcaacaccaccaccgtgaatgtcatcatcagcactgtggactaccttctgcgtctgcaggaatcaatcagtgatttctactggtattattcagggaaggacatcattgatgaatctggacagcacaatttttccaaagctctggcagtcaccaagcagattttcaattctcttacagaatacatccagggcccttgcattggtaatcaacagagcctggctcacagcaggctgtgggacgcagtggttggcttcctccatgtctttgctaatatgcagatgaaactctctcaggattccagtcagatcgagctgctgaaggaactcttggatctccttcaggacatggtggtgatgcttctgtccctcctggaagggaatgtggtaaatggcaccattggcaagcagatggttgacacactggtagaatcatctaccaatgtagaaatgatcttgaaattctttgacatgttcttgaaacttaaagacttaaccagctcagacaccttcaaagaatatgacccagatggtaaaggaattatctccaaaaaagaattccagaaggccatggaagggcaaaaacagtacacgcagtcagagattgactttctcctgtcgtgtgcagaagctgatgagaatgacatgtttaattacgttgattttgtagaccggttccatgagccagccaaggacatagggtttaatgtggctgtgttattgacaaatctttctgaacacatgccaaacgattcccgcctgaagtgtctgttggacccagcagaaagtgtgctaaattacttcgaaccctacctaggacgcatcgagatcatgggtggggccaagaagattgagcgtgtttattttgagatcagtgaatccagtcgcactcagtgggagaagccccaggtgaaggaatctaagcgacagttcatttttgatgttgtcaatgaaggtggggagcaggaaaagatggagctgtttgtgaacttctgtgaggacaccatctttgaaatgcagttagcatctcagatctctgaatccgattcagctgacaggccagaagaggaggaagaagatgaagattcttcttacgtgttagaaattgcgggtgaagaggaagaagacgggtctcttgagccggcctctgcatttgctatggcctgtgcctctgtgaagaggaatgtcaccgacttcctgaagagagcaaccctgaagaacctcaggaagcagtacaggaacgtgaaaaagatgactgcgaaggagctggtgaaggtgctcttctcctttttctggatgctgttcgtggggctattccagttgctcttcaccatcctgggaggaatctttcagatcctctggagcacagtgtttggagggggcctggtagaaggggcaaagaacatcagagtgaccaagatcctgggtgacatgcctgacccaacccaatttggtatccatgatgacactatggaggctgagagggcagaggtgatggagccaggtatcaccactgaactagtacacttcataaagggggagaagggagatacagatatcatgtcagacctctttggactccacccaaagaaagagggcagcttaaagcatgggcctgaagtgggtttgggtgacctctcagaaattattggcaaggatgaaccccctacattagagagtactgtacagaagaagaggaaagctcaggcagcagaaatgaaagcagcaaatgaagcagaaggaaaagtagaatccgagaaggcagacatggaagatggagagaaggaagacaaagacaaagaagaggagcaagctgagtacctgtggacagaagtgacaaaaaagaagaagcggcggtgtggtcagaaggttgagaagccggaagctttcacagccaatttctttaaagggctggaaatctatcagaccaagttactgcattacctggccaggaatttctacaacctgaggttccttgctctgtttgtagccttcgctatcaacttcatcctgcttttttataaggtcactgaagaacctttagaagaagagacagaggatgttgcaaacctatggaattcctttaatgacgaggaagaggaagaagcgatggtattctttgtccttcaggagagcaccgggtatatggcaccaaccctgcgtgccctggccatcatccataccatcatctctctagtctgtgtggtgggctactactgcctgaaggtgcctttggtggttttcaaaagggaaaaagaaatcgccaggaagctggagtttgatggcctatatatcaccgaacagccatctgaagatgacatcaaggggcagtgggaccgcttggtgatcaacacaccatcttttcctaataactactgggacaagtttgtaaagagaaaggtgatcaacaagtatggagatctctacggagcagaacgcattgctgaacttctgggtttggacaaaaatgctcttgactttagcccagtagaagagaccaaagcagaagcggcttctctggtgtcatggctaagttccatagacatgaagtaccatatctggaagcttggagttgtttttactgacaactcctttctctaccttgcctggtatacaaccatgtcagtcctgggccactacaataacttcttctttgctgctcacctattggacatcgcaatgggcttcaagacactgaggaccattctgtcatctgtaactcacaatggcaaacagttggttctgactgtcggtctcctggccgtggtggtttatctctatactgtggtggctttcaacttcttccgcaagttctacaacaaaagcgaagacgatgacgagcccgatatgaagtgcgacgacatgatgacgtgttaccttttccacatgtacgtgggagtgagagcaggaggtggcattggtgatgaaattgaagaccctgctggtgatccttatgaaatgtatcgcattgtctttgacattacctttttcttcttcgtcattgtcatcttgctggccatcattcaaggtcttattattgatgctttcggagagctaagagaccagcaggaacaagtacgagaagatatggagactaaatgtttcatctgtgggattggcaatgactactttgacacaacccctcatggttttgaaacacatacattacaagagcacaacttagccaactacttgttctttctgatgtatttgattaataaagatgaaacagagcacacgggtcaggaatcttatgtctggaagatgtaccaagaaaggtgttgggatttcttcccagccggtgactgctttcgtaaacaatatgaagatcagcttggataaatctgaatcaaagaagcgcgacaattctggacagtcaacttcccatgaaataaagtcccctttttacagttctgcaacatatctgaaatgtgacattttctaaatgcctcccttaaaaaaaaaactgctgaaaatctgtgctattttgaaattgatttggctttttgtgcctaatggacatacactgtgggagagaacctgtcaaaatgtcgaagaaggaaggcgaagaatcaagtaatctctaggcaaatgccttcaagttttccagttctgaggtaactagttcagtttgttgggatggaagcatgaaggaaagggctagagaagtatgaaatctcgaatgtgtaatacctgaaaatttaaacacttgaatgtcatcatggtatccaacttgtgactcatagggtctgaactcactccaaaagataataactgcagtctaatttttcccatggtacttgctagtgactgtatccagaaaagctttaagcagttaaagaaacagaaaaaaaccgacactttgtcgacactgaaatatcgattaagtgccttaaaacctctttagacatagctatgcaagttttttatgtttgtgttccagaaggacagttccattcattagttgtgatcttccgtcttactttatgaaactgcacttgaaggttattcatacaagtttttttagtaacagctgtcagtcaactgctgttattagaagaaaagtactgtactgaaaattcagaaaaaaaatctcaaccttatgccaaaatggagtaatgctttatggtcccttgtaagtagtggagctgctctgtttaggtgaatctcctcaaatacaatgaagtgcccactgcaataaagtaatacgtaccaat

SEQ ID NO: 18313 - DNA, 15552 bp, Homo sapiens
  source 1..15552: mol_type = unassigned DNA
cgcacgccgagcggctgccgggggaagcagaggcgccggaggctggggcaccgccgacgcctcgggagccatggccgaagggggagaaggaggcgaggacgagatccagtttctgaggactgaggatgaagtggtactccagtgcatcgccaccattcataaggagcagaggaagttctgcctggcagccgagggacttgggaatcgcctgtgcttcttggaacccacttcagaagccaagtacattcctccagatctctgcgtctgcaattttgtgctggaacagtccctatctgtcagagccctgcaggaaatgcttgccaacacaggtgaaaatggcggcgaaggggcagcacaaggaggtggccacaggaccctgttatacggccatgcagttctcctgaggcactctttcagcggaatgtatctaacatgcttgactacatcaagatcccagacagacaaacttgcctttgatgtaggtctacgggaacatgccacaggagaagcctgttggtggactatacatcctgcttccaaacagaggtccgaaggagagaaagttcgaattggcgatgacctcatcctcgtcagcgtgtcctctgaaagataccttcatctctcagtatcaaatggtaacatacaagtggatgcctcctttatgcaaacactctggaatgtacatcctacgtgctcaggaagtagcatcgaagaaggatacctacttggtgggcatgtagtacgtcttttccatggtcatgatgaatgtttgacgataccatctacagaccagaatgattcccagcacaggaggatattctacgaagctgggggagctgggactcgagccaggtctctttggagagtggaaccccttcggataagctggagtggcagtaacatcagatggggccaggctttccgactccggcatctcaccacaggccactacctggccttgacagaagaccaaggccttatactgcaagaccgggcaaagtcagacaccaagtccacagctttctctttccgggcatcaaaggaactcaaggagaaattagactccagtcacaagcgagacatagaaggcatgggagttccagaaatcaagtatggagattctgtctgctttgtgcagcatatagccagtggtctgtgggtgacctacaaagcacaagacgccaaaacttcccgcctgggacctctaaaaagaaaggtcatactccatcaggaaggccacatggatgatggattaacactgcagagatgccagcgtgaggagtcccaggctgctcggatcatccggaacactacagccttattcagccagtttgtcagcggaaacaatcgcacagctgcccccatcaccctgcctatagaagaagtcctgcagaccctacaggacttgatcgcctacttccagcccccagaggaggagatgcgacatgaagacaagcagaacaagctccgctcactcaaaaacagacaaaatcttttcaaggaagagggaatgttggcccttgtcttaaattgcattgaccgcttaaatgtctacaatagcgtagcacactttgcagggattgcaagggaagagagtggcatggcctggaaagaaattctgaacctcctctacaaattgctggctgctctcattcgcggaaacagaaacaattgcgctcaattctccaataaccttgattggctcatcagtaaattggacagactagaatcttcctcaggtatcttggaagttttgcactgcatcttaactgaaagcccagaagccttaaatctgatagcggagggccacatcaagtcgatcatctccctgttggataagcacgggcggaatcacaaggttctggatatcctgtgctccctctgtctctgcaatggggttgcagtgagagccaaccagaatctgatctgtgacaacttgctgccccggagaaacctactcctgcagacacgactgattaacgatgtaaccagtatccggccaaacatcttcctgggagtcgcggagggctcagcccagtacaagaagtggtacttcgagctgattatcgaccaggtggaccccttcctaacagcagagcccacacatctgcgggtgggctgggcctcttcttcaggctatgccccatacccaggaggtggagaaggatggggaggcaatggtgttggtgacgacctgtactcctatggctttgatggacttcacctttggtcaggccggatacccagagctgtggcttccatcaaccagcacctcctgagatcggatgacgtggtaagctgctgcctggacctcggggtgcccagcatctcattccgcatcaatgggcagcccgtgcaggggatgtttgagaacttcaacacagacgggctcttcttccctgtgatgagcttttcagcaggtgtcaaagtacgtttcctgatgggtggacgtcatggagagtttaagttcctgcctccctctggctatgccccttgctatgaagccttacttccaaaagagaagatgagattggagcctgtcaaagaatataaacgtgatgctgatggcattagagatctcttgggtaccacccagttcctctcccaagcctctttcatcccatgccccgtagacaccagtcaggttattttgccacctcacctagaaaagatccgagacagactagctgaaaacatccatgagctttggggaatgaataaaatagaacttggctggactttcggcaagatacgagatgacaataaaagacaacacccttgccttgtggagttttcaaagctcccagaaactgagaagaactataacctgcaaatgtcaactgaaaccttaaaaaccctcttggccctggggtgccacattgctcatgttaacccagctgctgaggaggatctcaagaaggtcaaactgcccaaaaactatatgatgtccaacggctataagccagcccctttggatttgtctgatgtgaagctgttacctcctcaagaaattttagtggataagcttgcagaaaatgcacacaatgtttgggcaaaagacagaataaaacaaggatggacctatggcatccaacaggatttgaagaacaaaagaaatccccgtctggtgccatatgcattactggatgagcgtaccaagaagtcaaacagggacagcctgcgggaagctgtgcgcacttttgttggttacgggtataacattgagccatcagaccaagaactagctgactcggctgtggagaaggtcagcatagacaagatccgatttttccgggtagagcgatcttatgcagtgagatctggaaagtggtattttgagtttgaagtggtgactggaggagacatgcgagtcggctgggcgaggccaggctgtcgacctgatgtcgagctgggggccgatgaccaagcctttgtgtttgaaggcaacaggggccagcgttggcatcaaggaagtgggtattttgggcgtacctggcagccaggggatgtggtcggatgtatgattaacctggatgatgcttcaatgatcttcacactgaatggggagctgctgatcaccaacaaaggctctgaacttgccttcgctgactacgagattgagaatggcttcgtgcccatctgctgtctgggtctatctcagatcggccgcatgaatctcgggacagatgccagtaccttcaagttttataccatgtgcggtctccaagagggctttgagccttttgctgtcaacatgaacagagatgttgctatgtggttcagcaagcgcctcccgacgtttgtcaacgtgccaaaggatcatccacacatagaggtcatgaggattgatggcaccatggacagccctccgtgtctcaaggtgacgcataagacatttggcacacagaatagcaatgccgacatgatctattgccgcttgagcatgcctgtcgagtgccactcctccttcagccacagcccctgtctggacagtgaagctttccagaaaaggaaacagatgcaagaaatactctctcatacaacaacacagtgctactacgccatccgcatctttgctggacaggatccatcctgtgtctgggtcggatgggtgactccagactatcacttgtacagtgaaaagtttgacctgaataaaaactgcacagtgactgtcaccctaggggatgaaagaggccgggtccatgaaagtgtgaaacgcagcaactgctacatggtctggggtggagacattgtagccagttcccagagatcaaatcggagcaacgtggacctggagatcggctgtctcgtggatctggccatgggcatgttgtccttctcagccaatggaaaggaactgggcacctgctaccaggtggagcctaataccaaagtgtttccagcagtcttcctgcagcctacaagtacttctttgtttcagtttgaacttggaaagctgaagaacgcaatgcccctgtcagcggccatattcaggagtgaagagaagaacccagtcccacagtgtccacctcggctggacgtccaaaccatccagcccgtgctctggagccgcatgcccaacagcttcctgaaggtggagaccgagcgtgtgagcgagcgccacggctgggtggtgcagtgcctggagcccctgcagatgatggcgctccacatccccgaggagaacaggtgtgtggatatcctggagctctgtgagcaggaggacctgatgcggttccattaccacacgctgaggctctacagcgcggtgtgcgccctgggaaacagccgcgtggcctacgccctgtgcagccacgtggacctctcccagctcttctatgccattgacaacaagtacctccccggcctccttcgatctggtttctatgacctgctcatcagcatccacctggccagcgccaaggagaggaagctgatgatgaagaacgagtacatcatccccattaccagcaccaccaggaatatccgcctcttcccggacgagtccaagaggcatggactgcctggggtgggcctgagaacatgtctcaagcccgggttcaggttctccaccccttgctttgttgtgactggtgaggatcaccaaaagcagagccccgagattcccttggagagtctcaggacgaaggctctgagtatgctgacagaggcagtgcagtgcagcggggcccacatccgagaccctgtaggggggtctgtggagttccagtttgtgcctgtgctgaaactcattggaaccctgctggtcatgggcgtgtttgatgatgatgatgttcggcagatcctcctcctgattgatccctctgtgtttggggagcatagtgcggggacagaggagggagcagaaaaggaggaagtgacccaggtggaggagaaggctgtggaggctggggagaaggccggcaaggaggctcctgtcaaaggcttgttgcagactcgattacccgaatccgtcaagctgcagatgtgtgagctcctcagctatctctgcgactgtgagctgcagcaccgagtggaggccattgtggcatttggtgacatttatgtctccaagctgcaggcaaatcagaagttccgctacaatgagctcatgcaggccctgaacatgtctgcggccctgactgcccggaagaccaaggagttccgctcacccccacaggagcagatcaacatgctgcttaactttcaactgggagagaactgcccctgcccagaggagattcgggaggagctgtatgatttccatgaggaccttctccttcactgtggggttcctttggaagaagaggaagaggaggaggaggacacctcctggacaggaaaactctgtgccttggtttacaaaatcaaaggcccacccaagccagagaaggagcagccgacggaggaggaggagagatgccccacaacattgaaggaactcatctcacagacgatgatctgctgggcccaggaggaccagatccaggattcagagctggtccgaatgatgttcaacctcctccggaggcagtatgacagcattggggagctgctgcaggcgctgcggaagacctacaccatcagccacacctctgtaagcgacaccatcaacctgctggctgccctgggccaaatccgctccctcctcagtgtcaggatgggcaaggaagaggagttgctcatgatcaatgggctgggagacataatgaacaacaaggtgttttaccagcatcccaacctcatgagagtcctgggcatgcacgagacggtgatggaggtgatggtgaacgtgttgggtacagagaaatctcagattgcatttccaaagatggttgctagctgctgccgtttcctttgctatttctgtcgaattagccggcaaaatcagaaggccatgtttgagcatctgagttatcttctggagaatagcagtgttggcctagcctccccgtcgatgaggggatccaccccgctggatgtggcagcttcctctgtgatggacaacaatgagttagcgctgagcttagaggaaccagacctcgagaaggtggtgacctacttggcaggctgtggcctacagagctgccccatgcttctggccaaaggataccctgatgtcggctggaaccccattgaaggggaacgctacctgtccttcctgaggtttgctgtcttcgtgaacagtgagagtgtggaagaaaacgccagcgttgtggtcaagctgctcatcagacgcccagagtgcttcggcccggccctgcggggtgaggggggaaacgggctcttggcagccatgcagggtgccattaagatctctgagaacccagcgctcgacctcccctctcaaggatacaaaagagaagtcacgggggacgatgaagaggaagaagaaatcgtgcatatgggcaatgcaattatgtcattttattcggcccttatagatctactgggccgctgtgctcctgaaatgcacctcatccagacaggaaagggggaagccatccgcatcaggtccatcctgcgctccctggtccccacagaagacctggttgggatcatcagcatccccttgaaactgccctccctcaacaaagatgggtcggtcagtgagccagatatggcggccaatttctgccctgaccacaaggcacctatggtgctgttcttggaccgcgtttatggcattaaggatcaaacttttctgctccacttgctggaggttggatttttacctgacctaagagcttctgcctctctagatacagtttccctaagcaccacagaggctgcgcttgcactaaataggtatatatgttctgctgtgctcccgctcctcacaagatgtgcccctctctttgccggaacagaacactgcacctctctgattgattccacactgcagacaatatacaggctatccaagggacgttccctcaccaaagcacaaagggacactatagaagaatgtttgcttgccatttgcaatcacttgaggccttccatgttacagcaactcctgcgacgcctcgtttttgatgtgccgcaactcaatgaatactgcaaaatgcctctcaagcttctgacgaatcactatgaacagtgttggaagtattactgcctgccttcaggatgggggagctacgggctagctgtggaagaagagctgcacctaacggagaagcttttctgggggatttttgactcgctctcccataagaaatatgacccagatcttttccgaatggccctgccttgtctcagtgctatagctggggccttgccaccagattatttagataccagaatcacagccacgttggagaaacagatctcagtggatgcggatggcaactttgacccaaaacctattaacaccatgaatttttccttgcctgaaaaattggaatacatcgtcaccaagtatgctgagcattcacatgataaatgggcctgtgacaagagtcagagtggatggaaatatgggatttccctggatgaaaatgtgaagacccacccactgataaggcctttcaagacattaacggagaaggagaaggaaatttatcgctggcctgcgcgagagtccctgaaaaccatgctggctgtgggctggactgtggagaggaccaaagagggagaagctttggttcaacagcgggaaaatgagaagcttcgaagtgtgtcccaggccaaccagggcaacagctacagtcctgctcccctcgacctctcaaacgttgtgctctccagagagctccagggaatggtggaggtcgtggctgagaactatcacaatatctgggccaagaagaagaagctggagctggagagcaaaggtggtggcagccaccctcttctggtaccatatgacaccttgactgccaaggaaaagttcaaggaccgggagaaggcacaggacctgtttaagttcctccaagtgaatggcatcatagtttccaggggtatgaaggatatggagctggatgcctcctccatggagaagaggtttgcctataagttcttgaagaagatcctgaaatacgttgattctgctcaagaatttattgcccatttagaagccattgtcagcagtgggaaaactgaaaagtctccccgtgaccaggagatcaaattctttgccaaagttctcctcccgctggttgaccagtacttcaccagtcattgcctctacttcttgtcatcccctctgaagccccttagcagcagcggatatgcctcccataaggagaaagaaatggtggccggcctgttctgcaaacttgccgctctcgttagacacagaatttccctctttggtagtgattctactacaatggtgagctgtcttcacatcttagctcagacacttgacacaaggactgtcatgaagtcaggctcagagctggtgaaggctgggttacgagcattctttgaaaatgctgcagaagatttggagaagacttcagaaaacctgaaacttgggaagttcacccattcccgaacgcagattaaaggcgtttctcagaatattaactacactacagtggctctgctccccatcctgacgtccatctttgagcacgtcactcagcatcagtttggaatggatctactcttgggtgatgtgcagatttcatgctaccacatactgtgcagcctctactcccttgggacgggaaagaacatttatgttgaaaggcaacgccctgcccttggagaatgtctggcctcgctggcagctgccataccagtggcattcctggagcccacccttaatcgctacaatccactctcggtcttcaacaccaaaacccccagggagaggtctattctggggatgccagacacggtagaagacatgtgtcctgacatcccccagctggaaggcctgatgaaggaaatcaacgacctggccgagtcaggggcccggtacacagagatgccccatgtcatcgaggtgatcttacccatgctctgcaactacttgtcctactggtgggagcggggtcctgagaacctgccccccagcacagggccatgctgcaccaaggtcacctctgaacacctcagtctcatcctgggcaacattctgaaaatcatcaacaacaacctgggcatcgatgaggcctcctggatgaagcgcattgcagtgtatgcacagcccatcatcagcaaagccaggcccgacctgctgagaagccacttcatcccaactctggagaagctgaagaaaaaggctgtcaagacggtgcaggaggaggagcagttgaaagccgatggcaaaggggacacccaggaggcagaactcctcatcctggacgagttcgcggtcctctgcagagatctctatgccttctaccccatgctgatccgctacgtggacaacaacagatctaactggctgaaaagtcctgatgctgattctgaccagctcttccgcatggtggcagaagtcttcattctgtggtgtaaatctcataacttcaagagagaagagcaaaattttgtgattcagaatgaaattaataatttggcatttttaactggagacagcaaaagcaagatgtcaaaagccatgcaagtaaagtctggaggacaagaccaggagcggaagaagacaaagcggcggggagacttgtattccatccagacctccctcatcgtggctgcactcaagaaaatgctgcccattggtttgaatatgtgtactccaggcgaccaggagctgatctccctcgcaaaatcgcgatacagccatagggacacagatgaagaggtcagagaacatctgcggaacaacttgcacttgcaggaaaagtctgatgacccagctgtaaaatggcaactgaacctctacaaggatgttctgaagagtgaagaacctttcaatccggaaaagacagtggagcgtgtgcagagaatttcagcagctgtcttccacctggaacaggtggaacagcctttgaggtccaagaaggccgtctggcacaaactgttatcaaagcaacggaaacgggcagtggtggcctgtttcaggatggcccctctctacaacctgcccaggcaccgctctattaacctcttcctccatggctatcagagattttggatagaaacagaggagtattcctttgaagagaaactagtacaggatttggctaaatctccaaaggtggaagaggaggaggaggaagagacagaaaaacaacctgacccactacatcagatcattctctattttagccgcaacgctctcacggagaggagcaaattggaagacgaccctttgtacacctcctattccagcatgatggccaagagttgtcaaagtggtgaggatgaagaagaagatgaagacaaggaaaaaacattcgaagagaaagagatggagaagcaaaaaaccctctatcagcaagctcggctgcatgagcgtggtgctgcagagatggtccttcagatgataagcgctagcaaaggtgagatgagccccatggtggttgagacgctgaagctggggatcgccattctgaacggaggcaatgctggtgtgcaacagaaaatgctagattacctaaaggagaaaaaggatgctggattctttcaaagcctttctggtcttatgcagtcttgcagtgtccttgatttgaatgcatttgagaggcagaataaagctgaaggcctggggatggtgactgaagaaggaacactcattgttcgggaacgtggtgaaaaagtactccagaatgacgagttcacgcgtgatctctttagattcctacagttactttgtgagggacataacagtgactttcagaacttcctgcggactcagatgggcaacaccaccaccgtgaatgtcatcatcagcactgtggactaccttctgcgtctgcaggaatcaatcagtgatttctactggtattattcagggaaggacatcattgatgaatctggacagcacaatttttccaaagctctggcagtcaccaagcagattttcaattctcttacagaatacatccagggcccttgcattggtaatcaacagagcctggctcacagcaggctgtgggacgcagtggttggcttcctccatgtctttgctaatatgcagatgaaactctctcaggattccagtcagatcgagctgctgaaggaactcttggatctccttcaggacatggtggtgatgcttctgtccctcctggaagggaatgtggtaaatggcaccattggcaagcagatggttgacacactggtagaatcatctaccaatgtagaaatgatcttgaaattctttgacatgttcttgaaacttaaagacttaaccagctcagacaccttcaaagaatatgacccagatggtaaaggaattatctccaaaaaagaattccagaaggccatggaagggcaaaaacagtacacgcagtcagagattgactttctcctgtcgtgtgcagaagctgatgagaatgacatgtttaattacgttgattttgtagaccggttccatgagccagccaaggacatagggtttaatgtggctgtgttattgacaaatctttctgaacacatgccaaacgattcccgcctgaagtgtctgttggacccagcagaaagtgtgctaaattacttcgaaccctacctaggacgcatcgagatcatgggtggggccaagaagattgagcgtgtttattttgagatcagtgaatccagtcgcactcagtgggagaagccccaggtgaaggaatctaagcgacagttcatttttgatgttgtcaatgaaggtggggagcaggaaaagatggagctgtttgtgaacttctgtgaggacaccatctttgaaatgcagttagcatctcagatctctgaatccgattcagctgacaggccagaagaggaggaagaagatgaagattcttcttacgtgttagaaattgcgggtgaagaggaagaagacgggtctcttgagccggcctctgcatttgctatggcctgtgcctctgtgaagaggaatgtcaccgacttcctgaagagagcaaccctgaagaacctcaggaagcagtacaggaacgtgaaaaagatgactgcgaaggagctggtgaaggtgctcttctcctttttctggatgctgttcgtggggctattccagttgctcttcaccatcctgggaggaatctttcagatcctctggagcacagtgtttggagggggcctggtagaaggggcaaagaacatcagagtgaccaagatcctgggtgacatgcctgacccaacccaatttggtatccatgatgacactatggaggctgagagggcagaggtgatggagccaggtatcaccactgaactagtacacttcataaagggggagaagggagatacagatatcatgtcagacctctttggactccacccaaagaaagagggcagcttaaagcatgggcctgaagtgggtttgggtgacctctcagaaattattggcaaggatgaaccccctacattagagagtactgtacagaagaagaggaaagctcaggcagcagaaatgaaagcagcaaatgaagcagaaggaaaagtagaatccgagaaggcagacatggaagatggagagaaggaagacaaagacaaagaagaggagcaagctgagtacctgtggacagaagtgacaaaaaagaagaagcggcggtgtggtcagaaggttgagaagccggaagctttcacagccaatttctttaaagggctggaaatctatcagaccaagttactgcattacctggccaggaatttctacaacctgaggttccttgctctgtttgtagccttcgctatcaacttcatcctgcttttttataaggtcactgaagaacctttagaagaagagacagaggatgttgcaaacctatggaattcctttaatgacgaggaagaggaagaagcgatggtattctttgtccttcaggagagcaccgggtatatggcaccaaccctgcgtgccctggccatcatccataccatcatctctctagtctgtgtggtgggctactactgcctgaaggtgcctttggtggttttcaaaagggaaaaagaaatcgccaggaagctggagtttgatggcctatatatcaccgaacagccatctgaagatgacatcaaggggcagtgggaccgcttggtgatcaacacaccatcttttcctaataactactgggacaagtttgtaaagagaaaggtgatcaacaagtatggagatctctacggagcagaacgcattgctgaacttctgggtttggacaaaaatgctcttgactttagcccagtagaagagaccaaagcagaagcggcttctctggtgtcatggctaagttccatagacatgaagtaccatatctggaagcttggagttgtttttactgacaactcctttctctaccttgcctggtatacaaccatgtcagtcctgggccactacaataacttcttctttgctgctcacctattggacatcgcaatgggcttcaagacactgaggaccattctgtcatctgtaactcacaatggcaaacagttggttctgactgtcggtctcctggccgtggtggtttatctctatactgtggtggctttcaacttcttccgcaagttctacaacaaaagcgaagacgatgacgagcccgatatgaagtgcgacgacatgatgacgtgttaccttttccacatgtacgtgggagtgagagcaggaggtggcattggtgatgaaattgaagaccctgctggtgatccttatgaaatgtatcgcattgtctttgacattacctttttcttcttcgtcattgtcatcttgctggccatcattcaaggtcttattattgatgctttcggagagctaagagaccagcaggaacaagtacgagaagatatggagactaaatgtttcatctgtgggattggcaatgactactttgacacaacccctcatggttttgaaacacatacattacaagagcacaacttagccaactacttgttctttctgatgtatttgattaataaagatgaaacagagcacacgggtcaggaatcttatgtctggaagatgtaccaagaaaggtgttgggatttcttcccagccggtgactgctttcgtaaacaatatgaagatcagcttggataaatctgaatcaaagaagcgcgacaattctggacagtcaacttcccatgaaataaagtcccctttttacagttctgcaacatatctgaaatgtgacattttctaaatgcctcccttaaaaaaaaaactgctgaaaatctgtgctattttgaaattgatttggctttttgtgcctaatggacatacactgtgggagagaacctgtcaaaatgtcgaagaaggaaggcgaagaatcaagtaatctctaggcaaatgccttcaagttttccagttctgaggtaactagttcagtttgttgggatggaagcatgaaggaaagggctagagaagtatgaaatctcgaatgtgtaatacctgaaaatttaaacacttgaatgtcatcatggtatccaacttgtgactcatagggtctgaactcactccaaaagataataactgcagtctaatttttcccatggtacttgctagtgactgtatccagaaaagctttaagcagttaaagaaacagaaaaaaaccgacactttgtcgacactgaaatatcgattaagtgccttaaaacctctttagacatagctatgcaagttttttatgtttgtgttccagaaggacagttccattcattagttgtgatcttccgtcttactttatgaaactgcacttgaaggttattcatacaagtttttttagtaacagctgtcagtcaactgctgttattagaagaaaagtactgtactgaaaattcagaaaaaaaatctcaaccttatgccaaaatggagtaatgctttatggtcccttgtaagtagtggagctgctctgtttaggtgaatctcctcaaatacaatgaagtgcccactgcaataaagtaatacgtacc

SEQ ID NO: 18314 - DNA, 15078 bp, Homo sapiens
  source 1..15078: mol_type = unassigned DNA
atggccgaagggggagaaggaggcgaggacgagatccagtttctgaggactgaggatgaagtggtactccagtgcatcgccaccattcataaggagcagaggaagttctgcctggcagccgagggacttgggaatcgcctgtgcttcttggaacccacttcagaagccaagtacattcctccagatctctgcgtctgcaattttgtgctggaacagtccctatctgtcagagccctgcaggaaatgcttgccaacacaggtgaaaatggcggcgaaggggcagcacaaggaggtggccacaggaccctgttatacggccatgcagttctcctgaggcactctttcagcggaatgtatctaacatgcttgactacatcaagatcccagacagacaaacttgcctttgatgtaggtctacgggaacatgccacaggagaagcctgttggtggactatacatcctgcttccaaacagaggtccgaaggagagaaagttcgaattggcgatgacctcatcctcgtcagcgtgtcctctgaaagataccttcatctctcagtatcaaatggtaacatacaagtggatgcctcctttatgcaaacactctggaatgtacatcctacgtgctcaggaagtagcatcgaagaaggatacctacttggtgggcatgtagtacgtcttttccatggtcatgatgaatgtttgacgataccatctacagaccagaatgattcccagcacaggaggatattctacgaagctgggggagctgggactcgagccaggtctctttggagagtggaaccccttcggataagctggagtggcagtaacatcagatggggccaggctttccgactccggcatctcaccacaggccactacctggccttgacagaagaccaaggccttatactgcaagaccgggcaaagtcagacaccaagtccacagctttctctttccgggcatcaaaggaactcaaggagaaattagactccagtcacaagcgagacatagaaggcatgggagttccagaaatcaagtatggagattctgtctgctttgtgcagcatatagccagtggtctgtgggtgacctacaaagcacaagacgccaaaacttcccgcctgggacctctaaaaagaaaggtcatactccatcaggaaggccacatggatgatggattaacactgcagagatgccagcgtgaggagtcccaggctgctcggatcatccggaacactacagccttattcagccagtttgtcagcggaaacaatcgcacagctgcccccatcaccctgcctatagaagaagtcctgcagaccctacaggacttgatcgcctacttccagcccccagaggaggagatgcgacatgaagacaagcagaacaagctccgctcactcaaaaacagacaaaatcttttcaaggaagagggaatgttggcccttgtcttaaattgcattgaccgcttaaatgtctacaatagcgtagcacactttgcagggattgcaagggaagagagtggcatggcctggaaagaaattctgaacctcctctacaaattgctggctgctctcattcgcggaaacagaaacaattgcgctcaattctccaataaccttgattggctcatcagtaaattggacagactagaatcttcctcaggtatcttggaagttttgcactgcatcttaactgaaagcccagaagccttaaatctgatagcggagggccacatcaagtcgatcatctccctgttggataagcacgggcggaatcacaaggttctggatatcctgtgctccctctgtctctgcaatggggttgcagtgagagccaaccagaatctgatctgtgacaacttgctgccccggagaaacctactcctgcagacacgactgattaacgatgtaaccagtatccggccaaacatcttcctgggagtcgcggagggctcagcccagtacaagaagtggtacttcgagctgattatcgaccaggtggaccccttcctaacagcagagcccacacatctgcgggtgggctgggcctcttcttcaggctatgccccatacccaggaggtggagaaggatggggaggcaatggtgttggtgacgacctgtactcctatggctttgatggacttcacctttggtcaggccggatacccagagctgtggcttccatcaaccagcacctcctgagatcggatgacgtggtaagctgctgcctggacctcggggtgcccagcatctcattccgcatcaatgggcagcccgtgcaggggatgtttgagaacttcaacacagacgggctcttcttccctgtgatgagcttttcagcaggtgtcaaagtacgtttcctgatgggtggacgtcatggagagtttaagttcctgcctccctctggctatgccccttgctatgaagccttacttccaaaagagaagatgagattggagcctgtcaaagaatataaacgtgatgctgatggcattagagatctcttgggtaccacccagttcctctcccaagcctctttcatcccatgccccgtagacaccagtcaggttattttgccacctcacctagaaaagatccgagacagactagctgaaaacatccatgagctttggggaatgaataaaatagaacttggctggactttcggcaagatacgagatgacaataaaagacaacacccttgccttgtggagttttcaaagctcccagaaactgagaagaactataacctgcaaatgtcaactgaaaccttaaaaaccctcttggccctggggtgccacattgctcatgttaacccagctgctgaggaggatctcaagaaggtcaaactgcccaaaaactatatgatgtccaacggctataagccagcccctttggatttgtctgatgtgaagctgttacctcctcaagaaattttagtggataagcttgcagaaaatgcacacaatgtttgggcaaaagacagaataaaacaaggatggacctatggcatccaacaggatttgaagaacaaaagaaatccccgtctggtgccatatgcattactggatgagcgtaccaagaagtcaaacagggacagcctgcgggaagctgtgcgcacttttgttggttacgggtataacattgagccatcagaccaagaactagctgactcggctgtggagaaggtcagcatagacaagatccgatttttccgggtagagcgatcttatgcagtgagatctggaaagtggtattttgagtttgaagtggtgactggaggagacatgcgagtcggctgggcgaggccaggctgtcgacctgatgtcgagctgggggccgatgaccaagcctttgtgtttgaaggcaacaggggccagcgttggcatcaaggaagtgggtattttgggcgtacctggcagccaggggatgtggtcggatgtatgattaacctggatgatgcttcaatgatcttcacactgaatggggagctgctgatcaccaacaaaggctctgaacttgccttcgctgactacgagattgagaatggcttcgtgcccatctgctgtctgggtctatctcagatcggccgcatgaatctcgggacagatgccagtaccttcaagttttataccatgtgcggtctccaagagggctttgagccttttgctgtcaacatgaacagagatgttgctatgtggttcagcaagcgcctcccgacgtttgtcaacgtgccaaaggatcatccacacatagaggtcatgaggattgatggcaccatggacagccctccgtgtctcaaggtgacgcataagacatttggcacacagaatagcaatgccgacatgatctattgccgcttgagcatgcctgtcgagtgccactcctccttcagccacagcccctgtctggacagtgaagctttccagaaaaggaaacagatgcaagaaatactctctcatacaacaacacagtgctactacgccatccgcatctttgctggacaggatccatcctgtgtctgggtcggatgggtgactccagactatcacttgtacagtgaaaagtttgacctgaataaaaactgcacagtgactgtcaccctaggggatgaaagaggccgggtccatgaaagtgtgaaacgcagcaactgctacatggtctggggtggagacattgtagccagttcccagagatcaaatcggagcaacgtggacctggagatcggctgtctcgtggatctggccatgggcatgttgtccttctcagccaatggaaaggaactgggcacctgctaccaggtggagcctaataccaaagtgtttccagcagtcttcctgcagcctacaagtacttctttgtttcagtttgaacttggaaagctgaagaacgcaatgcccctgtcagcggccatattcaggagtgaagagaagaacccagtcccacagtgtccacctcggctggacgtccaaaccatccagcccgtgctctggagccgcatgcccaacagcttcctgaaggtggagaccgagcgtgtgagcgagcgccacggctgggtggtgcagtgcctggagcccctgcagatgatggcgctccacatccccgaggagaacaggtgtgtggatatcctggagctctgtgagcaggaggacctgatgcggttccattaccacacgctgaggctctacagcgcggtgtgcgccctgggaaacagccgcgtggcctacgccctgtgcagccacgtggacctctcccagctcttctatgccattgacaacaagtacctccccggcctccttcgatctggtttctatgacctgctcatcagcatccacctggccagcgccaaggagaggaagctgatgatgaagaacgagtacatcatccccattaccagcaccaccaggaatatccgcctcttcccggacgagtccaagaggcatggactgcctggggtgggcctgagaacatgtctcaagcccgggttcaggttctccaccccttgctttgttgtgactggtgaggatcaccaaaagcagagccccgagattcccttggagagtctcaggacgaaggctctgagtatgctgacagaggcagtgcagtgcagcggggcccacatccgagaccctgtaggggggtctgtggagttccagtttgtgcctgtgctgaaactcattggaaccctgctggtcatgggcgtgtttgatgatgatgatgttcggcagatcctcctcctgattgatccctctgtgtttggggagcatagtgcggggacagaggagggagcagaaaaggaggaagtgacccaggtggaggagaaggctgtggaggctggggagaaggccggcaaggaggctcctgtcaaaggcttgttgcagactcgattacccgaatccgtcaagctgcagatgtgtgagctcctcagctatctctgcgactgtgagctgcagcaccgagtggaggccattgtggcatttggtgacatttatgtctccaagctgcaggcaaatcagaagttccgctacaatgagctcatgcaggccctgaacatgtctgcggccctgactgcccggaagaccaaggagttccgctcacccccacaggagcagatcaacatgctgcttaactttcaactgggagagaactgcccctgcccagaggagattcgggaggagctgtatgatttccatgaggaccttctccttcactgtggggttcctttggaagaagaggaagaggaggaggaggacacctcctggacaggaaaactctgtgccttggtttacaaaatcaaaggcccacccaagccagagaaggagcagccgacggaggaggaggagagatgccccacaacattgaaggaactcatctcacagacgatgatctgctgggcccaggaggaccagatccaggattcagagctggtccgaatgatgttcaacctcctccggaggcagtatgacagcattggggagctgctgcaggcgctgcggaagacctacaccatcagccacacctctgtaagcgacaccatcaacctgctggctgccctgggccaaatccgctccctcctcagtgtcaggatgggcaaggaagaggagttgctcatgatcaatgggctgggagacataatgaacaacaaggtgttttaccagcatcccaacctcatgagagtcctgggcatgcacgagacggtgatggaggtgatggtgaacgtgttgggtacagagaaatctcagattgcatttccaaagatggttgctagctgctgccgtttcctttgctatttctgtcgaattagccggcaaaatcagaaggccatgtttgagcatctgagttatcttctggagaatagcagtgttggcctagcctccccgtcgatgaggggatccaccccgctggatgtggcagcttcctctgtgatggacaacaatgagttagcgctgagcttagaggaaccagacctcgagaaggtggtgacctacttggcaggctgtggcctacagagctgccccatgcttctggccaaaggataccctgatgtcggctggaaccccattgaaggggaacgctacctgtccttcctgaggtttgctgtcttcgtgaacagtgagagtgtggaagaaaacgccagcgttgtggtcaagctgctcatcagacgcccagagtgcttcggcccggccctgcggggtgaggggggaaacgggctcttggcagccatgcagggtgccattaagatctctgagaacccagcgctcgacctcccctctcaaggatacaaaagagaagtcacgggggacgatgaagaggaagaagaaatcgtgcatatgggcaatgcaattatgtcattttattcggcccttatagatctactgggccgctgtgctcctgaaatgcacctcatccagacaggaaagggggaagccatccgcatcaggtccatcctgcgctccctggtccccacagaagacctggttgggatcatcagcatccccttgaaactgccctccctcaacaaagatgggtcggtcagtgagccagatatggcggccaatttctgccctgaccacaaggcacctatggtgctgttcttggaccgcgtttatggcattaaggatcaaacttttctgctccacttgctggaggttggatttttacctgacctaagagcttctgcctctctagatacagtttccctaagcaccacagaggctgcgcttgcactaaataggtatatatgttctgctgtgctcccgctcctcacaagatgtgcccctctctttgccggaacagaacactgcacctctctgattgattccacactgcagacaatatacaggctatccaagggacgttccctcaccaaagcacaaagggacactatagaagaatgtttgcttgccatttgcaatcacttgaggccttccatgttacagcaactcctgcgacgcctcgtttttgatgtgccgcaactcaatgaatactgcaaaatgcctctcaagcttctgacgaatcactatgaacagtgttggaagtattactgcctgccttcaggatgggggagctacgggctagctgtggaagaagagctgcacctaacggagaagcttttctgggggatttttgactcgctctcccataagaaatatgacccagatcttttccgaatggccctgccttgtctcagtgctatagctggggccttgccaccagattatttagataccagaatcacagccacgttggagaaacagatctcagtggatgcggatggcaactttgacccaaaacctattaacaccatgaatttttccttgcctgaaaaattggaatacatcgtcaccaagtatgctgagcattcacatgataaatgggcctgtgacaagagtcagagtggatggaaatatgggatttccctggatgaaaatgtgaagacccacccactgataaggcctttcaagacattaacggagaaggagaaggaaatttatcgctggcctgcgcgagagtccctgaaaaccatgctggctgtgggctggactgtggagaggaccaaagagggagaagctttggttcaacagcgggaaaatgagaagcttcgaagtgtgtcccaggccaaccagggcaacagctacagtcctgctcccctcgacctctcaaacgttgtgctctccagagagctccagggaatggtggaggtcgtggctgagaactatcacaatatctgggccaagaagaagaagctggagctggagagcaaaggtggtggcagccaccctcttctggtaccatatgacaccttgactgccaaggaaaagttcaaggaccgggagaaggcacaggacctgtttaagttcctccaagtgaatggcatcatagtttccaggggtatgaaggatatggagctggatgcctcctccatggagaagaggtttgcctataagttcttgaagaagatcctgaaatacgttgattctgctcaagaatttattgcccatttagaagccattgtcagcagtgggaaaactgaaaagtctccccgtgaccaggagatcaaattctttgccaaagttctcctcccgctggttgaccagtacttcaccagtcattgcctctacttcttgtcatcccctctgaagccccttagcagcagcggatatgcctcccataaggagaaagaaatggtggccggcctgttctgcaaacttgccgctctcgttagacacagaatttccctctttggtagtgattctactacaatggtgagctgtcttcacatcttagctcagacacttgacacaaggactgtcatgaagtcaggctcagagctggtgaaggctgggttacgagcattctttgaaaatgctgcagaagatttggagaagacttcagaaaacctgaaacttgggaagttcacccattcccgaacgcagattaaaggcgtttctcagaatattaactacactacagtggctctgctccccatcctgacgtccatctttgagcacgtcactcagcatcagtttggaatggatctactcttgggtgatgtgcagatttcatgctaccacatactgtgcagcctctactcccttgggacgggaaagaacatttatgttgaaaggcaacgccctgcccttggagaatgtctggcctcgctggcagctgccataccagtggcattcctggagcccacccttaatcgctacaatccactctcggtcttcaacaccaaaacccccagggagaggtctattctggggatgccagacacggtagaagacatgtgtcctgacatcccccagctggaaggcctgatgaaggaaatcaacgacctggccgagtcaggggcccggtacacagagatgccccatgtcatcgaggtgatcttacccatgctctgcaactacttgtcctactggtgggagcggggtcctgagaacctgccccccagcacagggccatgctgcaccaaggtcacctctgaacacctcagtctcatcctgggcaacattctgaaaatcatcaacaacaacctgggcatcgatgaggcctcctggatgaagcgcattgcagtgtatgcacagcccatcatcagcaaagccaggcccgacctgctgagaagccacttcatcccaactctggagaagctgaagaaaaaggctgtcaagacggtgcaggaggaggagcagttgaaagccgatggcaaaggggacacccaggaggcagaactcctcatcctggacgagttcgcggtcctctgcagagatctctatgccttctaccccatgctgatccgctacgtggacaacaacagatctaactggctgaaaagtcctgatgctgattctgaccagctcttccgcatggtggcagaagtcttcattctgtggtgtaaatctcataacttcaagagagaagagcaaaattttgtgattcagaatgaaattaataatttggcatttttaactggagacagcaaaagcaagatgtcaaaatctggaggacaagaccaggagcggaagaagacaaagcggcggggagacttgtattccatccagacctccctcatcgtggctgcactcaagaaaatgctgcccattggtttgaatatgtgtactccaggcgaccaggagctgatctccctcgcaaaatcgcgatacagccatagggacacagatgaagaggtcagagaacatctgcggaacaacttgcacttgcaggaaaagtctgatgacccagctgtaaaatggcaactgaacctctacaaggatgttctgaagagtgaagaacctttcaatccggaaaagacagtggagcgtgtgcagagaatttcagcagctgtcttccacctggaacaggtggaacagcctttgaggtccaagaaggccgtctggcacaaactgttatcaaagcaacggaaacgggcagtggtggcctgtttcaggatggcccctctctacaacctgcccagacacaaaattaataatttcttcctgagcacctttcaacaagtttggctggaaaaggttaatgaaaaaactcagtatgacaggcttatacccattttaatgaaatctccaaaggtggaagaggaggaggaggaagagacagaaaaacaacctgacccactacatcagatcattctctattttagccgcaacgctctcacggagaggagcaaattggaagacgaccctttgtacacctcctattccagcatgatggccaagagttgtcaaagtggtgaggatgaagaagaagatgaagacaaggaaaaaacattcgaagagaaagagatggagaagcaaaaaaccctctatcagcaagctcggctgcatgagcgtggtgctgcagagatggtccttcagatgataagcgctagcaaaggtgagatgagccccatggtggttgagacgctgaagctggggatcgccattctgaacggaggcaatgctggtgtgcaacagaaaatgctagattacctaaaggagaaaaaggatgctggattctttcaaagcctttctggtcttatgcagtcttgcagtgtccttgatttgaatgcatttgagaggcagaataaagctgaaggcctggggatggtgactgaagaaggaacacgtgaaaaagtactccagaatgacgagttcacgcgtgatctctttagattcctacagttactttgtgagggacataacagtgactttcagaacttcctgcggactcagatgggcaacaccaccaccgtgaatgtcatcatcagcactgtggactaccttctgcgtctgcaggaatcaatcagtgatttctactggtattattcagggaaggacatcattgatgaatctggacagcacaatttttccaaagctctggcagtcaccaagcagattttcaattctcttacagaatacatccagggcccttgcattggtaatcaacagagcctggctcacagcaggctgtgggacgcagtggttggcttcctccatgtctttgctaatatgcagatgaaactctctcaggattccagtcagatcgagctgctgaaggaactcttggatctccttcaggacatggtggtgatgcttctgtccctcctggaagggaatgtggtaaatggcaccattggcaagcagatggttgacacactggtagaatcatctaccaatgtagaaatgatcttgaaattctttgacatgttcttgaaacttaaagacttaaccagctcagacaccttcaaagaatatgacccagatggtaaaggaattatctccaaaaaagaattccagaaggccatggaagggcaaaaacagtacacgcagtcagagattgactttctcctgtcgtgtgcagaagctgatgagaatgacatgtttaattacgttgattttgtagaccggttccatgagccagccaaggacatagggtttaatgtggctgtgttattgacaaatctttctgaacacatgccaaacgattcccgcctgaagtgtctgttggacccagcagaaagtgtgctaaattacttcgaaccctacctaggacgcatcgagatcatgggtggggccaagaagattgagcgtgtttattttgagatcagtgaatccagtcgcactcagtgggagaagccccaggtgaaggaatctaagcgacagttcatttttgatgttgtcaatgaaggtggggagcaggaaaagatggagctgtttgtgaacttctgtgaggacaccatctttgaaatgcagttagcatctcagatctctgaatccgattcagctgacaggccagaagaggaggaagaagatgaagattcttcttacgtgttagaaattgcgggtgaagaggaagaagacgggtctcttgagccggcctctgcatttgctatggcctgtgcctctgtgaagaggaatgtcaccgacttcctgaagagagcaaccctgaagaacctcaggaagcagtacaggaacgtgaaaaagatgactgcgaaggagctggtgaaggtgctcttctcctttttctggatgctgttcgtggggctattccagttgctcttcaccatcctgggaggaatctttcagatcctctggagcacagtgtttggagggggcctggtagaaggggcaaagaacatcagagtgaccaagatcctgggtgacatgcctgacccaacccaatttggtatccatgatgacactatggaggctgagagggcagaggtgatggagccaggtatcaccactgaactagtacacttcataaagggggagaagggagatacagatatcatgtcagacctctttggactccacccaaagaaagagggcagcttaaagcatgggcctgaagtgggtttgggtgacctctcagaaattattggcaaggatgaaccccctacattagagagtactgtacagaagaagaggaaagctcaggcagcagaaatgaaagcagcaaatgaagcagaaggaaaagtagaatccgagaaggcagacatggaagatggagagaaggaagacaaagacaaagaagaggagcaagctgagtacctgtggacagaagtgacaaaaaagaagaagcggcggtgtggtcagaaggttgagaagccggaagctttcacagccaatttctttaaagggctggaaatctatcagaccaagttactgcattacctggccaggaatttctacaacctgaggttccttgctctgtttgtagccttcgctatcaacttcatcctgcttttttataaggtcactgaagaacctttagaagaagagacagaggatgttgcaaacctatggaattcctttaatgacgaggaagaggaagaagcgatggtattctttgtccttcaggagagcaccgggtatatggcaccaaccctgcgtgccctggccatcatccataccatcatctctctagtctgtgtggtgggctactactgcctgaaggtgcctttggtggttttcaaaagggaaaaagaaatcgccaggaagctggagtttgatggcctatatatcaccgaacagccatctgaagatgacatcaaggggcagtgggaccgcttggtgatcaacacaccatcttttcctaataactactgggacaagtttgtaaagagaaaggtgatcaacaagtatggagatctctacggagcagaacgcattgctgaacttctgggtttggacaaaaatgctcttgactttagcccagtagaagagaccaaagcagaagcggcttctctggtgtcatggctaagttccatagacatgaagtaccatatctggaagcttggagttgtttttactgacaactcctttctctaccttgcctggtatacaaccatgtcagtcctgggccactacaataacttcttctttgctgctcacctattggacatcgcaatgggcttcaagacactgaggaccattctgtcatctgtaactcacaatggcaaacagttggttctgactgtcggtctcctggccgtggtggtttatctctatactgtggtggctttcaacttcttccgcaagttctacaacaaaagcgaagacgatgacgagcccgatatgaagtgcgacgacatgatgacgtgttaccttttccacatgtacgtgggagtgagagcaggaggtggcattggtgatgaaattgaagaccctgctggtgatccttatgaaatgtatcgcattgtctttgacattacctttttcttcttcgtcattgtcatcttgctggccatcattcaaggtcttattattgatgctttcggagagctaagagaccagcaggaacaagtacgagaagatatggagactaaatgtttcatctgtgggattggcaatgactactttgacacaacccctcatggttttgaaacacatacattacaagagcacaacttagccaactacttgttctttctgatgtatttgattaataaagatgaaacagagcacacgggtcaggaatcttatgtctggaagatgtaccaagaaaggtgttgggatttcttcccagccggtgactgctttcgtaaacaatatgaagatcagcttggataaatctgaatcaaagaagcgcgacaattctggacagtcaacttcccatgaaataaagtcccctttttacagttctgcaacatatctgaaatgtgacattttctaaatgcctcccttaaaaaaaaaactgctgaaaatctgtgctattttgaaattgatttggctttttgtgcctaatggacatacactgtgggagagaacctgtcaaaatgtcgaagaaggaaggcgaagaatcaagtaatctctaggcaaatgccttcaagttttccagttctgaggtaactagttcagtttgttgggatggaagcatgaaggaaagggctagagaagtatgaaatctcgaatgtgtaatacctgaaaatttaaacacttgaatgtcatcatggtatccaacttgtgactcatagggtctgaactcactccaaaagataataactgcagtctaatttttcccatggtacttgctagtgactgtatccagaaaagctttaagcagttaaa

SEQ ID NO: 18315 - DNA, 137 bp, Homo sapiens
  source 1..137: mol_type = unassigned DNA
gcgaggacgagatccagtttctgaggacttacattcctccagatctctgcgtctgcaattttgtgctggaacagtccctatctgtcagagccctgcaggaaatgcttgccaacacaggtgaaaatggcggcgaaggg

SEQ ID NO: 18316 - DNA, 100 bp, Homo sapiens
  source 1..100: mol_type = unassigned DNA
cttgactacatcaagatcccagacagacaaacttgcctttgatgtaggtctacgggaacatgccacagggaaaatgaaaatgacagacatagtcaagagc

SEQ ID NO: 18317 - DNA, 100 bp, Homo sapiens
  source 1..100: mol_type = unassigned DNA
gactagctgaaaacatccatgagctttggggaatgaataaaatagaacttggctggactttcggcaagtgccagctggtcaaaacttaaatcacattctt

SEQ ID NO: 18318 - DNA, 100 bp, Homo sapiens
  source 1..100: mol_type = unassigned DNA
aagggactgggtcaaggtcaggccctttggtatgtcaaggaaacagatgcaagaaatactctctcatacaacaacacagtgctactacgccatccgcatc

SEQ ID NO: 18319 - DNA, 8528 bp, Homo sapiens
  source 1..8528: mol_type = unassigned DNA
gggccgctgtgctcctgaaatgcacctcatccagacaggaaagggggaagccatccgcatcaggtccatcctgcgctccctggtccccacagaagacctggttgggatcatcagcatccccttgaaactgccctccctcaacaaagatgggtcggtcagtgagccagatatggcggccaatttctgccctgaccacaaggcacctatggtgctgttcttggaccgcgtttatggcattaaggatcaaacttttctgctccacttgctggaggttggatttttacctgacctaagagcttctgcctctctagatacagtttccctaagcaccacagaggctgcgcttgcactaaataggtatatatgttctgctgtgctcccgctcctcacaagatgtgcccctctctttgccggaacagaacactgcacctctctgattgattccacactgcagacaatatacaggctatccaagggacgttccctcaccaaagcacaaagggacactatagaagaatgtttgcttgccatttgcaatcacttgaggccttccatgttacagcaactcctgcgacgcctcgtttttgatgtgccgcaactcaatgaatactgcaaaatgcctctcaagcttctgacgaatcactatgaacagtgttggaagtattactgcctgccttcaggatgggggagctacgggctagctgtggaagaagagctgcacctaacggagaagcttttctgggggatttttgactcgctctcccataagaaatatgacccagatcttttccgaatggccctgccttgtctcagtgctatagctggggccttgccaccagattatttagataccagaatcacagccacgttggagaaacagatctcagtggatgcggatggcaactttgacccaaaacctattaacaccatgaatttttccttgcctgaaaaattggaatacatcgtcaccaagtatgctgagcattcacatgataaatgggcctgtgacaagagtcagagtggatggaaatatgggatttccctggatgaaaatgtgaagacccacccactgataaggcctttcaagacattaacggagaaggagaaggaaatttatcgctggcctgcgcgagagtccctgaaaaccatgctggctgtgggctggactgtggagaggaccaaagagggagaagctttggttcaacagcgggaaaatgagaagcttcgaagtgtgtcccaggccaaccagggcaacagctacagtcctgctcccctcgacctctcaaacgttgtgctctccagagagctccagggaatggtggaggtcgtggctgagaactatcacaatatctgggccaagaagaagaagctggagctggagagcaaaggtggtggcagccaccctcttctggtaccatatgacaccttgactgccaaggaaaagttcaaggaccgggagaaggcacaggacctgtttaagttcctccaagtgaatggcatcatagtttccaggggtatgaaggatatggagctggatgcctcctccatggagaagaggtttgcctataagttcttgaagaagatcctgaaatacgttgattctgctcaagaatttattgcccatttagaagccattgtcagcagtgggaaaactgaaaagtctccccgtgaccaggagatcaaattctttgccaaagttctcctcccgctggttgaccagtacttcaccagtcattgcctctacttcttgtcatcccctctgaagccccttagcagcagcggatatgcctcccataaggagaaagaaatggtggccggcctgttctgcaaacttgccgctctcgttagacacagaatttccctctttggtagtgattctactacaatggtgagctgtcttcacatcttagctcagacacttgacacaaggactgtcatgaagtcaggctcagagctggtgaaggctgggttacgagcattctttgaaaatgctgcagaagatttggagaagacttcagaaaacctgaaacttgggaagttcacccattcccgaacgcagattaaaggcgtttctcagaatattaactacactacagtggctctgctccccatcctgacgtccatctttgagcacgtcactcagcatcagtttggaatggatctactcttgggtgatgtgcagatttcatgctaccacatactgtgcagcctctactcccttgggacgggaaagaacatttatgttgaaaggcaacgccctgcccttggagaatgtctggcctcgctggcagctgccataccagtggcattcctggagcccacccttaatcgctacaatccactctcggtcttcaacaccaaaacccccagggagaggtctattctggggatgccagacacggtagaagacatgtgtcctgacatcccccagctggaaggcctgatgaaggaaatcaacgacctggccgagtcaggggcccggtacacagagatgccccatgtcatcgaggtgatcttacccatgctctgcaactacttgtcctactggtgggagcggggtcctgagaacctgccccccagcacagggccatgctgcaccaaggtcacctctgaacacctcagtctcatcctgggcaacattctgaaaatcatcaacaacaacctgggcatcgatgaggcctcctggatgaagcgcattgcagtgtatgcacagcccatcatcagcaaagccaggcccgacctgctgagaagccacttcatcccaactctggagaagctgaagaaaaaggctgtcaagacggtgcaggaggaggagcagttgaaagccgatggcaaaggggacacccaggaggcagaactcctcatcctggacgagttcgcggtcctctgcagagatctctatgccttctaccccatgctgatccgctacgtggacaacaacagatctaactggctgaaaagtcctgatgctgattctgaccagctcttccgcatggtggcagaagtcttcattctgtggtgtaaatctcataacttcaagagagaagagcaaaattttgtgattcagaatgaaattaataatttggcatttttaactggagacagcaaaagcaagatgtcaaaagccatgcaagtaaaggtacaggtcaaatgcatgacgtgtcttttctgtcctagtattagaggtgccgggctctggccccctctgcactgtgatcaccatgggggtggtagagaatggattttcccgcctggaggtcccccaggcctgctccagggaagacaactgcctgtcaaagagtgaatgtaggcctacccacccttggaatggggaagccggggaagccagccaagcctcaccctaaccgagtctggaggacaagaccaggagcggaagaagacaaagcggcggggagacttgtattccatccagacctccctcatcgtggctgcactcaagaaaatgctgcccattggtttgaatatgtgtactccaggcgaccaggagctgatctccctcgcaaaatcgcgatacagccatagggacacagatgaagaggtcagagaacatctgcggaacaacttgcacttgcaggaaaagtctgatgacccagctgtaaaatggcaactgaacctctacaaggatgttctgaagagtgaagaacctttcaatccggaaaagacagtggagcgtgtgcagagaatttcagcagctgtcttccacctggaacaggtggaacagcctttgaggtccaagaaggccgtctggcacaaactgttatcaaagcaacggaaacgggcagtggtggcctgtttcaggatggcccctctctacaacctgcccaggcaccgctctattaacctcttcctccatggctatcagagattttggatagaaacagaggagtattcctttgaagagaaactagtacaggatttggctaaatctccaaaggtggaagaggaggaggaggaagagacagaaaaacaacctgacccactacatcagatcattctctattttagccgcaacgctctcacggagaggagcaaattggaagacgaccctttgtacacctcctattccagcatgatggccaagagttgtcaaagtggtgaggatgaagaagaagatgaagacaaggaaaaaacattcgaagagaaagagatggagaagcaaaaaaccctctatcagcaagctcggctgcatgagcgtggtgctgcagagatggtccttcagatgataagcgctagcaaaggtgagatgagccccatggtggttgagacgctgaagctggggatcgccattctgaacggaggcaatgctggtgtgcaacagaaaatgctagattacctaaaggagaaaaaggatgctggattctttcaaagcctttctggtcttatgcagtcttgcagtgtccttgatttgaatgcatttgagaggcagaataaagctgaaggcctggggatggtgactgaagaaggaacactcattgttcgggaacgtggtgaaaaagtactccagaatgacgagttcacgcgtgatctctttagattcctacagttactttgtgagggacataacagtgactttcagaacttcctgcggactcagatgggcaacaccaccaccgtgaatgtcatcatcagcactgtggactaccttctgcgtctgcaggaatcaatcagtgatttctactggtattattcagggaaggacatcattgatgaatctggacagcacaatttttccaaagctctggcagtcaccaagcagattttcaattctcttacagaatacatccagggcccttgcattggtaatcaacagagcctggctcacagcaggctgtgggacgcagtggttggcttcctccatgtctttgctaatatgcagatgaaactctctcagggaatgtggtaaatggcaccattggcaagcagatggttgacacactggtagaatcatctaccaatgtagaaatgatcttgaaattctttgacatgttcttgaaacttaaagacttaaccagctcagacaccttcaaagaatatgacccagatggtaaaggaattatctccaaaaaagaattccagaaggccatggaagggcaaaaacagtacacgcagtcagagattgactttctcctgtcgtgtgcagaagctgatgagaatgacatgtttaattacgttgattttgtagaccggttccatgagccagccaaggacatagggtttaatgtggctgtgttattgacaaatctttctgaacacatgccaaacgattcccgcctgaagtgtctgttggacccagcagaaagtgtgctaaattacttcgaaccctacctaggacgcatcgagatcatgggtggggccaagaagattgagcgtgtttattttgagatcagtgaatccagtcgcactcagtgggagaagccccaggtgaaggaatctaagcgacagttcatttttgatgttgtcaatgaaggtggggagcaggaaaagatggagctgtttgtgaacttctgtgaggacaccatctttgaaatgcagttagcatctcagatctctgaatccgattcagctgacaggccagaagaggaggaagaagatgaagattcttcttacgtgttagaaattgcgggtgaagaggaagaagacgggtctcttgagccggcctctgcatttgctatggcctgtgcctctgtgaagaggaatgtcaccgacttcctgaagagagcaaccctgaagaacctcaggaagcagtacaggaacgtgaaaaagatgactgcgaaggagctggtgaaggtgctcttctcctttttctggatgctgttcgtggggctattccagttgctcttcaccatcctgggaggaatctttcagatcctctggagcacagtgtttggagggggcctggtagaaggggcaaagaacatcagagtgaccaagatcctgggtgacatgcctgacccaacccaatttggtatccatgatgacactatggaggctgagagggcagaggtgatggagccaggtatcaccactgaactagtacacttcataaagggggagaagggagatacagatatcatgtcagacctctttggactccacccaaagaaagagggcagcttaaagcatgggcctgaagtgggtttgggtgacctctcagaaattattggcaaggatgaaccccctacattagagagtactgtacagaagaagaggaaagctcaggcagcagaaatgaaagcagcaaatgaagcagaaggaaaagtagaatccgagaaggcagacatggaagatggagagaaggaagacaaagacaaagaagaggagcaagctgagtacctgtggacagaagtgacaaaaaagaagaagcggcggtgtggtcagaaggttgagaagccggaagctttcacagccaatttctttaaagggctggaaatctatcagaccaagttactgcattacctggccaggaatttctacaacctgaggttccttgctctgtttgtagccttcgctatcaacttcatcctgcttttttataaggtcactgaagaacctttagaagaagagacagaggatgttgcaaacctatggaattcctttaatgacgaggaagaggaagaagcgatggtattctttgtccttcaggagagcaccgggtatatggcaccaaccctgcgtgccctggccatcatccataccatcatctctctagtctgtgtggtgggctactactgcctgaaggtgcctttggtggttttcaaaagggaaaaagaaatcgccaggaagctggagtttgatggcctatatatcaccgaacagccatctgaagatgacatcaaggggcagtgggaccgcttggtgatcaacacaccatcttttcctaataactactgggacaagtttgtaaagagaaaggtgatcaacaagtatggagatctctacggagcagaacgcattgctgaacttctgggtttggacaaaaatgctcttgactttagcccagtagaagagaccaaagcagaagcggcttctctggtgtcatggctaagttccatagacatgaagtaccatatctggaagcttggagttgtttttactgacaactcctttctctaccttgcctggtatacaaccatgtcagtcctgggccactacaataacttcttctttgctgctcacctattggacatcgcaatgggcttcaagacactgaggaccattctgtcatctgtaactcacaatggcaaacagttggttctgactgtcggtctcctggccgtggtggtttatctctatactgtggtggctttcaacttcttccgcaagttctacaacaaaagcgaagacgatgacgagcccgatatgaagtgcgacgacatgatgacgtgttaccttttccacatgtacgtgggagtgagagcaggaggtggcattggtgatgaaattgaagaccctgctggtgatccttatgaaatgtatcgcattgtctttgacattacctttttcttcttcgtcattgtcatcttgctggccatcattcaaggtcttattattgatgctttcggagagctaagagaccagcaggaacaagtacgagaagatatggagactaaatgtttcatctgtgggattggcaatgactactttgacacaacccctcatggttttgaaacacatacattacaagagcacaacttagccaactacttgttctttctgatgtatttgattaataaagatgaaacagagcacacgggtcaggaatcttatgtctggaagatgtaccaagaaaggtgttgggatttcttcccagccggtgactgctttcgtaaacaatatgaagatcagcttggataaatctgaatcaaagaagcgcgacaattctggacagtcaacttcccatgaaataaagtcccctttttacagttctgcaacatatctgaaatgtgacattttctaaatgcctcccttaaaaaaaaaactgctgaaaatctgtgctattttgaaattgatttggctttttgtgcctaatggacatacactgtgggagagaacctgtcaaaatgtcgaagaaggaaggcgaagaatcaagtaatctctaggcaaatgccttcaagttttccagttctgaggtaactagttcagtttgttgggatggaagcatgaaggaaagggctagagaagtatgaaatctcgaatgtgtaatacctgaaaatttaaacacttgaatgtcatcatggtatccaacttgtgactcatagggtctgaactcactccaaaagataataactgcagtctaatttttcccatggtacttgctagtgactgtatccagaaaagctttaagcagttaaagaaacagaaaaaaaccgacactttgtcgacactgaaatatcgattaagtgccttaaaacctctttagacatagctatgcaagttttttatgtttgtgttccagaaggacagttccattcattagttgtgatcttccgtcttactttatgaaactg

SEQ ID NO: 18320 - DNA, 100 bp, Homo sapiens
  source 1..100: mol_type = unassigned DNA
ctgaagccccttagcagcagcggatatgcctcccataaggagaaagaaatggtggccggcaaccaattgaggtatactgtgtgggagtacccgtggggct

SEQ ID NO: 18321 - DNA, 100 bp, Homo sapiens
  source 1..100: mol_type = unassigned DNA
gtctgcctgggctgagtgtgtgatccacatggtgcagtgataagcattcagcccctgaaggagggacacagatgaagaggtcagagaacatctgcggaac

SEQ ID NO: 18322 - DNA, 143 bp, Homo sapiens
  source 1..143: mol_type = unassigned DNA
caaactgttatcaaagcaacggaaacgggcagtggtggcctgtttcaggatggcccctctctacaacctgcccaggaatagaaattggaatccttggcctatggagctattgcagtctgcatagtataagggcctggctaaga

SEQ ID NO: 18323 - DNA, 100 bp, Homo sapiens
  source 1..100: mol_type = unassigned DNA
ttgcagtctgcatagtataagggcctggctaagacaatcaaggcaccgctctattaacctcttcctccatggctatcagagattttggatagaaacagag

SEQ ID NO: 18324 - DNA, 161 bp, Homo sapiens
  source 1..161: mol_type = unassigned DNA
attgtctgtcttctcccttccctgctccatgaaatccagagttgtcaaagtggtgaggatgaagaagaagatgaagacaaggaaaaaacattcgaagagaaagagatggagaagcaaaaaaccctctatcagcaagctcggctgcatgagcgtggtgctgc

SEQ ID NO: 18325 - DNA, 451 bp, Homo sapiens
  source 1..451: mol_type = unassigned DNA
aaccctctatcagcaagctcggctgcatgagcgtggtgctgcagagatggtccttcagatgataagcgctagcaaaggtgagatgagccccatggtggttgagacgctgaagctggggatcgccattctgaacggaggcaatgctggtgtgcaacagaaaatgctagattacctaaaggagaaaaaggatgctggattctttcaaagcctttctggtcttatgcagtcttgcagtgtccttgatttgaatgcatttgagaggcagaataaagctgaaggcctggggatggtgactgaagaaggaacacgtaagtaactaatgaatgtgaaggccattctcttcctgattaaaatctttttttttttttttttttttttccccatacagagtttcgctcttgttgctcaggctggactgcagtggcgcgatctcacctcactgcaacctctg

SEQ ID NO: 18326 - DNA, 100 bp, Homo sapiens
  source 1..100: mol_type = unassigned DNA
gaaagatcctagagacctggtatctctgcacttcttcacagggtccctggctcctgtcagagcaaagaggaatcaatcagtgatttctactggtattatt

SEQ ID NO: 18327 - DNA, 3714 bp, Homo sapiens
  source 1..3714: mol_type = unassigned DNA
tggtaatcaacagagcctggctcacagcaggctgtgggacgcagtggttggcttcctccatgtctttgctaatatgcagatgaaactctctcaggattccagtcagatcgagctgctgaaggaactcttggatctccttcaggacatggtggtgatgcttctgtccctcctggaagggaatgtggtaaatggcaccattggcaagcagatggttgacacactggtagaatcatctaccaatgtagaaatgatcttgaaattctttgacatgttcttgaaacttaaagacttaaccagctcagacaccttcaaagaatatgacccagatggtaaaggaattatctccaaaaaagaattccagaaggccatggaagggcaaaaacagtacacgcagtcagagattgactttctcctgtcgtgtgcagaagctgatgagaatgacatgtttaattacgttgattttgtagaccggttccatgagccagccaaggacatagggtttaatgtggctgtgttattgacaaatctttctgaacacatgccaaacgattcccgcctgaagtgtctgttggacccagcagaaagtgtgctaaattacttcgaaccctacctaggacgcatcgagatcatgggtggggccaagaagattgagcgtgtttattttgagatcagtgaatccagtcgcactcagtgggagaagccccaggtgaaggaatctaagcgacagttcatttttgatgttgtcaatgaaggtggggagcaggaaaagatggagctgtttgtgaacttctgtgaggacaccatctttgaaatgcagttagcatctcagatctctgaatccgattcagctgacaggccagaagaggaggaagaagatgaagattcttcttacgtgttagaaattgcgggtgaagaggaagaagacgggtctcttgagccggcctctgcatttgctatggcctgtgcctctgtgaagaggaatgtcaccgacttcctgaagagagcaaccctgaagaacctcaggaagcagtacaggaacgtgaaaaagatgactgcgaaggagctggtgaaggtgctcttctcctttttctggatgctgttcgtggggctattccagttgctcttcaccatcctgggaggaatctttcagatcctctggagcacagtgtttggagggggcctggtagaaggggcaaagaacatcagagtgaccaagatcctgggtgacatgcctgacccaacccaatttggtatccatgatgacactatggaggctgagagggcagaggtgatggagccaggtatcaccactgaactagtacacttcataaagggggagaagggagatacagatatcatgtcagacctctttggactccacccaaagaaagagggcagcttaaagcatgggcctgaagtgggtttgggtgacctctcagaaattattggcaaggatgaaccccctacattagagagtactgtacagaagaagaggaaagctcaggcagcagaaatgaaagcagcaaatgaagcagaaggaaaagtagaatccgagaaggcagacatggaagatggagagaaggaagacaaagacaaagaagaggagcaagctgagtacctgtggacagaagtgacaaaaaagaagaagcggcggtgtggtcagaaggttgagaagccggaagctttcacagccaatttctttaaagggctggaaatctatcagaccaagttactggtcactgaagaacctttagaagaagagacagaggatgttgcaaacctatggaattcctttaatgacgaggaagaggaagaagcgatggtattctttgtccttcaggagagcaccgggtatatggcaccaaccctgcgtgccctggccatcatccataccatcatctctctagtctgtgtggtgggctactactgcctgaaggtgcctttggtggttttcaaaagggaaaaagaaatcgccaggaagctggagtttgatggcctatatatcaccgaacagccatctgaagatgacatcaaggggcagtgggaccgcttggtgatcaacacaccagacggggtttcaccgtgttagccaggatggtctcgatctcctgatctggtgatccacccacctcagcctcccaaagtgctgggattacaggcatgagccaccacgcccggcctgaagtcctcctcttaaccaaatagcctgcttggtaagagacctcgtcttaacgtaagattgagaggcaattacatgggcaggtaaatagagccgtctggtagggatatgaagacctgtggaggcaagcctgccttcctgtaggcatgtggcactgtggtgggaagaaggaagagcactgattgacaggcaggtgacaccaaggctctgacgcttactggtctgtgaacttgcacaaggtaatcaagccttctcagccttagtttcctcatcagtaatagaaggatgagaatatcatcctgcagaggattaatgaatgtatgtgtcaaatgcttggcaaatgcctggcacgtggtaggcattaagctgttactcattctcttttctttcctgtaactatccaaaaagtggccatcaccattagcaaatgtcacactctaatgacagttgattcacaagtaagtgacagtttcaagataaattaatgtggcaaaagaaaagaaatagggccaaatagtaaacaaaggtgactgtgttgaaactcttaggtgtgccaattaagataggcatgttaagaaacagcaaccctgactccaggggaagaaagctgtgtcctatccaaagatgatcaggcaaactgagaagcagctctgcaaaggtacaactaaggatatttatttctttatattctccagaaaaggaagcctcttcccttagaagggggaaaatgtgaacaggcacatcctcacatcctaagtctgtccctgcctgcgggtcccctgccaatcttctcacacaaggaaaagcactgtttctgatgctttgtcattacattacagaagtcttagacactattgaatagtttaatcctttggtaagctttgtgcaatcatcagtaatgcctgcgtcttgttatacaggggcatgtggcctaaaagtcccagtaagaaggcagttcaatttcggccaggcacaatggttcatgcctgtaatcccagcgctttgggaggccgaggcgggtggttcatgaggtcaggagttcgagaccagcctggccaacatagtgaaaccccgtctctactaaaaatacaaaaaaattagctgagcgtggtggtgggcgcctgtaatcccagctacttgggagtctgaggcaaggagaatcacttgaacctgggaggcggaggttgcagtgagctgagatcacaccactgcgctccagcctgggcgacagagcaagacttcatctcaaaaaaaaaaaagaaggcagttcaatttctagcaatgtatcctaaggagataatgagacaagtacactaaaatgtcctaacaaaggtatttcccaatattttttacttagagtggcttaaacgtccatgagtaggaaatgcataaataaatagctattttttaaaatgttagatagaccaatgtttaattttttttcacaatggcatcatagtacatgttcatgttttgtaacgtgctttttttcagttaactgtatgtcatgggagctttctttttaaacattttac

SEQ ID NO: 18328 - DNA, 100 bp, Homo sapiens
  source 1..100: mol_type = unassigned DNA
gtcagatcgagctgctgaaggaactcttggatctccttcaggacatggtggtgatgcttctgtccctcctggaagaccggttccatgagccagccaagga

SEQ ID NO: 18329 - DNA, 100 bp, Homo sapiens
  source 1..100: mol_type = unassigned DNA
gatcgagctgctgaaggaactcttggatctccttcaggacatggtggtgatgcttctgtccctcctggaagctgacaggccagaagaggaggaagaagat

SEQ ID NO: 18330 - DNA, 3026 bp, Homo sapiens
  source 1..3026: mol_type = unassigned DNA
gttagaaattgcgggtgaagaggaagaagacgggtctcttgagccggcctctgcatttgctatggcctgtgcctctgtgaagaggaatgtcaccgacttcctgaagagagcaaccctgaagaacctcaggaagcagtacaggaacgtgaaaaagatgactgcgaaggagctggtgaaggtgctcttctcctttttctggatgctgttcgtggggctattccagttgctcttcaccatcctgggaggaatctttcagatcctctggagcacagtgtttggagggggcctggtagaaggggcaaagaacatcagagtgaccaagatcctgggtgacatgcctgacccaacccaatttggtatccatgatgacactatggaggctgagagggcagaggtgatggagccaggtatcaccactgaactagtacacttcataaagggggagaagggagatacagatatcatgtcagacctctttggactccacccaaagaaagagggcagcttaaagcatgggcctgaagtgggtttgggtgacctctcagaaattattggcaaggatgaaccccctacattagagagtactgtacagaagaagaggaaagctcaggcagcagaaatgaaagcagcaaatgaagcagaaggaaaagtagaatccgagaaggcagacatggaagatggagagaaggaagacaaagacaaagaagaggagcaagctgagtacctgtggacagaagtgacaaaaaagaagaagcggcggtgtggtcagaaggttgagaagccggaagctttcacagccaatttctttaaagggctggaaatctatcagaccaagttactgccaggtcactgaagaacctttagaagaagagacagaggatgttgcaaacctatggaattcctttaatgacgaggaagaggaagaagcgatggtattctttgtccttcaggagagcaccgggtatatggcaccaaccctgcgtgccctggccatcatccataccatcatctctctagtctgtgtggtgggctactactgcctgaaggtgcctttggtggttttcaaaagggaaaaagaaatcgccaggaagctggagtttgatggcctatatatcaccgaacagccatctgaagatgacatcaaggggcagtgggaccgcttggtgatcaacacaccatcttttcctaataactactgggacaagtttgtaaagagaaaggtgatcaacaagtatggagatctctacggagcagaacgcattgctgaacttctgggtttggacaaaaatgctcttgactttagcccagtagaagagaccaaagcagaagcggcttctctggtgtcatggctaagttccatagacatgaagtaccatatctggaagcttggagttgtttttactgacaactcctttctctaccttgcctggtatacaaccatgtcagtcctgggccactacaataacttcttctttgctgctcacctattggacatcgcaatgggcttcaagacactgaggaccattctgtcatctgtaactcacaatggcaaacagttggttctgactgtcggtctcctggccgtggtggtttatctctatactgtggtggctttcaacttcttccgcaagttctacaacaaaagcgaagacgatgacgagcccgatatgaagtgcgacgacatgatgacgtgttaccttttccacatgtacgtgggagtgagagcaggaggtggcattggtgatgaaattgaagaccctgctggtgatccttatgaaatgtatcgcattgtctttgacattacctttttcttcttcgtcattgtcatcttgctggccatcattcaaggtcttattattgatgctttcggagagctaagagaccagcaggaacaagtacgagaagatatggagactaaatgtttcatctgtgggattggcaatgactactttgacacaacccctcatggttttgaaacacatacattacaagagcacaacttagccaactacttgttctttctgatgtatttgattaataaagatgaaacagagcacacgggtcaggaatcttatgtctggaagatgtaccaagaaaggtgttgggatttcttcccagccggtgactgctttcgtaaacaatatgaagatcagcttggataaatctgaatcaaagaagcgcgacaattctggacagtcaacttcccatgaaataaagtcccctttttacagttctgcaacatatctgaaatgtgacattttctaaatgcctcccttaaaaaaaaaactgctgaaaatctgtgctattttgaaattgatttggctttttgtgcctaatggacatacactgtgggagagaacctgtcaaaatgtcgaagaaggaaggcgaagaatcaagtaatctctaggcaaatgccttcaagttttccagttctgaggtaactagttcagtttgttgggatggaagcatgaaggaaagggctagagaagtatgaaatctcgaatgtgtaatacctgaaaatttaaacacttgaatgtcatcatggtatccaacttgtgactcatagggtctgaactcactccaaaagataataactgcagtctaatttttcccatggtacttgctagtgactgtatccagaaaagctttaagcagttaaagaaacagaaaaaaaccgacactttgtcgacactgaaatatcgattaagtgccttaaaacctctttagacatagctatgcaagttttttatgtttgtgttccagaaggacagttccattcattagttgtgatcttccgtcttactttatgaaactgcacttgaaggttattcatacaagtttttttagtaacagctgtcagtcaactgctgttattagaagaaaagtactgtactgaaaattcagaaaaaaaatctcaaccttatgccaaaatggagtaatgctttatggtcccttgtaagtagtggagctgctctgtttaggtgaatctcctcaaatacaatgaagtgcccactgcaataaagtaa

SEQ ID NO: 18331 - DNA, 2973 bp, Homo sapiens
  source 1..2973: mol_type = unassigned DNA
gttcgtggggctattccagttgctcttcaccatcctgggaggaatctttcagatcctctggagcacagtgtttggagggggcctggtagaaggggcaaagaacatcagagtgaccaagatcctgggtgacatgcctgacccaacccaatttggtatccatgatgacactatggaggctgagagggcagaggtgatggagccaggtatcaccactgaactagtacacttcataaagggggagaagggagatacagatatcatgtcagacctctttggactccacccaaagaaagagggcagcttaaagcatgggcctgaagtgggtttgggtgacctctcagaaattattggcaaggatgaaccccctacattagagagtactgtacagaagaagaggaaagctcaggcagcagaaatgaaagcagcaaatgaagcagaaggaaaagtagaatccgagaaggcagacatggaagatggagagaaggaagacaaagacaaagaagaggagcaagctgagtacctgtggacagaagtgacaaaaaagaagaagcggcggtgtggtcagaaggttgagaagccggaagctttcacagccaatttctttaaagggctggaaatctatcagaccaagttactggtcactgaagaacctttagaagaagagacagaggatgttgcaaacctatggaattcctttaatgacgaggaagaggaagaagcgatggtattctttgtccttcaggagagcaccgggtatatggcaccaaccctgcgtgccctggccatcatccataccatcatctctctagtctgtgtggtgggctactactgcctgaaggtgcctttggtggttttcaaaagggaaaaagaaatcgccaggaagctggagtttgatggcctatatatcaccgaacagccatctgaagatgacatcaaggggcagtgggaccgcttggtgatcaacacaccatcttttcctaataactactgggacaagtttgtaaagagaaaggtgatcaacaagtatggagatctctacggagcagaacgcattgctgaacttctgggtttggacaaaaatgctcttgactttagcccagtagaagagaccaaagcagaagcggcttctctggtgtcatggctaagttccatagacatgaagtaccatatctggaagcttggagttgtttttactgacaactcctttctctaccttgcctggtatacaaccatgtcagtcctgggccactacaataacttcttctttgctgctcacctattggacatcgcaatgggcttcaagacactgaggaccattctgtcatctgtaactcacaatggcaaacagattcaaactgtttagcatttcattcctcattaagtacaagtctgtgtatgacagacaggcttcctcacatgtccaaacctttgtacgggagagggagaaaagacggaagttacagtgtgccaagctcatgccgtgtcccagttactgtgacagcctcacaactacctgttggttctgactgtcggtctcctggccgtggtggtttatctctatactgtggtggctttcaacttcttccgcaagttctacaacaaaagcgaagacgatgacgagcccgatatgaagtgcgacgacatgatgacgtgttaccttttccacatgtacgtgggagtgagagcaggaggtggcattggtgatgaaattgaagaccctgctggtgatccttatgaaatgtatcgcattgtctttgacattacctttttcttcttcgtcattgtcatcttgctggccatcattcaaggtcttattattgatgctttcggagagctaagagaccagcaggaacaagtacgagaagatatggagactaaatgtttcatctgtgggattggcaatgactactttgacacaacccctcatggttttgaaacacatacattacaagagcacaacttagccaactacttgttctttctgatgtatttgattaataaagatgaaacagagcacacgggtcaggaatcttatgtctggaagatgtaccaagaaaggtgttgggatttcttcccagccggtgactgctttcgtaaacaatatgaagatcagcttggataaatctgaatcaaagaagcgcgacaattctggacagtcaacttcccatgaaataaagtcccctttttacagttctgcaacatatctgaaatgtgacattttctaaatgcctcccttaaaaaaaaaactgctgaaaatctgtgctattttgaaattgatttggctttttgtgcctaatggacatacactgtgggagagaacctgtcaaaatgtcgaagaaggaaggcgaagaatcaagtaatctctaggcaaatgccttcaagttttccagttctgaggtaactagttcagtttgttgggatggaagcatgaaggaaagggctagagaagtatgaaatctcgaatgtgtaatacctgaaaatttaaacacttgaatgtcatcatggtatccaacttgtgactcatagggtctgaactcactccaaaagataataactgcagtctaatttttcccatggtacttgctagtgactgtatccagaaaagctttaagcagttaaagaaacagaaaaaaaccgacactttgtcgacactgaaatatcgattaagtgccttaaaacctctttagacatagctatgcaagttttttatgtttgtgttccagaaggacagttccattcattagttgtgatcttccgtcttactttatgaaactgcacttgaaggttattcatacaagtttttttagtaacagctgtcagtcaactgctgttattagaagaaaagtactgtactgaaaattcagaaaaaaaatctcaaccttatgccaaaatggagtaatgctttatggtcccttgtaagtagtggagctgctctgtttaggtgaatctcctcaaatacaatgaagtgcccac

SEQ ID NO: 18332 - DNA, 2743 bp, Homo sapiens
  source 1..2743: mol_type = unassigned DNA
agagtgaccaagatcctgggtgacatgcctgacccaacccaatttggtatccatgatgacactatggaggctgagagggcagaggtgatggagccaggtatcaccactgaactagtacacttcataaagggggagaagggagatacagatatcatgtcagacctctttggactccacccaaagaaagagggcagcttaaagcatgggcctgaagtgggtttgggtgacctctcagaaattattggcaaggatgaaccccctacattagagagtactgtacagaagaagaggaaagctcaggcagcagaaatgaaagcagcaaatgaagcagaaggaaaagtagaatccgagaaggcagacatggaagatggagagaaggaagacaaagacaaagaagaggagcaagctgagtacctgtggacagaagtgacaaaaaagaagaagcggcggtgtggtcagaaggttgagaagccggaagctttcacagccaatttctttaaagggctggaaatctatcagaccaagttactggtcactgaagaacctttagaagaagagacagaggatgttgcaaacctatggaattcctttaatgacgaggaagaggaagaagcgatggtattctttgtccttcaggagagcaccgggtatatggcaccaaccctgcgtgccctggccatcatccataccatcatctctctagtctgtgtggtgggctactactgcctgaaggtgcctttggtggttttcaaaagggaaaaagaaatcgccaggaagctggagtttgatggcctatatatcaccgaacagccatctgaagatgacatcaaggggcagtgggaccgcttggtgatcaacacaccatcttttcctaataactactgggacaagtttgtaaagagaaaggtgatcaacaagtatggagatctctacggagcagaacgcattgctgaacttctgggtttggacaaaaatgctcttgactttagcccagtagaagagaccaaagcagaagcggcttctctggtgtcatggctaagttccatagacatgaagtaccatatctggaagcttggagttgtttttactgacaactcctttctctaccttgcctggtatacaaccatgtcagtcctgggccactacaataacttcttctttgctgctcacctattggacatcgcaatgggcttcaagacactgaggaccattctgtcatctgtaactcacaatggcaaacagttggttctgactgtcggtctcctggccgtggtggtttatctctatactgtggtggctttcaacttcttccgcaagttctacaacaaaagcgaagacgatgacgagcccgatatgaagtgcgacgacatgatgacgtgttaccttttccacatgtacgtgggagtgagagcaggaggtggcattggtgatgaaattgaagaccctgctggtgatccttatgaaatgtatcgcattgtctttgacattacctttttcttcttcgtcattgtcatcttgctggccatcattcaaggtcttattattgatgctttcggagagctaagagaccagcaggaacaagtacgagaagatatggagactaaatgtttcatctgtgggattggcaatgactactttgacacaacccctcatggttttgaaacacatacattacaagagcacaacttagccaactacttgttctttctgatgtatttgattaataaagatgaaacagagcacacgggtcaggaatcttatgtctggaagatgtaccaagaaaggtgttgggatttcttcccagccggtgactgctttcgtaaacaatatgaagatcagcttggataaatctgaatcaaagaagcgcgacaattctggacagtcaacttcccatgaaataaagtcccctttttacagttctgcaacatatctgaaatgtgacattttctaaatgcctcccttaaaaaaaaaactgctgaaaatctgtgctattttgaaattgatttggctttttgtgcctaatggacatacactgtgggagagaacctgtcaaaatgtcgaagaaggaaggcgaagaatcaagtaatctctaggcaaatgccttcaagttttccagttctgaggtaactagttcagtttgttgggatggaagcatgaaggaaagggctagagaagtatgaaatctcgaatgtgtaatacctgaaaatttaaacacttgaatgtcatcatggtatccaacttgtgactcatagggtctgaactcactccaaaagataataactgcagtctaatttttcccatggtacttgctagtgactgtatccagaaaagctttaagcagttaaagaaacagaaaaaaaccgacactttgtcgacactgaaatatcgattaagtgccttaaaacctctttagacatagctatgcaagttttttatgtttgtgttccagaaggacagttccattcattagttgtgatcttccgtcttactttatgaaactgcacttgaaggttattcatacaagtttttttagtaacagctgtcagtcaactgctgttattagaagaaaagtactgtactgaaaattcagaaaaaaaatctcaaccttatgccaaaatggagtaatgctttatggtcccttgtaagtagtggagctgctctgtttaggtgaatctcctcaaatacaatgaagtgcccactgcaataaagtaatacgtaccaatacctccagggtctggactct

SEQ ID NO: 18333 - DNA, 100 bp, Homo sapiens
  source 1..100: mol_type = unassigned DNA
caaggatgaaccccctacattagagagtactgtacagaagaagaggaaagctcaggctctgggaatatggtgctgaataagaaacacactgtccctacag

SEQ ID NO: 18334 - DNA, 100 bp, Homo sapiens
  source 1..100: mol_type = unassigned DNA
ggaaagctcaggcagcagaaatgaaagcagcaaatgaagcagaaggaaaagtagaatccgagaaggcagatctccctttttgggccagaccgccctcccg

SEQ ID NO: 18335 - DNA, 1874 bp, Homo sapiens
  source 1..1874: mol_type = unassigned DNA
gttattgtgctttgtcactgttttaggctctgggaatatggtgctgaataagaaacacactgtccctacagcttagtggagaataaaggcattggacaagtcaagacaagtataaagaatgctaggaaggagaaatgtcaggcagcagaaatgaaagcagcaaatgaagcagaaggaaaagtagaatccgagaaggcagacatggaagatggagagaaggaagacaaagacaaagaagaggagcaagctgagtacctgtggacagaagtgacaaaaaagaagaagcggcggtgtggtcagaaggttgagaagccggaagctttcacagccaatttctttaaagggctggaaatctatcagaccaagttactgcattacctggccaggaatttctacaacctgaggttccttgctctgtttgtagccttcgctatcaacttcatcctgcttttttataaggtcactgaagaacctttagaagaagagacagaggatgttgcaaacctatggaattcctttaatgacgaggaagaggaagaagcgatggtattctttgtccttcaggagagcaccgggtatatggcaccaaccctgcgtgccctggccatcatccataccatcatctctctagtctgtgtggtgggctactactgcctgaaggtgcctttggtggttttcaaaagggaaaaagaaatcgccaggaagctggagtttgatggcctatatatcaccgaacagccatctgaagatgacatcaaggggcagtgggaccgcttggtgatcaacacaccatcttttcctaataactactgggacaagtttgtaaagagaaaggtgatcaacaagtatggagatctctacggagcagaacgcattgctgaacttctgggtttggacaaaaatgctcttgactttagcccagtagaagagaccaaagcagaagcggcttctctggtgtcatggctaagttccatagacatgaagtaccatatctggaagcttggagttgtttttactgacaactcctttctctaccttgcctggtatacaaccatgtcagtcctgggccactacaataacttcttctttgctgctcacctattggacatcgcaatgggcttcaagacactgaggaccattctgtcatctgtaactcacaatggcaaacagttggttctgactgtcggtctcctggccgtggtggtttatctctatactgtggtggctttcaacttcttccgcaagttctacaacaaaagcgaagacgatgacgagcccgatatgaagtgcgacgacatgatgacgtgttaccttttccacatgtacgtgggagtgagagcaggaggtggcattggtgatgaaattgaagaccctgctggtgatccttatgaaatgtatcgcattgtctttgacattacctttttcttcttcgtcattgtcatcttgctggccatcattcaaggtcttattattgatgctttcggagagctaagagaccagcaggaacaagtacgagaagatatggagactaaatgtttcatctgtgggattggcaatgactactttgacacaacccctcatggttttgaaacacatacattacaagagcacaacttagccaactacttgttctttctgatgtatttgattaataaagatgaaacagagcacacgggtcaggaatcttatgtctggaagatgtaccaagaaaggtgttgggatttcttcccagccggtgactgctttcgtaaacaatatgaagatcagcttggataaatctgaatcaaagaagcgcgacaattctggacagtcaacttcccatgaaataaagtcccctttttacagttctgcaacatatctgaaatgtgacattt

SEQ ID NO: 18336 - DNA, 100 bp, Homo sapiens
  source 1..100: mol_type = unassigned DNA
acacaagtttcctctttgaattgagcagcagaaatgaaagcagcaaatgaagcagaaggaaaagtagaatccgagaaggcagacatggaagatggagaga

SEQ ID NO: 18337 - DNA, 2257 bp, Homo sapiens
  source 1..2257: mol_type = unassigned DNA
ttgagaagccggaagctttcacagccaatttctttaaagggctggaaatctatcagaccaagttactgcgagtgtgtattttgagccaggtcactgaagaacctttagaagaagagacagaggatgttgcaaacctatggaattcctttaatgacgaggaagaggaagaagcgatggtattctttgtccttcaggagagcaccgggtatatggcaccaaccctgcgtgccctggccatcatccataccatcatctctctagtctgtgtggtgggctactactgcctgaaggtgcctttggtggttttcaaaagggaaaaagaaatcgccaggaagctggagtttgatggcctatatatcaccgaacagccatctgaagatgacatcaaggggcagtgggaccgcttggtgatcaacacaccatcttttcctaataactactgggacaagtttgtaaagagaaaggtgatcaacaagtatggagatctctacggagcagaacgcattgctgaacttctgggtttggacaaaaatgctcttgactttagcccagtagaagagaccaaagcagaagcggcttctctggtgtcatggctaagttccatagacatgaagtaccatatctggaagcttggagttgtttttactgacaactcctttctctaccttgcctggtatacaaccatgtcagtcctgggccactacaataacttcttctttgctgctcacctattggacatcgcaatgggcttcaagacactgaggaccattctgtcatctgtaactcacaatggcaaacagttggttctgactgtcggtctcctggccgtggtggtttatctctatactgtggtggctttcaacttcttccgcaagttctacaacaaaagcgaagacgatgacgagcccgatatgaagtgcgacgacatgatgacgtgttaccttttccacatgtacgtgggagtgagagcaggaggtggcattggtgatgaaattgaagaccctgctggtgatccttatgaaatgtatcgcattgtctttgacattacctttttcttcttcgtcattgtcatcttgctggccatcattcaaggtcttattattgatgctttcggagagctaagagaccagcaggaacaagtacgagaagatatggagactaaatgtttcatctgtgggattggcaatgactactttgacacaacccctcatggttttgaaacacatacattacaagagcacaacttagccaactacttgttctttctgatgtatttgattaataaagatgaaacagagcacacgggtcaggaatcttatgtctggaagatgtaccaagaaaggtgttgggatttcttcccagccggtgactgctttcgtaaacaatatgaagatcagcttggataaatctgaatcaaagaagcgcgacaattctggacagtcaacttcccatgaaataaagtcccctttttacagttctgcaacatatctgaaatgtgacattttctaaatgcctcccttaaaaaaaaaactgctgaaaatctgtgctattttgaaattgatttggctttttgtgcctaatggacatacactgtgggagagaacctgtcaaaatgtcgaagaaggaaggcgaagaatcaagtaatctctaggcaaatgccttcaagttttccagttctgaggtaactagttcagtttgttgggatggaagcatgaaggaaagggctagagaagtatgaaatctcgaatgtgtaatacctgaaaatttaaacacttgaatgtcatcatggtatccaacttgtgactcatagggtctgaactcactccaaaagataataactgcagtctaatttttcccatggtacttgctagtgactgtatccagaaaagctttaagcagttaaagaaacagaaaaaaaccgacactttgtcgacactgaaatatcgattaagtgccttaaaacctctttagacatagctatgcaagttttttatgtttgtgttccagaaggacagttccattcattagttgtgatcttccgtcttactttatgaaactgcacttgaaggttattcatacaagtttttttagtaacagctgtcagtcaactgctgttattagaagaaaagtactgtactgaaaattcagaaaaaaaatctcaaccttatgccaaaatggagtaatgctttatggtcccttgtaagtagtggagctgctctgtttaggtgaatctcctcaaatacaatgaagtgcccac

SEQ ID NO: 18338 - DNA, 137 bp, Homo sapiens
  source 1..137: mol_type = unassigned DNA
caccaaccctgcgtgccctggccatcatccataccatcatctctctagtctgtgtggtgggctactactgcctgaaggagactgaaggggaatgcttggaatcccagagatgagcaccgctctacaacttgatatta

SEQ ID NO: 18339 - DNA, 702 bp, Homo sapiens
  source 1..702: mol_type = unassigned DNA
cacggcaggcattagtcgctgagctttgcctcacctcccacatcatctgtgtactaacagtcatcatcagttcctcacagtgtgcagtggctactagcctttgccaccttcctatcgtgcctttggtggttttcaaaagggaaaaagaaatcgccaggaagctggagtttgatggcctatatatcaccgaacagccatctgaagatgacatcaaggggcagtgggaccgcttggtgatcaacacaccatcttttcctaataactactgggacaagtttgtaaagagaaaggtgatcaacaagtatggagatctctacggagcagaacgcattgctgaacttctgggtttggacaaaaatgctcttgactttagcccagtagaagagaccaaagcagaagcggcttctctggtgtcatggctaagttccatagacatgaagtaccatatctggaagcttggagttgtttttactgacaactcctttctctaccttgcctggtatacaaccatgtcagtcctgggccactacaataacttcttctttgctgctcacctattggacatcgcaatgggcttcaagacactgaggaccattctgtcatctgtaactcacaatggcaaacagttggttctgactgtcggtctcctggccgtggtggtttatctctatactgtggtggctttcaacttcttccgcaagt

SEQ ID NO: 18340 - DNA, 374 bp, Homo sapiens
  source 1..374: mol_type = unassigned DNA
gtgatggttggggcaagtggattattttccaatccctttctgtgtgcctttggtggttttcaaaagggaaaaagaaatcgccaggaagctggagtttgatggcctatatatcaccgaacagccatctgaagatgacatcaaggggcagtgggaccgcttggtgatcaacacaccatcttttcctaataactactgggacaagtttgtaaagagaaaggtgatcaacaagtatggagatctctacggagcagaacgcattgctgaacttctgggtttggacaaaaatgctcttgactttagcccagtagaagagaccaaagcagaagcggcttctctggtgtcatggctaagttccatagacatgaagtaccata

SEQ ID NO: 18341 - DNA, 3156 bp, Homo sapiens
  source 1..3156: mol_type = unassigned DNA
gaacattcttatacctgatacacaagttgaaggatttctctagagtatagacccaggagagaaatttgctgaatagtaggatatgcaaaatgtttgtcccaatttatgctccaaacagtactatattcgagtttcttcttctctgcttatttgctggcacttattgctggcagataattttgctgatctagtaggtgtatagtggcacctcattgtatgtttccctgattactaaatgggttaagcatcttgtactttttccctgaacattcatgtacagatgtactctttatttatgcactttccttctgaaggtctgttctctatgccacactttaaggactcgtaacaagtaaaaaatctgttttctaccttcaaggagtttgcatacctagtcaggggacaagaaattcagaatgctcagatgaaggtaagaccgcatctatgaaggggtcatgcccagagcctgtggtccttggcccttcagcatcactcgtggaatcttctgcttaggagaaaatgcgaccaggctgagttgtatgttaccatttgtataaatgatttaagagaaaggaggtatcagtgtggcagagagcgcatggcttgatttttatttgttttattttcaatttaaatgcagtgcataaaaaaatcaaggagcaatgtacaaggaagaaagtcaaaataattgttattttcatcccccagagataaaatattagcagtttactctgtaacaccagcatttgtttttgctttcaagtggcatttaaatgtttaagacaaagaaactgctttaacaaaccaaaaaaaaaaaacatttttttttaaatactgccaccctgttgggggagaggcggcatgagaggtcagtgaatagtaggaggtctccatttccttatcaccaacttgggtggtctctggagaatagggaactgttgtgttctagaaccaaaaagaatgaatcaaataaaggaaaacaaaagtaagaatgcatgcaccaaaggccagagactcctaggctgcaatccagtcttacaaggaacccccccacaggaaggattcagtaattctggataggaacaacatattttcaatggtttttgcaagcattcctgaagatgacagttctttcttaactttaacagtaagaaatatttgcagtggagctggtacaagctacagagagaagaaagatcatctctctggggatgctaggggatggtacagaaccatctccaaaaaagaaagggatccaactcctggaggaaagcaggccctgtggcattacgtgggaatagaaaatagagtggaaaaacactcagcttaaaaaatccaatgtaaataaactaaagatcttttcctaataactactgggacaagtttgtaaagagaaaggtgatcaacaagtatggagatctctacggagcagaacgcattgctgaacttctgggtttggacaaaaatgctcttgactttagcccagtagaagagaccaaagcagaagcggcttctctggtgtcatggctaagttccatagacatgaagtaccatatctggaagcttggagttgtttttactgacaactcctttctctaccttgcctggtatacaaccatgtcagtcctgggccactacaataacttcttctttgctgctcacctattggacatcgcaatgggcttcaagacactgaggaccattctgtcatctgtaactcacaatggcaaacagttggttctgactgtcggtctcctggccgtggtggtttatctctatactgtggtggctttcaacttcttccgcaagttctacaacaaaagcgaagacgatgacgagcccgatatgaagtgcgacgacatgatgacgtgttaccttttccacatgtacgtgggagtgagagcaggaggtggcattggtgatgaaattgaagaccctgctggtgatccttatgaaatgtatcgcattgtctttgacattacctttttcttcttcgtcattgtcatcttgctggccatcattcaaggtcttattattgatgctttcggagagctaagagaccagcaggaacaagtacgagaagatatggagactaaatgtttcatctgtgggattggcaatgactactttgacacaacccctcatggttttgaaacacatacattacaagagcacaacttagccaactacttgttctttctgatgtatttgattaataaagatgaaacagagcacacgggtcaggaatcttatgtctggaagatgtaccaagaaaggtgttgggatttcttcccagccggtgactgctttcgtaaacaatatgaagatcagcttggataaatctgaatcaaagaagcgcgacaattctggacagtcaacttcccatgaaataaagtcccctttttacagttctgcaacatatctgaaatgtgacattttctaaatgcctcccttaaaaaaaaaactgctgaaaatctgtgctattttgaaattgatttggctttttgtgcctaatggacatacactgtgggagagaacctgtcaaaatgtcgaagaaggaaggcgaagaatcaagtaatctctaggcaaatgccttcaagttttccagttctgaggtaactagttcagtttgttgggatggaagcatgaaggaaagggctagagaagtatgaaatctcgaatgtgtaatacctgaaaatttaaacacttgaatgtcatcatggtatccaacttgtgactcatagggtctgaactcactccaaaagataataactgcagtctaatttttcccatggtacttgctagtgactgtatccagaaaagctttaagcagttaaagaaacagaaaaaaaccgacactttgtcgacactgaaatatcgattaagtgccttaaaacctctttagacatagctatgcaagttttttatgtttgtgttccagaaggacagttccattcattagttgtgatcttccgtcttactttatgaaactgcacttgaaggttattcatacaagtttttttagtaacagctgtcagtcaactgctgttattagaagaaaagtactgtactgaaaattcagaaaaaaaatctcaaccttatgccaaaatggagtaatgctttatggtcccttgtaagtagtggagctgctctgtt

SEQ ID NO: 18342 - DNA, 581 bp, Homo sapiens
  source 1..581: mol_type = unassigned DNA
tagagcctgtgatgactctgaacttcaatcagatcttaaaattctttggtgagcaggacacaaaccagaaagatcccagatccaggcactcaaactgaaacgtttcttgatgtgttttccttgatgttaagaatgaagaaccaacctttttcgttttgtttttcagatcttttcctaataactactgggacaagtttgtaaagagaaaggtgatcaacaagtatggagatctctacggagcagaacgcattgctgaacttctgggtttggacaaaaatgctcttgactttagcccagtagaagagaccaaagcagaagcggcttctctggtgtcatggctaagttccatagacatgaagtaccatatctggaagcttggagttgtttttactgacaactcctttctctaccttgcctggtatacaaccatgtcagtcctgggccactacaataacttcttctttgctgctcacctattggacatcgcaatgggcttcaagacactgaggaccattctgtcatctgtaactcacaatggcaaacagttggttctgactgtcggtctcctggccgtggtggtt

SEQ ID NO: 18343 - DNA, 100 bp, Homo sapiens
  source 1..100: mol_type = unassigned DNA
ccgatatgaagtgcgacgacatgatgacggagagtgtcctgggaagacagaagtgatggaggtagttttcattaccacacatctaagccccgtggaaagg

SEQ ID NO: 18344 - DNA, 149 bp, Homo sapiens
  source 1..149: mol_type = unassigned DNA
ccgtggaaagggaagcaccctgcacagtggcgtcatcattcatctatttccgggtgttaccttttccacatgtacgtgggagtgagagcaggaggtggcattggtgatgaaattgaagaccctgctggtgatccttatgaaatgtatcg

SEQ ID NO: 18345 - DNA, 15564 bp, Homo sapiens
  source 1..15564: mol_type = unassigned DNA
cgcacgccgagcggctgccgggggaagcagaggcgccggaggctggggcaccgccgacgcctcgggagccatggccgaagggggagaaggaggcgaggacgagatccagtttctgaggactgaggatgaagtggtactccagtgcatcgccaccattcataaggagcagaggaagttctgcctggcagccgagggacttgggaatcgcctgtgcttcttggaacccacttcagaagccaagtacattcctccagatctctgcgtctgcaattttgtgctggaacagtccctatctgtcagagccctgcaggaaatgcttgccaacacaggtgaaaatggcggcgaaggggcagcacaaggaggtggccacaggaccctgttatacggccatgcagttctcctgaggcactctttcagcggaatgtatctaacatgcttgactacatcaagatcccagacagacaaacttgcctttgatgtaggtctacgggaacatgccacaggagaagcctgttggtggactatacatcctgcttccaaacagaggtccgaaggagagaaagttcgaattggcgatgacctcatcctcgtcagcgtgtcctctgaaagataccttcatctctcagtatcaaatggtaacatacaagtggatgcctcctttatgcaaacactctggaatgtacatcctacgtgctcaggaagtagcatcgaagaaggatacctacttggtgggcatgtagtacgtcttttccatggtcatgatgaatgtttgacgataccatctacagaccagaatgattcccagcacaggaggatattctacgaagctgggggagctgggactcgagccaggtctctttggagagtggaaccccttcggataagctggagtggcagtaacatcagatggggccaggctttccgactccggcatctcaccacaggccactacctggccttgacagaagaccaaggccttatactgcaagaccgggcaaagtcagacaccaagtccacagctttctctttccgggcatcaaaggaactcaaggagaaattagactccagtcacaagcgagacatagaaggcatgggagttccagaaatcaagtatggagattctgtctgctttgtgcagcatatagccagtggtctgtgggtgacctacaaagcacaagacgccaaaacttcccgcctgggacctctaaaaagaaaggtcatactccatcaggaaggccacatggatgatggattaacactgcagagatgccagcgtgaggagtcccaggctgctcggatcatccggaacactacagccttattcagccagtttgtcagcggaaacaatcgcacagctgcccccatcaccctgcctatagaagaagtcctgcagaccctacaggacttgatcgcctacttccagcccccagaggaggagatgcgacatgaagacaagcagaacaagctccgctcactcaaaaacagacaaaatcttttcaaggaagagggaatgttggcccttgtcttaaattgcattgaccgcttaaatgtctacaatagcgtagcacactttgcagggattgcaagggaagagagtggcatggcctggaaagaaattctgaacctcctctacaaattgctggctgctctcattcgcggaaacagaaacaattgcgctcaattctccaataaccttgattggctcatcagtaaattggacagactagaatcttcctcaggtatcttggaagttttgcactgcatcttaactgaaagcccagaagccttaaatctgatagcggagggccacatcaagtcgatcatctccctgttggataagcacgggcggaatcacaaggttctggatatcctgtgctccctctgtctctgcaatggggttgcagtgagagccaaccagaatctgatctgtgacaacttgctgccccggagaaacctactcctgcagacacgactgattaacgatgtaaccagtatccggccaaacatcttcctgggagtcgcggagggctcagcccagtacaagaagtggtacttcgagctgattatcgaccaggtggaccccttcctaacagcagagcccacacatctgcgggtgggctgggcctcttcttcaggctatgccccatacccaggaggtggagaaggatggggaggcaatggtgttggtgacgacctgtactcctatggctttgatggacttcacctttggtcaggccggatacccagagctgtggcttccatcaaccagcacctcctgagatcggatgacgtggtaagctgctgcctggacctcggggtgcccagcatctcattccgcatcaatgggcagcccgtgcaggggatgtttgagaacttcaacacagacgggctcttcttccctgtgatgagcttttcagcaggtgtcaaagtacgtttcctgatgggtggacgtcatggagagtttaagttcctgcctccctctggctatgccccttgctatgaagccttacttccaaaagagaagatgagattggagcctgtcaaagaatataaacgtgatgctgatggcattagagatctcttgggtaccacccagttcctctcccaagcctctttcatcccatgccccgtagacaccagtcaggttattttgccacctcacctagaaaagatccgagacagactagctgaaaacatccatgagctttggggaatgaataaaatagaacttggctggactttcggcaagatacgagatgacaataaaagacaacacccttgccttgtggagttttcaaagctcccagaaactgagaagaactataacctgcaaatgtcaactgaaaccttaaaaaccctcttggccctggggtgccacattgctcatgttaacccagctgctgaggaggatctcaagaaggtcaaactgcccaaaaactatatgatgtccaacggctataagccagcccctttggatttgtctgatgtgaagctgttacctcctcaagaaattttagtggataagcttgcagaaaatgcacacaatgtttgggcaaaagacagaataaaacaaggatggacctatggcatccaacaggatttgaagaacaaaagaaatccccgtctggtgccatatgcattactggatgagcgtaccaagaagtcaaacagggacagcctgcgggaagctgtgcgcacttttgttggttacgggtataacattgagccatcagaccaagaactagctgactcggctgtggagaaggtcagcatagacaagatccgatttttccgggtagagcgatcttatgcagtgagatctggaaagtggtattttgagtttgaagtggtgactggaggagacatgcgagtcggctgggcgaggccaggctgtcgacctgatgtcgagctgggggccgatgaccaagcctttgtgtttgaaggcaacaggggccagcgttggcatcaaggaagtgggtattttgggcgtacctggcagccaggggatgtggtcggatgtatgattaacctggatgatgcttcaatgatcttcacactgaatggggagctgctgatcaccaacaaaggctctgaacttgccttcgctgactacgagattgagaatggcttcgtgcccatctgctgtctgggtctatctcagatcggccgcatgaatctcgggacagatgccagtaccttcaagttttataccatgtgcggtctccaagagggctttgagccttttgctgtcaacatgaacagagatgttgctatgtggttcagcaagcgcctcccgacgtttgtcaacgtgccaaaggatcatccacacatagaggtcatgaggattgatggcaccatggacagccctccgtgtctcaaggtgacgcataagacatttggcacacagaatagcaatgccgacatgatctattgccgcttgagcatgcctgtcgagtgccactcctccttcagccacagcccctgtctggacagtgaagctttccagaaaaggaaacagatgcaagaaatactctctcatacaacaacacagtgctactacgccatccgcatctttgctggacaggatccatcctgtgtctgggtcggatgggtgactccagactatcacttgtacagtgaaaagtttgacctgaataaaaactgcacagtgactgtcaccctaggggatgaaagaggccgggtccatgaaagtgtgaaacgcagcaactgctacatggtctggggtggagacattgtagccagttcccagagatcaaatcggagcaacgtggacctggagatcggctgtctcgtggatctggccatgggcatgttgtccttctcagccaatggaaaggaactgggcacctgctaccaggtggagcctaataccaaagtgtttccagcagtcttcctgcagcctacaagtacttctttgtttcagtttgaacttggaaagctgaagaacgcaatgcccctgtcagcggccatattcaggagtgaagagaagaacccagtcccacagtgtccacctcggctggacgtccaaaccatccagcccgtgctctggagccgcatgcccaacagcttcctgaaggtggagaccgagcgtgtgagcgagcgccacggctgggtggtgcagtgcctggagcccctgcagatgatggcgctccacatccccgaggagaacaggtgtgtggatatcctggagctctgtgagcaggaggacctgatgcggttccattaccacacgctgaggctctacagcgcggtgtgcgccctgggaaacagccgcgtggcctacgccctgtgcagccacgtggacctctcccagctcttctatgccattgacaacaagtacctccccggcctccttcgatctggtttctatgacctgctcatcagcatccacctggccagcgccaaggagaggaagctgatgatgaagaacgagtacatcatccccattaccagcaccaccaggaatatccgcctcttcccggacgagtccaagaggcatggactgcctggggtgggcctgagaacatgtctcaagcccgggttcaggttctccaccccttgctttgttgtgactggtgaggatcaccaaaagcagagccccgagattcccttggagagtctcaggacgaaggctctgagtatgctgacagaggcagtgcagtgcagcggggcccacatccgagaccctgtaggggggtctgtggagttccagtttgtgcctgtgctgaaactcattggaaccctgctggtcatgggcgtgtttgatgatgatgatgttcggcagatcctcctcctgattgatccctctgtgtttggggagcatagtgcggggacagaggagggagcagaaaaggaggaagtgacccaggtggaggagaaggctgtggaggctggggagaaggccggcaaggaggctcctgtcaaaggcttgttgcagactcgattacccgaatccgtcaagctgcagatgtgtgagctcctcagctatctctgcgactgtgagctgcagcaccgagtggaggccattgtggcatttggtgacatttatgtctccaagctgcaggcaaatcagaagttccgctacaatgagctcatgcaggccctgaacatgtctgcggccctgactgcccggaagaccaaggagttccgctcacccccacaggagcagatcaacatgctgcttaactttcaactgggagagaactgcccctgcccagaggagattcgggaggagctgtatgatttccatgaggaccttctccttcactgtggggttcctttggaagaagaggaagaggaggaggaggacacctcctggacaggaaaactctgtgccttggtttacaaaatcaaaggcccacccaagccagagaaggagcagccgacggaggaggaggagagatgccccacaacattgaaggaactcatctcacagacgatgatctgctgggcccaggaggaccagatccaggattcagagctggtccgaatgatgttcaacctcctccggaggcagtatgacagcattggggagctgctgcaggcgctgcggaagacctacaccatcagccacacctctgtaagcgacaccatcaacctgctggctgccctgggccaaatccgctccctcctcagtgtcaggatgggcaaggaagaggagttgctcatgatcaatgggctgggagacataatgaacaacaaggtgttttaccagcatcccaacctcatgagagtcctgggcatgcacgagacggtgatggaggtgatggtgaacgtgttgggtacagagaaatctcagattgcatttccaaagatggttgctagctgctgccgtttcctttgctatttctgtcgaattagccggcaaaatcagaaggccatgtttgagcatctgagttatcttctggagaatagcagtgttggcctagcctccccgtcgatgaggggatccaccccgctggatgtggcagcttcctctgtgatggacaacaatgagttagcgctgagcttagaggaaccagacctcgagaaggtggtgacctacttggcaggctgtggcctacagagctgccccatgcttctggccaaaggataccctgatgtcggctggaaccccattgaaggggaacgctacctgtccttcctgaggtttgctgtcttcgtgaacagtgagagtgtggaagaaaacgccagcgttgtggtcaagctgctcatcagacgcccagagtgcttcggcccggccctgcggggtgaggggggaaacgggctcttggcagccatgcagggtgccattaagatctctgagaacccagcgctcgacctcccctctcaaggatacaaaagagaagtcagcacgggggacgatgaagaggaagaagaaatcgtgcatatgggcaatgcaattatgtcattttattcggcccttatagatctactgggccgctgtgctcctgaaatgcacctcatccagacaggaaagggggaagccatccgcatcaggtccatcctgcgctccctggtccccacagaagacctggttgggatcatcagcatccccttgaaactgccctccctcaacaaagatgggtcggtcagtgagccagatatggcggccaatttctgccctgaccacaaggcacctatggtgctgttcttggaccgcgtttatggcattaaggatcaaacttttctgctccacttgctggaggttggatttttacctgacctaagagcttctgcctctctagatacagtttccctaagcaccacagaggctgcgcttgcactaaataggtatatatgttctgctgtgctcccgctcctcacaagatgtgcccctctctttgccggaacagaacactgcacctctctgattgattccacactgcagacaatatacaggctatccaagggacgttccctcaccaaagcacaaagggacactatagaagaatgtttgcttgccatttgcaatcacttgaggccttccatgttacagcaactcctgcgacgcctcgtttttgatgtgccgcaactcaatgaatactgcaaaatgcctctcaagcttctgacgaatcactatgaacagtgttggaagtattactgcctgccttcaggatgggggagctacgggctagctgtggaagaagagctgcacctaacggagaagcttttctgggggatttttgactcgctctcccataagaaatatgacccagatcttttccgaatggccctgccttgtctcagtgctatagctggggccttgccaccagattatttagataccagaatcacagccacgttggagaaacagatctcagtggatgcggatggcaactttgacccaaaacctattaacaccatgaatttttccttgcctgaaaaattggaatacatcgtcaccaagtatgctgagcattcacatgataaatgggcctgtgacaagagtcagagtggatggaaatatgggatttccctggatgaaaatgtgaagacccacccactgataaggcctttcaagacattaacggagaaggagaaggaaatttatcgctggcctgcgcgagagtccctgaaaaccatgctggctgtgggctggactgtggagaggaccaaagagggagaagctttggttcaacagcgggaaaatgagaagcttcgaagtgtgtcccaggccaaccagggcaacagctacagtcctgctcccctcgacctctcaaacgttgtgctctccagagagctccagggaatggtggaggtcgtggctgagaactatcacaatatctgggccaagaagaagaagctggagctggagagcaaaggtggtggcagccaccctcttctggtaccatatgacaccttgactgccaaggaaaagttcaaggaccgggagaaggcacaggacctgtttaagttcctccaagtgaatggcatcatagtttccaggggtatgaaggatatggagctggatgcctcctccatggagaagaggtttgcctataagttcttgaagaagatcctgaaatacgttgattctgctcaagaatttattgcccatttagaagccattgtcagcagtgggaaaactgaaaagtctccccgtgaccaggagatcaaattctttgccaaagttctcctcccgctggttgaccagtacttcaccagtcattgcctctacttcttgtcatcccctctgaagccccttagcagcagcggatatgcctcccataaggagaaagaaatggtggccggcctgttctgcaaacttgccgctctcgttagacacagaatttccctctttggtaatgattctactacaatggtgagctgtcttcacatcttagctcagacacttgacacaaggactgtcatgaagtcaggctcagagctggtgaaggctgggttacgagcattctttgaaaatgctgcagaagatttggagaagacttcagaaaacctgaaacttgggaagttcacccattcccgaacgcagattaaaggcgtttctcagaatattaactacactacagtggctctgctccccatcctgacgtccatctttgagcacgtcactcagcatcagtttggaatggatctactcttgggtgatgtgcagatttcatgctaccacatactgtgcagcctctactcccttgggacgggaaagaacatttatgttgaaaggcaacgccctgcccttggagaatgtctggcctcgctggcagctgccataccagtggcattcctggagcccacccttaatcgctacaatccactctcggtcttcaacaccaaaacccccagggagaggtctattctggggatgccagacacggtagaagacatgtgtcctgacatcccccagctggaaggcctgatgaaggaaatcaacgacctggccgagtcaggggcccggtacacagagatgccccatgtcatcgaggtgatcttacccatgctctgcaactacttgtcctactggtgggagcggggtcctgagaacctgccccccagcacagggccatgctgcaccaaggtcacctctgaacacctcagtctcatcctgggcaacattctgaaaatcatcaacaacaacctgggcatcgatgaggcctcctggatgaagcgcattgcagtgtatgcacagcccatcatcagcaaagccaggcccgacctgctgagaagccacttcatcccaactctggagaagctgaagaaaaaggctgtcaagacggtgcaggaggaggagcagttgaaagccgatggcaaaggggacacccaggaggcagaactcctcatcctggacgagttcgcggtcctctgcagagatctctatgccttctaccccatgctgatccgctacgtggacaacaacagatctaactggctgaaaagtcctgatgctgattctgaccagctcttccgcatggtggcagaagtcttcattctgtggtgtaaatctcataacttcaagagagaagagcaaaattttgtgattcagaatgaaattaataatttggcatttttaactggagacagcaaaagcaagatgtcaaaagccatgcaagtaaagtctggaggacaagaccaggagcggaagaagacaaagcggcggggagacttgtattccatccagacctccctcatcgtggctgcactcaagaaaatgctgcccattggtttgaatatgtgtactccaggcgaccaggagctgatctccctcgcaaaatcgcgatacagccatagggacacagatgaagaggtcagagaacatctgcggaacaacttgcacttgcaggaaaagtctgatgacccagctgtaaaatggcaactgaacctctacaaggatgttctgaagagtgaagaacctttcaatccggaaaagacagtggagcgtgtgcagagaatttcagcagctgtcttccacctggaacaggtggaacagcctttgaggtccaagaaggccgtctggcacaaactgttatcaaagcaacggaaacgggcagtggtggcctgtttcaggatggcccctctctacaacctgcccaggcaacacatgcaccgctctattaacctcttcctccatggctatcagagattttggatagaaacagaggagtattcctttgaagagaaactagtacaggatttggctaaatctccaaaggtggaagaggaggaggaggaagagacagaaaaacaacctgacccactacatcagatcattctctattttagccgcaacgctctcacggagaggagcaaattggaagacgaccctttgtacacctcctattccagcatgatggccaagagttgtcaaagtggtgaggatgaagaagaagatgaagacaaggaaaaaacattcgaagagaaagagatggagaagcaaaaaaccctctatcagcaagctcggctgcatgagcgtggtgctgcagagatggtccttcagatgataagcgctagcaaaggtgagatgagccccatggtggttgagacgctgaagctggggatcgccattctgaacggaggcaatgctggtgtgcaacagaaaatgctagattacctaaaggagaaaaaggatgctggattctttcaaagcctttctggtcttatgcagtcttgcagtgtccttgatttgaatgcatttgagaggcagaataaagctgaaggcctggggatggtgactgaagaaggaacactcattgttcgggaacgtggtgaaaaagtactccagaatgacgagttcacgcgtgatctctttagattcctacagttactttgtgagggacataacagtgactttcagaacttcctgcggactcagatgggcaacaccaccaccgtgaatgtcatcatcagcactgtggactaccttctgcgtctgcaggaatcaatcagtgatttctactggtattattcagggaaggacatcattgatgaatctggacagcacaatttttccaaagctctggcagtcaccaagcagattttcaattctcttacagaatacatccagggcccttgcattggtaatcaacagagcctggctcacagcaggctgtgggacgcagtggttggcttcctccatgtctttgctaatatgcagatgaaactctctcaggattccagtcagatcgagctgctgaaggaactcttggatctccttcaggacatggtggtgatgcttctgtccctcctggaagggaatgtggtaaatggcaccattggcaagcagatggttgacacactggtagaatcatctaccaatgtagaaatgatcttgaaattctttgacatgttcttgaaacttaaagacttaaccagctcagacaccttcaaagaatatgacccagatggtaaaggaattatctccaaaaaagaattccagaaggccatggaagggcaaaaacagtacacgcagtcagagattgactttctcctgtcgtgtgcagaagctgatgagaatgacatgtttaattacgttgattttgtagaccggttccatgagccagccaaggacatagggtttaatgtggctgtgttattgacaaatctttctgaacacatgccaaacgattcccgcctgaagtgtctgttggacccagcagaaagtgtgctaaattacttcgaaccctacctaggacgcatcgagatcatgggtggggccaagaagattgagcgtgtttattttgagatcagtgaatccagtcgcactcagtgggagaagccccaggtgaaggaatctaagcgacagttcatttttgatgttgtcaatgaaggtggggagcaggaaaagatggagctgtttgtgaacttctgtgaggacaccatctttgaaatgcagttagcatctcagatctctgaatccgattcagctgacaggccagaagaggaggaagaagatgaagattcttcttacgtgttagaaattgcgggtgaagaggaagaagacgggtctcttgagccggcctctgcatttgctatggcctgtgcctctgtgaagaggaatgtcaccgacttcctgaagagagcaaccctgaagaacctcaggaagcagtacaggaacgtgaaaaagatgactgcgaaggagctggtgaaggtgctcttctcctttttctggatgctgttcgtggggctattccagttgctcttcaccatcctgggaggaatctttcagatcctctggagcacagtgtttggagggggcctggtagaaggggcaaagaacatcagagtgaccaagatcctgggtgacatgcctgacccaacccaatttggtatccatgatgacactatggaggctgagagggcagaggtgatggagccaggtatcaccactgaactagtacacttcataaagggggagaagggagatacagatatcatgtcagacctctttggactccacccaaagaaagagggcagcttaaagcatgggcctgaagtgggtttgggtgacctctcagaaattattggcaaggatgaaccccctacattagagagtactgtacagaagaagaggaaagctcaggcagcagaaatgaaagcagcaaatgaagcagaaggaaaagtagaatccgagaaggcagacatggaagatggagagaaggaagacaaagacaaagaagaggagcaagctgagtacctgtggacagaagtgacaaaaaagaagaagcggcggtgtggtcagaaggttgagaagccggaagctttcacagccaatttctttaaagggctggaaatctatcagaccaagttactgcattacctggccaggaatttctacaacctgaggttccttgctctgtttgtagccttcgctatcaacttcatcctgcttttttataaggtcactgaagaacctttagaagaagagacagaggatgttgcaaacctatggaattcctttaatgacgaggaagaggaagaagcgatggtattctttgtccttcaggagagcaccgggtatatggcaccaaccctgcgtgccctggccatcatccataccatcatctctctagtctgtgtggtgggctactactgcctgaaggtgcctttggtggttttcaaaagggaaaaagaaatcgccaggaagctggagtttgatggcctatatatcaccgaacagccatctgaagatgacatcaaggggcagtgggaccgcttggtgatcaacacaccatcttttcctaataactactgggacaagtttgtaaagagaaaggtgatcaacaagtatggagatctctacggagcagaacgcattgctgaacttctgggtttggacaaaaatgctcttgactttagcccagtagaagagaccaaagcagaagcggcttctctggtgtcatggctaagttccatagacatgaagtaccatatctggaagcttggagttgtttttactgacaactcctttctctaccttgcctggtatacaaccatgtcagtcctgggccactacaataacttcttctttgctgctcacctattggacatcgcaatgggcttcaagacactgaggaccattctgtcatctgtaactcacaatggcaaacagttggttctgactgtcggtctcctggccgtggtggtttatctctatactgtggtggctttcaacttcttccgcaagttctacaacaaaagcgaagacgatgacgagcccgatatgaagtgcgacgacatgatgacgtgttaccttttccacatgtacgtgggagtgagagcaggaggtggcattggtgatgaaattgaagaccctgctggtgatccttatgaaatgtatcgcattgtctttgacattacctttttcttcttcgtcattgtcatcttgctggccatcattcaaggtcttattattgatgctttcggagagctaagagaccagcaggaacaagtacgagaagatatggagactaaatgtttcatctgtgggattggcaatgactactttgacacaacccctcatggttttgaaacacatacattacaagagcacaacttagccaactacttgttctttctgatgtatttgattaataaagatgaaacagagcacacgggtcaggaatcttatgtctggaagatgtaccaagaaaggtgttgggatttcttcccagccggtgactgctttcgtaaacaatatgaagatcagcttggataaatctgaatcaaagaagcgcgacaattctggacagtcaacttcccatgaaataaagtcccctttttacagttctgcaacatatctgaaatgtgacattttctaaatgcctcccttaaaaaaaaaactgctgaaaatctgtgctattttgaaattgatttggctttttgtgcctaatggacatacactgtgggagagaacctgtcaaaatgtcgaagaaggaaggcgaagaatcaagtaatctctaggcaaatgccttcaagttttccagttctgaggtaactagttcagtttgttgggatggaagcatgaaggaaagggctagagaagtatgaaatctcgaatgtgtaatacctgaaaatttaaacacttgaatgtcatcatggtatccaacttgtgactcatagggtctgaactcactccaaaagataataactgcagtctaatttttcccatggtacttgctagtgactgtatccagaaaagctttaagcagttaaagaaacagaaaaaaaccgacactttgtcgacactgaaatatcgattaagtgccttaaaacctctttagacatagctatgcaagttttttatgtttgtgttccagaaggacagttccattcattagttgtgatcttccgtcttactttatgaaactgcacttgaaggttattcatacaagtttttttagtaacagctgtcagtcaactgctgttattagaagaaaagtactgtactgaaaattcagaaaaaaaatctcaaccttatgccaaaatggagtaatgctttatggtcccttgtaagtagtggagctgctctgtttaggtgaatctcctcaaatacaatgaagtgcccactgcaataaagtaatacgtacc

SEQ ID NO: 18346 - DNA, 573 bp, Homo sapiens
  source 1..573: mol_type = unassigned DNA
ggccctgggagtttgctgcccgaatctccagagcttgcgcagcggatcttgcaaatgttcactgcccagagcatgtgttccccactgtgcacaccctcccagccagatcctgactgctgtcatggcgtgccctctggagaaggccctggatgtgatggtgtccaccttccacaagtactcgggcaaagagggtgacaagttcaagctcaacaagtcagaactaaaggagctgctgacccgggagctgcccagcttcttggggaaaaggacagatgaagctgctttccagaagctgatgagcaacttggacagcaacagggacaacgaggtggacttccaagagtactgtgtcttcctgtcctgcatcgccatgatgtgtaacgaattctttgaaggcttcccagataagcagcccaggaagaaatgaaaactcctctgatgtggttggggggtctgccagctggggccctccctgtcgccagtgggcacttttttttttccaccctggctccttcagacacgtgcttgatgctgagcaagttcaataaagattcttggaagttttgaggctga

SEQ ID NO: 18347 - DNA, 755 bp, Homo sapiens
  source 1..755: mol_type = unassigned DNA
ggaaaaaatgctgttgttgaggcaaggcctgggaggccctgggagtttgctgcccgaatctccagagcttgcgcagcggatcttgcaaatgttcactgcccagagcatgtgttccccactgtgcacaccctcccagccaggtgcgggggcccactgctctgggctcccccagggagggagcagagtctcgccaagtgctcctggagggatgggagtggagcctggcattctgaacacatctctgaggggtgggattaataagacggtctctgtgcctcctgctcccagatcctgactgctgtcatggcgtgccctctggagaaggccctggatgtgatggtgtccaccttccacaagtactcgggcaaagagggtgacaagttcaagctcaacaagtcagaactaaaggagctgctgacccgggagctgcccagcttcttggggaaaaggacagatgaagctgctttccagaagctgatgagcaacttggacagcaacagggacaacgaggtggacttccaagagtactgtgtcttcctgtcctgcatcgccatgatgtgtaacgaattctttgaaggcttcccagataagcagcccaggaagaaatgaaaactcctctgatgtggttggggggtctgccagctggggccctccctgtcgccagtgggcacttttttttttccaccctggctccttcagacacgtgcttgatgctgagcaagttcaataaagattcttggaagttttgaggctga

SEQ ID NO: 18348 - DNA, 566 bp, Homo sapiens
  source 1..566: mol_type = unassigned DNA
ttcccctctctacaaccctctctcctcagcgcttcttctttcttggtttggtgcttctgagatgtgggcttgcacacgctgttgctatagtacgtgttgatcctgactgctgtcatggcgtgccctctggagaaggccctggatgtgatggtgtccaccttccacaagtactcgggcaaagagggtgacaagttcaagctcaacaagtcagaactaaaggagctgctgacccgggagctgcccagcttcttggggaaaaggacagatgaagctgctttccagaagctgatgagcaacttggacagcaacagggacaacgaggtggacttccaagagtactgtgtcttcctgtcctgcatcgccatgatgtgtaacgaattctttgaaggcttcccagataagcagcccaggaagaaatgaaaactcctctgatgtggttggggggtctgccagctggggccctccctgtcgccagtgggcacttttttttttccaccctggctccttcagacacgtgcttgatgctgagcaagttcaataaagattcttggaagttttgaggctga

SEQ ID NO: 18349 - DNA, 537 bp, Homo sapiens
  source 1..537: mol_type = unassigned DNA
attcttcccctctctacaaccctctctcctcagcgcttcttctttcttggtttgatcctgactgctgtcatggcgtgccctctggagaaggccctggatgtgatggtgtccaccttccacaagtactcgggcaaagagggtgacaagttcaagctcaacaagtcagaactaaaggagctgctgacccgggagctgcccagcttcttggggcctcttctccctccagaaaaggacagatgaagctgctttccagaagctgatgagcaacttggacagcaacagggacaacgaggtggacttccaagagtactgtgtcttcctgtcctgcatcgccatgatgtgtaacgaattctttgaaggcttcccagataagcagcccaggaagaaatgaaaactcctctgatgtggttggggggtctgccagctggggccctccctgtcgccagtgggcacttttttttttccaccctggctccttcagacacgtgcttgatgctgagcaagttcaataaagattcttggaagttttgaggctga

SEQ ID NO: 18350 - DNA, 600 bp, Homo sapiens
  source 1..600: mol_type = unassigned DNA
agtatccgctctcccctgtcccctgctatgggcagggcctggctggggtataaataggtcagacctctgggccgtccccattcttcccctctctacaaccctctctcctcagcgcttcttctttcttggtttgatcctgactgctgtcatggcgtgccctctggagaaggccctggatgtgatggtgtccaccttccacaagtactcgggcaaagagggtgacaagttcaagctcaacaagtcagaactaaaggagctgctgacccgggagctgcccagcttcttggggaaaaggacagatgaagctgctttccagaagctgatgagcaacttggacagcaacagggacaacgaggtggacttccaagagtactgtgtcttcctgtcctgcatcgccatgatgtgtaacgaattctttgaaggcttcccagataagcagcccaggaagaaatgaaaactcctctgatgtggttggggggtctgccagctggggccctccctgtcgccagtgggcacttttttttttccaccctggctccttcagacacgtgcttgatgctgagcaagttcaataaagattcttggaagttttgaggctga

SEQ ID NO: 18351 - DNA, 531 bp, Homo sapiens
  source 1..531: mol_type = unassigned DNA
tcctttcttgggaggctacaaatagtgacgccctgtctctaagctcctacagctgaaacgccagcaccagtgatcctgactgctgtcatggcgtgccctctggagaaggccctggatgtgatggtgtccaccttccacaagtactcgggcaaagagggtgacaagttcaagctcaacaagtcagaactaaaggagctgctgacccgggagctgcccagcttcttggggaaaaggacagatgaagctgctttccagaagctgatgagcaacttggacagcaacagggacaacgaggtggacttccaagagtactgtgtcttcctgtcctgcatcgccatgatgtgtaacgaattctttgaaggcttcccagataagcagcccaggaagaaatgaaaactcctctgatgtggttggggggtctgccagctggggccctccctgtcgccagtgggcacttttttttttccaccctggctccttcagacacgtgcttgatgctgagcaagttcaataaagattcttggaagtttt

SEQ ID NO: 18352 - DNA, 877 bp, Homo sapiens
  source 1..877: mol_type = unassigned DNA
cctggcagccctgccacccccgccttcggctcccattggctgccacggcctgcagtgggctgcaccagggttcatccatcctccctgggcagagggaataagaggctgcctctgcccaccagtcctgccgcccaggacccgcagcagagacgacgcctgcagcaaggagaccaggaaggggtgagacaaggaagaggatgtctgagctggagaaggccatggtggccctcatcgacgttttccaccaatattctggaagggagggagacaagcacaagctgaagaaatccgaactgaaggagctcatcaacaatgagctttcccatttcttagaggaaatcaaagagcaggaggttgtggacaaagtcatggaaacactggacaatgatggagacggcgaatgtgacttccaggaattcatggcctttgttgccatggttactactgcctgccacgagttctttgaacatgagtgagattagaaagcagccaaacctttcctgtaacagagacggtcatgcaagaaagcagacagcaagggcttgcagcctagtaggagctgagctttccagccgtgttgtagctaattaggaagcttgatttgctttgtgattgaaaaattgaaaacctctttccaaaggctgttttaacggcctgcatcattctttctgctatattaggcctgtgtgtaagctgactggccccagggactcttgttaacagtaacttaggagtcaggtctcagtgataaagcgtgcaccgtgcagcccgccatggccgtgtagaccctaacccggagggaaccctgactacagaaattaccccggggcacccttaaaacttccactacctttaaaaaacaaagccttatccagca

SEQ ID NO: 18353 - DNA, 971 bp, Homo sapiens
  source 1..971: mol_type = unassigned DNA
cctggcagccctgccacccccgccttcggctcccattggctgccacggcctgcagtgggctgcaccagggttcatccatcctccctgggcagagggaataagaggctgcctctgcccaccagtcctgccgcccaggacccgcagcagagacgacgcctgcagcaaggagaccaggaaggggtgagacaaggaagaggatgtctgagctggagaaggccatggtggccctcatcgacgttttccaccaatattctggaagggagggagacaagcacaagctgaagaaatccgaactgaaggagctcatcaacaatgagctttcccatttcttagagagatggagtctccctatgttgcccaggctggtctcaaacttcctgtgctcaagttatcctcctgccttagcttcccaaagtgctgggattacaggaaatcaaagagcaggaggttgtggacaaagtcatggaaacactggacaatgatggagacggcgaatgtgacttccaggaattcatggcctttgttgccatggttactactgcctgccacgagttctttgaacatgagtgagattagaaagcagccaaacctttcctgtaacagagacggtcatgcaagaaagcagacagcaagggcttgcagcctagtaggagctgagctttccagccgtgttgtagctaattaggaagcttgatttgctttgtgattgaaaaattgaaaacctctttccaaaggctgttttaacggcctgcatcattctttctgctatattaggcctgtgtgtaagctgactggccccagggactcttgttaacagtaacttaggagtcaggtctcagtgataaagcgtgcaccgtgcagcccgccatggccgtgtagaccctaacccggagggaaccctgactacagaaattaccccggggcacccttaaaacttccactacctttaaaaaacaaagccttatccagca

SEQ ID NO: 18354 - DNA, 839 bp, Homo sapiens
  source 1..839: mol_type = unassigned DNA
ttgctcctagtcactgtctcactttcagattgattttaacagcttgcagttgatggtttgctcacctgcactctaccacctcatcttggagccttgcaggaacagagagggaccctgtggggattaattcaggggaaattaatccctgaattcccttgctgctctgcctctgtatttttgccagtttccctgttggcccaacccagccagaattcagagggcatgggaatatatccccgtggcccacacggacagagaaggcaggcccacagctgtctaagaggccggtggaaggattatgataaaagtgcaaattcccagaatgcccctccaggccatgcctgctgctctgagcttgaaaagagtgccaaggccattccatcccccttgtctgggttgaggtctgtattgataacatatgaaatgttttaggatgaggtatagatgagaaggcaactttcctttgcgagcccctaggatgtctgagctggagaaggccatggtggccctcatcgacgttttccaccaatattctggaagggagggagacaagcacaagctgaagaaatccgaactgaaggagctcatcaacaatgagctttcccatttcttagaggaaatcaaagagcaggaggttgtggacaaagtcatggaaacactggacaatgatggagacggcgaatgtgacttccaggaattcatggcctttgttgccatggttactactgcctgccacgagttctttgaacatgagtgagattagaaagcagccaaacctttcctgtaacagagacggtcatgcaagaaagcagacagcaagggcttgcagcctagtagga

SEQ ID NO: 18355 - DNA, 2909 bp, Homo sapiens
  source 1..2909: mol_type = unassigned DNA
ggcgcggcgctgggtgacttcgcgtagcaggcagggaactggccgcggcgagcgggactggccattggagtgctccgctgcggagggaggggaccccgactcgagtaagtttgcgagagcactacgcagtcagtcgggggcagcagcaagatgcgaagcgagccgtacagatcccgggctctccgaacgcaacttcgccctgcttgagcgaggctgcggtttccgaggccctctccagccaaggaaaagctacacaaaaagcctggatcactcatcgaaccacccctgaagccagtgaaggctctctcgcctcgccctctagcgttcgtctggagtagcgccaccccggcttcctggggacacagggttggcaccatggggcccaccagcgtcccgctggtcaaggcccaccgcagctcggtctctgactacgtcaactatgatatcatcgtccggcattacaactacacgggaaagctgaatatcagcgcggacaaggagaacagcattaaactgacctcggtggtgttcattctcatctgctgctttatcatcctggagaacatctttgtcttgctgaccatttggaaaaccaagaaattccaccgacccatgtactattttattggcaatctggccctctcagacctgttggcaggagtagcctacacagctaacctgctcttgtctggggccaccacctacaagctcactcccgcccagtggtttctgcgggaagggagtatgtttgtggccctgtcagcctccgtgttcagtctcctcgccatcgccattgagcgctatatcacaatgctgaaaatgaaactccacaacgggagcaataacttccgcctcttcctgctaatcagcgcctgctgggtcatctccctcatcctgggtggcctgcctatcatgggctggaactgcatcagtgcgctgtccagctgctccaccgtgctgccgctctaccacaagcactatatcctcttctgcaccacggtcttcactctgcttctgctctccatcgtcattctgtactgcagaatctactccttggtcaggactcggagccgccgcctgacgttccgcaagaacatttccaaggccagccgcagctctgagaagtcgctggcgctgctcaagaccgtaattatcgtcctgagcgtcttcatcgcctgctgggcaccgctcttcatcctgctcctgctggatgtgggctgcaaggtgaagacctgtgacatcctcttcagagcggagtacttcctggtgttagctgtgctcaactccggcaccaaccccatcatttacactctgaccaacaaggagatgcgtcgggccttcatccggatcatgtcctgctgcaagtgcccgagcggagactctgctggcaaattcaagcgacccatcatcgccggcatggaattcagccgcagcaaatcggacaattcctcccacccccagaaagacgaaggggacaacccagagaccattatgtcttctggaaacgtcaactcttcttcctagaactggaagctgtccacccaccggaagcgctctttacttggtcgctggccaccccagtgtttggaaaaaaatctctgggcttcgactgctgccagggaggagctgctgcaagccagagggaggaagggggagaatacgaacagcctggtggtgtcgggtgttggtgggtagagttagttcctgtgaacaatgcactgggaagggtggagatcaggtcccggcctggaatatattttctacccccctggagctttgattttgcactgagccaaaggtctagcattgtcaagctcctaaagggttcatttggcccctcctcaaagactaatgtccccatgtgaaagcgtctctttgtctggagctttgaggagatgttttccttcactttagtttcaaacccaagtgagtgtgtgcacttctgcttctttagggatgccctgtacatcccacaccccaccctcccttcccttcatacccctcctcaacgttcttttactttatactttaactacctgagagttatcagagctggggttgtggaatgatcgatcatctatagcaaataggctatgttgagtacgtaggctgtgggaagatgaagatggtttggaggtgtaaaacaatgtccttcgctgaggccaaagtttccatgtaagcgggatccgttttttggaatttggttgaagtcactttgatttctttaaaaaacatcttttcaatgaaatgtgttaccatttcatatccattgaagccgaaatctgcataaggaagcccactttatctaaatgatattagccaggatccttggtgtcctaggagaaacagacaagcaaaacaaagtgaaaaccgaatggattaacttttgcaaaccaagggagatttcttagcaaatgagtctaacaaatatgacatctgtctttggcacttttgttgatgtttatttcagaatgttgtgtgattcatttcaagcaacaacatggttgtattttgttgtgttaaaagtacttttcttgatttttgaatgtatttgtttcagcagaagtcattttattggatttttctaacccgtgttaacaccattgaatgtgtatttcttaagaaaataccaccctcttgtgcccttaaaagcattactttaactggtagggaacgccagaaacttttcagtccagctattcattagatagtaattgaagatatgtataaatattacaaagaataaaaatatattactgtctctttagtatggttttcagtgcaattaaaccgagagatgtcttgtttttttaaaaagaatagtatttaataggtttctgacttttgtggatcattttgcacatagctttatcaacttttaaacattaataaactgatttttttaaaga

SEQ ID NO: 18356 - DNA, 763 bp, Homo sapiens
  source 1..763: mol_type = unassigned DNA
tggccgcggcgagcgggactggccattggagtgctccgctgcggagggaggggaccccgactcgagctgcggtttccgaggccctctccagccaaggaaaagctacacaaaaagcctggatcactcatcgaaccacccctgaagccagtgaaggctctctcgcctcgccctctagcgttcgtctggagtagcgccaccccggcttcctggggacacagggttggcaccatggggcccaccagcgtcccgctggtcaaggcccaccgcagctcggtctctgactacgtcaactatgatatcatcgtccggcattacaactacacgggaaagctgaatatcagcgcggacaaggagaacagcattaaactgacctcggtggtgttcattctcatctgctgctttatcatcctggagaacatctttgtcttgctgaccatttggaaaaccaagaaattccaccgacccatgtactattttattggcaatctggccctctcagacctgttggcaggagtagcctacacagctaacctgctcttgtctggggccaccacctacaagctcactcccgcccagtggtttctgcgggaagggagtatgtttgtggccctgtcagcctccgtgttcagtctcctcgccatcgccattgagcgctatatcacaatgctgaaaatgaaactccacaacgggagcaataacttccgcctcttcctgctaatcagcgcctgctgggtcatctccctcatcctgggtggcctgccta

SEQ ID NO: 18357 - DNA, 505 bp, Homo sapiens
  source 1..505: mol_type = unassigned DNA
acagcaaggcggggcgggcctggctgcccacacctcactgcgccctcggaccctaagcacacctgctcctagagagttattaatagagcccccaaatggcttacgctttcaaatgattttcctgcaaatctgatttcttgcatggcacatggcaattaggaggctgcggtttccgaggccctctccagccaaggaaaagctacacaaaaagcctggatcactcatcgaaccacccctgaagccagtgaaggctctctcgcctcgccctctagcgttcgtctggagtagcgccaccccggcttcctggggacacagggttggcaccatggggcccaccagcgtcccgctggtcaaggcccaccgcagctcggtctctgactacgtcaactatgatatcatcgtccggcattacaactacacgggaaagctgaatatcagcgcggacaaggagaacagcattaaactgacctcggtggtgttcattctcatctgctgctttatcatc

SEQ ID NO: 18358 - DNA, 2341 bp, Homo sapiens
  source 1..2341: mol_type = unassigned DNA
ctcactcggttcaaggcagcgcgactgcgggtggcgcacgaccagggcgcagaccttggggcgcgcggcccatggagtcggggctgctgcggccggcgccggtgagcgaggtcatcgtcctgcattacaactacaccggcaagctccgcggtgcgcgctaccagccgggtgccggcctgcgcgccgacgccgtggtgtgcctggcggtgtgcgccttcatcgtgctagagaatctagccgtgttgttggtgctcggacgccacccgcgcttccacgctcccatgttcctgctcctgggcagcctcacgttgtcggatctgctggcaggcgccgcctacgccgccaacatcctactgtcggggccgctcacgctgaaactgtcccccgcgctctggttcgcacgggagggaggcgtcttcgtggcactcactgcgtccgtgctgagcctcctggccatcgcgctggagcgcagcctcaccatggcgcgcagggggcccgcgcccgtctccagtcgggggcgcacgctggcgatggcagccgcggcctggggcgtgtcgctgctcctcgggctcctgccagcgctgggctggaattgcctgggtcgcctggacgcttgctccactgtcttgccgctctacgccaaggcctacgtgctcttctgcgtgctcgccttcgtgggcatcctggccgctatctgtgcactctacgcgcgcatctactgccaggtacgcgccaacgcgcggcgcctgccggcacggcccgggactgcggggaccacctcgacccgggcgcgtcgcaagccgcgctcgctggccttgctgcgcacgctcagcgtggtgctcctggcctttgtggcatgttggggccccctcttcctgctgctgttgctcgacgtggcgtgcccggcgcgcacctgtcctgtactcctgcaggccgatcccttcctgggactggccatggccaactcacttctgaaccccatcatctacacgctcaccaaccgcgacctgcgccacgcgctcctgcgcctggtctgctgcggacgccactcctgcggcagagacccgagtggctcccagcagtcggcgagcgcggctgaggcttccgggggcctgcgccgctgcctgcccccgggccttgatgggagcttcagcggctcggagcgctcatcgccccagcgcgacgggctggacaccagcggctccacaggcagccccggtgcacccacagccgcccggactctggtatcagaaccggctgcagactgacaccctcggcccacgactgtcttcccaagttttacagacttgttctttttacataaaggaatttgtaggaaatgcagccaaaggtgcagtcggaaaagatgcaggggaaatgtatttatgcagcgacaccccacaatgtgaacaaacagacaaaaaatctgtgccctcgtggaattgacgttctgcttgggaacacagaaaagaactcggtgatgaaataatggagatgattccagtgacaaacgacagagatggtgatggtggtcagggaagacctctctgcagaggtagtgacttgtgatgtgagctgagacctctgtcctgggaagaccaaaagaaaagcatttcaggatgagggaatggcatgcgcaaaggccctgaggctgaaatgtgcccatgtgttctaagaaatgcagcgatgctggtgtgcctggagcagggacggagggggagaatgggaggagacaaggagctgaaggagtagttcccgaaggaccttgtgggtgatatagaggacttcgcttttgctctgagtgaggtgggagccatagaagcttctaagcagaagagggacttgccctaattcaggtgatcacaggtgtcttgtggcctccatgggaggttgaaaaccagagaaggtgaaggggggctgcactgagccacaggaacaatgatggagattccagctaagcccagaccccgtggattctagatagattttagaggcagcagacagaattactgaggaattgagtgtaagagtggaataaagttatcaaggacaatgccaagggtggggcacccccaaatttgactctgggagactcagccaaatcctatctggtaataaaatttcttttttatttttcttttctttctttctttcttttttttttttttgagttgggatcttgtgctctgtcacccaggctggagtgcaatgggcacaattatagctcactgcagcctggaactcctgggatcaagcctggagttcctgcttcagcctccctagtagctgggactacaggcatgcaccaccatgcccagttaataaaatttcttcaaatgca

SEQ ID NO: 18359 - DNA, 2191 bp, Homo sapiens
  source 1..2191: mol_type = unassigned DNA
ggctaaggtggcccccactgaagactcctgctaagcaacccactgaagacccctccgaatcatcgacggggcgtccttggggtgcagcccaggaagctcagttcacagccttggggcgcgcggcccatggagtcggggctgctgcggccggcgccggtgagcgaggtcatcgtcctgcattacaactacaccggcaagctccgcggtgcgcgctaccagccgggtgccggcctgcgcgccgacgccgtggtgtgcctggcggtgtgcgccttcatcgtgctagagaatctagccgtgttgttggtgctcggacgccacccgcgcttccacgctcccatgttcctgctcctgggcagcctcacgttgtcggatctgctggcaggcgccgcctacgccgccaacatcctactgtcggggccgctcacgctgaaactgtcccccgcgctctggttcgcacgggagggaggcgtcttcgtggcactcactgcgtccgtgctgagcctcctggccatcgcgctggagcgcagcctcaccatggcgcgcagggggcccgcgcccgtctccagtcgggggcgcacgctggcgatggcagccgcggcctggggcgtgtcgctgctcctcgggctcctgccagcgctgggctggaattgcctgggtcgcctggacgcttgctccactgtcttgccgctctacgccaaggcctacgtgctcttctgcgtgctcgccttcgtgggcatcctggccgctatctgtgcactctacgcgcgcatctactgccaggtacgcgccaacgcgcggcgcctgccggcacggcccgggactgcggggaccacctcgacccgggcgcgtcgcaagccgcgctcgctggccttgctgcgcacgctcagcgtggtgctcctggcctttgtggcatgttggggccccctcttcctgctgctgttgctcgacgtggcgtgcccggcgcgcacctgtcctgtactcctgcaggccgatcccttcctgggactggccatggccaactcacttctgaaccccatcatctacacgctcaccaaccgcgacctgcgccacgcgctcctgcgcctggtctgctgcggacgccactcctgcggcagagacccgagtggctcccagcagtcggcgagcgcggctgaggcttccgggggcctgcgccgctgcctgcccccgggccttgatgggagcttcagcggctcggagcgctcatcgccccagcgcgacgggctggacaccagcggctccacaggcagccccggtgcacccacagccgcccggactctggtatcagaaccggctgcagactgacaccctcggcccacgactgtcttcccaagttttacagacttgttctttttacataaaggaatttgtaggaaatgcagccaaaggtgcagtcggaaaagatgcaggggaaatgtatttatgcagcgacaccccacaatgtgaacaaacagacaaaaaatctgtgccctcgtggaattgacgttctgcttgggaacacagaaaagaactcggtgatgaaataatggagatgattccagtgacaaacgacagagatggtgatggtggtcagggaagacctctctgcagaggtagtgacttgtgatgtgagctgagacctctgtcctgggaagaccaaaagaaaagcatttcaggatgagggaatggcatgcgcaaaggccctgaggctgaaatgtgcccatgtgttctaagaaatgcagcgatgctggtgtgcctggagcagggacggagggggagaatgggaggagacaaggagctgaaggagtagttcccgaaggaccttgtgggtgatatagaggacttcgcttttgctctgagtgaggtgggagccatagaagcttctaagcagaagagggacttgccctaattcaggtgatcacaggtgtcttgtggcctccatgggaggttgaaaaccagagaaggtgaaggggggctgcactgagccacaggaacaatgatggagattccagctaagcccagaccccgtggattctagatagattttagaggcagcagacagaattactgaggaattgagtgtaagagtggaataaagttatcaaggacaatgccaagggtggggcacccccaaatttgactctgggagactcagccaaatcctatctggtaataaaatttcttttttattttt

SEQ ID NO: 18360 - DNA, 565 bp, Homo sapiens
  source 1..565: mol_type = unassigned DNA
actgcgggtggcgcacgaccagggcgcagagtgagtggactgcactggacctttgggggcgctgggctgggcctgacccggagggggtcgccctggcggccactttcccggtctaaaaaggcgcaccactccttgcagggagttctccgaacttttcctggaggcctctggggagggggaagctgggggctccccagctgggtgcaggacctgggatacggggtgaaggtggctggaatcccctggccaccccctcctggccgggccactgcaagtttccatacttcagtcctgctgccgggcaagctgggcggatggggttggcctccccctcagagcatgtgtaaccctgtctccctgtatttgggctccccacctccagcatggccttggggcgcgcggcccatggagtcggggctgctgcggccggcgccggtgagcgaggtcatcgtcctgcattacaactacaccggcaagctccgcggtgcgcgctaccagccgggtgccggcctgcgcgccgacgccgtggtgtgcctggcggtgtgcgccttcatcgtgctagaga

SEQ ID NO: 18361 - DNA, 1698 bp, Homo sapiens
  source 1..1698: mol_type = unassigned DNA
cgcgcggcccatggagtcggggctgctgcggccggcgccggtgagcgaggtcatcgtcctgcattacaactacaccggcaagctccgcggtgcgcgctaccagccgggtgccggcctgcgcgccgacgccgtggtgtgcctggcggtgtgcgccttcatcgtgctagagaatctagccgtgttgttggtgctcggacgccacccgcgcttccacgctcccatgttcctgctcctgggcagcctcacgttgtcggatctggcacggcccgggactgcggggaccacctcgacccgggcgcgtcgcaagccgcgctcgctggccttgctgcgcacgctcagcgtggtgctcctggcctttgtggcatgttggggccccctcttcctgctgctgttgctcgacgtggcgtgcccggcgcgcacctgtcctgtactcctgcaggccgatcccttcctgggactggccatggccaactcacttctgaaccccatcatctacacgctcaccaaccgcgacctgcgccacgcgctcctgcgcctggtctgctgcggacgccactcctgcggcagagacccgagtggctcccagcagtcggcgagcgcggctgaggcttccgggggcctgcgccgctgcctgcccccgggccttgatgggagcttcagcggctcggagcgctcatcgccccagcgcgacgggctggacaccagcggctccacaggcagccccggtgcacccacagccgcccggactctggtatcagaaccggctgcagactgacaccctcggcccacgactgtcttcccaagttttacagacttgttctttttacataaaggaatttgtaggaaatgcagccaaaggtgcagtcggaaaagatgcaggggaaatgtatttatgcagcgacaccccacaatgtgaacaaacagacaaaaaatctgtgccctcgtggaattgacgttctgcttgggaacacagaaaagaactcggtgatgaaataatggagatgattccagtgacaaacgacagagatggtgatggtggtcagggaagacctctctgcagaggtagtgacttgtgatgtgagctgagacctctgtcctgggaagaccaaaagaaaagcatttcaggatgagggaatggcatgcgcaaaggccctgaggctgaaatgtgcccatgtgttctaagaaatgcagcgatgctggtgtgcctggagcagggacggagggggagaatgggaggagacaaggagctgaaggagtagttcccgaaggaccttgtgggtgatatagaggacttcgcttttgctctgagtgaggtgggagccatagaagcttctaagcagaagagggacttgccctaattcaggtgatcacaggtgtcttgtggcctccatgggaggttgaaaaccagagaaggtgaaggggggctgcactgagccacaggaacaatgatggagattccagctaagcccagaccccgtggattctagatagattttagaggcagcagacagaattactgaggaattgagtgtaagagtggaataaagttatcaaggacaatgccaagggtggggcacccccaaatttgactctgggagactcagccaaatcctatctggtaataaaatttcttttttatttttcttttctttctttctttcttttttttttttttgagttgggatcttgtgctctgtc

SEQ ID NO: 18362 - DNA, 5146 bp, Homo sapiens
  source 1..5146: mol_type = unassigned DNA
tttttattctgccccagctgatgtttgagccagcatgtcgcggaggaagcaagcgaagcctcaacatttccaatccgaccccgaagtggcctcgctcccccggcgagatggagacacagaaaagggtcaaccgagtcgccctactaagagcaaggatgcccacgtctgtggccggtgctgtgccgagttctttgaattatcagatcttctgctccacaagaagaactgtactaaaaatcaattagttttaatcgtaaatgaaaatccagcctccccacccgaaaccttctcccccagcccccctcctgataatcctgatgaacaaatgaatgacacagttaacaaaacagatcaagtggactgcagcgacctttcagaacacaacggacttgacagggaagagtccatggaggtggaggccccggttgctaacaaaagcggcagcggcacttccagcggcagccacagcagtaccgccccaagcagcagcagcagcagcagcagcagcagcggcggcggcggcagctcctccacaggtacctcagcgatcacaacctctctacctcaactcggggacctgacaacactgggcaacttctccgtaatcaacagcaacgtcatcatcgagaacctccagagcaccaaggtggcggtggcccagttctcccaggaagcgaggtgcggcggggcctctgggggcaagctggccgtcccagccctcatggaacaactcctagctctgcagcagcagcagatccaccagctgcaattgatcgaacagattcgtcaccaaatattgctgttggcttctcagaatgcagacttgccaacatcttctagtccttctcaaggtactttacgaacatctgccaaccccttgtccacgctaagttcccatttatctcagcagctggcagcagcagctggattggcacagagcctcgccagccaatctgccagcattagtggtgtgaaacagctacccccaatccagctacctcagagcagttctggcaacaccatcattccatccaacagcggctcttctcccaatatgaacatattggcagcggcagttaccaccccgtcctctgaaaaagtggcttcaagtgctggggcctcccatgtcagcaacccagcggtctcatcatcgtcctcaccagcttttgcaataagcagtttattaagtcctgcgtctaatccacttctacctcagcaagcctccgctaactcggttttccccagccctttgcccaacatcggaacaactgcagaggatttaaactccttgtctgccttggcccagcaaagaaaaagcaagccaccaaatgtcactgcctttgaagcgaaaagtacttccgatgaggcattcttcaaacacaagtgcaggttctgcgcgaaggtctttgggagtgacagtgccttgcagatccacttgcgttcccataccggagagaggccattcaagtgcaacatctgcgggaacaggttctccaccaaggggaatctgaaagtccactttcagcgccacaaagagaaataccctcatatccagatgaacccctatcctgtgcctgagcatttggacaatatccccacgagtactggcatcccatatggcatgtccatccctccagagaagccagtcaccagctggctagacaccaaaccagtcctgcctactctgaccacttcagtcggcctgccgttgcccccaaccctcccaagcctcatacccttcatcaagacggaagagccagcccccatccccatcagccattctgccaccagccccccaggctcagtcaaaagtgactccgggggccctgagtcagccacaagaaacctaggtgggctcccagaggaagccgaagggtccactctgccaccctctggtggcaaaagcgaagagagtggcatggtcaccaactcagtcccgacggcgagcagtagcgtcctgagctccccagcggcagactgcggccccgcgggcagtgccaccaccttcaccaaccctttgttgccgctcatgtccgagcagttcaaggccaagtttccttttgggggactcctggactcagctcaggcatcagagacgtccaagcttcagcaactggtagaaaacattgacaagaaggccactgaccccaatgagtgcatcatctgccaccgggttctcagctgccagagcgccttgaaaatgcactacaggacacacactggggagaggccctttaagtgtaagatctgtggccgggctttcaccacgaaagggaatcttaaaacccactacagtgtccatcgtgctatgcccccgctcagagtccagcattcctgccccatctgccagaagaagttcacgaacgctgtggtcctgcagcagcacatccgaatgcatatgggaggccagatccccaacaccccagtccccgacagctactctgagtccatggagtctgacacaggttcctttgatgagaaaaattttgatgacctagacaacttctctgatgaaaacatggaagactgtcctgagggcagcatccctgatacacctaagtctgcagacgcctcccaagacagcttatcctcttcgcctttgcccctcgagatgtcgagcatcgctgctttggaaaatcagatgaagatgatcaatgctggcctggcagagcagctacaggccagcctgaagtcagtggagaatgggtccatcgagggggatgtcctgaccaatgattcatcctcagtgggtggtgacatggaaagccaaagtgctggcagcccagccatctcagagtctacctcttccatgcaggctctgtccccgtccaacagcacgcaggagttccacaagtcacccagcattgaggagaaaccacagagagcggtcccaagcgagtttgccaatggtttgtctcccaccccagtgaatggtggggctttggatttgacatctagtcacgcagagaaaatcatcaaagaagattctttggggatcctcttcccttttagagaccggggtaaatttaaaaacactgcttgtgacatttgtggcaaaacatttgcttgtcagagtgccttggacattcactatagaagtcataccaaagagagaccatttatttgcacagtttgcaatcgtggcttttccacaaagggtaatttgaagcagcacatgttgacacatcagatgcgagatctgccatcccagctctttgagcccagttccaaccttggccccaatcagaactcagcggtgattcccgccaactcgttgtcatctctcatcaagacagaggtcaacggcttcgtgcatgtttctcctcaggacagtaaggacacccccaccagtcacgtcccgtctgggcctctgtcttcctctgccacatccccagttctgctccctgctctgcccaggagaactcccaagcagcactactgcaacacatgtggcaaaaccttctcctcatcgagtgccctgcagattcacgagagaactcacactggagagaaaccctttgcttgcactatttgtggaagagctttcacgactaaaggcaatcttaaggtacacatgggcactcacatgtggaatagcacccctgcacgacggggtcggcggctctctgtggatggccccatgacatttctaggaggcaatcccgtcaagttcccagaaatgttccagaaggatttggcggcaagatcaggaagtggggatccttccagcttctggaatcagtatgcagcagcgctctccaacgggctggcgatgaaggccaacgagatctccgtcattcagaacggtggcatccctccaattcctggaagcctcggcagtgggaacagctcacctgttagtgggctgacgggaaacctggagaggctccagaactcagagcccaatgctcccctggccggcctggagaaaatggcaagcagtgagaacggaaccaacttccgcttcacccgcttcgtggaggacagcaaggagatcgtcacgagttaaagcagctcgggctggagacatagcattcattcctgttcagaatgcgacctatggtggcctcctactccttgccccccaccccgccccgccccttccttctgttccccagatctatgaactacaacattatgaagacattcttttgtaccttgttcaactttagagttctaagaaagcttatttattagcgatataaccttgctttgcaaacagaatgcaagcgttaactttggtcttctgtattttggactaaatactaattgactagagtgctgtaaacttgctgtaacatttatggcaattgcaagttgccctgctaggcagttgtaatctggcattaacttattttctatatccagtttaatatgaatctggtgttgatgcaatgcctcagtgatgcattagatctctaataaagtctgtatatacatgtacactttgatcctgctggaaaattttatcagcaaacacattgtctaatctttcaaaacagatttaaggaaaggactgaaagtacagactgaacagtgtggttctttgaaaggtttggttttttaatttttattctaaaattcaacctttttttttgtcgatttaaccatttccattttgaactgctatttgtattgtgctttttacttgagtcgtcttcaatgttaataagtttctgtacagtaataagcacgcagaattctttagagaaaaagaaaacaagcgttgttttggtagttgaaactgagacgtaacattttgccttgtaggtatattcacgatagaaaatgtgtgctggaatttcacaatgctgctaagtatagcatcttgaacaaccttcagtggagaaaatgtagatgctcttgtatatacaataagaaatatcactttcattcaaatgtacatatgttccttacaagagcaaatgcttcttcttgatcaagagagcaggtatagtgtttgtttattttgtcttaggtatggaagaaaaaaattggactgttacatgcactttcttggaaagttgaaaggaaagggggggtccaatttctttaacatttaatacttactaacaacagagatactgtaattttactcaagtaatcaaatacattttttttgcaacagataaaacaaaatactgtg

SEQ ID NO: 18363 - DNA, 565 bp, Homo sapiens
  source 1..565: mol_type = unassigned DNA
atgtcgcggaggaagcaagcgaagcctcaacatttccaatccgaccccgaagtggcctcgctcccccggcgagatggtacacatgggcactcacatgtggaatagcacccctgcacgacggggtcggcggctctctgtggatggccccatgacatttctaggaggcaatcccgtcaagttcccagaaatgttccagaaggatttggcggcaagatcaggaagtggggatccttccagcttctggaatcagtatgcagcagcgctctccaacgggctggcgatgaaggccaacgagatctccgtcattcagaacggtggcatccctccaattcctggaagcctcggcagtgggaacagctcacctgttagtgggctgacgggaaacctggagaggctccagaactcagagcccaatgctcccctggccggcctggagaaaatggcaagcagtgagaacggaaccaacttccgcttcacccgcttcgtggaggacagcaaggagatcgtcacgagttaaagcagctcgggctggagacatagcattcattcctgttcagaatgcgac

SEQ ID NO: 18364 - DNA, 3896 bp, Homo sapiens
  source 1..3896: mol_type = unassigned DNA
ctttggaggttcagagctgcaagaagatggggactggtgtcggggcgccagcgcctgacccgctggggttgcggccggggtggagagtgctgctggccgccagttgttccggagacggtgcaaacggacggggaaagtgtcggggtctggctcgcaaaatttatctccgcatctcttcccacaacacttgcaccctctgccccccaaaatctttctggagacacagaaaagggtcaaccgagtcgccctactaagagcaaggatgcccacgtctgtggccggtgctgtgccgagttctttgaattatcagatcttctgctccacaagaagaactgtactaaaaatcaattagttttaatcgtaaatgaaaatccagcctccccacccgaaaccttctcccccagcccccctcctgataatcctgatgaacaaatgaatgacacagttaacaaaacagatcaagtggactgcagcgacctttcagaacacaacggacttgacagggaagagtccatggaggtggaggccccggttgctaacaaaagcggcagcggcacttccagcggcagccacagcagtaccgccccaagcagcagcagcagcagcagcagcagcagcggcggcggcggcagctcctccacaggtacctcagcgatcacaacctctctacctcaactcggggacctgacaacactgggcaacttctccgtaatcaacagcaacgtcatcatcgagaacctccagagcaccaaggtggcggtggcccagttctcccaggaagcgaggtgcggcggggcctctgggggcaagctggccgtcccagccctcatggaacaactcctagctctgcagcagcagcagatccaccagctgcaattgatcgaacagattcgtcaccaaatattgctgttggcttctcagaatgcagacttgccaacatcttctagtccttctcaaggtactttacgaacatctgccaaccccttgtccacgctaagttcccatttatctcagcagctggcagcagcagctggattggcacagagcctcgccagccaatctgccagcattagtggtgtgaaacagctacccccaatccagctacctcagagcagttctggcaacaccatcattccatccaacagcggctcttctcccaatatgaacatattggcagcggcagttaccaccccgtcctctgaaaaagtggcttcaagtgctggggcctcccatgtcagcaacccagcggtctcatcatcgtcctcaccagcttttgcaataagcagtttattaagtcctgcgtctaatccacttctacctcagcaagcctccgctaactcggttttccccagccctttgcccaacatcggaacaactgcagaggatttaaactccttgtctgccttggcccagcaaagaaaaagcaagccaccaaatgtcactgcctttgaagcgaaaagtacttccgatgaggcattcttcaaacacaagtgcaggttctgcgcgaaggtctttgggagtgacagtgccttgcagatccacttgcgttcccataccggagagaggccattcaagtgcaacatctgcgggaacaggttctccaccaaggggaatctgaaagtccactttcagcgccacaaagagaaataccctcatatccagatgaacccctatcctgtgcctgagcatttggacaatatccccacgagtactggcatcccatatggcatgtccatccctccagagaagccagtcaccagctggctagacaccaaaccagtcctgcctactctgaccacttcagtcggcctgccgttgcccccaaccctcccaagcctcatacccttcatcaagacggaagagccagcccccatccccatcagccattctgccaccagccccccaggctcagtcaaaagtgactccgggggccctgagtcagccacaagaaacctaggtgggctcccagaggaagccgaagggtccactctgccaccctctggtggcaaaagcgaagagagtggcatggtcaccaactcagtcccgacggcgagcagtagcgtcctgagctccccagcggcagactgcggccccgcgggcagtgccaccaccttcaccaaccctttgttgccgctcatgtccgagcagttcaaggccaagtttccttttgggggactcctggactcagctcaggcatcagagacgtccaagcttcagcaactggtagaaaacattgacaagaaggccactgaccccaatgagtgcatcatctgccaccgggttctcagctgccagagcgccttgaaaatgcactacaggacacacactggggagaggccctttaagtgtaagatctgtggccgggctttcaccacgaaagggaatcttaaaacccactacagtgtccatcgtgctatgcccccgctcagagtccagcattcctgccccatctgccagaagaagttcacgaacgctgtggtcctgcagcagcacatccgaatgcatatgggaggccagatccccaacaccccagtccccgacagctactctgagtccatggagtctgacacaggttcctttgatgagaaaaattttgatgacctagacaacttctctgatgaaaacatggaagactgtcctgagggcagcatccctgatacacctaagtctgcagacgcctcccaagacagcttatcctcttcgcctttgcccctcgagatgtcgagcatcgctgctttggaaaatcagatgaagatgatcaatgctggcctggcagagcagctacaggccagcctgaagtcagtggagaatgggtccatcgagggggatgtcctgaccaatgattcatcctcagtgggtggtgacatggaaagccaaagtgctggcagcccagccatctcagagtctacctcttccatgcaggctctgtccccgtccaacagcacgcaggagttccacaagtcacccagcattgaggagaaaccacagagagcggtcccaagcgagtttgccaatggtttgtctcccaccccagtgaatggtggggctttggatttgacatctagtcacgcagagaaaatcatcaaagaagattctttggggatcctcttcccttttagagaccggggtaaatttaaaaacactgcttgtgacatttgtggcaaaacatttgcttgtcagagtgccttggacattcactatagaagtcataccaaagagagaccatttatttgcacagtttgcaatcgtggcttttccacaaagggtaatttgaagcagcacatgttgacacatcagatgcgagatctgccatcccagctctttgagcccagttccaaccttggccccaatcagaactcagcggtgattcccgccaactcgttgtcatctctcatcaagacagaggtcaacggcttcgtgcatgtttctcctcaggacagtaaggacacccccaccagtcacgtcccgtctgggcctctgtcttcctctgccacatccccagttctgctccctgctctgcccaggagaactcccaagcagcactactgcaacacatgtggcaaaaccttctcctcatcgagtgccctgcagattcacgagagaactcacactggagagaaaccctttgcttgcactatttgtggaagagctttcacgactaaaggcaatcttaaggtacacatgggcactcacatgtggaatagcacccctgcacgacggggtcggcggctctctgtggatggccccatgacatttctaggaggcaatcccgtcaagttcccagaaatgttccagaaggatttggcggcaagatcaggaagtggggatccttccagcttctggaatcagtatgcagcagcgctctccaacgggctggcgatgaaggccaacgagat

SEQ ID NO: 18365 - DNA, 407 bp, Homo sapiens
  source 1..407: mol_type = unassigned DNA
gggagggggcgggcgggccggcgggcggggggagccgccgccgccgccgccgctcgatttccgtaattttgagaagatttttttttagtaattttttattctgccccagctgatgtttgagccagcatgtcgcggaggaagcaagcgaagcctcaacatttccaatccgaccccgaagtggcctcgctcccccggcgagatgccttcgtagatgaccacacaccatttgtacaacagaagttggtgttccccatgctgggcaaacaatgggaagccatcctgtctttgaataggatgttagcttggagttagagatttttctgtttaatttacaaatggatcttagtgagaagacatctgagcaaccaatggaaacaaacatgaaataaagggatttttataataaa

SEQ ID NO: 18366 - DNA, 5253 bp, Homo sapiens
  source 1..5253: mol_type = unassigned DNA
ctttggaggttcagagctgcaagaagatggggactggtgtcggggcgccagcgcctgacccgctggggttgcggccggggtggagagtgctgctggccgccagttgttccggagacggtgcaaacggacggggaaagtgtcggggtctggctcgcaaaatttatctccgcatctcttcccacaacacttgcaccctctgccccccaaaatctttctggagacacagaaaagggtcaaccgagtcgccctactaagagcaaggatgcccacgtctgtggccggtgctgtgccgagttctttgaattatcagatcttctgctccacaagaagaactgtactaaaaatcaattagttttaatcgtaaatgaaaatccagcctccccacccgaaaccttctcccccagcccccctcctgataatcctgatgaacaaatgaatgacacagttaacaaaacagatcaagtggactgcagcgacctttcagaacacaacggacttgacagggaagagtccatggaggtggaggccccggttgctaacaaaagcggcagcggcacttccagcggcagccacagcagtaccgccccaagcagcagcagcagcagcagcagcagcagcggcggcggcggcagctcctccacaggtacctcagcgatcacaacctctctacctcaactcggggacctgacaacactgggcaacttctccgtaatcaacagcaacgtcatcatcgagaacctccagagcaccaaggtggcggtggcccagttctcccaggaagcgaggtgcggcggggcctctgggggcaagctggccgtcccagccctcatggaacaactcctagctctgcagcagcagcagatccaccagctgcaattgatcgaacagattcgtcaccaaatattgctgttggcttctcagaatgcagacttgccaacatcttctagtccttctcaaggtactttacgaacatctgccaaccccttgtccacgctaagttcccatttatctcagcagctggcagcagcagctggattggcacagagcctcgccagccaatctgccagcattagtggtgtgaaacagctacccccaatccagctacctcagagcagttctggcaacaccatcattccatccaacagcggctcttctcccaatatgaacatattggcagcggcagttaccaccccgtcctctgaaaaagtggcttcaagtgctggggcctcccatgtcagcaacccagcggtctcatcatcgtcctcaccagcttttgcaataagcagtttattaagtcctgcgtctaatccacttctacctcagcaagcctccgctaactcggttttccccagccctttgcccaacatcggaacaactgcagaggatttaaactccttgtctgccttggcccagcaaagaaaaagcaagccaccaaatgtcactgcctttgaagcgaaaagtacttccgatgaggcattcttcaaacacaagtgcaggttctgcgcgaaggtctttgggagtgacagtgccttgcagatccacttgcgttcccataccggagagaggccattcaagtgcaacatctgcgggaacaggttctccaccaaggggaatctgaaagtccactttcagcgccacaaagagaaataccctcatatccagatgaacccctatcctgtgcctgagcatttggacaatatccccacgagtactggcatcccatatggcatgtccatccctccagagaagccagtcaccagctggctagacaccaaaccagtcctgcctactctgaccacttcagtcggcctgccgttgcccccaaccctcccaagcctcatacccttcatcaagacggaagagccagcccccatccccatcagccattctgccaccagccccccaggctcagtcaaaagtgactccgggggccctgagtcagccacaagaaacctaggtgggctcccagaggaagccgaagggtccactctgccaccctctggtggcaaaagcgaagagagtggcatggtcaccaactcagtcccgacggcgagcagtagcgtcctgagctccccagcggcagactgcggccccgcgggcagtgccaccaccttcaccaaccctttgttgccgctcatgtccgagcagttcaaggccaagtttccttttgggggactcctggactcagctcaggcatcagagacgtccaagcttcagcaactggtagaaaacattgacaagaaggccactgaccccaatgagtgcatcatctgccaccgggttctcagctgccagagcgccttgaaaatgcactacaggacacacactggggagaggccctttaagtgtaagatctgtggccgggctttcaccacgaaagggaatcttaaaacccactacagtgtccatcgtgctatgcccccgctcagagtccagcattcctgccccatctgccagaagaagttcacgaacgctgtggtcctgcagcagcacatccgaatgcatatgggaggccagatccccaacaccccagtccccgacagctactctgagtccatggagtctgacacaggttcctttgatgagaaaaattttgatgacctagacaacttctctgatgaaaacatggaagactgtcctgagggcagcatccctgatacacctaagtctgcagacgcctcccaagacagcttatcctcttcgcctttgcccctcgagatgtcgagcatcgctgctttggaaaatcagatgaagatgatcaatgctggcctggcagagcagctacaggccagcctgaagtcagtggagaatgggtccatcgagggggatgtcctgaccaatgattcatcctcagtgggtggtgacatggaaagccaaagtgctggcagcccagccatctcagagtctacctcttccatgcaggctctgtccccgtccaacagcacgcaggagttccacaagtcacccagcattgaggagaaaccacagagagcggtcccaagcgagtttgccaatggtttgtctcccaccccagtgaatggtggggctttggatttgacatctagtcacgcagagaaaatcatcaaagaagattctttggggatcctcttcccttttagagaccggggtaaatttaaaaacactgcttgtgacatttgtggcaaaacatttgcttgtcagagtgccttggacattcactatagaagtcataccaaagagagaccatttatttgcacagtttgcaatcgtggcttttccacaaagggtaatttgaagcagcacatgttgacacatcagatgcgagatctgccatcccagctctttgagcccagttccaaccttggccccaatcagaactcagcggtgattcccgccaactcgttgtcatctctcatcaagacagaggtcaacggcttcgtgcatgtttctcctcaggacagtaaggacacccccaccagtcacgtcccgtctgggcctctgtcttcctctgccacatccccagttctgctccctgctctgcccaggagaactcccaagcagcactactgcaacacatgtggcaaaaccttctcctcatcgagtgccctgcagattcacgagagaactcacactggagagaaaccctttgcttgcactatttgtggaagagctttcacgactaaaggcaatcttaaggtacacatgggcactcacatgtggaatagcacccctgcacgacggggtcggcggctctctgtggatggccccatgacatttctaggaggcaatcccgtcaagttcccagaaatgttccagaaggatttggcggcaagatcaggaagtggggatccttccagcttctggaatcagtatgcagcagcgctctccaacgggctggcgatgaaggccaacgagatctccgtcattcagaacggtggcatccctccaattcctggaagcctcggcagtgggaacagctcacctgttagtgggctgacgggaaacctggagaggctccagaactcagagcccaatgctcccctggccggcctggagaaaatggcaagcagtgagaacggaaccaacttccgcttcacccgcttcgtggaggacagcaaggagatcgtcacgagttaaagcagctcgggctggagacatagcattcattcctgttcagaatgcgacctatggtggcctcctactccttgccccccaccccgccccgccccttccttctgttccccagatctatgaactacaacattatgaagacattcttttgtaccttgttcaactttagagttctaagaaagcttatttattagcgatataaccttgctttgcaaacagaatgcaagcgttaactttggtcttctgtattttggactaaatactaattgactagagtgctgtaaacttgctgtaacatttatggcaattgcaagttgccctgctaggcagttgtaatctggcattaacttattttctatatccagtttaatatgaatctggtgttgatgcaatgcctcagtgatgcattagatctctaataaagtctgtatatacatgtacactttgatcctgctggaaaattttatcagcaaacacattgtctaatctttcaaaacagatttaaggaaaggactgaaagtacagactgaacagtgtggttctttgaaaggtttggttttttaatttttattctaaaattcaacctttttttttgtcgatttaaccatttccattttgaactgctatttgtattgtgctttttacttgagtcgtcttcaatgttaataagtttctgtacagtaataagcacgcagaattctttagagaaaaagaaaacaagcgttgttttggtagttgaaactgagacgtaacattttgccttgtaggtatattcacgatagaaaatgtgtgctggaatttcacaatgctgctaagtatagcatcttgaacaaccttcagtggagaaaatgtagatgctcttgtatatacaataagaaatatcactttcattcaaatgtacatatgttccttacaagagcaaatgcttcttcttgatcaagagagcaggtatagtgtttgtttattttgtcttaggtatggaagaaaaaaattggactgttacatgcactttcttggaaagttgaaaggaaagggggggtccaatttctttaacatttaatacttactaacaacagagatactgtaattttactcaagtaatcaaatacattttttttgcaacagataaaacaaaatactgtg

SEQ ID NO: 18367 - DNA, 1982 bp, Homo sapiens
  source 1..1982: mol_type = unassigned DNA
agctctccactgtggtttgaatccacggggtattgatcaccctgcccatgctgaaggtattaaactgcaaattgaaggtgaaggtgtggaatctcaatccattaaaaataaaaatttccagaaggtgcctgaccagaaaggaactcccaagcgactgcaggcagaagctgagacggctaagtcagctacggtgaagctatctaaaccggtggctctatggacccagcaggatgtctgcaagtggttgaagaaacattgtccgaatcagtatcagatctacaggcgagccctgctgagacttactgacaaaaagctcgagcgaatggggattgcccaggagaacctccggcagcacatcttacaacaggtgctccagctgaaggtgcgagaagaagtcagaaatctacagttactcacacaagcatcatctgagggttctccataaacacggttagccttccaagctgctgtcctgccagttgatatgaacatggcctgttcctcacagaaagactaacccatggcactgccagaagatatccttggatcgtggacagattaactggattaactgaaaaaagcacccattcagtcaatattatgggttttggaaaaatcttgctttgctgtggatttaaaatgaggtgcataatataatgccaactcattccaagtggtcattggcagaccattagctggaaaattgcttccagttttcatcactgtgcataactcaagttccctttggggagctgtctgtgcccttcactagaagtcctgttttagcatggcaactactggattattttattatgtgtgcagatggcatgatgttttagaaaaaaaaaattacagcaattctgcaatctcagtggaagtgttcacaatattatgccctggtaggaatgtaaacacgtctcgattatgttagttatgatgtctaaaggtatactgtccaactcttaagcactttatatgagaacactacaccaagatgaatcagcacattcagcacatgtgagaaatcaagtattttctttttatttttataaatcttagtggtttttttttttccggctcagactgtccaagacaaactccactactcgcatatccccagttgtttgtggtaggttgatgtaaatatggccacaatactgttagacttcacctccagatactttattgaacaactggtttacttctagcaccaaagggaagaagaagggggtccagtgatggtgatatcttagcttgcttctttgttcacaggcactattgaccacatgaacatacaggtactcaaatacaggaggcttctatttggctcctccaagggaggagttcctccaagggaaaaaaggggatggtattcttttaatcaaagaccatggtggatggatggtaagggcaacagaatgcaattcttttgtgtggtctgacgttaacacttcggaaaaaattctaagtcaagttgaaatcgccattctctcaagagagaaacatcaagagagaaacatcaagtgaccccactatgtgcctagagaaggaaaagggtcaagtcctatactaggttccttacttagggtagaacctactagtcccttgttaatcctttctgggattatacctgtgactaatttttttttttttaactatgtcttacgacaaagcacagtcctgggaaaccagtcaacttaattattgcttgtctttgagcattagagacatgttcatattgacttgctacataacactgtagcatgttttttcctgaaaatatcaagttggttgaatggaaagctcagcaaagtatgttctgtgtgcccactgtcccagcctgggactgacgggcatcagaggctttgctttaaaatatgggtaaccagttctggaagacttccaacgcaagcaagcttggtgttttagggtgtctccagatacataagcattgtctgcctccgctcagggtctcaggaaat

SEQ ID NO: 18368 - DNA, 625 bp, Homo sapiens
  source 1..625: mol_type = unassigned DNA
ggtttgaatccacggggtattgatcaccctgcccatgctgaaggtattaaactgcaaattgaaggtgaaggtgtggaatctcaatccattaaaaataaaaatttccagaaggtgcctgaccagaaaggaactcccaagcgactgcaggcagaagctgagacggctaagtcagctacggtgaagctatctaaaccggtggctctatggacccagcaggatgtctgcaagtggttgaagaaacattgtccgaatcagtatcagatctacagtgagtcattcaaacagcatgacataactgggcgagccctgctgagacttactgacaaaaagctcgagcgaatggggattgcccaggagaacctccggcagcacatcttacaacaggtgctccagctgaaggtgcgagaagaagtcagaaatctacagttactcacacaagcatcatctgagggttctccataaacacggttagccttccaagctgctgtcctgccagttgatatgaacatggcctgttcctcacagaaagactaacccatggcactgccagaagatatccttggatcgtggacagattaactggattaactgaaaaaagcacccattcagtcaatattatgggttt

SEQ ID NO: 18369 - DNA, 520 bp, Homo sapiens
  source 1..520: mol_type = unassigned DNA
gaggaaggggggagcgcggggcaggaggagtacctcggccaagaaaattatgcatgcgttagggaagctctgagagaatggctgtggaagctctccactgtggtttgaatccacggggtattgatcaccctgcccatgctgaaggtattaaactgcaaattgaaggtgaaggtgtggaatctcaatccattaaaaataaaaatttccagaaggtgcctgaccagaaaggaactcccaagcgactgcaggcagaagctgagacggctaagggcgagccctgctgagacttactgacaaaaagctcgagcgaatggggattgcccaggagaacctccggcagcacatcttacaacaggtgctccagctgaaggtgcgagaagaagtcagaaatctacagttactcacacaaggatattcaggaatatggagatatccctgactcttccaaaagaatgaccaagatcatgcctaattacctccatgtcctgggaaagccccgctgtaatggagatggcatctt

SEQ ID NO: 18370 - DNA, 202 bp, Homo sapiens
  source 1..202: mol_type = unassigned DNA
ctgaaggtgcgagaagaagtcagaaatctacagttactcacacaaggaaatgctgaatgatgtacaagaagctaatacaagctgcacctgtgggacagggaatatggtggatggagagagggtgtgtgccttttatgtcactttgtttgatgaaatgtatgagtatattaactatttaaaggaataaaatttttaaaaagaa

SEQ ID NO: 18371 - DNA, 2172 bp, Homo sapiens
  source 1..2172: mol_type = unassigned DNA
gcgtgaccgcggcaggttggtcctggagcagataagcgcagaatatttaggcgaaagcgagaggaaggggggagcgcggggcaggaggagtacctcggccaagaaaattatgcatgcgttagggaagctctgagagaatggctgtggaagctctccactgtggtttgaatccacggggtattgatcaccctgcccatgctgaaggtattaaactgcaaattgaaggtgaaggtgtggaatctcaatccattaaaaataaaaatttccagaaggtgcctgaccagaaaggaactcccaagcgactgcaggcagaagctgagacggctaagtcagctacggtgaagctatctaaaccggtggctctatggacccagcaggatgtctgcaagtggttgaagaaacattgtccgaatcagtatcagatctacagtgagtcattcaaacagcatgacataactgggcgagccctgctgagacttactgacaaaaagctcgagcgaatggggattgcccaggagaacctccggcagcacatcttacaacaggtgctccagctgaaggtgcgagaagaagtcagaaatctacagttactcacacaaggtaccctattgcttcctgatgggtggatggatggggagattagaagaaagaccaccttactattaggacagacaggagtcagggagaatttgttattgtttcttcacagaatttccatcatagaaaatagtatacagatttaagattacttccctttgaaaacttttttcatagctcactagggagaaggatgcacaaataagtaatggatgagcaaacagaattacctgagctaacttcaaggtggtcacgtacagttgtatggattgtgtactgcacaaccccagagaataccagtcacatcaatcagggtacgattgcactcactagagttgtataatgtgcagcctgcacaactgtacagtccagctgtagctatcttcacctgcgccaattgtgagggcgctttagcatttgagtgattcaatagttacgatgaccagtgatataagtggagtttttgttgtatttttgttttgcttttcaccggttagtgggagaaaaacattttagatatgtattactatacatgaatgtattatacacacacactttagagattgtaagaaccccatttagcttcttgaaagtggaataatttttataatagactatagtgaatctaaaactacactgttaagagtatataattcttaacaggaattataaataacttcaatatgatgagagcacttaagatctcaataactgtggaagtgacaaaataaagctagaattcgaagaaagccttaagttacactatatgtaactgatatgtctacatgagatttggatgctatcaaccttcattggctataaactttatttgttttattttagcgtccattgtacatcgttttaaatgaaaggatgataaaatatgtgtttttgagagccttgagtatttgtcattctgcagaatattgtaattgcatgcataccgatattggagaaatctgggtcagccaagtttcatgttattgcatttagattaacctagtaatagtccatttgcctagaggaaataatgtgctccctgaaagatgactattctagaaggataaatatagatttcaagtgatcgtaaaatagtattgtttgtctcatatgcattatttgcattttgtcctcagagatttccaatggtgaatttactggtatactaagtgatttaaatttgaatgtgaaatactgataggcttttaagcttcttttaagaagtagatagaaatacgaagattatgataagaaagtctgtcacagtgctatttggaaaacggaaaatttacaagcaacctagaggtccagcaatgtgaaaagaatcaagtaattctgcttaaattcataagattcagtataatgcccagttattaaaattacatctttaaagaatacatgacaacatgggaaattacgtaagtcatacaaggtgggaggaaaggtcatgtgtaaaattgtatgcataatataagcccaattttgtaaaaaccatatattcttatatgtacagaaaaaaaggactgcaagtaaatatgccaaccattttaataaaggatctctctggattgtggg

SEQ ID NO: 18372 - DNA, 592 bp, Homo sapiens
  source 1..592: mol_type = unassigned DNA
gcggcaggttggtcctggagcagataagcgcagaatatttaggcgaaagcgagaggaaggggggagcgcggggcaggaggagtacctcggccaagaaaattatgcatgcgttagggaagctctgagagaatggctgtggaagctctccactgtggtttgaatccacggggtattgatcaccctgcccatgctgaaggtattaaactgcaaattgaaggtgaaggtgtggaatctcaatccattaaaaataaaaatttccagaaggtgcctgaccagaaaggaactcccaagcgactgcaggcagaagctgagacggctaagtcagctacggtgaagctatctaaaccggtggctctatggacccagcaggatgtctgcaagtggttgaagaaacattgtccgaatcagtatcagatctacagtgagtcattcaaacagcatgacataactgggcgagccctgctgagacttactgacaaaaagctcgagcgaatggggattgcccaggagaacctccggcagcacatcttacaacaggtgctccagctgaaggtgcgagaagaagtcagaaatctacagttactcacacaag

SEQ ID NO: 18373 - DNA, 507 bp, Homo sapiens
  source 1..507: mol_type = unassigned DNA
acgccctgcgcgcgccgagccgggagccggctgcctcgctttgcgtgaccgcggcagctctccactgtggtttgaatccacggggtattgatcaccctgcccatgctgaaggtattaaactgcaaattgaaggtgaaggtgtggaatctcaatccattaaaaataaaaatttccagaaggtgcctgaccagaaaggaactcccaagcgactgcaggcagaagctgagacggctaagtcagctacggtgaagctatctaaaccggtggctctatggacccagcaggatgtctgcaagtggttgaagaaacattgtccgaatcagtatcagatctacagtgagtcattcaaacagcatgacataactgggcgagccctgctgagacttactgacaaaaagctcgagcgaatggggattgcccaggagaacctccggcagcacatcttacaacaggtgctccagctgaaggtgcgagaagaagtcagaaatctacagttactcacacaag

SEQ ID NO: 18374 - DNA, 8866 bp, Homo sapiens
  source 1..8866: mol_type = unassigned DNA
gcggcaggttggtcctggagcagataagcgcagaatatttaggcgaaagcgagaggaaggggggagcgcggggcaggaggagtacctcggccaagaaaattatgcatgcgttagggaagctctgagagaatggctgtggaagctctccactgtggtttgaatccacggggtattgatcaccctgcccatgctgaaggtattaaactgcaaattgaaggtgaaggtgtggaatctcaatccattaaaaataaaaatttccagaaggtgcctgaccagaaaggaactcccaagcgactgcaggcagaagctgagacggctaagtcagctacggtgaagctatctaaaccggtggctctatggacccagcaggatgtctgcaagtggttgaagaaacattgtccgaatcagtatcagatctacagtgagtcattcaaacagcatgacataactgggcgagccctgctgagacttactgacaaaaagctcgagcgaatggggattgcccaggagaacctccggcagcacatcttacaacaggtgctccagctgaaggtgcgagaagaagtcagaaatctacagttactcacacaagcatcatctgagggttctccataaacacggttagccttccaagctgctgtcctgccagttgatatgaacatggcctgttcctcacagaaagactaacccatggcactgccagaagatatccttggatcgtggacagattaactggattaactgaaaaaagcacccattcagtcaatattatgggttttggaaaaatcttgctttgctgtggatttaaaatgaggtgcataatataatgccaactcattccaagtggtcattggcagaccattagctggaaaattgcttccagttttcatcactgtgcataactcaagttccctttggggagctgtctgtgcccttcactagaagtcctgttttagcatggcaactactggattattttattatgtgtgcagatggcatgatgttttagaaaaaaaaaattacagcaattctgcaatctcagtggaagtgttcacaatattatgccctggtaggaatgtaaacacgtctcgattatgttagttatgatgtctaaaggtatactgtccaactcttaagcactttatatgagaacactacaccaagatgaatcagcacattcagcacatgtgagaaatcaagtattttctttttatttttataaatcttagtggtttttttttttccggctcagactgtccaagacaaactccactactcgcatatccccagttgtttgtggtaggttgatgtaaatatggccacaatactgttagacttcacctccagatactttattgaacaactggtttacttctagcaccaaagggaagaagaagggggtccagtgatggtgatatcttagcttgcttctttgttcacaggcactattgaccacatgaacatacaggtactcaaatacaggaggcttctatttggctcctccaagggaggagttcctccaagggaaaaaaggggatggtattcttttaatcaaagaccatggtggatggatggtaagggcaacagaatgcaattcttttgtgtggtctgacgttaacacttcggaaaaaattctaagtcaagttgaaatcgccattctctcaagagagaaacatcaagagagaaacatcaagtgaccccactatgtgcctagagaaggaaaagggtcaagtcctatactaggttccttacttagggtagaacctactagtcccttgttaatcctttctgggattatacctgtgactaatttttttttttttaactatgtcttacgacaaagcacagtcctgggaaaccagtcaacttaattattgcttgtctttgagcattagagacatgttcatattgacttgctacataacactgtagcatgttttttcctgaaaatatcaagttggttgaatggaaagctcagcaaagtatgttctgtgtgcccactgtcccagcctgggactgacgggcatcagaggctttgctttaaaatatgggtaaccagttctggaagacttccaacgcaagcaagcttggtgttttagggtgtctccagatacataagcattgtctgcctccgctcagggtctcaggaaatacacagcccattggaaaccacccacgcctgagatttggaaacctgacggaaagggaggaaggtccaaatgagtcagcagcaggatgactcaccacaagcctggcaggctgcagagccagagaagggggcttccaacaaggaactcagagaagttgcagtcaccaccaagatctggcccttcggcaggtcagcaccaggactgccaggccctctgcagaccgtaattctcttcacatctataattaggaggccaaactccagctgccaacacccttggacacaatattccagtctccactgcccatctcatgtggttcagttctaatagcaggtcttcttcttcctttcattccttcctttattcagcaagcatttgttgagcatctactatgtgccaagcattgtgcttgggcaacaacagtccacaaagcagactccccacctgcccttatgaaactgtatctcctcctccccaacattatcaccaccccaccatttccacaatgaaaactgaattcagacagcattctccattctgccagagtaacctaggaagaagaacatggcagcagacggatcctcagggaggaggcagcagagtgacagatggtaaactgcatcaggccacatatttgcacctttcagatacagccaactcttccagggcctagactgagctggttggagctccccaaagcagcattcagttgcttttccttgatatccaccctggctacctatattccctttctttatataggcacaaccattcaccactacgctggattatctaacactccaattctataactcatccaggggacacacagttgagtctgatgaagcctaagaactgccaggtgctgagatattgtaactgggaattaagatttagccaaggacattgtgagactactgctgactctcttggaaaactggacatgctttgtagtgcaaatgttcactaaatgatggtggttcattgttacttactttggcctttgcaaaatattctgaacaattcaataagtagagtttcctagtttgtttgtttttttaagtcaaaggaacgctgtgaaattattgaaagatgatgggtgaagagggacctaggagaaggcaaaatgaagaccattaaagagccccattgaagactgtatctctaaaaatgccttaatgcctggcacatattccatatttgcatatgaactactattcttttccaaactgtcaacttctgtttgaaatcattgtgggggatagtttggaaatatggtggcataaaatccaagcagtcaagagctaaaccagcaaaaaagaggaatgacttcattcacaggctttggcttctttattatgtggtggtcctctgtgatctcccatggttaacttcaactgtgctgtactttcttcccaagatgcatgtacggaatgttacctcctagaaatccagaaatagttgtggtgagttttgtttgataggaagcaagaggtggggaagtaaaggatacatatttttatgtctaaggactgtaaactgttgatgcttgacttttccttttacctacacctgtgctacacctttattaaaaggctgacacccagacttgtgcaggaaaggcactcttgggaatgaacagaaatgaataattatgagactttccatggtgccaaggggattcgcttatttccactccagaactgaatatgcagagcattgccagtcctgctagtgtgaaaagcaaattacttcaatagtttgagacgtacctaggggaagagagatcctatcaactttctttgcgggtagtggcgtaccttcaaatccttgctcaggctctgtgaggtgtgcacccgcagatttcacttctacctccggaatcctggcaaacaagccaggaatctctccagagtcacttcgcagttgctcagaaagaggctaacggtccttagtcctgaggaaattctgccatttttaacattcaaggagaaaaggcgtatcagctgtacgtgagaatatcaactaaggataaaaacctctaatggatcccccttgttacttgcaaatgctttctttgtctgcaaatgtcacataattgattttgcataggaacaacaaaagtctcaaggaattgaagtttttaataccccccttagcactttactttcaccaaaacctcctctttctagtacatgagcagttttgttctttgtgatgttttcctctacattctttagaataattttgttacttgacaactagacttgtcaatcgtcttagactcttttgaaaaatctaatctttgaaaatgacacaaattcctttattgctttaaggctgttttcattcacccctcccacagccccctccactgcacttttttgttttttgcggggatttttttctttcatctctcttcttttaacatgatgctgtgggtagttttcaagaattctataaagaactcaacaaaaagtgtatttgttacctttttccccagtcctaatatttcttcttaagcttgatcttggtgaaaatttgttgcccaaaaagcagtgaggtagggattaataacgctgaccagtcatctggaagattaattaatcccagtgcagccctgagatcaggaaggaggacaggccaggagatgtttctactccaggcaccactaaggactctatttcaaaggcagatcctgctccttagtctttttagatctgaatctaatcctgaatccagaaaattatcctatgaattctggtttatcaacgcacatgattcctggcaccattgcatagcttcaaggtaaaagagagccttgtttccattattttgctatggtggcttttgggaagacagagagcattcttttgaaagcgggaaacttaaggaaaagttggccaagtacacaggaaagttctaccacaccttaatataaagaacaaaatagatgcttctcatttggggaaagtagctaaaaggacagtaacagtactgatggccttctgtccatcaccttagctccacagggaaaattctgggtgagagcaagcactgtttctaaaatctaaattttttcaggtgaaatttaccagcaacaaatgtaaaagggaactgccatcaggcatagggctagttttatacttcctgcctaacggcaaaatgactgagacatgacttccatggaacagcagaaaatggatgccaaagatatcataaaactgaagttcaatttgccacgtaaggctatttaaaaaccctgatgcactccaagcattcttccttcagagctttcctcctacaattatatcaagcacaagaaggcaccaacagcatatacttaatgtaatgtaaaagtaaacatatgacttgtgttgaattaccattggctggttgacataataagtgtcatagatatttagacattatttctgatcatacaaaattattttcataatttcatattcttttcaattttcataaattcttttcaattttcataaattggagccaatggtttgggaggttttttgtttgtttgtttgtttggttggttggttatttgttgcgttgttgttttccaaacctcagatattttgagaagccttagaaaggctcttaagcccaggcctttttgcctcatgtgcagagtattaataacagccctactgatgtgaacctcaaggaaggaggctattaaattaatccatcactggagatactaatacctcaaacaattaaaacactgaagactctgctggttgccttccacattgtttataacctttttaaattcagtcatttggatcaagagaaataaatggttggtttcatatggcttttgccacattagcacagacacatctaccaaatgtagaagtccagactgagtggatgcatgagagcaaacagatctgtaatatgattgcatttaatcaccgccaccgcccaaattctgtaaaaatatattcaaatatgtaatgctaaaaaaaatgcaaaacaggagactcttactagatcatgctttcacttagggtaggataactgatcttgaagataacttcatagaaaaatttgctggctgaaatgccccaggcacctcagggttggtcctgtcctattccacaaactgatcatggtcttctcccatcttctcagaggagttagccttgcctctaaaatagcaaaaatgccatgaaattatctttctaacctctatagagacttcttatccaagtataattccaaaaatatgatttgagtttgagcatgcctgtggtccttgattctatgatccctaaatcagttctacttttctcactctctctctctctctctctctctctctctctctctctctatatatatatatatatatatatatatatatatatatatatatatatatatatataatctccagtattttttttcaaccacaatttagtgcatttagcgtgttaatgttgggaactgcctgctggctctatgtctacttttgacaatgcttatgtccagataccatacagtgcatttgagagaggaccaaggttatgttttcccacataccagctgctgcagaggtttcgaagtgcctgacccagttctttttcacatcaaaaaggccttcggttgcagatggaaaccttaaagatgaatgtagagtggggtaggaaattcatgtttgaatgctgaaacccttgtcttttttagttttattcaattcccacctcagatcaccagaaagggaggcctctttggtgggtgttggccctcactgggggtaaaaggggttctatttgcttaaactcatgctcgtaggcaattttagggctctctggggctctgaatggtttctccaccaccacctttcttccaccaatagaaagatgttgtccttacaaggccatgtctgagaagaccatggtttaactagtaaaagaagctcacattgcagagagctgaataataccaggctcttgactttgtactgtgtgtcacagtcatgattgggacagaaggaaccagtctgctgaaaagtcaagccagcacaaatatttggaaactaattccactgaaactcttgtatcattaaatcatactattgtagtttcagttaatgtaattatttaatatcaggcactaaattaaatagctttgcacaaaattttagaaaagatcaatcttgtaacaaaatttaatattaacagtaaaaagcacctgagaaaagaaaatatcgatctgttgtggtttatatacttgagttattcttagaactttgtggagattgacactgctctgataaaaaggaagaaaatgttttgaattcaagaatgctagactaatagaaatagcccagtctctctgggccactgctcttcagtatggggtgctctctgtccctccttagcagatggggttgtttggaggctaaaatgagctaagggaagaagctatactgtgcctccaatatcccttatgtgtaattagagtgccgatctgggctgcaggctttattcaatgattcctttcccttacttgaggctttctctgtagagctgttatttctgagcctccattctgggatttacaaaggaaacagaatgatgaagaagtaacaatcagcattttacacacacgcacacacacacacacacacacactttttctaatatatgaggctagtctgcagagtccacagcccaggtgtccatttatttccacttcttcacctcccaaagatttagagctccatgatctaccaaggtgaagactgccaatcccaggttggagaagacccgtcagagtgtggaggtgccaaactgagaggcacaggaagcagacagccacatcaaacttttttgatgaactactgcaaattggtgtttgttctaggaaagaaagaggaagaaaaattacacaatgtgaattgaacataagagcagtgctctttacagagtatgagaagggaggatgggggagaatctgattaaaaaaatgattcattccttcacagacactaacaaacatggctaaaaagcacatgtcagaacacagaagcctaggtagatggttgacatttttataacttccttaagtgagtagttaaaccagcagtcttaattctgttggtcttccaagagtgtttaattacataagtattacctgtattcatttcccacaactgttgggtttttctttctttttttttttttttttttttttcctctgtgcatcctagaaaaactcccaggactagacttaggaggaggcaatcaagttatgtggtaaaacaagagtgccttttctgttggatatccactttagtttcctggcttccagggcataagatgtttagaaactttttttctctaaacataagaattattgtgtaccacaattttgaaccaccgatttccatatcttcagcagctatcaacttgccaattccctttgggtctcctttgtatattcttatgtttccttctgtttccagttgtcctcaaaaagagttgaggggggcatgactcttataaaatggataaaaatgaaactgtacagatgtttgcctcccttgtatctgtgagcatgatctctatcaggctggaaaatctgctttatcattttgtatatttgactattttgtattcagcattacttgactccttatgtgcatggcaatgtattaaaatgtgggatttctattaccgtgt

SEQ ID NO: 18375 - DNA, 7134 bp, Homo sapiens
  source 1..7134: mol_type = unassigned DNA
gaaagtcagagtactgggagaacagaagacttcacaatttaatgcctcagtttttaaaaaaggatccttacacttcatgtctcctagccatcagaagaggaatgagacagcaaaagttcaaatggcctgtttcaagtttctgatataaaacgatgacattttcaggaaaatcctgcatttccagagagagactggctggttaaatttctgaaagaggacaccagctaaaagaaggtattgcatctcacccgagcagactgtgtctgtggaaagtgtaagccccttgccagaagagcagcttcccagcaaaggcagagggtgaaaacagcaaaggtcttaagacactggggacctagagtcaaaagggacctcctccagggaaaacgctgtgtgagaaatggcctcattcggtgactgtgagtgacacagcagaaagttgggtcattccggctgcttttttgagaagtccctgaagagatcaataacagcaagagggaacctggcaaggaagctattcctataatccaggaaagagatgaggaaggcttggaccaggtggtagtggtgtcaggtagtcaaatgctgggtatattttgaagatacaccccataggatttgctccacattgaatgtggaatgctggaagagagataaagtgtacctgtcacatactttttgagttttatttattttcttagaagtaagtacacaaagagatgctacctaggagaagggtattcttttcactattctttcaaattttctgtatgttcaaacattttcatagtagaaagttggggggaaaatctgtttcataaacatttcctcagcagcagtccagtctattgcattttaattggttgtgatatcattgttttatgcaatacgttctcaacaagtatatcctccggcaaactgaacaaggaccaagtctgttctgcctacagctctgcttcctcatagctgctttccagaacgtgactcttgcaaattatcaagaaaggggaactaatctaagggatccagatcaaacagcctcatgaagacttattttatgtttctaatataaagatagaagttttcagaaaagccctgctacacagaggatcagagcaggggtgggcctgctgggctgcagctgggattctgagcatcctttcccggaggcacggaaagtgagtgagtgagcccagtgaggaagaagttgaagctttgatatgagtaaacaagtatctctacctgaaatgattaaagactggaccaaagagcatgtgaaaaaatgggtaaatgaagaccttaagattaatgagcaatacgggcaaattctgctcagtgaagaagtaacaggattagtcctgcaggaattaactgagaaggaccttgtagaaatggggctaccatggggtccagcacttttgataaaacgttcatacaacaaattgaatagtaagtcccctgaaagtgacaatcatgatccgggacaattagataattcaaaaccgtccaaaacagaacaccagaaaaatccaaaacacaccaaaaaggaagaagaaaattcaatgtcatctaatattgattatgatcccagagagatcagagatatcaaacaagaagaatcaattcttatgaaagaaaatgtgttagatgaagtagcaaatgctaaacacaagaaaaagggtaagctaaaacctgaacaattgacttgtatgccatatccttttgatcagttccatgacagccatcgctacatagaacattatactctacaacctgaaacaggagcactcaatctcattgatccaatacatgagttcaaagctctcacaaacacagaaacagccacggaagtggacattaagatgaaattcagcaatgaagtcttccgatttgcatcagcttgtatgaattcacgcaccaatggcaccatccattttggagtcaaggacaaaccccatggagaaattgttggtgtgaaaatcaccagtaaggctgccttcattgaccacttcaatgtaatgatcaaaaagtattttgaagaaagtgagatcaatgaagccaagaagtgtattcgggagccaaggtttgtggaagtccttctgcagaacaatacaccatctgacagatttgtcattgaagttgatactattccaaaacactctatatgtaatgataagtatttctacattcagatgcaaatttgtaaagataaaatatggaaacaaaaccaaaatctttcactgtttgtaagagaaggggctagctctagggatatcctggccaattccaagcaacgggatgtagatttcaaggcatttttacaaaatttaaagtcactggtagcatctagaaaagaggctgaagaagagtatggaatgaaggcaatgaagaaggagagtgaaggactaaagctggttaaacttctcataggaaaccgagactcactggataattcatactatgactggtacattcttgtaacaaataaatgccatccaaaccaaataaagcacttagattttttaaaagaaattaaatggtttgctgtgttggagtttgatcctgaatctatgatcaatggagtggtcaaagcttacaaagaaagtcgggtggcaaaccttcactttccaaatcaatatgaagacaagacaactaacatgtgggagaagatttctactcttaatctttaccaacagcccagctggattttctgcaacggcagatcagacctgaaaagcgagacatataaacctctagaaccacatttatggcagagagaaagagcttcagaagtcaggaaactaattttatttctcacagatgaaaatataatgacaagaggaaaatttttggtagtgtttctattactctcttcagtggaaagcccaggagatccactcattgaaactttctgggctttctatcaagctctcaaaggaatggaaaatatgttgtgtatctctgtaaactcacatatttatcaacgatggaaagatctactacaaacaagaatgaagatggaagatgaactaacaaaccacagtatttccactttaaatatagaactggtaaacagcactatccttaaactaaaatcggtgactcggtcatcaagaaggtttttgcccgcccgtggatcttcttcagttatcctagagaaaaagaaagaggatgtcttgactgcactggaaatcctctgtgaaaatgagtgtacagagacagacatcgagaaagacaaatctaaattcctggagtttaagaaatcaaaagaagaacacttttatcgaggtggcaaagtatcctggtggaacttctatttttcttctgaaaactattcttcagattttgttaaaagggacagttatgaaaagcttaaagatttaatacactgctgggcagagtctcctaaaccaatatttgcaaaaatcatcaatctttatcatcatccaggctgtggaggtaccacactggctatgcatgttctctgggacttaaagaaaaacttcagatgtgctgtgttaaaaaacaagacaactgattttgcagaaattgcagagcaagtgatcaatctggtcacctatagggcaaagagccatcaggattacattcctgtgcttctccttgtggatgattttgaagaacaagaaaatgtctactttctacaaaatgccatccattccgttttagcagaaaaggatttgcgatatgaaaaaacattggtaattatcttaaactgcatgagatcccggaatccagatgaaagtgcaaaattggcagacagtattgcactaaattaccaactttcttccaaggaacaaagagcttttggtgccaaactgaaggaaattgaaaagcagcacaagaactgtgaaaacttttattccttcatgatcatgaaaagcaattttgatgaaacatatatagaaaatgtagtcaggaatatcctaaaaggacaggatgttgacagcaaggaagcacaactcatttccttcctggctttactcagctcttatgttactgactctacaatttcagtttcacagtgtgaaatatttttgggaatcatatacactagtacaccctgggaacctgaaagcttagaagacaagatgggaacttattctacacttctaataaaaacagaagttgcagaatatgggagatacacaggtgtgcgtatcattcaccctctgattgccctgtactgtctaaaagaactggaaagaagctatcacttggataaatgtcaaattgcattgaatatattagaagagaatttattctatgattctggaataggaagagacaaatttcaacatgatgttcaaactcttctgcttacaagacagcgcaaggtgtatggagatgaaacagacactctgttttccccattaatggaagctttacagaataaagacattgaaaaggtcttgagtgcaggaagtagacgattcccacaaaatgcattcatttgtcaagccttagcaagacatttctacattaaagagaaggactttaacacagctctggactgggcacgtcaggccaaaatgaaagcacctaaaaattcctatatttcagatacactaggtcaagtctacaaaagtgaaatcaaatggtggttggatgggaacaaaaactgtaggagcattactgttaatgacctaacacatctcctagaagctgcggaaaaagcctcaagagctttcaaagaatcccaaaggcaaactgatagtaaaaactatgaaaccgagaactggtcaccacagaagtcccagagacgatatgacatgtataacacagcttgtttcttgggtgaaatagaagttggtctttacactatccagattcttcagctcactccctttttccacaaagaaaatgaattatccaaaaaacatatggtgcaatttttatcaggaaagtggaccattcctcctgatcccagaaatgaatgttatttggctcttagcaagttcacatcccacctaaaaaatttacaatcagatctgaaaaggtgctttgacttttttattgattatatggttcttctgaaaatgaggtatacccaaaaagaaattgcagaaatcatgttaagcaagaaagtcagtcgttgtttcaggaaatacacagaacttttctgtcatttggatccatgtctattacaaagtaaagagagtcaattactccaggaggagaattgcaggaaaaagctagaagctctgagagcagataggtttgctggactcttggaatatcttaatccaaactacaaagatgctaccaccatggaaagtatagtgaatgaatatgccttcctactgcagcaaaactcaaaaaagcccatgacaaatgagaaacaaaattccattttggccaacattattctgagttgtctaaagcccaactccaagttaattcaaccacttaccacgctaaaaaaacaactccgagaggtcttgcaatttgtaggactaagtcatcaatatccaggtccttatttcttggcctgcctcctgttctggccagaaaatcaagagctagatcaagattccaaactaatagaaaagtatgtttcatccttaaatagatccttcaggggacagtacaagcgcatgtgcaggtccaagcaggcaagcacacttttctatctgggcaaaaggaagggtctaaacagtattgttcacaaggccaaaatagagcagtactttgataaagcacaaaatacaaattccctctggcacagtggggatgtgtggaaaaaaaatgaagtcaaagacctcctgcgtcgtctaactggtcaggctgaaggcaagctaatctctgtagaatatggaacagaggaaaaaataaaaataccagtaatatctgtttattcaggtccactcagaagtggtaggaacatagaaagagtgtctttctacctaggattttccattgaaggccctctggcatatgatatagaagtaatttaagacaatacatcacctgtagttcaaatacgtttatttatatctttatgattttattctctctctctattctcatggcactttcataacattatggctaacctctaattacagattttgcttttgcctccctgaatgaattacaagcctttttaagatatgaaatatgcctacccgcagagcttggcacaaagtggagtcaatcttttaatgttttaaatatgcattttcagactcaaataattaagaagtttcattgatatccactggtcacatcataactgtctatagggcaataaaatctgtgttaaactcaattgcttttataagttttctaaattatttcttcactgtgacagcaaagatttaaataagatgaatgtaaaagagaaagcttattggactcaaacccacagatccacaccagagttctatttacctcatcttggtatcaataaaaacttatgtggaaggtaaatatattgttccccatccaccacataacactctccccaacacacacacacacacacacacacacacacacacacacacacactccttgtaccccttgcccttctcccagctcattgctccaggagagagaagagttcaaaaaataaagtaatcataaacttgaactctctccattctcttgttcccatttacaggtgaatctcttcctttaagccatttttgtctcctgtgaatacagccttatctccacctgtttcttagatcccatctcccctggcttattttttccattcattaccctctttgttccctttacttctcaacctgtgctatatacatgctgttctctctgttgagattgccttatttccatctaacattctctctcctgctattctgatttgtcattcacaactgatttcaagagtcaccttcaccaggaagtcttccttgaccaccatcattcctgcctgattagagggcttcctcatggtaatatgtgttctcaagttttcagtgtcaaggaatgccatcccagaagctcattctcagatgcacaacagccagaacagtctcaagcagcattctagagcttggaatttaagaactacgcattgcctataaagtgaaacataggctaatatagattaaattgaatattgaataaaaaatatatttatttatccac

SEQ ID NO: 18376 - DNA, 5831 bp, Homo sapiens
  source 1..5831: mol_type = unassigned DNA
tgggagaacagaagacttcacaatttaatgcctcagtttttaaaaaaggatccttacacttcatgtctcctagccatcagaagaggaatgagacagcaaaagttcaaatggcctgtttcaagtttctgatataaaacgatgacattttcaggaaaatcctgcatttccagagagagactggctggttaaatttctgaaagaggacaccagctaaaagaagggtcattccggctgcttttttgagaagtccctgaagagatcaataacagcaagagggaacctggcaaggaagctattcctataatccaggaaagagatgaggaaggcttggaccaggtggtagtggtgtcagctctgcttcctcatagctgctttccagaacgtgactcttgcaaattatcaagaaaggggaactaatctaagggatccagatcaaacagcctcatgaagacttattttatgtttctaatataaagatagaagttttcagaaaagccctgctacacagaggatcagagcaggggtgggcctgctgggctgcagctgggattctgagcatcctttcccggaggcacggaaagtgagtgagtgagcccagtgaggaagaagttgaagctttgatatgagtaaacaagtatctctacctgaaatgattaaagactggaccaaagagcatgtgaaaaaatgggtaaatgaagaccttaagattaatgagcaatacgggcaaattctgctcagtgaagaagtaacaggattagtcctgcaggaattaactgagaaggaccttgtagaaatggggctaccatggggtccagcacttttgataaaacgttcatacaacaaattgaatagtaagtcccctgaaagtgacaatcatgatccgggacaattagataattcaaaaccgtccaaaacagaacaccagaaaaatccaaaacacaccaaaaaggaagaagaaaattcaatgtcatctaatattgattatgatcccagagagatcagagatatcaaacaagaagaatcaattcttatgaaagaaaatgtgttagatgaagtagcaaatgctaaacacaagaaaaagggtaagctaaaacctgaacaattgacttgtatgccatatccttttgatcagttccatgacagccatcgctacatagaacattatactctacaacctgaaacaggagcactcaatctcattgatccaatacatgagttcaaagctctcacaaacacagaaacagccacggaagtggacattaagatgaaattcagcaatgaagtcttccgatttgcatcagcttgtatgaattcacgcaccaatggcaccatccattttggagtcaaggacaaaccccatggagaaattgttggtgtgaaaatcaccagtaaggctgccttcattgaccacttcaatgtaatgatcaaaaagtattttgaagaaagtgagatcaatgaagccaagaagtgtattcgggagccaaggtttgtggaagtccttctgcagaacaatacaccatctgacagatttgtcattgaagttgatactattccaaaacactctatatgtaatgataagtatttctacattcagatgcaaatttgtaaagataaaatatggaaacaaaaccaaaatctttcactgtttgtaagagaaggggctagctctagggatatcctggccaattccaagcaacgggatgtagatttcaaggcatttttacaaaatttaaagtcactggtagcatctagaaaagaggctgaagaagagtatggaatgaaggcaatgaagaaggagagtgaaggactaaagctggttaaacttctcataggaaaccgagactcactggataattcatactatgactggtacattcttgtaacaaataaatgccatccaaaccaaataaagcacttagattttttaaaagaaattaaatggtttgctgtgttggagtttgatcctgaatctatgatcaatggagtggtcaaagcttacaaagaaagtcgggtggcaaaccttcactttccaaatcaatatgaagacaagacaactaacatgtgggagaagatttctactcttaatctttaccaacagcccagctggattttctgcaacggcagatcagacctgaaaagcgagacatataaacctctagaaccacatttatggcagagagaaagagcttcagaagtcaggaaactaattttatttctcacagatgaaaatataatgacaagaggaaaatttttggtagtgtttctattactctcttcagtggaaagcccaggagatccactcattgaaactttctgggctttctatcaagctctcaaaggaatggaaaatatgttgtgtatctctgtaaactcacatatttatcaacgatggaaagatctactacaaacaagaatgaagatggaagatgaactaacaaaccacagtatttccactttaaatatagaactggtaaacagcactatccttaaactaaaatcggtgactcggtcatcaagaaggtttttgcccgcccgtggatcttcttcagttatcctagagaaaaagaaagaggatgtcttgactgcactggaaatcctctgtgaaaatgagtgtacagagacagacatcgagaaagacaaatctaaattcctggagtttaagaaatcaaaagaagaacacttttatcgaggtggcaaagtatcctggtggaacttctatttttcttctgaaaactattcttcagattttgttaaaagggacagttatgaaaagcttaaagatttaatacactgctgggcagagtctcctaaaccaatatttgcaaaaatcatcaatctttatcatcatccaggctgtggaggtaccacactggctatgcatgttctctgggacttaaagaaaaacttcagatgtgctgtgttaaaaaacaagacaactgattttgcagaaattgcagagcaagtgatcaatctggtcacctatagggcaaagagccatcaggattacattcctgtgcttctccttgtggatgattttgaagaacaagaaaatgtctactttctacaaaatgccatccattccgttttagcagaaaaggatttgcgatatgaaaaaacattggtaattatcttaaactgcatgagatcccggaatccagatgaaagtgcaaaattggcagacagtattgcactaaattaccaactttcttccaaggaacaaagagcttttggtgccaaactgaaggaaattgaaaagcagcacaagaactgtgaaaacttttattccttcatgatcatgaaaagcaattttgatgaaacatatatagaaaatgtagtcaggaatatcctaaaaggacaggatgttgacagcaaggaagcacaactcatttccttcctggctttactcagctcttatgttactgactctacaatttcagtttcacagtgtgaaatatttttgggaatcatatacactagtacaccctgggaacctgaaagcttagaagacaagatgggaacttattctacacttctaataaaaacagaagttgcagaatatgggagatacacaggtgtgcgtatcattcaccctctgattgccctgtactgtctaaaagaactggaaagaagctatcacttggataaatgtcaaattgcattgaatatattagaagagaatttattctatgattctggaataggaagagacaaatttcaacatgatgttcaaactcttctgcttacaagacagcgcaaggtgtatggagatgaaacagacactctgttttccccattaatggaagctttacagaataaagacattgaaaaggtcttgagtgcaggaagtagacgattcccacaaaatgcattcatttgtcaagccttagcaagacatttctacattaaagagaaggactttaacacagctctggactgggcacgtcaggccaaaatgaaagcacctaaaaattcctatatttcagatacactaggtcaagtctacaaaagtgaaatcaaatggtggttggatgggaacaaaaactgtaggagcattactgttaatgacctaacacatctcctagaagctgcggaaaaagcctcaagagctttcaaagaatcccaaaggcaaactgatagtaaaaactatgaaaccgagaactggtcaccacagaagtcccagagacgatatgacatgtataacacagcttgtttcttgggtgaaatagaagttggtctttacactatccagattcttcagctcactccctttttccacaaagaaaatgaattatccaaaaaacatatggtgcaatttttatcaggaaagtggaccattcctcctgatcccagaaatgaatgttatttggctcttagcaagttcacatcccacctaaaaaatttacaatcagatctgaaaaggtgctttgacttttttattgattatatggttcttctgaaaatgaggtatacccaaaaagaaattgcagaaatcatgttaagcaagaaagtcagtcgttgtttcaggaaatacacagaacttttctgtcatttggatccatgtctattacaaagtaaagagagtcaattactccaggaggagaattgcaggaaaaagctagaagctctgagagcagataggtttgctggactcttggaatatcttaatccaaactacaaagatgctaccaccatggaaagtatagtgaatgaatatgccttcctactgcagcaaaactcaaaaaagcccatgacaaatgagaaacaaaattccattttggccaacattattctgagttgtctaaagcccaactccaagttaattcaaccacttaccacgctaaaaaaacaactccgagaggtcttgcaatttgtaggactaagtcatcaatatccaggtccttatttcttggcctgcctcctgttctggccagaaaatcaagagctagatcaagattccaaactaatagaaaagtatgtttcatccttaaatagatccttcaggggacagtacaagcgcatgtgcaggtccaagcaggcaagcacacttttctatctgggcaaaaggaagggtctaaacagtattgttcacaaggccaaaatagagcagtactttgataaagcacaaaatacaaattccctctggcacagtggggatgtgtggaaaaaaaatgaagtcaaagacctcctgcgtcgtctaactggtcaggctgaaggcaagctaatctctgtagaatatggaacagaggaaaaaataaaaataccagtaatatctgtttattcaggtccactcagaagtggtaggaacatagaaagagtgtctttctacctaggattttccattgaaggccctctggcatatgatatagaagtaatttaagacaatacatcacctgtagttcaaatacgtttatttatatctttatgattttattctctctctctattctcatggcactttcataacattatggctaacctctaattacagattttgcttttgcctccctgaatgaattacaagcctttttaagatatgaaatatgcctacccgcagagcttggcacaaagtggagtcaatcttttaatgttttaaatatgcattttcagactcaaataattaagaagtttcattgatatccactggtcacatcataactgtctatagggcaataaaatctgtgttaaactcaattgcttttataagttttctaaattatttcttcactgtgacagcaaagatttaaataagatgaatgtaaaagagaaagcttattggactcaaacccacagatccacaccagagttctatttacctcatcttggtatcaata

SEQ ID NO: 18377 - DNA, 5757 bp, Homo sapiens
  source 1..5757: mol_type = unassigned DNA
agaagacttcacaatttaatgcctcagtttttaaaaaaggatccttacacttcatgtctcctagccatcagaagaggaatgagacagcaaaagttcaaatggcctgtttcaagtttctgatataaaacgatgacattttcaggaaaatcctgcatttccagagagagactggctggttaaatttctgaaagaggacaccagctaaaagaaggtattgcatctcacccgagcagactgtgtctgtggaaagtgtaagccccttgccagaagagcagcttcccagcaaaggcagagggtgaaaacagcaaaggtcttaagacactggggacctagagtcaaaagggacctcctccagggaaaacgctgtgtgagaaatggcctcattcggtgactgtgagtgacacagcagaaagttgggtcattccggctgcttttttgagaagtccctgaagagatcaataacagcaagagggaacctggcaaggaagctattcctataatccaggaaagagatgaggaaggcttggaccaggtggtagtggtgtcagctctgcttcctcatagctgctttccagaacgtgactcttgcaaattatcaagaaaggggaactaatctaagggatccagatcaaacagcctcatgaagacttattttatgtttctaatataaagatagaagttttcagaaaagccctgctacacagaggatcagagcaggggtgggcctgctgggctgcagctgggattctgagcatcctttcccggaggcacggaaagtgagtgagtgagcccagtgaggaagaagttgaagctttgatatgagtaaacaagtatctctacctgaaatgattaaagactggaccaaagagcatgtgaaaaaatgggtaaatgaagaccttaagattaatgagcaatacgggcaaattctgctcagtgaagaagtaacaggattagtcctgcaggaattaactgagaaggaccttgtagaaatggggctaccatggggtccagcacttttgataaaacgttcatacaacaaattgaatagtaagtcccctgaaagtgacaatcatgatccgggacaattagataattcaaaaccgtccaaaacagaacaccagaaaaatccaaaacacaccaaaaaggaagaagaaaattcaatgtcatctaatattgattatgatcccagagagatcagagatatcaaacaagaagaatcaattcttatgaaagaaaatgtgttagatgaagtagcaaatgctaaacacaagaaaaagggtaagctaaaacctgaacaattgacttgtatgccatatccttttgatcagttccatgacagccatcgctacatagaacattatactctacaacctgaaacaggagcactcaatctcattgatccaatacatgagttcaaagctctcacaaacacagaaacagccacggaagtggacattaagatgaaattcagcaatgaagtcttccgatttgcatcagcttgtatgaattcacgcaccaatggcaccatccattttggagtcaaggacaaaccccatggagaaattgttggtgtgaaaatcaccagtaaggctgccttcattgaccacttcaatgtaatgatcaaaaagtattttgaagaaagtgagatcaatgaagccaagaagtgtattcgggagccaaggtttgtggaagtccttctgcagaacaatacaccatctgacagatttgtcattgaagttgatactattccaaaacactctatatgtaatgataagtatttctacattcagatgcaaatttgtaaagataaaatatggaaacaaaaccaaaatctttcactgtttgtaagagaaggggctagctctagggatatcctggccaattccaagcaacgggatgtagatttcaaggcatttttacaaaatttaaagtcactggtagcatctagaaaagaggctgaagaagagtatggaatgaaggcaatgaagaaggagagtgaaggactaaagctggttaaacttctcataggaaaccgagactcactggataattcatactatgactggtacattcttgtaacaaataaatgccatccaaaccaaataaagcacttagattttttaaaagaaattaaatggtttgctgtgttggagtttgatcctgaatctatgatcaatggagtggtcaaagcttacaaagaaagtcgggtggcaaaccttcactttccaaatcaatatgaagacaagacaactaacatgtgggagaagatttctactcttaatctttaccaacagcccagctggattttctgcaacggcagatcagacctgaaaagcgagacatataaacctctagaaccacatttatggcagagagaaagagcttcagaagtcaggaaactaattttatttctcacagatgaaaatataatgacaagaggaaaatttttggtagtgtttctattactctcttcagtggaaagcccaggagatccactcattgaaactttctgggctttctatcaagctctcaaaggaatggaaaatatgttgtgtatctctgtaaactcacatatttatcaacgatggaaagatctactacaaacaagaatgaagatggaagatgaactaacaaaccacagtatttccactttaaatatagaactggtaaacagcactatccttaaactaaaatcggtgactcggtcatcaagaaggtttttgcccgcccgtggatcttcttcagttatcctagagaaaaagaaagaggatgtcttgactgcactggaaatcctctgtgaaaatgagtgtacagagacagacatcgagaaagacaaatctaaattcctggagtttaagaaatcaaaagaagaacacttttatcgaggtggcaaagtatcctggtggaacttctatttttcttctgaaaactattcttcagattttgttaaaagggacagttatgaaaagcttaaagatttaatacactgctgggcagagtctcctaaaccaatatttgcaaaaatcatcaatctttatcatcatccaggctgtggaggtaccacactggctatgcatgttctctgggacttaaagaaaaacttcagatgtgctgtgttaaaaaacaagacaactgattttgcagaaattgcagagcaagtgatcaatctggtcacctatagggcaaagagccatcaggattacattcctgtgcttctccttgtggatgattttgaagaacaagaaaatgtctactttctacaaaatgccatccattccgttttagcagaaaaggatttgcgatatgaaaaaacattggtaattatcttaaactgcatgagatcccggaatccagatgaaagtgcaaaattggcagacagtattgcactaaattaccaactttcttccaaggaacaaagagcttttggtgccaaactgaaggaaattgaaaagcagcacaagaactgtgaaaacttttattccttcatgatcatgaaaagcaattttgatgaaacatatatagaaaatgtagtcaggaatatcctaaaaggacaggatgttgacagcaaggaagcacaactcatttccttcctggctttactcagctcttatgttactgactctacaatttcagtttcacagtgtgaaatatttttgggaatcatatacactagtacaccctgggaacctgaaagcttagaagacaagatgggaacttattctacacttctaataaaaacagaagttgcagaatatgggagatacacaggtgtgcgtatcattcaccctctgattgccctgtactgtctaaaagaactggaaagaagctatcacttggataaatgtcaaattgcattgaatatattagaagagaatttattctatgattctggaataggaagagacaaatttcaacatgatgttcaaactcttctgcttacaagacagcgcaaggtgtatggagatgaaacagacactctgttttccccattaatggaagctttacagaataaagacattgaaaaggtcttgagtgcaggaagtagacgattcccacaaaatgcattcatttgtcaagccttagcaagacatttctacattaaagagaaggactttaacacagctctggactgggcacgtcaggccaaaatgaaagcacctaaaaattcctatatttcagatacactaggtcaagtctacaaaagtgaaatcaaatggtggttggatgggaacaaaaactgtaggagcattactgttaatgacctaacacatctcctagaagctgcggaaaaagcctcaagagctttcaaagaatcccaaaggcaaactgatagtaaaaactatgaaaccgagaactggtcaccacagaagtcccagagacgatatgacatgtataacacagcttgtttcttgggtgaaatagaagttggtctttacactatccagattcttcagctcactccctttttccacaaagaaaatgaattatccaaaaaacatatggtgcaatttttatcaggaaagtggaccattcctcctgatcccagaaatgaatgttatttggctcttagcaagttcacatcccacctaaaaaatttacaatcagatctgaaaaggtgctttgacttttttattgattatatggttcttctgaaaatgaggtatacccaaaaagaaattgcagaaatcatgttaagcaagaaagtcagtcgttgtttcaggaaatacacagaacttttctgtcatttggatccatgtctattacaaagtaaagagagtcaattactccaggaggagaattgcaggaaaaagctagaagctctgagagcagataggtttgctggactcttggaatatcttaatccaaactacaaagatgctaccaccatggaaagtatagtgaatgaatatgccttcctactgcagcaaaactcaaaaaagcccatgacaaatgagaaacaaaattccattttggccaacattattctgagttgtctaaagcccaactccaagttaattcaaccacttaccacgctaaaaaaacaactccgagaggtcttgcaatttgtaggactaagtcatcaatatccaggtccttatttcttggcctgcctcctgttctggccagaaaatcaagagctagatcaagattccaaactaatagaaaagtatgtttcatccttaaatagatccttcaggggacagtacaagcgcatgtgcaggtccaagcaggcaagcacacttttctatctgggcaaaaggaagggtctaaacagtattgttcacaaggccaaaatagagcagtactttgataaagcacaaaatacaaattccctctggcacagtggggatgtgtggaaaaaaaatgaagtcaaagacctcctgcgtcgtctaactggtcaggctgaaggcaagctaatctctgtagaatatggaacagaggaaaaaataaaaataccagtaatatctgtttattcaggtccactcagaagtggtaggaacatagaaagagtgtctttctacctaggattttccattgaaggccctctggcatatgatatagaagtaatttaagacaatacatcacctgtagttcaaatacgtttatttatatctttatgattttattctctctctctattctcatggcactttcataacattatggctaacctctaattacagattttgcttttgcctccctgaatgaattacaagcctttttaagatatgaaatatgcctacccgcagagcttgg

SEQ ID NO: 18378 - DNA, 763 bp, Homo sapiens
  source 1..763: mol_type = unassigned DNA
agaagacttcacaatttaatgcctcagtttttaaaaaaggatccttacacttcatgtctcctagccatcagaagaggaatgagacagcaaaagttcaaatggcctgtttcaagtttctgatataaaacgatgacattttcaggaaaatcctgggtcattccggctgcttttttgagaagtccctgaagagatcaataacagcaagagggaacctggcaaggaagctattcctataatccaggaaagagatgaggaaggcttggaccaggtggtagtggtgtcagctctgcttcctcatagctgctttccagaacgtgactcttgcaaattatcaagaaaggggaactaatctaagggatccagatcaaacagcctcatgaagacttattttatgtttctaatataaagatagaagttttcagaaaagccctgctacacagaggatcagagcaggggtgggcctgctgggctgcagctgggattctgagcatcctttcccggaggcacggaaagtgagtgagtgagcccagtgaggaagaagttgaagctttgatatgagtaaacaagtatctctacctgaaatgattaaagactggaccaaagagcatgtgaaaaaatgggtaaatgaagaccttaagattaatgagcaatacgggcaaattctgctcagtgaagaagtaacaggattagtcctgcaggaattaactgagaaggaccttgtagaaatggggctaccatggggtccagcacttttgataaaacg

SEQ ID NO: 18379 - DNA, 631 bp, Homo sapiens
  source 1..631: mol_type = unassigned DNA
agaagacttcacaatttaatgcctcagtttttaaaaaaggatccttacacttcatgtctcctagccatcagaagaggaatgagacagcaaaagttcaaatggcctgtttcaagtttctgatataaaacgatgacattttcaggaaaatcctgctctgcttcctcatagctgctttccagaacgtgactcttgcaaattatcaagaaaggggaactaatctaagggatccagatcaaacagcctcatgaagacttattttatgtttctaatataaagatagaagttttcagaaaagccctgctacacagaggatcagagcaggggtgggcctgctgggctgcagctgggattctgagcatcctttcccggaggcacggaaagtgagtgagtgagcccagtgaggaagaagttgaagctttgatatgagtaaacaagtatctctacctgaaatgattaaagactggaccaaagagcatgtgaaaaaatgggtaaatgaagaccttaagattaatgagcaatacgggcaaattctgctcagtgaagaagtaacaggattagtcctgcaggaattaactgagaaggaccttgtagaaatggggctaccatggggtccagcacttttgataaaacg

SEQ ID NO: 18380 - DNA, 381 bp, Homo sapiens
  source 1..381: mol_type = unassigned DNA
agaagacttcacaatttaatgcctcagtttttaaaaaaggatccttacacttcatgtctcctagccatcagaagaggaatgagacagcaaaagttcaaatggcctgtttcaagtttctgatataaaacgatgacattttcaggaaaatcctggaagaagttgaagctttgatatgagtaaacaagtatctctacctgaaatgattaaagactggaccaaagagcatgtgaaaaaatgggtaaatgaagaccttaagattaatgagcaatacgggcaaattctgctcagtgaagaagtaacaggattagtcctgcaggaattaactgagaaggaccttgtagaaatggggctaccatggggtccagcacttttgataaaacg

SEQ ID NO: 18381 - DNA, 1198 bp, Homo sapiens
  source 1..1198: mol_type = unassigned DNA
agaagacttcacaatttaatgcctcagtttttaaaaaaggatccttacacttcatgtctcctagccatcagaagaggaatgagacagcaaaagttcaaatggcctgtttcaagtttctgatataaaacgatgacattttcaggaaaatcctgcatttccagagagagactggctggttaaatttctgaaagaggacaccagctaaaagaagggtcattccggctgcttttttgagaagtccctgaagagatcaataacagcaagagggaacctggcaaggaagctattcctataatccaggaaagagatgaggaaggcttggaccaggtggtagtggtgtcaggtagtcaaatgctgggtatattttgaagatacaccccataggatttgctccacattgaatgtggaatgctggaagagagataaagtgtacctgtcacatactttttgagttttatttattttcttagaagtaagtacacaaagagatgctacctaggagaagggtattcttttcactattctttcaaattttctgtatgttcaaacattttcatagtagaaagttggggggaaaatctgtttcataaacatttcctcagcagcagtccagtctattgcattttaattggttgtgatatcattgttttatgcaatacgttctcaacaagtatatcctccggcaaactgaacaaggaccaagtctgttctgcctacagctctgcttcctcatagctgctttccagaacgtgactcttgcaaattatcaagaaaggggaactaatctaagggatccagatcaaacagcctcatgaagacttattttatgtttctaatataaagatagaagttttcagaaaagccctgctacacagaggatcagagcaggggtgggcctgctgggctgcagctgggattctgagcatcctttcccggaggcacggaaagtgagtgagtgagcccagtgaggaagaagttgaagctttgatatgagtaaacaagtatctctacctgaaatgattaaagactggaccaaagagcatgtgaaaaaatgggtaaatgaagaccttaagattaatgagcaatacgggcaaattctgctcagtgaagaagtaacaggattagtcctgcaggaattaactgagaaggaccttgtagaaatggggctaccatggggtccagcacttttgataaaacg

SEQ ID NO: 18382 - DNA, 611 bp, Homo sapiens
  source 1..611: mol_type = unassigned DNA
agaaagtcagagtactgggagaacagaagacttcacaatttaatgcctcagtttttaaaaaaggatccttacacttcatgtctcctagccatcagaagaggaatgagacagcaaaagttcaaatggcctgtttcaagtttctgatataaaacgatgacattttcaggaaaatcctgggtcattccggctgcttttttgagaagtccctgaagagatcaataacagcaagagggaacctggcaaggaagctattcctataatccaggaaagagatgaggaaggcttggaccaggtggtagtggtgtcaggtagtcaaatgctgggtatattttgaagatacaccccataggatttgctccacattgaatgtggaatgctggaagagagataaagtgtacctgtcacatactttttgagttttatttattttcttagaagtaagtacacaaagagatgctacctaggagaagggtattcttttcactattctttcaaattttctgtatgttcaaacattttcatagtagaaagttggggggaaaatctgtttcataaacatttcctcagcagcagtccagtctattgcattttaattggttgtgatatcattg

SEQ ID NO: 18383 - DNA, 1221 bp, Homo sapiens
  source 1..1221: mol_type = unassigned DNA
atgagtaaacaagtatctctacctgaaatgattaaagactggaccaaagagcatgtgaaaaaatgggtaaatgaagaccttaagattaatgagcaatacgggcaaattctgctcagtgaagaagtaacaggattagtcctgcaggaattaactgagaaggaccttgtagaaatggggctaccatggggtccagcacttttgataaaacgttcatacaacaaattgaatagtaagtcccctgaaagtgacaatcatgatccgggacaattagataattcaaaaccgtccaaaacagaacaccagaaaaatccaaaacacaccaaaaaggaagaagaaaattcaatgtcatctaatattgattatgatcccagagagatcagagatatcaaacaagaagaatcaattcttatgaaagaaaatgtgttagatgaagtagcaaatgctaaacacaagaaaaagctagaagctctgagagcagataggtttgctggactcttggaatatcttaatccaaactacaaagatgctaccaccatggaaagtatagtgaatgaatatgccttcctactgcagcaaaactcaaaaaagcccatgacaaatgagaaacaaaattccattttggccaacattattctgagttgtctaaagcccaactccaagttaattcaaccacttaccacgctaaaaaaacaactccgagaggtcttgcaatttgtaggactaagtcatcaatatccaggtccttatttcttggcctgcctcctgttctggccagaaaatcaagagctagatcaagattccaaactaatagaaaagtatgtttcatccttaaatagatccttcaggggacagtacaagcgcatgtgcaggtccaagcaggcaagcacacttttctatctgggcaaaaggaagggtctaaacagtattgttcacaaggccaaaatagagcagtactttgataaagcacaaaatacaaattccctctggcacagtggggatgtgtggaaaaaaaatgaagtcaaagacctcctgcgtcgtctaactggtcaggctgaaggcaagctaatctctgtagaatatggaacagaggaaaaaataaaaataccagtaatatctgtttattcaggtccactcagaagtggtaggaacatagaaagagtgtctttctacctaggattttccattgaaggccctctggcatatgatatagaagtaatttaa

SEQ ID NO: 18384 - DNA, 3848 bp, Homo sapiens
  source 1..3848: mol_type = unassigned DNA
gccgcgaggagggccccattcaaaagtagtcgctattgtcgccgtgggctgagctcgccgggccggcccctccgtggggccgcgctgggacgcacgcgggtggacgaggggaccgatcccgggcgcccatggccggggccgccatggccgagcggggccgcgtgcctccccccgcacccgcgcccagcacggaggggctgccgcgcgccttcctgcagagcctgcgcaccctgttcgacatcctggacgaccggcggcgcggctgcgtgcacctgcgcgagatcgagtcccgctggcagggcaccgacgcgcgggagctgccccgcggggtgctggagggcttgcgccaggtggccccggccagcggctacctgaccttcgagcgcttcgtggccggcctgcgcacctccctgctgagcgccgacggcggcccccgggaccccacgcgcgccccggcccggcccggggatcagccgccgccgccgccgcagcgcctggtgttcgctccggccgacgagccgcggacggtcctggagaggaagcccctgcccctgggcgtgcgcgcccctctggccggtcccagcgccgccgcccgcagcccggagcagctgtgcgccccggctgaggcggcgccctgccccgcggagcccgagcggtcccagagcgcggcgctggaaccgagctccagcgcggacgcaggtgcagtggcgtgcagggccctggaggcggactcaggggatgcccggcgggctccccgtgcccgaggggaacgtcggaggcacaccatcgccagcggcgtggactgcggcctgctgaagcagatgaaggagctggagcaggagaaggaggtgctgctgcagggtttggagatgatggcgcggggccgcgactggtaccagcagcagctgcaacgagtgcaggagcgccagcgccgcctgggccagagcagagccagcgccgactttggggctgcagggagcccccgcccactggggcggctactgcccaaggtacaagaggtggcccggtgcctgggggagctgctggctgcagcctgtgccagccgggccctgcccccgtcctcctccgggcccccctgccctgccctgacgtccacctcacccccggtctggcagcagcagaccatcctcatgctgaaggagcagaaccgactcctcacccaggaggtgaccgagaagagtgagcgcatcacgcagctggagcaggagaagtcggcgctcattaagcagctgtttgaggcccgcgccctgagccagcaggacgggggacctctggattccaccttcatctagtccttgtgggccgcgtgggcccccagggccagcctggcactcagcccttcgagggtgggcgccccatcgcacccaccctctctggctggagacccccggcaggcccaggcacagtcccggagtgggcgccttcctgccgcccttgccagatgggctccccaggcctgcccccggctggtccccgcaccgagcgcttgactccgttttggctcctggtgctgacatgggctggggctctcttgagtccgcatagtccgcagctactactgccgctgtcagtggacagtggggtacccctccatgagttagcgtccccccgtttccagcggtgccgccctgggtcccatcttcagggaaaggcactgcccacgccaggctgcacttccaacaacgggcagcagagggcgcggggcggctccgacgcgggtccaagggcagcttcccgctcaaccagggcaccaggacgaggtggctgtagctcggacggacggaagtagatggagggggtggggacggcctgtaagcggggggtgcctgcctggctggggagccccagggatagcggtcggacttcaggttctggccaaggctgagggaccctggctgcagcggatcggcacgccgggtgggcgagagcttggcctgcatgtgcctcccacagaccctggggtgatggccttccccctcttggccgggacgttgccccacgttgagtcccacacaacatcctgtgagcctggctccccaggagggcccccagacagctcccaggcacgtcataggcaaagcctgttcccccgactcaggatttccaaggcctggggtcctgctcacccccctttgctctcacgcccagcctgtccccaggtttcagctgggagaggccacctccctcagccaaggaaaacgagaacccccagggtacaggaggaggctggggcaggtccccttgggtgtcactccctcagcccctgcccaggcccactcccgctggtgctggagtacgcactggtgggggggccctgctcagcccaacctggagggtcccagtgtcaccagaaccaggggcacggcaacagcatcgatgggttctgcagcccagggcccccgatgcggggtcagtgcgtggggggcgcagggcccccgatgccgatgcggggtcagtgtgtgtggggcgcagggcctccgatgcggggtcagtgcgtggggggcgcagggccccctcgtgtccagggcactttggtacactgtcccacaaggcacctgtctcagaggaggggccctggcaggcagcgtggcaactcccttccggagcccagctccatgctaacctgcccacagcaaccccacagagccacattccctgctgcacctggtctgcaggggtgtcccaggacaggcccaagtcagcccagcatgcagctgccctcctaccctgaagatgggagtgggctttccaggggacataaggatgtcaggcctggacctcctgggcaggaaagggtgcaggtcctgagggcctgtgccccacagccccagcaccaggtggactgcagcgcagtgggtgggccagtggcagccagggagaagccccccgtcagcaggctggggtctgcccaccagggcctccccacgtctgcctttgagggtgcctgccatgccctgggggatcctggcatctttactggactggaagcaggagacagaacagtgtctgtcccggggtgacttcatcaggagaccgcccacatagagctggaccccgcagctgaagcggaaatgtgagacaggctggcacctccggaaaaactgcctttcagccttggtgttccgtgcaaggtgaaaagaaataggtcctcccagtttacagcttgaaatcaggctagtgagtggccctggagaccacgaggggagaatttaaaggccccggctggcagggtctaggtggctggcagaggcacatgcagaccctgcctggagcctgccctaggacgctgggcgggtcagtctccgtgcaggatgtgagcagcgtccctgggctctatccgcgaggtgccagtagcgtgtgcaggtacatacacgtgcgtgcacactgtgatgacacccggaaatgtctcaggatgttgaaatgtgtccttgggggcagaagtgtccccagttgagaatctgccccagaggaacacacccacaccaggcctcaggattttgtgttgatcaagttccaaggaaaaggaacatctcagccgggcgtggtggttcacgcctggaatcccagcacttgaggccaggagttccagagcagcctgggcaacgcagtgagagaccccatctctacaaaaaaaaaaaagaaagaaagaaaatgagagatccaggtttaaaaattcataaacaccacaaggaaacaatacactatgagacccagcagaagcaacagattgactctagacccagatactagaattatcagagagaatataaagtaacagtgttttatatatctaaagaaataaaagagatttctggaaacatgaacaa

SEQ ID NO: 18385 - DNA, 801 bp, Homo sapiens
  source 1..801: mol_type = unassigned DNA
gcgcagctcttagtcgcgggccgactggtgtttatccgtcactcgccgaggttccttgggtcatggtgccagcctgactgagaagaggacgctcccgggagacgaatgaggaaccacctcctcctactgttcaagtacaggggcctggtccgcaaagggaagaaaagcaaaagacgaaaatggctaaattcgtgatccgcccagccactgccgccgactgcagtgacatactgcggctgatcaaggagctggctaaatatgaatacatggaagaacaagtaatcttaactgaaaaaggtaattcaacagtggcgggacgggggacaagcgttcggtgcctgtcaccttcgccaaggccattaccgcccctgctcccccttcttgcagatctgctagaagatggttttggagagcaccccttttaccactgcctggttgcagaagtgccgaaagagcactggactccggaaggtaacccctcgccctttccagaagccagagagaccaagtgttatgtaagaagtagtgtcggctgtgtagaaccactgactacacaggccgaagttactgagaacttggacagaaaaaatagccagcaagtgttcaaactactgaggaaaaaaaaaaattagatatgctgcacttaagaatactagggcaggttaaaagagctgtttaagtaagtatcagagtgctgtggagactcggaagtgtttaagctgcttaagtaagtataagtgctgtggagacccggaagagttagatataatgtcatttgttgtaattcagtttcataaaatg

SEQ ID NO: 18386 - DNA, 909 bp, Homo sapiens
  source 1..909: mol_type = unassigned DNA
gcgcagctcttagtcgcgggccgactggtgtttatccgtcactcgccgaggttccttgggtcatggtgccagcctgactgagaagaggacgctcccgggagacgaatgaggaaccacctcctcctactgttcaagtacaggggcctggtccgcaaagggaagaaaagcaaaagacgaaaatggctaaattcgtgatccgcccagccactgccgccgactgcagtgacatactgcggctgatcaaggagctggctaaatatgaatacatggaagaacaagtaatcttaactgaaaaagatctgctagaagatggttttggagagcaccccttttaccactgcctggttgcagaagtgccgaaagagcactggactccggaaggtaacccctcgccctttccagaagccagagagaccaagtgttatgtaagaagtagtgtcggctgtgtagaaccactgactacacaggccgaagttactgagaacttggacagaaaaaatagccagcaagtgttcaaactactgaggaaaaaaaaaaattagatatgctgcacttaagaatactagggcaggttaaaagagctgtttaagtaagtatcagagtgctgtggagactcggaagtgtttaagctgcttaagtaagtataagtgctgtggagacccggaagagttagatataatgtcatttgttgtaattcagtttcataaaatggttcttgtttgaccctaacgtaacagtttttgtaattgtgttaaatcacatttttttctttaatttgtcccaatcttcaggttacagtctctagcttcgccatgtacatggcccttccgtgtacatggatgggcggggaggtaactaaaagatcctttacacaataaagtagatgatcatgataaatgaggtaaggtc

SEQ ID NO: 18387 - DNA, 868 bp, Homo sapiens
  source 1..868: mol_type = unassigned DNA
gcgcagctcttagtcgcgggccgactggtgtttatccgtcactcgccgaggttccttgggtcatggtgccagcctgactgagaagaggacgctcccgggagacgaatgaggaaccacctcctcctactgttcaagtacaggggcctggtccgcaaagggaagaaaagcaaaagacgaaaatggctaaattcgtgatccgcccagccactgccgccgactgcagtgacatactgcggctgatcaaggagctggctaaatatgaatacatggaagaacaagtaatcttaactgaaaaaggacacagcattgttggttttgccatgtactattttacctatgacccgtggattggcaagttattgtatcttgaggacttcttcgtgatgagtgattatagaggctttggcataggatcagaaattctgaagaatctaagccaggttgcaatgaggtgtcgctgcagcagcatgcacttcttggtagcagaatggaatgaaccatccatcaacttctataaaagaagaggtgcttctgatctgtccagtgaagagggttggagactgttcaagatcgacaaggagtacttgctaaaaatggcaacagaggagtgaggagtgctgctgtagatgacaacctccattctattttagaataaattcccaacttctcttgctttctatgctgtttgtagtgaaataatagaatgagcacccattccaaagctttattaccagtggcgttgttgcatgtttgaaatgaggtctgtttaaagtggcaatctcagatgcagtttggagagtcagatctttctccttgaatatctttcgataaacaacaaggtggtgtgatcttaatatatttgaaaaaa

SEQ ID NO: 18388 - DNA, 1065 bp, Homo sapiens
  source 1..1065: mol_type = unassigned DNA
gcgcagctcttagtcgcgggccgactggtgtttatccgtcactcgccgaggttccttgggtcatggtgccagcctgactgagaagaggacgctcccgggagacgaatgaggaaccacctcctcctactgttcaagtacaggggcctggtccgcaaagggaagaaaagcaaaagacgaaaatggctaaattcgtgatccgcccagccactgccgccgactgcagtgacatactgcggctgatcaaggagctggctaaatatgaatacatggaagaacaagtaatcttaactgaaaaagatctgctagaagatggttttggagagcaccccttttaccactgcctggttgcagaagtgccgaaagagcactggactccggaaggacacagcattgttggttttgccatgtactattttacctatgacccgtggattggcaagttattgtatcttgaggacttcttcgtgatgagtgattatagaggctttggcataggatcagaaattctgaagaatctaagccaggttgcaatgaggtgtcgctgcagcagcatgcacttcttggtagcagaatggaatgaaccatccatcaacttctataaaagaagaggtgcttctgatctgtccagtgaagagggttggagactgttcaagatcgacaaggagtacttgctaaaaatggcaacagaggagtgaggagtgctgctgtagatgacaacctccattctattttagaataaattcccaacttctcttgctttctatgctgtttgtagtgaaataatagaatgagcacccattccaaagctttattaccagtggcgttgttgcatgtttgaaatgaggtctgtttaaagtggcaatctcagatgcagtttggagagtcagatctttctccttgaatatctttcgataaacaacaaggtggtgtgatcttaatatatttgaaaaaaacttcattctcgtgagtcatttaaatgtgtacaatgtacacactggtacttagagtttctgtttgattcttttttaataaactactctttgatttaattgtttggtgtaagca

SEQ ID NO: 18389 - DNA, 1135 bp, Homo sapiens
  source 1..1135: mol_type = unassigned DNA
ctggtgtttatccgtcactcgccgaggttccttgggtcatggtgccagcctgactgagaagaggacgctcccgggagacgaatgaggaaccacctcctcctactgttcaagtacaggggcctggtccgcaaagggaagaaaagcaaaagacgaaaatggctaaattcgtgatccgcccagccactgccgccgactgcagtgacatactgcggctgatcaaggagctggctaaatatgaatacatggaagaacaagtaatcttaactgaaaaagatctgctagaagatggttttggagagcaccccttttaccactgcctggttgcagaagtgccgaaagagcactggactccggaaggttacagtctctagcttcgccatgtacatggcccttccgtgtacatggatgggcggggaggtaactaaaagatcctttacacaataaagtagatgatcatgataaatgaggacacagcattgttggttttgccatgtactattttacctatgacccgtggattggcaagttattgtatcttgaggacttcttcgtgatgagtgattatagaggctttggcataggatcagaaattctgaagaatctaagccaggttgcaatgaggtgtcgctgcagcagcatgcacttcttggtagcagaatggaatgaaccatccatcaacttctataaaagaagaggtgcttctgatctgtccagtgaagagggttggagactgttcaagatcgacaaggagtacttgctaaaaatggcaacagaggagtgaggagtgctgctgtagatgacaacctccattctattttagaataaattcccaacttctcttgctttctatgctgtttgtagtgaaataatagaatgagcacccattccaaagctttattaccagtggcgttgttgcatgtttgaaatgaggtctgtttaaagtggcaatctcagatgcagtttggagagtcagatctttctccttgaatatctttcgataaacaacaaggtggtgtgatcttaatatatttgaaaaaaacttcattctcgtgagtcatttaaatgtgtacaatgtacacactggtacttagagtttctgtttgattcttttttaataaactactctttgatttaa

SEQ ID NO: 18390 - DNA, 735 bp, Homo sapiens
  source 1..735: mol_type = unassigned DNA
aagcaaaagacgaaaatggctaaattcgtgatccgcccagccactgccgccgactgcagtgacatactgcggctgatcaaggagctggctaaatatgaatacatggatgggcggggaggtaactaaaagatcctttacacaataaagtagatgatcatgataaatgaggacacagcattgttggttttgccatgtactattttacctatgacccgtggattggcaagttattgtatcttgaggacttcttcgtgatgagtgattatagaggctttggcataggatcagaaattctgaagaatctaagccaggttgcaatgaggtgtcgctgcagcagcatgcacttcttggtagcagaatggaatgaaccatccatcaacttctataaaagaagaggtgcttctgatctgtccagtgaagagggttggagactgttcaagatcgacaaggagtacttgctaaaaatggcaacagaggagtgaggagtgctgctgtagatgacaacctccattctattttagaataaattcccaacttctcttgctttctatgctgtttgtagtgaaataatagaatgagcacccattccaaagctttattaccagtggcgttgttgcatgtttgaaatgaggtctgtttaaagtggcaatctcagatgcagtttggagagtcagatctttctccttgaatatctttcgataaacaacaaggtggtgtgatcttaatatatttgaa

SEQ ID NO: 18391 - DNA, 432 bp, Homo sapiens
  source 1..432: mol_type = unassigned DNA
ggtgtgagagcccagcctgttcccctttctgcgcccatccccggctcggccgccaccccgcccgcccgccccattccgttcccctgagctggccgggccggagcctcattttgttttctacttttttctctcctatgtgcatccccccaggagctggctaaatatgaatacatggaagaacaagtaatcttaactgaaaaagatctgctagaagatggttttggagagcaccccttttaccactgcctggttgcagaagtgccgaaagagcactggactccggaaggtaacccctcgccctttccagaagccagagagaccaagtgttatgtaagaagtagtgtcggctgtgtagaaccactgactacacaggccgaagttactgagaacttggacagaaaaaatagccagcaagtgttcaaactactgagg

SEQ ID NO: 18392 - DNA, 1033 bp, Homo sapiens
  source 1..1033: mol_type = unassigned DNA
gggcaatgctgcttcttctgactcaacaaatggggagagcaaattgaaaatgcgtaaattggaaggcaagttctgaaattaaacgttgtactttggcctgatgttctgacctttaaggaagcaagagtttgtaaacttccaaatatttactattctgaactgccgtgtaaacctgacgtattcccaagtcaacataccagtataccaataggatgtgaataatgtgtgtgttgagtttaaaaccatagcagttttgctctggcaagtaatgaaagcgttctcgcttcctgagtgtgagctccagcagactgcagagtggccagtccacagttgtagcctgacttcagtgagttctgatgtgtgctttttgcaaatacatgttctcagaacagtgagatcatccagcagtggcctggactgcactcacataaaaatcatgagacagccatggctacttgtttctgtaatacatgcatgtgtgttttttaaaacctatgataggcctctgattctgcagctgcaacttttatggaatgttttccttctccacatctcatgtgatgctcttattacaggacacagcattgttggttttgccatgtactattttacctatgacccgtggattggcaagttattgtatcttgaggacttcttcgtgatgagtgattatagaggctttggcataggatcagaaattctgaagaatctaagccaggttgcaatgaggtgtcgctgcagcagcatgcacttcttggtagcagaatggaatgaaccatccatcaacttctataaaagaagaggtgcttctgatctgtccagtgaagagggttggagactgttcaagatcgacaaggagtacttgctaaaaatggcaacagaggagtgaggagtgctgctgtagatgacaacctccattctattttagaataaattcccaacttctcttgctttctatgctgtttgtagtgaaataatagaatgagcacccattccaaagctttattaccagtggcgttgttgcatgtttgaa

SEQ ID NO: 18393 - DNA, 826 bp, Homo sapiens
  source 1..826: mol_type = unassigned DNA
gattctgcagctgcaacttttatggaatgttttccttctccacatctcatgtgatgctcttattacaggacacagcattgttggttttgccatgtactattttacctatgacccgtggattggcaagttattgtatcttgaggacttcttcgtgatgagtgattatagaggtacgattgagttcggagcagagggtctgaagagagttcagagttataaatgcttacaatgactttttaaattgtactctttctttttaggctttggcataggatcagaaattctgaagaatctaagccaggttgcaatgaggtgtcgctgcagcagcatgcacttcttggtagcagaatggaatgaaccatccatcaacttctataaaagaagaggtgcttctgatctgtccagtgaagagggttggagactgttcaagatcgacaaggagtacttgctaaaaatggcaacagaggagtgaggagtgctgctgtagatgacaacctccattctattttagaataaattcccaacttctcttgctttctatgctgtttgtagtgaaataatagaatgagcacccattccaaagctttattaccagtggcgttgttgcatgtttgaaatgaggtctgtttaaagtggcaatctcagatgcagtttggagagtcagatctttctccttgaatatctttcgataaacaacaaggtggtgtgatcttaatatatttgaaaaaaacttcattctcgtgagtcatttaaatgtgtacaatgtacacactggtacttagagtttctgtttgattcttttttaataaactactctttgatttaa

SEQ ID NO: 18394 - DNA, 1631 bp, Homo sapiens
  source 1..1631: mol_type = unassigned DNA
gtaagtaagcctgccagacacactgtgacggctgcctgaagctagtgagtcgcggcgccgcgcactggtggttgggtcagtgccgcgcgccgatcggtcgttaccgcgaggcgctggtggccttcaggctggacggcgcgggtcagccctggttcgccggcttctgggtctttgaacagccgcgatgtcgatcttcacccccaccaaccagatccgcctaaccaatgtggccgtggtacggatgaagcgtgccgggaagcgcttcgaaatcgcctgctacaaaaacaaggtcgtcggctggcggagcggcgtggaaaaagacctcgatgaagttctgcagacccactcagtgtttgtaaatgtttctaaaggtcaggttgccaaaaaggaagatctcatcagtgcgtttggaacagatgaccaaactgaaatctgtaagcagattttgactaaaggagaagttcaagtatcagataaagaaagacacacacaactggagcagatgtttagggacattgcaactattgtggcagacaaatgtgtgaatcctgaaacaaagagaccatacaccgtgatccttattgagagagccatgaaggacatccactattcggtgaaaaccaacaagagtacaaaacagcaggctttggaagtgataaagcagttaaaagagaaaatgaagatagaacgtgctcacatgaggcttcggttcatccttccagtcaatgaaggcaagaagctgaaagaaaagctcaagccactgatcaaggtcatagaaagtgaagattatggccaacagttagaaatcgtatgtctgattgacccgggctgcttccgagaaattgatgagctaataaaaaaggaaactaaaggcaaaggttctttggaagtactcaatctgaaagatgtagaagaaggagatgagaaatttgaatgacacccatcaatctcttcacctctaaaacactaaagtgtttccgtttccgacggcactgtttcatgtctgtggtctgccaaatacttgcttaaactatttgacattttctatctttgtgttaacagtggacacagcaaggctttcctacataagtataataatgtgggaatgatttggttttaattataaactggggtctaaatcctaaagcaaaattgaaactccaagatgcaaagtccagagtggcattttgctactctgtctcatgccttgatagctttccaaaatgaaagttacttgaggcagctcttgtgggtgaaaagttatttgtacagtagagtaagattattaggggtatgtctatacaacaaaagggggggtctttcctaaaaaagaaaacatatgatgcttcatttctacttaatggaacttgtgttctgagggtcattatggtatcgtaatgtaaagcttggatgatgttcctgattatctgagaaacagatatagaaaaattgtgccggacttacctttcattgaacatgctgccataacttagattattcttggttaaaaaataaaagtcacttatttctaattcttaaagtttataatatatattaatatagctaaaattgtatgtaatcaataaaaccactcttatgtttattaaactatggcttgtgtttctagacaa

SEQ ID NO: 18395 - DNA, 1531 bp, Homo sapiens
  source 1..1531: mol_type = unassigned DNA
tgacggctgcctgaagctagtgagtcgcggcgccgcgcactggtggttgggtcagtgccgcgcgccgatcggtcgttaccgcgaggcgctggtggccttcaggctggacggcgcgggtcagccctggttcgccggcttctgggtctttgaacagccgcgatgtcgatcttcacccccaccaaccagatccgcctaaccaatgtggccgtggtacggatgaagcgtgccgggaagcgcttcgaaatcgcctgctacaaaaacaaggtcgtcggctggcggagcggcgtggaaaaagacctcgatgaagttctgcagacccactcagtgtttgtaaatgtttctaaaggtcaggttgccaaaaaggaagatctcatcagtgcgtttggaacagatgaccaaactgaaatctattttgactaaaggagaagttcaagtatcagataaagaaagacacacacaactggagcagatgtttagggacattgcaactattgtggcagacaaatgtgtgaatcctgaaacaaagagaccatacaccgtgatccttattgagagagccatgaaggacatccactattcggtgaaaaccaacaagagtacaaaacagcaggctttggaagtgataaagcagttaaaagagaaaatgaagatagaacgtgctcacatgaggcttcggttcatccttccagtcaatgaaggcaagaagctgaaagaaaagctcaagccactgatcaaggtcatagaaagtgaagattatggccaacagttagaaatcgtatgtctgattgacccgggctgcttccgagaaattgatgagctaataaaaaaggaaactaaaggcaaaggttctttggaagtactcaatctgaaagatgtagaagaaggagatgagaaatttgaatgacacccatcaatctcttcacctctaaaacactaaagtgtttccgtttccgacggcactgtttcatgtctgtggtctgccaaatacttgcttaaactatttgacattttctatctttgtgttaacagtggacacagcaaggctttcctacataagtataataatgtgggaatgatttggttttaattataaactggggtctaaatcctaaagcaaaattgaaactccaagatgcaaagtccagagtggcattttgctactctgtctcatgccttgatagctttccaaaatgaaagttacttgaggcagctcttgtgggtgaaaagttatttgtacagtagagtaagattattaggggtatgtctatacaacaaaagggggggtctttcctaaaaaagaaaacatatgatgcttcatttctacttaatggaacttgtgttctgagggtcattatggtatcgtaatgtaaagcttggatgatgttcctgattatctgagaaacagatatagaaaaattgtgccggacttacctttcattgaacatgctgccataacttagattattcttggttaaaaaataaaagtcacttatttctaattcttaaagtttataatatatattaatatagc

SEQ ID NO: 18396 - DNA, 841 bp, Homo sapiens
  source 1..841: mol_type = unassigned DNA
ctgaagctagtgagtcgcggcgccgcgcactggtggttgggtcagtgccgcgcgccgatcggtcgttaccgcgaggcgctggtggccttcaggctggacggcgcgggtcagccctggttcgccggcttctgggtctttgaacagccgcgatgtcgatcttcacccccaccaaccagatccgcctaaccaatgtggccgtggtacggatgaagcgtgccgggaagcgcttcgaaatcgcctgctacaaaaacaaggtcgtcggctggcggagcggcgtggaaaaagacctcgatgaagttctgcagacccactcagtgtttgtaaatgtttctaaaggtcaggttgccaaaaaggaagatctcatcagtgcgtttggaacagatgaccaaactgaaatctattttgactaaaggagaagttcaagtatcagataaagaaagacacacacaactggagcagatgtttagggacattgcaactattgtggcagacaaatgtgtgaatcctgaaacaaagagaccatacaccgtgatccttattgagagagccatgaaggacatccactattcggtgaaaaccaacaagagtacaaaacagcaggctttggaagtgataaagcagttaaaagagaaaatgaagatagaacgtgctcacatgaggcttcggttcatccttccagtcaatgaaggcaagaagctgaaagaaaagctcaagccactgatcaaggtcatagaaagtgaagattatggccaacagttagaaatcgtaagagtcaaatattttctttgcttcatgttacctaaatattgtattctctagtaataaatttgtagcaaacatt

SEQ ID NO: 18397 - DNA, 513 bp, Homo sapiens
  source 1..513: mol_type = unassigned DNA
ggactttctctcctgccctcacaagggaaaaagacctcgatgaagttctgcagacccactcagtgtttgtaaatgtttctaaaggtcaggttgccaaaaaggaagatctcatcagtgcgtttggaacagatgaccaaactgaaatctattttgactaaaggagaagttcaagtatcagataaagaaagacacacacaactggagcagatgtttagggacattgcaactattgtggcagacaaatgtgtgaatcctgaaacaaagagaccatacaccgtgatccttattgagagagccatgaaggacatccactattcggtgaaaaccaacaagagtacaaaacagcaggctttggaagtgataaagcagttaaaagagaaaatgaagatagaacgtgctcacatgaggcttcggttcatccttccagtcaatgaaggcaagaagctgaaagaaaagctcaagccactgatcaaggtcatagaaagtgaagattatggccaacagttagaaatc

SEQ ID NO: 18398 - DNA, 953 bp, Homo sapiens
  source 1..953: mol_type = unassigned DNA
cagacacactgtgacggctgcctgaagctagtgagtcgcggcgccgcgcactggtggttgggtcagtgccgcgcgccgatcggtcgttaccgcgaggcgctggtggccttcaggctggacggcgcgggtcagccctggttcgccggcttctgggtctttgaacagccgcgatgtcgatcttcacccccaccaaccagatccgcctaaccaatgtggccgtggtacggatgaagcgtgccgggaagcgcttcgaaatcgcctgctacaaaaacaaggtcgtcggctggcggagcgcgtgggaaaaagacctcgatgaagttctgcagacccactcagtgtttgtaaatgtttctaaaggtcaggttgccaaaaaggaagatctcatcagtgcgtttggaacagatgaccaaactgaaatctgtaagcagattttgactaaaggagaagttcaagtatcagataaagaaagacacacacaactggagcagatgtttagggacattgcaactattgtggcagacaaatgtgtgaatcctgaaacaaagagaccatacaccgtgatccttattgagagagccatgaaggacatccactattcggtgaaaaccaacaagagtacaaaacagcaggctttggaagtgataaagcagttaaaagagaaaatgaagatagaacgtgctcacatgaggcttcggttcatccttccagtcaatgaaggcaagaagctgaaagaaaagctcaagccactgatcaaggtcatagaaagtgaagattatggccaacagttagaaatcgtatgtctgattgacccgggctgcttccgagaaattgatgagctaataaaaaaggaaactaaaggcaaaggttctttggaagtactcaatctgaaagatgtagaagaaggagatgagaaatttgaatgacacccatcaatctcttcacctctaaaacac

SEQ ID NO: 18399 - DNA, 4923 bp, Homo sapiens
  source 1..4923: mol_type = unassigned DNA
gtgcgcggggcccccaagatggcgcccgaaacccggaagtgagcggcggcagctgcgaggctcggagaaacaggcgccgcgggctccgcgcccggccggacccgggcccgagatcatgatgctgccgccaccgccgccaccacggagcgagaagcccagatagacgccccggcggccccgggtcctggagtcccgccgcctgctgcccggccgaggaccccaccccgcctgccgcccgatgcttgcagtggggcccgccatggacagggattacccgcagcatgaacccccgccggcgggcagcctcctgtacagcccgccgcccctgcagagcgccatgctgcactgcccctactggaacaccttctcgctgccgccataccctgccttctccagcgacagccgcccgttcatgagctccgcctccttcctcggcagccagccctgcccagacaccagctatgcccccgtggccaccgcctccagcttgccaccaaagacctgcgactttgctcaggactcctcctattttgaggacttctccaacatctccatcttctcctcgtccgtggactccctgtcggacatcgtggacacgcccgacttcctgccggctgacagcctcaaccaggtgtccaccatctgggacgataaccctgccccctccacccacgataagctgttccagctcagcaggccgtttgcaggcttcgaggactttctgccctcccacagcaccccgcttctcgtcagctaccaggagcagagtgtgcagagccagccagaggaggaggacgaggctgaggaggaggaggcggaggagctggggcacacagagacctacgccgactacgtgccgtccaagtccaagatcgggaagcagcacccagaccgcgtggtggagaccagcacactgtccagcgtcccacccccagacatcacctacaccctggccctgccctcggacagcggggccctgtctgccctgcagctagaggccatcacctacgcctgccagcaacacgaggtcctgctccccagcgggcagcgcgcgggctttctcatcggcgatggggccggcgtgggcaaaggccggacggtggccggagtcatcctggagaaccacctgcgcggccggaagaaagcattgtggttcagcgtctccaacgacctcaagtacgatgcggagcgcgacctgcgggacatcgaagccacgggcatcgcggtgcacgcgctcagcaagatcaagtacggtgacaccactacctcagagggcgtcctcttcgccacctactccgccctgattggggagagccaggccggcggccagcaccgcactcgcctccggcagatcctggactggtgtggggaggccttcgagggcgtcatcgtgttcgacgagtgtcacaaagccaagaatgccggctccaccaagatgggcaaggctgtgctagacctgcagaacaagctgcccctggcccgcgtggtctacgccagcgccacaggtgcctctgagcctcggaacatgatctacatgagccgcttgggtatctggggcgagggcacacccttccggaactttgaggagttcctgcacgccatcgagaagaggggcgttggcgccatggagatcgtggccatggacatgaaggtcagcggcatgtacatcgcacgccagctcagcttctccggcgtcaccttccgcatcgaggagatcccgctggccccagccttcgagtgcgtctacaaccgcgcggccctgctgtgggccgaggccctgaacgtgttccagcaggcggccgactggatcggcctggagtcgcgcaagtccctgtggggccagttctggtcggcacaccagcgcttcttcaagtatctgtgcatcgcagccaaggtgcgccggctggtggagctggcccgagaggagctggcgcgagacaagtgcgtggtcatcgggctgcagtccacgggcgaggcgcgcacgcgggaggtgctgggggagaacgatgggcacctcaactgcttcgtctcggccgctgaaggcgtgttcctgtcgctaattcagaagcactttccgtccaccaagagaaagcgggacagaggagcgggcagcaagcggaaacggcgacctcggggacgcggggccaaagccccccggctggcgtgcgagacagcgggcgtcatccgcatcagtgacgacagcagcacggagtcggaccctggcctggacagcgacttcaactcctcccccgagtccctggtggatgacgacgttgtcatcgttgatgcagtcgggctccccagtgacgaccggggacccctgtgcctcctgcagagagacccgcatggccccggggtcctggagcgggtggagcggctgaagcaggatctgctggacaaagtgcggcggctgggccgggaactgccagtcaacaccctggacgagctcatcgaccagctgggcggcccccagcgggtggcggagatgaccggcaggaaaggccgcgtggtgtccaggcccgacgggacggtggccttcgagtcgcgggcagagcagggtctgtccatcgaccacgtgaacctcagggagaagcagcgcttcatgagcggcgagaagctcgtggccatcatctcggaggcctccagctcgggtgtctccctccaagccgaccgccgtgtccagaaccagcggcgccgcgtgcacatgaccttggagctgccgtggagcgccgaccgcgccatccagcagttcggccgcacccaccggtccaaccaggtctccgcgccagagtatgtcttcctcatctcggagctggccggggagcgccggttcgcctccatcgtggccaagcgcctggagagtctgggggccctgacccacggagaccgccgcgccacggagtcccgtgacctcagcaagtacaactttgagaacaagtatggcacccgggccctgcactgtgtcctcaccaccatcctgagccagactgagaacaaagtgcctgtgccccagggataccctggaggggtccccaccttcttccgggacatgaagcagggcctgctgtctgtgggcattggtggccgggagtcccggaatggctgcctggacgtggagaaggactgttccatcaccaagttcctgaaccgcatcctggggctggaggtgcacaagcagaacgccctgttccagtacttctcagacaccttcgaccacctcatcgagatggacaagcgggagggcaaatacgacatgggcatcctggaccttgctcccggtatcgaggagatctacgaggagagccagcaggtgttcctggctcccgggcacccgcaggacgggcaggtggtcttctacaagatcagcgtggaccgcggcctgaagtgggaggacgcctttgccaagtcgctggcgctgacgggcccctatgacggcttctacctctcctacaaggtccgcggtaacaagcccagctgcctgctggcggagcagaaccgcggccagttcttcacggtgtacaagcccaacatcggccggcagagccagctggaggccctggacagcctccgccgcaagttccaccgggtcaccgcggaggaggccaaggagccctgggagagtggctacgctttgtcgctgacgcactgcagccacagcgcctggaaccggcactgccggctggcgcaggagggtaaggactgcctgcaggggctgcggctgcggcaccactacatgctgtgcggcgcgctgctgcgcgtgtggggccgcatcgccgccgtcatggccgacgtcagcagcagcagctacctgcagatcgtgcggctgaagaccaaggacaggaagaagcaagtgggcatcaagatccccgagggctgcgtgcgccgggtgctgcaggagctgcggctgatggatgcggacgtgaagcgcaggcaggcgcccgccctgggctgccccgccccgcccgccccgcgcccgctggcgctgccttgcggccccggagaggtgctggacctcacctacagccccccggccgaggccttcccgccgcccccgcacttctctttcccggcgccgctgtccctggacgccggccccggcgtcgtgccgctgggcacccccgacgcccaggccgaccctgcggccctcgcgcaccagggctgcgacatcaacttcaaggaggtgctggaggacatgctgcgctcgctgcacgcggggccgccctccgagggcgcgctgggggagggcgcgggggcggggggcgcggcgggcggtggtcccgagcggcagagcgtgatccagttcagcccacccttccccggcgcccaggctcctctctgacacgcctttaggcgaaacatgccccaagacacagggaccgtttctcccctaggagcagcggtggggagcagggccaaggtcccctgaccactgctcagaggagccctaggccctggccgcagtgccttcagcgcccgacccgggcccccacctggtcagccctggcggggcccactcaggacagctgggggccggggcgtggcagggccctctctgtgcctctcctcccaagtaggaaggggctccgggtggctgctctgggactgggcacccacaagggctcagtgggcccaaacccttgaaatccgtgaaaccgggtggtcccaagagctagaaactcaggaaaccccaggtgctcagggccccgcgtctcgggggctccgtggggcagacccctgctaatatatgcaattctccctcccccagcccttccctgacccctaagttattgcccgctcacctctcccaggccccaggccgcggagctggcagggtggcgcctgcggtttctatgtatttatagcaagttctgatgtacatatgtaaaggacttttttaaatatatgtgccttttgcctacttcc

SEQ ID NO: 18400 - DNA, 4537 bp, Homo sapiens
  source 1..4537: mol_type = unassigned DNA
aatgctggggctgctgccgcggtcatgagggagccgctcccgggcagcgcttcctgggggacccctggccccccgagcgccgggaccatgtcccagctgcagctgtggctgcagtttgaggctctgaacaaggactcctcctattttgaggacttctccaacatctccatcttctcctcgtccgtggactccctgtcggacatcgtggacacgcccgacttcctgccggctgacagcctcaaccaggtgtccaccatctgggacgataaccctgccccctccacccacgataagctgttccagctcagcaggccgtttgcaggcttcgaggactttctgccctcccacagcaccccgcttctcgtcagctaccaggagcagagtgtgcagagccagccagaggaggaggacgaggctgaggaggaggaggcggaggagctggggcacacagagacctacgccgactacgtgccgtccaagtccaagatcgggaagcagcacccagaccgcgtggtggagaccagcacactgtccagcgtcccacccccagacatcacctacaccctggccctgccctcggacagcggggccctgtctgccctgcagctagaggccatcacctacgcctgccagcaacacgaggtcctgctccccagcgggcagcgcgcgggctttctcatcggcgatggggccggcgtgggcaaaggccggacggtggccggagtcatcctggagaaccacctgcgcggccggaagaaagcattgtggttcagcgtctccaacgacctcaagtacgatgcggagcgcgacctgcgggacatcgaagccacgggcatcgcggtgcacgcgctcagcaagatcaagtacggtgacaccactacctcagagggcgtcctcttcgccacctactccgccctgattggggagagccaggccggcggccagcaccgcactcgcctccggcagatcctggactggtgtggggaggccttcgagggcgtcatcgtgttcgacgagtgtcacaaagccaagaatgccggctccaccaagatgggcaaggctgtgctagacctgcagaacaagctgcccctggcccgcgtggtctacgccagcgccacaggtgcctctgagcctcggaacatgatctacatgagccgcttgggtatctggggcgagggcacacccttccggaactttgaggagttcctgcacgccatcgagaagaggggcgttggcgccatggagatcgtggccatggacatgaaggtcagcggcatgtacatcgcacgccagctcagcttctccggcgtcaccttccgcatcgaggagatcccgctggccccagccttcgagtgcgtctacaaccgcgcggccctgctgtgggccgaggccctgaacgtgttccagcaggcggccgactggatcggcctggagtcgcgcaagtccctgtggggccagttctggtcggcacaccagcgcttcttcaagtatctgtgcatcgcagccaaggtgcgccggctggtggagctggcccgagaggagctggcgcgagacaagtgcgtggtcatcgggctgcagtccacgggcgaggcgcgcacgcgggaggtgctgggggagaacgatgggcacctcaactgcttcgtctcggccgctgaaggcgtgttcctgtcgctaattcagaagcactttccgtccaccaagagaaagcgggacagaggagcgggcagcaagcggaaacggcgacctcggggacgcggggccaaagccccccggctggcgtgcgagacagcgggcgtcatccgcatcagtgacgacagcagcacggagtcggaccctggcctggacagcgacttcaactcctcccccgagtccctggtggatgacgacgttgtcatcgttgatgcagtcgggctccccagtgacgaccggggacccctgtgcctcctgcagagagacccgcatggccccggggtcctggagcgggtggagcggctgaagcaggatctgctggacaaagtgcggcggctgggccgggaactgccagtcaacaccctggacgagctcatcgaccagctgggcggcccccagcgggtggcggagatgaccggcaggaaaggccgcgtggtgtccaggcccgacgggacggtggccttcgagtcgcgggcagagcagggtctgtccatcgaccacgtgaacctcagggagaagcagcgcttcatgagcggcgagaagctcgtggccatcatctcggaggcctccagctcgggtgtctccctccaagccgaccgccgtgtccagaaccagcggcgccgcgtgcacatgaccttggagctgccgtggagcgccgaccgcgccatccagcagttcggccgcacccaccggtccaaccaggtctccgcgccagagtatgtcttcctcatctcggagctggccggggagcgccggttcgcctccatcgtggccaagcgcctggagagtctgggggccctgacccacggagaccgccgcgccacggagtcccgtgacctcagcaagtacaactttgagaacaagtatggcacccgggccctgcactgtgtcctcaccaccatcctgagccagactgagaacaaagtgcctgtgccccagggataccctggaggggtccccaccttcttccgggacatgaagcagggcctgctgtctgtgggcattggtggccgggagtcccggaatggctgcctggacgtggagaaggactgttccatcaccaagttcctgaaccgcatcctggggctggaggtgcacaagcagaacgccctgttccagtacttctcagacaccttcgaccacctcatcgagatggacaagcgggagggcaaatacgacatgggcatcctggaccttgctcccggtatcgaggagatctacgaggagagccagcaggtgttcctggctcccgggcacccgcaggacgggcaggtggtcttctacaagatcagcgtggaccgcggcctgaagtgggaggacgcctttgccaagtcgctggcgctgacgggcccctatgacggcttctacctctcctacaaggtccgcggtaacaagcccagctgcctgctggcggagcagaaccgcggccagttcttcacggtgtacaagcccaacatcggccggcagagccagctggaggccctggacagcctccgccgcaagttccaccgggtcaccgcggaggaggccaaggagccctgggagagtggctacgctttgtcgctgacgcactgcagccacagcgcctggaaccggcactgccggctggcgcaggagggtaaggactgcctgcaggggctgcggctgcggcaccactacatgctgtgcggcgcgctgctgcgcgtgtggggccgcatcgccgccgtcatggccgacgtcagcagcagcagctacctgcagatcgtgcggctgaagaccaaggacaggaagaagcaagtgggcatcaagatccccgagggctgcgtgcgccgggtgctgcaggagctgcggctgatggatgcggacgtgaagcgcaggcaggcgcccgccctgggctgccccgccccgcccgccccgcgcccgctggcgctgccttgcggccccggagaggtgctggacctcacctacagccccccggccgaggccttcccgccgcccccgcacttctctttcccggcgccgctgtccctggacgccggccccggcgtcgtgccgctgggcacccccgacgcccaggccgaccctgcggccctcgcgcaccagggctgcgacatcaacttcaaggaggtgctggaggacatgctgcgctcgctgcacgcggggccgccctccgagggcgcgctgggggagggcgcgggggcggggggcgcggcgggcggtggtcccgagcggcagagcgtgatccagttcagcccacccttccccggcgcccaggctcctctctgacacgcctttaggcgaaacatgccccaagacacagggaccgtttctcccctaggagcagcggtggggagcagggccaaggtcccctgaccactgctcagaggagccctaggccctggccgcagtgccttcagcgcccgacccgggcccccacctggtcagccctggcggggcccactcaggacagctgggggccggggcgtggcagggccctctctgtgcctctcctcccaagtaggaaggggctccgggtggctgctctgggactgggcacccacaagggctcagtgggcccaaacccttgaaatccgtgaaaccgggtggtcccaagagctagaaactcaggaaaccccaggtgctcagggccccgcgtctcgggggctccgtggggcagacccctgctaatatatgcaattctccctcccccagcccttccctgacccctaagttattgcccgctcacctctcccaggccccaggccgcggagctggcagggtggcgcctgcggtttctatgtatttatagcaagttctgatgtacatatgtaaaggacttttttaaatatatgtgccttttgcctacttc

SEQ ID NO: 18401 - DNA, 4861 bp, Homo sapiens
  source 1..4861: mol_type = unassigned DNA
gaaacccggaagtgagcggcggcagctgcgaggctcggagaaacaggcgccgcgggctccgcgcccggccggacccgggcccgagatcatgatgctgccgccaccgccgccaccacggagcgagaagcccagatagacgccccggcggccccgggtcctggagtcccgccgcctgctgcccggccgaggaccccaccccgcctgccgcccgatgcttgcagtggggcccgccatggacagggattacccgcagcatgaacccccgccggcgggcagcctcctgtacagcccgccgcccctgcagagcgccatgctgcactgcccctactggaacaccttctcgctgccgccataccctgccttctccagcgacagccgcccgttcatgagctccgcctccttcctcggcagccagccctgcccagacaccagctatgcccccgtggccaccgcctccagcttgccaccaaagacctgcgactttgctcaggactcctcctattttgaggacttctccaacatctccatcttctcctcgtccgtggactccctgtcggacatcgtggacacgcccgacttcctgccggctgacagcctcaaccaggtgtccaccatctgggacgataaccctgccccctccacccacgataagctgttccagctcagcaggccgtttgcaggcttcgaggactttctgccctcccacagcaccccgcttctcgtcagctaccaggagcagagtgtgcagagccagccagaggaggaggacgaggctgaggaggaggaggcggaggagctggggcacacagagacctacgccgactacgtgccgtccaagtccaagatcgggaagcagcacccagaccgcgtggtggagaccagcacactgtccagcgtcccacccccagacatcacctacaccctggccctgccctcggacagcggggccctgtctgccctgcagctagaggccatcacctacgcctgccagcaacacgaggtcctgctccccagcgggcagcgcgcgggctttctcatcggcgatggggccggcgtgggcaaaggccggacggtggccggagtcatcctggagaaccacctgcgcggccggaagaaagcattgtggttcagcgtctccaacgacctcaagtacgatgcggagcgcgacctgcgggacatcgaagccacgggcatcgcggtgcacgcgctcagcaagatcaagtacggtgacaccactacctcagagggcgtcctcttcgccacctactccgccctgattggggagagccaggccggcggccagcaccgcactcgcctccggcagatcctggactggtgtggggaggccttcgagggcgtcatcgtgttcgacgagtgtcacaaagccaagaatgccggctccaccaagatgggcaaggctgtgctagacctgcagaacaagctgcccctggcccgcgtggtctacgccagcgccacaggtgcctctgagcctcggaacatgatctacatgagccgcttgggtatctggggcgagggcacacccttccggaactttgaggagttcctgcacgccatcgagaagaggggcgttggcgccatggagatcgtggccatggacatgaaggtcagcggcatgtacatcgcacgccagctcagcttctccggcgtcaccttccgcatcgaggagatcccgctggccccagccttcgagtgcgtctacaaccgcgcggccctgctggcggccgactggatcggcctggagtcgcgcaagtccctgtggggccagttctggtcggcacaccagcgcttcttcaagtatctgtgcatcgcagccaaggtgcgccggctggtggagctggcccgagaggagctggcgcgagacaagtgcgtggtcatcgggctgcagtccacgggcgaggcgcgcacgcgggaggtgctgggggagaacgatgggcacctcaactgcttcgtctcggccgctgaaggcgtgttcctgtcgctaattcagaagcactttccgtccaccaagagaaagcgggacagaggagcgggcagcaagcggaaacggcgacctcggggacgcggggccaaagccccccggctggcgtgcgagacagcgggcgtcatccgcatcagtgacgacagcagcacggagtcggaccctggcctggacagcgacttcaactcctcccccgagtccctggtggatgacgacgttgtcatcgttgatgcagtcgggctccccagtgacgaccggggacccctgtgcctcctgcagagagacccgcatggccccggggtcctggagcgggtggagcggctgaagcaggatctgctggacaaagtgcggcggctgggccgggaactgccagtcaacaccctggacgagctcatcgaccagctgggcggcccccagcgggtggcggagatgaccggcaggaaaggccgcgtggtgtccaggcccgacgggacggtggccttcgagtcgcgggcagagcagggtctgtccatcgaccacgtgaacctcagggagaagcagcgcttcatgagcggcgagaagctcgtggccatcatctcggaggcctccagctcgggtgtctccctccaagccgaccgccgtgtccagaaccagcggcgccgcgtgcacatgaccttggagctgccgtggagcgccgaccgcgccatccagcagttcggccgcacccaccggtccaaccaggtctccgcgccagagtatgtcttcctcatctcggagctggccggggagcgccggttcgcctccatcgtggccaagcgcctggagagtctgggggccctgacccacggagaccgccgcgccacggagtcccgtgacctcagcaagtacaactttgagaacaagtatggcacccgggccctgcactgtgtcctcaccaccatcctgagccagactgagaacaaagtgcctgtgccccagggataccctggaggggtccccaccttcttccgggacatgaagcagggcctgctgtctgtgggcattggtggccgggagtcccggaatggctgcctggacgtggagaaggactgttccatcaccaagttcctgaaccgcatcctggggctggaggtgcacaagcagaacgccctgttccagtacttctcagacaccttcgaccacctcatcgagatggacaagcgggagggcaaatacgacatgggcatcctggaccttgctcccggtatcgaggagatctacgaggagagccagcaggtgttcctggctcccgggcacccgcaggacgggcaggtggtcttctacaagatcagcgtggaccgcggcctgaagtgggaggacgcctttgccaagtcgctggcgctgacgggcccctatgacggcttctacctctcctacaaggtccgcggtaacaagcccagctgcctgctggcggagcagaaccgcggccagttcttcacggtgtacaagcccaacatcggccggcagagccagctggaggccctggacagcctccgccgcaagttccaccgggtcaccgcggaggaggccaaggagccctgggagagtggctacgctttgtcgctgacgcactgcagccacagcgcctggaaccggcactgccggctggcgcaggagggtaaggactgcctgcaggggctgcggctgcggcaccactacatgctgtgcggcgcgctgctgcgcgtgtggggccgcatcgccgccgtcatggccgacgtcagcagcagcagctacctgcagatcgtgcggctgaagaccaaggacaggaagaagcaagtgggcatcaagatccccgagggctgcgtgcgccgggtgctgcaggagctgcggctgatggatgcggacgtgaagcgcaggcaggcgcccgccctgggctgccccgccccgcccgccccgcgcccgctggcgctgccttgcggccccggagaggtgctggacctcacctacagccccccggccgaggccttcccgccgcccccgcacttctctttcccggcgccgctgtccctggacgccggccccggcgtcgtgccgctgggcacccccgacgcccaggccgaccctgcggccctcgcgcaccagggctgcgacatcaacttcaaggaggtgctggaggacatgctgcgctcgctgcacgcggggccgccctccgagggcgcgctgggggagggcgcgggggcggggggcgcggcgggcggtggtcccgagcggcagagcgtgatccagttcagcccacccttccccggcgcccaggctcctctctgacacgcctttaggcgaaacatgccccaagacacagggaccgtttctcccctaggagcagcggtggggagcagggccaaggtcccctgaccactgctcagaggagccctaggccctggccgcagtgccttcagcgcccgacccgggcccccacctggtcagccctggcggggcccactcaggacagctgggggccggggcgtggcagggccctctctgtgcctctcctcccaagtaggaaggggctccgggtggctgctctgggactgggcacccacaagggctcagtgggcccaaacccttgaaatccgtgaaaccgggtggtcccaagagctagaaactcaggaaaccccaggtgctcagggccccgcgtctcgggggctccgtggggcagacccctgctaatatatgcaattctccctcccccagcccttccctgacccctaagttattgcccgctcacctctcccaggccccaggccgcggagctggcagggtggcgcctgcggtttctatgtatttatagcaagttctgatgtacatatgtaaaggacttttttaaatatatgtgccttttgccta

SEQ ID NO: 18402 - DNA, 1209 bp, Homo sapiens
  source 1..1209: mol_type = unassigned DNA
cgggccctgcactgtgtcctcaccaccatcctgagccagactgagaacaaagtgcctgtgccccagggataccctggaggggtccccaccttcttccgggacatgaagcagggcctgctgtctgtgggcattggtggccgggagtcccggaatggctgcctggacgtggagaaggactgttccatcaccaagttcctgaaccgcatcctggggctggaggtgcacaagcagaacgccctgttccagtacttctcagacaccttcgaccacctcatcgagatggacaagcgggagggcaaatacgacatgggcatcctggaccttgctcccggtatcgaggagatctacgaggagagccagcaggtgttcctggctcccgggcacccgcaggacgggcaggtggtcttctacaagatcagcgtggaccgcggcctgaagtgggaggacgcctttgccaagtcgctggcgctgacgggcccctatgacggcttctacctctcctacaaggtggggtcgggcggggttacccccccagaggagggcccgcggggggcggaccggggcgcggcctcaacgcccccctccgcaggtccgcggtaacaagcccagctgcctgctggcggagcagaaccgcggccagttcttcacggtgtacaagcccaacatcggccggcagagccagctggaggccctggacagcctccgccgcaagttccaccgggtaggcggccgccgggcgcagctttcgctcgggttgccggccctgaccccgcccaggctcatgcggccctgtgtccctaggtcaccgcggaggaggccaaggagccctgggagagtggctacgctttgtcgctgacgcactgcagccacagcgcctggaaccggcactgccggctggcgcaggagggtaaggactgcctgcaggggctgcggctgcggcaccactacatgctgtgcggcgcgctgctgcgcgtgtggggccgcatcgccgccgtcatggccgacgtcagcagcagcagctacctgcagatcgtgcggctgaagaccaaggacaggaagaagcaagtgggcatcaagatccccgagggctgcgtgcgccgggtgctgcaggagctgcggctgatggatgcggacgtgaagcgcaggcaggcgcccgccctgggctgccccgccccgcccgccccgcgcccgctggcgctgccttgcggc

SEQ ID NO: 18403 - DNA, 465 bp, Homo sapiens
  source 1..465: mol_type = unassigned DNA
tggtggccgggagtcccggaatggctgcctggacgtggagaaggactgttccatcaccaagttcctgaaccgcatcctggggctggaggtgcacaagcagaacgccctgttccagtacttctcagacaccttcgaccacctcatcgagatggacaagcgggagggcaaatacgacatgggcatcctggaccttgctcccggtatcgaggagatctacgaggagagccagcaggtgttcctggctcccgggcacccgcaggacgggcaggtggtcttctacaaggtcagcaggaagccccacagcccctcacactctgcccaccccgcccccaccacactcacacccccccaccccgtgccgtggcagatcagcgtggaccgcggcctgaagtgggaggacgcctttgccaagtcgctggcgctgacgggcccctatgacggcttctacctctcctacaaggtggg

SEQ ID NO: 18404 - DNA, 2403 bp, Homo sapiens
  source 1..2403: mol_type = unassigned DNA
aatgctggggctgctgccgcggtcatgagggagccgctcccgggcagcgcttcctgggggacccctggccccccgagcgccgggaccatgtcccagctgcagctgtggctgcagtttgaggctctgaacaaggactcctcctattttgaggacttctccaacatctccatcttctcctcgtccgtggactccctgtcggacatcgtggacacgcccgacttcctgccggctgacagcctcaaccaggtgtccaccatctgggacgataaccctgccccctccacccacgataagctgttccagctcagcaggccgtttgcaggcttcgaggactttctgccctcccacagcaccccgcttctcgtcagctaccaggagcagagtgtgcagagccagccagaggaggaggacgaggctgaggaggaggaggcggaggagctggggcacacagagacctacgccgactacgtgccgtccaagtccaagatcgggaagcagcacccagaccgcgtggtggagaccagcacactgtccagcgtcccacccccagacatcacctacaccctggccctgccctcggacagcggggccctgtctgccctgcagctagaggccatcacctacgcctgccagcaacacgaggtcctgctccccagcgggcagcgcgcgggctttctcatcggcgatggggccggcgtgggcaaaggccggacggtggccggagtcatcctggagaaccacctgcgcggccggaagaaagcattgtggttcagcgtctccaacgacctcaagtacgatgcggagcgcgacctgcgggacatcgaagccacgggcatcgcggtgcacgcgctcagcaagatcaagtacggtgacaccactacctcagagggcgtcctcttcgccacctactccgccctgattggggagagccaggccggcggccagcaccgcactcgcctccggcagatcctggactggtgtggggaggccttcgagggcgtcatcgtgttcgacgagtgtcacaaagccaagaatgccggctccaccaagatgggcaaggctgtgctagacctgcagaacaagctgcccctggcccgcgtggtctacgccagcgccacaggtgcctctgagcctcggaacatgatctacatgagccgcttgggtatctggggcgagggcacacccttccggaactttgaggagttcctgcacgccatcgagaagaggggcgttggcgccatggagatcgtggccatggacatgaaggtcagcggcatgtacatcgcacgccagctcagcttctccggcgtcaccttccgcatcgaggagatcccgctggccccagccttcgagtgcgtctacaaccgcgcggccctgctgtgggccgaggccctgaacgtgttccagcaggcggccgactggatcggcctggagtcgcgcaagtccctgtggggccagttctggtcggcacaccagcgcttcttcaagtatctgtgcatcgcagccaaggtgcgccggctggtggagctggcccgagaggagctggcgcgagacaagtgcgtggtcatcgggctgcagtccacgggcgaggcgcgcacgcgggaggtgctgggggagaacgatgggcacctcaactgcttcgtctcggccgctgaaggcgtgttcctgtcgctaattcagaagcactttccgtccaccaagagaaagcgggacagaggagcgggcagcaagcggaaacgtaagccctgccccccatggccccacccacccctgcccctctgctttctccccccgggggctggctggtcgctccctgcttcccccactcccccgtccactcagccaaatgcaggtcctgtccgtgccaggcaggctcaaggctccgctgccagtggcaggtcttgcgtggaccctgccatggaacgcttagggaagaggaagcaacagacagcctgaaggacacagacgtgggtgccgagcgagacccggggggcgggacacggacgcgggtgctgagcgagacccctcccaccttccgttttcagggtctccacggtcccttggggagcccattgataacccccaggcttctgtcacagggaagcccagagctgcctgtcgaagtctggtgtgtggcctccccaggcaccccgcgtgtccaccatactggccaggcctgaaaggacgttggatatgggtttattaatattgtcccgttggctgggcgtggtggctcacgcctgtaatcccagcactttgggaggccgaggcgggtggatcacctgaggtcaggagtttaagaccagcctggccaacatggtgagaccctgtctctactaaaaatacaaaaattagctgggcgtggtggtggacgcctataatcccagctacttgggaggctga

SEQ ID NO: 18405 - DNA, 587 bp, Homo sapiens
  source 1..587: mol_type = unassigned DNA
ggcgtttgccccccaccaggaaggtggggtcttgggtggtcaggacctgggctcctggggtcgcccccgtccttcagaatactccttaacccacgtgtgcctcagatcgtgttcgacgagtgtcacaaagccaagaatgccggctccaccaagatgggcaaggctgtgctagacctgcagaacaagctgcccctggcccgcgtggtctacgccagcgccacaggtgcctctgagcctcggaacatgatctacatgagccgcttgggtatctggggcgagggcacacccttccggaactttgaggagttcctgcacgccatcgagaagaggggcgttggcgccatggagatcgtggccatggacatgaaggtcagcggcatgtacatcgcacgccagctcagcttctccggcgtcaccttccgcatcgaggagatcccgctggccccagccttcgagtgcgtctacaaccgcgcggccctgctgtgggccgaggccctgaacgtgttccagcaggcggccgactggatcggcctggagtcgcgcaagtccctgtggggccagttctggtcggcacaccagcgcttctt

SEQ ID NO: 18406 - DNA, 562 bp, Homo sapiens
  source 1..562: mol_type = unassigned DNA
ggaaagctttccctgccaccacgggccagcctgggtccctgcactcgccagatcatgatgctgccgccaccgccgccaccacggagcgagaagcccagatagacgccccggcggccccgggtcctggagtcccgccgcctgctgcccggccgaggaccccaccccgcctgccgcccgatgcttgcagtggggcccgccatggacagggattacccgcagcatgaacccccgccggcgggcagcctcctgtacagcccgccgcccctgcagagcgccatgctgcactgcccctactggaacaccttctcgctgccgccataccctgccttctccagcgacagccgcccgttcatgagctccgcctccttcctcggcagccagccctgcccagacaccagctatgcccccgtggccaccgcctccagcttgccaccaaagacctgcgactttgctcaggactcctcctattttgaggacttctccaacatctccatcttctcctcgtccgtggactccctgtcggacatcgtggacacgcccgacttcctgccggctgacagcc

SEQ ID NO: 18407 - DNA, 561 bp, Homo sapiens
  source 1..561: mol_type = unassigned DNA
actcatcggtgcccccgagccccttggtgaccccgcacccgcttttcctcgatcatgatgctgccgccaccgccgccaccacggagcgagaagcccagatagacgccccggcggccccgggtcctggagtcccgccgcctgctgcccggccgaggaccccaccccgcctgccgcccgatgcttgcagtggggcccgccatggacagggattacccgcagcatgaacccccgccggcgggcagcctcctgtacagcccgccgcccctgcagagcgccatgctgcactgcccctactggaacaccttctcgctgccgccataccctgccttctccagcgacagccgcccgttcatgagctccgcctccttcctcggcagccagccctgcccagacaccagctatgcccccgtggccaccgcctccagcttgccaccaaagacctgcgactttgctcaggactcctcctattttgaggacttctccaacatctccatcttctcctcgtccgtggactccctgtcggacatcgtggacacgcccgacttcctgccggctgacagc

SEQ ID NO: 18408 - DNA, 914 bp, Homo sapiens
  source 1..914: mol_type = unassigned DNA
gcagatcggactggcgggcctggtgccgctgtctcagtgacctgctttgtgactcgtgcccgtgcttcccggagccttgtgattgacctccatccccagcaagaacaagcgtccaagtgaaaccgaaagaggcggccttggccttggttccaggccccgctgcgttttgaaagtgatgtgcgccaggttccggaaggcggctcactcgcgtttcctgggagtctctgccgctgtgggctcctggggccaaggccctgggtgctggggcgtggggagggggagccggtgagccttcgggcctggcgggcagtaaacgtttctggaactgactcacttgctggggaggggcagccagggagggtcacggagaaagtccctgcccgccatggccccggaccgccgtcggctgcccgtccagcctggagtgaggaggcgtcttcctttgcatgtcagatcatgatgctgccgccaccgccgccaccacggagcgagaagcccagatagacgccccggcggccccgggtcctggagtcccgccgcctgctgcccggccgaggaccccaccccgcctgccgcccgatgcttgcagtggggcccgccatggacagggattacccgcagcatgaacccccgccggcgggcagcctcctgtacagcccgccgcccctgcagagcgccatgctgcactgcccctactggaacaccttctcgctgccgccataccctgccttctccagcgacagccgcccgttcatgagctccgcctccttcctcggcagccagccctgcccagacaccagctatgcccccgtggccaccgcctccagcttgccaccaaagacctgcgactttgctcaggactcctcctattttgaggacttctccaacatctccatcttctcctcgtccgtgga

SEQ ID NO: 18409 - DNA, 4811 bp, Homo sapiens
  source 1..4811: mol_type = unassigned DNA
atcatgatgctgccgccaccgccgccaccacggagcgagaagcccagatagacgccccggcggccccgggtcctggagtcccgccgcctgctgcccggccgaggaccccaccccgcctgccgcccgatgcttgcagtggggcccgccatggacagggattacccgcagcatgaacccccgccggcgggcagcctcctgtacagcccgccgcccctgcagagcgccatgctgcactgcccctactggaacaccttctcgctgccgccataccctgccttctccagcgacagccgcccgttcatgagctccgcctccttcctcggcagccagccctgcccagacaccagctatgcccccgtggccaccgcctccagcttgccaccaaagacctgcgactttgctcaggactcctcctattttgaggacttctccaacatctccatcttctcctcgtccgtggactccctgtcggacatcgtggacacgcccgacttcctgccggctgacagcctcaaccaggtgtccaccatctgggacgataaccctgccccctccacccacgataagctgttccagctcagcaggccgtttgcaggcttcgaggactttctgccctcccacagcaccccgcttctcgtcagctaccaggagcagagtgtgcagagccagccagaggaggaggacgaggctgaggaggaggaggcggaggagctggggcacacagagacctacgccgactacgtgccgtccaagtccaagatcgggaagcagcacccagaccgcgtggtggagaccagcacactgtccagcgtcccacccccagacatcacctacaccctggccctgccctcggacagcggggccctgtctgccctgcagctagaggccatcacctacgcctgccagcaacacgaggtcctgctccccagcgggcagcgcgcgggctttctcatcggcgatggggccggcgtgggcaaaggccggacggtggccggagtcatcctggagaaccacctgcgcggccggaagaaagcattgtggttcagcgtctccaacgacctcaagtacgatgcggagcgcgacctgcgggacatcgaagccacgggcatcgcggtgcacgcgctcagcaagatcaagtacggtgacaccactacctcagagggcgtcctcttcgccacctactccgccctgattggggagagccaggccggcggccagcaccgcactcgcctccggcagatcctggactggtgtggggaggccttcgagggcgtcatcgtgttcgacgagtgtcacaaagccaagaatgccggctccaccaagatgggcaaggctgtgctagacctgcagaacaagctgcccctggcccgcgtggtctacgccagcgccacaggtgcctctgagcctcggaacatgatctacatgagccgcttgggtatctggggcgagggcacacccttccggaactttgaggagttcctgcacgccatcgagaagaggggcgttggcgccatggagatcgtggccatggacatgaaggtcagcggcatgtacatcgcacgccagctcagcttctccggcgtcaccttccgcatcgaggagatcccgctggccccagccttcgagtgcgtctacaaccgcgcggccctgctgtgggccgaggccctgaacgtgttccagcaggcggccgactggatcggcctggagtcgcgcaagtccctgtggggccagttctggtcggcacaccagcgcttcttcaagtatctgtgcatcgcagccaaggtgcgccggctggtggagctggcccgagaggagctggcgcgagacaagtgcgtggtcatcgggctgcagtccacgggcgaggcgcgcacgcgggaggtgctgggggagaacgatgggcacctcaactgcttcgtctcggccgctgaaggcgtgttcctgtcgctaattcagaagcactttccgtccaccaagagaaagcgggacagaggagcgggcagcaagcggaaacggcgacctcggggacgcggggccaaagccccccggctggcgtgcgagacagcgggcgtcatccgcatcagtgacgacagcagcacggagtcggaccctggcctggacagcgacttcaactcctcccccgagtccctggtggatgacgacgttgtcatcgttgatgcagtcgggctccccagtgacgaccggggacccctgtgcctcctgcagagagacccgcatggccccggggtcctggagcgggtggagcggctgaagcaggatctgctggacaaagtgcggcggctgggccgggaactgccagtcaacaccctggacgagctcatcgaccagctgggcggcccccagcgggtggcggagatgaccggcaggaaaggccgcgtggtgtccaggcccgacgggacggtggccttcgagtcgcgggcagagcagggtctgtccatcgaccacgtgaacctcagggagaagcagcgcttcatgagcggcgagaagctcgtggccatcatctcggaggcctccagctcgggtgtctccctccaagccgaccgccgtgtccagaaccagcggcgccgcgtgcacatgaccttggagctgccgtggagcgccgaccgcgccatccagcagttcggccgcacccaccggtccaaccaggtctccgcgccagagtatgtcttcctcatctcggagctggccggggagcgccggttcgcctccatcgtggccaagcgcctggagagtctgggggccctgacccacggagaccgccgcgccacggagtcccgtgacctcagcaagtacaactttgagaacaagtatggcacccgggccctgcactgtgtcctcaccaccatcctgagccagactgagaacaaagtgcctgtgccccagggataccctggaggggtccccaccttcttccgggacatgaagcagggcctgctgtctgtgggcattggtggccgggagtcccggaatggctgcctggacgtggagaaggactgttccatcaccaagttcctgaaccgcatcctggggctggaggtgcacaagcagaacgccctgttccagtacttctcagacaccttcgaccacctcatcgagatggacaagcgggagggcaaatacgacatgggcatcctggaccttgctcccggtatcgaggagatctacgaggagagccagcaggtgttcctggctcccgggcacccgcaggacgggcaggtggtcttctacaagatcagcgtggaccgcggcctgaagtgggaggacgcctttgccaagtcgctggcgctgacgggcccctatgacggcttctacctctcctacaaggtccgcggtaacaagcccagctgcctgctggcggagcagaaccgcggccagttcttcacggtgtacaagcccaacatcggccggcagagccagctggaggccctggacagcctccgccgcaagttccaccgggtcaccgcggaggaggccaaggagccctgggagagtggctacgctttgtcgctgacgcactgcagccacagcgcctggaaccggcactgccggctggcgcaggagggtaaggactgcctgcaggggctgcggctgcggcaccactacatgctgtgcggcgcgctgctgcgcgtgtggggccgcatcgccgccgtcatggccgacgtcagcagcagcagctacctgcagatcgtgcggctgaagaccaaggacaggaagaagcaagtgggcatcaagatccccgagggctgcgtgcgccgggtgctgcaggagctgcggctgatggatgcggacgtgaagcgcaggcaggcgcccgccctgggctgccccgccccgcccgccccgcgcccgctggcgctgccttgcggccccggagaggtgctggacctcacctacagccccccggccgaggccttcccgccgcccccgcacttctctttcccggcgccgctgtccctggacgccggccccggcgtcgtgccgctgggcacccccgacgcccaggccgaccctgcggccctcgcgcaccagggctgcgacatcaacttcaaggaggtgctggaggacatgctgcgctcgctgcacgcggggccgccctccgagggcgcgctgggggagggcgcgggggcggggggcgcggcgggcggtggtcccgagcggcagagcgtgatccagttcagcccacccttccccggcgcccaggctcctctctgacacgcctttaggcgaaacatgccccaagacacagggaccgtttctcccctaggagcagcggtggggagcagggccaaggtcccctgaccactgctcagaggagccctaggccctggccgcagtgccttcagcgcccgacccgggcccccacctggtcagccctggcggggcccactcaggacagctgggggccggggcgtggcagggccctctctgtgcctctcctcccaagtaggaaggggctccgggtggctgctctgggactgggcacccacaagggctcagtgggcccaaacccttgaaatccgtgaaaccgggtggtcccaagagctagaaactcaggaaaccccaggtgctcagggccccgcgtctcgggggctccgtggggcagacccctgctaatatatgcaattctccctcccccagcccttccctgacccctaagttattgcccgctcacctctcccaggccccaggccgcggagctggcagggtggcgcctgcggtttctatgtatttatagcaagttctgatgtacatatgtaaaggacttttttaaatatatgtgccttttgcctacttcc

SEQ ID NO: 18410 - DNA, 4537 bp, Homo sapiens; identical to SEQ ID NO: 18400
  source 1..4537: mol_type = unassigned DNA

SEQ ID NO: 18411 - DNA, 4776 bp, Homo sapiens
  source 1..4776: mol_type = unassigned DNA
atcatgatgctgccgccaccgccgccaccacggagcgagaagcccagatagacgccccggcggccccgggtcctggagtcccgccgcctgctgcccggccgaggaccccaccccgcctgccgcccgatgcttgcagtggggcccgccatggacagggattacccgcagcatgaacccccgccggcgggcagcctcctgtacagcccgccgcccctgcagagcgccatgctgcactgcccctactggaacaccttctcgctgccgccataccctgccttctccagcgacagccgcccgttcatgagctccgcctccttcctcggcagccagccctgcccagacaccagctatgcccccgtggccaccgcctccagcttgccaccaaagacctgcgactttgctcaggactcctcctattttgaggacttctccaacatctccatcttctcctcgtccgtggactccctgtcggacatcgtggacacgcccgacttcctgccggctgacagcctcaaccaggtgtccaccatctgggacgataaccctgccccctccacccacgataagctgttccagctcagcaggccgtttgcaggcttcgaggactttctgccctcccacagcaccccgcttctcgtcagctaccaggagcagagtgtgcagagccagccagaggaggaggacgaggctgaggaggaggaggcggaggagctggggcacacagagacctacgccgactacgtgccgtccaagtccaagatcgggaagcagcacccagaccgcgtggtggagaccagcacactgtccagcgtcccacccccagacatcacctacaccctggccctgccctcggacagcggggccctgtctgccctgcagctagaggccatcacctacgcctgccagcaacacgaggtcctgctccccagcgggcagcgcgcgggctttctcatcggcgatggggccggcgtgggcaaaggccggacggtggccggagtcatcctggagaaccacctgcgcggccggaagaaagcattgtggttcagcgtctccaacgacctcaagtacgatgcggagcgcgacctgcgggacatcgaagccacgggcatcgcggtgcacgcgctcagcaagatcaagtacggtgacaccactacctcagagggcgtcctcttcgccacctactccgccctgattggggagagccaggccggcggccagcaccgcactcgcctccggcagatcctggactggtgtggggaggccttcgagggcgtcatcgtgttcgacgagtgtcacaaagccaagaatgccggctccaccaagatgggcaaggctgtgctagacctgcagaacaagctgcccctggcccgcgtggtctacgccagcgccacaggtgcctctgagcctcggaacatgatctacatgagccgcttgggtatctggggcgagggcacacccttccggaactttgaggagttcctgcacgccatcgagaagaggggcgttggcgccatggagatcgtggccatggacatgaaggtcagcggcatgtacatcgcacgccagctcagcttctccggcgtcaccttccgcatcgaggagatcccgctggccccagccttcgagtgcgtctacaaccgcgcggccctgctggcggccgactggatcggcctggagtcgcgcaagtccctgtggggccagttctggtcggcacaccagcgcttcttcaagtatctgtgcatcgcagccaaggtgcgccggctggtggagctggcccgagaggagctggcgcgagacaagtgcgtggtcatcgggctgcagtccacgggcgaggcgcgcacgcgggaggtgctgggggagaacgatgggcacctcaactgcttcgtctcggccgctgaaggcgtgttcctgtcgctaattcagaagcactttccgtccaccaagagaaagcgggacagaggagcgggcagcaagcggaaacggcgacctcggggacgcggggccaaagccccccggctggcgtgcgagacagcgggcgtcatccgcatcagtgacgacagcagcacggagtcggaccctggcctggacagcgacttcaactcctcccccgagtccctggtggatgacgacgttgtcatcgttgatgcagtcgggctccccagtgacgaccggggacccctgtgcctcctgcagagagacccgcatggccccggggtcctggagcgggtggagcggctgaagcaggatctgctggacaaagtgcggcggctgggccgggaactgccagtcaacaccctggacgagctcatcgaccagctgggcggcccccagcgggtggcggagatgaccggcaggaaaggccgcgtggtgtccaggcccgacgggacggtggccttcgagtcgcgggcagagcagggtctgtccatcgaccacgtgaacctcagggagaagcagcgcttcatgagcggcgagaagctcgtggccatcatctcggaggcctccagctcgggtgtctccctccaagccgaccgccgtgtccagaaccagcggcgccgcgtgcacatgaccttggagctgccgtggagcgccgaccgcgccatccagcagttcggccgcacccaccggtccaaccaggtctccgcgccagagtatgtcttcctcatctcggagctggccggggagcgccggttcgcctccatcgtggccaagcgcctggagagtctgggggccctgacccacggagaccgccgcgccacggagtcccgtgacctcagcaagtacaactttgagaacaagtatggcacccgggccctgcactgtgtcctcaccaccatcctgagccagactgagaacaaagtgcctgtgccccagggataccctggaggggtccccaccttcttccgggacatgaagcagggcctgctgtctgtgggcattggtggccgggagtcccggaatggctgcctggacgtggagaaggactgttccatcaccaagttcctgaaccgcatcctggggctggaggtgcacaagcagaacgccctgttccagtacttctcagacaccttcgaccacctcatcgagatggacaagcgggagggcaaatacgacatgggcatcctggaccttgctcccggtatcgaggagatctacgaggagagccagcaggtgttcctggctcccgggcacccgcaggacgggcaggtggtcttctacaagatcagcgtggaccgcggcctgaagtgggaggacgcctttgccaagtcgctggcgctgacgggcccctatgacggcttctacctctcctacaaggtccgcggtaacaagcccagctgcctgctggcggagcagaaccgcggccagttcttcacggtgtacaagcccaacatcggccggcagagccagctggaggccctggacagcctccgccgcaagttccaccgggtcaccgcggaggaggccaaggagccctgggagagtggctacgctttgtcgctgacgcactgcagccacagcgcctggaaccggcactgccggctggcgcaggagggtaaggactgcctgcaggggctgcggctgcggcaccactacatgctgtgcggcgcgctgctgcgcgtgtggggccgcatcgccgccgtcatggccgacgtcagcagcagcagctacctgcagatcgtgcggctgaagaccaaggacaggaagaagcaagtgggcatcaagatccccgagggctgcgtgcgccgggtgctgcaggagctgcggctgatggatgcggacgtgaagcgcaggcaggcgcccgccctgggctgccccgccccgcccgccccgcgcccgctggcgctgccttgcggccccggagaggtgctggacctcacctacagccccccggccgaggccttcccgccgcccccgcacttctctttcccggcgccgctgtccctggacgccggccccggcgtcgtgccgctgggcacccccgacgcccaggccgaccctgcggccctcgcgcaccagggctgcgacatcaacttcaaggaggtgctggaggacatgctgcgctcgctgcacgcggggccgccctccgagggcgcgctgggggagggcgcgggggcggggggcgcggcgggcggtggtcccgagcggcagagcgtgatccagttcagcccacccttccccggcgcccaggctcctctctgacacgcctttaggcgaaacatgccccaagacacagggaccgtttctcccctaggagcagcggtggggagcagggccaaggtcccctgaccactgctcagaggagccctaggccctggccgcagtgccttcagcgcccgacccgggcccccacctggtcagccctggcggggcccactcaggacagctgggggccggggcgtggcagggccctctctgtgcctctcctcccaagtaggaaggggctccgggtggctgctctgggactgggcacccacaagggctcagtgggcccaaacccttgaaatccgtgaaaccgggtggtcccaagagctagaaactcaggaaaccccaggtgctcagggccccgcgtctcgggggctccgtggggcagacccctgctaatatatgcaattctccctcccccagcccttccctgacccctaagttattgcccgctcacctctcccaggccccaggccgcggagctggcagggtggcgcctgcggtttctatgtatttatagcaagttctgatgtacatatgtaaaggacttttttaaatatatgtgccttttgccta

SEQ ID NO: 18412 - DNA, 1209 bp, Homo sapiens; identical to SEQ ID NO: 18402
  source 1..1209: mol_type = unassigned DNA

SEQ ID NO: 18413 - DNA, 465 bp, Homo sapiens; identical to SEQ ID NO: 18403
  source 1..465: mol_type = unassigned DNA

SEQ ID NO: 18414 - DNA, 2403 bp, Homo sapiens; identical to SEQ ID NO: 18404
  source 1..2403: mol_type = unassigned DNA

SEQ ID NO: 18415 - DNA, 587 bp, Homo sapiens; identical to SEQ ID NO: 18405
  source 1..587: mol_type = unassigned DNA

SEQ ID NO: 18416 - DNA, 562 bp, Homo sapiens; identical to SEQ ID NO: 18406
  source 1..562: mol_type = unassigned DNA

SEQ ID NO: 18417 - DNA, 510 bp, Homo sapiens
  source 1..510: mol_type = unassigned DNA
atcatgatgctgccgccaccgccgccaccacggagcgagaagcccagatagacgccccggcggccccgggtcctggagtcccgccgcctgctgcccggccgaggaccccaccccgcctgccgcccgatgcttgcagtggggcccgccatggacagggattacccgcagcatgaacccccgccggcgggcagcctcctgtacagcccgccgcccctgcagagcgccatgctgcactgcccctactggaacaccttctcgctgccgccataccctgccttctccagcgacagccgcccgttcatgagctccgcctccttcctcggcagccagccctgcccagacaccagctatgcccccgtggccaccgcctccagcttgccaccaaagacctgcgactttgctcaggactcctcctattttgaggacttctccaacatctccatcttctcctcgtccgtggactccctgtcggacatcgtggacacgcccgacttcctgccggctgacagc

SEQ ID NO: 18418 - DNA, 461 bp, Homo sapiens
  source 1..461: mol_type = unassigned DNA
atcatgatgctgccgccaccgccgccaccacggagcgagaagcccagatagacgccccggcggccccgggtcctggagtcccgccgcctgctgcccggccgaggaccccaccccgcctgccgcccgatgcttgcagtggggcccgccatggacagggattacccgcagcatgaacccccgccggcgggcagcctcctgtacagcccgccgcccctgcagagcgccatgctgcactgcccctactggaacaccttctcgctgccgccataccctgccttctccagcgacagccgcccgttcatgagctccgcctccttcctcggcagccagccctgcccagacaccagctatgcccccgtggccaccgcctccagcttgccaccaaagacctgcgactttgctcaggactcctcctattttgaggacttctccaacatctccatcttctcctcgtccgtgga

SEQ ID NO: 18419 - DNA, 4686 bp, Homo sapiens
  source 1..4686: mol_type = unassigned DNA
atgcttgcagtggggcccgccatggacagggattacccgcagcatgaacccccgccggcgggcagcctcctgtacagcccgccgcccctgcagagcgccatgctgcactgcccctactggaacaccttctcgctgccgccataccctgccttctccagcgacagccgcccgttcatgagctccgcctccttcctcggcagccagccctgcccagacaccagctatgcccccgtggccaccgcctccagcttgccaccaaagacctgcgactttgctcaggactcctcctattttgaggacttctccaacatctccatcttctcctcgtccgtggactccctgtcggacatcgtggacacgcccgacttcctgccggctgacagcctcaaccaggtgtccaccatctgggacgataaccctgccccctccacccacgataagctgttccagctcagcaggccgtttgcaggcttcgaggactttctgccctcccacagcaccccgcttctcgtcagctaccaggagcagagtgtgcagagccagccagaggaggaggacgaggctgaggaggaggaggcggaggagctggggcacacagagacctacgccgactacgtgccgtccaagtccaagatcgggaagcagcacccagaccgcgtggtggagaccagcacactgtccagcgtcccacccccagacatcacctacaccctggccctgccctcggacagcggggccctgtctgccctgcagctagaggccatcacctacgcctgccagcaacacgaggtcctgctccccagcgggcagcgcgcgggctttctcatcggcgatggggccggcgtgggcaaaggccggacggtggccggagtcatcctggagaaccacctgcgcggccggaagaaagcattgtggttcagcgtctccaacgacctcaagtacgatgcggagcgcgacctgcgggacatcgaagccacgggcatcgcggtgcacgcgctcagcaagatcaagtacggtgacaccactacctcagagggcgtcctcttcgccacctactccgccctgattggggagagccaggccggcggccagcaccgcactcgcctccggcagatcctggactggtgtggggaggccttcgagggcgtcatcgtgttcgacgagtgtcacaaagccaagaatgccggctccaccaagatgggcaaggctgtgctagacctgcagaacaagctgcccctggcccgcgtggtctacgccagcgccacaggtgcctctgagcctcggaacatgatctacatgagccgcttgggtatctggggcgagggcacacccttccggaactttgaggagttcctgcacgccatcgagaagaggggcgttggcgccatggagatcgtggccatggacatgaaggtcagcggcatgtacatcgcacgccagctcagcttctccggcgtcaccttccgcatcgaggagatcccgctggccccagccttcgagtgcgtctacaaccgcgcggccctgctgtgggccgaggccctgaacgtgttccagcaggcggccgactggatcggcctggagtcgcgcaagtccctgtggggccagttctggtcggcacaccagcgcttcttcaagtatctgtgcatcgcagccaaggtgcgccggctggtggagctggcccgagaggagctggcgcgagacaagtgcgtggtcatcgggctgcagtccacgggcgaggcgcgcacgcgggaggtgctgggggagaacgatgggcacctcaactgcttcgtctcggccgctgaaggcgtgttcctgtcgctaattcagaagcactttccgtccaccaagagaaagcgggacagaggagcgggcagcaagcggaaacggcgacctcggggacgcggggccaaagccccccggctggcgtgcgagacagcgggcgtcatccgcatcagtgacgacagcagcacggagtcggaccctggcctggacagcgacttcaactcctcccccgagtccctggtggatgacgacgttgtcatcgttgatgcagtcgggctccccagtgacgaccggggacccctgtgcctcctgcagagagacccgcatggccccggggtcctggagcgggtggagcggctgaagcaggatctgctggacaaagtgcggcggctgggccgggaactgccagtcaacaccctggacgagctcatcgaccagctgggcggcccccagcgggtggcggagatgaccggcaggaaaggccgcgtggtgtccaggcccgacgggacggtggccttcgagtcgcgggcagagcagggtctgtccatcgaccacgtgaacctcagggagaagcagcgcttcatgagcggcgagaagctcgtggccatcatctcggaggcctccagctcgggtgtctccctccaagccgaccgccgtgtccagaaccagcggcgccgcgtgcacatgaccttggagctgccgtggagcgccgaccgcgccatccagcagttcggccgcacccaccggtccaaccaggtctccgcgccagagtatgtcttcctcatctcggagctggccggggagcgccggttcgcctccatcgtggccaagcgcctggagagtctgggggccctgacccacggagaccgccgcgccacggagtcccgtgacctcagcaagtacaactttgagaacaagtatggcacccgggccctgcactgtgtcctcaccaccatcctgagccagactgagaacaaagtgcctgtgccccagggataccctggaggggtccccaccttcttccgggacatgaagcagggcctgctgtctgtgggcattggtggccgggagtcccggaatggctgcctggacgtggagaaggactgttccatcaccaagttcctgaaccgcatcctggggctggaggtgcacaagcagaacgccctgttccagtacttctcagacaccttcgaccacctcatcgagatggacaagcgggagggcaaatacgacatgggcatcctggaccttgctcccggtatcgaggagatctacgaggagagccagcaggtgttcctggctcccgggcacccgcaggacgggcaggtggtcttctacaagatcagcgtggaccgcggcctgaagtgggaggacgcctttgccaagtcgctggcgctgacgggcccctatgacggcttctacctctcctacaaggtccgcggtaacaagcccagctgcctgctggcggagcagaaccgcggccagttcttcacggtgtacaagcccaacatcggccggcagagccagctggaggccctggacagcctccgccgcaagttccaccgggtcaccgcggaggaggccaaggagccctgggagagtggctacgctttgtcgctgacgcactgcagccacagcgcctggaaccggcactgccggctggcgcaggagggtaaggactgcctgcaggggctgcggctgcggcaccactacatgctgtgcggcgcgctgctgcgcgtgtggggccgcatcgccgccgtcatggccgacgtcagcagcagcagctacctgcagatcgtgcggctgaagaccaaggacaggaagaagcaagtgggcatcaagatccccgagggctgcgtgcgccgggtgctgcaggagctgcggctgatggatgcggacgtgaagcgcaggcaggcgcccgccctgggctgccccgccccgcccgccccgcgcccgctggcgctgccttgcggccccggagaggtgctggacctcacctacagccccccggccgaggccttcccgccgcccccgcacttctctttcccggcgccgctgtccctggacgccggccccggcgtcgtgccgctgggcacccccgacgcccaggccgaccctgcggccctcgcgcaccagggctgcgacatcaacttcaaggaggtgctggaggacatgctgcgctcgctgcacgcggggccgccctccgagggcgcgctgggggagggcgcgggggcggggggcgcggcgggcggtggtcccgagcggcagagcgtgatccagttcagcccacccttccccggcgcccaggctcctctctgacacgcctttaggcgaaacatgccccaagacacagggaccgtttctcccctaggagcagcggtggggagcagggccaaggtcccctgaccactgctcagaggagccctaggccctggccgcagtgccttcagcgcccgacccgggcccccacctggtcagccctggcggggcccactcaggacagctgggggccggggcgtggcagggccctctctgtgcctctcctcccaagtaggaaggggctccgggtggctgctctgggactgggcacccacaagggctcagtgggcccaaacccttgaaatccgtgaaaccgggtggtcccaagagctagaaactcaggaaaccccaggtgctcagggccccgcgtctcgggggctccgtggggcagacccctgctaatatatgcaattctccctcccccagcccttccctgacccctaagttattgcccgctcacctctcccaggccccaggccgcggagctggcagggtggcgcctgcggtttctatgtatttatagcaagttctgatgtacatatgtaaaggacttttttaaatatatgtgccttttgcctacttccc

SEQ ID NO: 18420 - DNA, 1142 bp, Homo sapiens
  source 1..1142: mol_type = unassigned DNA
gctagtgcgcggtcagcagagtgcgggaggagctggctgcggctccactccgcgcctccccgcgggcgattacgtcgcggcgtggtcctcgcggggcgcggaagacccagacttcagcctcgccacgcctgcccggagctcgaggctcccggacccccgtccacccctgggacgtgaggagtgaggctttgggccaggctgttccccgaggcgcgtggggaagcgggcgtgacctcttctgaaaaggcgttcaggacaaagaggtgtgggcaggccactgggccagctggtaacatcatggcagagaaagtgaacaacttcccaccattgcccaaattcatcccgctgaagccatgtttctaccaagacttcgaggcagatattcctccccagcatgtcagcatgaccaagcgcctctactacctctggatgtgactgacagctccttcagtttcatggcattcttctttaccttcatggctcagttggtcatcagcatcatccaggccgtgggcatcccaggctggggcgtctgcggctggattgctaccatctccttcttcggaacgaacattggctcggcggtggtgatgctaattcccactgtcatgttcacagtgatggccgtcttttccttcatcgccctcagcatggttcataaattttaccggggaagtggggggagtttcagcaaagctcaggaggagtggaccacaggggcctggaagaatccacatgtgcagcaggcagcccagaacgcagccatgggggcagcccagggtgccatgaatcagcctcagactcagtattccgccacccccaattacacgtactccaatgagatgtgaaccagccacgcctaccaggtggcagagctggggccattgggacagggggctcaagccacatcgtcatttgtggttaccaagcagggttcccccttcccttttctccttccctactttgtacaaaggaccagagttatatatatatatatatgtatatgtctgtaccccagcccccacctttcagattctgctcttggcactcagctgtgggctgcacgtggagctgtcccgtgcggtagtagctgtgtctgtgtcccctcgtgaaatagtgtgcagtggaggtctcttgtggtg

SEQ ID NO: 18421 - DNA, 3411 bp, Homo sapiens
  source 1..3411: mol_type = unassigned DNA
ggcctcgggcgcgcgcgcgcgcgcgcgcgctccccgcccccagccccggagcggctcgcggccggctccgcgccgcatcgctcgggtgcagcgcagctcagcgcagcgctgcggcctttcggcagccgaacggccgcggcagttcaggacaaagaggtgtgggcaggccactgggccagctggtaacatcatggcagagaaagtgaacaacttcccaccattgcccaaattcatcccgctgaagccatgtttctaccaagacttcgaggcagatattcctccccagcatgtcagcatgaccaagcgcctctactacctctggatgttgaacagcgtcacgctggccgtgaacctggtgggctgtctcgcgtggctgatcggaggcgggggagccaccaactttggcctcgcctttctctggctcatcctcttcacaccctgctcctacgtctgctggtttcggcccatttacaaggccttcaagactgacagctccttcagtttcatggcattcttctttaccttcatggctcagttggtcatcagcatcatccaggccgtgggcatcccaggctggggcgtctgcggctggattgctaccatctccttcttcggaacgaacattggctcggcggtggtgatgctaattcccactgtcatgttcacagtgatggccgtcttttccttcatcgccctcagcatggttcataaattttaccggggaagtggggggagtttcagcaaagctcaggaggagtggaccacaggggcctggaagaatccacatgtgcagcaggcagcccagaacgcagccatgggggcagcccagggtgccatgaatcagcctcagactcagtattccgccacccccaattacacgtactccaatgagatgtgaaccagccacgcctaccaggtggcagagctggggccattgggacagggggctcaagccacatcgtcatttgtggttaccaagcagggttcccccttcccttttctccttccctactttgtacaaaggaccagagttatatatatatatatatgtatatgtctgtaccccagcccccacctttcagattctgctcttggcactcagctgtgggctgcacgtggagctgtcccgtgcggtagtagctgtgtctgtgtcccctcgtgaaatagtgtgcagtggaggtctcttgtggtgctagatgtgtgtttagagctaaaccagcccccacccccaccctccacctgcccctcttgcctctggcccctctgaccctggcccagggacccctcacggggccaggggaggcatagcagaaagactggccccttcctagggttatgagctggaactgtttctactttcagtcttcctgggaagtaacagtacttagcactcttggtggtgggtgggagggtgggtacaggccagggatattcccttgctcttttgatccctccaggcctcgcctccttcagcctcctcctccctcatctgttccctgatgtcacattccctgtgcaatcttcccttgcccatggtctgtctatctctttcctatgtggcttttctttgtcttccccaaggctgagtgtcccagttttatctgctcctgagactgagcccagatccccaaatctaatctgatttacagttcaaggaagctgatggggagctgggccttacccctgatgtaggaggggcacacagctgggggtgcagagcccacctgggtacctgacccccaggggatgaaaatgcaaggatgagtctgcttgggcctgagagtttgatctgcaggggcaggctcatcttttctctcccctgccttctcctccttctctccccagagcccccttgagcccctctgcctatgtccctctgcctcctccccatgcccccagttgctgtggcttgattctgctaccctgaccccaccatgtgccaggtggcatctgccttactgccttccctgaggagctgggacatgctgggcagttgtcagatgtaaaggcacagctggagcagagggcatgtcagtaatgattggtccctggggaaggtctggctggctccagcacagtgaggcatttaggtatctctcggtgaccgttggattcctggaagcagtagctgttctgtttggatctggtaggacagggctcagagggctaggcacggagggaaggtcagaggagaaggcaggcagggcccagtgagaggggagcatgccttcccccaccctggcttgctcttggtcacagggcggttctgggcacttgaactcagggcccaagcagaagcacaggcccagtcctggctgcaagcacaatagcctgaatgggatttcaggttaggcagggtgggaggggaggctctctggctttagttttgttttgttttccaaatcaaggtaacttgctcccttctgcctacaggccttggtcttggcttgtcctcacccagtcggaactccctaccactttcaggagagtggttttaggcccgtggggctgttctgttccaagcagtgtgagaacatggctggtagaggctctagctgtgtgcggggcctgaaggggagtgggttctcgcccaaagagcatctgcccatttcccaccttcccttctcccaccagaagcttgcctgagctgtttggacaaaaatccaaaccccacttggctactctggcctggcttcagcttggaacccaatacctaggcttacaggccatcctgagccaggggcctctggaaattctcttcctgatggtcctttaggtttgggcacaaaatataattgcctctcccctctcccattttctctcttgggagcaatggtcacagtccctggtacctgaaaaggtacctaggtctaggcccttcttccctttcccttcctctcccctaccccagaactttggctccctttcccttctctctctggtagctccaggaggcctgtgatccagctccctgcctagcatccatgacctgttggatgttacctccaatcagtttcctgtcctacctgcctctttggcttggacctatatggccatgctctggctctacccttgggaagcctgatcccggtgtgtggcccagcttgttcaggccctgggatgctgcatctccaggcaactatgcactttcccggggagagaaccagtatgagaagtgggggcagggcacacattcatctttgtaggaaggtctggcctggggtcgggtgaaggagggcccaggtcagttctggggtcccagtgacctgctttgccattctcctggtgccgctgctgctccctgtttctggagctggatgttccccagctggcagttgagctgcctgagccaatgtgtctgtctttggtaactgagtgaaccataataaaggggaacatttggccctgtgt

SEQ ID NO: 18422 - DNA, 579 bp, Homo sapiens
  source 1..579: mol_type = unassigned DNA
gcgcgcgcgcgcgcgcgcgctccccgcccccagccccggagcggctcgcggccggctccgcgccgcatcgctcgggtgcagcgcagctcagcgcagcgctgcggcctttcggcagccgaacggccgcggcagaaccccgaccaagaacagatgccgggcccccagtcgctgccccatcaaggttcaggacaaagaggtgtgggcaggccactgggccagctggtaacatcatggcagagaaagtgaacaacttcccaccattgcccaaattcatcccgctgaagccatgtttctaccaagacttcgaggcagatattcctccccagcatgtcagcatgaccaagcgcctctactacctctggatgttgaacagcgtcacgctggccgtgaacctggtgggctgtctcgcgtggctgatcggaggcgggggagccaccaactttggcctcgcctttctctggctcatcctcttcacaccctgctcctacgtctgctggtttcggcccatttacaaggccttcaagactgacagctccttcagtttcatggcattcttctttaccttcatggctcagttgg

SEQ ID NO: 18423 - DNA, 600 bp, Homo sapiens
  source 1..600: mol_type = unassigned DNA
gcgcgctccccgcccccagccccggagcggctcgcggccggctccgcgccgcatcgctcgggtgcagcgcagctcagcgcagcgctgcggcctttcggcagccgaacggccgcggcagacggagtcttgctctgtcgccgggctggagggcagtggcacgatctcggctcactgcaacctctgcctcccaggttcaatcaattctcctgcttcaacctcccgagtagctggaactacaggcacatgccaccacgcccagttcaggacaaagaggtgtgggcaggccactgggccagctggtaacatcatggcagagaaagtgaacaacttcccaccattgcccaaattcatcccgctgaagccatgtttctaccaagacttcgaggcagatattcctccccagcatgtcagcatgaccaagcgcctctactacctctggatgttgaacagcgtcacgctggccgtgaacctggtgggctgtctcgcgtggctgatcggaggcgggggagccaccaactttggcctcgcctttctctggctcatcctcttcacaccctgctcctacgtctgctggtttcggcccatttacaaggccttcaa

SEQ ID NO: 18424 - DNA, 3400 bp, Homo sapiens
  source 1..3400: mol_type = unassigned DNA
cccgcccccagccccggagcggctcgcggccggctccgcgccgcatcgctcgggtgcagcgcagctcagcgcagcgctgcggcctttcggcagccgaacggccgcggcagttcaggacaaagaggtgtgggcaggccactgggccagctggtaacatcatggcagagaaagtgaacaacttcccaccattgcccaaattcatcccgctgaagccatgtttctaccaagacttcgaggcagatattcctccccagcatgtcagcatgaccaagcgcctctactacctctggatgttgaacagcgtcacgctggccgtgaacctggtgggctgtctcgcgtggctgatcggaggcgggggagccaccaactttggcctcgcctttctctggctcatcctcttcacaccctgctcctacgtctgctggtttcggcccatttacaaggccttcaagactgacagctccttcagtttcatggcattcttctttaccttcatggctcagttggtcatcagcatcatccaggccgtgggcatcccaggctggggcgtctgccccacactggcctcttcctgcagcggctggattgctaccatctccttcttcggaacgaacattggctcggcggtggtgatgctaattcccactgtcatgttcacagtgatggccgtcttttccttcatcgccctcagcatggttcataaattttaccggggaagtggggggagtttcagcaaagctcaggaggagtggaccacaggggcctggaagaatccacatgtgcagcaggcagcccagaacgcagccatgggggcagcccagggtgccatgaatcagcctcagactcagtattccgccacccccaattacacgtactccaatgagatgtgaaccagccacgcctaccaggtggcagagctggggccattgggacagggggctcaagccacatcgtcatttgtggttaccaagcagggttcccccttcccttttctccttccctactttgtacaaaggaccagagttatatatatatatatatgtatatgtctgtaccccagcccccacctttcagattctgctcttggcactcagctgtgggctgcacgtggagctgtcccgtgcggtagtagctgtgtctgtgtcccctcgtgaaatagtgtgcagtggaggtctcttgtggtgctagatgtgtgtttagagctaaaccagcccccacccccaccctccacctgcccctcttgcctctggcccctctgaccctggcccagggacccctcacggggccaggggaggcatagcagaaagactggccccttcctagggttatgagctggaactgtttctactttcagtcttcctgggaagtaacagtacttagcactcttggtggtgggtgggagggtgggtacaggccagggatattcccttgctcttttgatccctccaggcctcgcctccttcagcctcctcctccctcatctgttccctgatgtcacattccctgtgcaatcttcccttgcccatggtctgtctatctctttcctatgtggcttttctttgtcttccccaaggctgagtgtcccagttttatctgctcctgagactgagcccagatccccaaatctaatctgatttacagttcaaggaagctgatggggagctgggccttacccctgatgtaggaggggcacacagctgggggtgcagagcccacctgggtacctgacccccaggggatgaaaatgcaaggatgagtctgcttgggcctgagagtttgatctgcaggggcaggctcatcttttctctcccctgccttctcctccttctctccccagagcccccttgagcccctctgcctatgtccctctgcctcctccccatgcccccagttgctgtggcttgattctgctaccctgaccccaccatgtgccaggtggcatctgccttactgccttccctgaggagctgggacatgctgggcagttgtcagatgtaaaggcacagctggagcagagggcatgtcagtaatgattggtccctggggaaggtctggctggctccagcacagtgaggcatttaggtatctctcggtgaccgttggattcctggaagcagtagctgttctgtttggatctggtaggacagggctcagagggctaggcacggagggaaggtcagaggagaaggcaggcagggcccagtgagaggggagcatgccttcccccaccctggcttgctcttggtcacagggcggttctgggcacttgaactcagggcccaagcagaagcacaggcccagtcctggctgcaagcacaatagcctgaatgggatttcaggttaggcagggtgggaggggaggctctctggctttagttttgttttgttttccaaatcaaggtaacttgctcccttctgcctacaggccttggtcttggcttgtcctcacccagtcggaactccctaccactttcaggagagtggttttaggcccgtggggctgttctgttccaagcagtgtgagaacatggctggtagaggctctagctgtgtgcggggcctgaaggggagtgggttctcgcccaaagagcatctgcccatttcccaccttcccttctcccaccagaagcttgcctgagctgtttggacaaaaatccaaaccccacttggctactctggcctggcttcagcttggaacccaatacctaggcttacaggccatcctgagccaggggcctctggaaattctcttcctgatggtcctttaggtttgggcacaaaatataattgcctctcccctctcccattttctctcttgggagcaatggtcacagtccctggtacctgaaaaggtacctaggtctaggcccttcttccctttcccttcctctcccctaccccagaactttggctccctttcccttctctctctggtagctccaggaggcctgtgatccagctccctgcctagcatccatgacctgttggatgttacctccaatcagtttcctgtcctacctgcctctttggcttggacctatatggccatgctctggctctacccttgggaagcctgatcccggtgtgtggcccagcttgttcaggccctgggatgctgcatctccaggcaactatgcactttcccggggagagaaccagtatgagaagtgggggcagggcacacattcatctttgtaggaaggtctggcctggggtcgggtgaaggagggcccaggtcagttctggggtcccagtgacctgctttgccattctcctggtgccgctgctgctccctgtttctggagctggatgttccccagctggcagttgagctgcctgagccaatgtgtctgtctttggtaactgagtgaaccataataaaggggaacatttggccctg

SEQ ID NO: 18425 - DNA, 590 bp, Homo sapiens
  source 1..590: mol_type = unassigned DNA
cccagccccggagcggctcgcggccggctccgcgccgcatcgctcgggtgcagcgcagctcagcgcagcgctgcggcctttcggcagccgaacggccgcggcagttcaggacaaagaggtgtgggcaggccactgggccagctggtaacatcatggcagagaaagtgaacaacttcccaccattgcccaaattcatcccgctgaagccatgtttctaccaagacttcgaggcagatattcctccccagcatgtcagcatgaccaagcgcctctactacctctggatgttgaacagcgtcacgctggccgtgaacctggtgggctgtctcgcgtggctgatcggaggcgggggagccaccaactttggcctcgcctttctctggctcatcctcttcacaccctgctcctacgtctgctggtttcggcccatttacaaggccttcaaggcttgggggccttgaaggcagggaagccctggccctctgcccaggtgacgggagccacctcctctgccgcaggactgacagctccttcagtttcatggcattcttctttaccttcatggctcagttggtcatcagcatcatcca

SEQ ID NO: 18426 - DNA, 588 bp, Homo sapiens
  source 1..588: mol_type = unassigned DNA
agccccggagcggctcgcggccggctccgcgccgcatcgctcgggtgcagcgcagctcagcgcagcgctgcggcctttcggcagccgaacggccgcggcaggttcaatcaattctcctgcttcaacctcccgagtagctggaactacaggcacatgccaccacgcccagttcaggacaaagaggtgtgggcaggccactgggccagctggtaacatcatggcagagaaagtgaacaacttcccaccattgcccaaattcatcccgctgaagccatgtttctaccaagacttcgaggcagatattcctccccagcatgtcagcatgaccaagcgcctctactacctctggatgttgaacagcgtcacgctggccgtgaacctggtgggctgtctcgcgtggctgatcggaggcgggggagccaccaactttggcctcgcctttctctggctcatcctcttcacaccctgctcctacgtctgctggtttcggcccatttacaaggccttcaagactgacagctccttcagtttcatggcattcttctttaccttcatggctcagttggtcatcagcatcatccaggccgt

SEQ ID NO: 18427 - DNA, 1206 bp, Homo sapiens
  source 1..1206: mol_type = unassigned DNA
agccccggagcggctcgcggccggctccgcgccgcatcgctcgggtgcagcgcagctcagcgcagcgctgcggcctttcggcagccgaacggccgcggcagttcaggacaaagaggtgtgggcaggccactgggccagctggtaacatcatggcagagaaagtgaacaacttcccaccattgcccaaattcatcccgctgaagccatgtttctaccaagacttcgaggcagatattcctccccagcatgtcagcatgaccaagcgcctctactacctctggatgtgactgacagctccttcagtttcatggcattcttctttaccttcatggctcagttggtcatcagcatcatccaggccgtgggcatcccaggctggggcgtctgcggctggattgctaccatctccttcttcggaacgaacattggctcggcggtggtgatgctaattcccactgtcatgttcacagtgatggccgtcttttccttcatcgccctcagcatggttcataaattttaccggggaagtggggggagtttcagcaaagctcaggaggagtggaccacaggggcctggaagaatccacatgtgcagcaggcagcccagaacgcagccatgggggcagcccagggtgccatgaatcagcctcagactcagtattccgccacccccaattacacgtactccaatgagatgtgaaccagccacgcctaccaggtggcagagctggggccattgggacagggggctcaagccacatcgtcatttgtggttaccaagcagggttcccccttcccttttctccttccctactttgtacaaaggaccagagttatatatatatatatatgtatatgtctgtaccccagcccccacctttcagattctgctcttggcactcagctgtgggctgcacgtggagctgtcccgtgcggtagtagctgtgtctgtgtcccctcgtgaaatagtgtgcagtggaggtctcttgtggtgctagatgtgtgtttagagctaaaccagcccccacccccaccctccacctgcccctcttgcctctggcccctctgaccctggcccagggacccctcacggggccaggggaggcatagcagaaagactggccccttcctagggttatgagctggaactgtttctactttcagtcttcctgggaagtaacagtacttagcactcttggtggtggg

SEQ ID NO: 18428 - DNA, 593 bp, Homo sapiens
  source 1..593: mol_type = unassigned DNA
ggctcgcggccggctccgcgccgcatcgctcgggtgcagcgcagctcagcgcagcgctgcggcctttcggcagccgaacggccgcggcagttcaggacaaagaggtgtgggcaggccactgggccagctggtaacatcatggcagagaaagtgaacaacttcccaccattgcccaaattcatcccgctgaagccatgtttctaccaagacttcgaggcagatattcctccccagcatgtcagcatgaccaagcgcctctactacctctggatgtgtgagtgccatgggatgggggtgggccagggtggctggaggaggcaggaagactgggcgtgctgggcagcggggtggggtgcccacaggcctgactgtccttcagtcccacttgtggcatatgcatggaccataagtcttcccctgccaggctcccagaggcttcttccatgggccacctccccgactgggcctcagtttccctcaacctcccccatctaggcctctcttcccttccttcccctccaccctcctttcacagagcatctggacaggggtccctctctgcagtgtaatccctgtcttcttgcttccccttt

SEQ ID NO: 18429 - DNA, 561 bp, Homo sapiens
  source 1..561: mol_type = unassigned DNA
tccgcgccgcatcgctcgggtgcagcgcagctcagcgcagcgctgcggcctttcggcagccgaacggccgcggcagcatttcctttacaggctgcacttccttccctgctgccagccaggagtttcggaaggtttcctggaggaagtgtgatacagcaggttcaatcaattctcctgcttcaacctcccgagtagctggaactacaggcacatgccaccacgcccagttcaggacaaagaggtgtgggcaggccactgggccagctggtaacatcatggcagagaaagtgaacaacttcccaccattgcccaaattcatcccgctgaagccatgtttctaccaagacttcgaggcagatattcctccccagcatgtcagcatgaccaagcgcctctactacctctggatgttgaacagcgtcacgctggccgtgaacctggtgggctgtctcgcgtggctgatcggaggcgggggagccaccaactttggcctcgcctttctctggctcatcctcttcacaccctgctcctacgtctgctggtttcggcccatttacaagg

SEQ ID NO: 18430 - DNA, 532 bp, Homo sapiens
  source 1..532: mol_type = unassigned DNA
tccgcgccgcatcgctcgggtgcagcgcagctcagcgcagcgctgcggcctttcggcagccgaacggccgcggcagaaccccgaccaagaacagatgccgggcccccagtcgctgccccatcaaggttcaggacaaagaggtgtgggcaggccactgggccagctggtaacatcatggcagagaaagtgaacaacttcccaccattgcccaaattcatcccgctgaagccatgtttctaccaagacttcgaggcagatattcctccccagcatgtcagcatgaccaagcgcctctactacctctggatgtgactgacagctccttcagtttcatggcattcttctttaccttcatggctcagttggtcatcagcatcatccaggccgtgggcatcccaggctggggcgtctgcggctggattgctaccatctccttcttcggaacgaacattggctcggcggtggtgatgctaattcccactgtcatgttcacagtgatggccgtcttttccttcatcgccctcagcatggt

SEQ ID NO: 18431 - DNA, 3427 bp, Homo sapiens
  source 1..3427: mol_type = unassigned DNA
tccgcgccgcatcgctcgggtgcagcgcagctcagcgcagcgctgcggcctttcggcagccgaacggccgcggcagcatttcctttacaggctgcacttccttccctgctgccagccaggagtttcggaaggtttcctggaggaagtgtgatacagcagttcaggacaaagaggtgtgggcaggccactgggccagctggtaacatcatggcagagaaagtgaacaacttcccaccattgcccaaattcatcccgctgaagccatgtttctaccaagacttcgaggcagatattcctccccagcatgtcagcatgaccaagcgcctctactacctctggatgttgaacagcgtcacgctggccgtgaacctggtgggctgtctcgcgtggctgatcggaggcgggggagccaccaactttggcctcgcctttctctggctcatcctcttcacaccctgctcctacgtctgctggtttcggcccatttacaaggccttcaagactgacagctccttcagtttcatggcattcttctttaccttcatggctcagttggtcatcagcatcatccaggccgtgggcatcccaggctggggcgtctgcggctggattgctaccatctccttcttcggaacgaacattggctcggcggtggtgatgctaattcccactgtcatgttcacagtgatggccgtcttttccttcatcgccctcagcatggttcataaattttaccggggaagtggggggagtttcagcaaagctcaggaggagtggaccacaggggcctggaagaatccacatgtgcagcaggcagcccagaacgcagccatgggggcagcccagggtgccatgaatcagcctcagactcagtattccgccacccccaattacacgtactccaatgagatgtgaaccagccacgcctaccaggtggcagagctggggccattgggacagggggctcaagccacatcgtcatttgtggttaccaagcagggttcccccttcccttttctccttccctactttgtacaaaggaccagagttatatatatatatatatgtatatgtctgtaccccagcccccacctttcagattctgctcttggcactcagctgtgggctgcacgtggagctgtcccgtgcggtagtagctgtgtctgtgtcccctcgtgaaatagtgtgcagtggaggtctcttgtggtgctagatgtgtgtttagagctaaaccagcccccacccccaccctccacctgcccctcttgcctctggcccctctgaccctggcccagggacccctcacggggccaggggaggcatagcagaaagactggccccttcctagggttatgagctggaactgtttctactttcagtcttcctgggaagtaacagtacttagcactcttggtggtgggtgggagggtgggtacaggccagggatattcccttgctcttttgatccctccaggcctcgcctccttcagcctcctcctccctcatctgttccctgatgtcacattccctgtgcaatcttcccttgcccatggtctgtctatctctttcctatgtggcttttctttgtcttccccaaggctgagtgtcccagttttatctgctcctgagactgagcccagatccccaaatctaatctgatttacagttcaaggaagctgatggggagctgggccttacccctgatgtaggaggggcacacagctgggggtgcagagcccacctgggtacctgacccccaggggatgaaaatgcaaggatgagtctgcttgggcctgagagtttgatctgcaggggcaggctcatcttttctctcccctgccttctcctccttctctccccagagcccccttgagcccctctgcctatgtccctctgcctcctccccatgcccccagttgctgtggcttgattctgctaccctgaccccaccatgtgccaggtggcatctgccttactgccttccctgaggagctgggacatgctgggcagttgtcagatgtaaaggcacagctggagcagagggcatgtcagtaatgattggtccctggggaaggtctggctggctccagcacagtgaggcatttaggtatctctcggtgaccgttggattcctggaagcagtagctgttctgtttggatctggtaggacagggctcagagggctaggcacggagggaaggtcagaggagaaggcaggcagggcccagtgagaggggagcatgccttcccccaccctggcttgctcttggtcacagggcggttctgggcacttgaactcagggcccaagcagaagcacaggcccagtcctggctgcaagcacaatagcctgaatgggatttcaggttaggcagggtgggaggggaggctctctggctttagttttgttttgttttccaaatcaaggtaacttgctcccttctgcctacaggccttggtcttggcttgtcctcacccagtcggaactccctaccactttcaggagagtggttttaggcccgtggggctgttctgttccaagcagtgtgagaacatggctggtagaggctctagctgtgtgcggggcctgaaggggagtgggttctcgcccaaagagcatctgcccatttcccaccttcccttctcccaccagaagcttgcctgagctgtttggacaaaaatccaaaccccacttggctactctggcctggcttcagcttggaacccaatacctaggcttacaggccatcctgagccaggggcctctggaaattctcttcctgatggtcctttaggtttgggcacaaaatataattgcctctcccctctcccattttctctcttgggagcaatggtcacagtccctggtacctgaaaaggtacctaggtctaggcccttcttccctttcccttcctctcccctaccccagaactttggctccctttcccttctctctctggtagctccaggaggcctgtgatccagctccctgcctagcatccatgacctgttggatgttacctccaatcagtttcctgtcctacctgcctctttggcttggacctatatggccatgctctggctctacccttgggaagcctgatcccggtgtgtggcccagcttgttcaggccctgggatgctgcatctccaggcaactatgcactttcccggggagagaaccagtatgagaagtgggggcagggcacacattcatctttgtaggaaggtctggcctggggtcgggtgaaggagggcccaggtcagttctggggtcccagtgacctgctttgccattctcctggtgccgctgctgctccctgtttctggagctggatgttccccagctggcagttgagctgcctgagccaatgtgtctgtctttggtaactgagtgaaccataataaaggggaacatttggccctgtg

SEQ ID NO: 18432 - DNA, 554 bp, Homo sapiens
  source 1..554: mol_type = unassigned DNA
agcctgagctttgggccctccatcccccccgccagccccacctggcgttccctggaaaccggccttctggagatggcgtgcgcagccggggatgggggcgactggaagggggtgcccgtggcttcctttgggcctttccttccaactagcgcctgcaggtggacccgggttgacttccctcacctccctcgggcggccgacctttggatggcggacctcagccgccccagggttgcgaggcgacgggcgcgctggcccaggccaccaggcgggctccatcagggctttgggtgttcaggacaaagaggtgtgggcaggccactgggccagctggtaacatcatggcagagaaagtgaacaacttcccaccattgcccaaattcatcccgctgaagccatgtttctaccaagacttcgaggcagatattcctccccagcatgtcagcatgaccaagcgcctctactacctctggatgtgactgacagctccttcagtttcatggcattcttctttaccttcatggctcagttggtcatcagcatcatccaggccg

SEQ ID NO: 18433 - DNA, 557 bp, Homo sapiens
  source 1..557: mol_type = unassigned DNA
ggaaaccggccttctggagatggcgtgcgcagccggggatgggggcgactggaagggggtgcccgtggcttcctttgggcctttccttccaactagcgcctgcaggtggacccgggttgacttccctcacctccctcgggcggccgacctttggatggcggacctcagccgccccagggttgcgaggcgacgggcgcgctggcccaggccaccaggcgggctccatcagggctttgggtggtgagttgggggcgccggatttggctcatttcaacgctggccggaggtcacgaggatggaggttcaatcaattctcctgcttcaacctcccgagtagctggaactacaggcacatgccaccacgcccagttcaggacaaagaggtgtgggcaggccactgggccagctggtaacatcatggcagagaaagtgaacaacttcccaccattgcccaaattcatcccgctgaagccatgtttctaccaagacttcgaggcagatattcctccccagcatgtcagcatgaccaagcgcctctactacctctggatgtgtga

SEQ ID NO: 18434 - DNA, 554 bp, Homo sapiens
  source 1..554: mol_type = unassigned DNA
aaccggccttctggagatggcgtgcgcagccggggatgggggcgactggaagggggtgcccgtggcttcctttgggcctttccttccaactagcgcctgcaggtggacccgggttgacttccctcacctccctcgggcggccgacctttggatggcggacctcagccgccccagggttgcgaggcgacgggcgcgctggcccaggccaccaggcgggctccatcagggctttgggtggtgagttgggggcgccggatttggctcatttcaacgctggccggaggtcacgaggatggagttcaggacaaagaggtgtgggcaggccactgggccagctggtaacatcatggcagagaaagtgaacaacttcccaccattgcccaaattcatcccgctgaagccatgtttctaccaagacttcgaggcagatattcctccccagcatgtcagcatgaccaagcgcctctactacctctggatgttgaacagcgtcacgctggccgtgaacctggtgggctgtctcgcgtggctgatcggaggcgggggagccacca

SEQ ID NO: 18435 - DNA, 516 bp, Homo sapiens
  source 1..516: mol_type = unassigned DNA
attgcattcacggcactgtgggattcaggacaaagaggtgtgggcaggccactgggccagctggtaacatcatggcagagaaagtgaacaacttcccaccattgcccaaattcatcccgctgaagccatgtttctaccaagacttcgaggcagatattcctccccagcatgtcagcatgaccaagcgcctctactacctctggatgttgaacagcgtcacgctggccgtgaacctggtgggctgtctcgcgtggctgatcggaggcgggggagccaccaactttggcctcgcctttctctggctcatcctcttcacaccctgctcctacgtctgctggtttcggcccatttacaaggccttcaagactgacagctccttcagtttcatggcattcttctttaccttcatggctcagttggtcatcagcatcatccaggccgtgggcatcccaggctggggcgtctgcggctggattgctaccatctccttcttcggaacgaacattggctcggcgg

SEQ ID NO: 18436 - DNA, 966 bp, Homo sapiens
  source 1..966: mol_type = unassigned DNA
tgtgggcaggccactgggccagctggtaacatcatggcagagaaagtgaacaacttcccaccattgcccaaattcatcccgctgaagccatgtttctaccaagacttcgaggcagatattcctccccagcatgtcagcatgaccaagcgcctctactacctctggatgtgactgacagctccttcagtttcatggcattcttctttaccttcatggctcagttggtcatcagcatcatccaggccgtgggcatcccaggctggggcgtctgccccacactggcctcttcctgcagcggctggattgctaccatctccttcttcggaacgaacattggctcggcggtggtgatgctaattcccactgtcatgttcacagtgatggccgtcttttccttcatcgccctcagcatggttcataaattttaccggggaagtggggggagtttcagcaaagctcaggaggagtggaccacaggggcctggaagaatccacatgtgcagcaggcagcccagaacgcagccatgggggcagcccagggtgccatgaatcagcctcagactcagtattccgccacccccaattacacgtactccaatgagatgtgaaccagccacgcctaccaggtggcagagctggggccattgggacagggggctcaagccacatcgtcatttgtggttaccaagcagggttcccccttcccttttctccttccctactttgtacaaaggaccagagttatatatatatatatatgtatatgtctgtaccccagcccccacctttcagattctgctcttggcactcagctgtgggctgcacgtggagctgtcccgtgcggtagtagctgtgtctgtgtcccctcgtgaaatagtgtgcagtggaggtctcttgtggtgctagatgtgtgtttagagctaaaccagcccccacccccaccctccacctgcccctcttgcctct

SEQ ID NO: 18437 - DNA, 710 bp, Homo sapiens
  source 1..710: mol_type = unassigned DNA
ggaaatccctccctgtgtaatgttgcaacacacaggtctaccacgtggaaacttgcaaagatgtatgggtagaactaaccccttctgacctctcaattaaggcctttaaatgtcttctgtccattatgcacttaaacttggaagggcttgggggccttgaaggcagggaagccctggccctctgcccaggtgacgggagccacctcctctgccgcaggactgacagctccttcagtttcatggcattcttctttaccttcatggctcagttggtcatcagcatcatccaggccgtgggcatcccaggctggggcgtctgcggctggattgctaccatctccttcttcggaacgaacattggctcggcggtggtgatgctaattcccactgtcatgttcacagtgatggccgtcttttccttcatcgccctcagcatggttcataaattttaccggggaagtggggggagtttcagcaaagctcaggaggagtggaccacaggggcctggaagaatccacatgtgcagcaggcagcccagaacgcagccatgggggcagcccagggtgccatgaatcagcctcagactcagtattccgccacccccaattacacgtactccaatgagatgtgaaccagccacgcctaccaggtggcagagctggggccattgggacagggggctcaagccacatcgtcatttgtggttacc

SEQ ID NO: 18438 - DNA, 1910 bp, Homo sapiens
  source 1..1910: mol_type = unassigned DNA
gggaggaagggtgcgcggggcgaggggcggcggcagacctcgcggggccccagcgggaagcgcgggcggcggcgggatgcgcgctctgggcggcggggcgcggcgctaggcgcccggcggggcttccccaggctgcgaccccgcgggaccctccactcctcccgccgcctccgcagcccgcgcgccggagcatgagtcccggccggagccccacggccgcgggcggcgcctaggacggcgatccgcgccctggaggatccgccggccgcccggctccactacagctccagccgcctgcagcggggccctcctgaggccccagaggaagagaccatgaaagtgaggtcggccggcggcgatggagatgccttgtgcgttacagaagaggacctggcgggtgacgacgaggacatgccgaccttcccatgcacccagaagggccggccagggccccgctgcagccgctgccagaagaacctatctttgcacacatcggtgcggattctttacctcttcctggccctgctcctggtggccgtggctgtgttggcctctctggttttcagaaaagtggactctctctccgaagacatctccttgacccagtctatttatgacaagaagcttgtgttaatgcagaaaaatctccagggcctggatccgaaagccctgaacaactgctctttctgccatgaagctgggcagctggggccagagatccgaaaactgcaggaggagctggagggaattcagaagctgcttctggcccaggaggtgcagctggaccagaccttacaggcccaggaggtgctctccaccaccagcagacaaatctcccaggagatgggcagttgctccttctccatccaccaggttaaccagtctctggggctcttcctggcccaggtgagaggctggcaggccaccacagctggcctggacctctctctgaaggacctcacccaggagtgctacgatgtcaaggctgcagtgcaccagatcaacttcaccgtggggcagacttccgagtggatccacgggatccagcggaagacagacgaggagaccctgaccctccagaagattgtcaccgactggcagaactacacacggctcttcagcggcctgcgcaccacctccaccaagactggagaggcggtcaagaacatccaggccaccctgggggcctcctcacagcgcatcagccagaactcagagagcatgcacgacctggtactccaggtcatgggcttgcagctgcagctggataacatctcgtccttcctggatgaccacgaagagaacatgcatgatcttcagtaccatacccactacgcccagaaccgcactgtggagaggtttgagtctctggaaggacgcatggcttctcacgagattgaaattggcaccatcttcaccaacatcaatgccaccgacaaccacgtgcacagcatgctcaagtacctggatgacgtgcggctctcctgcacgctgggcttccacacccatgccgaggagctctactacctgaacaagtctgtctccatcatgctgggcaccacagacctgctccgggagcgcttcagcctgctcagtgcccggctggacctcaacgtccggaacctctccatgatcgtggaggagatgaaggcagtggacacacagcatggagaaatccttcgcaatgtcaccatcctacgaggtcacactttgttttcacataatcggatatgatatgaagccagccataaagcccaggatgaccaagaatataatttgaaaatgaatttgtttactatccttaatggtaagcatcaccttaagcacatattatgccttgagacactagccaattgtggtacatgaaaataatttataaataaataaatttacctatattaggaagatga

SEQ ID NO: 18439 - DNA, 3510 bp, Homo sapiens
  source 1..3510: mol_type = unassigned DNA
aggccccagaggaagagaccatgaaagtgaggtcggccggcggcgatggagatgccttgtgcgttacagaagaggacctggcgggtgacgacgaggacatgccgaccttcccatgcacccagaagggccggccagggccccgctgcagccgctgccagaagaacctatctttgcacacatcggtgcggattctttacctcttcctggccctgctcctggtggccgtggctgtgttggcctctctggttttcagaaaagtggactctctctccgaagacatctccttgacccagtctatttatgacaagaagcttgtgttaatgcagaaaaatctccagggcctggatccgaaagccctgaacaactgctctttctgccatgaagctgggcagctggggccagagatccgaaaactgcaggaggagctggagggaattcagaagctgcttctggcccaggaggtgcagctggaccagaccttacaggcccaggaggtgctctccaccaccagcagacaaatctcccaggagatgggcagttgctccttctccatccaccaggttaaccagtctctggggctcttcctggcccaggtgagaggctggcaggccaccacagctggcctggacctctctctgaaggacctcacccaggagtgctacgatgtcaaggctgcagtgcaccagatcaacttcaccgtggggcagacttccgagtggatccacgggatccagcggaagacagacgaggagaccctgaccctccagaagattgtcaccgactggcagaactacacacggctcttcagcggcctgcgcaccacctccaccaagactggagaggcggtcaagaacatccaggccaccctgggggcctcctcacagcgcatcagccagaactcagagagcatgcacgacctggtactccaggtcatgggcttgcagctgcagctggataacatctcgtccttcctggatgaccacgaagagaacatgcatgatcttcagtaccatacccactacgcccagaaccgcactgtggagaggtttgagtctctggaaggacgcatggcttctcacgagattgaaattggcaccatcttcaccaacatcaatgccaccgacaaccacgtgcacagcatgctcaagtacctggatgacgtgcggctctcctgcacgctgggcttccacacccatgccgaggagctctactacctgaacaagtctgtctccatcatgctgggcaccacagacctgctccgggagcgcttcagcctgctcagtgcccggctggacctcaacgtccggaacctctccatgatcgtggaggagatgaaggcagtggacacacagcatggagaaatccttcgcaatgtcaccatcctacgaggtgcccccggccctccaggaccaagaggattcaaaggagatatgggcgtgaaagggcctgttggcggcagaggcccgaaaggagaccccggcagcttgggccccctgggaccccagggtcctcaggggcaacctggagaggccgggcctgtgggagaaaggggccctgttggccctcgagggttcccaggcctcaaaggctcaaagggcagctttggaactggagggccgagaggacagccaggcccaaaaggggacatagggcccccagggccagaagggcccccggggtctccagggccctcagggcctcagggaaaaccgggaattgcagggaagacagggtcaccaggccagcggggggccatggggcctaagggtgaaccagggatccagggtccccctggtctcccggggcctccaggtccaccaggaagccagagcttctactgaggagggctgtggcagagccactgtcacacagaatgccggaggggcgcagagcagatccaggccccagaaagcctcacctacagacagctgtggtcctctgattccaatgagggggctccccagggctgaccctgcagctttgggctcccccatagtgactgtgccataggaaagcagcccctcctcacacatacatgtgcacatgcacacacatgcatgcacacacatgcacacatacacgcacatgcacacatacacatgcatgcacacatacacaggcatacatgcatgcacacacacatgcacgcacacacacatgcacacatacacgtgcacacatacacaggcacacatgcatgcacacatacacatgcacacacacatgcacacatatatgcacaggcacacacatgtacgcacacacacatgcactgcacacatatccatgcacacaaacacatatatacacatgcacatacacagatttttctgctggccaggtgggccaactgggtttccctggctgggcaggaggagagggcagaggaagaccccctctcctgtgactgagcctgccagggaggcagctacctcgggaggaaggtctcacatctgtctctgggcacccatgctggccagcagtttcccagggctccctggggttgaaaagccccaaggaaacctttgcgggtggggcgttactgccaaaactccagaggcaaagtggacctggcaaccacaagaccctccccataagcaggggaccagcatacccgggagctgtccctgtctgtcacagcacagtggggccacgaggctgacattctctggccttgcacacagtgccccctgagaagttcaacatttatttcttcacgtgtccagaaaattcctcaattcatccttgcctctgcccttcaggagcagcctggaaggaatccaagcaggagtttcatctgcatgggggcactctgcaggccctggaacattgggcctgagtggagatgggagacagaggcaggccagaaggttctctctgcacagctgcctcccttgctctccctgaggctggcctgccccattccccaagggggctcctctggagtggtggggaggattaggctgcagaagggccaaccccttgcaacagggcagctctcgcctcccgcacacggctctcctgatcacagctgcatgccgaccttgtcccaccgggacccacaatggcccgagccctctttgcatgggcagccagctggactaggagtgggaagggcctggacactcacagaggccccctctgtcatcactccttggcacccaccaacttcctgcacacactggcagagaggggcgctgggaaatcaccccacagggtggaggtctcctgttggctacactctaaagctgctttgccttcatgttcaaacagattcaggcaccaccccctccaccgcccgcaaggttagggcatagagttgtctccttcccaacacggacccagagagcagcccttccctgctcaaagcctttccgcaccctcctgactgtcctggatgtgcaactggtttgcactgcacaccccacggccatgtaactctcctgtccacatatgataataccattctgcatagtattactgactcagtaaagagctatttccaggagt

SEQ ID NO: 18440 - DNA, 2269 bp, Homo sapiens
  source 1..2269: mol_type = unassigned DNA
cactgaataaactctaggttcccatttctttcagccagatcctcccagggaatcactacaggctggttagccaaaaagtcctgattttctgctcaatagaggtccttactggaaggcagcatgtccaatgttaccttgagaaaaatgtctcccacaggaaatgagatgaagagcaccactcagggaaccacacggaagcagcaggattttcacgaggtgaacaaaagaagaactttcttacaggataacagttggataaagaaacgccctgaagaagaaaaagatgaaaattacggtagggtggtgctcaaccgacataattcccatgatgcattggacaggaaagtaaatgagagagatgtgccaaaagctacaattagtcggtacagttctgatgacactttggacaggagcatgtccatgtttagatcactggaagtaacaaagttgcaacctggcggttcattgaatgccaacacctccaacaccatagcatccacttctgctactactcctgtaaagaagaagaggcagtcctggtttccaccgccccctccaggttacaatgcctcctcgagcacaggaaccaggagacgggaaccaggtgttcaccctccaatacctccaaagcccagttctcctgtttcttctcctaaccagctgagacaggataataggcagatacatccacctaaaccaggtgtatatacagaaaccaacagatctgctgaaagaaatataagtgaagaattggataatctcatcaaaatgaacaaaagcttgaataggaatcaaggtcttgatagtctcttcagagcaaatccaaaggtagaagaaagagagaaaagagccaaaagccttgaaagtctcatctatatgagtacccggacagataaagatggcaaaggaatccaaagccttggaagtccgattaaagttaatcaaaggactgacaaaaatgagaaagggtaagtcaatctcctaccttgatggagctctttttattcaggttagcttttttacctcattaggaatgggagtgttatgctttcctttgtggcagtgaactcttgtactgctttgacccatcagacctagtaggcaaaaggaatatgttgagtgctgtttcataggacctctgatttgagttacattgaagtaggtgcaggaaaacctgctacataatctcttattccgtattttcttaaataattaagagatgagtcaaattttaatttaaattaagaaatataaaggacaaaattgcacagcgagagccacattgagaagcctttctaaactgatttagacacatttaaatgaaatgctattgtggaaattactaaaggtaagttaaggataattacatcaaagctctttttggtcatttggtcctgaaaacacctgacaccacattcagggacattcttgattatacagatttcagagaaaattgtactgtaacctaactgacaagttttggtgttttttccaaagaagacaaaatctcgaatctgttgctaaagtgaatgccaggatgaataaaacgagcagaaggtgagaactgaacagatgtctctaaatattggttattttctctcatattaattatgtgatattgagggcaccacatctttgtttggcttctctcttctgtgtctaatccctggtgccctgatcttcacttcaaagaatctacagtatattcgatctaaatttacatttacatatagcccaataaaatcctaaggattaattaaactatgttattgattggcaatttttatacttaaagccaatttaatgtcagtataataattttctccaaaagcttgaattaatcattgggaatacagaagatgtatgtgtctaatattatgggaatgttttgaaactgatataaacttttttttttaaagaagtgaagaccttgataatgctactgaagtaaatcccaaaggacatgaaaataccactggaaaaaaagaccttgatgggcttattaaagtggatcctgaaacaaataaaaatattacgaggggccagagccttgataatctcatcaaagtgacccctgaagtaaagagaagtaaccaaggttccaaagaccttaataacttcatcaaagtgtatccaggaacagaaaaaagtactgaagggggccaaagtctcgacagcctcattaaagtgactcctgaaagaaacagaactaaccaagggaaccaagacttggaaaatcttatcaaagtgatcccttcagcaaacaaaa

SEQ ID NO: 18441 - DNA, 3081 bp, Homo sapiens
  source 1..3081: mol_type = unassigned DNA
cagatcctcccagggaatcactacaggctggttagccaaaaagtcctgattttctgctcaatagaggtccttactggaaggcagcatgtccaatgttaccttgagaaaaatgtctcccacaggaaatgagatgaagagcaccactcagggaaccacacggaagcagcaggattttcacgaggtgaacaaaagaagaactttcttacaggataacagttggataaagaaacgccctgaagaagaaaaagatgaaaattacggtagggtggtgctcaaccgacataattcccatgatgcattggacaggaaagtaaatgagagagatgtgccaaaagctacaattagtcggtacagttctgatgacactttggacaggatctcagacagaaatgatgctgctaaaacatataaggccaataccttggataaccaactaaccaataggagcatgtccatgtttagatcactggaagtaacaaagttgcaacctggcggttcattgaatgccaacacctccaacaccatagcatccacttctgctactactcctgtaaagaagaagaggcagtcctggtttccaccgccccctccaggttacaatgcctcctcgagcacaggaaccaggagacgggaaccaggtgttcaccctccaatacctccaaagcccagttctcctgtttcttctcctaaccagctgagacaggataataggcagatacatccacctaaaccaggtgtatatacagaaaccaacagatctgctgaaagaaatataagtgaagaattggataatctcatcaaaatgaacaaaagcttgaataggaatcaaggtcttgatagtctcttcagagcaaatccaaaggtagaagaaagagagaaaagagccaaaagccttgaaagtctcatctatatgagtacccggacagataaagatggcaaaggaatccaaagccttggaagtccgattaaagttaatcaaaggactgacaaaaatgagaaaggaagacaaaatctcgaatctgttgctaaagtgaatgccaggatgaataaaacgagcagaagaagtgaagaccttgataatgctactgaagtaaatcccaaaggacatgaaaataccactggaaaaaaagaccttgatgggcttattaaagtggatcctgaaacaaataaaaatattacgaggggccagagccttgataatctcatcaaagtgacccctgaagtaaagagaagtaaccaaggttccaaagaccttaataacttcatcaaagtgtatccaggaacagaaaaaagtactgaagggggccaaagtctcgacagcctcattaaagtgactcctgaaagaaacagaactaaccaagggaaccaagacttggaaaatcttatcaaagtgatcccttcagcaaacaaaagcagtgaacaaggtcttgatgaacatattaatgtcagccccaaagctgtcaaaaacactgatggaaaacaagatcttgataaactcatcaaggtgaatcctgaaattttcacaaacaaccaaagaaaccaagatcttgctaacctcatcaaagtaaatcctgcagtaatcagaaacaatcagagccaagacttggacaatcttattaaagtgaaaccttcagctcttagaaacactaatcgagaccagaacctggaaaatttaattgaagtaaattctcatgtgtctgaaaacaagaatggaagctctaacactggagccaagcaggcaggaccacaggatactgttgtgtacacaaggacatatgtggagaatagtaaatcacccaaggatggatatcaggagaatatctctggaaaatacatacaaactgtttattcaacttctgataggtctgtcattgaaagagatatgtgcacttactgccgaaaacccttgggtgtagaaactaaaatgattttagatgaattacaaatttgctgccattctacttgctttaagtgtgaaatatgcaagcagcctttggaaaatctacaagcgggtgatagtatttggatttatagacagacaatacactgtgaaccttgctactctaaaattatggcaaagtggattccataactctggcacaaggaaatcaagatgaaaagcactcattaaggaattaaagttacaagttttatcttaataatatgtaatctagaaaagctttcacattgaagatcaactcttgtacaaaattaacaattctgttattgcataagtaatctaattgtcttcaataaggtcacacacataaaaagagccatctggtctctggctagagttagcaataaaaagttcaaatggttccagattccagtgtcaaaggagtgatgcattacactccagccaggtccatccctgctccgtatgttggctgtgagtggtggtttccatttaaaccaagtttctcatttcttcacctttttttctctaagaatttggattcgtagacattgacatcccgaagaactgtcaaggaagcaagatatgctttcttcatctgcaaaagaaatactaacaacaattttcttatacagtttggcagaaagatgttaacataaaaagtttatatacctcaaaaatcactaaactttccagatctctgtcctattatttgtaacacaaggggcattggataaaatgatttctagggttccttttgcttcccaaattctctgattctaaagcagtttttagaatcattagctctttggaaacatatatgcatacatgtttgttaagcctattgaactaggtaggacatataaacaatttaattttagtgtcattgtttaatcacagacttagtgtttgaaaactgtgttttaaaaacagaaacagattgatgggtaacaggtaaaatatgacatgtatagcttacatgttattatttgttaaattttctttgtatacatttcaaaatctgggtatacttataatccattagaagtaatggttatggactaaaaagatatgttctttagtatgttatatatactcatattacatagcagtatgtttacaaaaggcttataaaaataaaatgaactatcagttacatagaa

SEQ ID NO: 18442 - DNA, 2386 bp, Homo sapiens
  source 1..2386: mol_type = unassigned DNA
agatcctcccagggaatcactacaggctggttagccaaaaagtcctgattttctgctcaatagaggtccttactggaaggcagcatgtccaatgttaccttgagaaaaatgtctcccacaggaaatgagatgaagagcaccactcagggaaccacacggaagcagcaggattttcacgaggtgaacaaaagaagaactttcttacaggataacagttggataaagaaacgccctgaagaagaaaaagatgaaaattacggtagggtggtgctcaaccgacataattcccatgatgcattggacaggaaagtaaatgagagagatgtgccaaaagctacaattagtcggtacagttctgatgacactttggacaggatctcagacagaaatgatgctgctaaaacatataaggccaataccttggataaccaactaaccaataggagcatgtccatgtttagatcactggaagtaacaaagttgcaacctggcggttcattgaatgccaacacctccaacaccatagcatccacttctgctactactcctgtaaagaagaagaggcagtcctggtttccaccgccccctccaggttacaatgcctcctcgagcacaggaaccaggagacgggaaccaggtgttcaccctccaatacctccaaagcccagttctcctgtttcttctcctaaccagctgagacaggataataggcagatacatccacctaaaccaggtgtatatacagaaaccaacagatctgctgaaagaaatataaggagtcaggatcttgataacatcgtcaaagtggccacttcacttcagagaagtgacaaaggtgaagaattggataatctcatcaaaatgaacaaaagcttgaataggaatcaaggtcttgatagtctcttcagagcaaatccaaaggtagaagaaagagagaaaagagccaaaagccttgaaagtctcatctatatgagtacccggacagataaagatggcaaaggaatccaaagccttggaagtccgattaaagttaatcaaaggactgacaaaaatgagaaaggaagacaaaatctcgaatctgttgctaaagtgaatgccaggatgaataaaacgagcagaagaagtgaagaccttgataatgctactgaagtaaatcccaaaggacatgaaaataccactggaaaaaaagaccttgatgggcttattaaagtggatcctgaaacaaataaaaatattacgaggggccagagccttgataatctcatcaaagtgacccctgaagtaaagagaagtaaccaaggttccaaagaccttaataacttcatcaaagtgtatccaggaacagaaaaaagtactgaagggggccaaagtctcgacagcctcattaaagtgactcctgaaagaaacagaactaaccaagggaaccaagacttggaaaatcttatcaaagtgatcccttcagcaaacaaaagcagtgaacaaggtcttgatgaacatattaatgtcagccccaaagctgtcaaaaacactgatggaaaacaagatcttgataaactcatcaaggtgaatcctgaaattttcacaaacaaccaaagaaaccaagatcttgctaacctcatcaaagtaaatcctgcagtaatcagaaacaatcagagccaagacttggacaatcttattaaagtgaaaccttcagctcttagaaacactaatcgagaccagaacctggaaaatttaattgaagtaaattctcatgtgtctgaaaacaagaatggaagctctaacactggagccaagcaggcaggaccacaggatactgttgtgtacacaaggacatatgtggagaatagtaaatcacccaaggatggatatcaggagaatatctctggaaaatacatacaaactgtttattcaacttctgataggtctgtcattgaaagagatatgtgcacttactgccgaaaacccttgggtgtagaaactaaaatgattttagatgaattacaaatttgctgccattctacttgctttaagtgtgaaatatgcaagcagcctttggaaaatctacaagcgggtgatagtatttggatttatagacagacaatacactgtgaaccttgctactctaaaattatggcaaagtggattccataactctggcacaaggaaatcaagatgaaaagcactcattaaggaattaaagttacaagttttatcttaataatatgtaatctagaaaagctttcacattgaagatcaactcttgtacaaaattaacaattctgttattgcataagtaatctaattgtcttcaataaggtcacacacataaaaagagccatctggtctctggctagagttagcaataaaaagttcaaatggttccaga

SEQ ID NO: 18443 - DNA, 590 bp, Homo sapiens
  source 1..590: mol_type = unassigned DNA
gaacaaatgttttctagaagctacgtgtgcaagtacattgcacaatgctgtaattaatcagtgtacctatgtgtggactcaattaaaatgaagaattggataatctcatcaaaatgaacaaaagcttgaatagagccaaaagccttgaaagtctcatctatatgagtacccggacagataaagatggcaaaggaatccaaagccttggaagtccgattaaagttaatcaaaggactgacaaaaatgagaaagggggccagagccttgataatctcatcaaagtgacccctgaagtaaagagaagtaaccaaggttccaaagaccttaataacttcatcaaagtgtatccaggaacagaaaaaagtactgaagggggccaaagtctcgacagcctcattaaagtgactcctgaaagaaacagaactaaccaagggaaccaagacttggaaaatcttatcaaagtgatcccttcagcaaacaaaagcagtgaacaaggtcttgatgaacatattaatgtcagccccaaagctgtcaaaaacactgatggaaaacaagatcttgataaactcatcaaggtgaatcctgaaatt

SEQ ID NO: 18444 - DNA, 3096 bp, Homo sapiens
  source 1..3096: mol_type = unassigned DNA
aagaaacctctgaactgttcactaatacagtcaggtagaggttgagactccactgaataaactctaggttcccatttctttcagccagatcctcccagggaatcactacaggctggttagccaaaaagtcctgattttctgctcaatagaggtccttactggaaggcagcatgtccaatgttaccttgagaaaaatgtctcccacaggaaatgagatgaagagcaccactcagggaaccacacggaagcagcaggattttcacgaggtgaacaaaagaagaactttcttacaggataacagttggataaagaaacgccctgaagaagaaaaagatgaaaattacggtagggtggtgctcaaccgacataattcccatgatgcattggacaggaaagtaaatgagagagatgtgccaaaagctacaattagtcggtacagttctgatgacactttggacaggatctcagacagaaatgatgctgctaaaacatataaggccaataccttggataaccaactaaccaataggagcatgtccatgtttagatcactggaagtaacaaagttgcaacctggcggttcattgaatgccaacacctccaacaccatagcatccacttctgctactactcctgtaaagaagaagagggaaccaggtgttcaccctccaatacctccaaagcccagttctcctgtttcttctcctaaccagctgagacaggataataggcagatacatccacctaaaccaggtgtatatacagaaaccaacagatctgctgaaagaaatataaggagtcaggatcttgataacatcgtcaaagtggccacttcacttcagagaagtgacaaaggtgaagaattggataatctcatcaaaatgaacaaaagcttgaataggaatcaaggtcttgatagtctcttcagagcaaatccaaaggtagaagaaagagagaaaagagccaaaagccttgaaagtctcatctatatgagtacccggacagataaagatggcaaaggaatccaaagccttggaagtccgattaaagttaatcaaaggactgacaaaaatgagaaaggaagacaaaatctcgaatctgttgctaaagtgaatgccaggatgaataaaacgagcagaagaagtgaagaccttgataatgctactgaagtaaatcccaaaggacatgaaaataccactgggggccagagccttgataatctcatcaaagtgacccctgaagtaaagagaagtaaccaaggttccaaagaccttaataacttcatcaaagtgtatccaggaacagaaaaaagtactgaagggggccaaagtctcgacagcctcattaaagtgactcctgaaagaaacagaactaaccaagggaaccaagacttggaaaatcttatcaaagtgatcccttcagcaaacaaaagcagtgaacaaggtcttgatgaacatattaatgtcagccccaaagctgtcaaaaacactgatggaaaacaagatcttgataaactcatcaaggtgaatcctgaaattttcacaaacaaccaaagaaaccaagatcttgctaacctcatcaaagtaaatcctgcagtaatcagaaacaatcagagccaagacttggacaatcttattaaagtgaaaccttcagctcttagaaacactaatcgagaccagaacctggaaaatttaattgaagtaaattctcatgtgtctgaaaacaagaatggaagctctaacactggagccaagcaggcaggaccacaggatactgttgtgtacacaaggacatatgtggagaatagtaaatcacccaaggatggatatcaggagaatatctctggaaaatacatacaaactgtttattcaacttctgataggtctgtcattgaaagagatatgtgcacttactgccgaaaacccttgggtgtagaaactaaaatgattttagatgaattacaaatttgctgccattctacttgctttaagtgtgaaatatgcaagcagcctttggaaaatctacaagcgggtgatagtatttggatttatagacagacaatacactgtgaaccttgctactctaaaattatggcaaagtggattccataactctggcacaaggaaatcaagatgaaaagcactcattaaggaattaaagttacaagttttatcttaataatatgtaatctagaaaagctttcacattgaagatcaactcttgtacaaaattaacaattctgttattgcataagtaatctaattgtcttcaataaggtcacacacataaaaagagccatctggtctctggctagagttagcaataaaaagttcaaatggttccagattccagtgtcaaaggagtgatgcattacactccagccaggtccatccctgctccgtatgttggctgtgagtggtggtttccatttaaaccaagtttctcatttcttcacctttttttctctaagaatttggattcgtagacattgacatcccgaagaactgtcaaggaagcaagatatgctttcttcatctgcaaaagaaatactaacaacaattttcttatacagtttggcagaaagatgttaacataaaaagtttatatacctcaaaaatcactaaactttccagatctctgtcctattatttgtaacacaaggggcattggataaaatgatttctagggttccttttgcttcccaaattctctgattctaaagcagtttttagaatcattagctctttggaaacatatatgcatacatgtttgttaagcctattgaactaggtaggacatataaacaatttaattttagtgtcattgtttaatcacagacttagtgtttgaaaactgtgttttaaaaacagaaacagattgatgggtaacaggtaaaatatgacatgtatagcttacatgttattatttgttaaattttctttgtatacatttcaaaatctgggtatacttataatccattagaagtaatggttatggactaaaaagatatgttctttagtatgttatatatactcatattacatagcagtatgtttacaaaaggcttataaaaataaaatgaactatcagttacat

SEQ ID NO: 18445 - DNA, 3315 bp, Homo sapiens
  source 1..3315: mol_type = unassigned DNA
gttccattcccgggggattggagtagcgttggagtcaccgacgccatcccctcccgcctctggcgtgcatggagcatgcgcttccttcctcacttcctctgcaggagggagcgagagtaaagctacgccctggcgcgcagtctccgcgtcacaggaacttcagcacccacagggcggacagcgctcccctctacctggagacttgactcccgcgcgccccaaccctgcttatcccttgaccgtcgagtgtcagagatcctgcagccgcccagtcccggcccctctcccgccccacacccaccctcctggctcttcctgtttttactcctccttttcattcataacaaaagctacagctccaggagcccagcgccgggctgtgacccaagccgagcgtggaagaatggggttcctcgggaccggcacttggattctggtgttagtgctcccgattcaagctttccccaaacctggaggaagccaagacaaatctctacataatagagaattaagtgcagaaagacctttgaatgaacagattgctgaagcagaagaagacaagattaaaaaaacatatcctccagaaaacaagccaggtcagagcaactattcttttgttgataacttgaacctgctaaaggcaataacagaaaaggaaaaaattgagaaagaaagacaatctataagaagctccccacttgataataagttgaatgtggaagatgttgattcaaccaagaatcgaaaactgatcgatgattatgactctactaagagtggattggatcataaatttcaagatgatccagatggtcttcatcaactagacgggactcctttaaccgctgaagacattgtccataaaatcgctgccaggatttatgaagaaaatgacagagccgtgtttgacaagattgtttctaaactacttaatctcggccttatcacagaaagccaagcacatacactggaagatgaagtagcagaggttttacaaaaattaatctcaaaggaagccaacaattatgaggaggatcccaataagcccacaagctggactgagaatcaggctggaaaaataccagagaaagtgactccaatggcagcaattcaagatggtcttgctaagggagaaaacgatgaaacagtatctaacacattaaccttgacaaatggcttggaaaggagaactaaaacctacagtgaagacaactttgaggaactccaatatttcccaaatttctatgcgctactgaaaagtattgattcagaaaaagaagcaaaagagaaagaaacactgattactatcatgaaaacactgattgactttgtgaagatgatggtgaaatatggaacaatatctccagaagaaggtgtttcctaccttgaaaacttggatgaaatgattgctcttcagaccaaaaacaagctagaaaaaaatgctactgacaatataagcaagcttttcccagcaccatcagagaagagtcatgaagaaacagacagtaccaaggaagaagcagctaagatggaaaaggaatatggaagcttgaaggattccacaaaagatgataactccaacccaggaggaaagacagatgaacccaaaggaaaaacagaagcctatttggaagccatcagaaaaaatattgaatggttgaagaaacatgacaaaaagggaaataaagaagattatgacctttcaaagatgagagacttcatcaataaacaagctgatgcttatgtggagaaaggcatccttgacaaggaagaagccgaggccatcaagcgcatttatagcagcctgtaaaaatggcaaaagatccaggagtctttcaactgtttcagaaaacataatatagcttaaaacacttctaattctgtgattaaaattttttgacccaagggttattagaaagtgctgaatttacagtagttaaccttttacaagtggttaaaacatagctttcttcccgtaaaaactatctgaaagtaaagttgtatgtaagctgagattttgtatacagaatccttatttcctcatagacttatattttataatcagaatatgttgctttgaaaaagcctctaatggactgaccttaaaactcatccttcttccactgtctcatccacataagcactccccgaagaattaagggggttctgttttcaaggcatgccaagtactaaagcaccttgcagagcgtgtctattacaagatgtcatttccaccagcagttcccttaggggagctgaaataaattcacattttctcaaagtctcatagctttggaggagccatctgcttttttggctgctctttttagctggctttttattaggctcagtgacataaaaaggatccaggtaaatgggtataggatttgctggatttactaacaatttccccctgttcttaacacttcctattagtgacttttcagacattgagtttacttataaagagagatatttatgtactctctaagaagacaaatgaggtcataaacactgcataaagcaaggcaaaaatgtatgccacatctcagttatctaaactagattagatccaagccaagttttctcaacagagagcaaagggccaggcagtaaggtagaaatagagataaaaatcattccttccttgtgatccaaagctggtcgagcagctttcctggaggaaaaggttaatgaacttcaggtccctgcaactcagcccccaccacaaacacagccctggaaacatacagtggcgcaaggtcctcttgaaatgttaatggttaatgttcccaaaccagagaatgctttgaaaatgtatcattcagtgtaaattaattacatacatatttttctatatatttgtttcaaactgtaaaaataacataatatgtaatttgtgtattagtgagaggtgaagccagctggacttcctgggtcgagtggggccttggagaacttttctgtcttacaagaggattgtaaaatgcacccatcagtgctctgtaaaacacaccaatcagcgctctgtagctagcaataggtttgtaaaatgcacccatcagcactctgtaaaacgcaccaatcagcactctgtaaaatgcaccaatcagcaggattctaaaagtagacaatcacagggaggattgaaaaaaagggcactctgatagggcaaaaacggaacatgggaggggacaaataagggaataaaatctggccaccccagccagcagcagcaacctgttcaggtcgcctgccgctgtggaagctttgtccttttgctcttcataataaaccttgctactgttcactctt

SEQ ID NO: 18446 - DNA, 2163 bp, Homo sapiens
  source 1..2163: mol_type = unassigned DNA
gtctccgcgtcacaggaacttcagcacccacagggcggacagcgctcccctctacctggagacttgactcccgcgcgccccaaccctgcttatcccttgaccgtcgagtgtcagagatcctgcagccgcccagtcccggcccctctcccgccccacacccaccctcctggctcttcctgtttttactcctccttttcattcataacaaaagctacagctccaggagcccagcgccgggctgtgacccaagccgagcgtggaagaatggggttcctcgggaccggcacttggattctggtgttagtgctcccgattcaagctttccccaaacctggaggaagccaagattgctgaagcagaagaagacaagattaaaaaaacatatcctccagaaaacaagccaggtcagagcaactattcttttgttgataacttgaacctgctaaaggcaataacagaaaaggaaaaaattgagaaagaaagacaatctataagaagctccccacttgataataagttgaatgtggaagatgttgattcaaccaagaatcgaaaactgatcgatgattatgactctactaagagtggattggatcataaatttcaagatgatccagatggtcttcatcaactagacgggactcctttaaccgctgaagacattgtccataaaatcgctgccaggatttatgaagaaaatgacagagccgtgtttgacaagattgtttctaaactacttaatctcggccttatcacagaaagccaagcacatacactggaagatgaagtagcagaggttttacaaaaattaatctcaaaggaagccaacaattatgaggaggatcccaataagcccacaagctggactgagaatcaggctggaaaaataccagagaaagtgactccaatggcagcaattcaagatggtcttgctaagggagaaaacgatgaaacagtatctaacacattaaccttgacaaatggcttggaaaggagaactaaaacctacagtgaagacaactttgaggaactccaatatttcccaaatttctatgcgctactgaaaagtattgattcagaaaaagaagcaaaagagaaagaaacactgattactatcatgaaaacactgattgactttgtgaagatgatggtgaaatatggaacaatatctccagaagaaggtgtttcctaccttgaaaacttggatgaaatgattgctcttcagaccaaaaacaagctagaaaaaaatgctactgacaatataagcaagcttttcccagcaccatcagagaagagtcatgaagaaacagacagtaccaaggaagaagcagctaagatggaaaaggaatatggaagcttgaaggattccacaaaagatgataactccaacccaggaggaaagacagatgaacccaaaggaaaaacagaagcctatttggaagccatcagaaaaaatattgaatggttgaagaaacatgacaaaaagggaaataaagaagattatgacctttcaaagatgagagacttcatcaataaacaagctgatgcttatgtggagaaaggcatccttgacaaggaagaagccgaggccatcaagcgcatttatagcagcctgtaaaaatggcaaaagatccaggagtctttcaactgtttcagaaaacataatatagcttaaaacacttctaattctgtgattaaaattttttgacccaagggttattagaaagtgctgaatttacagtagttaaccttttacaagtggttaaaacatagctttcttcccgtaaaaactatctgaaagtaaagttgtatgtaagctgagattttgtatacagaatccttatttcctcatagacttatattttataatcagaatatgttgctttgaaaaagcctctaatggactgaccttaaaactcatccttcttccactgtctcatccacataagcactccccgaagaattaagggggttctgttttcaaggcatgccaagtactaaagcaccttgcagagcgtgtctattacaagatgtcatttccaccagcagttcccttaggggagctgaaataaattcacattttctcaaagtctcatagctttggaggagccatctgcttttttggctgctctttttagctggctttttattaggctcagtgac

SEQ ID NO: 18447 - DNA, 896 bp, Homo sapiens
  source 1..896: mol_type = unassigned DNA
agcgctcccctctacctggagacttgactcccgcgcgccccaaccctgcttatcccttgaccgtcgagtgtcagagatcctgcagccgcccagtcccggcccctctcccgccccacacccaccctcctggctcttcctgtttttactcctccttttcattcataacaaaagctacagctccaggagcccagcgccgggctgtgacccaagccgagcgtggaagaatggggttcctcgggaccggcacttggattctggtgttagtgctcccgattcaagctttccccaaacctggaggaagccaagattgctgaagcagaagaagacaagattaaaaaaacatatcctccagaaaacaagccaggtcagagcaactattcttttgttgataacttgaacctgctaaaggcaataacagaaaaggaaaaaattgagaaagaaagacaatctataagaagctccccacttgataataagttgaatgtggaagatgttgattcaaccaagaatcgaaaactgatcgatgattatgactctactaagagtggattggatcataaatttcaagatcacagaaagccaagcacatacactggaagatgaagtagcagaggttttacaaaaattaatctcaaaggaagccaacaattatgaggaggatcccaataagcccacaagctggactgagaatcaggctggaaaaataccagagaaagtgactccaatggcagcaattcaagatggtcttgctaagggagaaaacgatgaaacagtatctaacacattaaccttgacaaatggcttggaaaggagaactaaaacctacagtgaagacaactttgaggaactccaatatttcccaaatttctatgcgctactgaaaagtattgattcag

SEQ ID NO: 18448 - DNA, 1447 bp, Homo sapiens
  source 1..1447: mol_type = unassigned DNA
cagcgacgccacggccagcagcgctcgcgtcctccccagcaacagttactcaaagctaatcagatagcgaaagaagcaggagagcaagtcaagaaatacggtgaaggagtccttcccaaagttgtctaggtccttccgcgccggtgcctggtcttcgtcgtcaacaccatggacagctcccgggaaccgactctggggcgcttggacgccgctggcttctggcaggtctggcagcgctttgatgcggatgaaaaaggttacatagaagagaaggaactcgatgctttctttctccacatgttgatgaaactgggtactgatgacacggtcatgaaagcaaatttgcacaaggtgaaacagcagtttatgactacccaagatgcctctaaagatggtcgcattcggatgaaagagcttgctggtatgttcttatctgaggatgaaaactttcttctgctctttcgccgggaaaacccactggacagcagcgtggagtttatgcagatttggcgcaaatatgacgctgacagcagtggctttatatcagctgctgagctccgcaacttcctccgagacctctttcttcaccacaaaaaggccatttctgaggctaaactggaagaatacactggcaccatgatgaagatttttgacagaaataaagatggtcggttggatctaaatgacttagcaaggattctggctcttcaggaaaacttccttctccaatttaaaatggatgcttgttctactgaagaaaggaaaagggactttgagaaaatctttgcctactatgatgttagtaaaacaggagccctggaaggcccagaagtggatgggtttgtcaaagacatgatggagcttgtccagcccagcatcagcggggtggaccttgataagttccgcgagattctcctgcgtcactgcgacgtgaacaaggatggaaaaattcagaagtctgagctggctttgtgtcttgggctgaaaatcaacccataatcccagactgctttgccttttgctcttactatgtttctgtgatcttgctggtagaattgtatctgtgcattgatgttgggaacacagtgggcaaactcacaaatggtgtgctattcttgggcaagaacagggacgctagggccttccttccaccggcgtgatctatccctgtctcactgaaagcccctgtgtagtgtctgtgttgttttcccttgaccctgggctttcctatcctcccaaagactcagctcccctgttagatggctctgcctgtccttccccagtcaccagggtgggggggacaggggcagctgagtgcattcattttgtgcttttcttgtgggctttctgcttagtctgaaaggtgtgtggcattcatggcaatcctgtaacttcaacatagatttttttgtgtgtgtggaaataaatctgcaattggaaacaaaaa

SEQ ID NO: 18449 - DNA, 1402 bp, Homo sapiens
  source 1..1402: mol_type = unassigned DNA
cagccgctggttttgctgagggctgagggacggctcagcgacgccacggccagcagcgctcgcgtcctccccagcaacagttactcaaagctaatcagatagcgaaagaagcaggagagcaagtcaagaaatacggtgaaggagtccttcccaaagttgtctaggtccttccgcgccggtgcctggtcttcgtcgtcaacaccatggacagctcccgggaaccgactctggggcgcttggacgccgctggcttctggcaggtctggcagcgctttgatgcggatggacacggtcatgaaagcaaatttgcacaaggtgaaacagcagtttatgactacccaagatgcctctaaagatggtcgcattcggatgaaagagcttgctggtatgttcttatctgaggatgaaaactttcttctgctctttcgccgggaaaacccactggacagcagcgtggagtttatgcagatttggcgcaaatatgacgctgacagcagtggctttatatcagctgctgagctccgcaacttcctccgagacctctttcttcaccacaaaaaggccatttctgaggctaaactggaagaatacactggcaccatgatgaagatttttgacagaaataaagatggtcggttggatctaaatgacttagcaaggattctggctcttcaggaaaacttccttctccaatttaaaatggatgcttgttctactgaagaaaggaaaagggactttgagaaaatctttgcctactatgatgttagtaaaacaggagccctggaaggcccagaagtggatgggtttgtcaaagacatgatggagcttgtccagcccagcatcagcggggtggaccttgataagttccgcgagattctcctgcgtcactgcgacgtgaacaaggatggaaaaattcagaagtctgagctggctttgtgtcttgggctgaaaatcaacccataatcccagactgctttgccttttgctcttactatgtttctgtgatcttgctggtagaattgtatctgtgcattgatgttgggaacacagtgggcaaactcacaaatggtgtgctattcttgggcaagaacagggacgctagggccttccttccaccggcgtgatctatccctgtctcactgaaagcccctgtgtagtgtctgtgttgttttcccttgaccctgggctttcctatcctcccaaagactcagctcccctgttagatggctctgcctgtccttccccagtcaccagggtgggggggacaggggcagctgagtgcattcattttgtgcttttcttgtgggctttctgcttagtctgaaaggtgtgtggcattcatggcaatcctgtaacttcaacatagatttttttgtgtgtgtggaaataaatctgcaattgg

SEQ ID NO: 18450 - DNA, 704 bp, Homo sapiens
  source 1..704: mol_type = unassigned DNA
atggacagctcccgggaaccgactctggggcgcttggacgccgctggcttctggcaggtctggcagcgctttgatgcggatggacacggtcatgaaagcaaatttgcacaaggtgaaacagcagtttatgactacccaagatgcctctaaagatggtcgcattcggatgaaagagcttgctggtatgttcttatctgaggatgaaaactttcttctgctctttcgccgggaaaacccactggacagcagcgtggagtttatgcagatttggcgcaaatatgacgctgacagcagtggctttatatcagctgctgagctccgcaacttcctccgagacctctttcttcaccacaaaaaggccatttctgaggctaaactggaagaatacactggcaccatggattctggctcttcaggaaaacttccttctccaatttaaaatggatgcttgttctactgaagaaaggaaaagggactttgagaaaatctttgcctactatgatgttagtaaaacaggagccctggaaggcccagaagtggatgggtttgtcaaagacatgatggagcttgtccagcccagcatcagcggggtggaccttgataagttccgcgagattctcctgcgtcactgcgacgtgaacaaggatggaaaaattcagaagtctgagctggctttgtgtcttgggctgaaaatcaacccataa

SEQ ID NO: 18451 - DNA, 1436 bp, Homo sapiens
  source 1..1436: mol_type = unassigned DNA
gcttttatgagctgtaacactcaccgcgaaggtccgcagcttcactcctgaagccagcgagaccacgagcctactgggaggaacgaacaactcccgacgcgccgccttaagagctgtaacactcaccgcgaaggtctgcagcttcactcctgagccagcgagaccacgaacccaccagaaggaaaaaactccgaacacatctgaacatcagaagcaacaaactccggacacgccgcctttaagaactgtaacactcactgcgagggtccgcggcttcattcttgaagtgagtgagaccaagaacccaccagttctggacacaatttcaagtcctcaggtgccatcaatattctgaaaatggcagtgatttttattcaacctgtataaggcactttcaccatgtacctggaagcaacatctacatctttttcagcaatctagatgctggggacacaaggtccaccttccaggaatatggccatgacaccagaaatcacaaacatgatgagaatggaatgactggggaagaagtgccagatgcttcacttgtaaatgaagacccagcctctggggatgcagataccacctccctgaagaagctgaatatctgcagataagtggagttcaccaatgatgaggagcgggatggagaaaggaggtagggagagtcatccaaggaacatgagcaacatgttaaaagccaagtggtttaatttctggagatggtgaacccaagaggctctgctgggagacaacaaaaataatgaagaattgaaccagagtccggtgaatatcagcactgggaccagttagcagaggaaaaggaaagaataaaagcgaaaagaatgaagagtcatatgattaccaacttttcctttttcatataaattgagtgtatatgggtctggaacaacctgaatttccatcaagtcctggctaacctcattatgtcctatgaatatttttgactaatcccactttacattaatctgtattgtgaatgtggatattgaattatatttctttgtaatcccattatccaaaatccagttcagagactattagttaccaatgttcactgtgaaggaaaaaaaaaaaaaaaaagctcagaggataaacatgtgatatggtttggctgtgtccccacccaaatatcatcttgaattgtagctcccataattcccacgtgttgtgggagggacccggtgggagataattgtatcatgggggtggttcccccatactattctcatagtagtgaataagtctcacaaaatctgatggttttatgagggaaaacccctttcacctggttctcattctcttctctggtctgtcgtcatgtaagacatgcctttcaccttctccaccatgactgtgaggcctccccagccacgtggaactgtgagcccattaaacctctttcacttataaat

SEQ ID NO: 18452 - DNA, 12903 bp, Homo sapiens
  source 1..12903: mol_type = unassigned DNA
tactgcagaggtctctggtgcatgtgtgtatgtgtgcgtttgtgtgtgtttgtgtgtctgtgtgttctgccccagtgagactgcagcccttgtaaatactttgacaccttttgcaagaaggaatctgaacaattgcaactgaaggcacattgttatcatctcgtctttgggtgatgctgttcctcactgcagatggataattttccttttaatcaggaatttcatatgcagaataaatggtaattaaaatgtgcaggatgacaagatggagcaaacagtgcttgtaccaccaggacctgacagcttcaacttcttcaccagagaatctcttgcggctattgaaagacgcattgcagaagaaaaggcaaagaatcccaaaccagacaaaaaagatgacgacgaaaatggcccaaagccaaatagtgacttggaagctggaaagaaccttccatttatttatggagacattcctccagagatggtgtcagagcccctggaggacctggacccctactatatcaataagaaaacttttatagtattgaataaagggaaggccatcttccggttcagtgccacctctgccctgtacattttaactcccttcaatcctcttaggaaaatagctattaagattttggtacattcctacattattcagcatgctaattatgtgcactattttgacaaactgtgtgtttatgacaatgagtaaccctcctgattggacaaagaatgtagaatacaccttcacaggaatatatacttttgaatcacttataaaaattattgcaaggggattctgtttagaagattttactttccttcgggatccatggaactggctcgatttcactgtcattacatttgcgtacgtcacagagtttgtggacctgggcaatgtctcggcattgagaacattcagagttctccgagcattgaagacgatttcagtcattccaggcctgaaaaccattgtgggagccctgatccagtctgtgaagaagctctcagatgtaatgatcctgactgtgttctgtctgagcgtatttgctctaattgggctgcagctgttcatgggcaacctgaggaataaatgtatacaatggcctcccaccaatgcttccttggaggaacatagtatagaaaagaatataactgtgaattataatggtacacttataaatgaaactgtctttgagtttgactggaagtcatatattcaagattcaagatatcattatttcctggagggttttttagatgcactactatgtggaaatagctctgatgcaggccaatgtccagagggatatatgtgtgtgaaagctggtagaaatcccaattatggctacacaagctttgataccttcagttgggcttttttgtccttgtttcgactaatgactcaggacttctgggaaaatctttatcaactgacattacgtgctgctgggaaaacgtacatgatattttttgtattggtcattttcttgggctcattctacctaataaatttgatcctggctgtggtggccatggcctacgaggaacagaatcaggccaccttggaagaagcagaacagaaagaggccgaatttcagcagatgattgaacagcttaaaaagcaacaggaggcagctcagcaggcagcaacggcaactgcctcagaacattccagagagcccagtgcagcaggcaggctctcagacagctcatctgaagcctctaagttgagttccaagagtgctaaggaaagaagaaatcggaggaagaaaagaaaacagaaagagcagtctggtggggaagagaaagatgaggatgaattccaaaaatctgaatctgaggacagcatcaggaggaaaggttttcgcttctccattgaagggaaccgattgacatatgaaaagaggtactcctccccacaccagtctttgttgagcatccgtggctccctattttcaccaaggcgaaatagcagaacaagccttttcagctttagagggcgagcaaaggatgtgggatctgagaacgacttcgcagatgatgagcacagcacctttgaggataacgagagccgtagagattccttgtttgtgccccgacgacacggagagagacgcaacagcaacctgagtcagaccagtaggtcatcccggatgctggcagtgtttccagcgaatgggaagatgcacagcactgtggattgcaatggtgtggtttccttggttggtggaccttcagttcctacatcgcctgttggacagcttctgccagaggtgataatagataagccagctactgatgacaatggaacaaccactgaaactgaaatgagaaagagaaggtcaagttctttccacgtttccatggactttctagaagatccttcccaaaggcaacgagcaatgagtatagccagcattctaacaaatacagtagaagaacttgaagaatccaggcagaaatgcccaccctgttggtataaattttccaacatattcttaatctgggactgttctccatattggttaaaagtgaaacatgttgtcaacctggttgtgatggacccatttgttgacctggccatcaccatctgtattgtcttaaatactcttttcatggccatggagcactatccaatgacggaccatttcaataatgtgcttacagtaggaaacttggttttcactgggatctttacagcagaaatgtttctgaaaattattgccatggatccttactattatttccaagaaggctggaatatctttgacggttttattgtgacgcttagcctggtagaacttggactcgccaatgtggaaggattatctgttctccgttcatttcgattgctgcgagttttcaagttggcaaaatcttggccaacgttaaatatgctaataaagatcatcggcaattccgtgggggctctgggaaatttaaccctcgtcttggccatcatcgtcttcatttttgccgtggtcggcatgcagctctttggtaaaagctacaaagattgtgtctgcaagatcgccagtgattgtcaactcccacgctggcacatgaatgacttcttccactccttcctgattgtgttccgcgtgctgtgtggggagtggatagagaccatgtgggactgtatggaggttgctggtcaagccatgtgccttactgtcttcatgatggtcatggtgattggaaacctagtggtcctgaatctctttctggccttgcttctgagctcatttagtgcagacaaccttgcagccactgatgatgataatgaaatgaataatctccaaattgctgtggataggatgcacaaaggagtagcttatgtgaaaagaaaaatatatgaatttattcaacagtccttcattaggaaacaaaagattttagatgaaattaaaccacttgatgatctaaacaacaagaaagacagttgtatgtccaatcatacagcagaaattgggaaagatcttgactatcttaaagatgtaaatggaactacaagtggtataggaactggcagcagtgttgaaaaatacattattgatgaaagtgattacatgtcattcataaacaaccccagtcttactgtgactgtaccaattgctgtaggagaatctgactttgaaaatttaaacacggaagactttagtagtgaatcggatctggaagaaagcaaagagaaactgaatgaaagcagtagctcatcagaaggtagcactgtggacatcggcgcacctgtagaagaacagcccgtagtggaacctgaagaaactcttgaaccagaagcttgtttcactgaaggctgtgtacaaagattcaagtgttgtcaaatcaatgtggaagaaggcagaggaaaacaatggtggaacctgagaaggacgtgtttccgaatagttgaacataactggtttgagaccttcattgttttcatgattctccttagtagtggtgctctggcatttgaagatatatatattgatcagcgaaagacgattaagacgatgttggaatatgctgacaaggttttcacttacattttcattctggaaatgcttctaaaatgggtggcatatggctatcaaacatatttcaccaatgcctggtgttggctggacttcttaattgttgatgtttcattggtcagtttaacagcaaatgccttgggttactcagaacttggagccatcaaatctctcaggacactaagagctctgagacctctaagagccttatctcgatttgaagggatgagggtggttgtgaatgcccttttaggagcaattccatccatcatgaatgtgcttctggtttgtcttatattctggctaattttcagcatcatgggcgtaaatttgtttgctggcaaattctaccactgtattaacaccacaactggtgacaggtttgacatcgaagacgtgaataatcatactgattgcctaaaactaatagaaagaaatgagactgctcgatggaaaaatgtgaaagtaaactttgataatgtaggatttgggtatctctctttgcttcaagttgccacattcaaaggatggatggatataatgtatgcagcagttgattccagaaatgtggaactccagcctaagtatgaagaaagtctgtacatgtatctttactttgttattttcatcatctttgggtccttcttcaccttgaacctgtttattggtgtcatcatagataatttcaaccagcagaaaaagaagtttggaggtcaagacatctttatgacagaagaacagaagaaatactataatgcaatgaaaaaattaggatcgaaaaaaccgcaaaagcctatacctcgaccaggaaacaaatttcaaggaatggtctttgacttcgtaaccagacaagtttttgacataagcatcatgattctcatctgtcttaacatggtcacaatgatggtggaaacagatgaccagagtgaatatgtgactaccattttgtcacgcatcaatctggtgttcattgtgctatttactggagagtgtgtactgaaactcatctctctacgccattattattttaccattggatggaatatttttgattttgtggttgtcattctctccattgtaggtatgtttcttgccgagctgatagaaaagtatttcgtgtcccctaccctgttccgagtgatccgtcttgctaggattggccgaatcctacgtctgatcaaaggagcaaaggggatccgcacgctgctctttgctttgatgatgtcccttcctgcgttgtttaacatcggcctcctactcttcctagtcatgttcatctacgccatctttgggatgtccaactttgcctatgttaagagggaagttgggatcgatgacatgttcaactttgagacctttggcaacagcatgatctgcctattccaaattacaacctctgctggctgggatggattgctagcacccattctcaacagtaagccacccgactgtgaccctaataaagttaaccctggaagctcagttaagggagactgtgggaacccatctgttggaattttcttttttgtcagttacatcatcatatccttcctggttgtggtgaacatgtacatcgcggtcatcctggagaacttcagtgttgctactgaagaaagtgcagagcctctgagtgaggatgactttgagatgttctatgaggtttgggagaagtttgatcccgatgcaactcagttcatggaatttgaaaaattatctcagtttgcagctgcgcttgaaccgcctctcaatctgccacaaccaaacaaactccagctcattgccatggatttgcccatggtgagtggtgaccggatccactgtcttgatatcttatttgcttttacaaagcgggttctaggagagagtggagagatggatgctctacgaatacagatggaagagcgattcatggcttccaatccttccaaggtctcctatcagccaatcactactactttaaaacgaaaacaagaggaagtatctgctgtcattattcagcgtgcttacagacgccaccttttaaagcgaactgtaaaacaagcttcctttacgtacaataaaaacaaaatcaaaggtggggctaatcttcttataaaagaagacatgataattgacagaataaatgaaaactctattacagaaaaaactgatctgaccatgtccactgcagcttgtccaccttcctatgaccgggtgacaaagccaattgtggaaaaacatgagcaagaaggcaaagatgaaaaagccaaagggaaataaatgaaaataaataaaaataattgggtgacaaattgtttacagcctgtgaaggtgatgtatttttatcaacaggactcctttaggaggtcaatgccaaactgactgtttttacacaaatctccttaaggtcagtgcctacaataagacagtgaccccttgtcagcaaactgtgactctgtgtaaaggggagatgaccttgacaggaggttactgttctcactaccagctgacactgctgaagataagatgcacaatggctagtcagactgtagggaccagtttcaaggggtgcaaacctgtgattttggggttgtttaacatgaaacactttagtgtagtaattgtatccactgtttgcatttcaactgccacatttgtcacatttttatggaatctgttagtggattcatctttttgttaatccatgtgtttattatatgtgactatttttgtaaacgaagtttctgttgagaaataggctaaggacctctataacaggtatgccacctggggggtatggcaaccacatggccctcccagctacacaaagtcgtggtttgcatgagggcatgctgcacttagagatcatgcatgagaaaaagtcacaagaaaaacaaattcttaaatttcaccatatttctgggaggggtaattgggtgataagtggaggtgctttgttgatcttgttttgcgaaatccagcccctagaccaagtagattatttgtgggtaggccagtaaatcttagcaggtgcaaacttcattcaaatgtttggagtcataaatgttatgtttctttttgttgtattaaaaaaaaaacctgaatagtgaatattgcccctcaccctccaccgccagaagactgaattgaccaaaattactctttataaatttctgctttttcctgcactttgtttagccatcttcggctctcagcaaggttgacactgtatatgttaatgaaatgctatttattatgtaaatagtcattttaccctgtggtgcacgtttgagcaaacaaataatgacctaagcacagtatttattgcatcaaatatgtaccacaagaaatgtagagtgcaagctttacacaggtaataaaatgtattctgtaccatttatagatagtttggatgctatcaatgcatgtttatattaccatgctgctgtatctggtttctctcactgctcagaatctcatttatgagaaaccatatgtcagtggtaaagtcaaggaaattgttcaacagatctcatttatttaagtcattaagcaatagtttgcagcactttaacagctttttggttatttttacattttaagtggataacatatggtatatagccagactgtacagacatgtttaaaaaaacacactgcttaacctattaaatatgtgtttagaattttataagcaaatataaatactgtaaaaagtcactttattttatttttcagcattatgtacataaatatgaagaggaaattatcttcaggttgatatcacaatcacttttcttactttctgtccatagtactttttcatgaaagaaatttgctaaataagacatgaaaacaagactgggtagttgtagatttctgctttttaaattacatttgctaattttagattatttcacaattttaaggagcaaaataggttcacgattcatatccaaattatgctttgcaattggaaaagggtttaaaattttatttatatttctggtagtacctgcactaactgaattgaaggtagtgcttatgttatttttgttctttttttctgacttcggtttatgttttcatttctttggagtaatgctgctctagattgttctaaatagaatgtgggcttcataatttttttttccacaaaaacagagtagtcaacttatatagtcaattacatcaggacattttgtgtttcttacagaagcaaaccataggctcctcttttccttaaaactacttagataaactgtattcgtgaactgcatgctggaaaatgctactattatgctaaataatgctaaccaacatttaaaatgtgcaaaactaataaagattacattttttattttattgtttgcccagtcactttttgttaacagaatattctaatgatatggagattttttacattacaaattgggggagaaggggagcgcgcgcgcacacacacacacacacacacacacacacacacacacacagaggcatacccacgttgacaacaaaacctagggtagatatgtcactggaggtagggggtaatgacctcccagaattacaagcagcaggtgtgttctctgttaggaggaagaactggtgtcagaggatagctagtgattctaggaggaagagaagtatggaagccagagtgatggtggatgaccccttgagctatgaaaagaaacccttaaatcatcatttaaaaatttagaattgccatgtgtgtaggatactgtgtttgctcctccagagccactctctctgcttctgcatcattctgtgtgtcccagaagggtgacttctacacattgcaaaaatgggctctcctacctttgagctcccaattggtttggccaatgagaagcaccagtgggaaagcaccagagagagaagattgacataggaatatttcttctccaattccttctttgctgggttggcactggactcattcctccccgaaaagtcatactccaatcagactgcccctcatacaactgaagctactttctctggggtcaggtaatcactcctccccttgctccttcaggtctgctgctgcattgagagtgcttttgtattccttgtagctttctcctaacattgctgacacttttgtaaatgtccccttcatgaaattcttctatatgcctcatttcagcatgccatctgtctcctgcctggctgacacaaggtgattcaacagctcatgaaagtcagcaggaagcaaagatgtgccttgcttcagcttggggtcttaatcttgctaacttttgcagataaagaaaaacagtaactgggggaaccacagtgaagtccagtgcagaattcacagatatcatggaaaggttactcgggtggtccagatagtaaaattaacagtctaaattaatctatctaaatttctgaggaacgagaagccttcccttgtcatcaggtgaagccagaagagggaatatagcctcaaccagaaaagggacagtaattaaaaggcttttcccatccttgtacaatggactgactttgcctcttcataacatcacaatcctaaagcaacacaacaattaattctgatatattagtagctgaaaaaaattcccatttccaactaaggtaggtcagaattataggataaaccctgcagactttttatactacccatccacgccattactcactgttacctttccaaatacaaagagaagaactggtaaaacataatcatataaatctccatattcattttgaaatatttggcatgatattttctgtgctaaaaagtaattattcttcaaagaatgatgaggtcatgtcagtaagacacaggaaccaactagaaggggcttcccactggccaaatctggggcaagttgagcatcaaaataaatgatagtaaaagattataattcattgaataagaatcagcaaatacatactgatgtaagtaaataaggaaaagtacaaatctgtttcttgcagttgaatgttaattaacaattgtagaagaaataacggagttagaaaaatcactatttggcaatcaccctaatgacaattgattcatacaagaatcatcaatgagtattaaaactcatgggtgaaagtttgatgaggaatagggtatttatagcatcttaaagtatctcttctctattaagtagaaaatttaaacagaagaaagtatactttggagaaatacagcagacaataccttcaaagatatcatcaattatgagaccaactgatactatgtgcctcctgataagatatactgaaagggccacattacttcttggtacacagtcaaaattttaaaaccagaatctaactacaaggaaaatcaaattgaggacactctataaaataagtggactgaactccttaaaaatgtcaatgtcatgaaagacaaagaaaggctaaagaattccatgaggtcaaagaactatgacaactaaacacaattctggatggaatatcaaattaaaaaataacagataaataatattattgggaaagttgaataaatttgaatatggactgtttattagttattagtattataatagtgttaattttcctaattttgttaagactagtgtgcctgttccatgaaaatagaaaatgttcttattctctgaaaatgcatgctaaagtatttaggggtgaatgcaacaatgtctgcagctcattcttgaatcagttcaaagaaaaatgagttacatttatatatatatgtatgtatgtaaacagacatagataaaagtatagatgtgtgtgtgtctttagaaaggggaggattttttttttttttttgctgtgtgttactgaagtgcctatgtctgcgtgttcacactatcatattttgtatgccctggactttataatttctaccttcaaaattagatctactgttggtaattaattcaatatatactggttttttaactactattctcatttcctagcagtaatcttcctgaaaagtcacagaaatgattacattccttgttcttcataataatcactgtttaattaaaataagaatattttagaaaagatctgcggcatagtggttaagaccccagtatttgatgctaaacagatctgatttggataacagaaggtggcactttgctgtttaagctggggaccagacactgtgggtataaatagtaattccaaacacagctccacagagcagcacccttatgacaaggttttcatatgtctatagttaagccagaaaattaagaataatgccataaatatttataaagctgaacatatccaagttaaagacctttatcctgaaattgtatcttttagattattttctaaagactaataccatttaatgtttaaatgttctttggaaatgatggtgagaatacgtgataatgggtcattggttttaatattttatttagccaagtggaaaattggcaacctggtgtcggtcctcccatttgtattttactggtgcatgaaatccaaaagtctagtaaccattgggacagacaactctactgcataagtttgtatgtttgtatatctgtatcacaaagcccagacactcgaactatataaacttgtcgcactaaagacagcaaatatgtctggtaattgcatattcttcatgtgtgcactggaatttcttattatataagaaaataaatgtgtttctaaaccaccatgaattgggtactgctgatagtactattcttcctggcacatggaaatatcccactgaggttgtcaatcaatattgatttaatcagtgtggcagcaaaggcactagaggaggaaaatactctagacaatcaagtatagatgggaaaattgcatcaccaagaaattcttaaaatcacaagtggataatttgcaatatcaattgattttactcaactgcttgagtcctttatcattccgttagaacactcctcatatttgcagataactcagcccctcacctcagcaacaagcaagaggacatcattataaacttcctcaatttctttcctatccagtgaaaaatatctaagtcccttttcccttcccttttccttcccttcccttcctttttctttccttccattctcttcctttttccttcctttttctttccttccattctcttcctttttccttcctttttcttactttacctccccctcctacctttccctttctcccttcctccctctctcccttccttcctctctccctctccttccttccttccttcaatccatacttttatatcttttcagagatcaatttttcccattcatttctacattctcagataccttgctccatgacttgttctacttctcttctatctttattctttccctcttgactgatcctttttgtctgcctttgcattttcaaaatcagtttttctaatcttaaaaaataactttgctcaaccctgatgcatctttattcactgtgtcattatctcattatttttaaaggttagtttctaaagccagggctctatactcactaccttcactcttggttaaaattaaaagaaatataggtcccagtgatatttatgggaaaatttgactgtgaataatcttgttgatataaacactttgggttttcaaaatgttatgctagctgttaactttcccagtaacattatgagggaagggctggaaaatacaaaaggtagacataggaaccgagaacaccacccctatggagccaagctatacatactctgtctctggttatcataaatacatctcctatattcaatgcttgcttagaaaggcatgatgtccacggagcaattcaattgttcactgtgatgggtttttttgttttctcctcatggaatgcaacttttatttat

SEQ ID NO: 18453 - DNA, 12874 bp, Homo sapiens
  source 1..12874: mol_type = unassigned DNA
gtggaaactcatggaactgttcctccagattaacacttcaggggttatggaagctggaggaagctgagcttttactacatcttttgggggttatttatccattcacctactgaaggacatcttggttgcttccaggtttgggcaattatgaataaggctgctgtatacatccgtgtgcaggattttgtgtggacataagttttcaactcctttggttaaatcctaaggaatttcatatgcagaataaatggtaattaaaatgtgcaggatgacaagatggagcaaacagtgcttgtaccaccaggacctgacagcttcaacttcttcaccagagaatctcttgcggctattgaaagacgcattgcagaagaaaaggcaaagaatcccaaaccagacaaaaaagatgacgacgaaaatggcccaaagccaaatagtgacttggaagctggaaagaaccttccatttatttatggagacattcctccagagatggtgtcagagcccctggaggacctggacccctactatatcaataagaaaacttttatagtattgaataaagggaaggccatcttccggttcagtgccacctctgccctgtacattttaactcccttcaatcctcttaggaaaatagctattaagattttggtacattcattattcagcatgctaattatgtgcactattttgacaaactgtgtgtttatgacaatgagtaaccctcctgattggacaaagaatgtagaatacaccttcacaggaatatatacttttgaatcacttataaaaattattgcaaggggattctgtttagaagattttactttccttcgggatccatggaactggctcgatttcactgtcattacatttgcgtacgtcacagagtttgtggacctgggcaatgtctcggcattgagaacattcagagttctccgagcattgaagacgatttcagtcattccaggcctgaaaaccattgtgggagccctgatccagtctgtgaagaagctctcagatgtaatgatcctgactgtgttctgtctgagcgtatttgctctaattgggctgcagctgttcatgggcaacctgaggaataaatgtatacaatggcctcccaccaatgcttccttggaggaacatagtatagaaaagaatataactgtgaattataatggtacacttataaatgaaactgtctttgagtttgactggaagtcatatattcaagattcaagatatcattatttcctggagggttttttagatgcactactatgtggaaatagctctgatgcaggccaatgtccagagggatatatgtgtgtgaaagctggtagaaatcccaattatggctacacaagctttgataccttcagttgggcttttttgtccttgtttcgactaatgactcaggacttctgggaaaatctttatcaactgacattacgtgctgctgggaaaacgtacatgatattttttgtattggtcattttcttgggctcattctacctaataaatttgatcctggctgtggtggccatggcctacgaggaacagaatcaggccaccttggaagaagcagaacagaaagaggccgaatttcagcagatgattgaacagcttaaaaagcaacaggaggcagctcaggcagcaacggcaactgcctcagaacattccagagagcccagtgcagcaggcaggctctcagacagctcatctgaagcctctaagttgagttccaagagtgctaaggaaagaagaaatcggaggaagaaaagaaaacagaaagagcagtctggtggggaagagaaagatgaggatgaattccaaaaatctgaatctgaggacagcatcaggaggaaaggttttcgcttctccattgaagggaaccgattgacatatgaaaagaggtactcctccccacaccagtctttgttgagcatccgtggctccctattttcaccaaggcgaaatagcagaacaagccttttcagctttagagggcgagcaaaggatgtgggatctgagaacgacttcgcagatgatgagcacagcacctttgaggataacgagagccgtagagattccttgtttgtgccccgacgacacggagagagacgcaacagcaacctgagtcagaccagtaggtcatcccggatgctggcagtgtttccagcgaatgggaagatgcacagcactgtggattgcaatggtgtggtttccttggttggtggaccttcagttcctacatcgcctgttggacagcttctgccagagggaacaaccactgaaactgaaatgagaaagagaaggtcaagttctttccacgtttccatggactttctagaagatccttcccaaaggcaacgagcaatgagtatagccagcattctaacaaatacagtagaagaacttgaagaatccaggcagaaatgcccaccctgttggtataaattttccaacatattcttaatctgggactgttctccatattggttaaaagtgaaacatgttgtcaacctggttgtgatggacccatttgttgacctggccatcaccatctgtattgtcttaaatactcttttcatggccatggagcactatccaatgacggaccatttcaataatgtgcttacagtaggaaacttggttttcactgggatctttacagcagaaatgtttctgaaaattattgccatggatccttactattatttccaagaaggctggaatatctttgacggttttattgtgacgcttagcctggtagaacttggactcgccaatgtggaaggattatctgttctccgttcatttcgattgctgcgagttttcaagttggcaaaatcttggccaacgttaaatatgctaataaagatcatcggcaattccgtgggggctctgggaaatttaaccctcgtcttggccatcatcgtcttcatttttgccgtggtcggcatgcagctctttggtaaaagctacaaagattgtgtctgcaagatcgccagtgattgtcaactcccacgctggcacatgaatgacttcttccactccttcctgattgtgttccgcgtgctgtgtggggagtggatagagaccatgtgggactgtatggaggttgctggtcaagccatgtgccttactgtcttcatgatggtcatggtgattggaaacctagtggtcctgaatctctttctggccttgcttctgagctcatttagtgcagacaaccttgcagccactgatgatgataatgaaatgaataatctccaaattgctgtggataggatgcacaaaggagtagcttatgtgaaaagaaaaatatatgaatttattcaacagtccttcattaggaaacaaaagattttagatgaaattaaaccacttgatgatctaaacaacaagaaagacagttgtatgtccaatcatacagcagaaattgggaaagatcttgactatcttaaagatgtaaatggaactacaagtggtataggaactggcagcagtgttgaaaaatacattattgatgaaagtgattacatgtcattcataaacaaccccagtcttactgtgactgtaccaattgctgtaggagaatctgactttgaaaatttaaacacggaagactttagtagtgaatcggatctggaagaaagcaaagagaaactgaatgaaagcagtagctcatcagaaggtagcactgtggacatcggcgcacctgtagaagaacagcccgtagtggaacctgaagaaactcttgaaccagaagcttgtttcactgaaggctgtgtacaaagattcaagtgttgtcaaatcaatgtggaagaaggcagaggaaaacaatggtggaacctgagaaggacgtgtttccgaatagttgaacataactggtttgagaccttcattgttttcatgattctccttagtagtggtgctctggcatttgaagatatatatattgatcagcgaaagacgattaagacgatgttggaatatgctgacaaggttttcacttacattttcattctggaaatgcttctaaaatgggtggcatatggctatcaaacatatttcaccaatgcctggtgttggctggacttcttaattgttgatgtttcattggtcagtttaacagcaaatgccttgggttactcagaacttggagccatcaaatctctcaggacactaagagctctgagacctctaagagccttatctcgatttgaagggatgagggtggttgtgaatgcccttttaggagcaattccatccatcatgaatgtgcttctggtttgtcttatattctggctaattttcagcatcatgggcgtaaatttgtttgctggcaaattctaccactgtattaacaccacaactggtgacaggtttgacatcgaagacgtgaataatcatactgattgcctaaaactaatagaaagaaatgagactgctcgatggaaaaatgtgaaagtaaactttgataatgtaggatttgggtatctctctttgcttcaagttgccacattcaaaggatggatggatataatgtatgcagcagttgattccagaaatgtggaactccagcctaagtatgaagaaagtctgtacatgtatctttactttgttattttcatcatctttgggtccttcttcaccttgaacctgtttattggtgtcatcatagataatttcaaccagcagaaaaagaagtttggaggtcaagacatctttatgacagaagaacagaagaaatactataatgcaatgaaaaaattaggatcgaaaaaaccgcaaaagcctatacctcgaccaggaaacaaatttcaaggaatggtctttgacttcgtaaccagacaagtttttgacataagcatcatgattctcatctgtcttaacatggtcacaatgatggtggaaacagatgaccagagtgaatatgtgactaccattttgtcacgcatcaatctggtgttcattgtgctatttactggagagtgtgtactgaaactcatctctctacgccattattattttaccattggatggaatatttttgattttgtggttgtcattctctccattgtaggtatgtttcttgccgagctgatagaaaagtatttcgtgtcccctaccctgttccgagtgatccgtcttgctaggattggccgaatcctacgtctgatcaaaggagcaaaggggatccgcacgctgctctttgctttgatgatgtcccttcctgcgttgtttaacatcggcctcctactcttcctagtcatgttcatctacgccatctttgggatgtccaactttgcctatgttaagagggaagttgggatcgatgacatgttcaactttgagacctttggcaacagcatgatctgcctattccaaattacaacctctgctggctgggatggattgctagcacccattctcaacagtaagccacccgactgtgaccctaataaagttaaccctggaagctcagttaagggagactgtgggaacccatctgttggaattttcttttttgtcagttacatcatcatatccttcctggttgtggtgaacatgtacatcgcggtcatcctggagaacttcagtgttgctactgaagaaagtgcagagcctctgagtgaggatgactttgagatgttctatgaggtttgggagaagtttgatcccgatgcaactcagttcatggaatttgaaaaattatctcagtttgcagctgcgcttgaaccgcctctcaatctgccacaaccaaacaaactccagctcattgccatggatttgcccatggtgagtggtgaccggatccactgtcttgatatcttatttgcttttacaaagcgggttctaggagagagtggagagatggatgctctacgaatacagatggaagagcgattcatggcttccaatccttccaaggtctcctatcagccaatcactactactttaaaacgaaaacaagaggaagtatctgctgtcattattcagcgtgcttacagacgccaccttttaaagcgaactgtaaaacaagcttcctttacgtacaataaaaacaaaatcaaaggtggggctaatcttcttataaaagaagacatgataattgacagaataaatgaaaactctattacagaaaaaactgatctgaccatgtccactgcagcttgtccaccttcctatgaccgggtgacaaagccaattgtggaaaaacatgagcaagaaggcaaagatgaaaaagccaaagggaaataaatgaaaataaataaaaataattgggtgacaaattgtttacagcctgtgaaggtgatgtatttttatcaacaggactcctttaggaggtcaatgccaaactgactgtttttacacaaatctccttaaggtcagtgcctacaataagacagtgaccccttgtcagcaaactgtgactctgtgtaaaggggagatgaccttgacaggaggttactgttctcactaccagctgacactgctgaagataagatgcacaatggctagtcagactgtagggaccagtttcaaggggtgcaaacctgtgattttggggttgtttaacatgaaacactttagtgtagtaattgtatccactgtttgcatttcaactgccacatttgtcacatttttatggaatctgttagtggattcatctttttgttaatccatgtgtttattatatgtgactatttttgtaaacgaagtttctgttgagaaataggctaaggacctctataacaggtatgccacctggggggtatggcaaccacatggccctcccagctacacaaagtcgtggtttgcatgagggcatgctgcacttagagatcatgcatgagaaaaagtcacaagaaaaacaaattcttaaatttcaccatatttctgggaggggtaattgggtgataagtggaggtgctttgttgatcttgttttgcgaaatccagcccctagaccaagtagattatttgtgggtaggccagtaaatcttagcaggtgcaaacttcattcaaatgtttggagtcataaatgttatgtttctttttgttgtattaaaaaaaaaacctgaatagtgaatattgcccctcaccctccaccgccagaagactgaattgaccaaaattactctttataaatttctgctttttcctgcactttgtttagccatcttcggctctcagcaaggttgacactgtatatgttaatgaaatgctatttattatgtaaatagtcattttaccctgtggtgcacgtttgagcaaacaaataatgacctaagcacagtatttattgcatcaaatatgtaccacaagaaatgtagagtgcaagctttacacaggtaataaaatgtattctgtaccatttatagatagtttggatgctatcaatgcatgtttatattaccatgctgctgtatctggtttctctcactgctcagaatctcatttatgagaaaccatatgtcagtggtaaagtcaaggaaattgttcaacagatctcatttatttaagtcattaagcaatagtttgcagcactttaacagctttttggttatttttacattttaagtggataacatatggtatatagccagactgtacagacatgtttaaaaaaacacactgcttaacctattaaatatgtgtttagaattttataagcaaatataaatactgtaaaaagtcactttattttatttttcagcattatgtacataaatatgaagaggaaattatcttcaggttgatatcacaatcacttttcttactttctgtccatagtactttttcatgaaagaaatttgctaaataagacatgaaaacaagactgggtagttgtagatttctgctttttaaattacatttgctaattttagattatttcacaattttaaggagcaaaataggttcacgattcatatccaaattatgctttgcaattggaaaagggtttaaaattttatttatatttctggtagtacctgcactaactgaattgaaggtagtgcttatgttatttttgttctttttttctgacttcggtttatgttttcatttctttggagtaatgctgctctagattgttctaaatagaatgtgggcttcataatttttttttccacaaaaacagagtagtcaacttatatagtcaattacatcaggacattttgtgtttcttacagaagcaaaccataggctcctcttttccttaaaactacttagataaactgtattcgtgaactgcatgctggaaaatgctactattatgctaaataatgctaaccaacatttaaaatgtgcaaaactaataaagattacattttttattttattgtttgcccagtcactttttgttaacagaatattctaatgatatggagattttttacattacaaattgggggagaaggggagcgcgcgcgcacacacacacacacacacacacacacacacacacacacagaggcatacccacgttgacaacaaaacctagggtagatatgtcactggaggtagggggtaatgacctcccagaattacaagcagcaggtgtgttctctgttaggaggaagaactggtgtcagaggatagctagtgattctaggaggaagagaagtatggaagccagagtgatggtggatgaccccttgagctatgaaaagaaacccttaaatcatcatttaaaaatttagaattgccatgtgtgtaggatactgtgtttgctcctccagagccactctctctgcttctgcatcattctgtgtgtcccagaagggtgacttctacacattgcaaaaatgggctctcctacctttgagctcccaattggtttggccaatgagaagcaccagtgggaaagcaccagagagagaagattgacataggaatatttcttctccaattccttctttgctgggttggcactggactcattcctccccgaaaagtcatactccaatcagactgcccctcatacaactgaagctactttctctggggtcaggtaatcactcctccccttgctccttcaggtctgctgctgcattgagagtgcttttgtattccttgtagctttctcctaacattgctgacacttttgtaaatgtccccttcatgaaattcttctatatgcctcatttcagcatgccatctgtctcctgcctggctgacacaaggtgattcaacagctcatgaaagtcagcaggaagcaaagatgtgccttgcttcagcttggggtcttaatcttgctaacttttgcagataaagaaaaacagtaactgggggaaccacagtgaagtccagtgcagaattcacagatatcatggaaaggttactcgggtggtccagatagtaaaattaacagtctaaattaatctatctaaatttctgaggaacgagaagccttcccttgtcatcaggtgaagccagaagagggaatatagcctcaaccagaaaagggacagtaattaaaaggcttttcccatccttgtacaatggactgactttgcctcttcataacatcacaatcctaaagcaacacaacaattaattctgatatattagtagctgaaaaaaattcccatttccaactaaggtaggtcagaattataggataaaccctgcagactttttatactacccatccacgccattactcactgttacctttccaaatacaaagagaagaactggtaaaacataatcatataaatctccatattcattttgaaatatttggcatgatattttctgtgctaaaaagtaattattcttcaaagaatgatgaggtcatgtcagtaagacacaggaaccaactagaaggggcttcccactggccaaatctggggcaagttgagcatcaaaataaatgatagtaaaagattataattcattgaataagaatcagcaaatacatactgatgtaagtaaataaggaaaagtacaaatctgtttcttgcagttgaatgttaattaacaattgtagaagaaataacggagttagaaaaatcactatttggcaatcaccctaatgacaattgattcatacaagaatcatcaatgagtattaaaactcatgggtgaaagtttgatgaggaatagggtatttatagcatcttaaagtatctcttctctattaagtagaaaatttaaacagaagaaagtatactttggagaaatacagcagacaataccttcaaagatatcatcaattatgagaccaactgatactatgtgcctcctgataagatatactgaaagggccacattacttcttggtacacagtcaaaattttaaaaccagaatctaactacaaggaaaatcaaattgaggacactctataaaataagtggactgaactccttaaaaatgtcaatgtcatgaaagacaaagaaaggctaaagaattccatgaggtcaaagaactatgacaactaaacacaattctggatggaatatcaaattaaaaaataacagataaataatattattgggaaagttgaataaatttgaatatggactgtttattagttattagtattataatagtgttaattttcctaattttgttaagactagtgtgcctgttccatgaaaatagaaaatgttcttattctctgaaaatgcatgctaaagtatttaggggtgaatgcaacaatgtctgcagctcattcttgaatcagttcaaagaaaaatgagttacatttatatatatatgtatgtatgtaaacagacatagataaaagtatagatgtgtgtgtgtctttagaaaggggaggattttttttttttttttgctgtgtgttactgaagtgcctatgtctgcgtgttcacactatcatattttgtatgccctggactttataatttctaccttcaaaattagatctactgttggtaattaattcaatatatactggttttttaactactattctcatttcctagcagtaatcttcctgaaaagtcacagaaatgattacattccttgttcttcataataatcactgtttaattaaaataagaatattttagaaaagatctgcggcatagtggttaagaccccagtatttgatgctaaacagatctgatttggataacagaaggtggcactttgctgtttaagctggggaccagacactgtgggtataaatagtaattccaaacacagctccacagagcagcacccttatgacaaggttttcatatgtctatagttaagccagaaaattaagaataatgccataaatatttataaagctgaacatatccaagttaaagacctttatcctgaaattgtatcttttagattattttctaaagactaataccatttaatgtttaaatgttctttggaaatgatggtgagaatacgtgataatgggtcattggttttaatattttatttagccaagtggaaaattggcaacctggtgtcggtcctcccatttgtattttactggtgcatgaaatccaaaagtctagtaaccattgggacagacaactctactgcataagtttgtatgtttgtatatctgtatcacaaagcccagacactcgaactatataaacttgtcgcactaaagacagcaaatatgtctggtaattgcatattcttcatgtgtgcactggaatttcttattatataagaaaataaatgtgtttctaaaccaccatgaattgggtactgctgatagtactattcttcctggcacatggaaatatcccactgaggttgtcaatcaatattgatttaatcagtgtggcagcaaaggcactagaggaggaaaatactctagacaatcaagtatagatgggaaaattgcatcaccaagaaattcttaaaatcacaagtggataatttgcaatatcaattgattttactcaactgcttgagtcctttatcattccgttagaacactcctcatatttgcagataactcagcccctcacctcagcaacaagcaagaggacatcattataaacttcctcaatttctttcctatccagtgaaaaatatctaagtcccttttcccttcccttttccttcccttcccttcctttttctttccttccattctcttcctttttccttcctttttctttccttccattctcttcctttttccttcctttttcttactttacctccccctcctacctttccctttctcccttcctccctctctcccttccttcctctctccctctccttccttccttccttcaatccatacttttatatcttttcagagatcaatttttcccattcatttctacattctcagataccttgctccatgacttgttctacttctcttctatctttattctttccctcttgactgatcctttttgtctgcctttgcattttcaaaatcagtttttctaatcttaaaaaataactttgctcaaccctgatgcatctttattcactgtgtcattatctcattatttttaaaggttagtttctaaagccagggctctatactcactaccttcactcttggttaaaattaaaagaaatataggtcccagtgatatttatgggaaaatttgactgtgaataatcttgttgatataaacactttgggttttcaaaatgttatgctagctgttaactttcccagtaacattatgagggaagggctggaaaatacaaaaggtagacataggaaccgagaacaccacccctatggagccaagctatacatactctgtctctggttatcataaatacatctcctatattcaatgcttgcttagaaaggcatgatgtccacggagcaattcaattgttcactgtgatgggtttttttgttttctcctcatggaatgcaacttttatttat

SEQ ID NO: 18454 - DNA, 12506 bp, Homo sapiens
  source 1..12506: mol_type = unassigned DNA
gacacactgctggcctgtggaaactcatggaactgttcctccagattaacacttcaggggttatggaagctggaggaagctgagcttttactacatcttttgggggaatttcatatgcagaataaatggtaattaaaatgtgcaggatgacaagatggagcaaacagtgcttgtaccaccaggacctgacagcttcaacttcttcaccagagaatctcttgcggctattgaaagacgcattgcagaagaaaaggcaaagaatcccaaaccagacaaaaaagatgacgacgaaaatggcccaaagccaaatagtgacttggaagctggaaagaaccttccatttatttatggagacattcctccagagatggtgtcagagcccctggaggacctggacccctactatatcaataagaaaacttttatagtattgaataaagggaaggccatcttccggttcagtgccacctctgccctgtacattttaactcccttcaatcctcttaggaaaatagctattaagattttggtacattcattattcagcatgctaattatgtgcactattttgacaaactgtgtgtttatgacaatgagtaaccctcctgattggacaaagaatgtagaatacaccttcacaggaatatatacttttgaatcacttataaaaattattgcaaggggattctgtttagaagattttactttccttcgggatccatggaactggctcgatttcactgtcattacatttgcgtacgtcacagagtttgtggacctgggcaatgtctcggcattgagaacattcagagttctccgagcattgaagacgatttcagtcattccaggcctgaaaaccattgtgggagccctgatccagtctgtgaagaagctctcagatgtaatgatcctgactgtgttctgtctgagcgtatttgctctaattgggctgcagctgttcatgggcaacctgaggaataaatgtatacaatggcctcccaccaatgcttccttggaggaacatagtatagaaaagaatataactgtgaattataatggtacacttataaatgaaactgtctttgagtttgactggaagtcatatattcaagattcaagatatcattatttcctggagggttttttagatgcactactatgtggaaatagctctgatgcaggccaatgtccagagggatatatgtgtgtgaaagctggtagaaatcccaattatggctacacaagctttgataccttcagttgggcttttttgtccttgtttcgactaatgactcaggacttctgggaaaatctttatcaactgacattacgtgctgctgggaaaacgtacatgatattttttgtattggtcattttcttgggctcattctacctaataaatttgatcctggctgtggtggccatggcctacgaggaacagaatcaggccaccttggaagaagcagaacagaaagaggccgaatttcagcagatgattgaacagcttaaaaagcaacaggaggcagctcagcaggcagcaacggcaactgcctcagaacattccagagagcccagtgcagcaggcaggctctcagacagctcatctgaagcctctaagttgagttccaagagtgctaaggaaagaagaaatcggaggaagaaaagaaaacagaaagagcagtctggtggggaagagaaagatgaggatgaattccaaaaatctgaatctgaggacagcatcaggaggaaaggttttcgcttctccattgaagggaaccgattgacatatgaaaagaggtactcctccccacaccagtctttgttgagcatccgtggctccctattttcaccaaggcgaaatagcagaacaagccttttcagctttagagggcgagcaaaggatgtgggatctgagaacgacttcgcagatgatgagcacagcacctttgaggataacgagagccgtagagattccttgtttgtgccccgacgacacggagagagacgcaacagcaacctgagtcagaccagtaggtcatcccggatgctggcagtgtttccagcgaatgggaagatgcacagcactgtggattgcaatggtgtggtttccttggttggtggaccttcagttcctacatcgcctgttggacagcttctgccagaggtgataatagataagccagctactgatgacaatggaacaaccactgaaactgaaatgagaaagagaaggtcaagttctttccacgtttccatggactttctagaagatccttcccaaaggcaacgagcaatgagtatagccagcattctaacaaatacagtagaagaacttgaagaatccaggcagaaatgcccaccctgttggtataaattttccaacatattcttaatctgggactgttctccatattggttaaaagtgaaacatgttgtcaacctggttgtgatggacccatttgttgacctggccatcaccatctgtattgtcttaaatactcttttcatggccatggagcactatccaatgacggaccatttcaataatgtgcttacagtaggaaacttggttttcactgggatctttacagcagaaatgtttctgaaaattattgccatggatccttactattatttccaagaaggctggaatatctttgacggttttattgtgacgcttagcctggtagaacttggactcgccaatgtggaaggattatctgttctccgttcatttcgattgctgcgagttttcaagttggcaaaatcttggccaacgttaaatatgctaataaagatcatcggcaattccgtgggggctctgggaaatttaaccctcgtcttggccatcatcgtcttcatttttgccgtggtcggcatgcagctctttggtaaaagctacaaagattgtgtctgcaagatcgccagtgattgtcaactcccacgctggcacatgaatgacttcttccactccttcctgattgtgttccgcgtgctgtgtggggagtggatagagaccatgtgggactgtatggaggttgctggtcaagccatgtgccttactgtcttcatgatggtcatggtgattggaaacctagtggtcctgaatctctttctggccttgcttctgagctcatttagtgcagacaaccttgcagccactgatgatgataatgaaatgaataatctccaaattgctgtggataggatgcacaaaggagtagcttatgtgaaaagaaaaatatatgaatttattcaacagtccttcattaggaaacaaaagattttagatgaaattaaaccacttgatgatctaaacaacaagaaagacagttgtatgtccaatcatacagcagaaattgggaaagatcttgactatcttaaagatgtaaatggaactacaagtggtataggaactggcagcagtgttgaaaaatacattattgatgaaagtgattacatgtcattcataaacaaccccagtcttactgtgactgtaccaattgctgtaggagaatctgactttgaaaatttaaacacggaagactttagtagtgaatcggatctggaagaaagcaaagagaaactgaatgaaagcagtagctcatcagaaggtagcactgtggacatcggcgcacctgtagaagaacagcccgtagtggaacctgaagaaactcttgaaccagaagcttgtttcactgaaggctgtgtacaaagattcaagtgttgtcaaatcaatgtggaagaaggcagaggaaaacaatggtggaacctgagaaggacgtgtttccgaatagttgaacataactggtttgagaccttcattgttttcatgattctccttagtagtggtgctctggcatttgaagatatatatattgatcagcgaaagacgattaagacgatgttggaatatgctgacaaggttttcacttacattttcattctggaaatgcttctaaaatgggtggcatatggctatcaaacatatttcaccaatgcctggtgttggctggacttcttaattgttgatgtttcattggtcagtttaacagcaaatgccttgggttactcagaacttggagccatcaaatctctcaggacactaagagctctgagacctctaagagccttatctcgatttgaagggatgagggccacattcaaaggatggatggatataatgtatgcagcagttgattccagaaatgtggaactccagcctaagtatgaagaaagtctgtacatgtatctttactttgttattttcatcatctttgggtccttcttcaccttgaacctgtttattggtgtcatcatagataatttcaaccagcagaaaaagaagtttggaggtcaagacatctttatgacagaagaacagaagaaatactataatgcaatgaaaaaattaggatcgaaaaaaccgcaaaagcctatacctcgaccaggaaacaaatttcaaggaatggtctttgacttcgtaaccagacaagtttttgacataagcatcatgattctcatctgtcttaacatggtcacaatgatggtggaaacagatgaccagagtgaatatgtgactaccattttgtcacgcatcaatctggtgttcattgtgctatttactggagagtgtgtactgaaactcatctctctacgccattattattttaccattggatggaatatttttgattttgtggttgtcattctctccattgtaggtatgtttcttgccgagctgatagaaaagtatttcgtgtcccctaccctgttccgagtgatccgtcttgctaggattggccgaatcctacgtctgatcaaaggagcaaaggggatccgcacgctgctctttgctttgatgatgtcccttcctgcgttgtttaacatcggcctcctactcttcctagtcatgttcatctacgccatctttgggatgtccaactttgcctatgttaagagggaagttgggatcgatgacatgttcaactttgagacctttggcaacagcatgatctgcctattccaaattacaacctctgctggctgggatggattgctagcacccattctcaacagtaagccacccgactgtgaccctaataaagttaaccctggaagctcagttaagggagactgtgggaacccatctgttggaattttcttttttgtcagttacatcatcatatccttcctggttgtggtgaacatgtacatcgcggtcatcctggagaacttcagtgttgctactgaagaaagtgcagagcctctgagtgaggatgactttgagatgttctatgaggtttgggagaagtttgatcccgatgcaactcagttcatggaatttgaaaaattatctcagtttgcagctgcgcttgaaccgcctctcaatctgccacaaccaaacaaactccagctcattgccatggatttgcccatggtgagtggtgaccggatccactgtcttgatatcttatttgcttttacaaagcgggttctaggagagagtggagagatggatgctctacgaatacagatggaagagcgattcatggcttccaatccttccaaggtctcctatcagccaatcactactactttaaaacgaaaacaagaggaagtatctgctgtcattattcagcgtgcttacagacgccaccttttaaagcgaactgtaaaacaagcttcctttacgtacaataaaaacaaaatcaaaggtggggctaatcttcttataaaagaagacatgataattgacagaataaatgaaaactctattacagaaaaaactgatctgaccatgtccactgcagcttgtccaccttcctatgaccgggtgacaaagccaattgtggaaaaacatgagcaagaaggcaaagatgaaaaagccaaagggaaataaatgaaaataaataaaaataattgggtgacaaattgtttacagcctgtgaaggtgatgtatttttatcaacaggactcctttaggaggtcaatgccaaactgactgtttttacacaaatctccttaaggtcagtgcctacaataagacagtgaccccttgtcagcaaactgtgactctgtgtaaaggggagatgaccttgacaggaggttactgttctcactaccagctgacactgctgaagataagatgcacaatggctagtcagactgtagggaccagtttcaaggggtgcaaacctgtgattttggggttgtttaacatgaaacactttagtgtagtaattgtatccactgtttgcatttcaactgccacatttgtcacatttttatggaatctgttagtggattcatctttttgttaatccatgtgtttattatatgtgactatttttgtaaacgaagtttctgttgagaaataggctaaggacctctataacaggtatgccacctggggggtatggcaaccacatggccctcccagctacacaaagtcgtggtttgcatgagggcatgctgcacttagagatcatgcatgagaaaaagtcacaagaaaaacaaattcttaaatttcaccatatttctgggaggggtaattgggtgataagtggaggtgctttgttgatcttgttttgcgaaatccagcccctagaccaagtagattatttgtgggtaggccagtaaatcttagcaggtgcaaacttcattcaaatgtttggagtcataaatgttatgtttctttttgttgtattaaaaaaaaaacctgaatagtgaatattgcccctcaccctccaccgccagaagactgaattgaccaaaattactctttataaatttctgctttttcctgcactttgtttagccatcttcggctctcagcaaggttgacactgtatatgttaatgaaatgctatttattatgtaaatagtcattttaccctgtggtgcacgtttgagcaaacaaataatgacctaagcacagtatttattgcatcaaatatgtaccacaagaaatgtagagtgcaagctttacacaggtaataaaatgtattctgtaccatttatagatagtttggatgctatcaatgcatgtttatattaccatgctgctgtatctggtttctctcactgctcagaatctcatttatgagaaaccatatgtcagtggtaaagtcaaggaaattgttcaacagatctcatttatttaagtcattaagcaatagtttgcagcactttaacagctttttggttatttttacattttaagtggataacatatggtatatagccagactgtacagacatgtttaaaaaaacacactgcttaacctattaaatatgtgtttagaattttataagcaaatataaatactgtaaaaagtcactttattttatttttcagcattatgtacataaatatgaagaggaaattatcttcaggttgatatcacaatcacttttcttactttctgtccatagtactttttcatgaaagaaatttgctaaataagacatgaaaacaagactgggtagttgtagatttctgctttttaaattacatttgctaattttagattatttcacaattttaaggagcaaaataggttcacgattcatatccaaattatgctttgcaattggaaaagggtttaaaattttatttatatttctggtagtacctgcactaactgaattgaaggtagtgcttatgttatttttgttctttttttctgacttcggtttatgttttcatttctttggagtaatgctgctctagattgttctaaatagaatgtgggcttcataatttttttttccacaaaaacagagtagtcaacttatatagtcaattacatcaggacattttgtgtttcttacagaagcaaaccataggctcctcttttccttaaaactacttagataaactgtattcgtgaactgcatgctggaaaatgctactattatgctaaataatgctaaccaacatttaaaatgtgcaaaactaataaagattacattttttattttattgtttgcccagtcactttttgttaacagaatattctaatgatatggagattttttacattacaaattgggggagaaggggagcgcgcgcgcacacacacacacacacacacacacacacacacacacacagaggcatacccacgttgacaacaaaacctagggtagatatgtcactggaggtagggggtaatgacctcccagaattacaagcagcaggtgtgttctctgttaggaggaagaactggtgtcagaggatagctagtgattctaggaggaagagaagtatggaagccagagtgatggtggatgaccccttgagctatgaaaagaaacccttaaatcatcatttaaaaatttagaattgccatgtgtgtaggatactgtgtttgctcctccagagccactctctctgcttctgcatcattctgtgtgtcccagaagggtgacttctacacattgcaaaaatgggctctcctacctttgagctcccaattggtttggccaatgagaagcaccagtgggaaagcaccagagagagaagattgacataggaatatttcttctccaattccttctttgctgggttggcactggactcattcctccccgaaaagtcatactccaatcagactgcccctcatacaactgaagctactttctctggggtcaggtaatcactcctccccttgctccttcaggtctgctgctgcattgagagtgcttttgtattccttgtagctttctcctaacattgctgacacttttgtaaatgtccccttcatgaaattcttctatatgcctcatttcagcatgccatctgtctcctgcctggctgacacaaggtgattcaacagctcatgaaagtcagcaggaagcaaagatgtgccttgcttcagcttggggtcttaatcttgctaacttttgcagataaagaaaaacagtaactgggggaaccacagtgaagtccagtgcagaattcacagatatcatggaaaggttactcgggtggtccagatagtaaaattaacagtctaaattaatctatctaaatttctgaggaacgagaagccttcccttgtcatcaggtgaagccagaagagggaatatagcctcaaccagaaaagggacagtaattaaaaggcttttcccatccttgtacaatggactgactttgcctcttcataacatcacaatcctaaagcaacacaacaattaattctgatatattagtagctgaaaaaaattcccatttccaactaaggtaggtcagaattataggataaaccctgcagactttttatactacccatccacgccattactcactgttacctttccaaatacaaagagaagaactggtaaaacataatcatataaatctccatattcattttgaaatatttggcatgatattttctgtgctaaaaagtaattattcttcaaagaatgatgaggtcatgtcagtaagacacaggaaccaactagaaggggcttcccactggccaaatctggggcaagttgagcatcaaaataaatgatagtaaaagattataattcattgaataagaatcagcaaatacatactgatgtaagtaaataaggaaaagtacaaatctgtttcttgcagttgaatgttaattaacaattgtagaagaaataacggagttagaaaaatcactatttggcaatcaccctaatgacaattgattcatacaagaatcatcaatgagtattaaaactcatgggtgaaagtttgatgaggaatagggtatttatagcatcttaaagtatctcttctctattaagtagaaaatttaaacagaagaaagtatactttggagaaatacagcagacaataccttcaaagatatcatcaattatgagaccaactgatactatgtgcctcctgataagatatactgaaagggccacattacttcttggtacacagtcaaaattttaaaaccagaatctaactacaaggaaaatcaaattgaggacactctataaaataagtggactgaactccttaaaaatgtcaatgtcatgaaagacaaagaaaggctaaagaattccatgaggtcaaagaactatgacaactaaacacaattctggatggaatatcaaattaaaaaataacagataaataatattattgggaaagttgaataaatttgaatatggactgtttattagttattagtattataatagtgttaattttcctaattttgttaagactagtgtgcctgttccatgaaaatagaaaatgttcttattctctgaaaatgcatgctaaagtatttaggggtgaatgcaacaatgtctgcagctcattcttgaatcagttcaaagaaaaatgagttacatttatatatatatgtatgtatgtaaacagacatagataaaagtatagatgtgtgtgtgtctttagaaaggggaggattttttttttttttttgctgtgtgttactgaagtgcctatgtctgcgtgttcacactatcatattttgtatgccctggactttataatttctaccttcaaaattagatctactgttggtaattaattcaatatatactggttttttaactactattctcatttcctagcagtaatcttcctgaaaagtcacagaaatgattacattccttgttcttcataataatcactgtttaattaaaataagaatattttagaaaagatctgcggcatagtggttaagaccccagtatttgatgctaaacagatctgatttggataacagaaggtggcactttgctgtttaagctggggaccagacactgtgggtataaatagtaattccaaacacagctccacagagcagcacccttatgacaaggttttcatatgtctatagttaagccagaaaattaagaataatgccataaatatttataaagctgaacatatccaagttaaagacctttatcctgaaattgtatcttttagattattttctaaagactaataccatttaatgtttaaatgttctttggaaatgatggtgagaatacgtgataatgggtcattggttttaatattttatttagccaagtggaaaattggcaacctggtgtcggtcctcccatttgtattttactggtgcatgaaatccaaaagtctagtaaccattgggacagacaactctactgcataagtttgtatgtttgtatatctgtatcacaaagcccagacactcgaactatataaacttgtcgcactaaagacagcaaatatgtctggtaattgcatattcttcatgtgtgcactggaatttcttattatataagaaaataaatgtgtttctaaaccaccatgaattgggtactgctgatagtactattcttcctggcacatggaaatatcccactgaggttgtcaatcaatattgatttaatcagtgtggcagcaaaggcactagaggaggaaaatactctagacaatcaagtatagatgggaaaattgcatcaccaagaaattcttaaaatcacaagtggataatttgcaatatcaattgattttactcaactgcttgagtcctttatcattccgttagaacactcctcatatttgcagataactcagcccctcacctcagcaacaagcaagaggacatcattataaacttcctcaatttctttcctatccagtgaaaaatatctaagtcccttttcccttcccttttccttcccttcccttcctttttctttccttccattctcttcctttttccttcctttttctttccttccattctcttcctttttccttcctttttcttactttacctccccctcctacctttccctttctcccttcctccctctctcccttccttcctctctccctctccttccttccttccttcaatccatacttttatatcttttcagagatcaatttttcccattcatttctacattctcagataccttgctccatgacttgttctacttctcttctatctttattctttccctcttgactgatcctttttgtctgcctttgcattttcaaaatcagtttttctaatcttaaaaaataactttgctcaaccctgatgcatctttattcactgtgtcattatctcattatttttaaaggttagtttctaaagccagggctctatactcactaccttcactcttggttaaaattaaaagaaatataggtcccagtgatatttatgggaaaatttgactgtgaataatcttgttgatataaacactttgggttttcaaaatgttatgctagctgttaactttcccagtaacattatgagggaagggctggaaaatacaaaaggtagacataggaaccgagaacaccacccctatggagccaagctatacatactctgtctctggttatcataaatacatctcctatattcaatgcttgcttagaaaggcatgatgtccacggagcaattcaattgttcactgtgatgggtttttttgttttctcctcatggaatgcaacttttatttat

SEQ ID NO: 18455 - DNA, 8131 bp, Homo sapiens
  source 1..8131: mol_type = unassigned DNA
gaatttcatatgcagaataaatggtaattaaaatgtgcaggatgacaagatggagcaaacagtgcttgtaccaccaggacctgacagcttcaacttcttcaccagagaatctcttgcggctattgaaagacgcattgcagaagaaaaggcaaagaatcccaaaccagacaaaaaagatgacgacgaaaatggcccaaagccaaatagtgacttggaagctggaaagaaccttccatttatttatggagacattcctccagagatggtgtcagagcccctggaggacctggacccctactatatcaataagaaaacttttatagtattgaataaagggaaggccatcttccggttcagtgccacctctgccctgtacattttaactcccttcaatcctcttaggaaaatagctattaagattttggtacattcattattcagcatgctaattatgtgcactattttgacaaactgtgtgtttatgacaatgagtaaccctcctgattggacaaagaatgtagaatacaccttcacaggaatatatacttttgaatcacttataaaaattattgcaaggggattctgtttagaagattttactttccttcgggatccatggaactggctcgatttcactgtcattacatttgcgtttgtaacagaatttgtaaacctaggcaatttttcagctcttcgcactttcagagtcttgagagctttgaaaactatttcggtaattccaggcctgaaaaccattgtgggagccctgatccagtctgtgaagaagctctcagatgtaatgatcctgactgtgttctgtctgagcgtatttgctctaattgggctgcagctgttcatgggcaacctgaggaataaatgtatacaatggcctcccaccaatgcttccttggaggaacatagtatagaaaagaatataactgtgaattataatggtacacttataaatgaaactgtctttgagtttgactggaagtcatatattcaagattcaagatatcattatttcctggagggttttttagatgcactactatgtggaaatagctctgatgcaggccaatgtccagagggatatatgtgtgtgaaagctggtagaaatcccaattatggctacacaagctttgataccttcagttgggcttttttgtccttgtttcgactaatgactcaggacttctgggaaaatctttatcaactgacattacgtgctgctgggaaaacgtacatgatattttttgtattggtcattttcttgggctcattctacctaataaatttgatcctggctgtggtggccatggcctacgaggaacagaatcaggccaccttggaagaagcagaacagaaagaggccgaatttcagcagatgattgaacagcttaaaaagcaacaggaggcagctcagcaggcagcaacggcaactgcctcagaacattccagagagcccagtgcagcaggcaggctctcagacagctcatctgaagcctctaagttgagttccaagagtgctaaggaaagaagaaatcggaggaagaaaagaaaacagaaagagcagtctggtggggaagagaaagatgaggatgaattccaaaaatctgaatctgaggacagcatcaggaggaaaggttttcgcttctccattgaagggaaccgattgacatatgaaaagaggtactcctccccacaccagtctttgttgagcatccgtggctccctattttcaccaaggcgaaatagcagaacaagccttttcagctttagagggcgagcaaaggatgtgggatctgagaacgacttcgcagatgatgagcacagcacctttgaggataacgagagccgtagagattccttgtttgtgccccgacgacacggagagagacgcaacagcaacctgagtcagaccagtaggtcatcccggatgctggcagtgtttccagcgaatgggaagatgcacagcactgtggattgcaatggtgtggtttccttggttggtggaccttcagttcctacatcgcctgttggacagcttctgccagagggaacaaccactgaaactgaaatgagaaagagaaggtcaagttctttccacgtttccatggactttctagaagatccttcccaaaggcaacgagcaatgagtatagccagcattctaacaaatacagtagaagaacttgaagaatccaggcagaaatgcccaccctgttggtataaattttccaacatattcttaatctgggactgttctccatattggttaaaagtgaaacatgttgtcaacctggttgtgatggacccatttgttgacctggccatcaccatctgtattgtcttaaatactcttttcatggccatggagcactatccaatgacggaccatttcaataatgtgcttacagtaggaaacttggttttcactgggatctttacagcagaaatgtttctgaaaattattgccatggatccttactattatttccaagaaggctggaatatctttgacggttttattgtgacgcttagcctggtagaacttggactcgccaatgtggaaggattatctgttctccgttcatttcgattgctgcgagttttcaagttggcaaaatcttggccaacgttaaatatgctaataaagatcatcggcaattccgtgggggctctgggaaatttaaccctcgtcttggccatcatcgtcttcatttttgccgtggtcggcatgcagctctttggtaaaagctacaaagattgtgtctgcaagatcgccagtgattgtcaactcccacgctggcacatgaatgacttcttccactccttcctgattgtgttccgcgtgctgtgtggggagtggatagagaccatgtgggactgtatggaggttgctggtcaagccatgtgccttactgtcttcatgatggtcatggtgattggaaacctagtggtcctgaatctctttctggccttgcttctgagctcatttagtgcagacaaccttgcagccactgatgatgataatgaaatgaataatctccaaattgctgtggataggatgcacaaaggagtagcttatgtgaaaagaaaaatatatgaatttattcaacagtccttcattaggaaacaaaagattttagatgaaattaaaccacttgatgatctaaacaacaagaaagacagttgtatgtccaatcatacagcagaaattgggaaagatcttgactatcttaaagatgtaaatggaactacaagtggtataggaactggcagcagtgttgaaaaatacattattgatgaaagtgattacatgtcattcataaacaaccccagtcttactgtgactgtaccaattgctgtaggagaatctgactttgaaaatttaaacacggaagactttagtagtgaatcggatctggaagaaagcaaagagaaactgaatgaaagcagtagctcatcagaaggtagcactgtggacatcggcgcacctgtagaagaacagcccgtagtggaacctgaagaaactcttgaaccagaagcttgtttcactgaaggctgtgtacaaagattcaagtgttgtcaaatcaatgtggaagaaggcagaggaaaacaatggtggaacctgagaaggacgtgtttccgaatagttgaacataactggtttgagaccttcattgttttcatgattctccttagtagtggtgctctggcatttgaagatatatatattgatcagcgaaagacgattaagacgatgttggaatatgctgacaaggttttcacttacattttcattctggaaatgcttctaaaatgggtggcatatggctatcaaacatatttcaccaatgcctggtgttggctggacttcttaattgttgatgtttcattggtcagtttaacagcaaatgccttgggttactcagaacttggagccatcaaatctctcaggacactaagagctctgagacctctaagagccttatctcgatttgaagggatgagggtggttgtgaatgcccttttaggagcaattccatccatcatgaatgtgcttctggtttgtcttatattctggctaattttcagcatcatgggcgtaaatttgtttgctggcaaattctaccactgtattaacaccacaactggtgacaggtttgacatcgaagacgtgaataatcatactgattgcctaaaactaatagaaagaaatgagactgctcgatggaaaaatgtgaaagtaaactttgataatgtaggatttgggtatctctctttgcttcaagttgccacattcaaaggatggatggatataatgtatgcagcagttgattccagaaatgtggaactccagcctaagtatgaagaaagtctgtacatgtatctttactttgttattttcatcatctttgggtccttcttcaccttgaacctgtttattggtgtcatcatagataatttcaaccagcagaaaaagaagtttggaggtcaagacatctttatgacagaagaacagaagaaatactataatgcaatgaaaaaattaggatcgaaaaaaccgcaaaagcctatacctcgaccaggaaacaaatttcaaggaatggtctttgacttcgtaaccagacaagtttttgacataagcatcatgattctcatctgtcttaacatggtcacaatgatggtggaaacagatgaccagagtgaatatgtgactaccattttgtcacgcatcaatctggtgttcattgtgctatttactggagagtgtgtactgaaactcatctctctacgccattattattttaccattggatggaatatttttgattttgtggttgtcattctctccattgtaggtatgtttcttgccgagctgatagaaaagtatttcgtgtcccctaccctgttccgagtgatccgtcttgctaggattggccgaatcctacgtctgatcaaaggagcaaaggggatccgcacgctgctctttgctttgatgatgtcccttcctgcgttgtttaacatcggcctcctactcttcctagtcatgttcatctacgccatctttgggatgtccaactttgcctatgttaagagggaagttgggatcgatgacatgttcaactttgagacctttggcaacagcatgatctgcctattccaaattacaacctctgctggctgggatggattgctagcacccattctcaacagtaagccacccgactgtgaccctaataaagttaaccctggaagctcagttaagggagactgtgggaacccatctgttggaattttcttttttgtcagttacatcatcatatccttcctggttgtggtgaacatgtacatcgcggtcatcctggagaacttcagtgttgctactgaagaaagtgcagagcctctgagtgaggatgactttgagatgttctatgaggtttgggagaagtttgatcccgatgcaactcagttcatggaatttgaaaaattatctcagtttgcagctgcgcttgaaccgcctctcaatctgccacaaccaaacaaactccagctcattgccatggatttgcccatggtgagtggtgaccggatccactgtcttgatatcttatttgcttttacaaagcgggttctaggagagagtggagagatggatgctctacgaatacagatggaagagcgattcatggcttccaatccttccaaggtctcctatcagccaatcactactactttaaaacgaaaacaagaggaagtatctgctgtcattattcagcgtgcttacagacgccaccttttaaagcgaactgtaaaacaagcttcctttacgtacaataaaaacaaaatcaaaggtggggctaatcttcttataaaagaagacatgataattgacagaataaatgaaaactctattacagaaaaaactgatctgaccatgtccactgcagcttgtccaccttcctatgaccgggtgacaaagccaattgtggaaaaacatgagcaagaaggcaaagatgaaaaagccaaagggaaataaatgaaaataaataaaaataattgggtgacaaattgtttacagcctgtgaaggtgatgtatttttatcaacaggactcctttaggaggtcaatgccaaactgactgtttttacacaaatctccttaaggtcagtgcctacaataagacagtgaccccttgtcagcaaactgtgactctgtgtaaaggggagatgaccttgacaggaggttactgttctcactaccagctgacactgctgaagataagatgcacaatggctagtcagactgtagggaccagtttcaaggggtgcaaacctgtgattttggggttgtttaacatgaaacactttagtgtagtaattgtatccactgtttgcatttcaactgccacatttgtcacatttttatggaatctgttagtggattcatctttttgttaatccatgtgtttattatatgtgactatttttgtaaacgaagtttctgttgagaaataggctaaggacctctataacaggtatgccacctggggggtatggcaaccacatggccctcccagctacacaaagtcgtggtttgcatgagggcatgctgcacttagagatcatgcatgagaaaaagtcacaagaaaaacaaattcttaaatttcaccatatttctgggaggggtaattgggtgataagtggaggtgctttgttgatcttgttttgcgaaatccagcccctagaccaagtagattatttgtgggtaggccagtaaatcttagcaggtgcaaacttcattcaaatgtttggagtcataaatgttatgtttctttttgttgtattaaaaaaaaaacctgaatagtgaatattgcccctcaccctccaccgccagaagactgaattgaccaaaattactctttataaatttctgctttttcctgcactttgtttagccatcttcggctctcagcaaggttgacactgtatatgttaatgaaatgctatttattatgtaaatagtcattttaccctgtggtgcacgtttgagcaaacaaataatgacctaagcacagtatttattgcatcaaatatgtaccacaagaaatgtagagtgcaagctttacacaggtaataaaatgtattctgtaccatttatagatagtttggatgctatcaatgcatgtttatattaccatgctgctgtatctggtttctctcactgctcagaatctcatttatgagaaaccatatgtcagtggtaaagtcaaggaaattgttcaacagatctcatttatttaagtcattaagcaatagtttgcagcactttaacagctttttggttatttttacattttaagtggataacatatggtatatagccagactgtacagacatgtttaaaaaaacacactgcttaacctattaaatatgtgtttagaattttataagcaaatataaatactgtaaaaagtcactttattttatttttcagcattatgtacataaatatgaagaggaaattatcttcaggttgatatcacaatcacttttcttactttctgtccatagtactttttcatgaaagaaatttgctaaataagacatgaaaacaagactgggtagttgtagatttctgctttttaaattacatttgctaattttagattatttcacaattttaaggagcaaaataggttcacgattcatatccaaattatgctttgcaattggaaaagggtttaaaattttatttatatttctggtagtacctgcactaactgaattgaaggtagtgcttatgttatttttgttctttttttctgacttcggtttatgttttcatttctttggagtaatgctgctctagattgttctaaatagaatgtgggcttcataatttttttttccacaaaaacagagtagtcaacttatatagtcaattacatcaggacattttgtgtttcttacagaagcaaaccataggctcctcttttccttaaaactacttagataaactgtattcgtgaactgcatgctggaaaatgctactattatgctaaataatgctaaccaacatttaaaatgtgcaaaactaataaagattacattttttatttta

SEQ ID NO: 18456 - DNA, 8562 bp, Homo sapiens
  source 1..8562: mol_type = unassigned DNA
gtaccatagagtgaggcgaggatgaagccgagaggatactgcagaggtctctggtgcatgtgtgtatgtgtgcgtttgtgtgtgtttgtgtgtctgtgtgttctgccccagtgagactgcagcccttgtaaatactttgacaccttttgcaagaaggaatctgaacaattgcaactgaaggcacattgttatcatctcgtctttgggtgatgctgttcctcactgcagatggataattttccttttaatcagaacagcataagaattatttctgagtggaggtgaggcttgtccaaatgtctttgctatcatggatttcctgactcctacctgtttgaggtttgggcaattatgaataaggctgctgtatacatccgtgtgcaggattttgtgtggacataagttttcaactcctttggttaaatcctaaggaatttcatatgcagaataaatggtaattaaaatgtgcaggatgacaagatggagcaaacagtgcttgtaccaccaggacctgacagcttcaacttcttcaccagagaatctcttgcggctattgaaagacgcattgcagaagaaaaggcaaagaatcccaaaccagacaaaaaagatgacgacgaaaatggcccaaagccaaatagtgacttggaagctggaaagaaccttccatttatttatggagacattcctccagagatggtgtcagagcccctggaggacctggacccctactatatcaataagaaaacttttatagtattgaataaagggaaggccatcttccggttcagtgccacctctgccctgtacattttaactcccttcaatcctcttaggaaaatagctattaagattttggtacattcattattcagcatgctaattatgtgcactattttgacaaactgtgtgtttatgacaatgagtaaccctcctgattggacaaagaatgtagaatacaccttcacaggaatatatacttttgaatcacttataaaaattattgcaaggggattctgtttagaagattttactttccttcgggatccatggaactggctcgatttcactgtcattacatttgcgtacgtcacagagtttgtggacctgggcaatgtctcggcattgagaacattcagagttctccgagcattgaagacgatttcagtcattccaggcctgaaaaccattgtgggagccctgatccagtctgtgaagaagctctcagatgtaatgatcctgactgtgttctgtctgagcgtatttgctctaattgggctgcagctgttcatgggcaacctgaggaataaatgtatacaatggcctcccaccaatgcttccttggaggaacatagtatagaaaagaatataactgtgaattataatggtacacttataaatgaaactgtctttgagtttgactggaagtcatatattcaagattcaagatatcattatttcctggagggttttttagatgcactactatgtggaaatagctctgatgcaggccaatgtccagagggatatatgtgtgtgaaagctggtagaaatcccaattatggctacacaagctttgataccttcagttgggcttttttgtccttgtttcgactaatgactcaggacttctgggaaaatctttatcaactgacattacgtgctgctgggaaaacgtacatgatattttttgtattggtcattttcttgggctcattctacctaataaatttgatcctggctgtggtggccatggcctacgaggaacagaatcaggccaccttggaagaagcagaacagaaagaggccgaatttcagcagatgattgaacagcttaaaaagcaacaggaggcagctcagcaggcagcaacggcaactgcctcagaacattccagagagcccagtgcagcaggcaggctctcagacagctcatctgaagcctctaagttgagttccaagagtgctaaggaaagaagaaatcggaggaagaaaagaaaacagaaagagcagtctggtggggaagagaaagatgaggatgaattccaaaaatctgaatctgaggacagcatcaggaggaaaggttttcgcttctccattgaagggaaccgattgacatatgaaaagaggtactcctccccacaccagtctttgttgagcatccgtggctccctattttcaccaaggcgaaatagcagaacaagccttttcagctttagagggcgagcaaaggatgtgggatctgagaacgacttcgcagatgatgagcacagcacctttgaggataacgagagccgtagagattccttgtttgtgccccgacgacacggagagagacgcaacagcaacctgagtcagaccagtaggtcatcccggatgctggcagtgtttccagcgaatgggaagatgcacagcactgtggattgcaatggtgtggtttccttggttggtggaccttcagttcctacatcgcctgttggacagcttctgccagagggaacaaccactgaaactgaaatgagaaagagaaggtcaagttctttccacgtttccatggactttctagaagatccttcccaaaggcaacgagcaatgagtatagccagcattctaacaaatacagtagaagaacttgaagaatccaggcagaaatgcccaccctgttggtataaattttccaacatattcttaatctgggactgttctccatattggttaaaagtgaaacatgttgtcaacctggttgtgatggacccatttgttgacctggccatcaccatctgtattgtcttaaatactcttttcatggccatggagcactatccaatgacggaccatttcaataatgtgcttacagtaggaaacttggttttcactgggatctttacagcagaaatgtttctgaaaattattgccatggatccttactattatttccaagaaggctggaatatctttgacggttttattgtgacgcttagcctggtagaacttggactcgccaatgtggaaggattatctgttctccgttcatttcgattgctgcgagttttcaagttggcaaaatcttggccaacgttaaatatgctaataaagatcatcggcaattccgtgggggctctgggaaatttaaccctcgtcttggccatcatcgtcttcatttttgccgtggtcggcatgcagctctttggtaaaagctacaaagattgtgtctgcaagatcgccagtgattgtcaactcccacgctggcacatgaatgacttcttccactccttcctgattgtgttccgcgtgctgtgtggggagtggatagagaccatgtgggactgtatggaggttgctggtcaagccatgtgccttactgtcttcatgatggtcatggtgattggaaacctagtggtcctgaatctctttctggccttgcttctgagctcatttagtgcagacaaccttgcagccactgatgatgataatgaaatgaataatctccaaattgctgtggataggatgcacaaaggagtagcttatgtgaaaagaaaaatatatgaatttattcaacagtccttcattaggaaacaaaagattttagatgaaattaaaccacttgatgatctaaacaacaagaaagacagttgtatgtccaatcatacagcagaaattgggaaagatcttgactatcttaaagatgtaaatggaactacaagtggtataggaactggcagcagtgttgaaaaatacattattgatgaaagtgattacatgtcattcataaacaaccccagtcttactgtgactgtaccaattgctgtaggagaatctgactttgaaaatttaaacacggaagactttagtagtgaatcggatctggaagaaagcaaagagaaactgaatgaaagcagtagctcatcagaaggtagcactgtggacatcggcgcacctgtagaagaacagcccgtagtggaacctgaagaaactcttgaaccagaagcttgtttcactgaaggctgtgtacaaagattcaagtgttgtcaaatcaatgtggaagaaggcagaggaaaacaatggtggaacctgagaaggacgtgtttccgaatagttgaacataactggtttgagaccttcattgttttcatgattctccttagtagtggtgctctggcatttgaagatatatatattgatcagcgaaagacgattaagacgatgttggaatatgctgacaaggttttcacttacattttcattctggaaatgcttctaaaatgggtggcatatggctatcaaacatatttcaccaatgcctggtgttggctggacttcttaattgttgatgtttcattggtcagtttaacagcaaatgccttgggttactcagaacttggagccatcaaatctctcaggacactaagagctctgagacctctaagagccttatctcgatttgaagggatgagggtggttgtgaatgcccttttaggagcaattccatccatcatgaatgtgcttctggtttgtcttatattctggctaattttcagcatcatgggcgtaaatttgtttgctggcaaattctaccactgtattaacaccacaactggtgacaggtttgacatcgaagacgtgaataatcatactgattgcctaaaactaatagaaagaaatgagactgctcgatggaaaaatgtgaaagtaaactttgataatgtaggatttgggtatctctctttgcttcaagttgccacattcaaaggatggatggatataatgtatgcagcagttgattccagaaatgtggaactccagcctaagtatgaagaaagtctgtacatgtatctttactttgttattttcatcatctttgggtccttcttcaccttgaacctgtttattggtgtcatcatagataatttcaaccagcagaaaaagaagtttggaggtcaagacatctttatgacagaagaacagaagaaatactataatgcaatgaaaaaattaggatcgaaaaaaccgcaaaagcctatacctcgaccaggaaacaaatttcaaggaatggtctttgacttcgtaaccagacaagtttttgacataagcatcatgattctcatctgtcttaacatggtcacaatgatggtggaaacagatgaccagagtgaatatgtgactaccattttgtcacgcatcaatctggtgttcattgtgctatttactggagagtgtgtactgaaactcatctctctacgccattattattttaccattggatggaatatttttgattttgtggttgtcattctctccattgtaggtatgtttcttgccgagctgatagaaaagtatttcgtgtcccctaccctgttccgagtgatccgtcttgctaggattggccgaatcctacgtctgatcaaaggagcaaaggggatccgcacgctgctctttgctttgatgatgtcccttcctgcgttgtttaacatcggcctcctactcttcctagtcatgttcatctacgccatctttgggatgtccaactttgcctatgttaagagggaagttgggatcgatgacatgttcaactttgagacctttggcaacagcatgatctgcctattccaaattacaacctctgctggctgggatggattgctagcacccattctcaacagtaagccacccgactgtgaccctaataaagttaaccctggaagctcagttaagggagactgtgggaacccatctgttggaattttcttttttgtcagttacatcatcatatccttcctggttgtggtgaacatgtacatcgcggtcatcctggagaacttcagtgttgctactgaagaaagtgcagagcctctgagtgaggatgactttgagatgttctatgaggtttgggagaagtttgatcccgatgcaactcagttcatggaatttgaaaaattatctcagtttgcagctgcgcttgaaccgcctctcaatctgccacaaccaaacaaactccagctcattgccatggatttgcccatggtgagtggtgaccggatccactgtcttgatatcttatttgcttttacaaagcgggttctaggagagagtggagagatggatgctctacgaatacagatggaagagcgattcatggcttccaatccttccaaggtctcctatcagccaatcactactactttaaaacgaaaacaagaggaagtatctgctgtcattattcagcgtgcttacagacgccaccttttaaagcgaactgtaaaacaagcttcctttacgtacaataaaaacaaaatcaaaggtggggctaatcttcttataaaagaagacatgataattgacagaataaatgaaaactctattacagaaaaaactgatctgaccatgtccactgcagcttgtccaccttcctatgaccgggtgacaaagccaattgtggaaaaacatgagcaagaaggcaaagatgaaaaagccaaagggaaataaatgaaaataaataaaaataattgggtgacaaattgtttacagcctgtgaaggtgatgtatttttatcaacaggactcctttaggaggtcaatgccaaactgactgtttttacacaaatctccttaaggtcagtgcctacaataagacagtgaccccttgtcagcaaactgtgactctgtgtaaaggggagatgaccttgacaggaggttactgttctcactaccagctgacactgctgaagataagatgcacaatggctagtcagactgtagggaccagtttcaaggggtgcaaacctgtgattttggggttgtttaacatgaaacactttagtgtagtaattgtatccactgtttgcatttcaactgccacatttgtcacatttttatggaatctgttagtggattcatctttttgttaatccatgtgtttattatatgtgactatttttgtaaacgaagtttctgttgagaaataggctaaggacctctataacaggtatgccacctggggggtatggcaaccacatggccctcccagctacacaaagtcgtggtttgcatgagggcatgctgcacttagagatcatgcatgagaaaaagtcacaagaaaaacaaattcttaaatttcaccatatttctgggaggggtaattgggtgataagtggaggtgctttgttgatcttgttttgcgaaatccagcccctagaccaagtagattatttgtgggtaggccagtaaatcttagcaggtgcaaacttcattcaaatgtttggagtcataaatgttatgtttctttttgttgtattaaaaaaaaaacctgaatagtgaatattgcccctcaccctccaccgccagaagactgaattgaccaaaattactctttataaatttctgctttttcctgcactttgtttagccatcttcggctctcagcaaggttgacactgtatatgttaatgaaatgctatttattatgtaaatagtcattttaccctgtggtgcacgtttgagcaaacaaataatgacctaagcacagtatttattgcatcaaatatgtaccacaagaaatgtagagtgcaagctttacacaggtaataaaatgtattctgtaccatttatagatagtttggatgctatcaatgcatgtttatattaccatgctgctgtatctggtttctctcactgctcagaatctcatttatgagaaaccatatgtcagtggtaaagtcaaggaaattgttcaacagatctcatttatttaagtcattaagcaatagtttgcagcactttaacagctttttggttatttttacattttaagtggataacatatggtatatagccagactgtacagacatgtttaaaaaaacacactgcttaacctattaaatatgtgtttagaattttataagcaaatataaatactgtaaaaagtcactttattttatttttcagcattatgtacataaatatgaagaggaaattatcttcaggttgatatcacaatcacttttcttactttctgtccatagtactttttcatgaaagaaatttgctaaataagacatgaaaacaagactgggtagttgtagatttctgctttttaaattacatttgctaattttagattatttcacaattttaaggagcaaaataggttcacgattcatatccaaattatgctttgcaattggaaaagggtttaaaattttatttatatttctggtagtacctgcactaactgaattgaaggtagtgcttatgttatttttgttctttttttctgacttcggtttatgttttcatttctttggagtaatgctgctctagattgttctaaatagaatgtgggcttcataatttttttttccacaaaaacagagtagtcaacttatatagtcaattacatcaggacattttgtgtttcttacagaagcaaaccataggctcctcttttccttaaaactacttagataaactgtattcgtgaactgcatgctggaaaatgctactattatgctaaataatgctaaccaacatttaaaatgtgcaaaactaataaagattacattttttatttta

SEQ ID NO: 18457 - DNA, 10107 bp, Homo sapiens
  source 1..10107: mol_type = unassigned DNA
ggtaccatagagtgaggcgaggatgaagccgagaggatactgcagaggtctctggtgcatgtgtgtatgtgtgcgtttgtgtgtgtttgtgtgtctgtgtgttctgccccagtgagactgcagcccttgtaaatactttgacaccttttgcaagaaggaatctgaacaattgcaactgaaggcacattgttatcatctcgtctttgggtgatgctgttcctcactgcagatggataattttccttttaatcaggaatttcatatgcagaataaatggtaattaaaatgtgcaggatgacaagatggagcaaacagtgcttgtaccaccaggacctgacagcttcaacttcttcaccagagaatctcttgcggctattgaaagacgcattgcagaagaaaaggcaaagaatcccaaaccagacaaaaaagatgacgacgaaaatggcccaaagccaaatagtgacttggaagctggaaagaaccttccatttatttatggagacattcctccagagatggtgtcagagcccctggaggacctggacccctactatatcaataagaaaacttttatagtattgaataaagggaaggccatcttccggttcagtgccacctctgccctgtacattttaactcccttcaatcctcttaggaaaatagctattaagattttggtacattcattattcagcatgctaattatgtgcactattttgacaaactgtgtgtttatgacaatgagtaaccctcctgattggacaaagaatgtagaatacaccttcacaggaatatatacttttgaatcacttataaaaattattgcaaggggattctgtttagaagattttactttccttcgggatccatggaactggctcgatttcactgtcattacatttgcgtacgtcacagagtttgtggacctgggcaatgtctcggcattgagaacattcagagttctccgagcattgaagacgatttcagtcattccaggcctgaaaaccattgtgggagccctgatccagtctgtgaagaagctctcagatgtaatgatcctgactgtgttctgtctgagcgtatttgctctaattgggctgcagctgttcatgggcaacctgaggaataaatgtatacaatggcctcccaccaatgcttccttggaggaacatagtatagaaaagaatataactgtgaattataatggtacacttataaatgaaactgtctttgagtttgactggaagtcatatattcaagattcaagatatcattatttcctggagggttttttagatgcactactatgtggaaatagctctgatgcaggccaatgtccagagggatatatgtgtgtgaaagctggtagaaatcccaattatggctacacaagctttgataccttcagttgggcttttttgtccttgtttcgactaatgactcaggacttctgggaaaatctttatcaactgacattacgtgctgctgggaaaacgtacatgatattttttgtattggtcattttcttgggctcattctacctaataaatttgatcctggctgtggtggccatggcctacgaggaacagaatcaggccaccttggaagaagcagaacagaaagaggccgaatttcagcagatgattgaacagcttaaaaagcaacaggaggcagctcagcaggcagcaacggcaactgcctcagaacattccagagagcccagtgcagcaggcaggctctcagacagctcatctgaagcctctaagttgagttccaagagtgctaaggaaagaagaaatcggaggaagaaaagaaaacagaaagagcagtctggtggggaagagaaagatgaggatgaattccaaaaatctgaatctgaggacagcatcaggaggaaaggttttcgcttctccattgaagggaaccgattgacatatgaaaagaggtactcctccccacaccagtctttgttgagcatccgtggctccctattttcaccaaggcgaaatagcagaacaagccttttcagctttagagggcgagcaaaggatgtgggatctgagaacgacttcgcagatgatgagcacagcacctttgaggataacgagagccgtagagattccttgtttgtgccccgacgacacggagagagacgcaacagcaacctgagtcagaccagtaggtcatcccggatgctggcagtgtttccagcgaatgggaagatgcacagcactgtggattgcaatggtgtggtttccttggttggtggaccttcagttcctacatcgcctgttggacagcttctgccagagggaacaaccactgaaactgaaatgagaaagagaaggtcaagttctttccacgtttccatggactttctagaagatccttcccaaaggcaacgagcaatgagtatagccagcattctaacaaatacagtagaagaacttgaagaatccaggcagaaatgcccaccctgttggtataaattttccaacatattcttaatctgggactgttctccatattggttaaaagtgaaacatgttgtcaacctggttgtgatggacccatttgttgacctggccatcaccatctgtattgtcttaaatactcttttcatggccatggagcactatccaatgacggaccatttcaataatgtgcttacagtaggaaacttggttttcactgggatctttacagcagaaatgtttctgaaaattattgccatggatccttactattatttccaagaaggctggaatatctttgacggttttattgtgacgcttagcctggtagaacttggactcgccaatgtggaaggattatctgttctccgttcatttcgattgctgcgagttttcaagttggcaaaatcttggccaacgttaaatatgctaataaagatcatcggcaattccgtgggggctctgggaaatttaaccctcgtcttggccatcatcgtcttcatttttgccgtggtcggcatgcagctctttggtaaaagctacaaagattgtgtctgcaagatcgccagtgattgtcaactcccacgctggcacatgaatgacttcttccactccttcctgattgtgttccgcgtgctgtgtggggagtggatagagaccatgtgggactgtatggaggttgctggtcaagccatgtgccttactgtcttcatgatggtcatggtgattggaaacctagtggtcctgaatctctttctggccttgcttctgagctcatttagtgcagacaaccttgcagccactgatgatgataatgaaatgaataatctccaaattgctgtggataggatgcacaaaggagtagcttatgtgaaaagaaaaatatatgaatttattcaacagtccttcattaggaaacaaaagattttagatgaaattaaaccacttgatgatctaaacaacaagaaagacagttgtatgtccaatcatacagcagaaattgggaaagatcttgactatcttaaagatgtaaatggaactacaagtggtataggaactggcagcagtgttgaaaaatacattattgatgaaagtgattacatgtcattcataaacaaccccagtcttactgtgactgtaccaattgctgtaggagaatctgactttgaaaatttaaacacggaagactttagtagtgaatcggatctggaagaaagcaaagagaaactgaatgaaagcagtagctcatcagaaggtagcactgtggacatcggcgcacctgtagaagaacagcccgtagtggaacctgaagaaactcttgaaccagaagcttgtttcactgaaggctgtgtacaaagattcaagtgttgtcaaatcaatgtggaagaaggcagaggaaaacaatggtggaacctgagaaggacgtgtttccgaatagttgaacataactggtttgagaccttcattgttttcatgattctccttagtagtggtgctctggcatttgaagatatatatattgatcagcgaaagacgattaagacgatgttggaatatgctgacaaggttttcacttacattttcattctggaaatgcttctaaaatgggtggcatatggctatcaaacatatttcaccaatgcctggtgttggctggacttcttaattgttgatgtttcattggtcagtttaacagcaaatgccttgggttactcagaacttggagccatcaaatctctcaggacactaagagctctgagacctctaagagccttatctcgatttgaagggatgagggtggttgtgaatgcccttttaggagcaattccatccatcatgaatgtgcttctggtttgtcttatattctggctaattttcagcatcatgggcgtaaatttgtttgctggcaaattctaccactgtattaacaccacaactggtgacaggtttgacatcgaagacgtgaataatcatactgattgcctaaaactaatagaaagaaatgagactgctcgatggaaaaatgtgaaagtaaactttgataatgtaggatttgggtatctctctttgcttcaagttgccacattcaaaggatggatggatataatgtatgcagcagttgattccagaaatgtggaactccagcctaagtatgaagaaagtctgtacatgtatctttactttgttattttcatcatctttgggtccttcttcaccttgaacctgtttattggtgtcatcatagataatttcaaccagcagaaaaagaagtttggaggtcaagacatctttatgacagaagaacagaagaaatactataatgcaatgaaaaaattaggatcgaaaaaaccgcaaaagcctatacctcgaccaggaaacaaatttcaaggaatggtctttgacttcgtaaccagacaagtttttgacataagcatcatgattctcatctgtcttaacatggtcacaatgatggtggaaacagatgaccagagtgaatatgtgactaccattttgtcacgcatcaatctggtgttcattgtgctatttactggagagtgtgtactgaaactcatctctctacgccattattattttaccattggatggaatatttttgattttgtggttgtcattctctccattgtaggtaagaaatatttaaagttcttaaattcagttaaataaaagtgaaagctgaaacaatcaagattagattcaagatcatcccagcaatcagagataatcactgtaaatattttgatacattttatccaagtgtgtttgtttttttaacaaaatgtctcctactatatgtcagtattgtttcttattctatccatttagaacaatatacttagtgtaaatgtagtaaaacctcattcatttgaactagaactgtgctattaactaaaataaaaatgtttttgacatgttgagattgaagaaccaatatagtatctagatggttctgttaacaagactagaaatgtagtctggtactcacgaaaattgctttagagaatagacatggagtcaccagcatatagatattagtggaaagtggtttcaagataaggaaaagtattgcataaaaagagaataaagacaaggactaaacattagcaaatgcatatagtaggttctctgcaagtgtcatgtagagattttctagactaccttaaaaatgggtttatcataatgatgcacaagggaaataaggtggcatgggacatcatcagtactatacttcaaagcctggaacacataactagcctcatgagcaatagctcatttcattagacaaaactaaagctctagtaaagtaaaaagcatctgtctgtgggcctattcattcttccctaaacaggatgatatgattgggtcaatattttactatccaaaacgaggcacctgtgttggacagattttcatgccactcccctctctgaagaaactggccttatatccagctcattgtatatagcctttgattcccactaattataatccttggttataactagtgtggctaaggtataaaagttgtattctcacacgtctccttctctctctctctctctcacacacacacacacacacacacacacacactcttacacttcgtcttttcagaatgaggcatttaaacttgaaggcatttagtttcttgagctcttctttttaactttacaagtattgtttttatctaaaaagcaaatggagagagaagctgaaaataagaagactgagattacagtgttaggtacaggagaccaaaaagaattgaaatacaacattaagtacaggatactaaaaagagcatcaacctgggatcctttcagaaatgcaccagaacatacataaatgagtatataaaaatattagagtggaatttaagtaagtaccaagatcatggggagatgaaagtagcatcaaaagctaccaatactttcagatggaaaaggagtaaatagagaatttagaatatggcaatttcagaaaaagtcactgtatacatataaacttgtacctatactgttgggctgctactgttcggccaaatgtgcatttttaacttattttctttttaaattctgacttgggactttacataaactaaaagtagtttataaacatctcttaaagataaaaaaaagtactataatccttataattgaaattattgctgaatttcaaaattaagatttataatatattatgtacaattatatatatattatatatagttgtcatatttaatataactgggttcaggactctgaaccttaccttggagctttagaagaaacatatgtttattttaacgcatgatttcttcactggttggtattctcattgtttattcataggtatgtttcttgccgagctgatagaaaagtatttcgtgtcccctaccctgttccgagtgatccgtcttgctaggattggccgaatcctacgtctgatcaaaggagcaaaggggatccgcacgctgctctttgctttgatgatgtcccttcctgcgttgtttaacatcggcctcctactcttcctagtcatgttcatctacgccatctttgggatgtccaactttgcctatgttaagagggaagttgggatcgatgacatgttcaactttgagacctttggcaacagcatgatctgcctattccaaattacaacctctgctggctgggatggattgctagcacccattctcaacagtaagccacccgactgtgaccctaataaagttaaccctggaagctcagttaagggagactgtgggaacccatctgttggaattttcttttttgtcagttacatcatcatatccttcctggttgtggtgaacatgtacatcgcggtcatcctggagaacttcagtgttgctactgaagaaagtgcagagcctctgagtgaggatgactttgagatgttctatgaggtttgggagaagtttgatcccgatgcaactcagttcatggaatttgaaaaattatctcagtttgcagctgcgcttgaaccgcctctcaatctgccacaaccaaacaaactccagctcattgccatggatttgcccatggtgagtggtgaccggatccactgtcttgatatcttatttgcttttacaaagcgggttctaggagagagtggagagatggatgctctacgaatacagatggaagagcgattcatggcttccaatccttccaaggtctcctatcagccaatcactactactttaaaacgaaaacaagaggaagtatctgctgtcattattcagcgtgcttacagacgccaccttttaaagcgaactgtaaaacaagcttcctttacgtacaataaaaacaaaatcaaaggtggggctaatcttcttataaaagaagacatgataattgacagaataaatgaaaactctattacagaaaaaactgatctgaccatgtccactgcagcttgtccaccttcctatgaccgggtgacaaagccaattgtggaaaaacatgagcaagaaggcaaagatgaaaaagccaaagggaaataaatgaaaataaataaaaataattgggtgacaaattgtttacagcctgtgaaggtgatgtatttttatcaacaggactcctttaggaggtcaatgccaaactgactgtttttacacaaatctccttaaggtcagtgcctacaataagacagtgaccccttgtcagcaaactgtgactctgtgtaaaggggagatgaccttgacaggaggttactgttctcactaccagctgacactgctgaagataagatgcacaatggctagtcagactgtagggaccagtttcaaggggtgcaaacctgtgattttggggttgtttaacatgaaacactttagtgtagtaattgtatccactgtttgcatttcaactgccacatttgtcacatttttatggaatctgttagtggattcatctttttgttaatccatgtgtttattatatgtgactatttttgtaaacgaagtttctgttgagaaataggctaaggacctctataacaggtatgccacctggggggtatggcaaccacatggccctcccagctacacaaagtcgtggtttgcatgagggcatgctgcacttagagatcatgcatgagaaaaagtcacaagaaaaacaaattcttaaatttcaccatatttctgggaggggtaattgggtgataagtggaggtgctttgttgatcttgttttgcgaaatccagcccctagaccaagtagattatttgtgggtaggccagtaaatcttagcaggtgcaaacttcattcaaatgtttggagtcataaatgttatgtttctttttgttgtattaaaaaaaaaacctgaatagtgaatattgcccctcaccctccaccgccagaagactgaattgaccaaaattactctttataaatttctgctttttcctgcactttgtttagccatcttcggctctcagcaaggttgacactgtatatgttaatgaaatgctatttattatgtaaatagtcattttaccctgtggtgcacgtttgagcaaacaaataatgacctaagcacagtatttattgcatcaaatatgtaccacaagaaatgtagagtgcaagctttacacaggtaataaaatgtattctgtaccatttatagatagtttggatgctatcaatgcatgtttatattaccatgctgctgtatctggtttctctcactgctcagaatctcatttatgagaaaccatatgtcagtggtaaagtcaaggaaattgttcaacagatctcatttatttaagtcattaagcaatagtttgcagcactttaacagctttttggttatttttacattttaagtggataacatatggtatatagccagactgtacagacatgtttaaaaaaacacactgcttaacctattaaatatgtgtttagaattttataagcaaatataaatactgtaaaaagtcactttattttatttttcagcattatgtacataaatatgaagaggaaattatcttcaggttgatatcacaatcacttttcttactttctgtccatagtactttttcatgaaagaaatttgctaaataagacatgaaaacaagactgggtagttgtagatttctgctttttaaattacatttgctaattttagattatttcacaattttaaggagcaaaataggttcacgattcatatccaaattatgctttgcaattggaaaagggtttaaaattttatttatatttctggtagtacctgcactaactgaattgaaggtagtgcttatgttatttttgttctttttttctgacttcggtttatgttttcatttctttggagtaatgctgctctagattgttctaaatagaatgtgggcttcataatttttttttccacaaaaacagagtagtcaacttatatagtcaattacatcaggacattttgtgtttcttacagaagcaaaccataggctcctcttttccttaaaactacttagataaactgtattcgtgaactgcatgctggaaaatgctactattatgctaaataatgctaaccaacatttaaaatgtgcaaaactaataaagattacattttttatttta

SEQ ID NO: 18458 - DNA, 8508 bp, Homo sapiens
  source 1..8508: mol_type = unassigned DNA
ttgctgatttgtattaggtaccatagagtgaggcgaggatgaagccgagaggatactgcagaggtctctggtgcatgtgtgtatgtgtgcgtttgtgtgtgtttgtgtgtctgtgtgttctgccccagtgagactgcagcccttgtaaatactttgacaccttttgcaagaaggaatctgaacaattgcaactgaaggcacattgttatcatctcgtctttgggtgatgctgttcctcactgcagatggataattttccttttaatcaggtttgggcaattatgaataaggctgctgtatacatccgtgtgcaggattttgtgtggacataagttttcaactcctttggttaaatcctaaggaatttcatatgcagaataaatggtaattaaaatgtgcaggatgacaagatggagcaaacagtgcttgtaccaccaggacctgacagcttcaacttcttcaccagagaatctcttgcggctattgaaagacgcattgcagaagaaaaggcaaagaatcccaaaccagacaaaaaagatgacgacgaaaatggcccaaagccaaatagtgacttggaagctggaaagaaccttccatttatttatggagacattcctccagagatggtgtcagagcccctggaggacctggacccctactatatcaataagaaaacttttatagtattgaataaagggaaggccatcttccggttcagtgccacctctgccctgtacattttaactcccttcaatcctcttaggaaaatagctattaagattttggtacattcattattcagcatgctaattatgtgcactattttgacaaactgtgtgtttatgacaatgagtaaccctcctgattggacaaagaatgtagaatacaccttcacaggaatatatacttttgaatcacttataaaaattattgcaaggggattctgtttagaagattttactttccttcgggatccatggaactggctcgatttcactgtcattacatttgcgtacgtcacagagtttgtggacctgggcaatgtctcggcattgagaacattcagagttctccgagcattgaagacgatttcagtcattccaggcctgaaaaccattgtgggagccctgatccagtctgtgaagaagctctcagatgtaatgatcctgactgtgttctgtctgagcgtatttgctctaattgggctgcagctgttcatgggcaacctgaggaataaatgtatacaatggcctcccaccaatgcttccttggaggaacatagtatagaaaagaatataactgtgaattataatggtacacttataaatgaaactgtctttgagtttgactggaagtcatatattcaagattcaagatatcattatttcctggagggttttttagatgcactactatgtggaaatagctctgatgcaggccaatgtccagagggatatatgtgtgtgaaagctggtagaaatcccaattatggctacacaagctttgataccttcagttgggcttttttgtccttgtttcgactaatgactcaggacttctgggaaaatctttatcaactgacattacgtgctgctgggaaaacgtacatgatattttttgtattggtcattttcttgggctcattctacctaataaatttgatcctggctgtggtggccatggcctacgaggaacagaatcaggccaccttggaagaagcagaacagaaagaggccgaatttcagcagatgattgaacagcttaaaaagcaacaggaggcagctcagcaggcagcaacggcaactgcctcagaacattccagagagcccagtgcagcaggcaggctctcagacagctcatctgaagcctctaagttgagttccaagagtgctaaggaaagaagaaatcggaggaagaaaagaaaacagaaagagcagtctggtggggaagagaaagatgaggatgaattccaaaaatctgaatctgaggacagcatcaggaggaaaggttttcgcttctccattgaagggaaccgattgacatatgaaaagaggtactcctccccacaccagtctttgttgagcatccgtggctccctattttcaccaaggcgaaatagcagaacaagccttttcagctttagagggcgagcaaaggatgtgggatctgagaacgacttcgcagatgatgagcacagcacctttgaggataacgagagccgtagagattccttgtttgtgccccgacgacacggagagagacgcaacagcaacctgagtcagaccagtaggtcatcccggatgctggcagtgtttccagcgaatgggaagatgcacagcactgtggattgcaatggtgtggtttccttggttggtggaccttcagttcctacatcgcctgttggacagcttctgccagagggaacaaccactgaaactgaaatgagaaagagaaggtcaagttctttccacgtttccatggactttctagaagatccttcccaaaggcaacgagcaatgagtatagccagcattctaacaaatacagtagaagaacttgaagaatccaggcagaaatgcccaccctgttggtataaattttccaacatattcttaatctgggactgttctccatattggttaaaagtgaaacatgttgtcaacctggttgtgatggacccatttgttgacctggccatcaccatctgtattgtcttaaatactcttttcatggccatggagcactatccaatgacggaccatttcaataatgtgcttacagtaggaaacttggtaagcatattggaaggttttcactgggatctttacagcagaaatgtttctgaaaattattgccatggatccttactattatttccaagaaggctggaatatctttgacggttttattgtgacgcttagcctggtagaacttggactcgccaatgtggaaggattatctgttctccgttcatttcgattgctgcgagttttcaagttggcaaaatcttggccaacgttaaatatgctaataaagatcatcggcaattccgtgggggctctgggaaatttaaccctcgtcttggccatcatcgtcttcatttttgccgtggtcggcatgcagctctttggtaaaagctacaaagattgtgtctgcaagatcgccagtgattgtcaactcccacgctggcacatgaatgacttcttccactccttcctgattgtgttccgcgtgctgtgtggggagtggatagagaccatgtgggactgtatggaggttgctggtcaagccatgtgccttactgtcttcatgatggtcatggtgattggaaacctagtggtcctgaatctctttctggccttgcttctgagctcatttagtgcagacaaccttgcagccactgatgatgataatgaaatgaataatctccaaattgctgtggataggatgcacaaaggagtagcttatgtgaaaagaaaaatatatgaatttattcaacagtccttcattaggaaacaaaagattttagatgaaattaaaccacttgatgatctaaacaacaagaaagacagttgtatgtccaatcatacagcagaaattgggaaagatcttgactatcttaaagatgtaaatggaactacaagtggtataggaactggcagcagtgttgaaaaatacattattgatgaaagtgattacatgtcattcataaacaaccccagtcttactgtgactgtaccaattgctgtaggagaatctgactttgaaaatttaaacacggaagactttagtagtgaatcggatctggaagaaagcaaagagaaactgaatgaaagcagtagctcatcagaaggtagcactgtggacatcggcgcacctgtagaagaacagcccgtagtggaacctgaagaaactcttgaaccagaagcttgtttcactgaaggctgtgtacaaagattcaagtgttgtcaaatcaatgtggaagaaggcagaggaaaacaatggtggaacctgagaaggacgtgtttccgaatagttgaacataactggtttgagaccttcattgttttcatgattctccttagtagtggtgctctggcatttgaagatatatatattgatcagcgaaagacgattaagacgatgttggaatatgctgacaaggttttcacttacattttcattctggaaatgcttctaaaatgggtggcatatggctatcaaacatatttcaccaatgcctggtgttggctggacttcttaattgttgatgtttcattggtcagtttaacagcaaatgccttgggttactcagaacttggagccatcaaatctctcaggacactaagagctctgagacctctaagagccttatctcgatttgaagggatgagggtggttgtgaatgcccttttaggagcaattccatccatcatgaatgtgcttctggtttgtcttatattctggctaattttcagcatcatgggcgtaaatttgtttgctggcaaattctaccactgtattaacaccacaactggtgacaggtttgacatcgaagacgtgaataatcatactgattgcctaaaactaatagaaagaaatgagactgctcgatggaaaaatgtgaaagtaaactttgataatgtaggatttgggtatctctctttgcttcaagttgccacattcaaaggatggatggatataatgtatgcagcagttgattccagaaatgtggaactccagcctaagtatgaagaaagtctgtacatgtatctttactttgttattttcatcatctttgggtccttcttcaccttgaacctgtttattggtgtcatcatagataatttcaaccagcagaaaaagaagtttggaggtcaagacatctttatgacagaagaacagaagaaatactataatgcaatgaaaaaattaggatcgaaaaaaccgcaaaagcctatacctcgaccaggaaacaaatttcaaggaatggtctttgacttcgtaaccagacaagtttttgacataagcatcatgattctcatctgtcttaacatggtcacaatgatggtggaaacagatgaccagagtgaatatgtgactaccattttgtcacgcatcaatctggtgttcattgtgctatttactggagagtgtgtactgaaactcatctctctacgccattattattttaccattggatggaatatttttgattttgtggttgtcattctctccattgtaggtatgtttcttgccgagctgatagaaaagtatttcgtgtcccctaccctgttccgagtgatccgtcttgctaggattggccgaatcctacgtctgatcaaaggagcaaaggggatccgcacgctgctctttgctttgatgatgtcccttcctgcgttgtttaacatcggcctcctactcttcctagtcatgttcatctacgccatctttgggatgtccaactttgcctatgttaagagggaagttgggatcgatgacatgttcaactttgagacctttggcaacagcatgatctgcctattccaaattacaacctctgctggctgggatggattgctagcacccattctcaacagtaagccacccgactgtgaccctaataaagttaaccctggaagctcagttaagggagactgtgggaacccatctgttggaattttcttttttgtcagttacatcatcatatccttcctggttgtggtgaacatgtacatcgcggtcatcctggagaacttcagtgttgctactgaagaaagtgcagagcctctgagtgaggatgactttgagatgttctatgaggtttgggagaagtttgatcccgatgcaactcagttcatggaatttgaaaaattatctcagtttgcagctgcgcttgaaccgcctctcaatctgccacaaccaaacaaactccagctcattgccatggatttgcccatggtgagtggtgaccggatccactgtcttgatatcttatttgcttttacaaagcgggttctaggagagagtggagagatggatgctctacgaatacagatggaagagcgattcatggcttccaatccttccaaggtctcctatcagccaatcactactactttaaaacgaaaacaagaggaagtatctgctgtcattattcagcgtgcttacagacgccaccttttaaagcgaactgtaaaacaagcttcctttacgtacaataaaaacaaaatcaaaggtggggctaatcttcttataaaagaagacatgataattgacagaataaatgaaaactctattacagaaaaaactgatctgaccatgtccactgcagcttgtccaccttcctatgaccgggtgacaaagccaattgtggaaaaacatgagcaagaaggcaaagatgaaaaagccaaagggaaataaatgaaaataaataaaaataattgggtgacaaattgtttacagcctgtgaaggtgatgtatttttatcaacaggactcctttaggaggtcaatgccaaactgactgtttttacacaaatctccttaaggtcagtgcctacaataagacagtgaccccttgtcagcaaactgtgactctgtgtaaaggggagatgaccttgacaggaggttactgttctcactaccagctgacactgctgaagataagatgcacaatggctagtcagactgtagggaccagtttcaaggggtgcaaacctgtgattttggggttgtttaacatgaaacactttagtgtagtaattgtatccactgtttgcatttcaactgccacatttgtcacatttttatggaatctgttagtggattcatctttttgttaatccatgtgtttattatatgtgactatttttgtaaacgaagtttctgttgagaaataggctaaggacctctataacaggtatgccacctggggggtatggcaaccacatggccctcccagctacacaaagtcgtggtttgcatgagggcatgctgcacttagagatcatgcatgagaaaaagtcacaagaaaaacaaattcttaaatttcaccatatttctgggaggggtaattgggtgataagtggaggtgctttgttgatcttgttttgcgaaatccagcccctagaccaagtagattatttgtgggtaggccagtaaatcttagcaggtgcaaacttcattcaaatgtttggagtcataaatgttatgtttctttttgttgtattaaaaaaaaaacctgaatagtgaatattgcccctcaccctccaccgccagaagactgaattgaccaaaattactctttataaatttctgctttttcctgcactttgtttagccatcttcggctctcagcaaggttgacactgtatatgttaatgaaatgctatttattatgtaaatagtcattttaccctgtggtgcacgtttgagcaaacaaataatgacctaagcacagtatttattgcatcaaatatgtaccacaagaaatgtagagtgcaagctttacacaggtaataaaatgtattctgtaccatttatagatagtttggatgctatcaatgcatgtttatattaccatgctgctgtatctggtttctctcactgctcagaatctcatttatgagaaaccatatgtcagtggtaaagtcaaggaaattgttcaacagatctcatttatttaagtcattaagcaatagtttgcagcactttaacagctttttggttatttttacattttaagtggataacatatggtatatagccagactgtacagacatgtttaaaaaaacacactgcttaacctattaaatatgtgtttagaattttataagcaaatataaatactgtaaaaagtcactttattttatttttcagcattatgtacataaatatgaagaggaaattatcttcaggttgatatcacaatcacttttcttactttctgtccatagtactttttcatgaaagaaatttgctaaataagacatgaaaacaagactgggtagttgtagatttctgctttttaaattacatttgctaattttagattatttcacaattttaaggagcaaaataggttcacgattcatatccaaattatgctttgcaattggaaaagggtttaaaattttatttatatttctggtagtacctgcactaactgaattgaaggtagtgcttatgttatttttgttctttttttctgacttcggtttatgttttcatttctttggagtaatgctgctctagattgttctaaatagaatgtgggcttcataatttttttttccacaaaaacagagtagtcaacttatatagtcaattacatcaggacattttgtgtttcttacagaagcaaaccataggctcctcttttccttaaaactacttagataaactgtattcgtgaactgcatgctggaaaatgctactattatgctaaataatgctaaccaacatttaaaatgtgcaaaactaataaagattacattttttatttta

SEQ ID NO: 18459 - DNA, 8533 bp, Homo sapiens
  source 1..8533: mol_type = unassigned DNA
caagctatttgctgatttgtattaggtaccatagagtgaggcgaggatgaagccgagaggatactgcagaggtctctggtgcatgtgtgtatgtgtgcgtttgtgtgtgtttgtgtgtctgtgtgttctgccccagtgagactgcagcccttgtaaatactttgacaccttttgcaagaaggaatctgaacaattgcaactgaaggcacattgttatcatctcgtctttgggtgatgctgttcctcactgcagatggataattttccttttaatcaggtttgggcaattatgaataaggctgctgtatacatccgtgtgcaggattttgtgtggacataagttttcaactcctttggttaaatcctaaggaatttcatatgcagaataaatggtaattaaaatgtgcaggatgacaagatggagcaaacagtgcttgtaccaccaggacctgacagcttcaacttcttcaccagagaatctcttgcggctattgaaagacgcattgcagaagaaaaggcaaagaatcccaaaccagacaaaaaagatgacgacgaaaatggcccaaagccaaatagtgacttggaagctggaaagaaccttccatttatttatggagacattcctccagagatggtgtcagagcccctggaggacctggacccctactatatcaataagaaaacttttatagtattgaataaagggaaggccatcttccggttcagtgccacctctgccctgtacattttaactcccttcaatcctcttaggaaaatagctattaagattttggtacattcattattcagcatgctaattatgtgcactattttgacaaactgtgtgtttatgacaatgagtaaccctcctgattggacaaagaatgtagaatacaccttcacaggaatatatacttttgaatcacttataaaaattattgcaaggggattctgtttagaagattttactttccttcgggatccatggaactggctcgatttcactgtcattacatttgcgtacgtcacagagtttgtggacctgggcaatgtctcggcattgagaacattcagagttctccgagcattgaagacgatttcagtcattccaggcctgaaaaccattgtgggagccctgatccagtctgtgaagaagctctcagatgtaatgatcctgactgtgttctgtctgagcgtatttgctctaattgggctgcagctgttcatgggcaacctgaggaataaatgtatacaatggcctcccaccaatgcttccttggaggaacatagtatagaaaagaatataactgtgaattataatggtacacttataaatgaaactgtctttgagtttgactggaagtcatatattcaagattcaagatatcattatttcctggagggttttttagatgcactactatgtggaaatagctctgatgcaggccaatgtccagagggatatatgtgtgtgaaagctggtagaaatcccaattatggctacacaagctttgataccttcagttgggcttttttgtccttgtttcgactaatgactcaggacttctgggaaaatctttatcaactgacattacgtgctgctgggaaaacgtacatgatattttttgtattggtcattttcttgggctcattctacctaataaatttgatcctggctgtggtggccatggcctacgaggaacagaatcaggccaccttggaagaagcagaacagaaagaggccgaatttcagcagatgattgaacagcttaaaaagcaacaggaggcagctcagcaggcagcaacggcaactgcctcagaacattccagagagcccagtgcagcaggcaggctctcagacagctcatctgaagcctctaagttgagttccaagagtgctaaggaaagaagaaatcggaggaagaaaagaaaacagaaagagcagtctggtggggaagagaaagatgaggatgaattccaaaaatctgaatctgaggacagcatcaggaggaaaggttttcgcttctccattgaagggaaccgattgacatatgaaaagaggtactcctccccacaccagtctttgttgagcatccgtggctccctattttcaccaaggcgaaatagcagaacaagccttttcagctttagagggcgagcaaaggatgtgggatctgagaacgacttcgcagatgatgagcacagcacctttgaggataacgagagccgtagagattccttgtttgtgccccgacgacacggagagagacgcaacagcaacctgagtcagaccagtaggtcatcccggatgctggcagtgtttccagcgaatgggaagatgcacagcactgtggattgcaatggtgtggtttccttggttggtggaccttcagttcctacatcgcctgttggacagcttctgccagaggtgataatagataagccagctactgatgacaatggaacaaccactgaaactgaaatgagaaagagaaggtcaagttctttccacgtttccatggactttctagaagatccttcccaaaggcaacgagcaatgagtatagccagcattctaacaaatacagtagaagaacttgaagaatccaggcagaaatgcccaccctgttggtataaattttccaacatattcttaatctgggactgttctccatattggttaaaagtgaaacatgttgtcaacctggttgtgatggacccatttgttgacctggccatcaccatctgtattgtcttaaatactcttttcatggccatggagcactatccaatgacggaccatttcaataatgtgcttacagtaggaaacttggttttcactgggatctttacagcagaaatgtttctgaaaattattgccatggatccttactattatttccaagaaggctggaatatctttgacggttttattgtgacgcttagcctggtagaacttggactcgccaatgtggaaggattatctgttctccgttcatttcgattgctgcgagttttcaagttggcaaaatcttggccaacgttaaatatgctaataaagatcatcggcaattccgtgggggctctgggaaatttaaccctcgtcttggccatcatcgtcttcatttttgccgtggtcggcatgcagctctttggtaaaagctacaaagattgtgtctgcaagatcgccagtgattgtcaactcccacgctggcacatgaatgacttcttccactccttcctgattgtgttccgcgtgctgtgtggggagtggatagagaccatgtgggactgtatggaggttgctggtcaagccatgtgccttactgtcttcatgatggtcatggtgattggaaacctagtggtcctgaatctctttctggccttgcttctgagctcatttagtgcagacaaccttgcagccactgatgatgataatgaaatgaataatctccaaattgctgtggataggatgcacaaaggagtagcttatgtgaaaagaaaaatatatgaatttattcaacagtccttcattaggaaacaaaagattttagatgaaattaaaccacttgatgatctaaacaacaagaaagacagttgtatgtccaatcatacagcagaaattgggaaagatcttgactatcttaaagatgtaaatggaactacaagtggtataggaactggcagcagtgttgaaaaatacattattgatgaaagtgattacatgtcattcataaacaaccccagtcttactgtgactgtaccaattgctgtaggagaatctgactttgaaaatttaaacacggaagactttagtagtgaatcggatctggaagaaagcaaagagaaactgaatgaaagcagtagctcatcagaaggtagcactgtggacatcggcgcacctgtagaagaacagcccgtagtggaacctgaagaaactcttgaaccagaagcttgtttcactgaaggctgtgtacaaagattcaagtgttgtcaaatcaatgtggaagaaggcagaggaaaacaatggtggaacctgagaaggacgtgtttccgaatagttgaacataactggtttgagaccttcattgttttcatgattctccttagtagtggtgctctggcatttgaagatatatatattgatcagcgaaagacgattaagacgatgttggaatatgctgacaaggttttcacttacattttcattctggaaatgcttctaaaatgggtggcatatggctatcaaacatatttcaccaatgcctggtgttggctggacttcttaattgttgatgtttcattggtcagtttaacagcaaatgccttgggttactcagaacttggagccatcaaatctctcaggacactaagagctctgagacctctaagagccttatctcgatttgaagggatgagggtggttgtgaatgcccttttaggagcaattccatccatcatgaatgtgcttctggtttgtcttatattctggctaattttcagcatcatgggcgtaaatttgtttgctggcaaattctaccactgtattaacaccacaactggtgacaggtttgacatcgaagacgtgaataatcatactgattgcctaaaactaatagaaagaaatgagactgctcgatggaaaaatgtgaaagtaaactttgataatgtaggatttgggtatctctctttgcttcaagttgccacattcaaaggatggatggatataatgtatgcagcagttgattccagaaatgtggaactccagcctaagtatgaagaaagtctgtacatgtatctttactttgttattttcatcatctttgggtccttcttcaccttgaacctgtttattggtgtcatcatagataatttcaaccagcagaaaaagaagtttggaggtcaagacatctttatgacagaagaacagaagaaatactataatgcaatgaaaaaattaggatcgaaaaaaccgcaaaagcctatacctcgaccaggaaacaaatttcaaggaatggtctttgacttcgtaaccagacaagtttttgacataagcatcatgattctcatctgtcttaacatggtcacaatgatggtggaaacagatgaccagagtgaatatgtgactaccattttgtcacgcatcaatctggtgttcattgtgctatttactggagagtgtgtactgaaactcatctctctacgccattattattttaccattggatggaatatttttgattttgtggttgtcattctctccattgtaggtatgtttcttgccgagctgatagaaaagtatttcgtgtcccctaccctgttccgagtgatccgtcttgctaggattggccgaatcctacgtctgatcaaaggagcaaaggggatccgcacgctgctctttgctttgatgatgtcccttcctgcgttgtttaacatcggcctcctactcttcctagtcatgttcatctacgccatctttgggatgtccaactttgcctatgttaagagggaagttgggatcgatgacatgttcaactttgagacctttggcaacagcatgatctgcctattccaaattacaacctctgctggctgggatggattgctagcacccattctcaacagtaagccacccgactgtgaccctaataaagttaaccctggaagctcagttaagggagactgtgggaacccatctgttggaattttcttttttgtcagttacatcatcatatccttcctggttgtggtgaacatgtacatcgcggtcatcctggagaacttcagtgttgctactgaagaaagtgcagagcctctgagtgaggatgactttgagatgttctatgaggtttgggagaagtttgatcccgatgcaactcagttcatggaatttgaaaaattatctcagtttgcagctgcgcttgaaccgcctctcaatctgccacaaccaaacaaactccagctcattgccatggatttgcccatggtgagtggtgaccggatccactgtcttgatatcttatttgcttttacaaagcgggttctaggagagagtggagagatggatgctctacgaatacagatggaagagcgattcatggcttccaatccttccaaggtctcctatcagccaatcactactactttaaaacgaaaacaagaggaagtatctgctgtcattattcagcgtgcttacagacgccaccttttaaagcgaactgtaaaacaagcttcctttacgtacaataaaaacaaaatcaaaggtggggctaatcttcttataaaagaagacatgataattgacagaataaatgaaaactctattacagaaaaaactgatctgaccatgtccactgcagcttgtccaccttcctatgaccgggtgacaaagccaattgtggaaaaacatgagcaagaaggcaaagatgaaaaagccaaagggaaataaatgaaaataaataaaaataattgggtgacaaattgtttacagcctgtgaaggtgatgtatttttatcaacaggactcctttaggaggtcaatgccaaactgactgtttttacacaaatctccttaaggtcagtgcctacaataagacagtgaccccttgtcagcaaactgtgactctgtgtaaaggggagatgaccttgacaggaggttactgttctcactaccagctgacactgctgaagataagatgcacaatggctagtcagactgtagggaccagtttcaaggggtgcaaacctgtgattttggggttgtttaacatgaaacactttagtgtagtaattgtatccactgtttgcatttcaactgccacatttgtcacatttttatggaatctgttagtggattcatctttttgttaatccatgtgtttattatatgtgactatttttgtaaacgaagtttctgttgagaaataggctaaggacctctataacaggtatgccacctggggggtatggcaaccacatggccctcccagctacacaaagtcgtggtttgcatgagggcatgctgcacttagagatcatgcatgagaaaaagtcacaagaaaaacaaattcttaaatttcaccatatttctgggaggggtaattgggtgataagtggaggtgctttgttgatcttgttttgcgaaatccagcccctagaccaagtagattatttgtgggtaggccagtaaatcttagcaggtgcaaacttcattcaaatgtttggagtcataaatgttatgtttctttttgttgtattaaaaaaaaaacctgaatagtgaatattgcccctcaccctccaccgccagaagactgaattgaccaaaattactctttataaatttctgctttttcctgcactttgtttagccatcttcggctctcagcaaggttgacactgtatatgttaatgaaatgctatttattatgtaaatagtcattttaccctgtggtgcacgtttgagcaaacaaataatgacctaagcacagtatttattgcatcaaatatgtaccacaagaaatgtagagtgcaagctttacacaggtaataaaatgtattctgtaccatttatagatagtttggatgctatcaatgcatgtttatattaccatgctgctgtatctggtttctctcactgctcagaatctcatttatgagaaaccatatgtcagtggtaaagtcaaggaaattgttcaacagatctcatttatttaagtcattaagcaatagtttgcagcactttaacagctttttggttatttttacattttaagtggataacatatggtatatagccagactgtacagacatgtttaaaaaaacacactgcttaacctattaaatatgtgtttagaattttataagcaaatataaatactgtaaaaagtcactttattttatttttcagcattatgtacataaatatgaagaggaaattatcttcaggttgatatcacaatcacttttcttactttctgtccatagtactttttcatgaaagaaatttgctaaataagacatgaaaacaagactgggtagttgtagatttctgctttttaaattacatttgctaattttagattatttcacaattttaaggagcaaaataggttcacgattcatatccaaattatgctttgcaattggaaaagggtttaaaattttatttatatttctggtagtacctgcactaactgaattgaaggtagtgcttatgttatttttgttctttttttctgacttcggtttatgttttcatttctttggagtaatgctgctctagattgttctaaatagaatgtgggcttcataatttttttttccacaaaaacagagtagtcaacttatatagtcaattacatcaggacattttgtgtttcttacagaagcaaaccataggctcctcttttccttaaaactacttagataaactgtattcgtgaactgcatgctggaaaatgctactattatgctaaataatgctaaccaacatttaaaatgtgcaaaactaataaagattacattttttatttta

SEQ ID NO: 18460 - DNA, 8299 bp, Homo sapiens
  source 1..8299: mol_type = unassigned DNA
cattcagagagctccccagcactggtgcttcgttatgtaaggctgtctaggtcaagtgtaggagacacactgctggcctgtggaaactcatggaactgttcctccagattaacacttcaggggttatggaagctggaggaagctgagcttttactacatcttttgggggaatttcatatgcagaataaatggtaattaaaatgtgcaggatgacaagatggagcaaacagtgcttgtaccaccaggacctgacagcttcaacttcttcaccagagaatctcttgcggctattgaaagacgcattgcagaagaaaaggcaaagaatcccaaaccagacaaaaaagatgacgacgaaaatggcccaaagccaaatagtgacttggaagctggaaagaaccttccatttatttatggagacattcctccagagatggtgtcagagcccctggaggacctggacccctactatatcaataagaaaacttttatagtattgaataaagggaaggccatcttccggttcagtgccacctctgccctgtacattttaactcccttcaatcctcttaggaaaatagctattaagattttggtacattcattattcagcatgctaattatgtgcactattttgacaaactgtgtgtttatgacaatgagtaaccctcctgattggacaaagaatgtagaatacaccttcacaggaatatatacttttgaatcacttataaaaattattgcaaggggattctgtttagaagattttactttccttcgggatccatggaactggctcgatttcactgtcattacatttgcgtacgtcacagagtttgtggacctgggcaatgtctcggcattgagaacattcagagttctccgagcattgaagacgatttcagtcattccaggcctgaaaaccattgtgggagccctgatccagtctgtgaagaagctctcagatgtaatgatcctgactgtgttctgtctgagcgtatttgctctaattgggctgcagctgttcatgggcaacctgaggaataaatgtatacaatggcctcccaccaatgcttccttggaggaacatagtatagaaaagaatataactgtgaattataatggtacacttataaatgaaactgtctttgagtttgactggaagtcatatattcaagattcaagatatcattatttcctggagggttttttagatgcactactatgtggaaatagctctgatgcaggccaatgtccagagggatatatgtgtgtgaaagctggtagaaatcccaattatggctacacaagctttgataccttcagttgggcttttttgtccttgtttcgactaatgactcaggacttctgggaaaatctttatcaactgacattacgtgctgctgggaaaacgtacatgatattttttgtattggtcattttcttgggctcattctacctaataaatttgatcctggctgtggtggccatggcctacgaggaacagaatcaggccaccttggaagaagcagaacagaaagaggccgaatttcagcagatgattgaacagcttaaaaagcaacaggaggcagctcagcaggcagcaacggcaactgcctcagaacattccagagagcccagtgcagcaggcaggctctcagacagctcatctgaagcctctaagttgagttccaagagtgctaaggaaagaagaaatcggaggaagaaaagaaaacagaaagagcagtctggtggggaagagaaagatgaggatgaattccaaaaatctgaatctgaggacagcatcaggaggaaaggttttcgcttctccattgaagggaaccgattgacatatgaaaagaggtactcctccccacaccagtctttgttgagcatccgtggctccctattttcaccaaggcgaaatagcagaacaagccttttcagctttagagggcgagcaaaggatgtgggatctgagaacgacttcgcagatgatgagcacagcacctttgaggataacgagagccgtagagattccttgtttgtgccccgacgacacggagagagacgcaacagcaacctgagtcagaccagtaggtcatcccggatgctggcagtgtttccagcgaatgggaagatgcacagcactgtggattgcaatggtgtggtttccttggttggtggaccttcagttcctacatcgcctgttggacagcttctgccagagggaacaaccactgaaactgaaatgagaaagagaaggtcaagttctttccacgtttccatggactttctagaagatccttcccaaaggcaacgagcaatgagtatagccagcattctaacaaatacagtagaagaacttgaagaatccaggcagaaatgcccaccctgttggtataaattttccaacatattcttaatctgggactgttctccatattggttaaaagtgaaacatgttgtcaacctggttgtgatggacccatttgttgacctggccatcaccatctgtattgtcttaaatactcttttcatggccatggagcactatccaatgacggaccatttcaataatgtgcttacagtaggaaacttggttttcactgggatctttacagcagaaatgtttctgaaaattattgccatggatccttactattatttccaagaaggctggaatatctttgacggttttattgtgacgcttagcctggtagaacttggactcgccaatgtggaaggattatctgttctccgttcatttcgattgctgcgagttttcaagttggcaaaatcttggccaacgttaaatatgctaataaagatcatcggcaattccgtgggggctctgggaaatttaaccctcgtcttggccatcatcgtcttcatttttgccgtggtcggcatgcagctctttggtaaaagctacaaagattgtgtctgcaagatcgccagtgattgtcaactcccacgctggcacatgaatgacttcttccactccttcctgattgtgttccgcgtgctgtgtggggagtggatagagaccatgtgggactgtatggaggttgctggtcaagccatgtgccttactgtcttcatgatggtcatggtgattggaaacctagtggtcctgaatctctttctggccttgcttctgagctcatttagtgcagacaaccttgcagccactgatgatgataatgaaatgaataatctccaaattgctgtggataggatgcacaaaggagtagcttatgtgaaaagaaaaatatatgaatttattcaacagtccttcattaggaaacaaaagattttagatgaaattaaaccacttgatgatctaaacaacaagaaagacagttgtatgtccaatcatacagcagaaattgggaaagatcttgactatcttaaagatgtaaatggaactacaagtggtataggaactggcagcagtgttgaaaaatacattattgatgaaagtgattacatgtcattcataaacaaccccagtcttactgtgactgtaccaattgctgtaggagaatctgactttgaaaatttaaacacggaagactttagtagtgaatcggatctggaagaaagcaaagagaaactgaatgaaagcagtagctcatcagaaggtagcactgtggacatcggcgcacctgtagaagaacagcccgtagtggaacctgaagaaactcttgaaccagaagcttgtttcactgaaggctgtgtacaaagattcaagtgttgtcaaatcaatgtggaagaaggcagaggaaaacaatggtggaacctgagaaggacgtgtttccgaatagttgaacataactggtttgagaccttcattgttttcatgattctccttagtagtggtgctctggcatttgaagatatatatattgatcagcgaaagacgattaagacgatgttggaatatgctgacaaggttttcacttacattttcattctggaaatgcttctaaaatgggtggcatatggctatcaaacatatttcaccaatgcctggtgttggctggacttcttaattgttgatgtttcattggtcagtttaacagcaaatgccttgggttactcagaacttggagccatcaaatctctcaggacactaagagctctgagacctctaagagccttatctcgatttgaagggatgagggtggttgtgaatgcccttttaggagcaattccatccatcatgaatgtgcttctggtttgtcttatattctggctaattttcagcatcatgggcgtaaatttgtttgctggcaaattctaccactgtattaacaccacaactggtgacaggtttgacatcgaagacgtgaataatcatactgattgcctaaaactaatagaaagaaatgagactgctcgatggaaaaatgtgaaagtaaactttgataatgtaggatttgggtatctctctttgcttcaagttgccacattcaaaggatggatggatataatgtatgcagcagttgattccagaaatgtggaactccagcctaagtatgaagaaagtctgtacatgtatctttactttgttattttcatcatctttgggtccttcttcaccttgaacctgtttattggtgtcatcatagataatttcaaccagcagaaaaagaagtttggaggtcaagacatctttatgacagaagaacagaagaaatactataatgcaatgaaaaaattaggatcgaaaaaaccgcaaaagcctatacctcgaccaggaaacaaatttcaaggaatggtctttgacttcgtaaccagacaagtttttgacataagcatcatgattctcatctgtcttaacatggtcacaatgatggtggaaacagatgaccagagtgaatatgtgactaccattttgtcacgcatcaatctggtgttcattgtgctatttactggagagtgtgtactgaaactcatctctctacgccattattattttaccattggatggaatatttttgattttgtggttgtcattctctccattgtaggtatgtttcttgccgagctgatagaaaagtatttcgtgtcccctaccctgttccgagtgatccgtcttgctaggattggccgaatcctacgtctgatcaaaggagcaaaggggatccgcacgctgctctttgctttgatgatgtcccttcctgcgttgtttaacatcggcctcctactcttcctagtcatgttcatctacgccatctttgggatgtccaactttgcctatgttaagagggaagttgggatcgatgacatgttcaactttgagacctttggcaacagcatgatctgcctattccaaattacaacctctgctggctgggatggattgctagcacccattctcaacagtaagccacccgactgtgaccctaataaagttaaccctggaagctcagttaagggagactgtgggaacccatctgttggaattttcttttttgtcagttacatcatcatatccttcctggttgtggtgaacatgtacatcgcggtcatcctggagaacttcagtgttgctactgaagaaagtgcagagcctctgagtgaggatgactttgagatgttctatgaggtttgggagaagtttgatcccgatgcaactcagttcatggaatttgaaaaattatctcagtttgcagctgcgcttgaaccgcctctcaatctgccacaaccaaacaaactccagctcattgccatggatttgcccatggtgagtggtgaccggatccactgtcttgatatcttatttgcttttacaaagcgggttctaggagagagtggagagatggatgctctacgaatacagatggaagagcgattcatggcttccaatccttccaaggtctcctatcagccaatcactactactttaaaacgaaaacaagaggaagtatctgctgtcattattcagcgtgcttacagacgccaccttttaaagcgaactgtaaaacaagcttcctttacgtacaataaaaacaaaatcaaaggtggggctaatcttcttataaaagaagacatgataattgacagaataaatgaaaactctattacagaaaaaactgatctgaccatgtccactgcagcttgtccaccttcctatgaccgggtgacaaagccaattgtggaaaaacatgagcaagaaggcaaagatgaaaaagccaaagggaaataaatgaaaataaataaaaataattgggtgacaaattgtttacagcctgtgaaggtgatgtatttttatcaacaggactcctttaggaggtcaatgccaaactgactgtttttacacaaatctccttaaggtcagtgcctacaataagacagtgaccccttgtcagcaaactgtgactctgtgtaaaggggagatgaccttgacaggaggttactgttctcactaccagctgacactgctgaagataagatgcacaatggctagtcagactgtagggaccagtttcaaggggtgcaaacctgtgattttggggttgtttaacatgaaacactttagtgtagtaattgtatccactgtttgcatttcaactgccacatttgtcacatttttatggaatctgttagtggattcatctttttgttaatccatgtgtttattatatgtgactatttttgtaaacgaagtttctgttgagaaataggctaaggacctctataacaggtatgccacctggggggtatggcaaccacatggccctcccagctacacaaagtcgtggtttgcatgagggcatgctgcacttagagatcatgcatgagaaaaagtcacaagaaaaacaaattcttaaatttcaccatatttctgggaggggtaattgggtgataagtggaggtgctttgttgatcttgttttgcgaaatccagcccctagaccaagtagattatttgtgggtaggccagtaaatcttagcaggtgcaaacttcattcaaatgtttggagtcataaatgttatgtttctttttgttgtattaaaaaaaaaacctgaatagtgaatattgcccctcaccctccaccgccagaagactgaattgaccaaaattactctttataaatttctgctttttcctgcactttgtttagccatcttcggctctcagcaaggttgacactgtatatgttaatgaaatgctatttattatgtaaatagtcattttaccctgtggtgcacgtttgagcaaacaaataatgacctaagcacagtatttattgcatcaaatatgtaccacaagaaatgtagagtgcaagctttacacaggtaataaaatgtattctgtaccatttatagatagtttggatgctatcaatgcatgtttatattaccatgctgctgtatctggtttctctcactgctcagaatctcatttatgagaaaccatatgtcagtggtaaagtcaaggaaattgttcaacagatctcatttatttaagtcattaagcaatagtttgcagcactttaacagctttttggttatttttacattttaagtggataacatatggtatatagccagactgtacagacatgtttaaaaaaacacactgcttaacctattaaatatgtgtttagaattttataagcaaatataaatactgtaaaaagtcactttattttatttttcagcattatgtacataaatatgaagaggaaattatcttcaggttgatatcacaatcacttttcttactttctgtccatagtactttttcatgaaagaaatttgctaaataagacatgaaaacaagactgggtagttgtagatttctgctttttaaattacatttgctaattttagattatttcacaattttaaggagcaaaataggttcacgattcatatccaaattatgctttgcaattggaaaagggtttaaaattttatttatatttctggtagtacctgcactaactgaattgaaggtagtgcttatgttatttttgttctttttttctgacttcggtttatgttttcatttctttggagtaatgctgctctagattgttctaaatagaatgtgggcttcataatttttttttccacaaaaacagagtagtcaacttatatagtcaattacatcaggacattttgtgtttcttacagaagcaaaccataggctcctcttttccttaaaactacttagataaactgtattcgtgaactgcatgctggaaaatgctactattatgctaaataatgctaaccaacatttaaaatgtgcaaaactaataaagattacattttttatttta

SEQ ID NO: 18461 - DNA, 8097 bp, Homo sapiens
  source 1..8097: mol_type = unassigned DNA
aatgtgcaggatgacaagatggagcaaacagtgcttgtaccaccaggacctgacagcttcaacttcttcaccagagaatctcttgcggctattgaaagacgcattgcagaagaaaaggcaaagaatcccaaaccagacaaaaaagatgacgacgaaaatggcccaaagccaaatagtgacttggaagctggaaagaaccttccatttatttatggagacattcctccagagatggtgtcagagcccctggaggacctggacccctactatatcaataagaaaacttttatagtattgaataaagggaaggccatcttccggttcagtgccacctctgccctgtacattttaactcccttcaatcctcttaggaaaatagctattaagattttggtacattcattattcagcatgctaattatgtgcactattttgacaaactgtgtgtttatgacaatgagtaaccctcctgattggacaaagaatgtagaatacaccttcacaggaatatatacttttgaatcacttataaaaattattgcaaggggattctgtttagaagattttactttccttcgggatccatggaactggctcgatttcactgtcattacatttgcgtacgtcacagagtttgtggacctgggcaatgtctcggcattgagaacattcagagttctccgagcattgaagacgatttcagtcattccaggcctgaaaaccattgtgggagccctgatccagtctgtgaagaagctctcagatgtaatgatcctgactgtgttctgtctgagcgtatttgctctaattgggctgcagctgttcatgggcaacctgaggaataaatgtatacaatggcctcccaccaatgcttccttggaggaacatagtatagaaaagaatataactgtgaattataatggtacacttataaatgaaactgtctttgagtttgactggaagtcatatattcaagattcaagatatcattatttcctggagggttttttagatgcactactatgtggaaatagctctgatgcaggccaatgtccagagggatatatgtgtgtgaaagctggtagaaatcccaattatggctacacaagctttgataccttcagttgggcttttttgtccttgtttcgactaatgactcaggacttctgggaaaatctttatcaactgacattacgtgctgctgggaaaacgtacatgatattttttgtattggtcattttcttgggctcattctacctaataaatttgatcctggctgtggtggccatggcctacgaggaacagaatcaggccaccttggaagaagcagaacagaaagaggccgaatttcagcagatgattgaacagcttaaaaagcaacaggaggcagctcagcaggcagcaacggcaactgcctcagaacattccagagagcccagtgcagcaggcaggctctcagacagctcatctgaagcctctaagttgagttccaagagtgctaaggaaagaagaaatcggaggaagaaaagaaaacagaaagagcagtctggtggggaagagaaagatgaggatgaattccaaaaatctgaatctgaggacagcatcaggaggaaaggttttcgcttctccattgaagggaaccgattgacatatgaaaagaggtactcctccccacaccagtctttgttgagcatccgtggctccctattttcaccaaggcgaaatagcagaacaagccttttcagctttagagggcgagcaaaggatgtgggatctgagaacgacttcgcagatgatgagcacagcacctttgaggataacgagagccgtagagattccttgtttgtgccccgacgacacggagagagacgcaacagcaacctgagtcagaccagtaggtcatcccggatgctggcagtgtttccagcgaatgggaagatgcacagcactgtggattgcaatggtgtggtttccttggttggtggaccttcagttcctacatcgcctgttggacagcttctgccagagggaacaaccactgaaactgaaatgagaaagagaaggtcaagttctttccacgtttccatggactttctagaagatccttcccaaaggcaacgagcaatgagtatagccagcattctaacaaatacagtagaagaacttgaagaatccaggcagaaatgcccaccctgttggtataaattttccaacatattcttaatctgggactgttctccatattggttaaaagtgaaacatgttgtcaacctggttgtgatggacccatttgttgacctggccatcaccatctgtattgtcttaaatactcttttcatggccatggagcactatccaatgacggaccatttcaataatgtgcttacagtaggaaacttggttttcactgggatctttacagcagaaatgtttctgaaaattattgccatggatccttactattatttccaagaaggctggaatatctttgacggttttattgtgacgcttagcctggtagaacttggactcgccaatgtggaaggattatctgttctccgttcatttcgattgctgcgagttttcaagttggcaaaatcttggccaacgttaaatatgctaataaagatcatcggcaattccgtgggggctctgggaaatttaaccctcgtcttggccatcatcgtcttcatttttgccgtggtcggcatgcagctctttggtaaaagctacaaagattgtgtctgcaagatcgccagtgattgtcaactcccacgctggcacatgaatgacttcttccactccttcctgattgtgttccgcgtgctgtgtggggagtggatagagaccatgtgggactgtatggaggttgctggtcaagccatgtgccttactgtcttcatgatggtcatggtgattggaaacctagtggtcctgaatctctttctggccttgcttctgagctcatttagtgcagacaaccttgcagccactgatgatgataatgaaatgaataatctccaaattgctgtggataggatgcacaaaggagtagcttatgtgaaaagaaaaatatatgaatttattcaacagtccttcattaggaaacaaaagattttagatgaaattaaaccacttgatgatctaaacaacaagaaagacagttgtatgtccaatcatacagcagaaattgggaaagatcttgactatcttaaagatgtaaatggaactacaagtggtataggaactggcagcagtgttgaaaaatacattattgatgaaagtgattacatgtcattcataaacaaccccagtcttactgtgactgtaccaattgctgtaggagaatctgactttgaaaatttaaacacggaagactttagtagtgaatcggatctggaagaaagcaaagagaaactgaatgaaagcagtagctcatcagaaggtagcactgtggacatcggcgcacctgtagaagaacagcccgtagtggaacctgaagaaactcttgaaccagaagcttgtttcactgaaggctgtgtacaaagattcaagtgttgtcaaatcaatgtggaagaaggcagaggaaaacaatggtggaacctgagaaggacgtgtttccgaatagttgaacataactggtttgagaccttcattgttttcatgattctccttagtagtggtgctctggcatttgaagatatatatattgatcagcgaaagacgattaagacgatgttggaatatgctgacaaggttttcacttacattttcattctggaaatgcttctaaaatgggtggcatatggctatcaaacatatttcaccaatgcctggtgttggctggacttcttaattgttgatgtttcattggtcagtttaacagcaaatgccttgggttactcagaacttggagccatcaaatctctcaggacactaagagctctgagacctctaagagccttatctcgatttgaagggatgagggtggttgtgaatgcccttttaggagcaattccatccatcatgaatgtgcttctggtttgtcttatattctggctaattttcagcatcatgggcgtaaatttgtttgctggcaaattctaccactgtattaacaccacaactggtgacaggtttgacatcgaagacgtgaataatcatactgattgcctaaaactaatagaaagaaatgagactgctcgatggaaaaatgtgaaagtaaactttgataatgtaggatttgggtatctctctttgcttcaagttgccacattcaaaggatggatggatataatgtatgcagcagttgattccagaaatgtggaactccagcctaagtatgaagaaagtctgtacatgtatctttactttgttattttcatcatctttgggtccttcttcaccttgaacctgtttattggtgtcatcatagataatttcaaccagcagaaaaagaagtttggaggtcaagacatctttatgacagaagaacagaagaaatactataatgcaatgaaaaaattaggatcgaaaaaaccgcaaaagcctatacctcgaccaggaaacaaatttcaaggaatggtctttgacttcgtaaccagacaagtttttgacataagcatcatgattctcatctgtcttaacatggtcacaatgatggtggaaacagatgaccagagtgaatatgtgactaccattttgtcacgcatcaatctggtgttcattgtgctatttactggagagtgtgtactgaaactcatctctctacgccattattattttaccattggatggaatatttttgattttgtggttgtcattctctccattgtaggtatgtttcttgccgagctgatagaaaagtatttcgtgtcccctaccctgttccgagtgatccgtcttgctaggattggccgaatcctacgtctgatcaaaggagcaaaggggatccgcacgctgctctttgctttgatgatgtcccttcctgcgttgtttaacatcggcctcctactcttcctagtcatgttcatctacgccatctttgggatgtccaactttgcctatgttaagagggaagttgggatcgatgacatgttcaactttgagacctttggcaacagcatgatctgcctattccaaattacaacctctgctggctgggatggattgctagcacccattctcaacagtaagccacccgactgtgaccctaataaagttaaccctggaagctcagttaagggagactgtgggaacccatctgttggaattttcttttttgtcagttacatcatcatatccttcctggttgtggtgaacatgtacatcgcggtcatcctggagaacttcagtgttgctactgaagaaagtgcagagcctctgagtgaggatgactttgagatgttctatgaggtttgggagaagtttgatcccgatgcaactcagttcatggaatttgaaaaattatctcagtttgcagctgcgcttgaaccgcctctcaatctgccacaaccaaacaaactccagctcattgccatggatttgcccatggtgagtggtgaccggatccactgtcttgatatcttatttgcttttacaaagcgggttctaggagagagtggagagatggatgctctacgaatacagatggaagagcgattcatggcttccaatccttccaaggtctcctatcagccaatcactactactttaaaacgaaaacaagaggaagtatctgctgtcattattcagcgtgcttacagacgccaccttttaaagcgaactgtaaaacaagcttcctttacgtacaataaaaacaaaatcaaaggtggggctaatcttcttataaaagaagacatgataattgacagaataaatgaaaactctattacagaaaaaactgatctgaccatgtccactgcagcttgtccaccttcctatgaccgggtgacaaagccaattgtggaaaaacatgagcaagaaggcaaagatgaaaaagccaaagggaaataaatgaaaataaataaaaataattgggtgacaaattgtttacagcctgtgaaggtgatgtatttttatcaacaggactcctttaggaggtcaatgccaaactgactgtttttacacaaatctccttaaggtcagtgcctacaataagacagtgaccccttgtcagcaaactgtgactctgtgtaaaggggagatgaccttgacaggaggttactgttctcactaccagctgacactgctgaagataagatgcacaatggctagtcagactgtagggaccagtttcaaggggtgcaaacctgtgattttggggttgtttaacatgaaacactttagtgtagtaattgtatccactgtttgcatttcaactgccacatttgtcacatttttatggaatctgttagtggattcatctttttgttaatccatgtgtttattatatgtgactatttttgtaaacgaagtttctgttgagaaataggctaaggacctctataacaggtatgccacctggggggtatggcaaccacatggccctcccagctacacaaagtcgtggtttgcatgagggcatgctgcacttagagatcatgcatgagaaaaagtcacaagaaaaacaaattcttaaatttcaccatatttctgggaggggtaattgggtgataagtggaggtgctttgttgatcttgttttgcgaaatccagcccctagaccaagtagattatttgtgggtaggccagtaaatcttagcaggtgcaaacttcattcaaatgtttggagtcataaatgttatgtttctttttgttgtattaaaaaaaaaacctgaatagtgaatattgcccctcaccctccaccgccagaagactgaattgaccaaaattactctttataaatttctgctttttcctgcactttgtttagccatcttcggctctcagcaaggttgacactgtatatgttaatgaaatgctatttattatgtaaatagtcattttaccctgtggtgcacgtttgagcaaacaaataatgacctaagcacagtatttattgcatcaaatatgtaccacaagaaatgtagagtgcaagctttacacaggtaataaaatgtattctgtaccatttatagatagtttggatgctatcaatgcatgtttatattaccatgctgctgtatctggtttctctcactgctcagaatctcatttatgagaaaccatatgtcagtggtaaagtcaaggaaattgttcaacagatctcatttatttaagtcattaagcaatagtttgcagcactttaacagctttttggttatttttacattttaagtggataacatatggtatatagccagactgtacagacatgtttaaaaaaacacactgcttaacctattaaatatgtgtttagaattttataagcaaatataaatactgtaaaaagtcactttattttatttttcagcattatgtacataaatatgaagaggaaattatcttcaggttgatatcacaatcacttttcttactttctgtccatagtactttttcatgaaagaaatttgctaaataagacatgaaaacaagactgggtagttgtagatttctgctttttaaattacatttgctaattttagattatttcacaattttaaggagcaaaataggttcacgattcatatccaaattatgctttgcaattggaaaagggtttaaaattttatttatatttctggtagtacctgcactaactgaattgaaggtagtgcttatgttatttttgttctttttttctgacttcggtttatgttttcatttctttggagtaatgctgctctagattgttctaaatagaatgtgggcttcataatttttttttccacaaaaacagagtagtcaacttatatagtcaattacatcaggacattttgtgtttcttacagaagcaaaccataggctcctcttttccttaaaactacttagataaactgtattcgtgaactgcatgctggaaaatgctactattatgctaaataatgctaaccaacatttaaaatgtgcaaaactaataaagattacattttttatt

SEQ ID NO: 18462 - DNA, 4268 bp, Homo sapiens
  source 1..4268: mol_type = unassigned DNA
aaattgggaaagatcttgactatcttaaagatgtaaatggaactacaagtggtataggaactggcagcagtgttgaaaaatacattattgatgaaagtgattacatgtcattcataaacaaccccagtcttactgtgactgtaccaattgctgtaggagaatctgactttgaaaatttaaacacggaagactttagtagtgaatcggatctggaagaaagcaaagagaaactgaatgaaagcagtagctcatcagaaggtagcactgtggacatcggcgcacctgtagaagaacagcccgtagtggaacctgaagaaactcttgaaccagaagcttgtttcactgaaggctgtgtacaaagattcaagtgttgtcaaatcaatgtggaagaaggcagaggaaaacaatggtggaacctgagaaggacgtgtttccgaatagttgaacataactggtttgagaccttcattgttttcatgattctccttagtagtggtgctctggcatttgaagatatatatattgatcagcgaaagacgattaagacgatgttggaatatgctgacaaggttttcacttacattttcattctggaaatgcttctaaaatgggtggcatatggctatcaaacatatttcaccaatgcctggtgttggctggacttcttaattgttgatgtttcattggtcagtttaacagcaaatgccttgggttactcagaacttggagccatcaaatctctcaggacactaagagctctgagacctctaagagccttatctcgatttgaagggatgagggataatcttgctccaacttggatggggtggagcgctggttcctcccctgagccctttattatgggtggttgtgaatgcccttttaggagcaattccatccatcatgaatgtgcttctggtttgtcttatattctggctaattttcagcatcatgggcgtaaatttgtttgctggcaaattctaccactgtattaacaccacaactggtgacaggtttgacatcgaagacgtgaataatcatactgattgcctaaaactaatagaaagaaatgagactgctcgatggaaaaatgtgaaagtaaactttgataatgtaggatttgggtatctctctttgcttcaagttgccacattcaaaggatggatggatataatgtatgcagcagttgattccagaaatgtggaactccagcctaagtatgaagaaagtctgtacatgtatctttactttgttattttcatcatctttgggtccttcttcaccttgaacctgtttattggtgtcatcatagataatttcaaccagcagaaaaagaagtttggaggtcaagacatctttatgacagaagaacagaagaaatactataatgcaatgaaaaaattaggatcgaaaaaaccgcaaaagcctatacctcgaccaggaaacaaatttcaaggaatggtctttgacttcgtaaccagacaagtttttgacataagcatcatgattctcatctgtcttaacatggtcacaatgatggtggaaacagatgaccagagtgaatatgtgactaccattttgtcacgcatcaatctggtgttcattgtgctatttactggagagtgtgtactgaaactcatctctctacgccattattattttaccattggatggaatatttttgattttgtggttgtcattctctccattgtaggtatgtttcttgccgagctgatagaaaagtatttcgtgtcccctaccctgttccgagtgatccgtcttgctaggattggccgaatcctacgtctgatcaaaggagcaaaggggatccgcacgctgctctttgctttgatgatgtcccttcctgcgttgtttaacatcggcctcctactcttcctagtcatgttcatctacgccatctttgggatgtccaactttgcctatgttaagagggaagttgggatcgatgacatgttcaactttgagacctttggcaacagcatgatctgcctattccaaattacaacctctgctggctgggatggattgctagcacccattctcaacagtaagccacccgactgtgaccctaataaagttaaccctggaagctcagttaagggagactgtgggaacccatctgttggaattttcttttttgtcagttacatcatcatatccttcctggttgtggtgaacatgtacatcgcggtcatcctggagaacttcagtgttgctactgaagaaagtgcagagcctctgagtgaggatgactttgagatgttctatgaggtttgggagaagtttgatcccgatgcaactcagttcatggaatttgaaaaattatctcagtttgcagctgcgcttgaaccgcctctcaatctgccacaaccaaacaaactccagctcattgccatggatttgcccatggtgagtggtgaccggatccactgtcttgatatcttatttgcttttacaaagcgggttctaggagagagtggagagatggatgctctacgaatacagatggaagagcgattcatggcttccaatccttccaaggtctcctatcagccaatcactactactttaaaacgaaaacaagaggaagtatctgctgtcattattcagcgtgcttacagacgccaccttttaaagcgaactgtaaaacaagcttcctttacgtacaataaaaacaaaatcaaaggtggggctaatcttcttataaaagaagacatgataattgacagaataaatgaaaactctattacagaaaaaactgatctgaccatgtccactgcagcttgtccaccttcctatgaccgggtgacaaagccaattgtggaaaaacatgagcaagaaggcaaagatgaaaaagccaaagggaaataaatgaaaataaataaaaataattgggtgacaaattgtttacagcctgtgaaggtgatgtatttttatcaacaggactcctttaggaggtcaatgccaaactgactgtttttacacaaatctccttaaggtcagtgcctacaataagacagtgaccccttgtcagcaaactgtgactctgtgtaaaggggagatgaccttgacaggaggttactgttctcactaccagctgacactgctgaagataagatgcacaatggctagtcagactgtagggaccagtttcaaggggtgcaaacctgtgattttggggttgtttaacatgaaacactttagtgtagtaattgtatccactgtttgcatttcaactgccacatttgtcacatttttatggaatctgttagtggattcatctttttgttaatccatgtgtttattatatgtgactatttttgtaaacgaagtttctgttgagaaataggctaaggacctctataacaggtatgccacctggggggtatggcaaccacatggccctcccagctacacaaagtcgtggtttgcatgagggcatgctgcacttagagatcatgcatgagaaaaagtcacaagaaaaacaaattcttaaatttcaccatatttctgggaggggtaattgggtgataagtggaggtgctttgttgatcttgttttgcgaaatccagcccctagaccaagtagattatttgtgggtaggccagtaaatcttagcaggtgcaaacttcattcaaatgtttggagtcataaatgttatgtttctttttgttgtattaaaaaaaaaacctgaatagtgaatattgcccctcaccctccaccgccagaagactgaattgaccaaaattactctttataaatttctgctttttcctgcactttgtttagccatcttcggctctcagcaaggttgacactgtatatgttaatgaaatgctatttattatgtaaatagtcattttaccctgtggtgcacgtttgagcaaacaaataatgacctaagcacagtatttattgcatcaaatatgtaccacaagaaatgtagagtgcaagctttacacaggtaataaaatgtattctgtaccatttatagatagtttggatgctatcaatgcatgtttatattaccatgctgctgtatctggtttctctcactgctcagaatctcatttatgagaaaccatatgtcagtggtaaagtcaaggaaattgttcaacagatctcatttatttaagtcattaagcaatagtttgcagcactttaacagctttttggttatttttacattttaagtggataacatatggtatatagccagactgtacagacatgtttaaaaaaacaca

SEQ ID NO: 18463 - DNA, 5946 bp, Homo sapiens
  source 1..5946: mol_type = unassigned DNA
atggagcaaacagtgcttgtaccaccaggacctgacagcttcaacttcttcaccagagaatctcttgcggctattgaaagacgcattgcagaagaaaaggcaaagaatcccaaaccagacaaaaaagatgacgacgaaaatggcccaaagccaaatagtgacttggaagctggaaagaaccttccatttatttatggagacattcctccagagatggtgtcagagcccctggaggacctggacccctactatatcaataagaaaacttttatagtattgaataaagggaaggccatcttccggttcagtgccacctctgccctgtacattttaactcccttcaatcctcttaggaaaatagctattaagattttggtacattcattattcagcatgctaattatgtgcactattttgacaaactgtgtgtttatgacaatgagtaaccctcctgattggacaaagaatgtagaatacaccttcacaggaatatatacttttgaatcacttataaaaattattgcaaggggattctgtttagaagattttactttccttcgggatccatggaactggctcgatttcactgtcattacatttgcgtacgtcacagagtttgtggacctgggcaatgtctcggcattgagaacattcagagttctccgagcattgaagacgatttcagtcattccaggcctgaaaaccattgtgggagccctgatccagtctgtgaagaagctctcagatgtaatgatcctgactgtgttctgtctgagcgtatttgctctaattgggctgcagctgttcatgggcaacctgaggaataaatgtatacaatggcctcccaccaatgcttccttggaggaacatagtatagaaaagaatataactgtgaattataatggtacacttataaatgaaactgtctttgagtttgactggaagtcatatattcaagattcaagatatcattatttcctggagggttttttagatgcactactatgtggaaatagctctgatgcaggccaatgtccagagggatatatgtgtgtgaaagctggtagaaatcccaattatggctacacaagctttgataccttcagttgggcttttttgtccttgtttcgactaatgactcaggacttctgggaaaatctttatcaactgacattacgtgctgctgggaaaacgtacatgatattttttgtattggtcattttcttgggctcattctacctaataaatttgatcctggctgtggtggccatggcctacgaggaacagaatcaggccaccttggaagaagcagaacagaaagaggccgaatttcagcagatgattgaacagcttaaaaagcaacaggaggcagctcagcaggcagcaacggcaactgcctcagaacattccagagagcccagtgcagcaggcaggctctcagacagctcatctgaagcctctaagttgagttccaagagtgctaaggaaagaagaaatcggaggaagaaaagaaaacagaaagagcagtctggtggggaagagaaagatgaggatgaattccaaaaatctgaatctgaggacagcatcaggaggaaaggttttcgcttctccattgaagggaaccgattgacatatgaaaagaggtactcctccccacaccagtctttgttgagcatccgtggctccctattttcaccaaggcgaaatagcagaacaagccttttcagctttagagggcgagcaaaggatgtgggatctgagaacgacttcgcagatgatgagcacagcacctttgaggataacgagagccgtagagattccttgtttgtgccccgacgacacggagagagacgcaacagcaacctgagtcagaccagtaggtcatcccggatgctggcagtgtttccagcgaatgggaagatgcacagcactgtggattgcaatggtgtggtttccttgggaacaaccactgaaactgaaatgagaaagagaaggtcaagttctttccacgtttccatggactttctagaagatccttcccaaaggcaacgagcaatgagtatagccagcattctaacaaatacagtagaagaacttgaagaatccaggcagaaatgcccaccctgttggtataaattttccaacatattcttaatctgggactgttctccatattggttaaaagtgaaacatgttgtcaacctggttgtgatggacccatttgttgacctggccatcaccatctgtattgtcttaaatactcttttcatggccatggagcactatccaatgacggaccatttcaataatgtgcttacagtaggaaacttggttttcactgggatctttacagcagaaatgtttctgaaaattattgccatggatccttactattatttccaagaaggctggaatatctttgacggttttattgtgacgcttagcctggtagaacttggactcgccaatgtggaaggattatctgttctccgttcatttcgattgctgcgagttttcaagttggcaaaatcttggccaacgttaaatatgctaataaagatcatcggcaattccgtgggggctctgggaaatttaaccctcgtcttggccatcatcgtcttcatttttgccgtggtcggcatgcagctctttggtaaaagctacaaagattgtgtctgcaagatcgccagtgattgtcaactcccacgctggcacatgaatgacttcttccactccttcctgattgtgttccgcgtgctgtgtggggagtggatagagaccatgtgggactgtatggaggttgctggtcaagccatgtgccttactgtcttcatgatggtcatggtgattggaaacctagtggtcctgaatctctttctggccttgcttctgagctcatttagtgcagacaaccttgcagccactgatgatgataatgaaatgaataatctccaaattgctgtggataggatgcacaaaggagtagcttatgtgaaaagaaaaatatatgaatttattcaacagtccttcattaggaaacaaaagattttagatgaaattaaaccacttgatgatctaaacaacaagaaagacagttgtatgtccaatcatacagcagaaattgggaaagatcttgactatcttaaagatgtaaatggaactacaagtggtataggaactggcagcagtgttgaaaaatacattattgatgaaagtgattacatgtcattcataaacaaccccagtcttactgtgactgtaccaattgctgtaggagaatctgactttgaaaatttaaacacggaagactttagtagtgaatcggatctggaagaaagcaaagagaaactgaatgaaagcagtagctcatcagaaggtagcactgtggacatcggcgcacctgtagaagaacagcccgtagtggaacctgaagaaactcttgaaccagaagcttgtttcactgaaggctgtgtacaaagattcaagtgttgtcaaatcaatgtggaagaaggcagaggaaaacaatggtggaacctgagaaggacgtgtttccgaatagttgaacataactggtttgagaccttcattgttttcatgattctccttagtagtggtgctctggcatttgaagatatatatattgatcagcgaaagacgattaagacgatgttggaatatgctgacaaggttttcacttacattttcattctggaaatgcttctaaaatgggtggcatatggctatcaaacatatttcaccaatgcctggtgttggctggacttcttaattgttgatgtttcattggtcagtttaacagcaaatgccttgggttactcagaacttggagccatcaaatctctcaggacactaagagctctgagacctctaagagccttatctcgatttgaagggatgagggtggttgtgaatgcccttttaggagcaattccatccatcatgaatgtgcttctggtttgtcttatattctggctaattttcagcatcatgggcgtaaatttgtttgctggcaaattctaccactgtattaacaccacaactggtgacaggtttgacatcgaagacgtgaataatcatactgattgcctaaaactaatagaaagaaatgagactgctcgatggaaaaatgtgaaagtaaactttgataatgtaggatttgggtatctctctttgcttcaagttgccacattcaaaggatggatggatataatgtatgcagcagttgattccagaaatgtggaactccagcctaagtatgaagaaagtctgtacatgtatctttactttgttattttcatcatctttgggtccttcttcaccttgaacctgtttattggtgtcatcatagataatttcaaccagcagaaaaagaagtttggaggtcaagacatctttatgacagaagaacagaagaaatactataatgcaatgaaaaaattaggatcgaaaaaaccgcaaaagcctatacctcgaccaggaaacaaatttcaaggaatggtctttgacttcgtaaccagacaagtttttgacataagcatcatgattctcatctgtcttaacatggtcacaatgatggtggaaacagatgaccagagtgaatatgtgactaccattttgtcacgcatcaatctggtgttcattgtgctatttactggagagtgtgtactgaaactcatctctctacgccattattattttaccattggatggaatatttttgattttgtggttgtcattctctccattgtaggtatgtttcttgccgagctgatagaaaagtatttcgtgtcccctaccctgttccgagtgatccgtcttgctaggattggccgaatcctacgtctgatcaaaggagcaaaggggatccgcacgctgctctttgctttgatgatgtcccttcctgcgttgtttaacatcggcctcctactcttcctagtcatgttcatctacgccatctttgggatgtccaactttgcctatgttaagagggaagttgggatcgatgacatgttcaactttgagacctttggcaacagcatgatctgcctattccaaattacaacctctgctggctgggatggattgctagcacccattctcaacagtaagccacccgactgtgaccctaataaagttaaccctggaagctcagttaagggagactgtgggaacccatctgttggaattttcttttttgtcagttacatcatcatatccttcctggttgtggtgaacatgtacatcgcggtcatcctggagaacttcagtgttgctactgaagaaagtgcagagcctctgagtgaggatgactttgagatgttctatgaggtttgggagaagtttgatcccgatgcaactcagttcatggaatttgaaaaattatctcagtttgcagctgcgcttgaaccgcctctcaatctgccacaaccaaacaaactccagctcattgccatggatttgcccatggtgagtggtgaccggatccactgtcttgatatcttatttgcttttacaaagcgggttctaggagagagtggagagatggatgctctacgaatacagatggaagagcgattcatggcttccaatccttccaaggtctcctatcagccaatcactactactttaaaacgaaaacaagaggaagtatctgctgtcattattcagcgtgcttacagacgccaccttttaaagcgaactgtaaaacaagcttcctttacgtacaataaaaacaaaatcaaaggtggggctaatcttcttataaaagaagacatgataattgacagaataaatgaaaactctattacagaaaaaactgatctgaccatgtccactgcagcttgtccaccttcctatgaccgggtgacaaagccaattgtggaaaaacatgagcaagaaggcaaagatgaaaaagccaaagggaaataa

SEQ ID NO: 18464 - DNA, 560 bp, Homo sapiens
  source 1..560: mol_type = unassigned DNA
taaagtcaattttgaattatttagggaattaaatattatcatacctaaagagtacaattttttttacattttaaatcccagatataattatactaatcagttgaattttgtatttctttttttagccatccattttctattttaacattgaaaaaaatgtacaaaaggacacagttttaaccagtttgatttttcttttctatactttggaggtcaagacatctttatgacagaagaacagaagaaatactataatgcaatgaaaaaattaggatcgaaaaaaccgcaaaagcctatacctcgaccaggaaacaaatttcaaggaatggtctttgacttcgtaaccagacaagtttttgacataagcatcatgattctcatctgtcttaacatggtcacaatgatggtggaaacagatgaccagagtgaatatgtgactaccattttgtcacgcatcaatctggtgttcattgtgctatttactggagagtgtgtactgaaactcatctctctacgccattattattttaccattggatggaatatttttgattttgtgg

SEQ ID NO: 18465 - DNA, 544 bp, Homo sapiens
  source 1..544: mol_type = unassigned DNA
atactgctttaaatatcatgacaccatgaactctaaagaattgaaaagtgcttgtgagttggttatcaaggggaggatatatcaaatggccattttgttcaatatgtgttctagaaatgaaaagccatactaaaatactgtcttggtccaaaatctgtgtaaaatttgttttgaaatgtctttcaaaaatattcccttttgaaaattatatcagtaagaatatttattaaacatcaggtctaaattatttttactccaaagtaaaacatgcatgtccttcttaataggccacattcaaaggatggatggatataatgtatgcagcagttgattccagaaatgtggaactccagcctaagtatgaagaaagtctgtacatgtatctttactttgttattttcatcatctttgggtccttcttcaccttgaacctgtttattggtgtcatcatagataatttcaaccagcagaaaaagaagtttggaggtcaagacatctttatgacagaagaacagaagaaatactataatgcaatgaaaaaatt

SEQ ID NO: 18466 - DNA, 542 bp, Homo sapiens
  source 1..542: mol_type = unassigned DNA
ttttaagatttttttgaaccttgcttttacatatcctagaataaatagcattgatagaaaaaaagaatggaaagaccagagattactaggggaattttttttctttattaacagataagaattctgacttttctttttttccatttgtgtattaggtggttgtgaatgcccttttaggagcaattccatccatcatgaatgtgcttctggtttgtcttatattctggctaattttcagcatcatgggcgtaaatttgtttgctggcaaattctaccactgtattaacaccacaactggtgacaggtttgacatcgaagacgtgaataatcatactgattgcctaaaactaatagaaagaaatgagactgctcgatggaaaaatgtgaaagtaaactttgataatgtaggatttgggtatctctctttgcttcaagttgccacattcaaaggatggatggatataatgtatgcagcagttgattccagaaatgtggaactccagcctaagtatgaagaaagtctgtacatgtatctttacttt

SEQ ID NO: 18467 - DNA, 168 bp, Homo sapiens
  source 1..168: mol_type = unassigned DNA
tctttgcttcaagttgccacattcaaaggatggatggatataatgtatgcagcagttgattccagaaatcctctttcaggctccaagacctaaactgaaattcatgctcattccaactttgctcttcaaaactttgtggaactccagcctaagtatgaagaaagtctg

SEQ ID NO: 18468 - DNA, 4614 bp, Homo sapiens
  source 1..4614: mol_type = unassigned DNA
agtgtgaaccgtcttgcttttcagaacagcataagaattatttctgagtggaggtgaggcttgtccaaatgtctttgctatcatggatttcctgactcctacctgtttgaggtttgggcaattatgaataaggctgctgtatacatccgtgtgcaggattttgtgtggacataagttttcaactcctttggttaaatcctaaggaatttcatatgcagaataaatggtaattaaaatgtgcaggatgacaagatggagcaaacagtgcttgtaccaccaggacctgacagcttcaacttcttcaccagagaatctcttgcggctattgaaagacgcattgcagaagaaaaggcaaagaatcccaaaccagacaaaaaagatgacgacgaaaatggcccaaagccaaatagtgacttggaagctggaaagaaccttccatttatttatggagacattcctccagagatggtgtcagagcccctggaggacctggacccctactatatcaataagaaaacttttatagtattgaataaagggaaggccatcttccggttcagtgccacctctgccctgtacattttaactcccttcaatcctcttaggaaaatagctattaagattttggtacattcattattcagcatgctaattatgtgcactattttgacaaactgtgtgtttatgacaatgagtaaccctcctgattggacaaagaatgtagaatacaccttcacaggaatatatacttttgaatcacttataaaaattattgcaaggggattctgtttagaagattttactttccttcgggatccatggaactggctcgatttcactgtcattacatttgcgtacgtcacagagtttgtggacctgggcaatgtctcggcattgagaacattcagagttctccgagcattgaagacgatttcagtcattccaggcctgaaaaccattgtgggagccctgatccagtctgtgaagaagctctcagatgtaatgatcctgactgtgttctgtctgagcgtatttgctctaattgggctgcagctgttcatgggcaacctgaggaataaatgtatacaatggcctcccaccaatgcttccttggaggaacatagtatagaaaagaatataactgtgaattataatggtacacttataaatgaaactgtctttgagtttgactggaagtcatatattcaagattcaagatatcattatttcctggagggttttttagatgcactactatgtggaaatagctctgatgcaggccaatgtccagagggatatatgtgtgtgaaagctggtagaaatcccaattatggctacacaagctttgataccttcagttgggcttttttgtccttgtttcgactaatgactcaggacttctgggaaaatctttatcaactgacattacgtgctgctgggaaaacgtacatgatattttttgtattggtcattttcttgggctcattctacctaataaatttgatcctggctgtggtggccatggcctacgaggaacagaatcaggccaccttggaagaagcagaacagaaagaggccgaatttcagcagatgattgaacagcttaaaaagcaacaggaggcagctcagcaggcagcaacggcaactgcctcagaacattccagagagcccagtgcagcaggcaggctctcagacagctcatctgaagcctctaagttgagttccaagagtgctaaggaaagaagaaatcggaggaagaaaagaaaacagaaagagcagtctggtggggaagagaaagatgaggatgaattccaaaaatctgaatctgaggacagcatcaggaggaaaggttttcgcttctccattgaagggaaccgattgacatatgaaaagaggtactcctccccacaccagtctttgttgagcatccgtggctccctattttcaccaaggcgaaatagcagaacaagccttttcagctttagagggcgagcaaaggatgtgggatctgagaacgacttcgcagatgatgagcacagcacctttgaggataacgagagccgtagagattccttgtttgtgccccgacgacacggagagagacgcaacagcaacctgagtcagaccagtaggtcatcccggatgctggcagtgtttccagcgaatgggaagatgcacagcactgtggattgcaatggtgtggtttccttggttggtggaccttcagttcctacatcgcctgttggacagcttctgccagaggtgataatagataagccagctactgatgacaatggaacaaccactgaaactgaaatgagaaagagaaggtcaagttctttccacgtttccatggactttctagaagatccttcccaaaggcaacgagcaatgagtatagccagcattctaacaaatacagtagaagaacttgaagaatccaggcagaaatgcccaccctgttggtataaattttccaacatattcttaatctgggactgttctccatattggttaaaagtgaaacatgttgtcaacctggttgtgatggacccatttgttgacctggccatcaccatctgtattgtcttaaatactcttttcatggccatggagcactatccaatgacggaccatttcaataatgtgcttacagtaggaaacttggttttcactgggatctttacagcagaaatgtttctgaaaattattgccatggatccttactattatttccaagaaggctggaatatctttgacggttttattgtgacgcttagcctggtagaacttggactcgccaatgtggaaggattatctgttctccgttcatttcgattgctgcgagttttcaagttggcaaaatcttggccaacgttaaatatgctaataaagatcatcggcaattccgtgggggctctgggaaatttaaccctcgtcttggccatcatcgtcttcatttttgccgtggtcggcatgcagctctttggtaaaagctacaaagattgtgtctgcaagatcgccagtgattgtcaactcccacgctggcacatgaatgacttcttccactccttcctgattgtgttccgcgtgctgtgtggggagtggatagagaccatgtgggactgtatggaggttgctggtcaagccatgtgccttactgtcttcatgatggtcatggtgattggaaacctagtggtcctgaatctctttctggccttgcttctgagctcatttagtgcagacaaccttgcagccactgatgatgataatgaaatgaataatctccaaattgctgtggataggatgcacaaaggagtagcttatgtgaaaagaaaaatatatgaatttattcaacagtccttcattaggaaacaaaagattttagatgaaattaaaccacttgatgatctaaacaacaagaaagacagttgtatgtccaatcatacagcagaaattgggaaagatcttgactatcttaaagatgtaaatggaactacaagtggtataggaactggcagcagtgttgaaaaatacattattgatgaaagtgattacatgtcattcataaacaaccccagtcttactgtgactgtaccaattgctgtaggagaatctgactttgaaaatttaaacacggaagactttagtagtgaatcggatctggaagaaagcaaagagaaactgaatgaaagcagtagctcatcagaaggtagcactgtggacatcggcgcacctgtagaagaacagcccgtagtggaacctgaagaaactcttgaaccagaagcttgtttcactgaaggctgtgtacaaagattcaagtgttgtcaaatcaatgtggaagaaggcagaggaaaacaatggtggaacctgagaaggacgtgtttccgaatagttgaacataactggtttgagaccttcattgttttcatgattctccttagtagtggtgctctggcatttgaagatatatatattgatcagcgaaagacgattaagacgatgttggaatatgctgacaaggttttcacttacattttcattctggaaatgcttctaaaatgggtggcatatggctatcaaacatatttcaccaatgcctggtgttggctggacttcttaattgttgatgtttcattggtcagtttaacagcaaatgccttgggttactcagaacttggagccatcaaatctctcaggacactaagagctctgagacctctaagagccttatctcgatttgaagggatgagggtaagaaaaatgaaagaacctgaagtattgtatatagccaaaattaaactaaattaaatttagaaaaaggaaaatctatgcatgcaaaaggaatggcaaattcttgcaaaattgctactttattgttttatctgttgcatatttacttctaggtgatatgcaagagaaataggcctctcttgaaatgatataatatcatttatctgctgtgcttatttaaatgactttatttcctaatccatcttgggagtttccttacaaatctatatacaaaaaaaagctgatgcattattaaagtactatgtgtaatgatataatggtaatctaaagtaaattctatatcaggtacttattctttgt

SEQ ID NO: 18469 - DNA, 3606 bp, Homo sapiens
  source 1..3606: mol_type = unassigned DNA
agagtgaggcgaggatgaagccgagaggatactgcagaggtctctggtgcatgtgtgtatgtgtgcgtttgtgtgtgtttgtgtgtctgtgtgttctgccccagtgagactgcagcccttgtaaatactttgacaccttttgcaagaaggaatctgaacaattgcaactgaaggcacattgttatcatctcgtctttgggtgatgctgttcctcactgcagatggataattttccttttaatcaggttatttatccattcacctactgaaggacatcttggttgcttccaggtttgggcaattatgaataaggctgctgtatacatccgtgtgcaggattttgtgtggacataagttttcaactcctttggttaaatcctaaggaatttcatatgcagaataaatggtaattaaaatgtgcaggatgacaagatggagcaaacagtgcttgtaccaccaggacctgacagcttcaacttcttcaccagagaatctcttgcggctattgaaagacgcattgcagaagaaaaggcaaagaatcccaaaccagacaaaaaagatgacgacgaaaatggcccaaagccaaatagtgacttggaagctggaaagaaccttccatttatttatggagacattcctccagagatggtgtcagagcccctggaggacctggacccctactatatcaataagaaaatggagttttgctctcatcacccaggctggagtgcagtggcgcgatcttggctcactgcaacctccgcctcctgggttcaagcgattctcctgttctcctgcctcagcctcccaagcaactgggattacagggacccaccaccaggcccagctaatttttttgtgtgtttttagtagagatggggtttcaccatgttggccaggctggtctcaaacttctgacctcagacttttatagtattgaataaagggaaggccatcttccggttcagtgccacctctgccctgtacattttaactcccttcaatcctcttaggaaaatagctattaagattttggtacattcattattcagcatgctaattatgtgcactattttgacaaactgtgtgtttatgacaatgagtaaccctcctgattggacaaagaatgtagaatacaccttcacaggaatatatacttttgaatcacttataaaaattattgcaaggggattctgtttagaagattttactttccttcgggatccatggaactggctcgatttcactgtcattacatttgcgtacgtcacagagtttgtggacctgggcaatgtctcggcattgagaacattcagagttctccgagcattgaagacgatttcagtcattccaggcctgaaaaccattgtgggagccctgatccagtctgtgaagaagctctcagatgtaatgatcctgactgtgttctgtctgagcgtatttgctctaattgggctgcagctgttcatgggcaacctgaggaataaatgtatacaatggcctcccaccaatgcttccttggaggaacatagtatagaaaagaatataactgtgaattataatggtacacttataaatgaaactgtctttgagtttgactggaagtcatatattcaagattcaagatatcattatttcctggagggttttttagatgcactactatgtggaaatagctctgatgcaggccaatgtccagagggatatatgtgtgtgaaagctggtagaaatcccaattatggctacacaagctttgataccttcagttgggcttttttgtccttgtttcgactaatgactcaggacttctgggaaaatctttatcaactgacattacgtgctgctgggaaaacgtacatgatattttttgtattggtcattttcttgggctcattctacctaataaatttgatcctggctgtggtggccatggcctacgaggaacagaatcaggccaccttggaagaagcagaacagaaagaggccgaatttcagcagatgattgaacagcttaaaaagcaacaggaggcagctcagcaggcagcaacggcaactgcctcagaacattccagagagcccagtgcagcaggcaggctctcagacagctcatctgaagcctctaagttgagttccaagagtgctaaggaaagaagaaatcggaggaagaaaagaaaacagaaagagcagtctggtggggaagagaaagatgaggatgaattccaaaaatctgaatctgaggacagcatcaggaggaaaggttttcgcttctccattgaagggaaccgattgacatatgaaaagaggtactcctccccacaccagtctttgttgagcatccgtggctccctattttcaccaaggcgaaatagcagaacaagccttttcagctttagagggcgagcaaaggatgtgggatctgagaacgacttcgcagatgatgagcacagcacctttgaggataacgagagccgtagagattccttgtttgtgccccgacgacacggagagagacgcaacagcaacctgagtcagaccagtaggtcatcccggatgctggcagtgtttccagcgaatgggaagatgcacagcactgtggattgcaatggtgtggtttccttggttggtggaccttcagttcctacatcgcctgttggacagcttctgccagaggtgataatagataagccagctactgatgacaatggaacaaccactgaaactgaaatgagaaagagaaggtcaagttctttccacgtttccatggactttctagaagatccttcccaaaggcaacgagcaatgagtatagccagcattctaacaaatacagtagaagaacttgaagaatccaggcagaaatgcccaccctgttggtataaattttccaacatattcttaatctgggactgttctccatattggttaaaagtgaaacatgttgtcaacctggttgtgatggacccatttgttgacctggccatcaccatctgtattgtcttaaatactcttttcatggccatggagcactatccaatgacggaccatttcaataatgtgcttacagtaggaaacttggttttcactgggatctttacagcagaaatgtttctgaaaattattgccatggatccttactattatttccaagaaggctggaatatctttgacggttttattgtgacgcttagcctggtagaacttggactcgccaatgtggaaggattatctgttctccgttcatttcgattgctgcgagttttcaagttggcaaaatcttggccaacgttaaatatgctaataaagatcatcggcaattccgtgggggctctgggaaatttaaccctcgtcttggccatcatcgtcttcatttttgccgtggtcggcatgcagctctttggtaaaagctacaaagattgtgtctgcaagatcgccagtgattgtcaactcccacgctggcacatgaatgacttcttccactccttcctgattgtgttccgcgtgctgtgtggggagtggatagagaccatgtgggactgtatggaggttgctggtcaagccatgtgccttactgtcttcatgatggtcatggtgattggaaacctagtg

SEQ ID NO: 18470 - DNA, 921 bp, Homo sapiens
  source 1..921: mol_type = unassigned DNA
gtaccatagagtgaggcgaggatgaagccgagaggatactgcagaggtctctggtgcatgtgtgtatgtgtgcgtttgtgtgtgtttgtgtgtctgtgtgttctgccccagtgagactgcagcccttgtaaatactttgacaccttttgcaagaaggaatctgaacaattgcaactgaaggcacattgttatcatctcgtctttgggtgatgctgttcctcactgcagatggataattttccttttaatcaggtttgggcaattatgaataaggctgctgtatacatccgtgtgcaggattttgtgtggacataagttttcaactcctttggttaaatcctaaggaatttcatatgcagaataaatggtaattaaaatgtgcaggatgacaagatggagcaaacagtgcttgtaccaccaggacctgacagcttcaacttcttcaccagagaatctcttgcggctattgaaagacgcattgcagaagaaaaggcaaagaatcccaaaccagacaaaaaagatgacgacgaaaatggcccaaagccaaatagtgacttggaagctggaaagaaccttccatttatttatggagacattcctccagagatggtgtcagagcccctggaggacctggacccctactatatcaataagaaaacgcagtctcgctctgtggcccagactggagtgcagtggtgccatctcggctcactgcaagccccacctctcgggttcacgccattctcctgcctcagtctccccagtagctgggactacaggcgcctgccaccacgcccggctaattttctgtaattttagtagagacggggtttcaccatgttagccaggatggactcgatctcctgacctcgtgatccaccggcctcggcctcccaaagtgctaggattacaggcgtgagc

SEQ ID NO: 18471 - DNA, 711 bp, Homo sapiens
  source 1..711: mol_type = unassigned DNA
accatagagtgaggcgaggatgaagccgagaggatactgcagaggtctctggtgcatgtgtgtatgtgtgcgtttgtgtgtgtttgtgtgtctgtgtgttctgccccagtgagactgcagcccttgtaaatactttgacaccttttgcaagaaggaatctgaacaattgcaactgaaggcacattgttatcatctcgtctttgggtgatgctgttcctcactgcagatggataattttccttttaatcaggtttgggcaattatgaataaggctgctgtatacatccgtgtgcaggattttgtgtggacataagttttcaactcctttggttaaatcctaaggaatttcatatgcagaataaatggtaattaaaatgtgcaggatgacaagatggagcaaacagtgcttgtaccaccaggacctgacagcttcaacttcttcaccagagaatctcttgcggctattgaaagacgcattgcagaagaaaaggcaaagaatcccaaaccagacaaaaaagatgacgacgaaaatggcccaaagccaaatagtgacttggaagctggaaagaaccttccatttatttatggagacattcctccagagatggtgtcagagcccctggaggacctggacccctactatatcaataagaaagtgagtgttttttatcaggcatattttgctgctaattgcctactgcattccttgga

SEQ ID NO: 18472 - DNA, 100 bp, Homo sapiens
  source 1..100: mol_type = unassigned DNA
ttgcttttcagaacagcataagaattatttctgagtggaggaatttcatatgcagaataaatggtaattaaaatgtgcaggatgacaagatggagcaaac

SEQ ID NO: 18473 - DNA, 8191 bp, Homo sapiens
  source 1..8191: mol_type = unassigned DNA
aaaatatctgtattccttttattttaggaatttcatatgcagaataaatggtaattaaaatgtgcaggatgacaagatggagcaaacagtgcttgtaccaccaggacctgacagcttcaacttcttcaccagagaatctcttgcggctattgaaagacgcattgcagaagaaaaggcaaagaatcccaaaccagacaaaaaagatgacgacgaaaatggcccaaagccaaatagtgacttggaagctggaaagaaccttccatttatttatggagacattcctccagagatggtgtcagagcccctggaggacctggacccctactatatcaataagaaaacttttatagtattgaataaagggaaggccatcttccggttcagtgccacctctgccctgtacattttaactcccttcaatcctcttaggaaaatagctattaagattttggtacattcattattcagcatgctaattatgtgcactattttgacaaactgtgtgtttatgacaatgagtaaccctcctgattggacaaagaatgtagaatacaccttcacaggaatatatacttttgaatcacttataaaaattattgcaaggggattctgtttagaagattttactttccttcgggatccatggaactggctcgatttcactgtcattacatttgcgtacgtcacagagtttgtggacctgggcaatgtctcggcattgagaacattcagagttctccgagcattgaagacgatttcagtcattccaggcctgaaaaccattgtgggagccctgatccagtctgtgaagaagctctcagatgtaatgatcctgactgtgttctgtctgagcgtatttgctctaattgggctgcagctgttcatgggcaacctgaggaataaatgtatacaatggcctcccaccaatgcttccttggaggaacatagtatagaaaagaatataactgtgaattataatggtacacttataaatgaaactgtctttgagtttgactggaagtcatatattcaagattcaagatatcattatttcctggagggttttttagatgcactactatgtggaaatagctctgatgcaggccaatgtccagagggatatatgtgtgtgaaagctggtagaaatcccaattatggctacacaagctttgataccttcagttgggcttttttgtccttgtttcgactaatgactcaggacttctgggaaaatctttatcaactgacattacgtgctgctgggaaaacgtacatgatattttttgtattggtcattttcttgggctcattctacctaataaatttgatcctggctgtggtggccatggcctacgaggaacagaatcaggccaccttggaagaagcagaacagaaagaggccgaatttcagcagatgattgaacagcttaaaaagcaacaggaggcagctcagcaggcagcaacggcaactgcctcagaacattccagagagcccagtgcagcaggcaggctctcagacagctcatctgaagcctctaagttgagttccaagagtgctaaggaaagaagaaatcggaggaagaaaagaaaacagaaagagcagtctggtggggaagagaaagatgaggatgaattccaaaaatctgaatctgaggacagcatcaggaggaaaggttttcgcttctccattgaagggaaccgattgacatatgaaaagaggtactcctccccacaccagtctttgttgagcatccgtggctccctattttcaccaaggcgaaatagcagaacaagccttttcagctttagagggcgagcaaaggatgtgggatctgagaacgacttcgcagatgatgagcacagcacctttgaggataacgagagccgtagagattccttgtttgtgccccgacgacacggagagagacgcaacagcaacctgagtcagaccagtaggtcatcccggatgctggcagtgtttccagcgaatgggaagatgcacagcactgtggattgcaatggtgtggtttccttggttggtggaccttcagttcctacatcgcctgttggacagcttctgccagaggtgataatagataagccagctactgatgacaatggaacaaccactgaaactgaaatgagaaagagaaggtcaagttctttccacgtttccatggactttctagaagatccttcccaaaggcaacgagcaatgagtatagccagcattctaacaaatacagtagaagaacttgaagaatccaggcagaaatgcccaccctgttggtataaattttccaacatattcttaatctgggactgttctccatattggttaaaagtgaaacatgttgtcaacctggttgtgatggacccatttgttgacctggccatcaccatctgtattgtcttaaatactcttttcatggccatggagcactatccaatgacggaccatttcaataatgtgcttacagtaggaaacttggttttcactgggatctttacagcagaaatgtttctgaaaattattgccatggatccttactattatttccaagaaggctggaatatctttgacggttttattgtgacgcttagcctggtagaacttggactcgccaatgtggaaggattatctgttctccgttcatttcgattgctgcgagttttcaagttggcaaaatcttggccaacgttaaatatgctaataaagatcatcggcaattccgtgggggctctgggaaatttaaccctcgtcttggccatcatcgtcttcatttttgccgtggtcggcatgcagctctttggtaaaagctacaaagattgtgtctgcaagatcgccagtgattgtcaactcccacgctggcacatgaatgacttcttccactccttcctgattgtgttccgcgtgctgtgtggggagtggatagagaccatgtgggactgtatggaggttgctggtcaagccatgtgccttactgtcttcatgatggtcatggtgattggaaacctagtggtcctgaatctctttctggccttgcttctgagctcatttagtgcagacaaccttgcagccactgatgatgataatgaaatgaataatctccaaattgctgtggataggatgcacaaaggagtagcttatgtgaaaagaaaaatatatgaatttattcaacagtccttcattaggaaacaaaagattttagatgaaattaaaccacttgatgatctaaacaacaagaaagacagttgtatgtccaatcatacagcagaaattgggaaagatcttgactatcttaaagatgtaaatggaactacaagtggtataggaactggcagcagtgttgaaaaatacattattgatgaaagtgattacatgtcattcataaacaaccccagtcttactgtgactgtaccaattgctgtaggagaatctgactttgaaaatttaaacacggaagactttagtagtgaatcggatctggaagaaagcaaagagaaactgaatgaaagcagtagctcatcagaaggtagcactgtggacatcggcgcacctgtagaagaacagcccgtagtggaacctgaagaaactcttgaaccagaagcttgtttcactgaaggctgtgtacaaagattcaagtgttgtcaaatcaatgtggaagaaggcagaggaaaacaatggtggaacctgagaaggacgtgtttccgaatagttgaacataactggtttgagaccttcattgttttcatgattctccttagtagtggtgctctggcatttgaagatatatatattgatcagcgaaagacgattaagacgatgttggaatatgctgacaaggttttcacttacattttcattctggaaatgcttctaaaatgggtggcatatggctatcaaacatatttcaccaatgcctggtgttggctggacttcttaattgttgatgtttcattggtcagtttaacagcaaatgccttgggttactcagaacttggagccatcaaatctctcaggacactaagagctctgagacctctaagagccttatctcgatttgaagggatgagggtggttgtgaatgcccttttaggagcaattccatccatcatgaatgtgcttctggtttgtcttatattctggctaattttcagcatcatgggcgtaaatttgtttgctggcaaattctaccactgtattaacaccacaactggtgacaggtttgacatcgaagacgtgaataatcatactgattgcctaaaactaatagaaagaaatgagactgctcgatggaaaaatgtgaaagtaaactttgataatgtaggatttgggtatctctctttgcttcaagttgccacattcaaaggatggatggatataatgtatgcagcagttgattccagaaatgtggaactccagcctaagtatgaagaaagtctgtacatgtatctttactttgttattttcatcatctttgggtccttcttcaccttgaacctgtttattggtgtcatcatagataatttcaaccagcagaaaaagaagtttggaggtcaagacatctttatgacagaagaacagaagaaatactataatgcaatgaaaaaattaggatcgaaaaaaccgcaaaagcctatacctcgaccaggaaacaaatttcaaggaatggtctttgacttcgtaaccagacaagtttttgacataagcatcatgattctcatctgtcttaacatggtcacaatgatggtggaaacagatgaccagagtgaatatgtgactaccattttgtcacgcatcaatctggtgttcattgtgctatttactggagagtgtgtactgaaactcatctctctacgccattattattttaccattggatggaatatttttgattttgtggttgtcattctctccattgtaggtatgtttcttgccgagctgatagaaaagtatttcgtgtcccctaccctgttccgagtgatccgtcttgctaggattggccgaatcctacgtctgatcaaaggagcaaaggggatccgcacgctgctctttgctttgatgatgtcccttcctgcgttgtttaacatcggcctcctactcttcctagtcatgttcatctacgccatctttgggatgtccaactttgcctatgttaagagggaagttgggatcgatgacatgttcaactttgagacctttggcaacagcatgatctgcctattccaaattacaacctctgctggctgggatggattgctagcacccattctcaacagtaagccacccgactgtgaccctaataaagttaaccctggaagctcagttaagggagactgtgggaacccatctgttggaattttcttttttgtcagttacatcatcatatccttcctggttgtggtgaacatgtacatcgcggtcatcctggagaacttcagtgttgctactgaagaaagtgcagagcctctgagtgaggatgactttgagatgttctatgaggtttgggagaagtttgatcccgatgcaactcagttcatggaatttgaaaaattatctcagtttgcagctgcgcttgaaccgcctctcaatctgccacaaccaaacaaactccagctcattgccatggatttgcccatggtgagtggtgaccggatccactgtcttgatatcttatttgcttttacaaagcgggttctaggagagagtggagagatggatgctctacgaatacagatggaagagcgattcatggcttccaatccttccaaggtctcctatcagccaatcactactactttaaaacgaaaacaagaggaagtatctgctgtcattattcagcgtgcttacagacgccaccttttaaagcgaactgtaaaacaagcttcctttacgtacaataaaaacaaaatcaaaggtggggctaatcttcttataaaagaagacatgataattgacagaataaatgaaaactctattacagaaaaaactgatctgaccatgtccactgcagcttgtccaccttcctatgaccgggtgacaaagccaattgtggaaaaacatgagcaagaaggcaaagatgaaaaagccaaagggaaataaatgaaaataaataaaaataattgggtgacaaattgtttacagcctgtgaaggtgatgtatttttatcaacaggactcctttaggaggtcaatgccaaactgactgtttttacacaaatctccttaaggtcagtgcctacaataagacagtgaccccttgtcagcaaactgtgactctgtgtaaaggggagatgaccttgacaggaggttactgttctcactaccagctgacactgctgaagataagatgcacaatggctagtcagactgtagggaccagtttcaaggggtgcaaacctgtgattttggggttgtttaacatgaaacactttagtgtagtaattgtatccactgtttgcatttcaactgccacatttgtcacatttttatggaatctgttagtggattcatctttttgttaatccatgtgtttattatatgtgactatttttgtaaacgaagtttctgttgagaaataggctaaggacctctataacaggtatgccacctggggggtatggcaaccacatggccctcccagctacacaaagtcgtggtttgcatgagggcatgctgcacttagagatcatgcatgagaaaaagtcacaagaaaaacaaattcttaaatttcaccatatttctgggaggggtaattgggtgataagtggaggtgctttgttgatcttgttttgcgaaatccagcccctagaccaagtagattatttgtgggtaggccagtaaatcttagcaggtgcaaacttcattcaaatgtttggagtcataaatgttatgtttctttttgttgtattaaaaaaaaaacctgaatagtgaatattgcccctcaccctccaccgccagaagactgaattgaccaaaattactctttataaatttctgctttttcctgcactttgtttagccatcttcggctctcagcaaggttgacactgtatatgttaatgaaatgctatttattatgtaaatagtcattttaccctgtggtgcacgtttgagcaaacaaataatgacctaagcacagtatttattgcatcaaatatgtaccacaagaaatgtagagtgcaagctttacacaggtaataaaatgtattctgtaccatttatagatagtttggatgctatcaatgcatgtttatattaccatgctgctgtatctggtttctctcactgctcagaatctcatttatgagaaaccatatgtcagtggtaaagtcaaggaaattgttcaacagatctcatttatttaagtcattaagcaatagtttgcagcactttaacagctttttggttatttttacattttaagtggataacatatggtatatagccagactgtacagacatgtttaaaaaaacacactgcttaacctattaaatatgtgtttagaattttataagcaaatataaatactgtaaaaagtcactttattttatttttcagcattatgtacataaatatgaagaggaaattatcttcaggttgatatcacaatcacttttcttactttctgtccatagtactttttcatgaaagaaatttgctaaataagacatgaaaacaagactgggtagttgtagatttctgctttttaaattacatttgctaattttagattatttcacaattttaaggagcaaaataggttcacgattcatatccaaattatgctttgcaattggaaaagggtttaaaattttatttatatttctggtagtacctgcactaactgaattgaaggtagtgcttatgttatttttgttctttttttctgacttcggtttatgttttcatttctttggagtaatgctgctctagattgttctaaatagaatgtgggcttcataatttttttttccacaaaaacagagtagtcaacttatatagtcaattacatcaggacattttgtgtttcttacagaagcaaaccataggctcctcttttccttaaaactacttagataaactgtattcgtgaactgcatgctggaaaatgctactattatgctaaataatgctaaccaacatttaaaatgtgcaaaactaataaagattacattttttatttta

SEQ ID NO: 18474 - DNA, 8169 bp, Homo sapiens
  source 1..8169: mol_type = unassigned DNA
agagtaaaaggtctctgcacataaggacaggaaggggatgctgttcagtgctcaattcttttgaggctaaaggagatccagaattccacagaccattatttcccagacagtgattggaggaatactactgttctgctggactaatgaagtgccactccacatccaccagaatggctacaacttaaaaaggcttatcatactgtttgtgagaatctagagctacagaagctgtcagagacttcaggtatcttcacatgaaattgagcttcaaagaagatgaagatgagtaagggccgggaaagccagggaaggtttctgtttcctgtgtatcaagtttcccaaacaagaatcttggagtcctcttcagcttctgcaactccttctcgatcaacatgcagtcaaacttcaaattgtattgacggaaactcagaactgcttagatcattttcttactctcattatttctgcgtggatttagacattcattgtcttttgcctgggctcttgcaataggcttttatcttatatcctaccgtaaaaggtttcagatgctacacatcctccatactaccaaagtaataggtaaaaaataaatctgattgtgtctgtacaaaaaaacctgttagaactaataaataaattcagtaaaattgcaggatacaaagtcaacatacaaaaatcagtagtgtttctaaacactaagaatcaactatttgcaagagaagtcaagacaacaatatcattttaaagcatcaaaaatattgaggaataaacttaatgaggtgaaatatctgtacaccaaaaactataaaacatggattaaagaaattaaataagacacacataaaaagaaagatatcccgtgttaacgagtggaaagaattaatgttcttaaaatacccagagtacttaaagtgatctgtggattcaatgaaatccgtataaaaattccaatgacataatagatattttttaaatcttaaaattcatatggaatcacaagttaccccaaacagtcaaagcaatcttaagtaaaaataatgaaacttggttgcatcacactgcctgatctcaaaatacattacaaagttgtagtgatcaaaacagcttggtactggcataaaaatcagcacacaaatggaacagaaccaaaagcccagaaataaatccatgcacttatggtcaataaatctttgacaaaagtaccaagaacacaaaatgggaaacgaacagtctcttcagtaaatgatgttggaaaaacttggtatccacatgcagaagaatgaaattggacccttatctcacactatatacaaaaatcaactcaaaatggattaacaacttacagaacacctaaaactgtaaaagtactagaagaaaatataggggaaaactctatgacattgatctgggcaatgattttttgaatctgaccccaaaatcacagaccaaaacaaaagaaataatcaacagaatgaaaagacaacctacagaatggaagaaaatatttgcaaaccatatgttcaataaggggttaatgtctaaaatatgtaagaaactccaacaactcaatagcaaataataataataataataacctgattacaaaatgggcaaaggacctaaatggacatttctcaaaagaaggcatacaaatggccaacaagtgtatgataaaattcccaatatcactaatcatcaggaaaacacaaattaaaactacagtgaaatagcacctcacattcattaaaaatggctactatcaaaagaacaaaagataagcgttggtaaggatgtggagaaaacaaaagtgttgtacactgttggtgggattgtaaattagccatcatagaaaacaatatgtaaattcctcaaaaaagtaaatacagaactattgtatgatccagtaattctacttctgggtatatacctagacattcaaagaagaattggtaccaaccctactgcaactatttcacaagatagagaaagaaggaatccaccctaaatcattctattaagtcagtatcacccaaataccaaaatcaggaaaggacacaagaaaaaagaaaactgcagactaatgttcctgatgaacatagatgcaaaaattctcaacaaaattctagctaagcaaatccaagggcatataaaaaagataatacatcatgatcaagtgggtttcatacccgggatgcagggatggtttaacatatgtaactcaataaatgggatacatcacataaacaattaaaaataaaaatcatatgatcgtcttaatagacacagaaaaaatgtttgataaaatacagtatccctttatggtaaaaaatcctcaacaaaattggcataggagaaacatacctcaaagtaataaaagccatctgtgacaaacccagaaccaatatcatactgaatggggaaaagttgaaagcattccccctgagaactggaacaagacaaggtgacaaaattagtgtgataaagagatatttacactgtcgtgtttattgcagcattatttccaatagacaggatacggaatcaacctaagtcttatctgtagatgaggaacggataaagaattgcacacacacacacacgcacacacacacacacaatgaaatactcttcagccttaacaaagaaggaaattctgtcacttgtgacaacatgaatgaacctggaggacattaggttgagtaaaataagccaagcacagaatgacaaatattgcatgatgtaacttaggtatggaatctaaaaatgtcaaactcacagaaacagaaagtagaatggtggttaccaggggctactgggtagggctgtaggggtggaggaatggaaaatgttggtcaaagggtacaaaagttcagttaaacaggaggaataagttctggatatctattgtactatgtaatgactgtagttaataatactgtgttgcatattcaaaaattgctatgtgtcgattttaaatgttctcaccaccaaaatataaatatctgaggtgaaggagatattaattagtttgatttaatcatttcacaatgcaaatattaagttgcacactgtaaatatatacaatttttaattgtcaattaaatataattgaaaaatagaacataataaaatattggattattaactctatcaggaaatgaagctttgagtaacattttactgtttatatttatggttttagccaccaagcaaacatggtggtcaagaacttggactcacattcaggttgccatagtccaaattcaggcttccctactcactaatgtgttcttaagcaagaaataaacttattttggcttcctttggtaaaatgggattaataattgttcctatcctacattttattgtgaagattgaattaatgaaatatacacgtaaaacacttaagacaattcctggccttagtaagatttcaacaaaaatggtcattattatgatgctttattctgttacatttatggattattagacagataaaattggacctcatatgtgaccattctattttcctttattcaaatggaaaaagaatgtcaattcaacatagggaaatactatatatgtataaattattacttaaatttatgtttttacttaaatatatgtttattaaaatcaagtgtttaaatttatatattaacttttacatttataacatcttatttcttctgaaaacaaccaacacaacccatttcttatcagtgataattcaaatggcctctttattctttcctgaatttttcaatcccaattcttctcttctgttctttttcagcagcatcttgcacagggctttatggaaaagactgaggtgctgtggtgaatttaatctcctctgttgtttactttaatctcttcatccagttactctgacttttctccatgcttaatgttatccctcttgatttcacagcttaacaatttcttctttgttcttgaccccatcctagccttcttatttcaaaagtcccctcaagcaagtttcttttcacattcttaatttcttattcttaataactccttttttatgccttcaagcaagtatggctctctctcatactgaaaatgtgctcttccgttctattttgctactgtttttattcacttaacagtaaatttcaaacaagttttgtgcacctaattctttcatttctttacaacccacccattgcttatccactcttacagctgtactagaattgtaatttaaatatgtatcatatcagtttttttgtaacattgataatttataatatttaacatattttgtaatagagttttcttcttaatattttactttccttttaaaaagcctcagcaagttgccattgactttcggcattgtatttgatacctctggactctggctactatcgccctttctgtataaaatctgtaacttgaccaaggcaagaacctccaccccaggccaactaattttctcatctgctattgtcccaacctgctttggtttctcctataggtcagagtcaggtcctgcttgggtttgggcctttgctcataattttcccttgcaattgaaatattctctcactccaggccagcctttaaagcctaacgtaagtaccaccacatccacgaagcctctgcacatcaacttcagatctcaatgctgttaaccttttataaacaaaaagcaatatagaataaatcctttttgggagcaggagtcaaaatgctagttgcagtcttgcatctgtcacttatttgcttggccagtgacgtagccttattaaaaactcaatttctttatccaaaagatgaggatgtttatacctccctgatctaccttctaagattgttgtacatgataagtaaaatactgtgcataaaaacatttgtaaaaattttaaaaatctgttcaagcttgtcattgttaccacagataaatcgggtactaccttgctgtcttggattgcttttgtatgttgttctcttatgttgttactggactcggtgttattacttaaatttctctgtatttattttgacaacttaattaggttttgaattctttggaagcggagagtatgaatggtattatgagcaaagacccagaaggagccacctcctaattattttggagagaattatctaagaggcctaattggacttgtgcttcccattaaagtatgattcatatcagagaagcttacagtcttattgctggccacatggagatagtacataggagatactcgatgggaattctgtcaactgaaagagagtcagcaagacagtgtaaacatggttagcgtgtctcagcttacccagcctggcttggtgtaaccaatatagactatggaaaataggaagtagacaaaaggtagtggagattgggctcatgccattttctttaattgaaatacaatttccataaaataaaatacagatatttttaagtgcatattactttgagttttgacaaatgtattcccctgtctggcaactgctccaattaagatgtagaatatttctatcaccccagtacccttttcctgtcaatccctccttctcccagagacaatcactgttccaatttctatcactatagcttagttttaccagttcaaaaacttcacataagtagaatcataaagcatgttactttttttcctggcttttgtcacttaacagtttttttttttagatttaaccattttgttgcatatgtaagtatatcataactttttgttgttgagtagcactctcctatataagtatgttataataatgtttcatttacctattgatgagcatttgagttgttcctaagttttaactagtataaaaaagtttactatgaacattcttgcataggtctttttgtgggtgtatattttcactactcttaagattgtcagactggataaagagcaaagttcagtggtatgctgttttcaacacatattttaaatataacacagacaggttgaaagtaaaaaaatcagtaaaagatacagcatgaaaacactaagcaaaagaaagctgatatggctatatgaatatcaaaaaagtagattttaagacaaaggatactaacacagataaaaatggtcattttattggggaaaaaaaggccaatttgtaacaaggcatgacaatcttaaaagggtataacaaagtagaatttcaaaatccaagaagaaaaaaatggcagaataaagtaaaaagcagagaaatccacaataattgttagagattttatcaattttatcccagtagttgctagaacaagaagacaaaaaatcaatgatatagacaacttgaataacattatcagggatcaaacctgcagacctaactgacatttatagaatattatacccaacaacttcagaatatacattcttttcaaatacacatggaacattccacaggtggtgttatgctaggccataaaattagtgacacttcatttcaaagagtatttgactacaatggaattaaattagaaatcaattacaattagatatatagaaaaggcccctttttacaaaattaagcaacagacttctaaataatcaatccatggatcaaagagggaaatcacacacacacacacacacacacacacacacacacacacacaaatacagtgcgctatacggagtgataattagaatacaacatgttaggaatctctgtgttcatgcctttaaccatttcatattatttcataataatcaagaacttattaatcaaattagcatttaattatcttcagatgaaatgagaaagagggtgggcaaaatgtagactgaaggctgagaattataggaattatggtcacaatcagccagtgttttaactctactgcaattgtaacaaagtcattggatcttggttcaaccaatgggaatagatcctttcaaaatgccaataaataaaatgctaaataaacattttggcaattttctcttgataaatctcttatagcaatgtgcataatgcttccattttcatccaatgaagtactagtgaaaatagtctagatagtgttaatattgatagaaattataactaaggaataagttagatggtgattaaagagttgaataagcactcaaagaaagttgtgaaatctctgttctgagatatgtgacaaaaccatctgtctctgattttagtttaatccttaatgaatataagaagcctgactaaatgatctcttgggaggcccccttccaaacacaaaacccattattttaatttgcattggttatagtgccaacacaaagaaaaaacacactcaagatcttttttataaagtagggatttaattctaaatcttagtcatatcttacaatttataaattctttaatgttgaaaaatattttctttgtagaactaaaaccattctctctctctccctccctccctctctctctttctctctgtctgtttgagaacccaaaataaaatgtagtttataatttgtgattatgatttgaacttttcaaaaaatgtatgagtcatttcttgccctttgataatttccaaatgatgatgctttgcttttgcttttagagatcagtctttgcttttaattatttccatatattttggttgggagtgagaaaaataaacggaaaatgtcactcatgagtgtcagcctggtaatgaatatatagaatgcaaatggtcactttactgggggagacggtaagtttttctgagccttttgcccttttatcttctccagcctgctgttttttctgttttcatttgtagattaaactggtgcagcaatatggtggggtagaaatcacatgaatctgacatatgtgggctcctgtatctgtgcacatggatagagatgctggtcaaaatccaaccatcttatgagttccagacatacttttaaaattcacatgcatgaagctatacaaaatattttaaaatacagaatccaaaataaaatttctttttgtataaaatactccttctcaattcattcctgtaggcaaaacttgatatttaataatattaagaaaaagaagaaaatgaattcgaaatattttattgctttacaacacaaaaaaaatggtttacttactcccaataatctgaatttattccaatagtatatttatggatttaaccaggagagggattatcct

SEQ ID NO: 18475 - DNA, 9007 bp, Homo sapiens
  source 1..9007: mol_type = unassigned DNA
gcctttatttatttatttttctaatttagcatgctgttttctaacagacattgggtaccatcgaatgactgtcagaacagaaagctaaggcaaaggagggaggatgctgtggtcatcctttcttgtttttttcttctttaatgaggatagagcacatgtgagattttactttctactccagtaaaaattctgaagaattgcattggagactgttatattcaacacatacgtggattctgtgttatgatttacatttttctttatttcagcactttcttatgcaaggagctaaacagtgattaaaggagcaggatgaaaagatggcacagtcagtgctggtaccgccaggacctgacagcttccgcttctttaccagggaatcccttgctgctattgaacaacgcattgcagaagagaaagctaagagacccaaacaggaacgcaaggatgaggatgatgaaaatggcccaaagccaaacagtgacttggaagcaggaaaatctcttccatttatttatggagacattcctccagagatggtgtcagtgcccctggaggatctggacccctactatatcaataagaaaacgtttatagtattgaataaagggaaagcaatctctcgattcagtgccacccctgccctttacattttaactcccttcaaccctattagaaaattagctattaagattttggtacattctttattcaatatgctcattatgtgcacgattcttaccaactgtgtatttatgaccatgagtaaccctccagactggacaaagaatgtggagtatacctttacaggaatttatacttttgaatcacttattaaaatacttgcaaggggcttttgtttagaagatttcacatttttacgggatccatggaattggttggatttcacagtcattacttttgcatatgtgacagagtttgtggacctgggcaatgtctcagcgttgagaacattcagagttctccgagcattgaaaacaatttcagtcattccaggcctgaagaccattgtgggggccctgatccagtcagtgaagaagctttctgatgtcatgatcttgactgtgttctgtctaagcgtgtttgcgctaataggattgcagttgttcatgggcaacctacgaaataaatgtttgcaatggcctccagataattcttcctttgaaataaatatcacttccttctttaacaattcattggatgggaatggtactactttcaataggacagtgagcatatttaactgggatgaatatattgaggataaaagtcacttttattttttagaggggcaaaatgatgctctgctttgtggcaacagctcagatgcaggccagtgtcctgaaggatacatctgtgtgaaggctggtagaaaccccaactatggctacacgagctttgacacctttagttgggcctttttgtccttatttcgtctcatgactcaagacttctgggaaaacctttatcaactgacactacgtgctgctgggaaaacgtacatgatattttttgtgctggtcattttcttgggctcattctatctaataaatttgatcttggctgtggtggccatggcctatgaggaacagaatcaggccacattggaagaggctgaacagaaggaagctgaatttcagcagatgctcgaacagttgaaaaagcaacaagaagaagctcaggcggcagctgcagccgcatctgctgaatcaagagacttcagtggtgctggtgggataggagttttttcagagagttcttcagtagcatctaagttgagctccaaaagtgaaaaagagctgaaaaacagaagaaagaaaaagaaacagaaagaacagtctggagaagaagagaaaaatgacagagtccgaaaatcggaatctgaagacagcataagaagaaaaggtttccgtttttccttggaaggaagtaggctgacatatgaaaagagattttcttctccacaccagtccttactgagcatccgtggctcccttttctctccaagacgcaacagtagggcgagccttttcagcttcagaggtcgagcaaaggacattggctctgagaatgactttgctgatgatgagcacagcacctttgaggacaatgacagccgaagagactctctgttcgtgccgcacagacatggagaacggcgccacagcaatgtcagccaggccagccgtgcctccagggtgctccccatcctgcccatgaatgggaagatgcatagcgctgtggactgcaatggtgtggtctccctggtcgggggcccttctaccctcacatctgctgggcagctcctaccagagggcacaactactgaaacagaaataagaaagagacggtccagttcttatcatgtttccatggatttattggaagatcctacatcaaggcaaagagcaatgagtatagccagtattttgaccaacaccatggaagattttttttttttatatttagcctccagaaagctgctgcaaatgtaaggtaaatcttttgaagattgtctggccttccgctccttgccatagcaaaaccactgagaggaagctgccagtggttctgctaccgatgtcagcagcatgtctgctccctaaagcaggaagtagagaaggagacaggaacttgaagaatccagacagaaatgcccaccatgctggtataaatttgctaatatgtgtttgatttgggactgttgtaaaccatggttaaaggtgaaacaccttgtcaacctggttgtaatggacccatttgttgacctggccatcaccatctgcattgtcttaaatacactcttcatggctatggagcactatcccatgacggagcagttcagcagtgtactgtctgttggaaacctggtcttcacagggatcttcacagcagaaatgtttctcaagataattgccatggatccatattattactttcaagaaggctggaatatttttgatggttttattgtgagccttagtttaatggaacttggtttggcaaatgtggaaggattgtcagttctccgatcattccggctgctccgagttttcaagttggcaaaatcttggccaactctaaatatgctaattaagatcattggcaattctgtgggggctctaggaaacctcaccttggtattggccatcatcgtcttcatttttgctgtggtcggcatgcagctctttggtaagagctacaaagaatgtgtctgcaagatttccaatgattgtgaactcccacgctggcacatgcatgactttttccactccttcctgatcgtgttccgcgtgctgtgtggagagtggatagagaccatgtgggactgtatggaggtcgctggccaaaccatgtgccttactgtcttcatgatggtcatggtgattggaaatctagtggttctgaacctcttcttggccttgcttttgagttccttcagttctgacaatcttgctgccactgatgatgataacgaaatgaataatctccagattgctgtgggaaggatgcagaaaggaatcgattttgttaaaagaaaaatacgtgaatttattcagaaagcctttgttaggaagcagaaagctttagatgaaattaaaccgcttgaagatctaaataataaaaaagacagctgtatttccaaccataccaccatagaaataggcaaagacctcaattatctcaaagacggaaatggaactactagtggcataggcagcagtgtagaaaaatatgtcgtggatgaaagtgattacatgtcatttataaacaaccctagcctcactgtgacagtaccaattgctgttggagaatctgactttgaaaatttaaatactgaagaattcagcagcgagtcagatatggaggaaagcaaagagaagctaaatgcaactagttcatctgaaggcagcacggttgatattggagctcccgccgagggagaacagcctgaggttgaacctgaggaatcccttgaacctgaagcctgttttacagaagactgtgtacggaagttcaagtgttgtcagataagcatagaagaaggcaaagggaaactctggtggaatttgaggaaaacatgctataagatagtggagcacaattggttcgaaaccttcattgtcttcatgattctgctgagcagtggggctctggcctttgaagatatatacattgagcagcgaaaaaccattaagaccatgttagaatatgctgacaaggttttcacttacatattcattctggaaatgctgctaaagtgggttgcatatggttttcaagtgtattttaccaatgcctggtgctggctagacttcctgattgttgatgtctcactggttagcttaactgcaaatgccttgggttactcagaacttggtgccatcaaatccctcagaacactaagagctctgaggccactgagagctttgtcccggtttgaaggaatgagggttgttgtaaatgctcttttaggagccattccatctatcatgaatgtacttctggtttgtctgatcttttggctaatattcagtatcatgggagtgaatctctttgctggcaagttttaccattgtattaattacaccactggagagatgtttgatgtaagcgtggtcaacaactacagtgagtgcaaagctctcattgagagcaatcaaactgccaggtggaaaaatgtgaaagtaaactttgataacgtaggacttggatatctgtctctacttcaagtagccacgtttaagggatggatggatattatgtatgcagctgttgattcacgaaatgtagaattacaacccaagtatgaagacaacctgtacatgtatctttattttgtcatctttattatttttggttcattctttaccttgaatcttttcattggtgtcatcatagataacttcaaccaacagaaaaagaagtttggaggtcaagacatttttatgacagaagaacagaagaaatactacaatgcaatgaaaaaactgggttcaaagaaaccacaaaaacccatacctcgacctgctaacaaattccaaggaatggtctttgattttgtaaccaaacaagtctttgatatcagcatcatgatcctcatctgccttaacatggtcaccatgatggtggaaaccgatgaccagagtcaagaaatgacaaacattctgtactggattaatctggtgtttattgttctgttcactggagaatgtgtgctgaaactgatctctcttcgttactactatttcactattggatggaatatttttgattttgtggtggtcattctctccattgtaggaatgtttctggctgaactgatagaaaagtattttgtgtcccctaccctgttccgagtgatccgtcttgccaggattggccgaatcctacgtctgatcaaaggagcaaaggggatccgcacgctgctctttgctttgatgatgtcccttcctgcgttgtttaacatcggcctccttcttttcctggtcatgttcatctacgccatctttgggatgtccaattttgcctatgttaagagggaagttgggatcgatgacatgttcaactttgagacctttggcaacagcatgatctgcctgttccaaattacaacctctgctggctgggatggattgctagcacctattcttaatagtggacctccagactgtgaccctgacaaagatcaccctggaagctcagttaaaggagactgtgggaacccatctgttgggattttcttttttgtcagttacatcatcatatccttcctggttgtggtgaacatgtacatcgcggtcatcctggagaacttcagtgttgctactgaagaaagtgcagagcctctgagtgaggatgactttgagatgttctatgaggtttgggagaagtttgatcccgatgcgacccagtttatagagtttgccaaactttctgattttgcagatgccctggatcctcctcttctcatagcaaaacccaacaaagtccagctcattgccatggatctgcccatggtgagtggtgaccggatccactgtcttgacatcttatttgcttttacaaagcgtgttttgggtgagagtggagagatggatgcccttcgaatacagatggaagagcgattcatggcatcaaacccctccaaagtctcttatgagcccattacgaccacgttgaaacgcaaacaagaggaggtgtctgctattattatccagagggcttacagacgctacctcttgaagcaaaaagttaaaaaggtatcaagtatatacaagaaagacaaaggcaaagaatgtgatggaacacccatcaaagaagatactctcattgataaactgaatgagaattcaactccagagaaaaccgatatgacgccttccaccacgtctccaccctcgtatgatagtgtgaccaaaccagaaaaagaaaaatttgaaaaagacaaatcagaaaaggaagacaaagggaaagatatcagggaaagtaaaaagtaaaaagaaaccaagaattttccattttgtgatcaattgtttacagcccgtgatggtgatgtgtttgtgtcaacaggactcccacaggaggtctatgccaaactgactgtttttacaaatgtatacttaaggtcagtgcctataacaagacagagacctctggtcagcaaactggaactcagtaaactggagaaatagtatcgatgggaggtttctattttcacaaccagctgacactgctgaagagcagaggcgtaatggctactcagacgataggaaccaatttaaaggggggagggaagttaaatttttatgtaaattcaacatgtgacacttgataatagtaattgtcaccagtgtttatgttttaactgccacacctgccatatttttacaaaacgtgtgctgtgaatttatcacttttctttttaattcacaggttgtttactattatatgtgactatttttgtaaatgggtttgtgtttggggagagggattaaagggagggaattctacatttctctattgtattgtataactggatatattttaaatggaggcatgctgcaattctcattcacacataaaaaaatcacatcacaaaagggaagagtttacttcttgtttcaggatgtttttagatttttgaggtgcttaaatagctattcgtatttttaaggtgtctcatccagaaaaaatttaatgtgcctgtaaatgttccatagaatcacaagcattaaagagttgttttatttttacataacccattaaatgtacatgtatatatgtatatatgtatatgtgcgtgtatatacatatatatgtatacacacatgcacacacagagatatacacataccattacattgtcattcacagtcccagcagcatgactatcacatttttgataagtgtcctttggcataaaataaaaatatcctatcagtcctttctaagaagcctgaattgaccaaaaaacatccccaccaccactttataaagttgattctgctttatcctgcagtattgtttagccatcttctgctcttggtaaggttgacatagtatatgtcaatttaaaaaataaaagtctgctttgtaaatagtaattttacccagtggtgcatgtttgagcaaacaaaaatgatgatttaagcacactacttattgcatcaaatatgtaccacagtaagtatagtttgcaagctttcaacaggtaatatgatgtaattggttccattatagtttgaagctgtcactgctgcatgtttatcttgcctatgctgctgtatcttattccttccactgttcagaagtctaatatgggaagccatatatcagtggtaaagtgaagcaaattgttctaccaagacctcattcttcatgtcattaagcaataggttgcagcaaacaaggaagagcttcttgctttttattcttccaaccttaattgaacactcaatgatgaaaagcccgactgtacaaacatgttgcaagctgcttaaatctgtttaaaatatatggttagagttttctaagaaaatataaatactgtaaaaagttcattttattttatttttcagccttttgtacgtaaaatgagaaattaaaagtatcttcaggtggatgtcacagtcactattgttagtttctgttcctagcacttttaaattgaagcacttcacaaaataagaagcaaggactaggatgcagtgtaggtttctgcttttttattagtactgtaaacttgcacacatttcaatgtgaaacaaatctcaaactgagttcaatgtttatttgctttcaatagtaatgccttatcattgaaagaggcttaaagaaaaaaaaaatcagctgatactcttggcattgcttgaatccaatgtttccacctagtctttttattcagtaatcatcagtcttttccaatgtttgtttacacagatagatcttattgacccatatggcactagaactgtatcagatataatatgggatcccagctttttttcctctcccacaaaaccaggtagtgaagttatattaccagttacagcaaaatactttgtgtttcacaagcaacaataaatgtagattctttatactgaagctattgacttgtagtgtgttggtgaaatgcatgcaggaaaatgctgttaccataaagaacggtaaaccacattacaatcaagccaaaagaataaaggtttcgcttttgtttttgtatttaattgttgtctttgtttctatctttgaaatgccatttaaaggtagatttctatcatgtaaaaataatctatctgaaaaacaaatgtaaagaacacacattaattactataattcatctttcaattttttcatggaatggaagttaattaagaagagtgtattggataactactttaatattggccaaaaagctagatatggcatcaggtagactagtggaaagttacaaaaattaataaaaaattgactaacattttaa

SEQ ID NO: 18476 - DNA, 1807 bp, Homo sapiens
  source 1..1807: mol_type = unassigned DNA
atgctgttttctaacagacattgggtaccatcgaatgactgtcagaacagaaagctaaggcaaaggagggaggatgctgtggtcatcctttcttgtttttttcttctttaatgaggatagagcacatgtgagattttactttctactccagtaaaaattctgaagaattgcattggagactgttatattcaacacatacgtggattctgtgttatgatttacatttttctttatttcagcactttcttatgcaaggagctaaacagtgattaaaggagcaggatgaaaagatggcacagtcagtgctggtaccgccaggacctgacagcttccgcttctttaccagggaatcccttgctgctattgaacaacgcattgcagaagagaaagctaagagacccaaacaggaacgcaaggatgaggatgatgaaaatggcccaaagccaaacagtgacttggaagcaggaaaatctcttccatttatttatggagacattcctccagagatggtgtcagtgcccctggaggatctggacccctactatatcaataagaaaacgtttatagtattgaataaagggaaagcaatctctcgattcagtgccacccctgccctttacattttaactcccttcaaccctattagaaaattagctattaagattttggtacattctttattcaatatgctcattatgtgcacgattcttaccaactgtgtatttatgaccatgagtaaccctccagactggacaaagaatgtggagtatacctttacaggaatttatacttttgaatcacttattaaaatacttgcaaggggcttttgtttagaagatttcacatttttacgggatccatggaattggttggatttcacagtcattacttttgcatatgtgacagagtttgtggacctgggcaatgtctcagcgttgagaacattcagagttctccgagcattgaaaacaatttcagtcattccaggcctgaagaccattgtgggggccctgatccagtcagtgaagaagctttctgatgtcatgatcttgactgtgttctgtctaagcgtgtttgcgctaataggattgcagttgttcatgggcaacctacgaaataaatgtttgcaatggcctccagataattcttcctttgaaataaatatcacttccttctttaacaattcattggatgggaatggtactactttcaataggacagtgagcatatttaactgggatgaatatattgaggataaaagtcacttttattttttagaggggcaaaatgatgctctgctttgtggcaacagctcagatgcaggccagtgtcctgaaggatacatctgtgtgaaggctggtagaaaccccaactatggctacacgagctttgacacctttagttgggcctttttgtccttatttcgtctcatgactcaagacttctgggaaaacctttatcaactgacactacgtgctgctgggaaaacgtacatgatattttttgtgctggtcattttcttgggctcattctatctaataaatttgatcttggctgtggtggccatggcctatgaggaacagaatcaggccacattggaagaggctgaacagaaggaagctgaatttcagcagatgctcgaacagttgaaaaagcaacaagaagaagctcaggcggcagctgcagccgcatctgctgaatcaagagacttcagtggtgctggtgggataggagttttttcagagagttcttcagtagcatctaagttgagctccaaaagtgaaaaagagctgaaaaacagaagaaa

SEQ ID NO: 18477 - DNA, 8881 bp, Homo sapiens
  source 1..8881: mol_type = unassigned DNA
gaatgactgtcagaacagaaagctaaggcaaaggagggaggatgctgtggtcatcctttcttgtttttttcttctttaatgaggatagagcacatgtgagattttactttctactccagtaaaaattctgaagaattgcattggagactgttatattcaacacatacgtggattctgtgttatgatttacatttttctttatttcaggggtttttctccctttgcttgacacttctctgtcctgacaccttgagaagaaggatgtgtttgcttacccttccgccatgattgtaaatttcctgaggccttcccagccatgcagcactcactttcttatgcaaggagctaaacagtgattaaaggagcaggatgaaaagatggcacagtcagtgctggtaccgccaggacctgacagcttccgcttctttaccagggaatcccttgctgctattgaacaacgcattgcagaagagaaagctaagagacccaaacaggaacgcaaggatgaggatgatgaaaatggcccaaagccaaacagtgacttggaagcaggaaaatctcttccatttatttatggagacattcctccagagatggtgtcagtgcccctggaggatctggacccctactatatcaataagaaaacgtttatagtattgaataaagggaaagcaatctctcgattcagtgccacccctgccctttacattttaactcccttcaaccctattagaaaattagctattaagattttggtacattctttattcaatatgctcattatgtgcacgattcttaccaactgtgtatttatgaccatgagtaaccctccagactggacaaagaatgtggagtatacctttacaggaatttatacttttgaatcacttattaaaatacttgcaaggggcttttgtttagaagatttcacatttttacgggatccatggaattggttggatttcacagtcattacttttgcgtatgtaacagaatttgtaaacctaggcaatgtttcagctcttcgaactttcagagtcttgagagctttgaaaactatttctgtaattccaggcctgaagaccattgtgggggccctgatccagtcagtgaagaagctttctgatgtcatgatcttgactgtgttctgtctaagcgtgtttgcgctaataggattgcagttgttcatgggcaacctacgaaataaatgtttgcaatggcctccagataattcttcctttgaaataaatatcacttccttctttaacaattcattggatgggaatggtactactttcaataggacagtgagcatatttaactgggatgaatatattgaggataaaagtcacttttattttttagaggggcaaaatgatgctctgctttgtggcaacagctcagatgcaggccagtgtcctgaaggatacatctgtgtgaaggctggtagaaaccccaactatggctacacgagctttgacacctttagttgggcctttttgtccttatttcgtctcatgactcaagacttctgggaaaacctttatcaactgacactacgtgctgctgggaaaacgtacatgatattttttgtgctggtcattttcttgggctcattctatctaataaatttgatcttggctgtggtggccatggcctatgaggaacagaatcaggccacattggaagaggctgaacagaaggaagctgaatttcagcagatgctcgaacagttgaaaaagcaacaagaagaagctcaggcggcagctgcagccgcatctgctgaatcaagagacttcagtggtgctggtgggataggagttttttcagagagttcttcagtagcatctaagttgagctccaaaagtgaaaaagagctgaaaaacagaagaaagaaaaagaaacagaaagaacagtctggagaagaagagaaaaatgacagagtccgaaaatcggaatctgaagacagcataagaagaaaaggtttccgtttttccttggaaggaagtaggctgacatatgaaaagagattttcttctccacaccagtccttactgagcatccgtggctcccttttctctccaagacgcaacagtagggcgagccttttcagcttcagaggtcgagcaaaggacattggctctgagaatgactttgctgatgatgagcacagcacctttgaggacaatgacagccgaagagactctctgttcgtgccgcacagacatggagaacggcgccacagcaatgtcagccaggccagccgtgcctccagggtgctccccatcctgcccatgaatgggaagatgcatagcgctgtggactgcaatggtgtggtctccctggtcgggggcccttctaccctcacatctgctgggcagctcctaccagagggcacaactactgaaacagaaataagaaagagacggtccagttcttatcatgtttccatggatttattggaagatcctacatcaaggcaaagagcaatgagtatagccagtattttgaccaacaccatggaagaacttgaagaatccagacagaaatgcccaccatgctggtataaatttgctaatatgtgtttgatttgggactgttgtaaaccatggttaaaggtgaaacaccttgtcaacctggttgtaatggacccatttgttgacctggccatcaccatctgcattgtcttaaatacactcttcatggctatggagcactatcccatgacggagcagttcagcagtgtactgtctgttggaaacctggtcttcacagggatcttcacagcagaaatgtttctcaagataattgccatggatccatattattactttcaagaaggctggaatatttttgatggttttattgtgagccttagtttaatggaacttggtttggcaaatgtggaaggattgtcagttctccgatcattccggctgctccgagttttcaagttggcaaaatcttggccaactctaaatatgctaattaagatcattggcaattctgtgggggctctaggaaacctcaccttggtattggccatcatcgtcttcatttttgctgtggtcggcatgcagctctttggtaagagctacaaagaatgtgtctgcaagatttccaatgattgtgaactcccacgctggcacatgcatgactttttccactccttcctgatcgtgttccgcgtgctgtgtggagagtggatagagaccatgtgggactgtatggaggtcgctggccaaaccatgtgccttactgtcttcatgatggtcatggtgattggaaatctagtggttctgaacctcttcttggccttgcttttgagttccttcagttctgacaatcttgctgccactgatgatgataacgaaatgaataatctccagattgctgtgggaaggatgcagaaaggaatcgattttgttaaaagaaaaatacgtgaatttattcagaaagcctttgttaggaagcagaaagctttagatgaaattaaaccgcttgaagatctaaataataaaaaagacagctgtatttccaaccataccaccatagaaataggcaaagacctcaattatctcaaagacggaaatggaactactagtggcataggcagcagtgtagaaaaatatgtcgtggatgaaagtgattacatgtcatttataaacaaccctagcctcactgtgacagtaccaattgctgttggagaatctgactttgaaaatttaaatactgaagaattcagcagcgagtcagatatggaggaaagcaaagagaagctaaatgcaactagttcatctgaaggcagcacggttgatattggagctcccgccgagggagaacagcctgaggttgaacctgaggaatcccttgaacctgaagcctgttttacagaagactgtgtacggaagttcaagtgttgtcagataagcatagaagaaggcaaagggaaactctggtggaatttgaggaaaacatgctataagatagtggagcacaattggttcgaaaccttcattgtcttcatgattctgctgagcagtggggctctggcctttgaagatatatacattgagcagcgaaaaaccattaagaccatgttagaatatgctgacaaggttttcacttacatattcattctggaaatgctgctaaagtgggttgcatatggttttcaagtgtattttaccaatgcctggtgctggctagacttcctgattgttgatgtctcactggttagcttaactgcaaatgccttgggttactcagaacttggtgccatcaaatccctcagaacactaagagctctgaggccactgagagctttgtcccggtttgaaggaatgagggttgttgtaaatgctcttttaggagccattccatctatcatgaatgtacttctggtttgtctgatcttttggctaatattcagtatcatgggagtgaatctctttgctggcaagttttaccattgtattaattacaccactggagagatgtttgatgtaagcgtggtcaacaactacagtgagtgcaaagctctcattgagagcaatcaaactgccaggtggaaaaatgtgaaagtaaactttgataacgtaggacttggatatctgtctctacttcaagtagccacgtttaagggatggatggatattatgtatgcagctgttgattcacgaaatgtagaattacaacccaagtatgaagacaacctgtacatgtatctttattttgtcatctttattatttttggttcattctttaccttgaatcttttcattggtgtcatcatagataacttcaaccaacagaaaaagaagtttggaggtcaagacatttttatgacagaagaacagaagaaatactacaatgcaatgaaaaaactgggttcaaagaaaccacaaaaacccatacctcgacctgctaacaaattccaaggaatggtctttgattttgtaaccaaacaagtctttgatatcagcatcatgatcctcatctgccttaacatggtcaccatgatggtggaaaccgatgaccagagtcaagaaatgacaaacattctgtactggattaatctggtgtttattgttctgttcactggagaatgtgtgctgaaactgatctctcttcgttactactatttcactattggatggaatatttttgattttgtggtggtcattctctccattgtaggaatgtttctggctgaactgatagaaaagtattttgtgtcccctaccctgttccgagtgatccgtcttgccaggattggccgaatcctacgtctgatcaaaggagcaaaggggatccgcacgctgctctttgctttgatgatgtcccttcctgcgttgtttaacatcggcctccttcttttcctggtcatgttcatctacgccatctttgggatgtccaattttgcctatgttaagagggaagttgggatcgatgacatgttcaactttgagacctttggcaacagcatgatctgcctgttccaaattacaacctctgctggctgggatggattgctagcacctattcttaatagtggacctccagactgtgaccctgacaaagatcaccctggaagctcagttaaaggagactgtgggaacccatctgttgggattttcttttttgtcagttacatcatcatatccttcctggttgtggtgaacatgtacatcgcggtcatcctggagaacttcagtgttgctactgaagaaagtgcagagcctctgagtgaggatgactttgagatgttctatgaggtttgggagaagtttgatcccgatgcgacccagtttatagagtttgccaaactttctgattttgcagatgccctggatcctcctcttctcatagcaaaacccaacaaagtccagctcattgccatggatctgcccatggtgagtggtgaccggatccactgtcttgacatcttatttgcttttacaaagcgtgttttgggtgagagtggagagatggatgcccttcgaatacagatggaagagcgattcatggcatcaaacccctccaaagtctcttatgagcccattacgaccacgttgaaacgcaaacaagaggaggtgtctgctattattatccagagggcttacagacgctacctcttgaagcaaaaagttaaaaaggtatcaagtatatacaagaaagacaaaggcaaagaatgtgatggaacacccatcaaagaagatactctcattgataaactgaatgagaattcaactccagagaaaaccgatatgacgccttccaccacgtctccaccctcgtatgatagtgtgaccaaaccagaaaaagaaaaatttgaaaaagacaaatcagaaaaggaagacaaagggaaagatatcagggaaagtaaaaagtaaaaagaaaccaagaattttccattttgtgatcaattgtttacagcccgtgatggtgatgtgtttgtgtcaacaggactcccacaggaggtctatgccaaactgactgtttttacaaatgtatacttaaggtcagtgcctataacaagacagagacctctggtcagcaaactggaactcagtaaactggagaaatagtatcgatgggaggtttctattttcacaaccagctgacactgctgaagagcagaggcgtaatggctactcagacgataggaaccaatttaaaggggggagggaagttaaatttttatgtaaattcaacatgtgacacttgataatagtaattgtcaccagtgtttatgttttaactgccacacctgccatatttttacaaaacgtgtgctgtgaatttatcacttttctttttaattcacaggttgtttactattatatgtgactatttttgtaaatgggtttgtgtttggggagagggattaaagggagggaattctacatttctctattgtattgtataactggatatattttaaatggaggcatgctgcaattctcattcacacataaaaaaatcacatcacaaaagggaagagtttacttcttgtttcaggatgtttttagatttttgaggtgcttaaatagctattcgtatttttaaggtgtctcatccagaaaaaatttaatgtgcctgtaaatgttccatagaatcacaagcattaaagagttgttttatttttacataacccattaaatgtacatgtatatatgtatatatgtatatgtgcgtgtatatacatatatatgtatacacacatgcacacacagagatatacacataccattacattgtcattcacagtcccagcagcatgactatcacatttttgataagtgtcctttggcataaaataaaaatatcctatcagtcctttctaagaagcctgaattgaccaaaaaacatccccaccaccactttataaagttgattctgctttatcctgcagtattgtttagccatcttctgctcttggtaaggttgacatagtatatgtcaatttaaaaaataaaagtctgctttgtaaatagtaattttacccagtggtgcatgtttgagcaaacaaaaatgatgatttaagcacactacttattgcatcaaatatgtaccacagtaagtatagtttgcaagctttcaacaggtaatatgatgtaattggttccattatagtttgaagctgtcactgctgcatgtttatcttgcctatgctgctgtatcttattccttccactgttcagaagtctaatatgggaagccatatatcagtggtaaagtgaagcaaattgttctaccaagacctcattcttcatgtcattaagcaataggttgcagcaaacaaggaagagcttcttgctttttattcttccaaccttaattgaacactcaatgatgaaaagcccgactgtacaaacatgttgcaagctgcttaaatctgtttaaaatatatggttagagttttctaagaaaatataaatactgtaaaaagttcattttattttatttttcagccttttgtacgtaaaatgagaaattaaaagtatcttcaggtggatgtcacagtcactattgttagtttctgttcctagcacttttaaattgaagcacttcacaaaataagaagcaaggactaggatgcagtgtaggtttctgcttttttattagtactgtaaacttgcacacatttcaatgtgaaacaaatctcaaactgagttcaatgtttatttgctttcaatagtaatgccttatcattgaaagaggcttaaagaaaaaaaaaatcagctgatactcttggcattgcttgaatccaatgtttccacctagtctttttattcagtaatcatcagtcttttccaatgtttgtttacacagatagatcttattgacccatatggcactagaactgtatcagatataatatgggatcccagctttttttcctctcccacaaaaccaggtagtgaagttatattaccagttacagcaaaatactttgtgtttcacaagcaacaataaatgtagattctttatactgaagctattgacttgtagtgtgttggtgaaatgcatgcaggaaaatgctgttaccataaagaacggtaaaccacattacaatcaagccaaaagaataaaggtttcgcttttgtttttgtatttaattgttgtctttgtttctatctttgaaatgccatttaaaggtagatttctatcatgtaaaaataatctatctgaaaaacaaatgtaaagaacacacattaattactataattcatctttcaattttttcatggaatggaagttaattaagaagagtgtattggataactactttaatattggccaaaaagctagatatggcatcaggtagactagtggaaagttacaaaaattaataaaaaattgactaacattttaa

SEQ ID NO: 18478 - DNA, 4408 bp, Homo sapiens
  source 1..4408: mol_type = unassigned DNA
gactgtcagaacagaaagctaaggcaaaggagggaggatgctgtggtcatcctttcttgtttttttcttctttaatgaggatagagcacatgtgagattttactttctactccagtaaaaattctgaagaattgcattggagactgttatattcaacacatacgtggattctgtgttatgatttacatttttctttatttcagcactttcttatgcaaggagctaaacagtgattaaaggagcaggatgaaaagatggcacagtcagtgctggtaccgccaggacctgacagcttccgcttctttaccagggaatcccttgctgctattgaacaacgcattgcagaagagaaagctaagagacccaaacaggaacgcaaggatgaggatgatgaaaatggcccaaagccaaacagtgacttggaagcaggaaaatctcttccatttatttatggagacattcctccagagatggtgtcagtgcccctggaggatctggacccctactatatcaataagaaagtgagttcttagtcaagttgccttcactgcctatttactaattggttctgggctagtcccagggatgatggtgaagaaggctggcctccttccctctgtctaaagtatcactaagatgctggatgggcctgaccgtgtaatggaccaatgatcctagaagtcttttggaagcactcatttgaacctgcatttgtgagacaggcagagaactgacgtttatagtattgaataaagggaaagcaatctctcgattcagtgccacccctgccctttacattttaactcccttcaaccctattagaaaattagctattaagattttggtacattctttattcaatatgctcattatgtgcacgattcttaccaactgtgtatttatgaccatgagtaaccctccagactggacaaagaatgtggagtatacctttacaggaatttatacttttgaatcacttattaaaatacttgcaaggggcttttgtttagaagatttcacatttttacgggatccatggaattggttggatttcacagtcattacttttgcatatgtgacagagtttgtggacctgggcaatgtctcagcgttgagaacattcagagttctccgagcattgaaaacaatttcagtcattccaggcctgaagaccattgtgggggccctgatccagtcagtgaagaagctttctgatgtcatgatcttgactgtgttctgtctaagcgtgtttgcgctaataggattgcagttgttcatgggcaacctacgaaataaatgtttgcaatggcctccagataattcttcctttgaaataaatatcacttccttctttaacaattcattggatgggaatggtactactttcaataggacagtgagcatatttaactgggatgaatatattgaggataaaagtcacttttattttttagaggggcaaaatgatgctctgctttgtggcaacagctcagatgcaggccagtgtcctgaaggatacatctgtgtgaaggctggtagaaaccccaactatggctacacgagctttgacacctttagttgggcctttttgtccttatttcgtctcatgactcaagacttctgggaaaacctttatcaactgacactacgtgctgctgggaaaacgtacatgatattttttgtgctggtcattttcttgggctcattctatctaataaatttgatcttggctgtggtggccatggcctatgaggaacagaatcaggccacattggaagaggctgaacagaaggaagctgaatttcagcagatgctcgaacagttgaaaaagcaacaagaagaagctcaggcggcagctgcagccgcatctgctgaatcaagagacttcagtggtgctggtgggataggagttttttcagagagttcttcagtagcatctaagttgagctccaaaagtgaaaaagagctgaaaaacagaagaaagaaaaagaaacagaaagaacagtctggagaagaagagaaaaatgacagagtccgaaaatcggaatctgaagacagcataagaagaaaaggtttccgtttttccttggaaggaagtaggctgacatatgaaaagagattttcttctccacaccagtccttactgagcatccgtggctcccttttctctccaagacgcaacagtagggcgagccttttcagcttcagaggtcgagcaaaggacattggctctgagaatgactttgctgatgatgagcacagcacctttgaggacaatgacagccgaagagactctctgttcgtgccgcacagacatggagaacggcgccacagcaatgtcagccaggccagccgtgcctccagggtgctccccatcctgcccatgaatgggaagatgcatagcgctgtggactgcaatggtgtggtctccctggtcgggggcccttctaccctcacatctgctgggcagctcctaccagagggcacaactactgaaacagaaataagaaagagacggtccagttcttatcatgtttccatggatttattggaagatcctacatcaaggcaaagagcaatgagtatagccagtattttgaccaacaccatggaaggtatgttaaaagtcctgcgtcacagttacttggtgctttggtaatgatgaaaaaacacttcataaatttcaataaaatacttcctgacttgatattgtatcattattacacattttactaaataacagtaaaatccgtgcataactcatggattctattatcttccacagattttttttttttatatttagcctccagaaagctgctgcaaatgtaaggtatattttgaacaccactttcatacattaaattctaaacattgaaacttgtgtgcatgacgttgaaaagagtgtaatgataaatgcttatacttatgatgatgctaagccatttggattatattaactgcttgagacacaagttataaaatcctatgacttaaccagaaatataaattaaaaatgtgaattagggtttgatattaacttccttgaagcaaagtgtttaaaattttgtagtcctacttttgcctttctctgaccagattcttacaatatatcagctttctctttagttgcagattttatctgaatagttaacataatgtgtagcagtctggatctcagaatgccaaaataaagactttggggacagcttaatctgtgatcaatttctggctctgccatatgttaaatgtgttaatttgtgactttgaatttcagtctcctcatcagtaaaatgtggatgatgatgtttaggcataaggttgttgaatggattaaataagccttcttagataaaacactgatgtatttggcatgcagaagacagttaataaatattatcaatattagttgttttgttgttgttatttttgttaattcacatgtttttgcctttccatactgtaagtgaattcaaacaactgtcaacttcaactacttggaaaatattttcatgtaaaatgtattctatcccccttccttgccctcctattccctcctctccctatctctttacaaaccttctcccttgtaccccttcccaggtatgtgtgtgagtgtgagtgtgtgtagatgtgtcaagggagaagagaaaaggagaatgaaagcaaaagagagcaagcatacacgtccctttcttattgataattagattttctcttgagattggatagattcctggaataattcttttcctgtctgtatgcaaagatcccataatattattaataccaatacgaaaagcctgaaaatcacagccagaaaaaattcacagtgtagacgactgtgtacatcacagacaagtcagtattacaaaacccaattttcatagtgtcctatttcagtatcctaatgcaattcactgatttcaattgaatattaaactctagtacgttcttccccaacctcgcctgcgttagcttgcactccctcttccccccagctgccagtagcttgctcctccctgtccctccaggtaaatcttttgaagattgtctggccttccgctccttgccatagcaaaaccactgagaggaagctgccagtggttctgctaccgatgtcagcagcatgtctgctccctaaagcaggaagtagagaaggagacaggaacttgaagaatccagacagaaatgcccaccatgctggtataaatttgctaatatgtgtttgatttgggactgttgtaaaccatggttaaaggtgaaacaccttgtcaacctggttgtaatggacccatttgttgacctggccatcaccatctgcattgtcttaaatacactcttcatggctatggagcactatcccatgacggagcagttcagcagtgtactgtctgttggaaacctg

SEQ ID NO: 18479 - DNA, 3119 bp, Homo sapiens
  source 1..3119: mol_type = unassigned DNA
agaacagaaagctaaggcaaaggagggaggatgctgtggtcatcctttcttgtttttttcttctttaatgaggatagagcacatgtgagattttactttctactccagtaaaaattctgaagaattgcattggagactgttatattcaacacatacgtggattctgtgttatgatttacatttttctttatttcagttacagaatcctcttggggctttcttagagccaatctcctctaaggtgaatgcattttcttgcattcacctgtcatgaaatggcagtggaaagacttgaagaaggcacaggcgttgcactttcttatgcaaggagctaaacagtgattaaaggagcaggatgaaaagatggcacagtcagtgctggtaccgccaggacctgacagcttccgcttctttaccagggaatcccttgctgctattgaacaacgcattgcagaagagaaagctaagagacccaaacaggaacgcaaggatgaggatgatgaaaatggcccaaagccaaacagtgacttggaagcaggaaaatctcttccatttatttatggagacattcctccagagatggtgtcagtgcccctggaggatctggacccctactatatcaataagaaaacgtttatagtattgaataaagggaaagcaatctctcgattcagtgccacccctgccctttacattttaactcccttcaaccctattagaaaattagctattaagattttggtacattctttattcaatatgctcattatgtgcacgattcttaccaactgtgtatttatgaccatgagtaaccctccagactggacaaagaatgtggagtatacctttacaggaatttatacttttgaatcacttattaaaatacttgcaaggggcttttgtttagaagatttcacatttttacgggatccatggaattggttggatttcacagtcattacttttgcatatgtgacagagtttgtggacctgggcaatgtctcagcgttgagaacattcagagttctccgagcattgaaaacaatttcagtcattccaggcctgaagaccattgtgggggccctgatccagtcagtgaagaagctttctgatgtcatgatcttgactgtgttctgtctaagcgtgtttgcgctaataggattgcagttgttcatgggcaacctacgaaataaatgtttgcaatggcctccagataattcttcctttgaaataaatatcacttccttctttaacaattcattggatgggaatggtactactttcaataggacagtgagcatatttaactgggatgaatatattgaggataaaagtcacttttattttttagaggggcaaaatgatgctctgctttgtggcaacagctcagatgcaggccagtgtcctgaaggatacatctgtgtgaaggctggtagaaaccccaactatggctacacgagctttgacacctttagttgggcctttttgtccttatttcgtctcatgactcaagacttctgggaaaacctttatcaactgacactacgtgctgctgggaaaacgtacatgatattttttgtgctggtcattttcttgggctcattctatctaataaatttgatcttggctgtggtggccatggcctatgaggaacagaatcaggccacattggaagaggctgaacagaaggaagctgaatttcagcagatgctcgaacagttgaaaaagcaacaagaagaagctcaggcggcagctgcagccgcatctgctgaatcaagagacttcagtggtgctggtgggataggagttttttcagagagttcttcagtagcatctaagttgagctccaaaagtgaaaaagagctgaaaaacagaagaaagaaaaagaaacagaaagaacagtctggagaagaagagaaaaatgacagagtccgaaaatcggaatctgaagacagcataagaagaaaaggtttccgtttttccttggaaggaagtaggctgacatatgaaaagagattttcttctccacaccagtccttactgagcatccgtggctcccttttctctccaagacgcaacagtagggcgagccttttcagcttcagaggtcgagcaaaggacattggctctgagaatgactttgctgatgatgagcacagcacctttgaggacaatgacagccgaagagactctctgttcgtgccgcacagacatggagaacggcgccacagcaatgtcagccaggccagccgtgcctccagggtgctccccatcctgcccatgaatgggaagatgcatagcgctgtggactgcaatggtgtggtctccctggtcgggggcccttctaccctcacatctgctgggcagctcctaccagagggcacaactactgaaacagaaataagaaagagacggtccagttcttatcatgtttccatggatttattggaagatcctacatcaaggcaaagagcaatgagtatagccagtattttgaccaacaccatggaagattttttttttttatatttagcctccagaaagctgctgcaaatgtaaggtatattttgaacaccactttcatacattaaattctaaacattgaaacttgtgtgcatgacgttgaaaagagtgtaatgataaatgcttatacttatgatgatgctaagccatttggattatattaactgcttgagacacaagttataaaatcctatgacttaaccagaaatataaattaaaaatgtgaattagggtttgatattaacttccttgaagcaaagtgtttaaaattttgtagtcctacttttgcctttctctgaccagattcttacaatatatcagctttctctttagttgcagattttatctgaatagttaacataatgtgtagcagtctggatctcagaatgccaaaataaagactttggggacagcttaatctgtgatcaatttctggctctgccatatgttaaatgtgttaatttgtgactttgaatttcagtctcctcatcagtaaaatgtggatgatgatgtttaggcataaggttgttgaatggattaaataagccttcttagataaaacactgatgtatttggcatgcagaagacagttaata

SEQ ID NO: 18480 - DNA, 8856 bp, Homo sapiens
  source 1..8856: mol_type = unassigned DNA
agaacagaaagctaaggcaaaggagggaggatgctgtggtcatcctttcttgtttttttcttctttaatgaggatagagcacatgtgagattttactttctactccagtaaaaattctgaagaattgcattggagactgttatattcaacacatacgtggattctgtgttatgatttacatttttctttatttcagggaatcccttgctgctattgaacaacgcattgcagaagagaaagctaagagacccaaacaggaacgcaaggatgaggatgatgaaaatggcccaaagccaaacagtgacttggaagcaggaaaatctcttccatttatttatggagacattcctccagagatggtgtcagtgcccctggaggatctggacccctactatatcaataagaaagtgagttcttagtcaagttgccttcactgcctatttactaattggttctgggctagtcccagggatgatggtgaagaaggctggcctccttccctctgtctaaagtatcactaagatgctggatgggcctgaccgtgtaatggaccaatgatcctagaagtcttttggaagcactcatttgaacctgcatttgtgagacaggcagagaactgacgtttatagtattgaataaagggaaagcaatctctcgattcagtgccacccctgccctttacattttaactcccttcaaccctattagaaaattagctattaagattttggtacattctttattcaatatgctcattatgtgcacgattcttaccaactgtgtatttatgaccatgagtaaccctccagactggacaaagaatgtggagtatacctttacaggaatttatacttttgaatcacttattaaaatacttgcaaggggcttttgtttagaagatttcacatttttacgggatccatggaattggttggatttcacagtcattacttttgcatatgtgacagagtttgtggacctgggcaatgtctcagcgttgagaacattcagagttctccgagcattgaaaacaatttcagtcattccaggcctgaagaccattgtgggggccctgatccagtcagtgaagaagctttctgatgtcatgatcttgactgtgttctgtctaagcgtgtttgcgctaataggattgcagttgttcatgggcaacctacgaaataaatgtttgcaatggcctccagataattcttcctttgaaataaatatcacttccttctttaacaattcattggatgggaatggtactactttcaataggacagtgagcatatttaactgggatgaatatattgaggataaaagtcacttttattttttagaggggcaaaatgatgctctgctttgtggcaacagctcagatgcaggccagtgtcctgaaggatacatctgtgtgaaggctggtagaaaccccaactatggctacacgagctttgacacctttagttgggcctttttgtccttatttcgtctcatgactcaagacttctgggaaaacctttatcaactgacactacgtgctgctgggaaaacgtacatgatattttttgtgctggtcattttcttgggctcattctatctaataaatttgatcttggctgtggtggccatggcctatgaggaacagaatcaggccacattggaagaggctgaacagaaggaagctgaatttcagcagatgctcgaacagttgaaaaagcaacaagaagaagctcaggcggcagctgcagccgcatctgctgaatcaagagacttcagtggtgctggtgggataggagttttttcagagagttcttcagtagcatctaagttgagctccaaaagtgaaaaagagctgaaaaacagaagaaagaaaaagaaacagaaagaacagtctggagaagaagagaaaaatgacagagtccgaaaatcggaatctgaagacagcataagaagaaaaggtttccgtttttccttggaaggaagtaggctgacatatgaaaagagattttcttctccacaccagtccttactgagcatccgtggctcccttttctctccaagacgcaacagtagggcgagccttttcagcttcagaggtcgagcaaaggacattggctctgagaatgactttgctgatgatgagcacagcacctttgaggacaatgacagccgaagagactctctgttcgtgccgcacagacatggagaacggcgccacagcaatgtcagccaggccagccgtgcctccagggtgctccccatcctgcccatgaatgggaagatgcatagcgctgtggactgcaatggtgtggtctccctggtcgggggcccttctaccctcacatctgctgggcagctcctaccagagggcacaactactgaaacagaaataagaaagagacggtccagttcttatcatgtttccatggatttattggaagatcctacatcaaggcaaagagcaatgagtatagccagtattttgaccaacaccatggaagaacttgaagaatccagacagaaatgcccaccatgctggtataaatttgctaatatgtgtttgatttgggactgttgtaaaccatggttaaaggtgaaacaccttgtcaacctggttgtaatggacccatttgttgacctggccatcaccatctgcattgtcttaaatacactcttcatggctatggagcactatcccatgacggagcagttcagcagtgtactgtctgttggaaacctggtcttcacagggatcttcacagcagaaatgtttctcaagataattgccatggatccatattattactttcaagaaggctggaatatttttgatggttttattgtgagccttagtttaatggaacttggtttggcaaatgtggaaggattgtcagttctccgatcattccggctgctccgagttttcaagttggcaaaatcttggccaactctaaatatgctaattaagatcattggcaattctgtgggggctctaggaaacctcaccttggtattggccatcatcgtcttcatttttgctgtggtcggcatgcagctctttggtaagagctacaaagaatgtgtctgcaagatttccaatgattgtgaactcccacgctggcacatgcatgactttttccactccttcctgatcgtgttccgcgtgctgtgtggagagtggatagagaccatgtgggactgtatggaggtcgctggccaaaccatgtgccttactgtcttcatgatggtcatggtgattggaaatctagtggttctgaacctcttcttggccttgcttttgagttccttcagttctgacaatcttgctgccactgatgatgataacgaaatgaataatctccagattgctgtgggaaggatgcagaaaggaatcgattttgttaaaagaaaaatacgtgaatttattcagaaagcctttgttaggaagcagaaagctttagatgaaattaaaccgcttgaagatctaaataataaaaaagacagctgtatttccaaccataccaccatagaaataggcaaagacctcaattatctcaaagacggaaatggaactactagtggcataggcagcagtgtagaaaaatatgtcgtggatgaaagtgattacatgtcatttataaacaaccctagcctcactgtgacagtaccaattgctgttggagaatctgactttgaaaatttaaatactgaagaattcagcagcgagtcagatatggaggaaagcaaagagaagctaaatgcaactagttcatctgaaggcagcacggttgatattggagctcccgccgagggagaacagcctgaggttgaacctgaggaatcccttgaacctgaagcctgttttacagaagactgtgtacggaagttcaagtgttgtcagataagcatagaagaaggcaaagggaaactctggtggaatttgaggaaaacatgctataagatagtggagcacaattggttcgaaaccttcattgtcttcatgattctgctgagcagtggggctctggcctttgaagatatatacattgagcagcgaaaaaccattaagaccatgttagaatatgctgacaaggttttcacttacatattcattctggaaatgctgctaaagtgggttgcatatggttttcaagtgtattttaccaatgcctggtgctggctagacttcctgattgttgatgtctcactggttagcttaactgcaaatgccttgggttactcagaacttggtgccatcaaatccctcagaacactaagagctctgaggccactgagagctttgtcccggtttgaaggaatgagggttgttgtaaatgctcttttaggagccattccatctatcatgaatgtacttctggtttgtctgatcttttggctaatattcagtatcatgggagtgaatctctttgctggcaagttttaccattgtattaattacaccactggagagatgtttgatgtaagcgtggtcaacaactacagtgagtgcaaagctctcattgagagcaatcaaactgccaggtggaaaaatgtgaaagtaaactttgataacgtaggacttggatatctgtctctacttcaagtagccacgtttaagggatggatggatattatgtatgcagctgttgattcacgaaatgtagaattacaacccaagtatgaagacaacctgtacatgtatctttattttgtcatctttattatttttggttcattctttaccttgaatcttttcattggtgtcatcatagataacttcaaccaacagaaaaagaagtttggaggtcaagacatttttatgacagaagaacagaagaaatactacaatgcaatgaaaaaactgggttcaaagaaaccacaaaaacccatacctcgacctgctaacaaattccaaggaatggtctttgattttgtaaccaaacaagtctttgatatcagcatcatgatcctcatctgccttaacatggtcaccatgatggtggaaaccgatgaccagagtcaagaaatgacaaacattctgtactggattaatctggtgtttattgttctgttcactggagaatgtgtgctgaaactgatctctcttcgttactactatttcactattggatggaatatttttgattttgtggtggtcattctctccattgtaggaatgtttctggctgaactgatagaaaagtattttgtgtcccctaccctgttccgagtgatccgtcttgccaggattggccgaatcctacgtctgatcaaaggagcaaaggggatccgcacgctgctctttgctttgatgatgtcccttcctgcgttgtttaacatcggcctccttcttttcctggtcatgttcatctacgccatctttgggatgtccaattttgcctatgttaagagggaagttgggatcgatgacatgttcaactttgagacctttggcaacagcatgatctgcctgttccaaattacaacctctgctggctgggatggattgctagcacctattcttaatagtggacctccagactgtgaccctgacaaagatcaccctggaagctcagttaaaggagactgtgggaacccatctgttgggattttcttttttgtcagttacatcatcatatccttcctggttgtggtgaacatgtacatcgcggtcatcctggagaacttcagtgttgctactgaagaaagtgcagagcctctgagtgaggatgactttgagatgttctatgaggtttgggagaagtttgatcccgatgcgacccagtttatagagtttgccaaactttctgattttgcagatgccctggatcctcctcttctcatagcaaaacccaacaaagtccagctcattgccatggatctgcccatggtgagtggtgaccggatccactgtcttgacatcttatttgcttttacaaagcgtgttttgggtgagagtggagagatggatgcccttcgaatacagatggaagagcgattcatggcatcaaacccctccaaagtctcttatgagcccattacgaccacgttgaaacgcaaacaagaggaggtgtctgctattattatccagagggcttacagacgctacctcttgaagcaaaaagttaaaaaggtatcaagtatatacaagaaagacaaaggcaaagaatgtgatggaacacccatcaaagaagatactctcattgataaactgaatgagaattcaactccagagaaaaccgatatgacgccttccaccacgtctccaccctcgtatgatagtgtgaccaaaccagaaaaagaaaaatttgaaaaagacaaatcagaaaaggaagacaaagggaaagatatcagggaaagtaaaaagtaaaaagaaaccaagaattttccattttgtgatcaattgtttacagcccgtgatggtgatgtgtttgtgtcaacaggactcccacaggaggtctatgccaaactgactgtttttacaaatgtatacttaaggtcagtgcctataacaagacagagacctctggtcagcaaactggaactcagtaaactggagaaatagtatcgatgggaggtttctattttcacaaccagctgacactgctgaagagcagaggcgtaatggctactcagacgataggaaccaatttaaaggggggagggaagttaaatttttatgtaaattcaacatgtgacacttgataatagtaattgtcaccagtgtttatgttttaactgccacacctgccatatttttacaaaacgtgtgctgtgaatttatcacttttctttttaattcacaggttgtttactattatatgtgactatttttgtaaatgggtttgtgtttggggagagggattaaagggagggaattctacatttctctattgtattgtataactggatatattttaaatggaggcatgctgcaattctcattcacacataaaaaaatcacatcacaaaagggaagagtttacttcttgtttcaggatgtttttagatttttgaggtgcttaaatagctattcgtatttttaaggtgtctcatccagaaaaaatttaatgtgcctgtaaatgttccatagaatcacaagcattaaagagttgttttatttttacataacccattaaatgtacatgtatatatgtatatatgtatatgtgcgtgtatatacatatatatgtatacacacatgcacacacagagatatacacataccattacattgtcattcacagtcccagcagcatgactatcacatttttgataagtgtcctttggcataaaataaaaatatcctatcagtcctttctaagaagcctgaattgaccaaaaaacatccccaccaccactttataaagttgattctgctttatcctgcagtattgtttagccatcttctgctcttggtaaggttgacatagtatatgtcaatttaaaaaataaaagtctgctttgtaaatagtaattttacccagtggtgcatgtttgagcaaacaaaaatgatgatttaagcacactacttattgcatcaaatatgtaccacagtaagtatagtttgcaagctttcaacaggtaatatgatgtaattggttccattatagtttgaagctgtcactgctgcatgtttatcttgcctatgctgctgtatcttattccttccactgttcagaagtctaatatgggaagccatatatcagtggtaaagtgaagcaaattgttctaccaagacctcattcttcatgtcattaagcaataggttgcagcaaacaaggaagagcttcttgctttttattcttccaaccttaattgaacactcaatgatgaaaagcccgactgtacaaacatgttgcaagctgcttaaatctgtttaaaatatatggttagagttttctaagaaaatataaatactgtaaaaagttcattttattttatttttcagccttttgtacgtaaaatgagaaattaaaagtatcttcaggtggatgtcacagtcactattgttagtttctgttcctagcacttttaaattgaagcacttcacaaaataagaagcaaggactaggatgcagtgtaggtttctgcttttttattagtactgtaaacttgcacacatttcaatgtgaaacaaatctcaaactgagttcaatgtttatttgctttcaatagtaatgccttatcattgaaagaggcttaaagaaaaaaaaaatcagctgatactcttggcattgcttgaatccaatgtttccacctagtctttttattcagtaatcatcagtcttttccaatgtttgtttacacagatagatcttattgacccatatggcactagaactgtatcagatataatatgggatcccagctttttttcctctcccacaaaaccaggtagtgaagttatattaccagttacagcaaaatactttgtgtttcacaagcaacaataaatgtagattctttatactgaagctattgacttgtagtgtgttggtgaaatgcatgcaggaaaatgctgttaccataaagaacggtaaaccacattacaatcaagccaaaagaataaaggtttcgcttttgtttttgtatttaattgttgtctttgtttctatctttgaaatgccatttaaaggtagatttctatcatgtaaaaataatctatctgaaaaacaaatgtaaagaacacacattaattactataattcatctttcaattttttcatggaatggaagttaattaagaagagtgtattggataactactttaatattggccaaaaagctagatatggcatcaggtagactagtggaaagttacaaaaattaataaaaaattgactaacattttaa

SEQ ID NO: 18481 - DNA, 8430 bp, Homo sapiens
  source 1..8430: mol_type = unassigned DNA
cctttcttgtttttttcttctttaatgaggatagagcacatgtgagattttactttctactccagtaaaaattctgaagaattgcattggagactgttatattcaacacatacgtggattctgtgttatgatttacatttttctttatttcagcactttcttatgcaaggagctaaacagtgattaaaggagcaggatgaaaagatggcacagtcagtgctggtaccgccaggacctgacagcttccgcttctttaccagggaatcccttgctgctattgaacaacgcattgcagaagagaaagctaagagacccaaacaggaacgcaaggatgaggatgatgaaaatggcccaaagccaaacagtgacttggaagcaggaaaatctcttccatttatttatggagacattcctccagagatggtgtcagtgcccctggaggatctggacccctactatatcaataagaaaacgtttatagtattgaataaagggaaagcaatctctcgattcagtgccacccctgccctttacattttaactcccttcaaccctattagaaaattagctattaagattttggtacattctttattcaatatgctcattatgtgcacgattcttaccaactgtgtatttatgaccatgagtaaccctccagactggacaaagaatgtggagtatacctttacaggaatttatacttttgaatcacttattaaaatacttgcaaggggcttttgtttagaagatttcacatttttacgggatccatggaattggttggatttcacagtcattacttttgcgtatgtaacagaatttgtaaacctaggcaatgtttcagctcttcgaactttcagagtcttgagagctttgaaaactatttctgtaattccaggcctgaagaccattgtgggggccctgatccagtcagtgaagaagctttctgatgtcatgatcttgactgtgttctgtctaagcgtgtttgcgctaataggattgcagttgttcatgggcaacctacgaaataaatgtttgcaatggcctccagataattcttcctttgaaataaatatcacttccttctttaacaattcattggatgggaatggtactactttcaataggacagtgagcatatttaactgggatgaatatattgaggataaaagtcacttttattttttagaggggcaaaatgatgctctgctttgtggcaacagctcagatgcaggccagtgtcctgaaggatacatctgtgtgaaggctggtagaaaccccaactatggctacacgagctttgacacctttagttgggcctttttgtccttatttcgtctcatgactcaagacttctgggaaaacctttatcaactgacactacgtgctgctgggaaaacgtacatgatattttttgtgctggtcattttcttgggctcattctatctaataaatttgatcttggctgtggtggccatggcctatgaggaacagaatcaggccacattggaagaggctgaacagaaggaagctgaatttcagcagatgctcgaacagttgaaaaagcaacaagaagaagctcaggcggcagctgcagccgcatctgctgaatcaagagacttcagtggtgctggtgggataggagttttttcagagagttcttcagtagcatctaagttgagctccaaaagtgaaaaagagctgaaaaacagaagaaagaaaaagaaacagaaagaacagtctggagaagaagagaaaaatgacagagtccgaaaatcggaatctgaagacagcataagaagaaaaggtttccgtttttccttggaaggaagtaggctgacatatgaaaagagattttcttctccacaccagtccttactgagcatccgtggctcccttttctctccaagacgcaacagtagggcgagccttttcagcttcagaggtcgagcaaaggacattggctctgagaatgactttgctgatgatgagcacagcacctttgaggacaatgacagccgaagagactctctgttcgtgccgcacagacatggagaacggcgccacagcaatgtcagccaggccagccgtgcctccagggtgctccccatcctgcccatgaatgggaagatgcatagcgctgtggactgcaatggtgtggtctccctggtcgggggcccttctaccctcacatctgctgggcagctcctaccagagggcacaactactgaaacagaaataagaaagagacggtccagttcttatcatgtttccatggatttattggaagatcctacatcaaggcaaagagcaatgagtatagccagtattttgaccaacaccatggaagaacttgaagaatccagacagaaatgcccaccatgctggtataaatttgctaatatgtgtttgatttgggactgttgtaaaccatggttaaaggtgaaacaccttgtcaacctggttgtaatggacccatttgttgacctggccatcaccatctgcattgtcttaaatacactcttcatggctatggagcactatcccatgacggagcagttcagcagtgtactgtctgttggaaacctggtcttcacagggatcttcacagcagaaatgtttctcaagataattgccatggatccatattattactttcaagaaggctggaatatttttgatggttttattgtgagccttagtttaatggaacttggtttggcaaatgtggaaggattgtcagttctccgatcattccggctgctccgagttttcaagttggcaaaatcttggccaactctaaatatgctaattaagatcattggcaattctgtgggggctctaggaaacctcaccttggtattggccatcatcgtcttcatttttgctgtggtcggcatgcagctctttggtaagagctacaaagaatgtgtctgcaagatttccaatgattgtgaactcccacgctggcacatgcatgactttttccactccttcctgatcgtgttccgcgtgctgtgtggagagtggatagagaccatgtgggactgtatggaggtcgctggccaaaccatgtgccttactgtcttcatgatggtcatggtgattggaaatctagtggttctgaacctcttcttggccttgcttttgagttccttcagttctgacaatcttgctgccactgatgatgataacgaaatgaataatctccagattgctgtgggaaggatgcagaaaggaatcgattttgttaaaagaaaaatacgtgaatttattcagaaagcctttgttaggaagcagaaagctttagatgaaattaaaccgcttgaagatctaaataataaaaaagacagctgtatttccaaccataccaccatagaaataggcaaagacctcaattatctcaaagacggaaatggaactactagtggcataggcagcagtgtagaaaaatatgtcgtggatgaaagtgattacatgtcatttataaacaaccctagcctcactgtgacagtaccaattgctgttggagaatctgactttgaaaatttaaatactgaagaattcagcagcgagtcagatatggaggaaagcaaagagaagctaaatgcaactagttcatctgaaggcagcacggttgatattggagctcccgccgagggagaacagcctgaggttgaacctgaggaatcccttgaacctgaagcctgttttacagaagactgtgtacggaagttcaagtgttgtcagataagcatagaagaaggcaaagggaaactctggtggaatttgaggaaaacatgctataagatagtggagcacaattggttcgaaaccttcattgtcttcatgattctgctgagcagtggggctctggcctttgaagatatatacattgagcagcgaaaaaccattaagaccatgttagaatatgctgacaaggttttcacttacatattcattctggaaatgctgctaaagtgggttgcatatggttttcaagtgtattttaccaatgcctggtgctggctagacttcctgattgttgatgtctcactggttagcttaactgcaaatgccttgggttactcagaacttggtgccatcaaatccctcagaacactaagagctctgaggccactgagagctttgtcccggtttgaaggaatgagggttgttgtaaatgctcttttaggagccattccatctatcatgaatgtacttctggtttgtctgatcttttggctaatattcagtatcatgggagtgaatctctttgctggcaagttttaccattgtattaattacaccactggagagatgtttgatgtaagcgtggtcaacaactacagtgagtgcaaagctctcattgagagcaatcaaactgccaggtggaaaaatgtgaaagtaaactttgataacgtaggacttggatatctgtctctacttcaagtagccacgtttaagggatggatggatattatgtatgcagctgttgattcacgaaatgtagaattacaacccaagtatgaagacaacctgtacatgtatctttattttgtcatctttattatttttggttcattctttaccttgaatcttttcattggtgtcatcatagataacttcaaccaacagaaaaagaagtttggaggtcaagacatttttatgacagaagaacagaagaaatactacaatgcaatgaaaaaactgggttcaaagaaaccacaaaaacccatacctcgacctgctaacaaattccaaggaatggtctttgattttgtaaccaaacaagtctttgatatcagcatcatgatcctcatctgccttaacatggtcaccatgatggtggaaaccgatgaccagagtcaagaaatgacaaacattctgtactggattaatctggtgtttattgttctgttcactggagaatgtgtgctgaaactgatctctcttcgttactactatttcactattggatggaatatttttgattttgtggtggtcattctctccattgtaggaatgtttctggctgaactgatagaaaagtattttgtgtcccctaccctgttccgagtgatccgtcttgccaggattggccgaatcctacgtctgatcaaaggagcaaaggggatccgcacgctgctctttgctttgatgatgtcccttcctgcgttgtttaacatcggcctccttcttttcctggtcatgttcatctacgccatctttgggatgtccaattttgcctatgttaagagggaagttgggatcgatgacatgttcaactttgagacctttggcaacagcatgatctgcctgttccaaattacaacctctgctggctgggatggattgctagcacctattcttaatagtggacctccagactgtgaccctgacaaagatcaccctggaagctcagttaaaggagactgtgggaacccatctgttgggattttcttttttgtcagttacatcatcatatccttcctggttgtggtgaacatgtacatcgcggtcatcctggagaacttcagtgttgctactgaagaaagtgcagagcctctgagtgaggatgactttgagatgttctatgaggtttgggagaagtttgatcccgatgcgacccagtttatagagtttgccaaactttctgattttgcagatgccctggatcctcctcttctcatagcaaaacccaacaaagtccagctcattgccatggatctgcccatggtgagtggtgaccggatccactgtcttgacatcttatttgcttttacaaagcgtgttttgggtgagagtggagagatggatgcccttcgaatacagatggaagagcgattcatggcatcaaacccctccaaagtctcttatgagcccattacgaccacgttgaaacgcaaacaagaggaggtgtctgctattattatccagagggcttacagacgctacctcttgaagcaaaaagttaaaaaggtatcaagtatatacaagaaagacaaaggcaaagaatgtgatggaacacccatcaaagaagatactctcattgataaactgaatgagaattcaactccagagaaaaccgatatgacgccttccaccacgtctccaccctcgtatgatagtgtgaccaaaccagaaaaagaaaaatttgaaaaagacaaatcagaaaaggaagacaaagggaaagatatcagggaaagtaaaaagtaaaaagaaaccaagaattttccattttgtgatcaattgtttacagcccgtgatggtgatgtgtttgtgtcaacaggactcccacaggaggtctatgccaaactgactgtttttacaaatgtatacttaaggtcagtgcctataacaagacagagacctctggtcagcaaactggaactcagtaaactggagaaatagtatcgatgggaggtttctattttcacaaccagctgacactgctgaagagcagaggcgtaatggctactcagacgataggaaccaatttaaaggggggagggaagttaaatttttatgtaaattcaacatgtgacacttgataatagtaattgtcaccagtgtttatgttttaactgccacacctgccatatttttacaaaacgtgtgctgtgaatttatcacttttctttttaattcacaggttgtttactattatatgtgactatttttgtaaatgggtttgtgtttggggagagggattaaagggagggaattctacatttctctattgtattgtataactggatatattttaaatggaggcatgctgcaattctcattcacacataaaaaaatcacatcacaaaagggaagagtttacttcttgtttcaggatgtttttagatttttgaggtgcttaaatagctattcgtatttttaaggtgtctcatccagaaaaaatttaatgtgcctgtaaatgttccatagaatcacaagcattaaagagttgttttatttttacataacccattaaatgtacatgtatatatgtatatatgtatatgtgcgtgtatatacatatatatgtatacacacatgcacacacagagatatacacataccattacattgtcattcacagtcccagcagcatgactatcacatttttgataagtgtcctttggcataaaataaaaatatcctatcagtcctttctaagaagcctgaattgaccaaaaaacatccccaccaccactttataaagttgattctgctttatcctgcagtattgtttagccatcttctgctcttggtaaggttgacatagtatatgtcaatttaaaaaataaaagtctgctttgtaaatagtaattttacccagtggtgcatgtttgagcaaacaaaaatgatgatttaagcacactacttattgcatcaaatatgtaccacagtaagtatagtttgcaagctttcaacaggtaatatgatgtaattggttccattatagtttgaagctgtcactgctgcatgtttatcttgcctatgctgctgtatcttattccttccactgttcagaagtctaatatgggaagccatatatcagtggtaaagtgaagcaaattgttctaccaagacctcattcttcatgtcattaagcaataggttgcagcaaacaaggaagagcttcttgctttttattcttccaaccttaattgaacactcaatgatgaaaagcccgactgtacaaacatgttgcaagctgcttaaatctgtttaaaatatatggttagagttttctaagaaaatataaatactgtaaaaagttcattttattttatttttcagccttttgtacgtaaaatgagaaattaaaagtatcttcaggtggatgtcacagtcactattgttagtttctgttcctagcacttttaaattgaagcacttcacaaaataagaagcaaggactaggatgcagtgtaggtttctgcttttttattagtactgtaaacttgcacacatttcaatgtgaaacaaatctcaaactgagttcaatgtttatttgctttcaatagtaatgccttatcattgaaagaggcttaaagaaaaaaaaaatcagctgatactcttggcattgcttgaatccaatgtttccacctagtctttttattcagtaatcatcagtcttttccaatgtttgtttacacagatagatcttattgacccatatggcactagaactgtatcagatataatatgggatcccagctttttttcctctcccacaaaaccaggtagtgaagttatattaccagttacagcaaaatactttgtgtttcacaagcaacaataaatgtagattctttatactgaagctattgacttgtagtgtgttggtgaaatgcatgcaggaaaatgctgttaccataaagaacggtaaaccacattacaatcaagccaaaagaataaaggttt

SEQ ID NO: 18482 - DNA, 8519 bp, Homo sapiens
  source 1..8519: mol_type = unassigned DNA
tactccagtaaaaattctgaagaattgcattggagactgttatattcaacacatacgtggattctgtgttatgatttacatttttctttatttcagaatcatttgtataacaagttggtatattgctgagcacatctgtaaagtaagacctgaatatggatttgataattgaagttgacactcatcatagagatttatgaaatattgtgcgcttgattgcagtaggacaacttactatggggaaggaatcttcactttcttatgcaaggagctaaacagtgattaaaggagcaggatgaaaagatggcacagtcagtgctggtaccgccaggacctgacagcttccgcttctttaccagggaatcccttgctgctattgaacaacgcattgcagaagagaaagctaagagacccaaacaggaacgcaaggatgaggatgatgaaaatggcccaaagccaaacagtgacttggaagcaggaaaatctcttccatttatttatggagacattcctccagagatggtgtcagtgcccctggaggatctggacccctactatatcaataagaaaacgtttatagtattgaataaagggaaagcaatctctcgattcagtgccacccctgccctttacattttaactcccttcaaccctattagaaaattagctattaagattttggtacattctttattcaatatgctcattatgtgcacgattcttaccaactgtgtatttatgaccatgagtaaccctccagactggacaaagaatgtggaatatgtgacagagtttgtggacctgggcaatgtctcagcgttgagaacattcagagttctccgagcattgaaaacaatttcagtcattccaggcctgaagaccattgtgggggccctgatccagtcagtgaagaagctttctgatgtcatgatcttgactgtgttctgtctaagcgtgtttgcgctaataggattgcagttgttcatgggcaacctacgaaataaatgtttgcaatggcctccagataattcttcctttgaaataaatatcacttccttctttaacaattcattggatgggaatggtactactttcaataggacagtgagcatatttaactgggatgaatatattgaggataaaagtcacttttattttttagaggggcaaaatgatgctctgctttgtggcaacagctcagatgcaggccagtgtcctgaaggatacatctgtgtgaaggctggtagaaaccccaactatggctacacgagctttgacacctttagttgggcctttttgtccttatttcgtctcatgactcaagacttctgggaaaacctttatcaactgacactacgtgctgctgggaaaacgtacatgatattttttgtgctggtcattttcttgggctcattctatctaataaatttgatcttggctgtggtggccatggcctatgaggaacagaatcaggccacattggaagaggctgaacagaaggaagctgaatttcagcagatgctcgaacagttgaaaaagcaacaagaagaagctcaggcggcagctgcagccgcatctgctgaatcaagagacttcagtggtgctggtgggataggagttttttcagagagttcttcagtagcatctaagttgagctccaaaagtgaaaaagagctgaaaaacagaagaaagaaaaagaaacagaaagaacagtctggagaagaagagaaaaatgacagagtccgaaaatcggaatctgaagacagcataagaagaaaaggtttccgtttttccttggaaggaagtaggctgacatatgaaaagagattttcttctccacaccaggttacgctgatgcaagaggtgggttcccttggtcttcagcagctccacccctgtcactttgcagggtacagcttccctcctgactacttccatgggctggcattgaatgtctgtggcttttccagtccttactgagcatccgtggctcccttttctctccaagacgcaacagtagggcgagccttttcagcttcagaggtcgagcaaaggacattggctctgagaatgactttgctgatgatgagcacagcacctttgaggacaatgacagccgaagagactctctgttcgtgccgcacagacatggagaacggcgccacagcaatgtcagccaggccagccgtgcctccagggtgctccccatcctgcccatgaatgggaagatgcatagcgctgtggactgcaatggtgtggtctccctggtcgggggcccttctaccctcacatctgctgggcagctcctaccagagggcacaactactgaaacagaaataagaaagagacggtccagttcttatcatgtttccatggatttattggaagatcctacatcaaggcaaagagcaatgagtatagccagtattttgaccaacaccatggaagaacttgaagaatccagacagaaatgcccaccatgctggtataaatttgctaatatgtgtttgatttgggactgttgtaaaccatggttaaaggtgaaacaccttgtcaacctggttgtaatggacccatttgttgacctggccatcaccatctgcattgtcttaaatacactcttcatggctatggagcactatcccatgacggagcagttcagcagtgtactgtctgttggaaacctggtcttcacagggatcttcacagcagaaatgtttctcaagataattgccatggatccatattattactttcaagaaggctggaatatttttgatggttttattgtgagccttagtttaatggaacttggtttggcaaatgtggaaggattgtcagttctccgatcattccggctgctccgagttttcaagttggcaaaatcttggccaactctaaatatgctaattaagatcattggcaattctgtgggggctctaggaaacctcaccttggtattggccatcatcgtcttcatttttgctgtggtcggcatgcagctctttggtaagagctacaaagaatgtgtctgcaagatttccaatgattgtgaactcccacgctggcacatgcatgactttttccactccttcctgatcgtgttccgcgtgctgtgtggagagtggatagagaccatgtgggactgtatggaggtcgctggccaaaccatgtgccttactgtcttcatgatggtcatggtgattggaaatctagtggttctgaacctcttcttggccttgcttttgagttccttcagttctgacaatcttgctgccactgatgatgataacgaaatgaataatctccagattgctgtgggaaggatgcagaaaggaatcgattttgttaaaagaaaaatacgtgaatttattcagaaagcctttgttaggaagcagaaagctttagatgaaattaaaccgcttgaagatctaaataataaaaaagacagctgtatttccaaccataccaccatagaaataggcaaagacctcaattatctcaaagacggaaatggaactactagtggcataggcagcagtgtagaaaaatatgtcgtggatgaaagtgattacatgtcatttataaacaaccctagcctcactgtgacagtaccaattgctgttggagaatctgactttgaaaatttaaatactgaagaattcagcagcgagtcagatatggaggaaagcaaagagaagctaaatgcaactagttcatctgaaggcagcacggttgatattggagctcccgccgagggagaacagcctgaggttgaacctgaggaatcccttgaacctgaagcctgttttacagaagactgtgtacggaagttcaagtgttgtcagataagcatagaagaaggcaaagggaaactctggtggaatttgaggaaaacatgctataagatagtggagcacaattggttcgaaaccttcattgtcttcatgattctgctgagcagtggggctctggcctttgaagatatatacattgagcagcgaaaaaccattaagaccatgttagaatatgctgacaaggttttcacttacatattcattctggaaatgctgctaaagtgggttgcatatggttttcaagtgtattttaccaatgcctggtgctggctagacttcctgattgttgatgtctcactggttagcttaactgcaaatgccttgggttactcagaacttggtgccatcaaatccctcagaacactaagagctctgaggccactgagagctttgtcccggtttgaaggaatgagggttgttgtaaatgctcttttaggagccattccatctatcatgaatgtacttctggtttgtctgatcttttggctaatattcagtatcatgggagtgaatctctttgctggcaagttttaccattgtattaattacaccactggagagatgtttgatgtaagcgtggtcaacaactacagtgagtgcaaagctctcattgagagcaatcaaactgccaggtggaaaaatgtgaaagtaaactttgataacgtaggacttggatatctgtctctacttcaagtagccacgtttaagggatggatggatattatgtatgcagctgttgattcacgaaatgtagaattacaacccaagtatgaagacaacctgtacatgtatctttattttgtcatctttattatttttggttcattctttaccttgaatcttttcattggtgtcatcatagataacttcaaccaacagaaaaagaagtttggaggtcaagacatttttatgacagaagaacagaagaaatactacaatgcaatgaaaaaactgggttcaaagaaaccacaaaaacccatacctcgacctgctaacaaattccaaggaatggtctttgattttgtaaccaaacaagtctttgatatcagcatcatgatcctcatctgccttaacatggtcaccatgatggtggaaaccgatgaccagagtcaagaaatgacaaacattctgtactggattaatctggtgtttattgttctgttcactggagaatgtgtgctgaaactgatctctcttcgttactactatttcactattggatggaatatttttgattttgtggtggtcattctctccattgtaggaatgtttctggctgaactgatagaaaagtattttgtgtcccctaccctgttccgagtgatccgtcttgccaggattggccgaatcctacgtctgatcaaaggagcaaaggggatccgcacgctgctctttgctttgatgatgtcccttcctgcgttgtttaacatcggcctccttcttttcctggtcatgttcatctacgccatctttgggatgtccaattttgcctatgttaagagggaagttgggatcgatgacatgttcaactttgagacctttggcaacagcatgatctgcctgttccaaattacaacctctgctggctgggatggattgctagcacctattcttaatagtggacctccagactgtgaccctgacaaagatcaccctggaagctcagttaaaggagactgtgggaacccatctgttgggattttcttttttgtcagttacatcatcatatccttcctggttgtggtgaacatgtacatcgcggtcatcctggagaacttcagtgttgctactgaagaaagtgcagagcctctgagtgaggatgactttgagatgttctatgaggtttgggagaagtttgatcccgatgcgacccagtttatagagtttgccaaactttctgattttgcagatgccctggatcctcctcttctcatagcaaaacccaacaaagtccagctcattgccatggatctgcccatggtgagtggtgaccggatccactgtcttgacatcttatttgcttttacaaagcgtgttttgggtgagagtggagagatggatgcccttcgaatacagatggaagagcgattcatggcatcaaacccctccaaagtctcttatgagcccattacgaccacgttgaaacgcaaacaagaggaggtgtctgctattattatccagagggcttacagacgctacctcttgaagcaaaaagttaaaaaggtatcaagtatatacaagaaagacaaaggcaaagaatgtgatggaacacccatcaaagaagatactctcattgataaactgaatgagaattcaactccagagaaaaccgatatgacgccttccaccacgtctccaccctcgtatgatagtgtgaccaaaccagaaaaagaaaaatttgaaaaagacaaatcagaaaaggaagacaaagggaaagatatcagggaaagtaaaaagtaaaaagaaaccaagaattttccattttgtgatcaattgtttacagcccgtgatggtgatgtgtttgtgtcaacaggactcccacaggaggtctatgccaaactgactgtttttacaaatgtatacttaaggtcagtgcctataacaagacagagacctctggtcagcaaactggaactcagtaaactggagaaatagtatcgatgggaggtttctattttcacaaccagctgacactgctgaagagcagaggcgtaatggctactcagacgataggaaccaatttaaaggggggagggaagttaaatttttatgtaaattcaacatgtgacacttgataatagtaattgtcaccagtgtttatgttttaactgccacacctgccatatttttacaaaacgtgtgctgtgaatttatcacttttctttttaattcacaggttgtttactattatatgtgactatttttgtaaatgggtttgtgtttggggagagggattaaagggagggaattctacatttctctattgtattgtataactggatatattttaaatggaggcatgctgcaattctcattcacacataaaaaaatcacatcacaaaagggaagagtttacttcttgtttcaggatgtttttagatttttgaggtgcttaaatagctattcgtatttttaaggtgtctcatccagaaaaaatttaatgtgcctgtaaatgttccatagaatcacaagcattaaagagttgttttatttttacataacccattaaatgtacatgtatatatgtatatatgtatatgtgcgtgtatatacatatatatgtatacacacatgcacacacagagatatacacataccattacattgtcattcacagtcccagcagcatgactatcacatttttgataagtgtcctttggcataaaataaaaatatcctatcagtcctttctaagaagcctgaattgaccaaaaaacatccccaccaccactttataaagttgattctgctttatcctgcagtattgtttagccatcttctgctcttggtaaggttgacatagtatatgtcaatttaaaaaataaaagtctgctttgtaaatagtaattttacccagtggtgcatgtttgagcaaacaaaaatgatgatttaagcacactacttattgcatcaaatatgtaccacagtaagtatagtttgcaagctttcaacaggtaatatgatgtaattggttccattatagtttgaagctgtcactgctgcatgtttatcttgcctatgctgctgtatcttattccttccactgttcagaagtctaatatgggaagccatatatcagtggtaaagtgaagcaaattgttctaccaagacctcattcttcatgtcattaagcaataggttgcagcaaacaaggaagagcttcttgctttttattcttccaaccttaattgaacactcaatgatgaaaagcccgactgtacaaacatgttgcaagctgcttaaatctgtttaaaatatatggttagagttttctaagaaaatataaatactgtaaaaagttcattttattttatttttcagccttttgtacgtaaaatgagaaattaaaagtatcttcaggtggatgtcacagtcactattgttagtttctgttcctagcacttttaaattgaagcacttcacaaaataagaagcaaggactaggatgcagtgtaggtttctgcttttttattagtactgtaaacttgcacacatttcaatgtgaaacaaatctcaaactgagttcaatgtttatttgctttcaatagtaatgccttatcattgaaagaggcttaaagaaaaaaaaaatcagctgatactcttggcattgcttgaatccaatgtttccacctagtctttttattcagtaatcatcagtcttttccaatgtttgtttacacagatagatcttattgacccatatggcactagaactgtatcagatataatatgggatcccagctttttttcctctcccacaaaaccaggtagtgaagttatattaccagttacagcaaaatactttgtgtttcacaagcaacaataaatgtagattctttatactgaagctattgacttgtagtgtgttggtgaaatgcatgcaggaaaatgctgttaccataaagaacggtaaaccacattacaatcaagccaaaagaataa

SEQ ID NO: 18483 - DNA, 2832 bp, Homo sapiens
  source 1..2832: mol_type = unassigned DNA
attgtagagatataatgaagcagattaacatggcagtggctctgccaaagctcagggctgagccttctgattgcagcctcagaggcaagccaatattctgagtccaaaggccttttgaacgatttctgctggctatgatgggaatcccttgctgctattgaacaacgcattgcagaagagaaagctaagagacccaaacaggaacgcaaggatgaggatgatgaaaatggcccaaagccaaacagtgacttggaagcaggaaaatctcttccatttatttatggagacattcctccagagatggtgtcagtgcccctggaggatctggacccctactatatcaataagaaaacgtttatagtattgaataaagggaaagcaatctctcgattcagtgccacccctgccctttacattttaactcccttcaaccctattagaaaattagctattaagattttggtacattctttattcaatatgctcattatgtgcacgattcttaccaactgtgtatttatgaccatgagtaaccctccagactggacaaagaatgtggagtatacctttacaggaatttatacttttgaatcacttattaaaatacttgcaaggggcttttgtttagaagatttcacatttttacgggatccatggaattggttggatttcacagtcattacttttgcatatgtgacagagtttgtggacctgggcaatgtctcagcgttgagaacattcagagttctccgagcattgaaaacaatttcagtcattccaggcctgaagaccattgtgggggccctgatccagtcagtgaagaagctttctgatgtcatgatcttgactgtgttctgtctaagcgtgtttgcgctaataggattgcagttgttcatgggcaacctacgaaataaatgtttgcaatggcctccagataattcttcctttgaaataaatatcacttccttctttaacaattcattggatgggaatggtactactttcaataggacagtgagcatatttaactgggatgaatatattgaggataaaagtcacttttattttttagaggggcaaaatgatgctctgctttgtggcaacagctcagatgcaggccagtgtcctgaaggatacatctgtgtgaaggctggtagaaaccccaactatggctacacgagctttgacacctttagttgggcctttttgtccttatttcgtctcatgactcaagacttctgggaaaacctttatcaactgacactacgtgctgctgggaaaacgtacatgatattttttgtgctggtcattttcttgggctcattctatctaataaatttgatcttggctgtggtggccatggcctatgaggaacagaatcaggccacattggaagaggctgaacagaaggaagctgaatttcagcagatgctcgaacagttgaaaaagcaacaagaagaagctcaggcggcagctgcagccgcatctgctgaatcaagagacttcagtggtgctggtgggataggagttttttcagagagttcttcagtagcatctaagttgagctccaaaagtgaaaaagagctgaaaaacagaagaaagaaaaagaaacagaaagaacagtctggagaagaagagaaaaatgacagagtccgaaaatcggaatctgaagacagcataagaagaaaaggtttccgtttttccttggaaggaagtaggctgacatatgaaaagagattttcttctccacaccagtccttactgagcatccgtggctcccttttctctccaagacgcaacagtagggcgagccttttcagcttcagaggtcgagcaaaggacattggctctgagaatgactttgctgatgatgagcacagcacctttgaggacaatgacagccgaagagactctctgttcgtgccgcacagacatggagaacggcgccacagcaatgtcagccaggccagccgtgcctccagggtgctccccatcctgcccatgaatgggaagatgcatagcgctgtggactgcaatggtgtggtctccctggtcgggggcccttctaccctcacatctgctgggcagctcctaccagagggcacaactactgaaacagaaataagaaagagacggtccagttcttatcatgtttccatggatttattggaagatcctacatcaaggcaaagagcaatgagtatagccagtattttgaccaacaccatggaagattttttttttttatatttagcctccagaaagctgctgcaaatgtaaggtatattttgaacaccactttcatacattaaattctaaacattgaaacttgtgtgcatgacgttgaaaagagtgtaatgataaatgcttatacttatgatgatgctaagccatttggattatattaactgcttgagacacaagttataaaatcctatgacttaaccagaaatataaattaaaaatgtgaattagggtttgatattaacttccttgaagcaaagtgtttaaaattttgtagtcctacttttgcctttctctgaccagattcttacaatatatcagctttctctttagttgcagattttatctgaatagttaacataatgtgtagcagtctggatctcagaatgccaaaataaagactttggggacagcttaatctgtgatcaatttctggctctgccatatgttaaatgtgttaatttgtgactttgaatttcagtctcctcatcagtaaaatgtggatgatgatgtttaggcataaggttgttgaatggattaaataagccttcttagataaaacactgatgtatttggcatgcagaagac

SEQ ID NO: 18484 - DNA, 8610 bp, Homo sapiens
  source 1..8610: mol_type = unassigned DNA
atagcagtaacacaattcacctctagtgtgaacatatcaggatggcatagaccagcactttcttatgcaaggagctaaacagtgattaaaggagcaggatgaaaagatggcacagtcagtgctggtaccgccaggacctgacagcttccgcttctttaccagggaatcccttgctgctattgaacaacgcattgcagaagagaaagctaagagacccaaacaggaacgcaaggatgaggatgatgaaaatggcccaaagccaaacagtgacttggaagcaggaaaatctcttccatttatttatggagacattcctccagagatggtgtcagtgcccctggaggatctggacccctactatatcaataagaaaacgtttatagtattgaataaagggaaagcaatctctcgattcagtgccacccctgccctttacattttaactcccttcaaccctattagaaaattagctattaagattttggtacattctttattcaatatgctcattatgtgcacgattcttaccaactgtgtatttatgaccatgagtaaccctccagactggacaaagaatgtggagtatacctttacaggaatttatacttttgaatcacttattaaaatacttgcaaggggcttttgtttagaagatttcacatttttacgggatccatggaattggttggatttcacagtcattacttttgcatatgtgacagagtttgtggacctgggcaatgtctcagcgttgagaacattcagagttctccgagcattgaaaacaatttcagtcattccaggcctgaagaccattgtgggggccctgatccagtcagtgaagaagctttctgatgtcatgatcttgactgtgttctgtctaagcgtgtttgcgctaataggattgcagttgttcatgggcaacctacgaaataaatgtttgcaatggcctccagataattcttcctttgaaataaatatcacttccttctttaacaattcattggatgggaatggtactactttcaataggacagtgagcatatttaactgggatgaatatattgaggataaaagtcacttttattttttagaggggcaaaatgatgctctgctttgtggcaacagctcagatgcaggccagtgtcctgaaggatacatctgtgtgaaggctggtagaaaccccaactatggctacacgagctttgacacctttagttgggcctttttgtccttatttcgtctcatgactcaagacttctgggaaaacctttatcaactgacactacgtgctgctgggaaaacgtacatgatattttttgtgctggtcattttcttgggctcattctatctaataaatttgatcttggctgtggtggccatggcctatgaggaacagaatcaggccacattggaagaggctgaacagaaggaagctgaatttcagcagatgctcgaacagttgaaaaagcaacaagaagaagctcaggcggcagctgcagccgcatctgctgaatcaagagacttcagtggtgctggtgggataggagttttttcagagagttcttcagtagcatctaagttgagctccaaaagtgaaaaagagctgaaaaacagaagaaagaaaaagaaacagaaagaacagtctggagaagaagagaaaaatgacagagtccgaaaatcggaatctgaagacagcataagaagaaaaggtttccgtttttccttggaaggaagtaggctgacatatgaaaagagattttcttctccacaccagtccttactgagcatccgtggctcccttttctctccaagacgcaacagtagggcgagccttttcagcttcagaggtcgagcaaaggacattggctctgagaatgactttgctgatgatgagcacagcacctttgaggacaatgacagccgaagagactctctgttcgtgccgcacagacatggagaacggcgccacagcaatgtcagccaggccagccgtgcctccagggtgctccccatcctgcccatgaatgggaagatgcatagcgctgtggactgcaatggtgtggtctccctggtcgggggcccttctaccctcacatctgctgggcagctcctaccagagggcacaactactgaaacagaaataagaaagagacggtccagttcttatcatgtttccatggatttattggaagatcctacatcaaggcaaagagcaatgagtatagccagtattttgaccaacaccatggaagaacttgaagaatccagacagaaatgcccaccatgctggtataaatttgctaatatgtgtttgatttgggactgttgtaaaccatggttaaaggtgaaacaccttgtcaacctggttgtaatggacccatttgttgacctggccatcaccatctgcattgtcttaaatacactcttcatggctatggagcactatcccatgacggagcagttcagcagtgtactgtctgttggaaacctggtcttcacagggatcttcacagcagaaatgtttctcaagataattgccatggatccatattattactttcaagaaggctggaatatttttgatggttttattgtgagccttagtttaatggaacttggtttggcaaatgtggaaggattgtcagttctccgatcattccggctgctccgagttttcaagttggcaaaatcttggccaactctaaatatgctaattaagatcattggcaattctgtgggggctctaggaaacctcaccttggtattggccatcatcgtcttcatttttgctgtggtcggcatgcagctctttggtaagagctacaaagaatgtgtctgcaagatttccaatgattgtgaactcccacgctggcacatgcatgactttttccactccttcctgatcgtgttccgcgtgctgtgtggagagtggatagagaccatgtgggactgtatggaggtcgctggccaaaccatgtgccttactgtcttcatgatggtcatggtgattggaaatctagtggttctgaacctcttcttggccttgcttttgagttccttcagttctgacaatcttgctgccactgatgatgataacgaaatgaataatctccagattgctgtgggaaggatgcagaaaggaatcgattttgttaaaagaaaaatacgtgaatttattcagaaagcctttgttaggaagcagaaagctttagatgaaattaaaccgcttgaagatctaaataataaaaaagacagctgtatttccaaccataccaccatagaaataggcaaagacctcaattatctcaaagacggaaatggaactactagtggcataggcagcagtgtagaaaaatatgtcgtggatgaaagtgattacatgtcatttataaacaaccctagcctcactgtgacagtaccaattgctgttggagaatctgactttgaaaatttaaatactgaagaattcagcagcgagtcagatatggaggaaagcaaagagaagctaaatgcaactagttcatctgaaggcagcacggttgatattggagctcccgccgagggagaacagcctgaggttgaacctgaggaatcccttgaacctgaagcctgttttacagaagactgtgtacggaagttcaagtgttgtcagataagcatagaagaaggcaaagggaaactctggtggaatttgaggaaaacatgctataagatagtggagcacaattggttcgaaaccttcattgtcttcatgattctgctgagcagtggggctctggcctttgaagatatatacattgagcagcgaaaaaccattaagaccatgttagaatatgctgacaaggttttcacttacatattcattctggaaatgctgctaaagtgggttgcatatggttttcaagtgtattttaccaatgcctggtgctggctagacttcctgattgttgatgtctcactggttagcttaactgcaaatgccttgggttactcagaacttggtgccatcaaatccctcagaacactaagagctctgaggccactgagagctttgtcccggtttgaaggaatgagggttgttgtaaatgctcttttaggagccattccatctatcatgaatgtacttctggtttgtctgatcttttggctaatattcagtatcatgggagtgaatctctttgctggcaagttttaccattgtattaattacaccactggagagatgtttgatgtaagcgtggtcaacaactacagtgagtgcaaagctctcattgagagcaatcaaactgccaggtggaaaaatgtgaaagtaaactttgataacgtaggacttggatatctgtctctacttcaagtagccacgtttaagggatggatggatattatgtatgcagctgttgattcacgaaatgtagaattacaacccaagtatgaagacaacctgtacatgtatctttattttgtcatctttattatttttggttcattctttaccttgaatcttttcattggtgtcatcatagataacttcaaccaacagaaaaagaagtttggaggtcaagacatttttatgacagaagaacagaagaaatactacaatgcaatgaaaaaactgggttcaaagaaaccacaaaaacccatacctcgacctgctaacaaattccaaggaatggtctttgattttgtaaccaaacaagtctttgatatcagcatcatgatcctcatctgccttaacatggtcaccatgatggtggaaaccgatgaccagagtcaagaaatgacaaacattctgtactggattaatctggtgtttattgttctgttcactggagaatgtgtgctgaaactgatctctcttcgttactactatttcactattggatggaatatttttgattttgtggtggtcattctctccattgtaggaatgtttctggctgaactgatagaaaagtattttgtgtcccctaccctgttccgagtgatccgtcttgccaggattggccgaatcctacgtctgatcaaaggagcaaaggggatccgcacgctgctctttgctttgatgatgtcccttcctgcgttgtttaacatcggcctccttcttttcctggtcatgttcatctacgccatctttgggatgtccaattttgcctatgttaagagggaagttgggatcgatgacatgttcaactttgagacctttggcaacagcatgatctgcctgttccaaattacaacctctgctggctgggatggattgctagcacctattcttaatagtggacctccagactgtgaccctgacaaagatcaccctggaagctcagttaaaggagactgtgggaacccatctgttgggattttcttttttgtcagttacatcatcatatccttcctggttgtggtgaacatgtacatcgcggtcatcctggagaacttcagtgttgctactgaagaaagtgcagagcctctgagtgaggatgactttgagatgttctatgaggtttgggagaagtttgatcccgatgcgacccagtttatagagtttgccaaactttctgattttgcagatgccctggatcctcctcttctcatagcaaaacccaacaaagtccagctcattgccatggatctgcccatggtgagtggtgaccggatccactgtcttgacatcttatttgcttttacaaagcgtgttttgggtgagagtggagagatggatgcccttcgaatacagatggaagagcgattcatggcatcaaacccctccaaagtctcttatgagcccattacgaccacgttgaaacgcaaacaagaggaggtgtctgctattattatccagagggcttacagacgctacctcttgaagcaaaaagttaaaaaggtatcaagtatatacaagaaagacaaaggcaaagaatgtgatggaacacccatcaaagaagatactctcattgataaactgaatgagaattcaactccagagaaaaccgatatgacgccttccaccacgtctccaccctcgtatgatagtgtgaccaaaccagaaaaagaaaaatttgaaaaagacaaatcagaaaaggaagacaaagggaaagatatcagggaaagtaaaaagtaaaaagaaaccaagaattttccattttgtgatcaattgtttacagcccgtgatggtgatgtgtttgtgtcaacaggactcccacaggaggtctatgccaaactgactgtttttacaaatgtatacttaaggtcagtgcctataacaagacagagacctctggtcagcaaactggaactcagtaaactggagaaatagtatcgatgggaggtttctattttcacaaccagctgacactgctgaagagcagaggcgtaatggctactcagacgataggaaccaatttaaaggggggagggaagttaaatttttatgtaaattcaacatgtgacacttgataatagtaattgtcaccagtgtttatgttttaactgccacacctgccatatttttacaaaacgtgtgctgtgaatttatcacttttctttttaattcacaggttgtttactattatatgtgactatttttgtaaatgggtttgtgtttggggagagggattaaagggagggaattctacatttctctattgtattgtataactggatatattttaaatggaggcatgctgcaattctcattcacacataaaaaaatcacatcacaaaagggaagagtttacttcttgtttcaggatgtttttagatttttgaggtgcttaaatagctattcgtatttttaaggtgtctcatccagaaaaaatttaatgtgcctgtaaatgttccatagaatcacaagcattaaagagttgttttatttttacataacccattaaatgtacatgtatatatgtatatatgtatatgtgcgtgtatatacatatatatgtatacacacatgcacacacagagatatacacataccattacattgtcattcacagtcccagcagcatgactatcacatttttgataagtgtcctttggcataaaataaaaatatcctatcagtcctttctaagaagcctgaattgaccaaaaaacatccccaccaccactttataaagttgattctgctttatcctgcagtattgtttagccatcttctgctcttggtaaggttgacatagtatatgtcaatttaaaaaataaaagtctgctttgtaaatagtaattttacccagtggtgcatgtttgagcaaacaaaaatgatgatttaagcacactacttattgcatcaaatatgtaccacagtaagtatagtttgcaagctttcaacaggtaatatgatgtaattggttccattatagtttgaagctgtcactgctgcatgtttatcttgcctatgctgctgtatcttattccttccactgttcagaagtctaatatgggaagccatatatcagtggtaaagtgaagcaaattgttctaccaagacctcattcttcatgtcattaagcaataggttgcagcaaacaaggaagagcttcttgctttttattcttccaaccttaattgaacactcaatgatgaaaagcccgactgtacaaacatgttgcaagctgcttaaatctgtttaaaatatatggttagagttttctaagaaaatataaatactgtaaaaagttcattttattttatttttcagccttttgtacgtaaaatgagaaattaaaagtatcttcaggtggatgtcacagtcactattgttagtttctgttcctagcacttttaaattgaagcacttcacaaaataagaagcaaggactaggatgcagtgtaggtttctgcttttttattagtactgtaaacttgcacacatttcaatgtgaaacaaatctcaaactgagttcaatgtttatttgctttcaatagtaatgccttatcattgaaagaggcttaaagaaaaaaaaaatcagctgatactcttggcattgcttgaatccaatgtttccacctagtctttttattcagtaatcatcagtcttttccaatgtttgtttacacagatagatcttattgacccatatggcactagaactgtatcagatataatatgggatcccagctttttttcctctcccacaaaaccaggtagtgaagttatattaccagttacagcaaaatactttgtgtttcacaagcaacaataaatgtagattctttatactgaagctattgacttgtagtgtgttggtgaaatgcatgcaggaaaatgctgttaccataaagaacggtaaaccacattacaatcaagccaaaagaataaaggtttcgcttttgtttttgtatttaattgttgtctttgtttctatctttgaaatgccatttaaaggtagatttctatcatgtaaaaataatctatctgaaaaacaaatgtaaagaacacacattaattactataattcatctttcaattttttcatggaatggaagttaattaagaagagtgtattggataactactttaatattggccaaaaagctagatatggcatcaggtagactagtggaaagttacaaaaattaataaaaaattgactaacattttaa

SEQ ID NO: 18485 - DNA, 8660 bp, Homo sapiens
  source 1..8660: mol_type = unassigned DNA
aaaaaaaagatttttttttttttaaagcatgatggaattttagctgcagtcttcttggtgccagcttatcaatcccaaactctgggtgtaaaagattctacagggcactttcttatgcaaggagctaaacagtgattaaaggagcaggatgaaaagatggcacagtcagtgctggtaccgccaggacctgacagcttccgcttctttaccagggaatcccttgctgctattgaacaacgcattgcagaagagaaagctaagagacccaaacaggaacgcaaggatgaggatgatgaaaatggcccaaagccaaacagtgacttggaagcaggaaaatctcttccatttatttatggagacattcctccagagatggtgtcagtgcccctggaggatctggacccctactatatcaataagaaaacgtttatagtattgaataaagggaaagcaatctctcgattcagtgccacccctgccctttacattttaactcccttcaaccctattagaaaattagctattaagattttggtacattctttattcaatatgctcattatgtgcacgattcttaccaactgtgtatttatgaccatgagtaaccctccagactggacaaagaatgtggagtatacctttacaggaatttatacttttgaatcacttattaaaatacttgcaaggggcttttgtttagaagatttcacatttttacgggatccatggaattggttggatttcacagtcattacttttgcatatgtgacagagtttgtggacctgggcaatgtctcagcgttgagaacattcagagttctccgagcattgaaaacaatttcagtcattccaggcctgaagaccattgtgggggccctgatccagtcagtgaagaagctttctgatgtcatgatcttgactgtgttctgtctaagcgtgtttgcgctaataggattgcagttgttcatgggcaacctacgaaataaatgtttgcaatggcctccagataattcttcctttgaaataaatatcacttccttctttaacaattcattggatgggaatggtactactttcaataggacagtgagcatatttaactgggatgaatatattgaggataaaagtcacttttattttttagaggggcaaaatgatgctctgctttgtggcaacagctcagatgcaggccagtgtcctgaaggatacatctgtgtgaaggctggtagaaaccccaactatggctacacgagctttgacacctttagttgggcctttttgtccttatttcgtctcatgactcaagacttctgggaaaacctttatcaactgacactacgtgctgctgggaaaacgtacatgatattttttgtgctggtcattttcttgggctcattctatctaataaatttgatcttggctgtggtggccatggcctatgaggaacagaatcaggccacattggaagaggctgaacagaaggaagctgaatttcagcagatgctcgaacagttgaaaaagcaacaagaagaagctcaggcggcagctgcagccgcatctgctgaatcaagagacttcagtggtgctggtgggataggagttttttcagagagttcttcagtagcatctaagttgagctccaaaagtgaaaaagagctgaaaaacagaagaaagaaaaagaaacagaaagaacagtctggagaagaagagaaaaatgacagagtccgaaaatcggaatctgaagacagcataagaagaaaaggtttccgtttttccttggaaggaagtaggctgacatatgaaaagagattttcttctccacaccagtccttactgagcatccgtggctcccttttctctccaagacgcaacagtagggcgagccttttcagcttcagaggtcgagcaaaggacattggctctgagaatgactttgctgatgatgagcacagcacctttgaggacaatgacagccgaagagactctctgttcgtgccgcacagacatggagaacggcgccacagcaatgtcagccaggccagccgtgcctccagggtgctccccatcctgcccatgaatgggaagatgcatagcgctgtggactgcaatggtgtggtctccctggtcgggggcccttctaccctcacatctgctgggcagctcctaccagagggcacaactactgaaacagaaataagaaagagacggtccagttcttatcatgtttccatggatttattggaagatcctacatcaaggcaaagagcaatgagtatagccagtattttgaccaacaccatggaagaacttgaagaatccagacagaaatgcccaccatgctggtataaatttgctaatatgtgtttgatttgggactgttgtaaaccatggttaaaggtgaaacaccttgtcaacctggttgtaatggacccatttgttgacctggccatcaccatctgcattgtcttaaatacactcttcatggctatggagcactatcccatgacggagcagttcagcagtgtactgtctgttggaaacctggtcttcacagggatcttcacagcagaaatgtttctcaagataattgccatggatccatattattactttcaagaaggctggaatatttttgatggttttattgtgagccttagtttaatggaacttggtttggcaaatgtggaaggattgtcagttctccgatcattccggctgctccgagttttcaagttggcaaaatcttggccaactctaaatatgctaattaagatcattggcaattctgtgggggctctaggaaacctcaccttggtattggccatcatcgtcttcatttttgctgtggtcggcatgcagctctttggtaagagctacaaagaatgtgtctgcaagatttccaatgattgtgaactcccacgctggcacatgcatgactttttccactccttcctgatcgtgttccgcgtgctgtgtggagagtggatagagaccatgtgggactgtatggaggtcgctggccaaaccatgtgccttactgtcttcatgatggtcatggtgattggaaatctagtggttctgaacctcttcttggccttgcttttgagttccttcagttctgacaatcttgctgccactgatgatgataacgaaatgaataatctccagattgctgtgggaaggatgcagaaaggaatcgattttgttaaaagaaaaatacgtgaatttattcagaaagcctttgttaggaagcagaaagctttagatgaaattaaaccgcttgaagatctaaataataaaaaagacagctgtatttccaaccataccaccatagaaataggcaaagacctcaattatctcaaagacggaaatggaactactagtggcataggcagcagtgtagaaaaatatgtcgtggatgaaagtgattacatgtcatttataaacaaccctagcctcactgtgacagtaccaattgctgttggagaatctgactttgaaaatttaaatactgaagaattcagcagcgagtcagatatggaggaaagcaaagagaagctaaatgcaactagttcatctgaaggcagcacggttgatattggagctcccgccgagggagaacagcctgaggttgaacctgaggaatcccttgaacctgaagcctgttttacagaagactgtgtacggaagttcaagtgttgtcagataagcatagaagaaggcaaagggaaactctggtggaatttgaggaaaacatgctataagatagtggagcacaattggttcgaaaccttcattgtcttcatgattctgctgagcagtggggctctggcctttgaagatatatacattgagcagcgaaaaaccattaagaccatgttagaatatgctgacaaggttttcacttacatattcattctggaaatgctgctaaagtgggttgcatatggttttcaagtgtattttaccaatgcctggtgctggctagacttcctgattgttgatgtctcactggttagcttaactgcaaatgccttgggttactcagaacttggtgccatcaaatccctcagaacactaagagctctgaggccactgagagctttgtcccggtttgaaggaatgagggttgttgtaaatgctcttttaggagccattccatctatcatgaatgtacttctggtttgtctgatcttttggctaatattcagtatcatgggagtgaatctctttgctggcaagttttaccattgtattaattacaccactggagagatgtttgatgtaagcgtggtcaacaactacagtgagtgcaaagctctcattgagagcaatcaaactgccaggtggaaaaatgtgaaagtaaactttgataacgtaggacttggatatctgtctctacttcaagtagccacgtttaagggatggatggatattatgtatgcagctgttgattcacgaaatgtagaattacaacccaagtatgaagacaacctgtacatgtatctttattttgtcatctttattatttttggttcattctttaccttgaatcttttcattggtgtcatcatagataacttcaaccaacagaaaaagaagtttggaggtcaagacatttttatgacagaagaacagaagaaatactacaatgcaatgaaaaaactgggttcaaagaaaccacaaaaacccatacctcgacctgctaacaaattccaaggaatggtctttgattttgtaaccaaacaagtctttgatatcagcatcatgatcctcatctgccttaacatggtcaccatgatggtggaaaccgatgaccagagtcaagaaatgacaaacattctgtactggattaatctggtgtttattgttctgttcactggagaatgtgtgctgaaactgatctctcttcgttactactatttcactattggatggaatatttttgattttgtggtggtcattctctccattgtaggaatgtttctggctgaactgatagaaaagtattttgtgtcccctaccctgttccgagtgatccgtcttgccaggattggccgaatcctacgtctgatcaaaggagcaaaggggatccgcacgctgctctttgctttgatgatgtcccttcctgcgttgtttaacatcggcctccttcttttcctggtcatgttcatctacgccatctttgggatgtccaattttgcctatgttaagagggaagttgggatcgatgacatgttcaactttgagacctttggcaacagcatgatctgcctgttccaaattacaacctctgctggctgggatggattgctagcacctattcttaatagtggacctccagactgtgaccctgacaaagatcaccctggaagctcagttaaaggagactgtgggaacccatctgttgggattttcttttttgtcagttacatcatcatatccttcctggttgtggtgaacatgtacatcgcggtcatcctggagaacttcagtgttgctactgaagaaagtgcagagcctctgagtgaggatgactttgagatgttctatgaggtttgggagaagtttgatcccgatgcgacccagtttatagagtttgccaaactttctgattttgcagatgccctggatcctcctcttctcatagcaaaacccaacaaagtccagctcattgccatggatctgcccatggtgagtggtgaccggatccactgtcttgacatcttatttgcttttacaaagcgtgttttgggtgagagtggagagatggatgcccttcgaatacagatggaagagcgattcatggcatcaaacccctccaaagtctcttatgagcccattacgaccacgttgaaacgcaaacaagaggaggtgtctgctattattatccagagggcttacagacgctacctcttgaagcaaaaagttaaaaaggtatcaagtatatacaagaaagacaaaggcaaagaatgtgatggaacacccatcaaagaagatactctcattgataaactgaatgagaattcaactccagagaaaaccgatatgacgccttccaccacgtctccaccctcgtatgatagtgtgaccaaaccagaaaaagaaaaatttgaaaaagacaaatcagaaaaggaagacaaagggaaagatatcagggaaagtaaaaagtaaaaagaaaccaagaattttccattttgtgatcaattgtttacagcccgtgatggtgatgtgtttgtgtcaacaggactcccacaggaggtctatgccaaactgactgtttttacaaatgtatacttaaggtcagtgcctataacaagacagagacctctggtcagcaaactggaactcagtaaactggagaaatagtatcgatgggaggtttctattttcacaaccagctgacactgctgaagagcagaggcgtaatggctactcagacgataggaaccaatttaaaggggggagggaagttaaatttttatgtaaattcaacatgtgacacttgataatagtaattgtcaccagtgtttatgttttaactgccacacctgccatatttttacaaaacgtgtgctgtgaatttatcacttttctttttaattcacaggttgtttactattatatgtgactatttttgtaaatgggtttgtgtttggggagagggattaaagggagggaattctacatttctctattgtattgtataactggatatattttaaatggaggcatgctgcaattctcattcacacataaaaaaatcacatcacaaaagggaagagtttacttcttgtttcaggatgtttttagatttttgaggtgcttaaatagctattcgtatttttaaggtgtctcatccagaaaaaatttaatgtgcctgtaaatgttccatagaatcacaagcattaaagagttgttttatttttacataacccattaaatgtacatgtatatatgtatatatgtatatgtgcgtgtatatacatatatatgtatacacacatgcacacacagagatatacacataccattacattgtcattcacagtcccagcagcatgactatcacatttttgataagtgtcctttggcataaaataaaaatatcctatcagtcctttctaagaagcctgaattgaccaaaaaacatccccaccaccactttataaagttgattctgctttatcctgcagtattgtttagccatcttctgctcttggtaaggttgacatagtatatgtcaatttaaaaaataaaagtctgctttgtaaatagtaattttacccagtggtgcatgtttgagcaaacaaaaatgatgatttaagcacactacttattgcatcaaatatgtaccacagtaagtatagtttgcaagctttcaacaggtaatatgatgtaattggttccattatagtttgaagctgtcactgctgcatgtttatcttgcctatgctgctgtatcttattccttccactgttcagaagtctaatatgggaagccatatatcagtggtaaagtgaagcaaattgttctaccaagacctcattcttcatgtcattaagcaataggttgcagcaaacaaggaagagcttcttgctttttattcttccaaccttaattgaacactcaatgatgaaaagcccgactgtacaaacatgttgcaagctgcttaaatctgtttaaaatatatggttagagttttctaagaaaatataaatactgtaaaaagttcattttattttatttttcagccttttgtacgtaaaatgagaaattaaaagtatcttcaggtggatgtcacagtcactattgttagtttctgttcctagcacttttaaattgaagcacttcacaaaataagaagcaaggactaggatgcagtgtaggtttctgcttttttattagtactgtaaacttgcacacatttcaatgtgaaacaaatctcaaactgagttcaatgtttatttgctttcaatagtaatgccttatcattgaaagaggcttaaagaaaaaaaaaatcagctgatactcttggcattgcttgaatccaatgtttccacctagtctttttattcagtaatcatcagtcttttccaatgtttgtttacacagatagatcttattgacccatatggcactagaactgtatcagatataatatgggatcccagctttttttcctctcccacaaaaccaggtagtgaagttatattaccagttacagcaaaatactttgtgtttcacaagcaacaataaatgtagattctttatactgaagctattgacttgtagtgtgttggtgaaatgcatgcaggaaaatgctgttaccataaagaacggtaaaccacattacaatcaagccaaaagaataaaggtttcgcttttgtttttgtatttaattgttgtctttgtttctatctttgaaatgccatttaaaggtagatttctatcatgtaaaaataatctatctgaaaaacaaatgtaaagaacacacattaattactataattcatctttcaattttttcatggaatggaagttaattaagaagagtgtattggataactactttaatattggccaaaaagctagatatggcatcaggtagactagtggaaagttacaaaaattaataaaaaattgactaacattttaa

SEQ ID NO: 18486 - DNA, 9456 bp, Homo sapiens
  source 1..9456: mol_type = unassigned DNA
aagatttttttttttttaaagcatgatggaattttagctgcagtcttcttggtgccagcttatcaatcccaaactctgggtgtaaaagattctacagggcactttcttatgcaaggagctaaacagtgattaaaggagcaggatgaaaagatggcacagtcagtgctggtaccgccaggacctgacagcttccgcttctttaccagggaatcccttgctgctattgaacaacgcattgcagaagagaaagctaagagacccaaacaggaacgcaaggatgaggatgatgaaaatggcccaaagccaaacagtgacttggaagcaggaaaatctcttccatttatttatggagacattcctccagagatggtgtcagtgcccctggaggatctggacccctactatatcaataagaaagtgagttcttagtcaagttgccttcactgcctatttactaattggttctgggctagtcccagggatgatggtgaagaaggctggcctccttccctctgtctaaagtatcactaagatgctggatgggcctgaccgtgtaatggaccaatgatcctagaagtcttttggaagcactcatttgaacctgcatttgtgagacaggcagagaactggtgaggcatcctccagcgcgggaattaaggaaggacaaaagcctattcaccttcttgaatacaaattatatgcttaaaccagtgtaaattgaccctgattccctaataatgttgagaagcaaaaactgtaaactaggagtctatttaaattttattttttatatttgcaggagtagtatctaaattcctctttatagtctctagctctccataagtcactttgatcttcagtgggtttaattattcctttataccatactttctcctttctattgctctccacagaaggaataatagcaggtgacttgtaggtgccaaataagattctgagcaaagaacacacctggaaaaccttgaagttctcatgagaaaattttctaaccaaaaaaaaaaatcaaagcctcaattttgtgctttatgtgaattataaatgcggttttaaaatacttacattaaaacttgataaagttgctaagaattcctatggcattgatcacaaattttcttaataatcctcatgtcatttatcaaatttaggaaagtttatagtgctcagaaaaaaaaagcatctatcttcatgtcatatgatgacgtttatagtattgaataaagggaaagcaatctctcgattcagtgccacccctgccctttacattttaactcccttcaaccctattagaaaattagctattaagattttggtacattctttattcaatatgctcattatgtgcacgattcttaccaactgtgtatttatgaccatgagtaaccctccagactggacaaagaatgtggagtatacctttacaggaatttatacttttgaatcacttattaaaatacttgcaaggggcttttgtttagaagatttcacatttttacgggatccatggaattggttggatttcacagtcattacttttgcatatgtgacagagtttgtggacctgggcaatgtctcagcgttgagaacattcagagttctccgagcattgaaaacaatttcagtcattccaggcctgaagaccattgtgggggccctgatccagtcagtgaagaagctttctgatgtcatgatcttgactgtgttctgtctaagcgtgtttgcgctaataggattgcagttgttcatgggcaacctacgaaataaatgtttgcaatggcctccagataattcttcctttgaaataaatatcacttccttctttaacaattcattggatgggaatggtactactttcaataggacagtgagcatatttaactgggatgaatatattgaggataaaagtcacttttattttttagaggggcaaaatgatgctctgctttgtggcaacagctcagatgcaggccagtgtcctgaaggatacatctgtgtgaaggctggtagaaaccccaactatggctacacgagctttgacacctttagttgggcctttttgtccttatttcgtctcatgactcaagacttctgggaaaacctttatcaactgacactacgtgctgctgggaaaacgtacatgatattttttgtgctggtcattttcttgggctcattctatctaataaatttgatcttggctgtggtggccatggcctatgaggaacagaatcaggccacattggaagaggctgaacagaaggaagctgaatttcagcagatgctcgaacagttgaaaaagcaacaagaagaagctcaggcggcagctgcagccgcatctgctgaatcaagagacttcagtggtgctggtgggataggagttttttcagagagttcttcagtagcatctaagttgagctccaaaagtgaaaaagagctgaaaaacagaagaaagaaaaagaaacagaaagaacagtctggagaagaagagaaaaatgacagagtccgaaaatcggaatctgaagacagcataagaagaaaaggtttccgtttttccttggaaggaagtaggctgacatatgaaaagagattttcttctccacaccagtccttactgagcatccgtggctcccttttctctccaagacgcaacagtagggcgagccttttcagcttcagaggtcgagcaaaggacattggctctgagaatgactttgctgatgatgagcacagcacctttgaggacaatgacagccgaagagactctctgttcgtgccgcacagacatggagaacggcgccacagcaatgtcagccaggccagccgtgcctccagggtgctccccatcctgcccatgaatgggaagatgcatagcgctgtggactgcaatggtgtggtctccctggtcgggggcccttctaccctcacatctgctgggcagctcctaccagagggcacaactactgaaacagaaataagaaagagacggtccagttcttatcatgtttccatggatttattggaagatcctacatcaaggcaaagagcaatgagtatagccagtattttgaccaacaccatggaagaacttgaagaatccagacagaaatgcccaccatgctggtataaatttgctaatatgtgtttgatttgggactgttgtaaaccatggttaaaggtgaaacaccttgtcaacctggttgtaatggacccatttgttgacctggccatcaccatctgcattgtcttaaatacactcttcatggctatggagcactatcccatgacggagcagttcagcagtgtactgtctgttggaaacctggtcttcacagggatcttcacagcagaaatgtttctcaagataattgccatggatccatattattactttcaagaaggctggaatatttttgatggttttattgtgagccttagtttaatggaacttggtttggcaaatgtggaaggattgtcagttctccgatcattccggctgctccgagttttcaagttggcaaaatcttggccaactctaaatatgctaattaagatcattggcaattctgtgggggctctaggaaacctcaccttggtattggccatcatcgtcttcatttttgctgtggtcggcatgcagctctttggtaagagctacaaagaatgtgtctgcaagatttccaatgattgtgaactcccacgctggcacatgcatgactttttccactccttcctgatcgtgttccgcgtgctgtgtggagagtggatagagaccatgtgggactgtatggaggtcgctggccaaaccatgtgccttactgtcttcatgatggtcatggtgattggaaatctagtggttctgaacctcttcttggccttgcttttgagttccttcagttctgacaatcttgctgccactgatgatgataacgaaatgaataatctccagattgctgtgggaaggatgcagaaaggaatcgattttgttaaaagaaaaatacgtgaatttattcagaaagcctttgttaggaagcagaaagctttagatgaaattaaaccgcttgaagatctaaataataaaaaagacagctgtatttccaaccataccaccatagaaataggcaaagacctcaattatctcaaagacggaaatggaactactagtggcataggcagcagtgtagaaaaatatgtcgtggatgaaagtgattacatgtcatttataaacaaccctagcctcactgtgacagtaccaattgctgttggagaatctgactttgaaaatttaaatactgaagaattcagcagcgagtcagatatggaggaaagcaaagagaagctaaatgcaactagttcatctgaaggcagcacggttgatattggagctcccgccgagggagaacagcctgaggttgaacctgaggaatcccttgaacctgaagcctgttttacagaagactgtgtacggaagttcaagtgttgtcagataagcatagaagaaggcaaagggaaactctggtggaatttgaggaaaacatgctataagatagtggagcacaattggttcgaaaccttcattgtcttcatgattctgctgagcagtggggctctggcctttgaagatatatacattgagcagcgaaaaaccattaagaccatgttagaatatgctgacaaggttttcacttacatattcattctggaaatgctgctaaagtgggttgcatatggttttcaagtgtattttaccaatgcctggtgctggctagacttcctgattgttgatgtctcactggttagcttaactgcaaatgccttgggttactcagaacttggtgccatcaaatccctcagaacactaagagctctgaggccactgagagctttgtcccggtttgaaggaatgagggttgttgtaaatgctcttttaggagccattccatctatcatgaatgtacttctggtttgtctgatcttttggctaatattcagtatcatgggagtgaatctctttgctggcaagttttaccattgtattaattacaccactggagagatgtttgatgtaagcgtggtcaacaactacagtgagtgcaaagctctcattgagagcaatcaaactgccaggtggaaaaatgtgaaagtaaactttgataacgtaggacttggatatctgtctctacttcaagtagccacgtttaagggatggatggatattatgtatgcagctgttgattcacgaaatgtagaattacaacccaagtatgaagacaacctgtacatgtatctttattttgtcatctttattatttttggttcattctttaccttgaatcttttcattggtgtcatcatagataacttcaaccaacagaaaaagaagtttggaggtcaagacatttttatgacagaagaacagaagaaatactacaatgcaatgaaaaaactgggttcaaagaaaccacaaaaacccatacctcgacctgctaacaaattccaaggaatggtctttgattttgtaaccaaacaagtctttgatatcagcatcatgatcctcatctgccttaacatggtcaccatgatggtggaaaccgatgaccagagtcaagaaatgacaaacattctgtactggattaatctggtgtttattgttctgttcactggagaatgtgtgctgaaactgatctctcttcgttactactatttcactattggatggaatatttttgattttgtggtggtcattctctccattgtaggaatgtttctggctgaactgatagaaaagtattttgtgtcccctaccctgttccgagtgatccgtcttgccaggattggccgaatcctacgtctgatcaaaggagcaaaggggatccgcacgctgctctttgctttgatgatgtcccttcctgcgttgtttaacatcggcctccttcttttcctggtcatgttcatctacgccatctttgggatgtccaattttgcctatgttaagagggaagttgggatcgatgacatgttcaactttgagacctttggcaacagcatgatctgcctgttccaaattacaacctctgctggctgggatggattgctagcacctattcttaatagtggacctccagactgtgaccctgacaaagatcaccctggaagctcagttaaaggagactgtgggaacccatctgttgggattttcttttttgtcagttacatcatcatatccttcctggttgtggtgaacatgtacatcgcggtcatcctggagaacttcagtgttgctactgaagaaagtgcagagcctctgagtgaggatgactttgagatgttctatgaggtttgggagaagtttgatcccgatgcgacccagtttatagagtttgccaaactttctgattttgcagatgccctggatcctcctcttctcatagcaaaacccaacaaagtccagctcattgccatggatctgcccatggtgagtggtgaccggatccactgtcttgacatcttatttgcttttacaaagcgtgttttgggtgagagtggagagatggatgcccttcgaatacagatggaagagcgattcatggcatcaaacccctccaaagtctcttatgagcccattacgaccacgttgaaacgcaaacaagaggaggtgtctgctattattatccagagggcttacagacgctacctcttgaagcaaaaagttaaaaaggtatcaagtatatacaagaaagacaaaggcaaagaatgtgatggaacacccatcaaagaagatactctcattgataaactgaatgagaattcaactccagagaaaaccgatatgacgccttccaccacgtctccaccctcgtatgatagtgtgaccaaaccagaaaaagaaaaatttgaaaaagacaaatcagaaaaggaagacaaagggaaagatatcagggaaagtaaaaagtaaaaagaaaccaagaattttccattttgtgatcaattgtttacagcccgtgatggtgatgtgtttgtgtcaacaggactcccacaggaggtctatgccaaactgactgtttttacaaatgtatacttaaggtcagtgcctataacaagacagagacctctggtcagcaaactggaactcagtaaactggagaaatagtatcgatgggaggtttctattttcacaaccagctgacactgctgaagagcagaggcgtaatggctactcagacgataggaaccaatttaaaggggggagggaagttaaatttttatgtaaattcaacatgtgacacttgataatagtaattgtcaccagtgtttatgttttaactgccacacctgccatatttttacaaaacgtgtgctgtgaatttatcacttttctttttaattcacaggttgtttactattatatgtgactatttttgtaaatgggtttgtgtttggggagagggattaaagggagggaattctacatttctctattgtattgtataactggatatattttaaatggaggcatgctgcaattctcattcacacataaaaaaatcacatcacaaaagggaagagtttacttcttgtttcaggatgtttttagatttttgaggtgcttaaatagctattcgtatttttaaggtgtctcatccagaaaaaatttaatgtgcctgtaaatgttccatagaatcacaagcattaaagagttgttttatttttacataacccattaaatgtacatgtatatatgtatatatgtatatgtgcgtgtatatacatatatatgtatacacacatgcacacacagagatatacacataccattacattgtcattcacagtcccagcagcatgactatcacatttttgataagtgtcctttggcataaaataaaaatatcctatcagtcctttctaagaagcctgaattgaccaaaaaacatccccaccaccactttataaagttgattctgctttatcctgcagtattgtttagccatcttctgctcttggtaaggttgacatagtatatgtcaatttaaaaaataaaagtctgctttgtaaatagtaattttacccagtggtgcatgtttgagcaaacaaaaatgatgatttaagcacactacttattgcatcaaatatgtaccacagtaagtatagtttgcaagctttcaacaggtaatatgatgtaattggttccattatagtttgaagctgtcactgctgcatgtttatcttgcctatgctgctgtatcttattccttccactgttcagaagtctaatatgggaagccatatatcagtggtaaagtgaagcaaattgttctaccaagacctcattcttcatgtcattaagcaataggttgcagcaaacaaggaagagcttcttgctttttattcttccaaccttaattgaacactcaatgatgaaaagcccgactgtacaaacatgttgcaagctgcttaaatctgtttaaaatatatggttagagttttctaagaaaatataaatactgtaaaaagttcattttattttatttttcagccttttgtacgtaaaatgagaaattaaaagtatcttcaggtggatgtcacagtcactattgttagtttctgttcctagcacttttaaattgaagcacttcacaaaataagaagcaaggactaggatgcagtgtaggtttctgcttttttattagtactgtaaacttgcacacatttcaatgtgaaacaaatctcaaactgagttcaatgtttatttgctttcaatagtaatgccttatcattgaaagaggcttaaagaaaaaaaaaatcagctgatactcttggcattgcttgaatccaatgtttccacctagtctttttattcagtaatcatcagtcttttccaatgtttgtttacacagatagatcttattgacccatatggcactagaactgtatcagatataatatgggatcccagctttttttcctctcccacaaaaccaggtagtgaagttatattaccagttacagcaaaatactttgtgtttcacaagcaacaataaatgtagattctttatactgaagctattgacttgtagtgtgttggtgaaatgcatgcaggaaaatgctgttaccataaagaacggtaaaccacattacaatcaagccaaaagaataaaggtttcgcttttgtttttgtatttaattgttgtctttgtttctatctttgaaatgccatttaaaggtagatttctatcatgtaaaaataatctatctgaaaaacaaatgtaaagaacacacattaattactataattcatctttcaattttttcatggaatggaagttaattaagaagagtgtattggataactactttaatattggccaaaaagctagatatggcatcaggtagactagtggaaagttacaaaaattaataaaaaattgactaacattttaa

SEQ ID NO: 18487 - DNA, 11676 bp, Homo sapiens
  source 1..11676: mol_type = unassigned DNA
ttttttttttaaagcatgatggaattttagctgcagtcttcttggtgccagcttatcaatcccaaactctgggtgtaaaagattctacagggcactttcttatgcaaggagctaaacagtgattaaaggagcaggatgaaaagatggcacagtcagtgctggtaccgccaggacctgacagcttccgcttctttaccagggaatcccttgctgctattgaacaacgcattgcagaagagaaagctaagagacccaaacaggaacgcaaggatgaggatgatgaaaatggcccaaagccaaacagtgacttggaagcaggaaaatctcttccatttatttatggagacattcctccagagatggtgtcagtgcccctggaggatctggacccctactatatcaataagaaaacgtttatagtattgaataaagggaaagcaatctctcgattcagtgccacccctgccctttacattttaactcccttcaaccctattagaaaattagctattaagattttggtacattctttattcaatatgctcattatgtgcacgattcttaccaactgtgtatttatgaccatgagtaaccctccagactggacaaagaatgtggagtatacctttacaggaatttatacttttgaatcacttattaaaatacttgcaaggggcttttgtttagaagatttcacatttttacgggatccatggaattggttggatttcacagtcattacttttgcatatgtgacagagtttgtggacctgggcaatgtctcagcgttgagaacattcagagttctccgagcattgaaaacaatttcagtcattccaggcctgaagaccattgtgggggccctgatccagtcagtgaagaagctttctgatgtcatgatcttgactgtgttctgtctaagcgtgtttgcgctaataggattgcagttgttcatgggcaacctacgaaataaatgtttgcaatggcctccagataattcttcctttgaaataaatatcacttccttctttaacaattcattggatgggaatggtactactttcaataggacagtgagcatatttaactgggatgaatatattgaggataaaagtcacttttattttttagaggggcaaaatgatgctctgctttgtggcaacagctcagatgcaggccagtgtcctgaaggatacatctgtgtgaaggctggtagaaaccccaactatggctacacgagctttgacacctttagttgggcctttttgtccttatttcgtctcatgactcaagacttctgggaaaacctttatcaactgacactacgtgctgctgggaaaacgtacatgatattttttgtgctggtcattttcttgggctcattctatctaataaatttgatcttggctgtggtggccatggcctatgaggaacagaatcaggccacattggaagaggctgaacagaaggaagctgaatttcagcagatgctcgaacagttgaaaaagcaacaagaagaagctcaggcggcagctgcagccgcatctgctgaatcaagagacttcagtggtgctggtgggataggagttttttcagagagttcttcagtagcatctaagttgagctccaaaagtgaaaaagagctgaaaaacagaagaaagaaaaagaaacagaaagaacagtctggagaagaagagaaaaatgacagagtccgaaaatcggaatctgaagacagcataagaagaaaaggtttccgtttttccttggaaggaagtaggctgacatatgaaaagagattttcttctccacaccagtccttactgagcatccgtggctcccttttctctccaagacgcaacagtagggcgagccttttcagcttcagaggtcgagcaaaggacattggctctgagaatgactttgctgatgatgagcacagcacctttgaggacaatgacagccgaagagactctctgttcgtgccgcacagacatggagaacggcgccacagcaatgtcagccaggccagccgtgcctccagggtgctccccatcctgcccatgaatgggaagatgcatagcgctgtggactgcaatggtgtggtctccctggtcgggggcccttctaccctcacatctgctgggcagctcctaccagagggcacaactactgaaacagaaataagaaagagacggtccagttcttatcatgtttccatggatttattggaagatcctacatcaaggcaaagagcaatgagtatagccagtattttgaccaacaccatggaagaacttgaagaatccagacagaaatgcccaccatgctggtataaatttgctaatatgtgtttgatttgggactgttgtaaaccatggttaaaggtgaaacaccttgtcaacctggttgtaatggacccatttgttgacctggccatcaccatctgcattgtcttaaatacactcttcatggctatggagcactatcccatgacggagcagttcagcagtgtactgtctgttggaaacctggtcttcacagggatcttcacagcagaaatgtttctcaagataattgccatggatccatattattactttcaagaaggctggaatatttttgatggttttattgtgagccttagtttaatggaacttggtttggcaaatgtggaaggattgtcagttctccgatcattccggctgctccgagttttcaagttggcaaaatcttggccaactctaaatatgctaattaagatcattggcaattctgtgggggctctaggaaacctcaccttggtattggccatcatcgtcttcatttttgctgtggtcggcatgcagctctttggtaagagctacaaagaatgtgtctgcaagatttccaatgattgtgaactcccacgctggcacatgcatgactttttccactccttcctgatcgtgttccgcgtgctgtgtggagagtggatagagaccatgtgggactgtatggaggtcgctggccaaaccatgtgccttactgtcttcatgatggtcatggtgattggaaatctagtggttctgaacctcttcttggccttgcttttgagttccttcagttctgacaatcttgctgccactgatgatgataacgaaatgaataatctccagattgctgtgggaaggatgcagaaaggaatcgattttgttaaaagaaaaatacgtgaatttattcagaaagcctttgttaggaagcagaaagctttagatgaaattaaaccgcttgaagatctaaataataaaaaagacagctgtatttccaaccataccaccatagaaataggcaaagacctcaattatctcaaagacggaaatggaactactagtggcataggcagcagtgtagaaaaatatgtcgtggatgaaagtgattacatgtcatttataaacaaccctagcctcactgtgacagtaccaattgctgttggagaatctgactttgaaaatttaaatactgaagaattcagcagcgagtcagatatggaggaaagcaaagagaagctaaatgcaactagttcatctgaaggcagcacggttgatattggagctcccgccgagggagaacagcctgaggttgaacctgaggaatcccttgaacctgaagcctgttttacagaagactgtgtacggaagttcaagtgttgtcagataagcatagaagaaggcaaagggaaactctggtggaatttgaggaaaacatgctataagatagtggagcacaattggttcgaaaccttcattgtcttcatgattctgctgagcagtggggctctggcctttgaagatatatacattgagcagcgaaaaaccattaagaccatgttagaatatgctgacaaggttttcacttacatattcattctggaaatgctgctaaagtgggttgcatatggttttcaagtgtattttaccaatgcctggtgctggctagacttcctgattgttgatgtgagtatgctgcactttgctgctttattcattggcatatatgtaatagttctagcaatggtgcctgacacagtgtaggcactcagtaacactgtatcagcccaaatataaattatgtttctcatttcacagtgagaggatgcctcaaaacattttttaccaatttaaatacatatacattcatagataaaaatcaaatgccatcatactatacttattcacttaatttcaaattaatatttaaaatctcaagttatgcaaaataaaatatgaatttagaaattttgctttttgcacactcacatttcgcaaaataacttgtatttaaatttttcacaggcatctttgacattagtatgtttgtcatcactaaagcctgttgagtttaggtcacacagatgaatcattaattacaaagaaatttgaaagtccaaaaagcaagagacaccacttgatttgtatgatatagaagcaaattggctattgaccaagtagccaaagattttattaaaccacattggtgttgaaataaaataagatagagtactaaaatatgagggtttttatataattgaatatgaggcaaatctaccattaaatgtactactactattaaatgtataaaggttacatgcagaattacattaacagtctctggcaataaaggaagacaataaataatatttagaactacataagtgtggacattacaaacaatagaaaatgcaccaaaactataaccattcttttatttgtataatgggattatgcatgatactatttcttttctctattttctgtatgtacttatcataggttggtaaatccataataaaaatatctgatacttgatatatctatgttaggataaaagtatcaagtcagcactgcttgaatataaggaaactcttcagagaaatctagttgtcctgcagctaatgatcatattacccaaagtactctgatatttacctttttagatttaagaaaactattatgatagtatatgaaactgatcaacactttgccttaaatcaaatatgcttattgctcatctatttcattatgaaagatacaaatataaataagtcatttttctagtcctgcagtagcttacagttgaaaagtgaggacagctgcgtacacagtaagtcgacacctgtattacaagtgccacctctttacttgaggaaggaggaaaggcttcaatagggaagtggagtgtgagctggagcttgagagatgtgaatgctagcaggcacagctgagggaggaacacggattcgttaaaacgttggtgcatgacatgcagggcgggttccagaaacaagtagatagggtgaggtaagcctttgtaatgggatgataaggtaagaaagataagttagaaaagatctgaagaacctgagatgccatccaaggaaatttggacttattatttaatacagaggaagctattgaagaattacatatagggaagtgacaagacctgcttgttcttttagtgagggaagttaggtggaggtgagaatgacggaatagaaaggagatttatttagagatcaaaacaccaattaggagattgctgcaatgtcccagaaagagaaggcctatatgtatcttcttttccacatttagctacacaagtcacataaaactgaatattttacaacttcttttcagccagtaaatactaccccattcaaaatattttcctctgtctaacttttatctttcatcctttaacttatgcttatctctttttggttctgtcttcagagaaggtaaagtactacaggtccttatatcttaaatacagaaaagcttcacaactcatgataattcagtaactatttttcaattatctgttaaaaagggacttacaaagcctaagagtttggattttaagggaactatatgaactatgtaagacataattttacaactcattgttttctgtattcaagaggcttcactttcaaattgcatgtgcaaaattattttgaataagttgttttttgtaacaactttcaatgtgcttcacttattttccttaaaaaatatatttttcaaatatattaacaccatactcttaaaagctgtattgcatatttatttttatttatctgcttttgaaattcaggtgtactttagaacaaaatagcttatataattttaataatttttctatatgttttcaaggaaattggacatgtgtatgtcccccgaccgtttttctttttctttttagctaagactttataatttttctcaactacattagtcaactgtatgaataactaaagacaacattgttcttgcaatttctaatttatcataaaatctcaactttttttattcactaattttgtctgacctaattaatgatattatgcccttcaaactgaaatttacaaaagtcaaagctgctttttagaggcctattcctttttaaatgtgttcatgctcatattcaccagtggtttgtatagtttacttgtgtatcaaatgttactttccatttcagatctgctcaatattattagaaatgatacagaaataagttttacagatctgtagaggaagatcacatttctctctcttttttttctttacttttaattttttaaaaacatttcctaccaagaatcttgaaaaagagcacatatatgggcttcttttttataagtgttcgcagactagtatcattaacttcaccctgggaacctgtagaaatgcaaattcttaggcctttccccaaacttactaagtcagactctgctattggtgtttttaacaagacccctgggtgattttgaaactcatgaaagttcgagaattactgattcattgcatagagcaaggctgaactgtgtagacatttttatatgtaaataagaaaattgtgttgctttttctgtataggtctcactggttagcttaactgcaaatgccttgggttactcagaacttggtgccatcaaatccctcagaacactaagagctctgaggccactgagagctttgtcccggtttgaaggaatgagggttgttgtaaatgctcttttaggagccattccatctatcatgaatgtacttctggtttgtctgatcttttggctaatattcagtatcatgggagtgaatctctttgctggcaagttttaccattgtattaattacaccactggagagatgtttgatgtaagcgtggtcaacaactacagtgagtgcaaagctctcattgagagcaatcaaactgccaggtggaaaaatgtgaaagtaaactttgataacgtaggacttggatatctgtctctacttcaagtagccacgtttaagggatggatggatattatgtatgcagctgttgattcacgaaatgtagaattacaacccaagtatgaagacaacctgtacatgtatctttattttgtcatctttattatttttggttcattctttaccttgaatcttttcattggtgtcatcatagataacttcaaccaacagaaaaagaagataagtatattaaaacttcatccttgctctgaaatatgaactaaatatttcatactctttcctttagcctccaaaatgcaatcaccaaaaaaagaatataaaattcagaaattattttgagacatttgataatcgataagcttttaagcaattaataattcagatagcatgtttttgatatttttagtctagaaatatgactaatatggcataatttatatattgaataaaggcatctctataaatacagatattagtaacaatagaatgaaatgtgggagccaattttcacatgattactaaggtggattttatagccagcaaagaacacaattttaacaagtgttgctttcatttctttactttggaggtcaagacatttttatgacagaagaacagaagaaatactacaatgcaatgaaaaaactgggttcaaagaaaccacaaaaacccatacctcgacctgctaacaaattccaaggaatggtctttgattttgtaaccaaacaagtctttgatatcagcatcatgatcctcatctgccttaacatggtcaccatgatggtggaaaccgatgaccagagtcaagaaatgacaaacattctgtactggattaatctggtgtttattgttctgttcactggagaatgtgtgctgaaactgatctctcttcgttactactatttcactattggatggaatatttttgattttgtggtggtcattctctccattgtaggaatgtttctggctgaactgatagaaaagtattttgtgtcccctaccctgttccgagtgatccgtcttgccaggattggccgaatcctacgtctgatcaaaggagcaaaggggatccgcacgctgctctttgctttgatgatgtcccttcctgcgttgtttaacatcggcctccttcttttcctggtcatgttcatctacgccatctttgggatgtccaattttgcctatgttaagagggaagttgggatcgatgacatgttcaactttgagacctttggcaacagcatgatctgcctgttccaaattacaacctctgctggctgggatggattgctagcacctattcttaatagtggacctccagactgtgaccctgacaaagatcaccctggaagctcagttaaaggagactgtgggaacccatctgttgggattttcttttttgtcagttacatcatcatatccttcctggttgtggtgaacatgtacatcgcggtcatcctggagaacttcagtgttgctactgaagaaagtgcagagcctctgagtgaggatgactttgagatgttctatgaggtttgggagaagtttgatcccgatgcgacccagtttatagagtttgccaaactttctgattttgcagatgccctggatcctcctcttctcatagcaaaacccaacaaagtccagctcattgccatggatctgcccatggtgagtggtgaccggatccactgtcttgacatcttatttgcttttacaaagcgtgttttgggtgagagtggagagatggatgcccttcgaatacagatggaagagcgattcatggcatcaaacccctccaaagtctcttatgagcccattacgaccacgttgaaacgcaaacaagaggaggtgtctgctattattatccagagggcttacagacgctacctcttgaagcaaaaagttaaaaaggtatcaagtatatacaagaaagacaaaggcaaagaatgtgatggaacacccatcaaagaagatactctcattgataaactgaatgagaattcaactccagagaaaaccgatatgacgccttccaccacgtctccaccctcgtatgatagtgtgaccaaaccagaaaaagaaaaatttgaaaaagacaaatcagaaaaggaagacaaagggaaagatatcagggaaagtaaaaagtaaaaagaaaccaagaattttccattttgtgatcaattgtttacagcccgtgatggtgatgtgtttgtgtcaacaggactcccacaggaggtctatgccaaactgactgtttttacaaatgtatacttaaggtcagtgcctataacaagacagagacctctggtcagcaaactggaactcagtaaactggagaaatagtatcgatgggaggtttctattttcacaaccagctgacactgctgaagagcagaggcgtaatggctactcagacgataggaaccaatttaaaggggggagggaagttaaatttttatgtaaattcaacatgtgacacttgataatagtaattgtcaccagtgtttatgttttaactgccacacctgccatatttttacaaaacgtgtgctgtgaatttatcacttttctttttaattcacaggttgtttactattatatgtgactatttttgtaaatgggtttgtgtttggggagagggattaaagggagggaattctacatttctctattgtattgtataactggatatattttaaatggaggcatgctgcaattctcattcacacataaaaaaatcacatcacaaaagggaagagtttacttcttgtttcaggatgtttttagatttttgaggtgcttaaatagctattcgtatttttaaggtgtctcatccagaaaaaatttaatgtgcctgtaaatgttccatagaatcacaagcattaaagagttgttttatttttacataacccattaaatgtacatgtatatatgtatatatgtatatgtgcgtgtatatacatatatatgtatacacacatgcacacacagagatatacacataccattacattgtcattcacagtcccagcagcatgactatcacatttttgataagtgtcctttggcataaaataaaaatatcctatcagtcctttctaagaagcctgaattgaccaaaaaacatccccaccaccactttataaagttgattctgctttatcctgcagtattgtttagccatcttctgctcttggtaaggttgacatagtatatgtcaatttaaaaaataaaagtctgctttgtaaatagtaattttacccagtggtgcatgtttgagcaaacaaaaatgatgatttaagcacactacttattgcatcaaatatgtaccacagtaagtatagtttgcaagctttcaacaggtaatatgatgtaattggttccattatagtttgaagctgtcactgctgcatgtttatcttgcctatgctgctgtatcttattccttccactgttcagaagtctaatatgggaagccatatatcagtggtaaagtgaagcaaattgttctaccaagacctcattcttcatgtcattaagcaataggttgcagcaaacaaggaagagcttcttgctttttattcttccaaccttaattgaacactcaatgatgaaaagcccgactgtacaaacatgttgcaagctgcttaaatctgtttaaaatatatggttagagttttctaagaaaatataaatactgtaaaaagttcattttattttatttttcagccttttgtacgtaaaatgagaaattaaaagtatcttcaggtggatgtcacagtcactattgttagtttctgttcctagcacttttaaattgaagcacttcacaaaataagaagcaaggactaggatgcagtgtaggtttctgcttttttattagtactgtaaacttgcacacatttcaatgtgaaacaaatctcaaactgagttcaatgtttatttgctttcaatagtaatgccttatcattgaaagaggcttaaagaaaaaaaaaatcagctgatactcttggcattgcttgaatccaatgtttccacctagtctttttattcagtaatcatcagtcttttccaatgtttgtttacacagatagatcttattgacccatatggcactagaactgtatcagatataatatgggatcccagctttttttcctctcccacaaaaccaggtagtgaagttatattaccagttacagcaaaatactttgtgtttcacaagcaacaataaatgtagattctttatactgaagctattgacttgtagtgtgttggtgaaatgcatgcaggaaaatgctgttaccataaagaacggtaaaccacattacaatcaagccaaaagaataaaggtttcgcttttgtttttgtattt

SEQ ID NO: 18488 - DNA, 8573 bp, Homo sapiens
  source 1..8573: mol_type = unassigned DNA
tgccagcttatcaatcccaaactctgggtgtaaaagattctacagggcactttcttatgcaaggagctaaacagtgattaaaggagcaggatgaaaagatggcacagtcagtgctggtaccgccaggacctgacagcttccgcttctttaccagggaatcccttgctgctattgaacaacgcattgcagaagagaaagctaagagacccaaacaggaacgcaaggatgaggatgatgaaaatggcccaaagccaaacagtgacttggaagcaggaaaatctcttccatttatttatggagacattcctccagagatggtgtcagtgcccctggaggatctggacccctactatatcaataagaaaacgtttatagtattgaataaagggaaagcaatctctcgattcagtgccacccctgccctttacattttaactcccttcaaccctattagaaaattagctattaagattttggtacattctttattcaatatgctcattatgtgcacgattcttaccaactgtgtatttatgaccatgagtaaccctccagactggacaaagaatgtggagtatacctttacaggaatttatacttttgaatcacttattaaaatacttgcaaggggcttttgtttagaagatttcacatttttacgggatccatggaattggttggatttcacagtcattacttttgcatatgtgacagagtttgtggacctgggcaatgtctcagcgttgagaacattcagagttctccgagcattgaaaacaatttcagtcattccaggcctgaagaccattgtgggggccctgatccagtcagtgaagaagctttctgatgtcatgatcttgactgtgttctgtctaagcgtgtttgcgctaataggattgcagttgttcatgggcaacctacgaaataaatgtttgcaatggcctccagataattcttcctttgaaataaatatcacttccttctttaacaattcattggatgggaatggtactactttcaataggacagtgagcatatttaactgggatgaatatattgaggataaaagtcacttttattttttagaggggcaaaatgatgctctgctttgtggcaacagctcagatgcaggccagtgtcctgaaggatacatctgtgtgaaggctggtagaaaccccaactatggctacacgagctttgacacctttagttgggcctttttgtccttatttcgtctcatgactcaagacttctgggaaaacctttatcaactgacactacgtgctgctgggaaaacgtacatgatattttttgtgctggtcattttcttgggctcattctatctaataaatttgatcttggctgtggtggccatggcctatgaggaacagaatcaggccacattggaagaggctgaacagaaggaagctgaatttcagcagatgctcgaacagttgaaaaagcaacaagaagaagctcaggcggcagctgcagccgcatctgctgaatcaagagacttcagtggtgctggtgggataggagttttttcagagagttcttcagtagcatctaagttgagctccaaaagtgaaaaagagctgaaaaacagaagaaagaaaaagaaacagaaagaacagtctggagaagaagagaaaaatgacagagtccgaaaatcggaatctgaagacagcataagaagaaaaggtttccgtttttccttggaaggaagtaggctgacatatgaaaagagattttcttctccacaccagtccttactgagcatccgtggctcccttttctctccaagacgcaacagtagggcgagccttttcagcttcagaggtcgagcaaaggacattggctctgagaatgactttgctgatgatgagcacagcacctttgaggacaatgacagccgaagagactctctgttcgtgccgcacagacatggagaacggcgccacagcaatgtcagccaggccagccgtgcctccagggtgctccccatcctgcccatgaatgggaagatgcatagcgctgtggactgcaatggtgtggtctccctggtcgggggcccttctaccctcacatctgctgggcagctcctaccagagggcacaactactgaaacagaaataagaaagagacggtccagttcttatcatgtttccatggatttattggaagatcctacatcaaggcaaagagcaatgagtatagccagtattttgaccaacaccatggaaggtaaatcttttgaagattgtctggccttccgctccttgccatagcaaaaccactgagaggaagctgccagtggttctgctaccgatgtcagcagcatgtctgctccctaaagcaggaagtagagaaggagacaggaacttgaagaatccagacagaaatgcccaccatgctggtataaatttgctaatatgtgtttgatttgggactgttgtaaaccatggttaaaggtgaaacaccttgtcaacctggttgtaatggacccatttgttgacctggccatcaccatctgcattgtcttaaatacactcttcatggctatggagcactatcccatgacggagcagttcagcagtgtactgtctgttggaaacctggtcttcacagggatcttcacagcagaaatgtttctcaagataattgccatggatccatattattactttcaagaaggctggaatatttttgatggttttattgtgagccttagtttaatggaacttggtttggcaaatgtggaaggattgtcagttctccgatcattccggctgctccgagttttcaagttggcaaaatcttggccaactctaaatatgctaattaagatcattggcaattctgtgggggctctaggaaacctcaccttggtattggccatcatcgtcttcatttttgctgtggtcggcatgcagctctttggtaagagctacaaagaatgtgtctgcaagatttccaatgattgtgaactcccacgctggcacatgcatgactttttccactccttcctgatcgtgttccgcgtgctgtgtggagagtggatagagaccatgtgggactgtatggaggtcgctggccaaaccatgtgccttactgtcttcatgatggtcatggtgattggaaatctagtggttctgaacctcttcttggccttgcttttgagttccttcagttctgacaatcttgctgccactgatgatgataacgaaatgaataatctccagattgctgtgggaaggatgcagaaaggaatcgattttgttaaaagaaaaatacgtgaatttattcagaaagcctttgttaggaagcagaaagctttagatgaaattaaaccgcttgaagatctaaataataaaaaagacagctgtatttccaaccataccaccatagaaataggcaaagacctcaattatctcaaagacggaaatggaactactagtggcataggcagcagtgtagaaaaatatgtcgtggatgaaagtgattacatgtcatttataaacaaccctagcctcactgtgacagtaccaattgctgttggagaatctgactttgaaaatttaaatactgaagaattcagcagcgagtcagatatggaggaaagcaaagagaagctaaatgcaactagttcatctgaaggcagcacggttgatattggagctcccgccgagggagaacagcctgaggttgaacctgaggaatcccttgaacctgaagcctgttttacagaagactgtgtacggaagttcaagtgttgtcagataagcatagaagaaggcaaagggaaactctggtggaatttgaggaaaacatgctataagatagtggagcacaattggttcgaaaccttcattgtcttcatgattctgctgagcagtggggctctggcctttgaagatatatacattgagcagcgaaaaaccattaagaccatgttagaatatgctgacaaggttttcacttacatattcattctggaaatgctgctaaagtgggttgcatatggttttcaagtgtattttaccaatgcctggtgctggctagacttcctgattgttgatgtctcactggttagcttaactgcaaatgccttgggttactcagaacttggtgccatcaaatccctcagaacactaagagctctgaggccactgagagctttgtcccggtttgaaggaatgagggttgttgtaaatgctcttttaggagccattccatctatcatgaatgtacttctggtttgtctgatcttttggctaatattcagtatcatgggagtgaatctctttgctggcaagttttaccattgtattaattacaccactggagagatgtttgatgtaagcgtggtcaacaactacagtgagtgcaaagctctcattgagagcaatcaaactgccaggtggaaaaatgtgaaagtaaactttgataacgtaggacttggatatctgtctctacttcaagtagccacgtttaagggatggatggatattatgtatgcagctgttgattcacgaaatgtagaattacaacccaagtatgaagacaacctgtacatgtatctttattttgtcatctttattatttttggttcattctttaccttgaatcttttcattggtgtcatcatagataacttcaaccaacagaaaaagaagtttggaggtcaagacatttttatgacagaagaacagaagaaatactacaatgcaatgaaaaaactgggttcaaagaaaccacaaaaacccatacctcgacctgctaacaaattccaaggaatggtctttgattttgtaaccaaacaagtctttgatatcagcatcatgatcctcatctgccttaacatggtcaccatgatggtggaaaccgatgaccagagtcaagaaatgacaaacattctgtactggattaatctggtgtttattgttctgttcactggagaatgtgtgctgaaactgatctctcttcgttactactatttcactattggatggaatatttttgattttgtggtggtcattctctccattgtaggaatgtttctggctgaactgatagaaaagtattttgtgtcccctaccctgttccgagtgatccgtcttgccaggattggccgaatcctacgtctgatcaaaggagcaaaggggatccgcacgctgctctttgctttgatgatgtcccttcctgcgttgtttaacatcggcctccttcttttcctggtcatgttcatctacgccatctttgggatgtccaattttgcctatgttaagagggaagttgggatcgatgacatgttcaactttgagacctttggcaacagcatgatctgcctgttccaaattacaacctctgctggctgggatggattgctagcacctattcttaatagtggacctccagactgtgaccctgacaaagatcaccctggaagctcagttaaaggagactgtgggaacccatctgttgggattttcttttttgtcagttacatcatcatatccttcctggttgtggtgaacatgtacatcgcggtcatcctggagaacttcagtgttgctactgaagaaagtgcagagcctctgagtgaggatgactttgagatgttctatgaggtttgggagaagtttgatcccgatgcgacccagtttatagagtttgccaaactttctgattttgcagatgccctggatcctcctcttctcatagcaaaacccaacaaagtccagctcattgccatggatctgcccatggtgagtggtgaccggatccactgtcttgacatcttatttgcttttacaaagcgtgttttgggtgagagtggagagatggatgcccttcgaatacagatggaagagcgattcatggcatcaaacccctccaaagtctcttatgagcccattacgaccacgttgaaacgcaaacaagaggaggtgtctgctattattatccagagggcttacagacgctacctcttgaagcaaaaagttaaaaaggtatcaagtatatacaagaaagacaaaggcaaagaatgtgatggaacacccatcaaagaagatactctcattgataaactgaatgagaattcaactccagagaaaaccgatatgacgccttccaccacgtctccaccctcgtatgatagtgtgaccaaaccagaaaaagaaaaatttgaaaaagacaaatcagaaaaggaagacaaagggaaagatatcagggaaagtaaaaagtaaaaagaaaccaagaattttccattttgtgatcaattgtttacagcccgtgatggtgatgtgtttgtgtcaacaggactcccacaggaggtctatgccaaactgactgtttttacaaatgtatacttaaggtcagtgcctataacaagacagagacctctggtcagcaaactggaactcagtaaactggagaaatagtatcgatgggaggtttctattttcacaaccagctgacactgctgaagagcagaggcgtaatggctactcagacgataggaaccaatttaaaggggggagggaagttaaatttttatgtaaattcaacatgtgacacttgataatagtaattgtcaccagtgtttatgttttaactgccacacctgccatatttttacaaaacgtgtgctgtgaatttatcacttttctttttaattcacaggttgtttactattatatgtgactatttttgtaaatgggtttgtgtttggggagagggattaaagggagggaattctacatttctctattgtattgtataactggatatattttaaatggaggcatgctgcaattctcattcacacataaaaaaatcacatcacaaaagggaagagtttacttcttgtttcaggatgtttttagatttttgaggtgcttaaatagctattcgtatttttaaggtgtctcatccagaaaaaatttaatgtgcctgtaaatgttccatagaatcacaagcattaaagagttgttttatttttacataacccattaaatgtacatgtatatatgtatatatgtatatgtgcgtgtatatacatatatatgtatacacacatgcacacacagagatatacacataccattacattgtcattcacagtcccagcagcatgactatcacatttttgataagtgtcctttggcataaaataaaaatatcctatcagtcctttctaagaagcctgaattgaccaaaaaacatccccaccaccactttataaagttgattctgctttatcctgcagtattgtttagccatcttctgctcttggtaaggttgacatagtatatgtcaatttaaaaaataaaagtctgctttgtaaatagtaattttacccagtggtgcatgtttgagcaaacaaaaatgatgatttaagcacactacttattgcatcaaatatgtaccacagtaagtatagtttgcaagctttcaacaggtaatatgatgtaattggttccattatagtttgaagctgtcactgctgcatgtttatcttgcctatgctgctgtatcttattccttccactgttcagaagtctaatatgggaagccatatatcagtggtaaagtgaagcaaattgttctaccaagacctcattcttcatgtcattaagcaataggttgcagcaaacaaggaagagcttcttgctttttattcttccaaccttaattgaacactcaatgatgaaaagcccgactgtacaaacatgttgcaagctgcttaaatctgtttaaaatatatggttagagttttctaagaaaatataaatactgtaaaaagttcattttattttatttttcagccttttgtacgtaaaatgagaaattaaaagtatcttcaggtggatgtcacagtcactattgttagtttctgttcctagcacttttaaattgaagcacttcacaaaataagaagcaaggactaggatgcagtgtaggtttctgcttttttattagtactgtaaacttgcacacatttcaatgtgaaacaaatctcaaactgagttcaatgtttatttgctttcaatagtaatgccttatcattgaaagaggcttaaagaaaaaaaaaatcagctgatactcttggcattgcttgaatccaatgtttccacctagtctttttattcagtaatcatcagtcttttccaatgtttgtttacacagatagatcttattgacccatatggcactagaactgtatcagatataatatgggatcccagctttttttcctctcccacaaaaccaggtagtgaagttatattaccagttacagcaaaatactttgtgtttcacaagcaacaataaatgtagattctttatactgaagctattgacttgtagtgtgttggtgaaatgcatgcaggaaaatgctgttaccataaagaacggtaaaccacattacaatcaagccaaaagaataaaggtttcgcttttgtttttgtatttaattgttgtctttgtttctatctttgaaatgccatttaaaggtagatttctatcatgtaaaaataatctatctgaaaaacaaatgtaaagaacac

SEQ ID NO: 18489 - DNA, 661 bp, Homo sapiens
  source 1..661: mol_type = unassigned DNA
tggacaaagaatgtggagtatacctttacaggaatttatacttttgaatcacttattaaaatacttgcaaggggcttttgtttagaagatttcacatttttacgggatccatggaattggttggatttcacagtcattacttttgcatatgtgacagagtttgtggacctgggcaatgtctcagcgttgagaacattcagagttctccgagcattgaaaacaatttcagtcattccaggcctgaagaccattgtgggggccctgatccagtcagtgaagaagctttctgatgtcatgatcttgactgtgttctgtctaagcgtgtttgcgctaataggattgcagttgttcatgggcaacctacgaaataaatgtttgcaatggcctccagataattcttcctttgaaataaatatcacttccttctttaacaattcattggatgggaatggtactactttcaataggacagtgagcatatttaactgggatgaatatattgaggataaaagtaagatatactctataaaccattaagttgtttagttctctaaatattaaatattatatataatggaaattatctcaatttagatgtgaatcaagtgacttagactaatttaagatgatttaatacatataaaagagatatcaaatgata

SEQ ID NO: 18490 - DNA, 8792 bp, Homo sapiens
  source 1..8792: mol_type = unassigned DNA
atgctgttttctaacagacattgggtaccatcgaatgactgtcagaacagaaagctaaggcaaaggagggaggatgctgtggtcatcctttcttgtttttttcttctttaatgaggatagagcacatgtgagattttactttctactccagtaaaaattctgaagaattgcattggagactgttatattcaacacatacgtggattctgtgttatgatttacatttttctttatttcagcactttcttatgcaaggagctaaacagtgattaaaggagcaggatgaaaagatggcacagtcagtgctggtaccgccaggacctgacagcttccgcttctttaccagggaatcccttgctgctattgaacaacgcattgcagaagagaaagctaagagacccaaacaggaacgcaaggatgaggatgatgaaaatggcccaaagccaaacagtgacttggaagcaggaaaatctcttccatttatttatggagacattcctccagagatggtgtcagtgcccctggaggatctggacccctactatatcaataagaaaacgtttatagtattgaataaagggaaagcaatctctcgattcagtgccacccctgccctttacattttaactcccttcaaccctattagaaaattagctattaagattttggtacattctttattcaatatgctcattatgtgcacgattcttaccaactgtgtatttatgaccatgagtaaccctccagactggacaaagaatgtggagtatacctttacaggaatttatacttttgaatcacttattaaaatacttgcaaggggcttttgtttagaagatttcacatttttacgggatccatggaattggttggatttcacagtcattacttttgcatatgtgacagagtttgtggacctgggcaatgtctcagcgttgagaacattcagagttctccgagcattgaaaacaatttcagtcattccaggcctgaagaccattgtgggggccctgatccagtcagtgaagaagctttctgatgtcatgatcttgactgtgttctgtctaagcgtgtttgcgctaataggattgcagttgttcatgggcaacctacgaaataaatgtttgcaatggcctccagataattcttcctttgaaataaatatcacttccttctttaacaattcattggatgggaatggtactactttcaataggacagtgagcatatttaactgggatgaatatattgaggataaaagtcacttttattttttagaggggcaaaatgatgctctgctttgtggcaacagctcagatgcaggccagtgtcctgaaggatacatctgtgtgaaggctggtagaaaccccaactatggctacacgagctttgacacctttagttgggcctttttgtccttatttcgtctcatgactcaagacttctgggaaaacctttatcaactgacactacgtgctgctgggaaaacgtacatgatattttttgtgctggtcattttcttgggctcattctatctaataaatttgatcttggctgtggtggccatggcctatgaggaacagaatcaggccacattggaagaggctgaacagaaggaagctgaatttcagcagatgctcgaacagttgaaaaagcaacaagaagaagctcaggcggcagctgcagccgcatctgctgaatcaagagacttcagtggtgctggtgggataggagttttttcagagagttcttcagtagcatctaagttgagctccaaaagtgaaaaagagctgaaaaacagaagaaagaaaaagaaacagaaagaacagtctggagaagaagagaaaaatgacagagtccgaaaatcggaatctgaagacagcataagaagaaaaggtttccgtttttccttggaaggaagtaggctgacatatgaaaagagattttcttctccacaccagtccttactgagcatccgtggctcccttttctctccaagacgcaacagtagggcgagccttttcagcttcagaggtcgagcaaaggacattggctctgagaatgactttgctgatgatgagcacagcacctttgaggacaatgacagccgaagagactctctgttcgtgccgcacagacatggagaacggcgccacagcaatgtcagccaggccagccgtgcctccagggtgctccccatcctgcccatgaatgggaagatgcatagcgctgtggactgcaatggtgtggtctccctggtcgggggcccttctaccctcacatctgctgggcagctcctaccagagggcacaactactgaaacagaaataagaaagagacggtccagttcttatcatgtttccatggatttattggaagatcctacatcaaggcaaagagcaatgagtatagccagtattttgaccaacaccatggaagaacttgaagaatccagacagaaatgcccaccatgctggtataaatttgctaatatgtgtttgatttgggactgttgtaaaccatggttaaaggtgaaacaccttgtcaacctggttgtaatggacccatttgttgacctggccatcaccatctgcattgtcttaaatacactcttcatggctatggagcactatcccatgacggagcagttcagcagtgtactgtctgttggaaacctggtcttcacagggatcttcacagcagaaatgtttctcaagataattgccatggatccatattattactttcaagaaggctggaatatttttgatggttttattgtgagccttagtttaatggaacttggtttggcaaatgtggaaggattgtcagttctccgatcattccggctgctccgagttttcaagttggcaaaatcttggccaactctaaatatgctaattaagatcattggcaattctgtgggggctctaggaaacctcaccttggtattggccatcatcgtcttcatttttgctgtggtcggcatgcagctctttggtaagagctacaaagaatgtgtctgcaagatttccaatgattgtgaactcccacgctggcacatgcatgactttttccactccttcctgatcgtgttccgcgtgctgtgtggagagtggatagagaccatgtgggactgtatggaggtcgctggccaaaccatgtgccttactgtcttcatgatggtcatggtgattggaaatctagtggttctgaacctcttcttggccttgcttttgagttccttcagttctgacaatcttgctgccactgatgatgataacgaaatgaataatctccagattgctgtgggaaggatgcagaaaggaatcgattttgttaaaagaaaaatacgtgaatttattcagaaagcctttgttaggaagcagaaagctttagatgaaattaaaccgcttgaagatctaaataataaaaaagacagctgtatttccaaccataccaccatagaaataggcaaagacctcaattatctcaaagacggaaatggaactactagtggcataggcagcagtgtagaaaaatatgtcgtggatgaaagtgattacatgtcatttataaacaaccctagcctcactgtgacagtaccaattgctgttggagaatctgactttgaaaatttaaatactgaagaattcagcagcgagtcagatatggaggaaagcaaagagaagctaaatgcaactagttcatctgaaggcagcacggttgatattggagctcccgccgagggagaacagcctgaggttgaacctgaggaatcccttgaacctgaagcctgttttacagaagactgtgtacggaagttcaagtgttgtcagataagcatagaagaaggcaaagggaaactctggtggaatttgaggaaaacatgctataagatagtggagcacaattggttcgaaaccttcattgtcttcatgattctgctgagcagtggggctctggcctttgaagatatatacattgagcagcgaaaaaccattaagaccatgttagaatatgctgacaaggttttcacttacatattcattctggaaatgctgctaaagtgggttgcatatggttttcaagtgtattttaccaatgcctggtgctggctagacttcctgattgttgatgtctcactggttagcttaactgcaaatgccttgggttactcagaacttggtgccatcaaatccctcagaacactaagagctctgaggccactgagagctttgtcccggtttgaaggaatgagggttgttgtaaatgctcttttaggagccattccatctatcatgaatgtacttctggtttgtctgatcttttggctaatattcagtatcatgggagtgaatctctttgctggcaagttttaccattgtattaattacaccactggagagatgtttgatgtaagcgtggtcaacaactacagtgagtgcaaagctctcattgagagcaatcaaactgccaggtggaaaaatgtgaaagtaaactttgataacgtaggacttggatatctgtctctacttcaagtagccacgtttaagggatggatggatattatgtatgcagctgttgattcacgaaatgtagaattacaacccaagtatgaagacaacctgtacatgtatctttattttgtcatctttattatttttggttcattctttaccttgaatcttttcattggtgtcatcatagataacttcaaccaacagaaaaagaagtttggaggtcaagacatttttatgacagaagaacagaagaaatactacaatgcaatgaaaaaactgggttcaaagaaaccacaaaaacccatacctcgacctgctaacaaattccaaggaatggtctttgattttgtaaccaaacaagtctttgatatcagcatcatgatcctcatctgccttaacatggtcaccatgatggtggaaaccgatgaccagagtcaagaaatgacaaacattctgtactggattaatctggtgtttattgttctgttcactggagaatgtgtgctgaaactgatctctcttcgttactactatttcactattggatggaatatttttgattttgtggtggtcattctctccattgtaggaatgtttctggctgaactgatagaaaagtattttgtgtcccctaccctgttccgagtgatccgtcttgccaggattggccgaatcctacgtctgatcaaaggagcaaaggggatccgcacgctgctctttgctttgatgatgtcccttcctgcgttgtttaacatcggcctccttcttttcctggtcatgttcatctacgccatctttgggatgtccaattttgcctatgttaagagggaagttgggatcgatgacatgttcaactttgagacctttggcaacagcatgatctgcctgttccaaattacaacctctgctggctgggatggattgctagcacctattcttaatagtggacctccagactgtgaccctgacaaagatcaccctggaagctcagttaaaggagactgtgggaacccatctgttgggattttcttttttgtcagttacatcatcatatccttcctggttgtggtgaacatgtacatcgcggtcatcctggagaacttcagtgttgctactgaagaaagtgcagagcctctgagtgaggatgactttgagatgttctatgaggtttgggagaagtttgatcccgatgcgacccagtttatagagtttgccaaactttctgattttgcagatgccctggatcctcctcttctcatagcaaaacccaacaaagtccagctcattgccatggatctgcccatggtgagtggtgaccggatccactgtcttgacatcttatttgcttttacaaagcgtgttttgggtgagagtggagagatggatgcccttcgaatacagatggaagagcgattcatggcatcaaacccctccaaagtctcttatgagcccattacgaccacgttgaaacgcaaacaagaggaggtgtctgctattattatccagagggcttacagacgctacctcttgaagcaaaaagttaaaaaggtatcaagtatatacaagaaagacaaaggcaaagaatgtgatggaacacccatcaaagaagatactctcattgataaactgaatgagaattcaactccagagaaaaccgatatgacgccttccaccacgtctccaccctcgtatgatagtgtgaccaaaccagaaaaagaaaaatttgaaaaagacaaatcagaaaaggaagacaaagggaaagatatcagggaaagtaaaaagtaaaaagaaaccaagaattttccattttgtgatcaattgtttacagcccgtgatggtgatgtgtttgtgtcaacaggactcccacaggaggtctatgccaaactgactgtttttacaaatgtatacttaaggtcagtgcctataacaagacagagacctctggtcagcaaactggaactcagtaaactggagaaatagtatcgatgggaggtttctattttcacaaccagctgacactgctgaagagcagaggcgtaatggctactcagacgataggaaccaatttaaaggggggagggaagttaaatttttatgtaaattcaacatgtgacacttgataatagtaattgtcaccagtgtttatgttttaactgccacacctgccatatttttacaaaacgtgtgctgtgaatttatcacttttctttttaattcacaggttgtttactattatatgtgactatttttgtaaatgggtttgtgtttggggagagggattaaagggagggaattctacatttctctattgtattgtataactggatatattttaaatggaggcatgctgcaattctcattcacacataaaaaaatcacatcacaaaagggaagagtttacttcttgtttcaggatgtttttagatttttgaggtgcttaaatagctattcgtatttttaaggtgtctcatccagaaaaaatttaatgtgcctgtaaatgttccatagaatcacaagcattaaagagttgttttatttttacataacccattaaatgtacatgtatatatgtatatatgtatatgtgcgtgtatatacatatatatgtatacacacatgcacacacagagatatacacataccattacattgtcattcacagtcccagcagcatgactatcacatttttgataagtgtcctttggcataaaataaaaatatcctatcagtcctttctaagaagcctgaattgaccaaaaaacatccccaccaccactttataaagttgattctgctttatcctgcagtattgtttagccatcttctgctcttggtaaggttgacatagtatatgtcaatttaaaaaataaaagtctgctttgtaaatagtaattttacccagtggtgcatgtttgagcaaacaaaaatgatgatttaagcacactacttattgcatcaaatatgtaccacagtaagtatagtttgcaagctttcaacaggtaatatgatgtaattggttccattatagtttgaagctgtcactgctgcatgtttatcttgcctatgctgctgtatcttattccttccactgttcagaagtctaatatgggaagccatatatcagtggtaaagtgaagcaaattgttctaccaagacctcattcttcatgtcattaagcaataggttgcagcaaacaaggaagagcttcttgctttttattcttccaaccttaattgaacactcaatgatgaaaagcccgactgtacaaacatgttgcaagctgcttaaatctgtttaaaatatatggttagagttttctaagaaaatataaatactgtaaaaagttcattttattttatttttcagccttttgtacgtaaaatgagaaattaaaagtatcttcaggtggatgtcacagtcactattgttagtttctgttcctagcacttttaaattgaagcacttcacaaaataagaagcaaggactaggatgcagtgtaggtttctgcttttttattagtactgtaaacttgcacacatttcaatgtgaaacaaatctcaaactgagttcaatgtttatttgctttcaatagtaatgccttatcattgaaagaggcttaaagaaaaaaaaaatcagctgatactcttggcattgcttgaatccaatgtttccacctagtctttttattcagtaatcatcagtcttttccaatgtttgtttacacagatagatcttattgacccatatggcactagaactgtatcagatataatatgggatcccagctttttttcctctcccacaaaaccaggtagtgaagttatattaccagttacagcaaaatactttgtgtttcacaagcaacaataaatgtagattctttatactgaagctattgacttgtagtgtgttggtgaaatgcatgcaggaaaatgctgttaccataaagaacggtaaaccacattacaatcaagccaaaagaataaaggtttcgcttttgtttttgtatttaattgttgtctttgtttctatctttgaaatgccatttaaaggtagatttctatcatgtaaaaataatctatctgaaaaacaaatgtaaagaacacacattaattactataattcatctttcaattttttcatggaatggaagttaattaagaagagtgtattggataactactttaatattggccaaaaagctagatatggcatcaggtagactagtggaaagttacaaaaattaataaaaaattgactaacatttt

SEQ ID NO: 18491 - DNA, 8553 bp, Homo sapiens
  source 1..8553: mol_type = unassigned DNA
cactttcttatgcaaggagctaaacagtgattaaaggagcaggatgaaaagatggcacagtcagtgctggtaccgccaggacctgacagcttccgcttctttaccagggaatcccttgctgctattgaacaacgcattgcagaagagaaagctaagagacccaaacaggaacgcaaggatgaggatgatgaaaatggcccaaagccaaacagtgacttggaagcaggaaaatctcttccatttatttatggagacattcctccagagatggtgtcagtgcccctggaggatctggacccctactatatcaataagaaaacgtttatagtattgaataaagggaaagcaatctctcgattcagtgccacccctgccctttacattttaactcccttcaaccctattagaaaattagctattaagattttggtacattctttattcaatatgctcattatgtgcacgattcttaccaactgtgtatttatgaccatgagtaaccctccagactggacaaagaatgtggagtatacctttacaggaatttatacttttgaatcacttattaaaatacttgcaaggggcttttgtttagaagatttcacatttttacgggatccatggaattggttggatttcacagtcattacttttgcgtatgtaacagaatttgtaaacctaggcaatgtttcagctcttcgaactttcagagtcttgagagctttgaaaactatttctgtaattccaggcctgaagaccattgtgggggccctgatccagtcagtgaagaagctttctgatgtcatgatcttgactgtgttctgtctaagcgtgtttgcgctaataggattgcagttgttcatgggcaacctacgaaataaatgtttgcaatggcctccagataattcttcctttgaaataaatatcacttccttctttaacaattcattggatgggaatggtactactttcaataggacagtgagcatatttaactgggatgaatatattgaggataaaagtcacttttattttttagaggggcaaaatgatgctctgctttgtggcaacagctcagatgcaggccagtgtcctgaaggatacatctgtgtgaaggctggtagaaaccccaactatggctacacgagctttgacacctttagttgggcctttttgtccttatttcgtctcatgactcaagacttctgggaaaacctttatcaactgacactacgtgctgctgggaaaacgtacatgatattttttgtgctggtcattttcttgggctcattctatctaataaatttgatcttggctgtggtggccatggcctatgaggaacagaatcaggccacattggaagaggctgaacagaaggaagctgaatttcagcagatgctcgaacagttgaaaaagcaacaagaagaagctcaggcggcagctgcagccgcatctgctgaatcaagagacttcagtggtgctggtgggataggagttttttcagagagttcttcagtagcatctaagttgagctccaaaagtgaaaaagagctgaaaaacagaagaaagaaaaagaaacagaaagaacagtctggagaagaagagaaaaatgacagagtccgaaaatcggaatctgaagacagcataagaagaaaaggtttccgtttttccttggaaggaagtaggctgacatatgaaaagagattttcttctccacaccagtccttactgagcatccgtggctcccttttctctccaagacgcaacagtagggcgagccttttcagcttcagaggtcgagcaaaggacattggctctgagaatgactttgctgatgatgagcacagcacctttgaggacaatgacagccgaagagactctctgttcgtgccgcacagacatggagaacggcgccacagcaatgtcagccaggccagccgtgcctccagggtgctccccatcctgcccatgaatgggaagatgcatagcgctgtggactgcaatggtgtggtctccctggtcgggggcccttctaccctcacatctgctgggcagctcctaccagagggcacaactactgaaacagaaataagaaagagacggtccagttcttatcatgtttccatggatttattggaagatcctacatcaaggcaaagagcaatgagtatagccagtattttgaccaacaccatggaagaacttgaagaatccagacagaaatgcccaccatgctggtataaatttgctaatatgtgtttgatttgggactgttgtaaaccatggttaaaggtgaaacaccttgtcaacctggttgtaatggacccatttgttgacctggccatcaccatctgcattgtcttaaatacactcttcatggctatggagcactatcccatgacggagcagttcagcagtgtactgtctgttggaaacctggtcttcacagggatcttcacagcagaaatgtttctcaagataattgccatggatccatattattactttcaagaaggctggaatatttttgatggttttattgtgagccttagtttaatggaacttggtttggcaaatgtggaaggattgtcagttctccgatcattccggctgctccgagttttcaagttggcaaaatcttggccaactctaaatatgctaattaagatcattggcaattctgtgggggctctaggaaacctcaccttggtattggccatcatcgtcttcatttttgctgtggtcggcatgcagctctttggtaagagctacaaagaatgtgtctgcaagatttccaatgattgtgaactcccacgctggcacatgcatgactttttccactccttcctgatcgtgttccgcgtgctgtgtggagagtggatagagaccatgtgggactgtatggaggtcgctggccaaaccatgtgccttactgtcttcatgatggtcatggtgattggaaatctagtggttctgaacctcttcttggccttgcttttgagttccttcagttctgacaatcttgctgccactgatgatgataacgaaatgaataatctccagattgctgtgggaaggatgcagaaaggaatcgattttgttaaaagaaaaatacgtgaatttattcagaaagcctttgttaggaagcagaaagctttagatgaaattaaaccgcttgaagatctaaataataaaaaagacagctgtatttccaaccataccaccatagaaataggcaaagacctcaattatctcaaagacggaaatggaactactagtggcataggcagcagtgtagaaaaatatgtcgtggatgaaagtgattacatgtcatttataaacaaccctagcctcactgtgacagtaccaattgctgttggagaatctgactttgaaaatttaaatactgaagaattcagcagcgagtcagatatggaggaaagcaaagagaagctaaatgcaactagttcatctgaaggcagcacggttgatattggagctcccgccgagggagaacagcctgaggttgaacctgaggaatcccttgaacctgaagcctgttttacagaagactgtgtacggaagttcaagtgttgtcagataagcatagaagaaggcaaagggaaactctggtggaatttgaggaaaacatgctataagatagtggagcacaattggttcgaaaccttcattgtcttcatgattctgctgagcagtggggctctggcctttgaagatatatacattgagcagcgaaaaaccattaagaccatgttagaatatgctgacaaggttttcacttacatattcattctggaaatgctgctaaagtgggttgcatatggttttcaagtgtattttaccaatgcctggtgctggctagacttcctgattgttgatgtctcactggttagcttaactgcaaatgccttgggttactcagaacttggtgccatcaaatccctcagaacactaagagctctgaggccactgagagctttgtcccggtttgaaggaatgagggttgttgtaaatgctcttttaggagccattccatctatcatgaatgtacttctggtttgtctgatcttttggctaatattcagtatcatgggagtgaatctctttgctggcaagttttaccattgtattaattacaccactggagagatgtttgatgtaagcgtggtcaacaactacagtgagtgcaaagctctcattgagagcaatcaaactgccaggtggaaaaatgtgaaagtaaactttgataacgtaggacttggatatctgtctctacttcaagtagccacgtttaagggatggatggatattatgtatgcagctgttgattcacgaaatgtagaattacaacccaagtatgaagacaacctgtacatgtatctttattttgtcatctttattatttttggttcattctttaccttgaatcttttcattggtgtcatcatagataacttcaaccaacagaaaaagaagtttggaggtcaagacatttttatgacagaagaacagaagaaatactacaatgcaatgaaaaaactgggttcaaagaaaccacaaaaacccatacctcgacctgctaacaaattccaaggaatggtctttgattttgtaaccaaacaagtctttgatatcagcatcatgatcctcatctgccttaacatggtcaccatgatggtggaaaccgatgaccagagtcaagaaatgacaaacattctgtactggattaatctggtgtttattgttctgttcactggagaatgtgtgctgaaactgatctctcttcgttactactatttcactattggatggaatatttttgattttgtggtggtcattctctccattgtaggaatgtttctggctgaactgatagaaaagtattttgtgtcccctaccctgttccgagtgatccgtcttgccaggattggccgaatcctacgtctgatcaaaggagcaaaggggatccgcacgctgctctttgctttgatgatgtcccttcctgcgttgtttaacatcggcctccttcttttcctggtcatgttcatctacgccatctttgggatgtccaattttgcctatgttaagagggaagttgggatcgatgacatgttcaactttgagacctttggcaacagcatgatctgcctgttccaaattacaacctctgctggctgggatggattgctagcacctattcttaatagtggacctccagactgtgaccctgacaaagatcaccctggaagctcagttaaaggagactgtgggaacccatctgttgggattttcttttttgtcagttacatcatcatatccttcctggttgtggtgaacatgtacatcgcggtcatcctggagaacttcagtgttgctactgaagaaagtgcagagcctctgagtgaggatgactttgagatgttctatgaggtttgggagaagtttgatcccgatgcgacccagtttatagagtttgccaaactttctgattttgcagatgccctggatcctcctcttctcatagcaaaacccaacaaagtccagctcattgccatggatctgcccatggtgagtggtgaccggatccactgtcttgacatcttatttgcttttacaaagcgtgttttgggtgagagtggagagatggatgcccttcgaatacagatggaagagcgattcatggcatcaaacccctccaaagtctcttatgagcccattacgaccacgttgaaacgcaaacaagaggaggtgtctgctattattatccagagggcttacagacgctacctcttgaagcaaaaagttaaaaaggtatcaagtatatacaagaaagacaaaggcaaagaatgtgatggaacacccatcaaagaagatactctcattgataaactgaatgagaattcaactccagagaaaaccgatatgacgccttccaccacgtctccaccctcgtatgatagtgtgaccaaaccagaaaaagaaaaatttgaaaaagacaaatcagaaaaggaagacaaagggaaagatatcagggaaagtaaaaagtaaaaagaaaccaagaattttccattttgtgatcaattgtttacagcccgtgatggtgatgtgtttgtgtcaacaggactcccacaggaggtctatgccaaactgactgtttttacaaatgtatacttaaggtcagtgcctataacaagacagagacctctggtcagcaaactggaactcagtaaactggagaaatagtatcgatgggaggtttctattttcacaaccagctgacactgctgaagagcagaggcgtaatggctactcagacgataggaaccaatttaaaggggggagggaagttaaatttttatgtaaattcaacatgtgacacttgataatagtaattgtcaccagtgtttatgttttaactgccacacctgccatatttttacaaaacgtgtgctgtgaatttatcacttttctttttaattcacaggttgtttactattatatgtgactatttttgtaaatgggtttgtgtttggggagagggattaaagggagggaattctacatttctctattgtattgtataactggatatattttaaatggaggcatgctgcaattctcattcacacataaaaaaatcacatcacaaaagggaagagtttacttcttgtttcaggatgtttttagatttttgaggtgcttaaatagctattcgtatttttaaggtgtctcatccagaaaaaatttaatgtgcctgtaaatgttccatagaatcacaagcattaaagagttgttttatttttacataacccattaaatgtacatgtatatatgtatatatgtatatgtgcgtgtatatacatatatatgtatacacacatgcacacacagagatatacacataccattacattgtcattcacagtcccagcagcatgactatcacatttttgataagtgtcctttggcataaaataaaaatatcctatcagtcctttctaagaagcctgaattgaccaaaaaacatccccaccaccactttataaagttgattctgctttatcctgcagtattgtttagccatcttctgctcttggtaaggttgacatagtatatgtcaatttaaaaaataaaagtctgctttgtaaatagtaattttacccagtggtgcatgtttgagcaaacaaaaatgatgatttaagcacactacttattgcatcaaatatgtaccacagtaagtatagtttgcaagctttcaacaggtaatatgatgtaattggttccattatagtttgaagctgtcactgctgcatgtttatcttgcctatgctgctgtatcttattccttccactgttcagaagtctaatatgggaagccatatatcagtggtaaagtgaagcaaattgttctaccaagacctcattcttcatgtcattaagcaataggttgcagcaaacaaggaagagcttcttgctttttattcttccaaccttaattgaacactcaatgatgaaaagcccgactgtacaaacatgttgcaagctgcttaaatctgtttaaaatatatggttagagttttctaagaaaatataaatactgtaaaaagttcattttattttatttttcagccttttgtacgtaaaatgagaaattaaaagtatcttcaggtggatgtcacagtcactattgttagtttctgttcctagcacttttaaattgaagcacttcacaaaataagaagcaaggactaggatgcagtgtaggtttctgcttttttattagtactgtaaacttgcacacatttcaatgtgaaacaaatctcaaactgagttcaatgtttatttgctttcaatagtaatgccttatcattgaaagaggcttaaagaaaaaaaaaatcagctgatactcttggcattgcttgaatccaatgtttccacctagtctttttattcagtaatcatcagtcttttccaatgtttgtttacacagatagatcttattgacccatatggcactagaactgtatcagatataatatgggatcccagctttttttcctctcccacaaaaccaggtagtgaagttatattaccagttacagcaaaatactttgtgtttcacaagcaacaataaatgtagattctttatactgaagctattgacttgtagtgtgttggtgaaatgcatgcaggaaaatgctgttaccataaagaacggtaaaccacattacaatcaagccaaaagaataaaggtttcgcttttgtttttgtatttaattgttgtctttgtttctatctttgaaatgccatttaaaggtagatttctatcatgtaaaaataatctatctgaaaaacaaatgtaaagaacacacattaattactataattcatctttcaattttttcatggaatggaagttaattaagaagagtgtattggataactactttaatattggccaaaaagctagatatggcatcaggtagactagtggaaagttacaaaaattaataaaaaattgactaacatttt

SEQ ID NO: 18492 - DNA, 5826 bp, Homo sapiens
  source 1..5826: mol_type = unassigned DNA
ttttctctcccccccatctctctctctctcctttacacactccctctctctctctttttagcagcaacatacaagccggccatattagagagatggaaataaagcttccttaatgttgtatatgtctttgaagtacatccgtgcatttttttttagcatccaaccattcctcccttgtagttctcgccccctcaaatcaccctctcccgtagcccacccgactaacatctcagtctctgaaaatgcacagagatgcctggctacctcgccctgccttcagcctcacggggctcagtctctttttctctttggtgccaccaggacggagcatggaggtcacagtacctgccaccctcaacgtcctcaatggctctgacgcccgcctgccctgcaccttcaactcctgctacacagtgaaccacaaacagttctccctgaactggacttaccaggagtgcaacaactgctctgaggagatgttcctccagttccgcatgaagatcattaacctgaagctggagcggtttcaagaccgcgtggagttctcagggaaccccagcaagtacgatgtgtcggtgatgctgagaaacgtgcagccggaggatgaggggatttacaactgctacatcatgaacccccctgaccgccaccgtggccatggcaagatccatctgcaggtcctcatggaagagccccctgagcgggactccacggtggccgtgattgtgggtgcctccgtcgggggcttcctggctgtggtcatcttggtgctgatggtggtcaagtgtgtgaggagaaaaaaagagcagaagctgagcacagatgacctgaagaccgaggaggagggcaagacggacggtgaaggcaacccggatgatggcgccaagtagtgggtggccggccctgcagcctcccgtgtcccgtctcctcccctctccgccctgtacagtgaccctgcctgctcgctcttggtgtgcttcccgtgacctaggaccccagggcccacctggggcctcctgaacccccgacttcgtatctcccaccctgcaccaagagtgacccactctcttccatccgagaaacctgccatgctctgggacgtgtgggccctggggagaggagagaaagggctcccacctgccagtccctggggggaggcaggaggcacatgtgagggtccccagagagaagggagtgggtgggcaggggtagaggagggggccgctgtccacctgcccagtgcttggcctggcagtggcttcagagaggacctggtggggagggagggctttcctgtgctgacagcgctccctcaggagggccttggcctggcacggctgtgctcctcccctgctcccagcccagagcagccatcaggctggaggtgacgatgagttcctgaaacttggaggggcatgttaaagggatgactgtgcattccagggcactgacggaaagccagggctgcaggcaaagctggacatgtgccctggcccaggaggccatgttgggccctcgtttccattgctagtggcctccttggggctcccgttggctcctaatcccttaggactgtggatgaggccagactggaagagcagctccaggtagggggccatgtttcccagcggggacccaccaacagaggccagtttcaaagtcagctgaggggctgaggggtggggctccatggtgaatgcaggttgctgcaggctctgccttctccatggggtaaccaccctcgcctgggcaggggcagccaaggctgggaaatgaggaggccatgcacagggtggggcagctttctttggggcttcagtgagaactctcccagttgcccttggtggggtttccacctggcttttggctacagagagggaagggaaagcctgaggccggcataaggggaggccttggaacctgagctgccaatgccagccctgtcccatctgcagccacactactcgctcctctcccaacaactcccttcgtggggacaaaagtgacaattgtaggccaggcacagtggctcacgcctgtaatcccagcactttgggaggccaaggcgggtggattacctccatctgtttagtagaaatgggcaaaaccccatctctactaaaaatacaagaattagctgggcgtggtggcgtgtgcctgtaatcccagctatttgggaggctgaggcaggagaatcgcttgagcccgggaagcagaggttgcagtgaactgagatagtgatagtgccactgcaattcagcctgggtgacatagagagactccatctcaaaaaaaaaaaaaaaaaaaaaaaaaggcaattgtgcggagccaaccatcactgccattacactcacattcaatggaaattgattaggcctgagagaaggagcaagaggcagaaacactgactctgagaccatgaccttggaagatcctcagagatcaactagccaagtcactcacttaaaatggggaaactgaggttccaactgacagaaactgagggtcctgccctcttctctggctcctcagtctccagtttgaagcaacagagccatcattttcccagtgggaggggcctctgtgtcctggtctatgatggggcgagttggaggggtgggcttctctagccctgccccctcccaggagcccagcccctctggccaggactgaggaggagtggagggaagcagggagggagggagcaagtgtgaagggcacagctgctggcaaatgccccattccctgccccagcacttcccagcctttccaggagctctgccccacccctactcaaggagtcaggtgcccagggtagggaataagtctaggaaagggggtggagacaggaccgtgacagtctcagggaccaatccctgcctctgcccatcagattgccaatttggggagacagcaatatcatctgggagattcagcttaatttgcttcaattcagcaaccatttattgagcatctattatgtgccaggcactgtgccgggcactggggatatacacaaagccataagcactggggactgccaggttggcactgtagggaccaagattaactttttggtgcatctaattccacctctgcaagacactgcttccaaggctacagttggggaagatgaagagattctagaatctgtgccctgggaagggagaaacagcagggaagaggggcaatacaacagggtcaagggtgcagaggccaggcagagtgggtgcagagtgggggatgggcaaccagcctggtaacacctgggtgaggtgagcgagtcaagcccatctggaaatgctaaactcatcagctcagtacctaactgccaatcaacacactgccaatgcgggtgggctaagccgccaggatgcctgcagcagatggacgctgcccatccttgagccagccagctgggggcagagaggtgggtggcgggcacctcatgccagctgagaccaagagtggttgtatacatttctgcagcttgcagatttcatttttttggtcaccctttaagtgtccttctctcccaggatgagtgaggagctgtgctgatgttgggaacttatctttttccaggatccataacatttaggggaattatttgcgggctttcctagtgtattctaagaagttctaactctccatcaagaagcccaagattcctggagtctttttttcctctgccctgatcaactggggcccaggaaaagcaatgtctcttcacgggcctcagggccccagcagatggggctgggtcaggaaccatctctgtcccaggtgctcagccctcatatgcattttcttctggagcctcttagaatctcctccagaggactcatagagctgcctcccccaggatggtgaagttgggagcaaaatggggcttctgtaagtagaggtggaaaaccagagagatgtttccacagcagccatttccctaccctgtttcctaacttatgctgacaagttcttcctcttcctaccgtggggttcgagccccacttctggttgcatgttcccaccaccacgctctgctggttttagtcggctgactttctcaactgccccagcctctcctgctctctcagaacctccctctgcccccaccccccatctgtctcttcctcctaattaagggccactgcaaagagagacgggctggctaacccatgggatttagcttataagaacaaagcacaattattcaggactgaactgctttgaggtgccttggaactggctttggaaatagctatctgccccctagctatggactcttcacagttatttccagtttataaaaaggaaaagctgatcggatccatgtttctctctgcgagtctccttggggaggttgggctggtaaatatttgcaaggtcaggttaagcagacagacaattgaaaatactgggcaggtccaaaaggatagttccaggccataggaatggcttggtgcagttaacgggtgatgaagcaagaaatcttccttcctacttatgtcttaaagatggacagcctgtgtctcttgctgtgcctcttgctggcgtcttcctttattgaagcttgctgatgcactgtacatagtctctctctctaggtatagatatattatatatacaaatatcaaacatctcaccacacccaccccaaaagttacactgtgtgtgtgtggggaggtgtaataacttctcagtgttttgagttgattcaccaaaggcaaattttggaatgttcttgcgctttgtgcacttggaggggaaaacccaactacatatgcactttcttggttgtgtgtgctatagagaggttggaaggggtggttggaaggggagagaaactgagatggccctctgtgactcgactgctgggatgtatctgcttttgggagcagactgagtttcttttgcaatttgtcttattgtttgggtctactggcaacaataaactatctcccctgaaaatccctcgagtgtggctttattcaggggttcagggcagggtaggctgatgcttcaccaggatcttaactggaaccctaggtgctcctttcctggtaatcccattggcgctgccagatctccagcatctgagggcctcaatgcccctgcctcacaaggggaaggttgtctaccccacacttgtgcccccacagatgtttcatccctttgccttccccaaccccctggggactccgctcaccctggaacagagtggctgaacacctacttcttggagggctctcgattattttggggatgaagacaaccccggaagctcccaaggctgactgtcatgcggatgttgcctgtcctttgcatgggcagacaggccatccttcctgctctgttccccaaaggtgttggattagacatttcttttgcctcctctggactcagaaagaatagatgacagctggtcagagtctgccctcatgcagttcatggagaagggtggctgtgggaaggttcaggtggctcatgtcccatctacatactgctggatcctatatatatgtgccaaagcagccctaagaagtttaggaccaagggcaacctcctggctaggggctccactgtcccagacaggcctttttttctcccttgctcttcattcttccgtctctttgcatttctccctctctcccttgcaccgctctctctctctctctctctctctctctgtctgtctgtctctctctctcttgcctaggaggcttaccaggcttaccttcctcttcctactctggggttcgagccccacttctggctgcatgctccggccaccacgctctggtggtttcagtctgctgactttct

SEQ ID NO: 18493 - DNA, 4480 bp, Homo sapiens
  source 1..4480: mol_type = unassigned DNA
agtcctttccaggggagaaatggagaatgatggagggtggcccaggcggtgctgattggagtagacagccatcctcccgaggttggcactgagggtgatagagacctacctgcctggccaagctactccgccctgcctaagcatccccttccagagctccaggctggtggggttttattaagggaggcggtgctccttacacaggcctcttcctgctccccgtaaccctgtcgctggaggtgtctgtgggaaaggccaccgacatctacgctgtcaatggcacggagatcctgctgccctgcaccttctccagctgctttggcttcgaggacctccacttccggtggacctacaacagcagtgacgcattcaagattctcatagaggggactgtgaagaatgagaagtctgaccccaaggtgacgttgaaagacgatgaccgcatcactctggtaggctctactaaggagaagatgaacaacatttccattgtgctgagggacctggagttcagcgacacgggcaaatacacctgccatgtgaagaaccccaaggagaataatctccagcaccacgccaccatcttcctccaagtcgttgatagactggaagaagtggacaacacagtgacactcatcatcctggctgtcgtgggcggggtcatcgggctcctcatcctcatcctgctgatcaagaaactcatcatcttcatcctgaagaagactcgggagaagaagaaggagtgtctcgtgagctcctcggggaatgacaacacggagaacggcttgcctggctccaaggcagaggagaaaccaccttcaaaagtgtgagccctgcttcgggctgagcagctgcagggagccccctttctgatgatgaaactgatgcttgagccccgaccgtagaacccacgtgcctgagacatctgctgcttggctcaaactgtagtctttccgggcacaagaaaccagagtcctgcccagcctgcccatccccttcccagtcagggctccccagggacaagggatggccaggggagggggtctgtggaagattcaggagaaagaaaggagaggctagggtggtgtggaggggctggtcccctgacacctgggcagatggggtctccttcagtctccctaccctgcacaagcagggccttgattttcctccaggcttctcttcacaagagactgggaggatccgtaagggatgtcctaagagctgcaccctggagatggggtgtaggaagaagtggcttcctttggaggtgggagtgggctggaggcctctggagaagacctggggtgggggctgatgggggcaggcccacagtgagagactgcctctgcttcataggataccagatcccccacagtcttccaagtaggaaacttcctttcccctgccccgggaccctatctgcctatcccctcccctgctcagagtttttaagccctctcaaccagggctggccaccctggtcttgagggttcctggccacctagcctgctcctctgctctctgggttactgaggggctcaggaaggggcccctcgagccttcctggagtacccgagtgctccctatgcctttccaagcatttctacttggggaattgggccacagaggtagtgagccagtgtcctgggcctctgggatgcccgccccattgctgccaatgctggcagcccctcccctggcatggcaggaccatcgccactctgggcactcctgagcccagctctcccctgcttctccccctcctacctgagaggctgcaccctccaacctcccattggctcgctcccccccccccaccgtgccctccatcacgccctgcccccagggtggttcatttcccagccctgggtcaagggcctgccttcgcctcagggactctcttcctttggatgagggggtccttgggtttcccagctgcttcctgctcagctgggccaccccctcccaccctggggttggggaggagcagggagtgggtgcccacagttttcctttgcttctcccagagctggtttgcacagcccttgtgtgtggggctagaatgtgccttagtcctgaatcctagcccttacccccatcctctctagacggtatgtcctgacataacagcagagtctggtgtggtgctggtgagggttcgccagccctcccctccccagggtcatagagggggccatgaggctggaattggccagtgactgaatcttggagatgtcggccaggtgctcccattggggtttctagcctgccctagggggaggtggtgatgttgggagtgggatctcctgagtccttgttgggcagaattggtgaggccagggatggcagggaaaagtggtaacaagcctctctgcccatctacttccaatccctctctcccttactgattttttgatgccctgtcttctgggcccctaggagggatgagagaggagtagccccctttttcagagagtttggggtctacctcagagctctccctgtcaaaaagcagctgcaagcctcgcaagggtggagtggggggagactgaggaccagtagtacctgcagggtgcccgtggctgtggccagtgtcccttagccaacctgctgggctcaccagttccccgtctgatctgcctgtgcgcctcccattcttctctacccagaacctgtcatgggctggggctcagattttcctggctttgggagcagacagaccagagccaccagccattcagaaaacttcttatagctaccttcatgcaaaactgttttcttcttccttctcaatggtgacatttgaagaggcagagcaccttggggctcctccttctgtcttaagagaaagccaaggcacgtagagtagggagaagaagggcaccatcctctctttcctccccagggtctactgctgatttctagatggatcatgcagcttctctcagctcagctctttccatctaccaaatgggtgtaataatacttacctacctcacaggactgttgtgaggcttggcaagttttgtctaaaaacatctttttggcttggaaagggatctgggaagccaggtattaattgcagggatagttccaagtctgtcctgtcttcatctctgtgtcccatctctacaacccacatacagacacacacactctctctctctttctttccatcccaccccccttggaattatttagtctttgcaatattagaaaccttgactctgatgcttaaagcttcttgtccatggcttttgtttgatggttttcaatagaggtgactgagattgtagggggggcatttttggttgcccccatgcgtgggggcactactaagaatgctaaacttagtccccacaacaaagaatcatcctgtcccatgtcaacattatacccatggagaaacactggcatggatttgcactaggatgtatatgggcaaagctatcttccccaagtggaacctcagtgcatgcaaatctctgatggtggcttccagggcttgtgggctagagagagccacttacaaagtcgatcttgagagacctggccacatgcagctgggctgagtgatgtcagcgagactaaagacaaagttctgagctcctcatcaactacaaaatatgaaatcagcattccaggttctgggcttctccccatgtcgtaattgaacagaaggcagcccgaataaacccctgatgttagagaggcctggggagagcagccgatggggctcagactacatatggcaggccgatcagagctcttgtggagcgagggcttgagagcatgcttgtgagatggcaggaggtggggtgtgcttgtgtggagtgtgcgtgtgcaggcagtgtgggtgcatggcagcgtaactgtggagtggatgggctctgcatgtaaggggtgatgcatgatgggcagatgctggacatttgaggagccgtctttcttggcctgagctatgcctgttgaggcatctggagactgagaaagaatcaaaggcagagaagaccagccgtgctcctgcattccgtcactccatgacttcatctcagtgtcacagacagctgccatcagagggctggcagtagggagttccaggagcggggacttctcgggaaaatcctataacttgctttactttactttgtcccaggttggagtccctaccctcccacctcccacctgatatgcagtgcttttgactatcttatgcatggtttattcctctggcttggatgacaacaatacccatagtcaattttcctatgtaactatagatcaaatgatgcaacaacaggccttgggaggcctcaggtgtgcgagtgcctctgggaggcgcagatgcccacacagccagcactgacttgtgttcgagcacagaacggatataatcagtctggcctctacaacaagttttgcattgtagaattgtatttagctttgccttggatgaaataaaaattatgtttaataa

SEQ ID NO: 18494 - DNA, 4484 bp, Homo sapiens
  source 1..4484: mol_type = unassigned DNA
ctctgcccgctaactttcccgagccccgaccggcggcgcagagctccggggtagctttgtggccgaacgccgacctcgggcggagagcgcggctgtgcccagtatcccatccccgcgacccccgcgcgctccggagagaacaggactatgcccggggctggggacggaggcaaagccccggcgagatggctgggcactgggcttttgggcctcttcctgctccccgtaaccctgtcgctggaggtgtctgtgggaaaggccaccgacatctacgctgtcaatggcacggagatcctgctgccctgcaccttctccagctgctttggcttcgaggacctccacttccggtggacctacaacagcagtgacgcattcaagattctcatagaggggactgtgaagaatgagaagtctgaccccaaggtgacgttgaaagacgatgaccgcatcactctggtaggctctactaaggagaagatgaacaacatttccattgtgctgagggacctggagttcagcgacacgggcaaatacacctgccatgtgaagaaccccaaggagaataatctccagcaccacgccaccatcttcctccaagtcgttgatagactggaagaagtggacaacacagtgacactcatcatcctggctgtcgtgggcggggtcatcgggctcctcatcctcatcctgctgatcaagaaactcatcatcttcatcctgaagaagactcgggagaagaagaaggagtgtctcgtgagctcctcggggaatgacaacacggagaacggcttgcctggctccaaggcagaggagaaaccaccttcaaaagtgtgagccctgcttcgggctgagcagctgcagggagccccctttctgatgatgaaactgatgcttgagccccgaccgtagaacccacgtgcctgagacatctgctgcttggctcaaactgtagtctttccgggcacaagaaaccagagtcctgcccagcctgcccatccccttcccagtcagggctccccagggacaagggatggccaggggagggggtctgtggaagattcaggagaaagaaaggagaggctagggtggtgtggaggggctggtcccctgacacctgggcagatggggtctccttcagtctccctaccctgcacaagcagggccttgattttcctccaggcttctcttcacaagagactgggaggatccgtaagggatgtcctaagagctgcaccctggagatggggtgtaggaagaagtggcttcctttggaggtgggagtgggctggaggcctctggagaagacctggggtgggggctgatgggggcaggcccacagtgagagactgcctctgcttcataggataccagatcccccacagtcttccaagtaggaaacttcctttcccctgccccgggaccctatctgcctatcccctcccctgctcagagtttttaagccctctcaaccagggctggccaccctggtcttgagggttcctggccacctagcctgctcctctgctctctgggttactgaggggctcaggaaggggcccctcgagccttcctggagtacccgagtgctccctatgcctttccaagcatttctacttggggaattgggccacagaggtagtgagccagtgtcctgggcctctgggatgcccgccccattgctgccaatgctggcagcccctcccctggcatggcaggaccatcgccactctgggcactcctgagcccagctctcccctgcttctccccctcctacctgagaggctgcaccctccaacctcccattggctcgctcccccccccccaccgtgccctccatcacgccctgcccccagggtggttcatttcccagccctgggtcaagggcctgccttcgcctcagggactctcttcctttggatgagggggtccttgggtttcccagctgcttcctgctcagctgggccaccccctcccaccctggggttggggaggagcagggagtgggtgcccacagttttcctttgcttctcccagagctggtttgcacagcccttgtgtgtggggctagaatgtgccttagtcctgaatcctagcccttacccccatcctctctagacggtatgtcctgacataacagcagagtctggtgtggtgctggtgagggttcgccagccctcccctccccagggtcatagagggggccatgaggctggaattggccagtgactgaatcttggagatgtcggccaggtgctcccattggggtttctagcctgccctagggggaggtggtgatgttgggagtgggatctcctgagtccttgttgggcagaattggtgaggccagggatggcagggaaaagtggtaacaagcctctctgcccatctacttccaatccctctctcccttactgattttttgatgccctgtcttctgggcccctaggagggatgagagaggagtagccccctttttcagagagtttggggtctacctcagagctctccctgtcaaaaagcagctgcaagcctcgcaagggtggagtggggggagactgaggaccagtagtacctgcagggtgcccgtggctgtggccagtgtcccttagccaacctgctgggctcaccagttccccgtctgatctgcctgtgcgcctcccattcttctctacccagaacctgtcatgggctggggctcagattttcctggctttgggagcagacagaccagagccaccagccattcagaaaacttcttatagctaccttcatgcaaaactgttttcttcttccttctcaatggtgacatttgaagaggcagagcaccttggggctcctccttctgtcttaagagaaagccaaggcacgtagagtagggagaagaagggcaccatcctctctttcctccccagggtctactgctgatttctagatggatcatgcagcttctctcagctcagctctttccatctaccaaatgggtgtaataatacttacctacctcacaggactgttgtgaggcttggcaagttttgtctaaaaacatctttttggcttggaaagggatctgggaagccaggtattaattgcagggatagttccaagtctgtcctgtcttcatctctgtgtcccatctctacaacccacatacagacacacacactctctctctctttctttccatcccaccccccttggaattatttagtctttgcaatattagaaaccttgactctgatgcttaaagcttcttgtccatggcttttgtttgatggttttcaatagaggtgactgagattgtagggggggcatttttggttgcccccatgcgtgggggcactactaagaatgctaaacttagtccccacaacaaagaatcatcctgtcccatgtcaacattatacccatggagaaacactggcatggatttgcactaggatgtatatgggcaaagctatcttccccaagtggaacctcagtgcatgcaaatctctgatggtggcttccagggcttgtgggctagagagagccacttacaaagtcgatcttgagagacctggccacatgcagctgggctgagtgatgtcagcgagactaaagacaaagttctgagctcctcatcaactacaaaatatgaaatcagcattccaggttctgggcttctccccatgtcgtaattgaacagaaggcagcccgaataaacccctgatgttagagaggcctggggagagcagccgatggggctcagactacatatggcaggccgatcagagctcttgtggagcgagggcttgagagcatgcttgtgagatggcaggaggtggggtgtgcttgtgtggagtgtgcgtgtgcaggcagtgtgggtgcatggcagcgtaactgtggagtggatgggctctgcatgtaaggggtgatgcatgatgggcagatgctggacatttgaggagccgtctttcttggcctgagctatgcctgttgaggcatctggagactgagaaagaatcaaaggcagagaagaccagccgtgctcctgcattccgtcactccatgacttcatctcagtgtcacagacagctgccatcagagggctggcagtagggagttccaggagcggggacttctcgggaaaatcctataacttgctttactttactttgtcccaggttggagtccctaccctcccacctcccacctgatatgcagtgcttttgactatcttatgcatggtttattcctctggcttggatgacaacaatacccatagtcaattttcctatgtaactatagatcaaatgatgcaacaacaggccttgggaggcctcaggtgtgcgagtgcctctgggaggcgcagatgcccacacagccagcactgacttgtgttcgagcacagaacggatataatcagtctggcctctacaacaagttttgcattgtagaattgtatttagctttgccttggatgaaataaaaattatgtttaataa

SEQ ID NO: 18495 - DNA, 3969 bp, Homo sapiens
  source 1..3969: mol_type = unassigned DNA
ctttctgtctgggcttctgtcacccagcttgtactcagccttttcagaaggaagagaacgggcatttgtggagcgttttctgggtgccagatcccgatggaagaagtggacaacacagtgacactcatcatcctggctgtcgtgggcggggtcatcgggctcctcatcctcatcctgctgatcaagaaactcatcatcttcatcctgaagaagactcgggagaagaagaaggagtgtctcgtgagctcctcggggaatgacaacacggagaacggcttgcctggctccaaggcagaggagaaaccaccttcaaaagtgtgagccctgcttcgggctgagcagctgcagggagccccctttctgatgatgaaactgatgcttgagccccgaccgtagaacccacgtgcctgagacatctgctgcttggctcaaactgtagtctttccgggcacaagaaaccagagtcctgcccagcctgcccatccccttcccagtcagggctccccagggacaagggatggccaggggagggggtctgtggaagattcaggagaaagaaaggagaggctagggtggtgtggaggggctggtcccctgacacctgggcagatggggtctccttcagtctccctaccctgcacaagcagggccttgattttcctccaggcttctcttcacaagagactgggaggatccgtaagggatgtcctaagagctgcaccctggagatggggtgtaggaagaagtggcttcctttggaggtgggagtgggctggaggcctctggagaagacctggggtgggggctgatgggggcaggcccacagtgagagactgcctctgcttcataggataccagatcccccacagtcttccaagtaggaaacttcctttcccctgccccgggaccctatctgcctatcccctcccctgctcagagtttttaagccctctcaaccagggctggccaccctggtcttgagggttcctggccacctagcctgctcctctgctctctgggttactgaggggctcaggaaggggcccctcgagccttcctggagtacccgagtgctccctatgcctttccaagcatttctacttggggaattgggccacagaggtagtgagccagtgtcctgggcctctgggatgcccgccccattgctgccaatgctggcagcccctcccctggcatggcaggaccatcgccactctgggcactcctgagcccagctctcccctgcttctccccctcctacctgagaggctgcaccctccaacctcccattggctcgctcccccccccccaccgtgccctccatcacgccctgcccccagggtggttcatttcccagccctgggtcaagggcctgccttcgcctcagggactctcttcctttggatgagggggtccttgggtttcccagctgcttcctgctcagctgggccaccccctcccaccctggggttggggaggagcagggagtgggtgcccacagttttcctttgcttctcccagagctggtttgcacagcccttgtgtgtggggctagaatgtgccttagtcctgaatcctagcccttacccccatcctctctagacggtatgtcctgacataacagcagagtctggtgtggtgctggtgagggttcgccagccctcccctccccagggtcatagagggggccatgaggctggaattggccagtgactgaatcttggagatgtcggccaggtgctcccattggggtttctagcctgccctagggggaggtggtgatgttgggagtgggatctcctgagtccttgttgggcagaattggtgaggccagggatggcagggaaaagtggtaacaagcctctctgcccatctacttccaatccctctctcccttactgattttttgatgccctgtcttctgggcccctaggagggatgagagaggagtagccccctttttcagagagtttggggtctacctcagagctctccctgtcaaaaagcagctgcaagcctcgcaagggtggagtggggggagactgaggaccagtagtacctgcagggtgcccgtggctgtggccagtgtcccttagccaacctgctgggctcaccagttccccgtctgatctgcctgtgcgcctcccattcttctctacccagaacctgtcatgggctggggctcagattttcctggctttgggagcagacagaccagagccaccagccattcagaaaacttcttatagctaccttcatgcaaaactgttttcttcttccttctcaatggtgacatttgaagaggcagagcaccttggggctcctccttctgtcttaagagaaagccaaggcacgtagagtagggagaagaagggcaccatcctctctttcctccccagggtctactgctgatttctagatggatcatgcagcttctctcagctcagctctttccatctaccaaatgggtgtaataatacttacctacctcacaggactgttgtgaggcttggcaagttttgtctaaaaacatctttttggcttggaaagggatctgggaagccaggtattaattgcagggatagttccaagtctgtcctgtcttcatctctgtgtcccatctctacaacccacatacagacacacacactctctctctctttctttccatcccaccccccttggaattatttagtctttgcaatattagaaaccttgactctgatgcttaaagcttcttgtccatggcttttgtttgatggttttcaatagaggtgactgagattgtagggggggcatttttggttgcccccatgcgtgggggcactactaagaatgctaaacttagtccccacaacaaagaatcatcctgtcccatgtcaacattatacccatggagaaacactggcatggatttgcactaggatgtatatgggcaaagctatcttccccaagtggaacctcagtgcatgcaaatctctgatggtggcttccagggcttgtgggctagagagagccacttacaaagtcgatcttgagagacctggccacatgcagctgggctgagtgatgtcagcgagactaaagacaaagttctgagctcctcatcaactacaaaatatgaaatcagcattccaggttctgggcttctccccatgtcgtaattgaacagaaggcagcccgaataaacccctgatgttagagaggcctggggagagcagccgatggggctcagactacatatggcaggccgatcagagctcttgtggagcgagggcttgagagcatgcttgtgagatggcaggaggtggggtgtgcttgtgtggagtgtgcgtgtgcaggcagtgtgggtgcatggcagcgtaactgtggagtggatgggctctgcatgtaaggggtgatgcatgatgggcagatgctggacatttgaggagccgtctttcttggcctgagctatgcctgttgaggcatctggagactgagaaagaatcaaaggcagagaagaccagccgtgctcctgcattccgtcactccatgacttcatctcagtgtcacagacagctgccatcagagggctggcagtagggagttccaggagcggggacttctcgggaaaatcctataacttgctttactttactttgtcccaggttggagtccctaccctcccacctcccacctgatatgcagtgcttttgactatcttatgcatggtttattcctctggcttggatgacaacaatacccatagtcaattttcctatgtaactatagatcaaatgatgcaacaacaggccttgggaggcctcaggtgtgcgagtgcctctgggaggcgcagatgcccacacagccagcactgacttgtgttcgagcacagaacggatataatcagtctggcctctacaacaagttttgcattgtagaattgtatttagctttgccttggatgaaataaaaattatgtttaat

SEQ ID NO: 18496 - DNA, 1206 bp, Homo sapiens
  source 1..1206: mol_type = unassigned DNA
gatgaagaaactgaggctaggagggttcaatgacctgcccaacattgccagctagttagtgacagttaaatcccatgcttaaaattcagactatctgactccaaaatcttctcaccatctaagaggtatcatagggaggttcttaattttttctgtgtgagcaaaggggtctagaaagaggcaatgaaattttcgcctggcaatttggggatcaagtcaccactcaaacttgagtgttataggctccaattctgatttattccagaactcgtgtgagtgcatctgtgggagggcatgtgcagggtgggggagagggccccttatgtgtgccctagcctgatagatgccatgctctgcctctccagcttcctgctgcaggcctggggagggctgggggtctgggagtggatgtgccccggatgccagggggtggaggctacatggcccttgcactgccacagttctcggctccaggttgactcttgctccctttgtgccttccctttcctccctactcgggccacacagtggaagaagtggacaacacagtgacactcatcatcctggctgtcgtgggcggggtcatcgggctcctcatcctcatcctgctgatcaagaaactcatcatcttcatcctgaagaagactcgggagaagaagaaggagtgtctcgtgagctcctcggggaatgacaacacggagaacggcttgcctggctccaaggcagaggagaaaccaccttcaaaagtgtgagccctgcttcgggctgagcagctgcagggagccccctttctgatgatgaaactgatgcttgagccccgaccgtagaacccacgtgcctgagacatctgctgcttggctcaaactgtagtctttccgggcacaagaaaccagagtcctgcccagcctgcccatccccttcccagtcagggctccccagggacaagggatggccaggggagggggtctgtggaagattcaggagaaagaaaggagaggctagggtggtgtggaggggctggtcccctgacacctgggcagatggggtctccttcagtctccctaccctgcacaagcagggccttgattttcctccaggcttctcttcacaagagactgggaggatccgtaagggatgtcctaagagctgcaccctggagatggggtgtaggaagaagtggcttcctttggaggtgggagtgggctg

SEQ ID NO: 18497 - DNA, 566 bp, Homo sapiens
  source 1..566: mol_type = unassigned DNA
agcagccggctcccagcagcgggcgagcgcgcctccccctccgctccctccctccccctcctctcgctctctgcccgctaactttcccgagccccgaccggcggcgcagagctccggggtagctttgtggccgaacgccgacctcgggcggagagcgcggctgtgcccagtatcccatccccgcgacccccgcgcgctccggagagaacaggactatgcccggggctggggacggaggcaaagccccggcgagatggctgggcactgggcttttggtggaagaagtggacaacacagtgacactcatcatcctggctgtcgtgggcggggtcatcgggctcctcatcctcatcctgctgatcaagaaactcatcatcttcatcctgaagaagactcgggagaagaagaaggagtgtctcgtgagctcctcggggaatgacaacacggagaacggcttgcctggctccaaggcagaggagaaaccaccttcaaaagtgtgagccctgcttcgggctgagcagctgcagggagccccctttctgatgatgaaactgatgcttgagccc

SEQ ID NO: 18498 - DNA, 850 bp, Homo sapiens
  source 1..850: mol_type = unassigned DNA
cctcctcgaccgccccgcccgtcagtcctgaaaacctggcgagaggcgcgtactgtcctaggggaattcccctgcaaacagaagggagcccgccctgcgcgtcctggagtgggtgcggcaggagcgcttccaggcactgcgtccccaggtgaggggcggagccggggcgcggttcgcggcagtggccaggcctttgtttccttgggttggggtgacccctggtggtcatccagagcgcaacaagggctactccctggtccagaattcagtcctttccaggggagaaatggagaatgatggagggtggcccaggcggtgctgattggagtagacagccatcctcccgaggttggcactgagggtgatagagacctacctgcctggccaagctactccgccctgcctaagcatccccttccagagctccaggctggtggggttttattaagggaggcggtgctccttacacaggcctcttcctgctccccgtaaccctgtcgctggaggtgtctgtgggaaaggccaccgacatctacgctgtcaatggcacggagatcctgctgccctgcaccttctccagctgctttggcttcgaggacctccacttccggtggacctacaacagcagtgacgcattcaagattctcatagaggggactgtgaagaatgagaagtctgaccccaaggtgacgttgaaagacgatgaccgcatcactctgtggaagaagtggacaacacagtgacactcatcatcctggctgtcgtgggcggggtcatcgggctcctcatcctcatcctgctgatcaagaaactcatcatcttcatcctgaagaagactcgggagaagaag

SEQ ID NO: 18499 - DNA, 9768 bp, Homo sapiens
  source 1..9768: mol_type = unassigned DNA
gggaggcggggctgctacctccacgggcgcgccctggcaggaggggcgcagtctgcttgcaggcggtcgccagcgctccagcggcggctgtcggctttccaattccgccagctcggctgaggctgggctagcctgggtgccagtggctgctagcggcaggcgtcccctgagcaacaggagcccagagaaaaagaagcagccctgagagagcgccggggaaggagaggcccgcgccctctcctggagccagattctgcaggtgcactgggtggggatgatcggcgggctaggttgcaagcctcttatgtgaggagctgaagaggaattaaaatatacaggatgaaaagatggcaatgttgcctcccccaggacctcagagctttgtccatttcacaaaacagtctcttgccctcattgaacaacgcattgctgaaagaaaatcaaaggaacccaaagaagaaaagaaagatgatgatgaagaagccccaaagccaagcagtgacttggaagctggcaaacagctgcccttcatctatggggacattcctcccggcatggtgtcagagcccctggaggacttggacccctactatgcagacaaaaagactttcatagtattgaacaaagggaaaacaatcttccgtttcaatgccacacctgctttatatatgctttctcctttcagtcctctaagaagaatatctattaagattttagtacactccttattcagcatgctcatcatgtgcactattctgacaaactgcatatttatgaccatgaataacccaccggactggaccaaaaatgtcgagtacacttttactggaatatatacttttgaatcacttgtaaaaatccttgcaagaggcttctgtgtaggagaattcacttttcttcgtgacccgtggaactggctggattttgtcgtcattgtttttgcgtatttaacagaatttgtaaacctaggcaatgtttcagctcttcgaactttcagagtattgagagctttgaaaactatttctgtaatcccaggcctgaagacaattgtaggggctttgatccagtcagtgaagaagctttctgatgtcatgatcctgactgtgttctgtctgagtgtgtttgcactaattggactacagctgttcatgggaaacctgaagcataaatgttttcgaaattcacttgaaaataatgaaacattagaaagcataatgaataccctagagagtgaagaagactttagaaaatatttttattacttggaaggatccaaagatgctctcctttgtggtttcagcacagattcaggtcagtgtccagaggggtacacctgtgtgaaaattggcagaaaccctgattatggctacacgagctttgacactttcagctgggccttcttagccttgtttaggctaatgacccaagattactgggaaaacctttaccaacagacgctgcgtgctgctggcaaaacctacatgatcttctttgtcgtagtgattttcctgggctccttttatctaataaacttgatcctggctgtggttgccatggcatatgaagaacagaaccaggcaaacattgaagaagctaaacagaaagaattagaatttcaacagatgttagaccgtcttaaaaaagagcaagaagaagctgaggcaattgcagcggcagcggctgaatatacaagtattaggagaagcagaattatgggcctctcagagagttcttctgaaacatccaaactgagctctaaaagtgctaaagaaagaagaaacagaagaaagaaaaagaatcaaaagaagctctccagtggagaggaaaagggagatgctgagaaattgtcgaaatcagaatcagaggacagcatcagaagaaaaagtttccaccttggtgtcgaagggcataggcgagcacatgaaaagaggttgtctacccccaatcagtcaccactcagcattcgtggctccttgttttctgcaaggcgaagcagcagaacaagtctttttagtttcaaaggcagaggaagagatataggatctgagactgaatttgccgatgatgagcacagcatttttggagacaatgagagcagaaggggctcactgtttgtgccccacagaccccaggagcgacgcagcagtaacatcagccaagccagtaggtccccaccaatgctgccggtgaacgggaaaatgcacagtgctgtggactgcaacggtgtggtctccctggttgatggacgctcagccctcatgctccccaatggacagcttctgccagagggcacgaccaatcaaatacacaagaaaaggcgttgtagttcctatctcctttcagaggatatgctgaatgatcccaacctcagacagagagcaatgagtagagcaagcatattaacaaacactgtggaagaacttgaagagtccagacaaaaatgtccaccttggtggtacagatttgcacacaaattcttgatctggaattgctctccatattggataaaattcaaaaagtgtatctattttattgtaatggatccttttgtagatcttgcaattaccatttgcatagttttaaacacattatttatggctatggaacaccacccaatgactgaggaattcaaaaatgtacttgctataggaaatttggtctttactggaatctttgcagctgaaatggtattaaaactgattgccatggatccatatgagtatttccaagtaggctggaatatttttgacagccttattgtgactttaagtttagtggagctctttctagcagatgtggaaggattgtcagttctgcgatcattcagactgctccgagtcttcaagttggcaaaatcctggccaacattgaacatgctgattaagatcattggtaactcagtaggggctctaggtaacctcaccttagtgttggccatcatcgtcttcatttttgctgtggtcggcatgcagctctttggtaagagctacaaagaatgtgtctgcaagatcaatgatgactgtacgctcccacggtggcacatgaacgacttcttccactccttcctgattgtgttccgcgtgctgtgtggagagtggatagagaccatgtgggactgtatggaggtcgctggtcaagctatgtgccttattgtttacatgatggtcatggtcattggaaacctggtggtcctaaacctatttctggccttattattgagctcatttagttcagacaatcttacagcaattgaagaagaccctgatgcaaacaacctccagattgcagtgactagaattaaaaagggaataaattatgtgaaacaaaccttacgtgaatttattctaaaagcattttccaaaaagccaaagatttccagggagataagacaagcagaagatctgaatactaagaaggaaaactatatttctaaccatacacttgctgaaatgagcaaaggtcacaatttcctcaaggaaaaagataaaatcagtggttttggaagcagcgtggacaaacacttgatggaagacagtgatggtcaatcatttattcacaatcccagcctcacagtgacagtgccaattgcacctggggaatccgatttggaaaatatgaatgctgaggaacttagcagtgattcggatagtgaatacagcaaagtgagattaaaccggtcaagctcctcagagtgcagcacagttgataaccctttgcctggagaaggagaagaagcagaggctgaacctatgaattccgatgagccagaggcctgtttcacagatggttgtgtatggaggttctcatgctgccaagttaacatagagtcagggaaaggaaaaatctggtggaacatcaggaaaacctgctacaagattgttgaacacagttggtttgaaagcttcattgtcctcatgatcctgctcagcagtggtgccctggcttttgaagatatttatattgaaaggaaaaagaccattaagattatcctggagtatgcagacaagatcttcacttacatcttcattctggaaatgcttctaaaatggatagcatatggttataaaacatatttcaccaatgcctggtgttggctggatttcctaattgttgatgtttctttggttactttagtggcaaacactcttggctactcagatcttggccccattaaatcccttcggacactgagagctttaagacctctaagagccttatctagatttgaaggaatgagggtcgttgtgaatgcactcataggagcaattccttccatcatgaatgtgctacttgtgtgtcttatattctggctgatattcagcatcatgggagtaaatttgtttgctggcaagttctatgagtgtattaacaccacagatgggtcacggtttcctgcaagtcaagttccaaatcgttccgaatgttttgcccttatgaatgttagtcaaaatgtgcgatggaaaaacctgaaagtgaactttgataatgtcggacttggttacctatctctgcttcaagttgcaacttttaagggatggacgattattatgtatgcagcagtggattctgttaatgtagacaagcagcccaaatatgaatatagcctctacatgtatatttattttgtcgtctttatcatctttgggtcattcttcactttgaacttgttcattggtgtcatcatagataatttcaaccaacagaaaaagaagcttggaggtcaagacatctttatgacagaagaacagaagaaatactataatgcaatgaaaaagctggggtccaagaagccacaaaagccaattcctcgaccagggaacaaaatccaaggatgtatatttgacctagtgacaaatcaagcctttgatattagtatcatggttcttatctgtctcaacatggtaaccatgatggtagaaaaggagggtcaaagtcaacatatgactgaagttttatattggataaatgtggtttttataatccttttcactggagaatgtgtgctaaaactgatctccctcagacactactacttcactgtaggatggaatatttttgattttgtggttgtgattatctccattgtaggtatgtttctagctgatttgattgaaacgtattttgtgtcccctaccctgttccgagtgatccgtcttgccaggattggccgaatcctacgtctagtcaaaggagcaaaggggatccgcacgctgctctttgctttgatgatgtcccttcctgcgttgtttaacatcggcctcctgctcttcctggtcatgttcatctacgccatctttggaatgtccaactttgcctatgttaaaaaggaagatggaattaatgacatgttcaattttgagacctttggcaacagtatgatttgcctgttccaaattacaacctctgctggctgggatggattgctagcacctattcttaacagtaagccacccgactgtgacccaaaaaaagttcatcctggaagttcagttgaaggagactgtggtaacccatctgttggaatattctactttgttagttatatcatcatatccttcctggttgtggtgaacatgtacattgcagtcatactggagaattttagtgttgccactgaagaaagtactgaacctctgagtgaggatgactttgagatgttctatgaggtttgggagaagtttgatcccgatgcgacccagtttatagagttctctaaactctctgattttgcagctgccctggatcctcctcttctcatagcaaaacccaacaaagtccagctcattgccatggatctgcccatggttagtggtgaccggatccattgtcttgacatcttatttgcttttacaaagcgtgttttgggtgagagtggggagatggattctcttcgttcacagatggaagaaaggttcatgtctgcaaatccttccaaagtgtcctatgaacccatcacaaccacactaaaacggaaacaagaggatgtgtctgctactgtcattcagcgtgcttatagacgttaccgcttaaggcaaaatgtcaaaaatatatcaagtatatacataaaagatggagacagagatgatgatttactcaataaaaaagatatggcttttgataatgttaatgagaactcaagtccagaaaaaacagatgccacttcatccaccacctctccaccttcatatgatagtgtaacaaagccagacaaagagaaatatgaacaagacagaacagaaaaggaagacaaagggaaagacagcaaggaaagcaaaaaatagagcttcatttttgatatattgtttacagcctgtgaaagtgatttatttgtgttaataaaactcttttgaggaagtctatgccaaaatcctttttatcaaaatattctcgaaggcagtgcagtcactaactctgatttcctaagaaaggtgggcagcattagcagatggttatttttgcactgatgattctttaagaatcgtaagagaactctgtaggaattattgattatagcatacaaaagtgattcagttttttggtttttaataaatcagaagaccatgtagaaaacttttacatctgccttgtcatcttttcacaggattgtaattagtcttgtttcccatgtaaataaacaacacacgcatacagaaaaatctattatttatctattatttggaaatcaacaaaagtatttgccttggctttgcaatgaaatgcttgatagaagtaatggacattagttatgaatgtttagttaaaatgcattattagggagcttgactttttatcaatgtacagaggttattctatattttgaggtgcttaaatttattctacattgcatcagaaccaatttatatgtgcctataaaatgccatgggattaaaaatatatgtaggctattcatttctacaaatgtttttcattcatcttgactcacatgccaacaaggataagacttacctttagagtattgtgtttcatagcctttcttctttcatatccctttttgttcatagaataaccacagaacttgaaaaattattctaagtacatattacactcctcaaaaaaaacaaagataactgagaaaaaagttattgacagaagttctatttgctattatttacatagcctaacatttgactgtgctgcccaaaatactgataatagtctcttaaactcttttgtcaaattttcctgctttcttatgcagtattgtttagtcatcctttcgctgtaagcaaagttgatgaaatccttcctgatatgcagttagttgtttgaccacggtacatacttgagcagataataacttgggcacagtatttattgcatcacttgtatacaatcccgtgtttggcaagctttcaaatcatgtaatatgacagactttacacagatatgtgtttagtatgaataaaaaagcattgaaatagggattcttgccaacttgctctcttgccaccaacttactttcctaaattatggaagtaatcttttttggatatacttcaatgtatacaatgaggaagatgtcaccttctccttaaaattctatgatgtgaaatatattttgcctcaatcaacacagtaccatgggcttctaatttatcaagcacatattcattttgcattagctgtagacatctagttttttgaaaacacctattaatagtaatttgaaaagaaataaccataatgctttttttcgtgagtttatttcaggaatatgagatctttcttctataaagttattcatgcacaggcaaaaattgagctacacaggtagaatgtagttttacttagaagatttttgtgggaggttttgaagcaaatatataaaacaactttcactaatttgctttccatatttaaaaaataataaattacatttatataataaatgtttaaagcacatattttttgttgttctggcaatttaaaaagaaagaggatttaaacgtacctatagaaacaaagatttatggttaaagaatgagatcagaagtctagaatgtttttaaattgtgatatattttacaacatccgttattactttgagacatttgtcctaatctacgtataaaactcaatctagggctaaagattctttataccatcttaggttcattcatcttaggctatttgaaccactttttaatttaatatgaaagacaccatgcagtgttttccgagactacatagatcattttatcacatacctaccaagcctgttggaaataggttttgataatttaagtagggacctatacaaaatatattacatttatcagatttttaaatacattcaattaagaatttaacatcaccttaaatttgaattcaatctaccgttatttcaaactcacaaatataactgcattatgaatacttacataatgtagtaagacaagatgtttgacaggttcgtgtgtaattttctattaatgtttttacattgccttgtttttatgtaaaataaaaaatatgggcaactggtttgttaacaacacaatttcttcttagcatttcaaaaatatatataaagttgttctttttcctatttcatgaactatgtttttttttaaaataacatggttaagttttatatatatttacgtttgtttcaggaatgtctacttgtgactttttatcaattaaaaataatatttggaagaaagagcttattaagtataagcttgaagtaaaattagacctctctttccatgtagattactgtttgtactgatggtttcacccttcagaaggcactgtcatattaatatttaaattttataatcgctgaacttattacacccaacaatacagaaaggcagttacactgaagaacttaacttagaataaaatggaagcaaacaggttttctaaaaacttttttaagtgaccaggtctcgctctgtcacccaggctagagtgcaatggcatgatcatagctctctgcagcctcaactctgggctcaagcaaccctcctgcctcagcctcccaagtagctaagactacaggtacatgccaccatgcctggctaatatttaaatttttgtagataaggggtcttgctatgttgcccaggctagtctcaaactcctggcttcaagtgttcctactgtcatgacctgccaacatgctggggttacaggcatgagccaccatgccccaaacaggtttgaacacaaatctttcggatgaaaattagagaacctaattttagctttttgatagttacctagtttgcaaaagatttgggtgacttgtgagctgtttttaaatgctgattgttgaacatcacaacccaaaatacttagcatgattttatagagttttgatagctttattaaaaagagtgaaaataaaatgcatatgtaaataaagcagttctaaatagctatttcagagaaatgttaatagaagtgctgaaagaagggccaactaaattaggatggccagggaattggcctgggtttaggacctatgtatgaaggccaccaattttttaaaaatatctgtggtttattatgttattatcttcttgaggaaaacaatcaagaattgcttcatgaaaataaataaatagccatgaatatcataaagctgtttacataggattctttacaaatttcatagatctatgaatgctcaaaatgtttgagtttgccataaattatattgtagttatattgtagttatacttgagactgacacattgtaatataatctaagaataaaagttatacaaaataaaa

SEQ ID NO: 18500 - DNA, 5967 bp, Homo sapiens
  source 1..5967: mol_type = unassigned DNA
atggcaatgttgcctcccccaggacctcagagctttgtccatttcacaaaacagtctcttgccctcattgaacaacgcattgctgaaagaaaatcaaaggaacccaaagaagaaaagaaagatgatgatgaagaagccccaaagccaagcagtgacttggaagctggcaaacagctgcccttcatctatggggacattcctcccggcatggtgtcagagcccctggaggacttggacccctactatgcagacaaaaagactttcatagtattgaacaaagggaaaacaatcttccgtttcaatgccacacctgctttatatatgctttctcctttcagtcctctaagaagaatatctattaagattttagtacactccttattcagcatgctcatcatgtgcactattctgacaaactgcatatttatgaccatgaataacccaccggactggaccaaaaatgtcgagtacacttttactggaatatatacttttgaatcacttgtaaaaatccttgcaagaggcttctgtgtaggagaattcacttttcttcgtgacccgtggaactggctggattttgtcgtcattgtttttgcgtatttaacagaatttgtaaacctaggcaatgtttcagctcttcgaactttcagagtattgagagctttgaaaactatttctgtaatcccaggcctgaagacaattgtaggggctttgatccagtcagtgaagaagctttctgatgtcatgatcctgactgtgttctgtctgagtgtgtttgcactaattggactacagctgttcatgggaaacctgaagcataaatgttttcgaaattcacttgaaaataatgaaacattagaaagcataatgaataccctagagagtgaagaagactttagaaaatatttttattacttggaaggatccaaagatgctctcctttgtggtttcagcacagattcaggtcagtgtccagaggggtacacctgtgtgaaaattggcagaaaccctgattatggctacacgagctttgacactttcagctgggccttcttagccttgtttaggctaatgacccaagattactgggaaaacctttaccaacagacgctgcgtgctgctggcaaaacctacatgatcttctttgtcgtagtgattttcctgggctccttttatctaataaacttgatcctggctgtggttgccatggcatatgaagaacagaaccaggcaaacattgaagaagctaaacagaaagaattagaatttcaacagatgttagaccgtcttaaaaaagagcaagaagaagctgaggcaattgcagcggcagcggctgaatatacaagtattaggagaagcagaattatgggcctctcagagagttcttctgaaacatccaaactgagctctaaaagtgctaaagaaagaagaaacagaagaaagaaaaagaatcaaaagaagctctccagtggagaggaaaagggagatgctgagaaattgtcgaaatcagaatcagaggacagcatcagaagaaaaagtttccaccttggtgtcgaagggcataggcgagcacatgaaaagaggttgtctacccccaatcagtcaccactcagcattcgtggctccttgttttctgcaaggcgaagcagcagaacaagtctttttagtttcaaaggcagaggaagagatataggatctgagactgaatttgccgatgatgagcacagcatttttggagacaatgagagcagaaggggctcactgtttgtgccccacagaccccaggagcgacgcagcagtaacatcagccaagccagtaggtccccaccaatgctgccggtgaacgggaaaatgcacagtgctgtggactgcaacggtgtggtctccctggttgatggacgctcagccctcatgctccccaatggacagcttctgccagaggtgataatagataaggcaacttctgatgacagcggcacgaccaatcaaatacacaagaaaaggcgttgtagttcctatctcctttcagaggatatgctgaatgatcccaacctcagacagagagcaatgagtagagcaagcatattaacaaacactgtggaagaacttgaagagtccagacaaaaatgtccaccttggtggtacagatttgcacacaaattcttgatctggaattgctctccatattggataaaattcaaaaagtgtatctattttattgtaatggatccttttgtagatcttgcaattaccatttgcatagttttaaacacattatttatggctatggaacaccacccaatgactgaggaattcaaaaatgtacttgctataggaaatttggtctttactggaatctttgcagctgaaatggtattaaaactgattgccatggatccatatgagtatttccaagtaggctggaatatttttgacagccttattgtgactttaagtttagtggagctctttctagcagatgtggaaggattgtcagttctgcgatcattcagactgctccgagtcttcaagttggcaaaatcctggccaacattgaacatgctgattaagatcattggtaactcagtaggggctctaggtaacctcaccttagtgttggccatcatcgtcttcatttttgctgtggtcggcatgcagctctttggtaagagctacaaagaatgtgtctgcaagatcaatgatgactgtacgctcccacggtggcacatgaacgacttcttccactccttcctgattgtgttccgcgtgctgtgtggagagtggatagagaccatgtgggactgtatggaggtcgctggtcaagctatgtgccttattgtttacatgatggtcatggtcattggaaacctggtggtcctaaacctatttctggccttattattgagctcatttagttcagacaatcttacagcaattgaagaagaccctgatgcaaacaacctccagattgcagtgactagaattaaaaagggaataaattatgtgaaacaaaccttacgtgaatttattctaaaagcattttccaaaaagccaaagatttccagggagataagacaagcagaagatctgaatactaagaaggaaaactatatttctaaccatacacttgctgaaatgagcaaaggtcacaatttcctcaaggaaaaagataaaatcagtggttttggaagcagcgtggacaaacacttgatggaagacagtgatggtcaatcatttattcacaatcccagcctcacagtgacagtgccaattgcacctggggaatccgatttggaaaatatgaatgctgaggaacttagcagtgattcggatagtgaatacagcaaagtgagattaaaccggtcaagctcctcagagtgcagcacagttgataaccctttgcctggagaaggagaagaagcagaggctgaacctatgaattccgatgagccagaggcctgtttcacagatggttgtgtatggaggttctcatgctgccaagttaacatagagtcagggaaaggaaaaatctggtggaacatcaggaaaacctgctacaagattgttgaacacagttggtttgaaagcttcattgtcctcatgatcctgctcagcagtggtgccctggcttttgaagatatttatattgaaaggaaaaagaccattaagattatcctggagtatgcagacaagatcttcacttacatcttcattctggaaatgcttctaaaatggatagcatatggttataaaacatatttcaccaatgcctggtgttggctggatttcctaattgttgatgtttctttggttactttagtggcaaacactcttggctactcagatcttggccccattaaatcccttcggacactgagagctttaagacctctaagagccttatctagatttgaaggaatgagggtcgttgtgaatgcactcataggagcaattccttccatcatgaatgtgctacttgtgtgtcttatattctggctgatattcagcatcatgggagtaaatttgtttgctggcaagttctatgagtgtattaacaccacagatgggtcacggtttcctgcaagtcaagttccaaatcgttccgaatgttttgcccttatgaatgttagtcaaaatgtgcgatggaaaaacctgaaagtgaactttgataatgtcggacttggttacctatctctgcttcaagttgcaacttttaagggatggacgattattatgtatgcagcagtggattctgttaatgtagacaagcagcccaaatatgaatatagcctctacatgtatatttattttgtcgtctttatcatctttgggtcattcttcactttgaacttgttcattggtgtcatcatagataatttcaaccaacagaaaaagaagcttggaggtcaagacatctttatgacagaagaacagaagaaatactataatgcaatgaaaaagctggggtccaagaagccacaaaagccaattcctcgaccagggaacaaaatccaaggatgtatatttgacctagtgacaaatcaagcctttgatattagtatcatggttcttatctgtctcaacatggtaaccatgatggtagaaaaggagggtcaaagtcaacatatgactgaagttttatattggataaatgtggtttttataatccttttcactggagaatgtgtgctaaaactgatctccctcagacactactacttcactgtaggatggaatatttttgattttgtggttgtgattatctccattgtaggtatgtttctagctgatttgattgaaacgtattttgtgtcccctaccctgttccgagtgatccgtcttgccaggattggccgaatcctacgtctagtcaaaggagcaaaggggatccgcacgctgctctttgctttgatgatgtcccttcctgcgttgtttaacatcggcctcctgctcttcctggtcatgttcatctacgccatctttggaatgtccaactttgcctatgttaaaaaggaagatggaattaatgacatgttcaattttgagacctttggcaacagtatgatttgcctgttccaaattacaacctctgctggctgggatggattgctagcacctattcttaacagtaagccacccgactgtgacccaaaaaaagttcatcctggaagttcagttgaaggagactgtggtaacccatctgttggaatattctactttgttagttatatcatcatatccttcctggttgtggtgaacatgtacattgcagtcatactggagaattttagtgttgccactgaagaaagtactgaacctctgagtgaggatgactttgagatgttctatgaggtttgggagaagtttgatcccgatgcgacccagtttatagagttctctaaactctctgattttgcagctgccctggatcctcctcttctcatagcaaaacccaacaaagtccagctcattgccatggatctgcccatggttagtggtgaccggatccattgtcttgacatcttatttgcttttacaaagcgtgttttgggtgagagtggggagatggattctcttcgttcacagatggaagaaaggttcatgtctgcaaatccttccaaagtgtcctatgaacccatcacaaccacactaaaacggaaacaagaggatgtgtctgctactgtcattcagcgtgcttatagacgttaccgcttaaggcaaaatgtcaaaaatatatcaagtatatacataaaagatggagacagagatgatgatttactcaataaaaaagatatggcttttgataatgttaatgagaactcaagtccagaaaaaacagatgccacttcatccaccacctctccaccttcatatgatagtgtaacaaagccagacaaagagaaatatgaacaagacagaacagaaaaggaagacaaagggaaagacagcaaggaaagcaaaaaatag

SEQ ID NO: 18501 - DNA, 1585 bp, Homo sapiens
  source 1..1585: mol_type = unassigned DNA
attctgacaaactgcatatttatgaccatgaataacccaccggactggaccaaaaatgtcgagtacacttttactggaatatatacttttgaatcacttgtaaaaatccttgcaagaggcttctgtgtaggagaattcacttttcttcgtgacccgtggaactggctggattttgtcgtcattgtttttgcatatgtgacagagtttgtggacctgggcaatgtctcagcattgagaacattcagagttctccgagcattgaaaacaatttcagtcattccaggcctgaagacaattgtaggggctttgatccagtcagtgaagaagctttctgatgtcatgatcctgactgtgttctgtctgagtgtgtttgcactaattggactacagctgttcatgggaaacctgaagcataaatgttttcgaaattcacttgaaaataatgaaacattagaaagcataatgaataccctagagagtgaagaagactttagaaaatatttttattacttggaaggatccaaagatgctctcctttgtggtttcagcacagattcaggtcagtgtccagaggggtacacctgtgtgaaaattggcagaaaccctgattatggctacacgagctttgacactttcagctgggccttcttagccttgtttaggctaatgacccaagattactgggaaaacctttaccaacagacgctgcgtgctgctggcaaaacctacatgatcttctttgtcgtagtgattttcctgggctccttttatctaataaacttgatcctggctgtggttgccatggcatatgaagaacagaaccaggcaaacattgaagaagctaaacagaaagaattagaatttcaacagatgttagaccgtcttaaaaaagagcaagaagaagctgaggcaattgcagcggcagcggctgaatatacaagtattaggagaagcagaattatgggcctctcagagagttcttctgaaacatccaaactgagctctaaaagtgctaaagaaagaagaaacagaagaaagaaaaagaatcaaaagaagctctccagtggagaggaaaagggagatgctgagaaattgtcgaaatcagaatcagaggacagcatcagaagaaaaagtttccaccttggtgtcgaagggcataggcgagcacatgaaaagaggttgtctacccccaatcagtcaccactcagcattcgtggctccttgttttctgcaaggcgaagcagcagaacaagtctttttagtttcaaaggcagaggaagagatataggatctgagactgaatttgccgatgatgagcacagcatttttggagacaatgagagcagaaggggctcactgtttgtgccccacagaccccaggagcgacgcagcagtaacatcagccaagccagtaggtccccaccaatgctgccggtgaacgggaaaatgcacagtgctgtggactgcaacggtgtggtctccctggttgatggacgctcagccctcatgctccccaatggacagcttctgccagagggcacgaccaatcaaatacacaagaaaaggcgttgtagttcctatctcc

SEQ ID NO: 18502 - DNA, 1618 bp, Homo sapiens
  source 1..1618: mol_type = unassigned DNA
attctgacaaactgcatatttatgaccatgaataacccaccggactggaccaaaaatgtcgagtacacttttactggaatatatacttttgaatcacttgtaaaaatccttgcaagaggcttctgtgtaggagaattcacttttcttcgtgacccgtggaactggctggattttgtcgtcattgtttttgcatatgtgacagagtttgtggacctgggcaatgtctcagcattgagaacattcagagttctccgagcattgaaaacaatttcagtcattccaggcctgaagacaattgtaggggctttgatccagtcagtgaagaagctttctgatgtcatgatcctgactgtgttctgtctgagtgtgtttgcactaattggactacagctgttcatgggaaacctgaagcataaatgttttcgaaattcacttgaaaataatgaaacattagaaagcataatgaataccctagagagtgaagaagactttagaaaatatttttattacttggaaggatccaaagatgctctcctttgtggtttcagcacagattcaggtcagtgtccagaggggtacacctgtgtgaaaattggcagaaaccctgattatggctacacgagctttgacactttcagctgggccttcttagccttgtttaggctaatgacccaagattactgggaaaacctttaccaacagacgctgcgtgctgctggcaaaacctacatgatcttctttgtcgtagtgattttcctgggctccttttatctaataaacttgatcctggctgtggttgccatggcatatgaagaacagaaccaggcaaacattgaagaagctaaacagaaagaattagaatttcaacagatgttagaccgtcttaaaaaagagcaagaagaagctgaggcaattgcagcggcagcggctgaatatacaagtattaggagaagcagaattatgggcctctcagagagttcttctgaaacatccaaactgagctctaaaagtgctaaagaaagaagaaacagaagaaagaaaaagaatcaaaagaagctctccagtggagaggaaaagggagatgctgagaaattgtcgaaatcagaatcagaggacagcatcagaagaaaaagtttccaccttggtgtcgaagggcataggcgagcacatgaaaagaggttgtctacccccaatcagtcaccactcagcattcgtggctccttgttttctgcaaggcgaagcagcagaacaagtctttttagtttcaaaggcagaggaagagatataggatctgagactgaatttgccgatgatgagcacagcatttttggagacaatgagagcagaaggggctcactgtttgtgccccacagaccccaggagcgacgcagcagtaacatcagccaagccagtaggtccccaccaatgctgccggtgaacgggaaaatgcacagtgctgtggactgcaacggtgtggtctccctggttgatggacgctcagccctcatgctccccaatggacagcttctgccagaggtgataatagataaggcaacttctgatgacagcggcacgaccaatcaaatacacaagaaaaggcgttgtagttcctatctcc

SEQ ID NO: 18503 - DNA, 905 bp, Homo sapiens
  source 1..905: mol_type = unassigned DNA
gtacacttttactggaatatatacttttgaatcacttgtaaaaatccttgcaagaggcttctgtgtaggagaattcacttttcttcgtgacccgtggaactggctggattttgtcgtcattgtttttgcgtatttaacagaatttgtaaacctaggcaatgtttcagctcttcgaactttcagagtattgagagctttgaaaactatttctgtaatcccaggcctgaagacaattgtaggggctttgatccagtcagtgaagaagctttctgatgtcatgatcctgactgtgttctgtctgagtgtgtttgcactaattggactacagctgttcatgggaaacctgaagcataaatgttttcgaaattcacttgaaaataatgaaacattagaaagcataatgaataccctagagagtgaagaagactttagaagtaagaatgtccttgcatttgttattaggttgaaataatgctaaaaacattgctctcttttaataatgaaatgttgctttcattttaatcatttcaaagctattcaaatatatagaaagctgctacagtgtgaatttgggtcatgttatatatgattttcataaatcatcctggttctaagctatctagcagtactggcaaaaggaacacaggatagttccataattcctaatttctatatcataaaaaagaattattttctctagagaaataaatgtagccttgaattaataacattaaccattacatttaacaatataatagattatatattttatataattttattatatagtacatacttatatttattatatataatgtgacatatttattatgatagatttttatacttaatagattgtactcataactataacatcttaaagttctattaatcatatataatga

SEQ ID NO: 18504 - DNA, 9786 bp, Homo sapiens
  source 1..9786: mol_type = unassigned DNA
cggggctgctacctccacgggcgcgccctggcaggaggggcgcagtctgcttgcaggcggtcgccagcgctccagcggcggctgtcggctttccaattccgccagctcggctgaggctgggctagcctgggtgccagtggctgctagcggcaggcgtcccctgagcaacaggagcccagagaaaaagaagcagccctgagagagcgccggggaaggagaggcccgcgccctctcctggagccagattctgcaggtgcactgggtggggatgatcggcgggctaggttgcaagcctcttatgtgaggagctgaagaggaattaaaatatacaggatgaaaagatggcaatgttgcctcccccaggacctcagagctttgtccatttcacaaaacagtctcttgccctcattgaacaacgcattgctgaaagaaaatcaaaggaacccaaagaagaaaagaaagatgatgatgaagaagccccaaagccaagcagtgacttggaagctggcaaacagctgcccttcatctatggggacattcctcccggcatggtgtcagagcccctggaggacttggacccctactatgcagacaaaaagactttcatagtattgaacaaagggaaaacaatcttccgtttcaatgccacacctgctttatatatgctttctcctttcagtcctctaagaagaatatctattaagattttagtacactccttattcagcatgctcatcatgtgcactattctgacaaactgcatatttatgaccatgaataacccaccggactggaccaaaaatgtcgagtacacttttactggaatatatacttttgaatcacttgtaaaaatccttgcaagaggcttctgtgtaggagaattcacttttcttcgtgacccgtggaactggctggattttgtcgtcattgtttttgcgtatttaacagaatttgtaaacctaggcaatgtttcagctcttcgaactttcagagtattgagagctttgaaaactatttctgtaatcccaggcctgaagacaattgtaggggctttgatccagtcagtgaagaagctttctgatgtcatgatcctgactgtgttctgtctgagtgtgtttgcactaattggactacagctgttcatgggaaacctgaagcataaatgttttcgaaattcacttgaaaataatgaaacattagaaagcataatgaataccctagagagtgaagaagactttagaaaatatttttattacttggaaggatccaaagatgctctcctttgtggtttcagcacagattcaggtcagtgtccagaggggtacacctgtgtgaaaattggcagaaaccctgattatggctacacgagctttgacactttcagctgggccttcttagccttgtttaggctaatgacccaagattactgggaaaacctttaccaacagacgctgcgtgctgctggcaaaacctacatgatcttctttgtcgtagtgattttcctgggctccttttatctaataaacttgatcctggctgtggttgccatggcatatgaagaacagaaccaggcaaacattgaagaagctaaacagaaagaattagaatttcaacagatgttagaccgtcttaaaaaagagcaagaagaagctgaggcaattgcagcggcagcggctgaatatacaagtattaggagaagcagaattatgggcctctcagagagttcttctgaaacatccaaactgagctctaaaagtgctaaagaaagaagaaacagaagaaagaaaaagaatcaaaagaagctctccagtggagaggaaaagggagatgctgagaaattgtcgaaatcagaatcagaggacagcatcagaagaaaaagtttccaccttggtgtcgaagggcataggcgagcacatgaaaagaggttgtctacccccaatcagtcaccactcagcattcgtggctccttgttttctgcaaggcgaagcagcagaacaagtctttttagtttcaaaggcagaggaagagatataggatctgagactgaatttgccgatgatgagcacagcatttttggagacaatgagagcagaaggggctcactgtttgtgccccacagaccccaggagcgacgcagcagtaacatcagccaagccagtaggtccccaccaatgctgccggtgaacgggaaaatgcacagtgctgtggactgcaacggtgtggtctccctggttgatggacgctcagccctcatgctccccaatggacagcttctgccagaggtgataatagataaggcaacttctgatgacagcggcacgaccaatcaaatacacaagaaaaggcgttgtagttcctatctcctttcagaggatatgctgaatgatcccaacctcagacagagagcaatgagtagagcaagcatattaacaaacactgtggaagaacttgaagagtccagacaaaaatgtccaccttggtggtacagatttgcacacaaattcttgatctggaattgctctccatattggataaaattcaaaaagtgtatctattttattgtaatggatccttttgtagatcttgcaattaccatttgcatagttttaaacacattatttatggctatggaacaccacccaatgactgaggaattcaaaaatgtacttgctataggaaatttggtctttactggaatctttgcagctgaaatggtattaaaactgattgccatggatccatatgagtatttccaagtaggctggaatatttttgacagccttattgtgactttaagtttagtggagctctttctagcagatgtggaaggattgtcagttctgcgatcattcagactgctccgagtcttcaagttggcaaaatcctggccaacattgaacatgctgattaagatcattggtaactcagtaggggctctaggtaacctcaccttagtgttggccatcatcgtcttcatttttgctgtggtcggcatgcagctctttggtaagagctacaaagaatgtgtctgcaagatcaatgatgactgtacgctcccacggtggcacatgaacgacttcttccactccttcctgattgtgttccgcgtgctgtgtggagagtggatagagaccatgtgggactgtatggaggtcgctggtcaagctatgtgccttattgtttacatgatggtcatggtcattggaaacctggtggtcctaaacctatttctggccttattattgagctcatttagttcagacaatcttacagcaattgaagaagaccctgatgcaaacaacctccagattgcagtgactagaattaaaaagggaataaattatgtgaaacaaaccttacgtgaatttattctaaaagcattttccaaaaagccaaagatttccagggagataagacaagcagaagatctgaatactaagaaggaaaactatatttctaaccatacacttgctgaaatgagcaaaggtcacaatttcctcaaggaaaaagataaaatcagtggttttggaagcagcgtggacaaacacttgatggaagacagtgatggtcaatcatttattcacaatcccagcctcacagtgacagtgccaattgcacctggggaatccgatttggaaaatatgaatgctgaggaacttagcagtgattcggatagtgaatacagcaaagtgagattaaaccggtcaagctcctcagagtgcagcacagttgataaccctttgcctggagaaggagaagaagcagaggctgaacctatgaattccgatgagccagaggcctgtttcacagatggttgtgtatggaggttctcatgctgccaagttaacatagagtcagggaaaggaaaaatctggtggaacatcaggaaaacctgctacaagattgttgaacacagttggtttgaaagcttcattgtcctcatgatcctgctcagcagtggtgccctggcttttgaagatatttatattgaaaggaaaaagaccattaagattatcctggagtatgcagacaagatcttcacttacatcttcattctggaaatgcttctaaaatggatagcatatggttataaaacatatttcaccaatgcctggtgttggctggatttcctaattgttgatgtttctttggttactttagtggcaaacactcttggctactcagatcttggccccattaaatcccttcggacactgagagctttaagacctctaagagccttatctagatttgaaggaatgagggtcgttgtgaatgcactcataggagcaattccttccatcatgaatgtgctacttgtgtgtcttatattctggctgatattcagcatcatgggagtaaatttgtttgctggcaagttctatgagtgtattaacaccacagatgggtcacggtttcctgcaagtcaagttccaaatcgttccgaatgttttgcccttatgaatgttagtcaaaatgtgcgatggaaaaacctgaaagtgaactttgataatgtcggacttggttacctatctctgcttcaagttgcaacttttaagggatggacgattattatgtatgcagcagtggattctgttaatgtagacaagcagcccaaatatgaatatagcctctacatgtatatttattttgtcgtctttatcatctttgggtcattcttcactttgaacttgttcattggtgtcatcatagataatttcaaccaacagaaaaagaagcttggaggtcaagacatctttatgacagaagaacagaagaaatactataatgcaatgaaaaagctggggtccaagaagccacaaaagccaattcctcgaccagggaacaaaatccaaggatgtatatttgacctagtgacaaatcaagcctttgatattagtatcatggttcttatctgtctcaacatggtaaccatgatggtagaaaaggagggtcaaagtcaacatatgactgaagttttatattggataaatgtggtttttataatccttttcactggagaatgtgtgctaaaactgatctccctcagacactactacttcactgtaggatggaatatttttgattttgtggttgtgattatctccattgtaggtatgtttctagctgatttgattgaaacgtattttgtgtcccctaccctgttccgagtgatccgtcttgccaggattggccgaatcctacgtctagtcaaaggagcaaaggggatccgcacgctgctctttgctttgatgatgtcccttcctgcgttgtttaacatcggcctcctgctcttcctggtcatgttcatctacgccatctttggaatgtccaactttgcctatgttaaaaaggaagatggaattaatgacatgttcaattttgagacctttggcaacagtatgatttgcctgttccaaattacaacctctgctggctgggatggattgctagcacctattcttaacagtaagccacccgactgtgacccaaaaaaagttcatcctggaagttcagttgaaggagactgtggtaacccatctgttggaatattctactttgttagttatatcatcatatccttcctggttgtggtgaacatgtacattgcagtcatactggagaattttagtgttgccactgaagaaagtactgaacctctgagtgaggatgactttgagatgttctatgaggtttgggagaagtttgatcccgatgcgacccagtttatagagttctctaaactctctgattttgcagctgccctggatcctcctcttctcatagcaaaacccaacaaagtccagctcattgccatggatctgcccatggttagtggtgaccggatccattgtcttgacatcttatttgcttttacaaagcgtgttttgggtgagagtggggagatggattctcttcgttcacagatggaagaaaggttcatgtctgcaaatccttccaaagtgtcctatgaacccatcacaaccacactaaaacggaaacaagaggatgtgtctgctactgtcattcagcgtgcttatagacgttaccgcttaaggcaaaatgtcaaaaatatatcaagtatatacataaaagatggagacagagatgatgatttactcaataaaaaagatatggcttttgataatgttaatgagaactcaagtccagaaaaaacagatgccacttcatccaccacctctccaccttcatatgatagtgtaacaaagccagacaaagagaaatatgaacaagacagaacagaaaaggaagacaaagggaaagacagcaaggaaagcaaaaaatagagcttcatttttgatatattgtttacagcctgtgaaagtgatttatttgtgttaataaaactcttttgaggaagtctatgccaaaatcctttttatcaaaatattctcgaaggcagtgcagtcactaactctgatttcctaagaaaggtgggcagcattagcagatggttatttttgcactgatgattctttaagaatcgtaagagaactctgtaggaattattgattatagcatacaaaagtgattcagttttttggtttttaataaatcagaagaccatgtagaaaacttttacatctgccttgtcatcttttcacaggattgtaattagtcttgtttcccatgtaaataaacaacacacgcatacagaaaaatctattatttatctattatttggaaatcaacaaaagtatttgccttggctttgcaatgaaatgcttgatagaagtaatggacattagttatgaatgtttagttaaaatgcattattagggagcttgactttttatcaatgtacagaggttattctatattttgaggtgcttaaatttattctacattgcatcagaaccaatttatatgtgcctataaaatgccatgggattaaaaatatatgtaggctattcatttctacaaatgtttttcattcatcttgactcacatgccaacaaggataagacttacctttagagtattgtgtttcatagcctttcttctttcatatccctttttgttcatagaataaccacagaacttgaaaaattattctaagtacatattacactcctcaaaaaaaacaaagataactgagaaaaaagttattgacagaagttctatttgctattatttacatagcctaacatttgactgtgctgcccaaaatactgataatagtctcttaaactcttttgtcaaattttcctgctttcttatgcagtattgtttagtcatcctttcgctgtaagcaaagttgatgaaatccttcctgatatgcagttagttgtttgaccacggtacatacttgagcagataataacttgggcacagtatttattgcatcacttgtatacaatcccgtgtttggcaagctttcaaatcatgtaatatgacagactttacacagatatgtgtttagtatgaataaaaaagcattgaaatagggattcttgccaacttgctctcttgccaccaacttactttcctaaattatggaagtaatcttttttggatatacttcaatgtatacaatgaggaagatgtcaccttctccttaaaattctatgatgtgaaatatattttgcctcaatcaacacagtaccatgggcttctaatttatcaagcacatattcattttgcattagctgtagacatctagttttttgaaaacacctattaatagtaatttgaaaagaaataaccataatgctttttttcgtgagtttatttcaggaatatgagatctttcttctataaagttattcatgcacaggcaaaaattgagctacacaggtagaatgtagttttacttagaagatttttgtgggaggttttgaagcaaatatataaaacaactttcactaatttgctttccatatttaaaaaataataaattacatttatataataaatgtttaaagcacatattttttgttgttctggcaatttaaaaagaaagaggatttaaacgtacctatagaaacaaagatttatggttaaagaatgagatcagaagtctagaatgtttttaaattgtgatatattttacaacatccgttattactttgagacatttgtcctaatctacgtataaaactcaatctagggctaaagattctttataccatcttaggttcattcatcttaggctatttgaaccactttttaatttaatatgaaagacaccatgcagtgttttccgagactacatagatcattttatcacatacctaccaagcctgttggaaataggttttgataatttaagtagggacctatacaaaatatattacatttatcagatttttaaatacattcaattaagaatttaacatcaccttaaatttgaattcaatctaccgttatttcaaactcacaaatataactgcattatgaatacttacataatgtagtaagacaagatgtttgacaggttcgtgtgtaattttctattaatgtttttacattgccttgtttttatgtaaaataaaaaatatgggcaactggtttgttaacaacacaatttcttcttagcatttcaaaaatatatataaagttgttctttttcctatttcatgaactatgtttttttttaaaataacatggttaagttttatatatatttacgtttgtttcaggaatgtctacttgtgactttttatcaattaaaaataatatttggaagaaagagcttattaagtataagcttgaagtaaaattagacctctctttccatgtagattactgtttgtactgatggtttcacccttcagaaggcactgtcatattaatatttaaattttataatcgctgaacttattacacccaacaatacagaaaggcagttacactgaagaacttaacttagaataaaatggaagcaaacaggttttctaaaaacttttttaagtgaccaggtctcgctctgtcacccaggctagagtgcaatggcatgatcatagctctctgcagcctcaactctgggctcaagcaaccctcctgcctcagcctcccaagtagctaagactacaggtacatgccaccatgcctggctaatatttaaatttttgtagataaggggtcttgctatgttgcccaggctagtctcaaactcctggcttcaagtgttcctactgtcatgacctgccaacatgctggggttacaggcatgagccaccatgccccaaacaggtttgaacacaaatctttcggatgaaaattagagaacctaattttagctttttgatagttacctagtttgcaaaagatttgggtgacttgtgagctgtttttaaatgctgattgttgaacatcacaacccaaaatacttagcatgattttatagagttttgatagctttattaaaaagagtgaaaataaaatgcatatgtaaataaagcagttctaaatagctatttcagagaaatgttaatagaagtgctgaaagaagggccaactaaattaggatggccagggaattggcctgggtttaggacctatgtatgaaggccaccaattttttaaaaatatctgtggtttattatgttattatcttcttgaggaaaacaatcaagaattgcttcatgaaaataaataaatagccatgaatatcataaagctgtttacataggattctttacaaatttcatagatctatgaatgctcaaaatgtttgagtttgccataaattatattgtagttatattgtagttatacttgagactgacacattgtaatataatctaagaataaaagttatac

SEQ ID NO: 18505 - DNA, 3507 bp, Homo sapiens
  source 1..3507: mol_type = unassigned DNA
ccacaagagcccgcggtggcgctgccaggggatgctagcccgagagcgagcagaggagcagcgcacccgcacgagccttggaccctttggaaccgaaagcacgcccgtcctcagagtcccgtcctcaaagtcccatcctcgccatggcacccggagagaagatcaaagccaaaatcaagaagaatctgcccgtgacgggccctcaggcgccgaccattaaagagctgatgcggtggtactgcctcaacaccaacacccatggctgtcgccgcatcgtggtgtcccgcggccgtctgcgccgcctcctctggatcgggttcacactgactgccgtggccctcatcctctggcagtgcgccctcctcgtcttctccttctatactgtctcagtttccatcaaagtccacttccggaagctggattttcctgcagtcaccatctgcaacatcaacccctacaagtacagcaccgttcgccaccttctagctgacttggaacaggagaccagagaggccctgaagtccctgtatggctttccagagtcccggaagcgccgagaggcggagtcctggaactccgtctcagagggaaagcagcctagattctcccaccggattccgctgctgatctttgatcaggatgagaagggcaaggccagggacttcttcacagggaggaagcggaaagtcggcggtagcatcattcacaaggcttcaaatgtcatgcacatcgagtccaagcaagtggtgggattccaactgtgctcaaatgacacctccgactgtgccacctacaccttcagctcgggaatcaatgccattcaggagtggtataagctacactacatgaacatcatggcacaggtgcctctggagaagaaaatcaacatgagctattctgctgaggagctgctggtgacctgcttctttgatggagtgtcctgtgatgccaggaatttcacgcttttccaccacccgatgcatgggaattgctatactttcaacaacagagaaaatgagaccattctcagcacctccatggggggcagcgaatatgggctgcaagtcattttgtacataaacgaagaggaatacaacccattcctcgtgtcctccactggagctaaggtgatcatccatcggcaggatgagtatcccttcgtcgaagatgtgggaacagagattgagacagcaatggtcacctctataggaatgcacctgacagagtccttcaagctgagtgagccctacagtcagtgcacggaggacgggagtgacgtgccaatcaggaacatctacaacgctgcctactcgctccagatctgccttcattcatgcttccagacaaagatggtggagaaatgtgggtgtgcccagtacagccagcctctacctcctgcagccaactactgcaactaccagcagcaccccaactggatgtattgttactaccaactgcatcgagcctttgtccaggaagagctgggctgccagtctgtgtgcaaggaagcctgcagctttaaagagtggacactaaccacaagcctggcacaatggccatctgtggtttcggagaagtggttgctgcctgttctcacttgggaccaaggccggcaagtaaacaaaaagctcaacaagacagacttggccaaactcttgatattctacaaagacctgaaccagagatccatcatggagagcccagccaacagtattgagatgcttctgtccaacttcggtggccagctgggcctgtggatgagctgctctgttgtctgcgtcatcgagatcatcgaggtcttcttcattgacttcttctctatcattgcccgccgccagtggcagaaagccaaggagtggtgggcctggaaacaggctcccccatgtccagaagctccccgtagcccacagggccaggacaatccagccctggatatagacgatgacctacccactttcaactctgctttgcacctgcctccagccctaggaacccaagtgcccggcacaccgccccccaaatacaataccttgcgcttggagagggccttttccaaccagctcacagatacccagatgctggatgagctctgaggcagggttgagaagacagatctagtcaggaccaccagccatggtctaaggacatggatcgggtgcccccagacgtgtgcacaggggaccctctgccccactctgggcttttcagatactctgaccaaaaagcctgctttaaaccgcaagatggggcctgggcatgcgcaggaggagccatcgggtactacgcagcaacactcacaactgtccaggctgagataaatcccgggacctgaactattagcacgtcactagagactgggagccgaggcagtggtgctggcccaagtgaaggccagagtgaggactgatgcagctctttacgggtcttgagagggaaggactcttccaaagccccaaagccgagggtttcacccacactgccagcctgggttggggcccaaggatgtgaccttgagtgtcaaggctggacagctactgccagatgccaaagataggagaaagtgccagccctgaagctggagccgtttgtgaataaactgttcttcatcattgacactggagaaaggtgtcctccatgccctcaggcagcagagaactggcccagagcccttggagtgttggtggagatcagagtgccgtggtggaggtctgggactatgtcagagtgtcctcactttggggcatgggtgggtccaggagatggatttagttattcaattttgtggatgaataaattgaggcacagaaagattaagttaccggcccaaggtgacacagtgaggaggtggcagagctaggatttgaacccagacaatctgacttcatgattttgcatccaattcgtgtctgtgccttttaaagggtgaggtctgtgtcactttgggtggggagggggagcatggtgggccatgctctgggcagctgttccaagacagagctgacccttccattaccaatggcctgtccctcaccaacaagccaactgccacagatgacccacttcataccacattcacatctttccacctgaaatggctaacaggtattaaatccttggttggtgtttaaagccaacccaagaacagggtgttaggtactgttttaagcacctagataggttagcataggggactgcaaatggtgttccgcaaagcaaatcctgtttttgaccatgaactaagaattttattttattttattttttattttttgtagaaataggatctcactatgttgcccaggctgttcttgaactcctggcctcaaatgatcttcccacttcagcctcccaaagtgcagggattacaggcacaagccaccgtgcccagccaagaatttttatttttgcttttaaatagcaaaagaagaagattctgtgactcatgaaaatgatatgagattcgaattccagtgtctataaataaagttttattggtacacagccaca

SEQ ID NO: 18506 - DNA, 3779 bp, Homo sapiens
  source 1..3779: mol_type = unassigned DNA
gtggggacccgcgctgcctccgccgctcctcggatggtgacggggccctgccgccgcagcccccccaagccccggctccgcaggcccacagcgccggagccccgcaggaatcatgcccaggtccttcctggtcaagaaggtcaaacttgacgcgttctcttcggccgacctggagagcgcctacggacgcgcccgcagcgacctcggcgcgccactgcacgataaagggtacctcagcgactacgtggggccctcgtccgtctacgatggcgacgccgaggctgcgctgctcaaagggccgtcgccggagcccatgtacgcagcagctgtgcgtggagagctgggtccggcggctgcagggtctgcgccgccgcccaccccgcgcccggagctggccaccgctgcgggcggctacatcaacggcgacgcggccgtcagcgagggctacgcggcggacgccttcttcatcaccgacgggcgctcgcggcgtaaggcttccaatgccggcgctgccgccgctccctccacagcctcggcggcggcccccgacggcgacgccggaggcgggggcggggcgggcgggcgcagcttgggatccgggccggggggccggggcggcacgcgcgcgggggcaggcaccgaggcgcgcgcggggccaggggccgcaggtgctggcggccggcacgcgtgcggcgagtgcggcaaaacatacgccacgtcgtcgaacctgagccgccacaagcagacgcaccgcagcctggacagccagctggcgcggcgctgcccgacgtgcggcaaggtgtacgtgtccatgccggccatggccatgcacctgctcacgcacgacctgcgccacaagtgcggcgtgtgcggcaaagccttctcgcggccctggctgctgcagggccacatgcgctcgcacaccggcgagaaacccttcggctgcgcgcactgcggcaaggccttcgccgaccgctccaacctgcgcgcgcacatgcagacgcattcggccttcaagcacttccagtgcaagcgctgcaagaagagcttcgcgctcaagtcctatctcaacaagcactacgagtcggcctgcttcaagggcggcgccggaggccccgcggctcctgcgccgccacagctcagccctgtgcaggcctagggcggcggggcctcccccagccaggtcggctctcagcaatacggccccccagggaagtcttcgctggcgtccgggtggaggggccggagggcgggcccctcctcacagcaatagggggaggggggcccggtcccaccccgccccgcccgccaggggccttgccggccccttcaagcaatagggtcccgaggggagacccaccccgagccccctcccctcccctccagggtgcccccggctttctcccagcaatagggtcgacgagacctagaaccgaacctcatctccgagttgggtctctgaagacgggggtgaggtgaggtagggagcgccctccttctcccgcctctgcgcccctggatcgcgtcgcagggactcaggtcttccccaccccttcccaagccttctagcgcagggcctgcggcccagacgtccagggagccggcccctccccggcagcaggccggggcggagcaggagcgggcgggcctgcagggacgcccctgcctagcagccttcgcggaactcccggcagtgttagacgcgttgtgggtcggggagaggggcggacggcggcaccccctccctcgggttgcttctggggcctcagtcggagccgccctcctaccctcgcctcgcatcctctgccaaatccgaattcttccagcccagcttcccgggctctgtcctccatatcgaataataatgacacatatcgaatcgcatggacttatccgacctcctcagaccccgcttccgccctgccccgggcccccaccccccacccccgtaccccaggcattcgtgttggaggacggattcccggggccggcaggcaggcctgggcgctgccctctacacacctctgtcttcgctttgcgggtaaagccccctgggggggttgcggacgcgtcgggtttctttttctgtatttgtacgttttatttatgaacggattgcactcgggtcagggagggggcgctgaacccccatcttgcccgccgacgccgggggcctgggatgtccgggattactttccacgccccgaggcccgcccctagctgggagcctctagggagcctcaggccccgcctctccgaggcaggcccctcccctgagacccaggccccgcccctgagacccaggccccgcccccactcggttgccaactttcgcccgtctatgccaaagcctcggcggcgaccccgccccaagggcccgccccattggccgccgcctttgtgacgtcactgcatgcagccccacccctcctcccgatcctacccggggctgcccgctccccctccctcttaggtagtccgaagccgactatagagcaataatgcgcactgcatgcgaagctgccgccgcctctagagttactgagaatcaggtatcccctcgccctacccaccccataggcccctagatcagggacgctgcgcggggccggccgcgcagactttctccccacccctccccgacccccacggcagagcccggcggctgtaatggttccatgggcgggggtggggtggttgcccccaagacccctccttcaggcattaatcattcactgaccgttcattgagcacctactatgtgccaggccaattgctgagtccgccaggagcgcagccacctgctgggaggtgtgtttgcaggacaggggtccaaccggcttgggtgggccagggaagaacggcagatgcagagagaccaggtccctaggttcacatgccccctacactcctccccacctcaaccagtccctgctgggcacaactgggctctacctttgagttaggccttttgactccagctgagggggacagatccagggctcctgggcccccacacaggtggccacttctctgatcctctggccaacacacatctgccatgtccagccaggggcagagccatggctggagaagaaggtgccagctgtagcctatggtgtggccagcctcacccccagcagcaagcgtggctgcccccacaaggatgacccaccgctctgcacagcagtgcccacatccaaacaccctacacaaccaggtgtggtgcctgcacagctcccaagctggggcctgcccacctgtgccgcatgcacacgcacacacaggcgcccccacctcaccccaccccatactcctgtctacctacctaaggagaaagctggagggctgtgggcccgtcagggtctcctgcttccccctacaccccgccgccgtggaaagccatgggccccctcccgcccccataactaagcagcacaataaccgacttagcgaattcaggtagaaggaacgtttaggtagcacctattttgtactgattctacaagtagggcccgaggtgcgggggccctcgggtgggggctgcggccgccggcccgcccgcccccacccccgcctgtgccccgccgccttgtacatattcccacccggaataggccgggatttttactcgggccgtgcccctcttccgcccccatttggggccaggccggccggacagacggacggacggacagacctccttcctaagcacaatagcaccagctccccggagcaccgcacctccacaaggagaataaatgccactcttgatagaa

SEQ ID NO: 18507 - DNA, 9808 bp, Homo sapiens
  source 1..9808: mol_type = unassigned DNA
ggctgggcggctcgggagcccgagcggtggcggagcggcgagcagcgagcagcgcctgcgggagcggccggtcggtcgggtccccgcgccccgcacgcccgcacgcccagcggggcccgcattgagcatgggcgcggcggccgtgcgctggcacttgtgcgtgctgctggccctgggcacacgcgggcggctggccgggggcagcgggctcccagggtcagtcgacgtggatgagtgctcagagggcacagatgactgccacatcgatgccatctgtcagaacacgcccaagtcctacaaatgcctctgcaagccaggctacaagggggaaggcaagcagtgtgaagacattgacgagtgtgagaatgactactacaatgggggctgtgtccacgagtgcatcaacatcccggggaactacaggtgtacctgctttgatggcttcatgctggcacacgatggacacaactgcctggatgtggacgagtgtcaggacaataatggtggctgccagcagatctgcgtcaatgccatgggcagctacgagtgtcagtgccacagtggcttcttccttagtgacaaccagcatacctgcatccaccgctccaatgagggtatgaactgcatgaacaaagaccatggctgtgcccacatctgccgggagacgcccaaaggtggggtggcctgcgactgcaggcccggctttgaccttgcccaaaaccagaaggactgcacactaacctgtaattatggaaacggaggctgccagcacagctgtgaggacacagacacaggccccacgtgtggttgccaccagaagtacgccctccactcagacggtcgcacgtgcatcgagacgtgcgcagtcaataacggaggctgcgaccggacatgcaaggacacagccactggcgtgcgatgcagctgccccgttggattcacactgcagccggacgggaagacatgcaaagacatcaacgagtgcctggtcaacaacggaggctgcgaccacttctgccgcaacaccgtgggcagcttcgagtgcggctgccggaagggctacaagctgctcaccgacgagcgcacctgccaggacatcgacgagtgctccttcgagcggacctgtgaccacatctgcatcaactccccgggcagcttccagtgcctgtgtcaccgcggctacatcctctacgggacaacccactgcggagatgtggacgagtgcagcatgagcaacgggagctgtgaccagggctgcgtcaacaccaagggcagctacgagtgcgtctgtcccccggggaggcggctccactggaacgggaaggattgcgtggagacaggcaagtgtctttctcgcgccaagacctccccccgggcccagctgtcctgcagcaaggcaggcggtgtggagagctgcttcctttcctgcccggctcacacactcttcgtgccagactcggaaaatagctacgtcctgagctgcggagttccagggccgcagggcaaggcgctgcagaaacgcaacggcaccagctctggcctcgggcccagctgctcagatgcccccaccacccccatcaaacagaaggcccgcttcaagatccgagatgccaagtgccacctccggccccacagccaggcacgagcaaaggagaccgccaggcagccgctgctggaccactgccatgtgactttcgtgaccctcaagtgtgactcctccaagaagaggcgccgtggccgcaagtccccatccaaggaggtgtcccacatcacagcagagtttgagatcgagacaaagatggaagaggcctcagacacatgcgaagcggactgcttgcggaagcgagcagaacagagcctgcaggccgccatcaagaccctgcgcaagtccatcggccggcagcagttctatgtccaggtctcaggcactgagtacgaggtagcccagaggccagccaaggcgctggaggggcagggggcatgtggcgcaggccaggtgctacaggacagcaaatgcgttgcctgtgggcctggcacccacttcggtggtgagctcggccagtgtgtgtcatgtatgccaggaacataccaggacatggaaggccagctcagttgcacaccgtgccccagcagcgacgggcttggtctgcctggtgcccgcaacgtgtcggaatgtggaggccagtgttctccaggcttcttctcggccgatggcttcaagccctgccaggcctgccccgtgggcacgtaccagcctgagcccgggcgcaccggctgcttcccctgtggagggggtttgctcaccaaacacgaaggcaccacctccttccaggactgcgaggctaaagtgcactgctcccccggccaccactacaacaccaccacccaccgctgcatccgctgccccgtcggcacctaccagcccgagtttggccagaaccactgcatcacctgtccgggcaacaccagcacagacttcgatggctccaccaacgtcacacactgcaaaaaccagcactgcggcggcgagcttggtgactacaccggctacatcgagtcccccaactaccctggcgactacccagccaacgctgaatgcgtctggcacatcgcgcctcccccaaagcgcaggatcctcatcgtggtccctgagatcttcctgcccatcgaggatgagtgcggcgatgttctggtcatgaggaagagtgcctctcccacgtccatcaccacctatgagacctgccagacctacgagaggcccatcgccttcacctcccgctcccgcaagctctggatccagttcaaatccaatgaaggcaacagcggcaaaggcttccaagtgccctatgtcacctacgatgaggactaccagcaactcatagaggacatcgtgcgcgatgggcgcctgtacgcctcggagaaccaccaggaaattttgaaagacaagaagctgatcaaggccctcttcgacgtgctggcgcatccccagaactacttcaagtacacagcccaggaatccaaggagatgttcccacggtccttcatcaaactgctgcgctccaaagtgtctcggttcctgcggccctacaaataaccggggggagcggccctgcctgggggtggcctggtccgcggagggtgcacctgccctccacagtgggagctgcatgggcctccacaccaccttgggaaccccatggcactgcccttcagggaagccgaccagcccatggagaccgagcccaggcacccttcggacccgctgcccctgtgggagcaccctgcttcaggaagcctccctccctccctctgcctcccttccccaggacaccaagagcgccctctcctgagccctggcagaccgactgcaggtagcaggattgcaggaccctctgcctggcctggcgtttcaggagagaggggaagtggggcctgtgctctgggaggcgtggtcatccgagacaggagtccaggggagagaggaggggacaaaggcgccgtctgggggaggtcgatgagcctgtgctggcatccgcgggccccacgctttgccaactcctccagccacaggcaaggccacggctccgggctgttgcgctctaagggttctgtgattggatggaacagagctgctggggaggagactggaagtttctgcattccttcaacagaacatttaatgaagtactctatatatatatataaatatatatataaatatatatatatacttctatttgtgggtactttaggaaaatgccctttggtcactgtaaatatgaattgtgaccccatcccttcccgcatgagcccagtgagtcccagcagctatcagcctccctgaacgattaaacagctcctcccagcatttgcatttgcccttctgtttctgtgaggccggcagcccttggggctggggagagcacagcttgccttggacttgcttctgaacacgaattcttcgagaactaggctcagatgctctgctggagtgttggcctcaccccagtccccttgccagcaacatcactgcccttggacgagactcagtggaagacacttcccctcggacccgttcccaggaggtgcaggggcccagcaataaacggcgaaaggggccttggctcttgccctgtggcagtgaccttggggtccgtactatgcccaggtgtcagcaggaaacaaggccttgctcacaggagcacaggctgtaccaccacaaggagcctcagagcggccagtgaggaaaggggagagagcagagcttgctgtcagaggccaggctcccagtgcagcctcctcttgctacgccatgccacccccattcacagggaaacctctttccttcctataaaggaaagaggttgaattgactcacatttccacatggcttgggaggcctcaggaaacttacaatcatggcggagggtgaaggggaagcaagcgccttcttcacaaggcagcaggagagagaagcaagcagggaaatgtcgggagaaagagagtctgggctgtgaccgagtgcatgtgtcccacccagccggaaggccagcgcctgggatggagccagcagaaccccatgccgaggtccaggaggccttgcctgctcttcatctgcctgcgagctgtaggacctgcatgggaaatggtctgtgtgtttcaggttaacaaatactgaaaatcccaaggaacctgggagaatctgaaaatgaactccagtcttcagctcgaagttgcctctagggttcctcctggtcacccccgggcccagcctggctggcgagaaacaaacacggtttgagaggctgtggcacactgaggaccacacagatggaggcagccaagtgaggtccctggaggttcagggcttggtgacgaggtaggccgtgatcacatattctacagtccaaaagagggcccggagctcagcaattactcacgccgtcacatgtgcccacagtagcgggctccgcggcgtggctcctgctgccatcagctgccttctctgctgaagtccaactcaagtcggagagagagtggagcctctgcacttggggagtaggtcagtgtcaactaacaagccctgccaggggccactgccgctcctctggtcacagtccacgcaggccagccctggtttctggaaagaggcctccctccctccctttgtggagccgtcagtcatccccaagatgagaggcgagcatcctgccgagtgagcctgcagcaacagctcctgaggaaggtgccgggaggggtgtcgcctcttcacgagtgttctccagagaatcagaacccagaggatacagacgtagatgtgtgaggggctgcattatgggaactggctcacagattctggaggccaacaagtcccacgatcggctgtctgcgattgggagaccaggagaagccacaccgtaactcagtctgagtccaaagcccgagaagccaggggccaccctgtgagtcccagcatccaaagccccgagaacgaggaagatggatgtcccagctcccaaagggaggattctcccttcctcctccttcttttctattggggccctcaacagattggatggagtggatgtcttcactcagtctgccaattcccatcctaacctcttctggaaacaccctagcatgttttcccagctagctgggtatccgttcacccaaccaagacgaccatgcaatcaaccatcacacttaaatgtttttgttttgttttttttgttttgttttttgttttctttttttgttttcttttttttttttttttttttttttgagatggagtctcgctctgtcacccaggctggagtgcagtggcgcgatcttggttcactgcaagctccgcctcccgggttcacgccattctcctgcctcagcctcccgagtagctgggactacaggcacccaccaccttgcccggctaatttttttgtatttttagtagagacagggtttcaccatattagccaggatggtctcgatctcctgacctcgtgatccgcccacctcggcctcccaaagtgctgggattacaggcgtgagccaccacgcccagccagggttttcttttttaatcctttccagaaacagaaagagctcttaacctctctgagctctttctgcaattcctttgggcgatttctgaaagttgccacccacgtactcacagatccactgcccgcctctcctcccctcatgttccaggactcaccaccgtggtcagaccatgcccagtgtgcccagggcaaagttggatgggcaggtgcagacgaggcccagccttcatcctgctttccctcgcaagcccttctatagctcccagcccacgggagaggccatgaggagcgcgaggtcgccagcagccccactgggcctcccacaccatctgagtgacttgaattccagggttgggctctgtcttgagtctccacatcagtctcacaccagggaacttgggggtcccccgttaaactacagctgaccctgggcctcagggcgggatggtcccaaggtgagctccgtggacagcaaagcgcatttcttccagttggcatgttgtcgaagccaatggcagcttgactgatgtgaggtggctattccacctggttcaagatggaggtgtagagaaaagggaagtggggaacaaggactgggccaggtaggacggatccacgtaacgaggcccaagaaaaaatggaagctgggggcagagagtccaggaggcccccatgctgtctgaggggaggccggcatagcccctcctcgactgtcgcctgagcagctgatgaggtccccagcgccgcacgctgtgctccagggagaggagccaagaagcaagcgggctgctgggagtccctgcactgccatctggccgggacggaggcgcctgcccggtctccaggctcctctgagcttgggtcagctcctaatggagcatggcaccccagggaaccagaggaactctgtgaagaaaggcatggaaaaccggggtgtctcccgcacagcttcccaggagtcaggtgggacccaggcgtggggggacctttctgccccacattcctggcattccccccaagtttatttctactttccagaaacaagccacgggaagggaaggaacctgcagcagggtttcgaagacagccaggccctccgtgattgagggctcatatagccgctgagggcagcctgcagccaggtggcctcacctgctgcccagaattaggctgtgccttttcccagtccttccccatgccagagcctctccccatctttccccgcgccagagcctcacagccacagccacaccaacctccctcctctcaagcagcagaatcagcctacgctccccagcctcagtgcccctgccccacacaggtcacgctggcaaggcgatgaccagtttccgaaacgctggatccccaagggtacagtgtggcccagtcctcccccacctccatggtggcccaggctgcagggctcacggtgggcccacggtggaggcctcaggcagctttctctccagctacccattggcttaggacacacagataaagtagagctgaaacacgggccaaaacatccccagacaaggatggcacaagaggccaaatttgaaggccttgggagagaagccatttcccctacctctaacgagcgtagttttctgtctgaatggccccccttttcatgcacgctcgttcttaagagacgcaccatccgcaggcagcgtctcagtgaagcctgtcccctgggcttgtccacggcaggaggcccctggcctgtttaagccataccgatgcttaatttacatttttggagttgaatattattccggtgcctccaccacccccagcagaaaaaataagatactgaaataagttgagtcatttcgcaaacatttactgagcacctcctgtgtgccaggctcctagaaagacagggagttggtgccctgcacagatgacaaactgccccagacagcagacagacaaacaaactgccccggacagcagacagacaaacagacacattgccctggacagcagagagacaaacagacacactgccccggacagcagacagacagacacgttgccccggacagcagacagaaaaactgccccggacagcagacagacagacaaactgccccagacagcagacagacaaactgccccggaaagcagacagcaaactgccccagacagcagacagacagacacacttccccagacagcagatagacagacaccctgccccagacagcagacaagctgccctggacagcctgctcaccttgcctgccacagtgcatgccccacagggagaagccttccttctcacccagggagtccagccattttcacctcccctggtccatgctcaggaagtctggtcaccctggcaaactgcacctgacattgaggtcccttttcaccaaagatgcacaaggtgtccatgccgagccgacatcattcaggccaagggcagaggatgtaatgaggggtggagtgaggatgtggagagagagcagagagcgcctcctattctaccgcggctgcctctgcccccacagcacccacagatccctggcccttccaggagtaagtcctgggcaggcagagctggggttggcctgatcccacctgccttgctcttggaaaggacatcaggtgtgggcaaagcatccttgaagcccagacaacacaggcatggcctgcgtgccctcccagcatctgctgcgatggcctcaaggcctctccagtcccctgctgcaccatgccactcagagcccctgagtgagccccctggaattgtctgcaccccccaagccccaacaggaagaagggaaaggtggggaagctgacgctcactcagtgcccactgggtgccaggctctgggctcaaccctctaatatccacacattccatccccccagccccatgtagatggtggggttaagaccattcttcagatgtggaaatgaaggctctgggagaccacaggacatgcccaaggcaaagagttggtagtccctggatttgggaatcaaactcaagcccatctaatccaagggtaggaaatgtctctaaaacgttgatcaatctgaagcttacagattggaaactgggccaggtcagccctggcggtggagtccagagacagagagaaggctgcagggaggggagagaacaggaggatcccgggccagggtgacttcagtgacattccttccctccttcacaagcacgaaaaactcgttcggagaaaagacagcttctgccttccctaccaggcggacagggtactcactgtgccgacgtgagcagacacagccagaggctcaagtgcccttgccgagtgtccccactgctcttggggaggccccggcacagccctgcagagatgcaagtaagagagtgcccagtgccctcggcagatgggtggcagaaagcaggaggaggaagagggagctgaccgatgccgggtgtcttactccgctgagatcagaacctccaacatgccgagcagacgcaggccacattgctcggggaacaggacaccagggcgctgtgctagcggcccgcagacttcacttctggctcctgtgagggcactgtattgtccagacgcttggcaacgactctgcctgcaagtggcaaataccaacataaccacatcttccttttagttgccacaaatattcagttttgttttatccatcatgtcccccatatgcatgtaatgaaacatttgtgaaaatcactttaataataaacaggaaatgaacct

SEQ ID NO: 18508 - DNA, 524 bp, Homo sapiens
  source 1..524: mol_type = unassigned DNA
ccgggagacgcccaaaggtggggtggcctgcgactgcaggcccggctttgaccttgcccaaaaccagaaggactgcacactaacctgtaattatggaaacggaggctgccagcacagctgtgaggacacagacacaggccccacgtgtggttgccaccagaagtacgccctccactcagacggtcgcacgtgcatcgagaaggatgaggctgcaattgagcgctctcagttcaatgccacgtcagtagctgatgtggacaagcgggtgaaacggcggctactcatggagacgtgcgcagtcaataacggaggctgcgaccggacatgcaaggacacagccactggcgtgcgatgcagctgccccgttggattcacactgcagccggacgggaagacatgcaaagacatcaacgagtgcctggtcaacaacggaggctgcgaccacttctgccgcaacaccgtgggcagcttcgagtgcggctgccggaagggctacaagctgctcaccgacgagcgcacctgcc

SEQ ID NO: 18509 - DNA, 2258 bp, Homo sapiens
  source 1..2258: mol_type = unassigned DNA
ggccggtcggtcgggtccccgcgccccgcacgcccgcacgcccagcggggcccgcattgagcatgggcgcggcggccgtgcgctggcacttgtgcgtgctgctggccctgggcacacgcgggcggctggccgggggcagcgggctcccagggtcagtcgacgtggatgagtgctcagagggcacagatgactgccacatcgatgccatctgtcagaacacgcccaagtcctacaaatgcctctgcaagccaggctacaagggggaaggcaagcagtgtgaagacattgacgagtgtgagaatgactactacaatgggggctgtgtccacgagtgcatcaacatcccggggaactacaggtgtacctgctttgatggcttcatgctggcacacgatggacacaactgcctggatgtggacgagtgtcaggacaataatggtggctgccagcagatctgcgtcaatgccatgggcagctacgagtgtcagtgccacagtggcttcttccttagtgacaaccagcatacctgcatccaccgctccaatgagggtatgaactgcatgaacaaagaccatggctgtgcccacatctgccgggagacgcccaaaggtggggtggcctgcgactgcaggcccggctttgaccttgcccaaaaccagaaggactgcacactaacctgtaattatggaaacggaggctgccagcacagctgtgaggacacagacacaggccccacgtgtggttgccaccagaagtacgccctccactcagacggtcgcacgtgcatcgagaaggatgaggctgcaattgagcgctctcagttcaatgccacgtcagtagctgatgtggacaagcgggtgaaacggcggctactcatggagacgtgcgcagtcaataacggaggctgcgaccggacatgcaaggacacagccactggcgtgcgatgcagctgccccgttggattcacactgcagccggacgggaagacatgcaaaggtcagcatgtggagctgtgtgggtgcccctgcctgtactggcctggccaagagcctccgtgtgcttgcatagccgggcccagggctgggctgaacgggggccacgtgtagctgtgggaaaggacacgtggcaatcatttgctttgctgttggagaggccaggaagagggagggctggccagcagcagggtccccagcagagttcgagagaacacaggtcccacggcacatcagcaggttcctgggccaaaaaggcactgatgtcagagaatttggctgcacgctgggttaaacagttaagccagcgtctctactgtgggacttcctgggccctcagtgatagtgtggcttcccaaggcgcgtagaatgtagcgcgtttccgaaccccttgacctttggttgcagtgggtcttgcagagctgatggggacagtctggtgttgggccatctgggacacacaggtctactcatgccaggaaaaataaggacagtgtgtcactactaggggggcgaggctagggggatcccatctgaaaagataaggactcaggacttctgcttgccatcagaaaatgaggagtcaggaagacctgagagtgactggttgaaggaaggagggacagggctggcctgctggtggctggcagtgagggaaggcagaggtgtatcctcccacttgtcccctgagtcaccccacaaagacttactgagtacctcctgggttgaggggaccctcaggaaacaggaagcccagggagctgggagaggagagctgggtgggctctcgagacagccctgcagatgaggaggtccagctacccccaaaggacagacggagccccaagaagctgtgggccctggggcagggtgttaggcctgagtgccggagccctctgtgcagaagggtgaggggcagtgctcagtgcccccagcatcactccagaccaccctccaaacgcccccaccccagcgctgggcagtacccccacactctgccaggaagggagagcctagagagcagggcgtggaggggagaggaactggaacttccaaagtcccatcggggaaaatattgaaagtggaggttagggtgacttaaaatagcttgaggtggactttttttaagcctgtaaaaataaatgtatttttgtacagtgtatgacttcttccttgccaacttgctgggaagaaccgagtgattattgacagaaataacagtgcttccgcctgtttatttgaaaataaagcccttctgtggccacc

SEQ ID NO: 18510 - DNA, 489 bp, Homo sapiens
  source 1..489: mol_type = unassigned DNA
ctccctaaatatttgtggaatgaaggggcacgccttggctttgcagggtatgttcccggcccacagggggctctccatggatctgaggagactggcagggcaggatcggaatcggcaccctggagaagctgtcgttggagacggccttggcgagacagtgtgttgcagctccagctctgtccgctgggttcagccccctcaccttacctcagtcactaacctctgtgcgctcagcgttctcagctgttaagtggacgtaacacaggttgagcatcctttatccaaaatgcttgggaccagaagtgtttccagtgttggatgttttcacatttgggaacatttgcagatacataatgaagtagcttgtggatggacccaagtctaaagatggaacgcatttgttttatatactccttgtacacatacctgaaggcaattttacatggcatttcaataattttgtgcataaaacaaagtttgtgtgaagta

SEQ ID NO: 18511 - DNA, 544 bp, Homo sapiens
  source 1..544: mol_type = unassigned DNA
gggcacgtaagcacacaagcagttgaacgtggaaggcgttgggagccagataatacaagatgtggactcttgtggctggaacagctgggtggccttggctttgcagggtatgttcccggcccacagggggctctccatggatctgaggagactggcagggcaggatcggaatcggcaccctggagaagctgtcgttggagacggccttggcgagacagtgtgttgcagctccagctctgtccgctgggttcagccccctcaccttacctcagtcactaacctctgtgcgctcagcgttctcagctgttaagtggacgtaacacaggttgagcatcctttatccaaaatgcttgggaccagaagtgtttccagtgttggatgttttcacatttgggaacatttgcagatacataatgaagtagcttgtggatggacccaagtctaaagatggaacgcatttgttttatatactccttgtacacatacctgaaggcaattttacatggcatttcaataattttgtgcataaaacaaagtttgtgtg

SEQ ID NO: 18512 - DNA, 530 bp, Homo sapiens
  source 1..530: mol_type = unassigned DNA
acattgacgagtgtgagaatgactactacaatgggggctgtgtccacgagtgcatcaacatcccggggaactacaggtgtacctgctttgatggcttcatgctggcacacgatggacacaactgcctggagacagggtcttgctatattgcccaggcctctggaactcctgggctcaggtgatctgcccacctcgacctcccaaagtgctgggattacaggcttgacccgccaccttacctcaggcattacttcaggaatgcttcacaaaagtggaaccactggatcaaacgaccatttggttttttatggctttctaaaagggctcagcaaagcttctgttgtgccagctggtttgtgggtgtgtggtagaggatactgggtgtcctgagtgctctggaactttccctcttaatggggtgttagccttagacctgcctgcctgtttttgtccaacccatgttggatgtcagataagtttgttgtggaaaacatctgtgagcatgtaattacaccccgaataaataccca

SEQ ID NO: 18513 - DNA, 282 bp, Homo sapiens
  source 1..282: mol_type = unassigned DNA
acattgacgagtgtgagaatgactactacaatgggggctgtgtccacgagtgcatcaacatcccggggaactacaggtgtacctgctttgatggcttcatgctggcacacgatggacacaactgcctgggaatgcttcacaaaagtggaaccactggatcaaacgaccatttggttttttatggctttctaaaagggctcagcaaagcttctgttgtgccagctggtttgtgggtgtgtggtagaggatactgggtgtcctgagtgctctggaactttccct

SEQ ID NO: 18514 - DNA, 1119 bp, Homo sapiens
  source 1..1119: mol_type = unassigned DNA
cccagcggggcccgcattgagcatgggcgcggcggccgtgcgctggcacttgtgcgtgctgctggccctgggcacacgcgggcggctggccgggggcagcgggctcccagggtcagtcgacgtggatgagtgctcagagggcacagatgactgccacatcgatgccatctgtcagaacacgcccaagtcctacaaatgcctctgcaagccaggctacaagggggaaggcaagcagtgtgaagacattgacgagtgtgagaatgactactacaatgggggctgtgtccacgagtgcatcaacatcccggggaactacaggtgtacctgctttgatggcttcatgctggcacacgatggacacaactgcctggatgtggacgagtgtcaggacaataatggtggctgccagcagatctgcgtcaatgccatgggcagctacgagtgtcagtgccacagtggcttcttccttagtgacaaccagcatacctgcatccaccgctccaatgagggtatgaactgcatgaacaaagaccatggctgtgcccacatctgccgggagacgcccaaaggtggggtggcctgcgactgcaggcccggctttgaccttgcccaaaaccagaaggactgcacactaacctgtaattatggaaacggaggctgccagcacagctgtgaggacacagacacaggccccacgtgtggttgccaccagaagtacgccctccactcagacggtcgcacgtgcatcgagacgtgcgcagtcaataacggaggctgcgaccggacatgcaaggacacagccactggcgtgcgatgcagctgccccgttggattcacactgcagccggacgggaagacatgcaaagacatcaacgagtgcctggtcaacaacggaggctgcgaccacttctgccgcaacaccgtgggcagcttcgagtgcggctgccggaagggctacaagctgctcaccgacgagcgcacctgccaggacatcgacgagtgctccttcgagcggacctgtgaccacatctgcatcaactccccgggcagcttccagtgcctcatcaaactgctgcgctccaaagtgtctcggttcctgcggccctacaaataaccggg

SEQ ID NO: 18515 - DNA, 3147 bp, Homo sapiens
  source 1..3147: mol_type = unassigned DNA
ggaagggcctgtgggtttattataaggcggagctcggcgggagaggtgcgggccgaatccgagccgagcggagaggaatccggcagtagagagcggactccagccggcggaccctgcagccctcgcctgggacagcggcgcgctgggcaggcgcccaagagagcatcgagcagcggaacccgcgaagccggcccgcagccgcgacccgcgcagcctgccgctctcccgccgccggtccgggcagcatgaggcgcgcggcgctctggctctggctgtgcgcgctggcgctgagcctgcagccggccctgccgcaaattgtggctactaatttgccccctgaagatcaagatggctctggggatgactctgacaacttctccggctcaggtgcaggtgctttgcaagatatcaccttgtcacagcagaccccctccacttggaaggacacgcagctcctgacggctattcccacgtctccagaacccaccggcctggaggctacagctgcctccacctccaccctgccggctggagaggggcccaaggagggagaggctgtagtcctgccagaagtggagcctggcctcaccgcccgggagcaggaggccaccccccgacccagggagaccacacagctcccgaccactcatctggcctcaacgaccacagccaccacggcccaggagcccgccacctcccacccccacagggacatgcagcctggccaccatgagacctcaacccctgcaggacccagccaagctgaccttcacactccccacacagaggatggaggtccttctgccaccgagagggctgctgaggatggagcctccagtcagctcccagcagcagagggctctggggagcaggacttcacctttgaaacctcgggggagaatacggctgtagtggccgtggagcctgaccgccggaaccagtccccagtggatcagggggccacgggggcctcacagggcctcctggacaggaaagaggtgctgggaggggtcattgccggaggcctcgtggggctcatctttgctgtgtgcctggtgggtttcatgctgtaccgcatgaagaagaaggacgaaggcagctactccttggaggagccgaaacaagccaacggcggggcctaccagaagcccaccaaacaggaggaattctatgcctgacgcgggagccatgcgccccctccgccctgccactcactaggcccccacttgcctcttccttgaagaactgcaggccctggcctcccctgccaccaggccacctccccagcattccagcccctctggtcgctcctgcccacggagtcgtggggtgtgctgggagctccactctgcttctctgacttctgcctggagacttagggcaccaggggtttctcgcataggacctttccaccacagccagcacctggcatcgcaccattctgactcggtttctccaaactgaagcagcctctccccaggtccagctctggaggggagggggatccgactgctttggacctaaatggcctcatgtggctggaagatcctgcgggtggggcttggggctcacacacctgtagcacttactggtaggaccaagcatcttgggggggtggccgctgagtggcaggggacaggagtccactttgtttcgtggggaggtctaatctagatatcgacttgtttttgcacatgtttcctctagttctttgttcatagcccagtagaccttgttacttctgaggtaagttaagtaagttgattcggtatccccccatcttgcttccctaatctatggtcgggagacagcatcagggttaagaagactttttttttttttttttaaactaggagaaccaaatctggaagccaaaatgtaggcttagtttgtgtgttgtctcttgagtttgtcgctcatgtgtgcaacagggtatggactatctgtctggtggccccgtttctggtggtctgttggcaggctggccagtccaggctgccgtggggccgccgcctctttcaagcagtcgtgcctgtgtccatgcgctcagggccatgctgaggcctgggccgctgccacgttggagaagcccgtgtgagaagtgaatgctgggactcagccttcagacagagaggactgtagggagggcggcaggggcctggagatcctcctgcagaccacgcccgtcctgcctgtggcgccgtctccaggggctgcttcctcctggaaattgacgaggggtgtcttgggcagagctggctctgagcgcctccatccaaggccaggttctccgttagctcctgtggccccaccctgggccctgggctggaatcaggaatattttccaaagagtgatagtcttttgcttttggcaaaactctacttaatccaatgggtttttccctgtacagtagattttccaaatgtaataaactttaatataaagtagtcctgtgaatgccactgccttcgcttcttgcctctgtgctgtgtgtgacgtgaccggacttttctgcaaacaccaacatgttgggaaacttggctcgaatctctgtgccttcgtctttcccatggggagggattctggttccagggtccctctgtgtatttgcttttttgttttggctgaaattctcctggaggtcggtaggttcagccaaggttttataaggctgatgtcaatttctgtgttgccaagctccaagccccatcttctaaatggcaaaggaaggtggatggccccagcacagcttgacctgaggctgtggtcacagcggaggtgtggagccgaggcctaccccgcagacaccttggacatcctcctcccacccggctgcagaggccagaggcccccagcccagggctcctgcacttacttgcttatttgacaacgtttcagcgactccgttggccactccgagaggtgggccagtctgtggatcagagatgcaccaccaagccaagggaacctgtgtccggtattcgatactgcgactttctgcctggagtgtatgactgcacatgactcgggggtggggaaaggggtcggctgaccatgctcatctgctggtccgtgggacggtgcccaagccagaggctgggttcatttgtgtaacgacaataaacggtacttgtcatttcgggcaa

SEQ ID NO: 18516 - DNA, 1523 bp, Homo sapiens
  source 1..1523: mol_type = unassigned DNA
ttattataaggcggagctcggcgggagaggtgcgggccgaatccgagccgagcggagaggaatccggcagtagagagcggactccagccggcggaccctgcagccctcgcctgggacagcggcgcgctgggcaggcgcccaagagagcatcgagcagcggaacccgcgaagccggcccgcagccgcgacccgcgcagcctgccgctctcccgccgccggtccgggcagcatgaggcgcgcggcgctctggctctggctgtgcgcgctggcgctgagcctgcagccggccctgccgcaaattgtggctactaatttgccccctgaagatcaagatggctctggggatgactctgacaacttctccggctcaggtgcaggtgctttgcaagatatcaccttgtcacagcagaccccctccacttggaaggacacgcagctcctgacggctattcccacgtctccagaacccaccggcctggaggctacagctgcctccacctccaccctgccggctggagaggggcccaaggagggagaggctgtagtcctgccagaagtggagcctggcctcaccgcccgggagcaggaggccaccccccgacccagggagaccacacagctcccgaccactcatctggcctcaacgaccacagccaccacggcccaggagcccgccacctcccacccccacagggacatgcagcctgtccactttgtttcgtggggaggtctaatctagatatcgacttgtttttgcacatgtttcctctagttctttgttcatagcccagtagaccttgttacttctgaggtaagttaagtaagttgattcggtatccccccatcttgcttccctaatctatggtcgggagacagcatcagggttaagaagactttttttttttttttttaaactaggagaaccaaatctggaagccaaaatgtaggcttagtttgtgtgttgtctcttgagtttgtcgctcatgtgtgcaacagggtatggactatctgtctggtggccccgtttctggtggtctgttggcaggctggccagtccaggctgccgtggggccgccgcctctttcaagcagtcgtgcctgtgtccatgcgctcagggccatgctgaggcctgggccgctgccacgttggagaagcccgtgtgagaagtgaatgctgggactcagccttcagacagagaggactgtagggagggcggcaggggcctggagatcctcctgcagaccacgcccgtcctgcctgtggcgccgtctccaggggctgcttcctcctggaaattgacgaggggtgtcttgggcagagctggctctgagcgcctccatccaaggccaggttctccgttagctcctgtggccccaccctgggccctgggctggaatcaggaatattttccaaagagtgatagtcttttgcttttggcaaaactctacttaatccaatgggtttttccctgtacagtagattttccaaatgtaataaactttaatataaagtagtcctgtgaa

SEQ ID NO: 18517 - DNA, 646 bp, Homo sapiens
  source 1..646: mol_type = unassigned DNA
ccgcgttggcccggggagccgggccagggctgcgtggggggcgcgggcgagcgtctgcagggccctcgggcttgccgtgggcggctcgagcaaattgtggctactaatttgccccctgaagatcaagatggctctggggatgactctgacaacttctccggctcaggtgcaggtgctttgcaagatatcaccttgtcacagcagaccccctccacttggaaggacacgcagctcctgacggctattcccacgtctccagaacccaccggcctggaggctacagctgcctccacctccaccctgccggctggagaggggcccaaggagggagaggctgtagtcctgccagaagtggagcctggcctcaccgcccgggagcaggaggccaccccccgacccagggagaccacacagctcccgaccactcatctggcctcaacgaccacagccaccacggcccaggagcccgccacctcccacccccacagggacatgcagcctggccaccatgagacctcaacccctgcaggacccagccaagctgaccttcacactccccacacagaggatggaggtccttctgccaccgagagggctgctgaggatggagcctccagtcagctcccagcagcagagggctctgggg

SEQ ID NO: 18518 - DNA, 558 bp, Homo sapiens
  source 1..558: mol_type = unassigned DNA
actgctaatgtggcatctggacaagtctcagcagcgctgaccctccgtaagcgttgcctcgtgtagtagctgccagttattgagcgctttggttttttttttctttacagagtctgtctcatgggagatgaggtagggacagtcgtttctgagaccgatgtgtaaagcgccctccctgcttcccagcaaattgtggctactaatttgccccctgaagatcaagatggctctggggatgactctgacaacttctccggctcaggtgcaggtgctttgcaagatatcaccttgtcacagcagaccccctccacttggaaggacacgcagctcctgacggctattcccacgtctccagaacccaccggcctggaggctacagctgcctccacctccaccctgccggctggagaggggcccaaggagggagaggctgtagtcctgccagaagtggagcctggcctcaccgcccgggagcaggaggccaccccccgacccagggagaccacacagctcccgaccactcatctggcctcaacgaccacagccaccacggcccag

SEQ ID NO: 18519 - DNA, 591 bp, Homo sapiens
  source 1..591: mol_type = unassigned DNA
attataaggcggagctcggcgggagaggtgcgggccgaatccgagccgagcggagaggaatccggcagtagagagcggactccagccggcggaccctgcagccctcgcctgggacagcggcgcgctgggcaggcgcccaagagagcatcgagcagcggaacccgcgaagccggcccgcagccgcgacccgcgcagcctgccgctctcccgccgccggtccgggcagcatgaggcgcgcggcgctctggctctggctgtgcgcgctggcgctgagcctgcagccggccctgccgagtctgtctcatgggagatgaggtagggacagtcgtttctgagaccgatgtgtaaagcgccctccctgcttcccagcaaattgtggctactaatttgccccctgaagatcaagatggctctggggatgactctgacaacttctccggctcaggtgcaggtgctttgcaagatatcaccttgtcacagcagaccccctccacttggaaggacacgcagctcctgacggctattcccacgtctccagaacccaccggcctggaggctacagctgcctccacctccaccctgccggctgga

SEQ ID NO: 18520 - DNA, 3291 bp, Homo sapiens
  source 1..3291: mol_type = unassigned DNA
ttcagcccctctcccgggctgcgcctccgcactccgggcccgggcagaagggggtgcgcctcggccccaccacccagggagcagccgagctgaaaggccgggaaccgcggcttgcggggaccacagctcccgaaagcgacgttcggccaccggaggagcgggagccaagcaggcggagctcggcgggagaggtgcgggccgaatccgagccgagcggagaggaatccggcagtagagagcggactccagccggcggaccctgcagccctcgcctgggacagcggcgcgctgggcaggcgcccaagagagcatcgagcagcggaacccgcgaagccggcccgcagccgcgacccgcgcagcctgccgctctcccgccgccggtccgggcagcatgaggcgcgcggcgctctggctctggctgtgcgcgctggcgctgagcctgcagccggccctgccgcaaattgtggctactaatttgccccctgaagatcaagatggctctggggatgactctgacaacttctccggctcaggtgcaggtgctttgcaagatatcaccttgtcacagcagaccccctccacttggaaggacacgcagctcctgacggctattcccacgtctccagaacccaccggcctggaggctacagctgcctccacctccaccctgccggctggagaggggcccaaggagggagaggctgtagtcctgccagaagtggagcctggcctcaccgcccgggagcaggaggccaccccccgacccagggagaccacacagctcccgaccactcatctggcctcaacgaccacagccaccacggcccaggagcccgccacctcccacccccacagggacatgcagcctggccaccatgagacctcaacccctgcaggacccagccaagctgaccttcacactccccacacagaggatggaggtccttctgccaccgagagggctgctgaggatggagcctccagtcagctcccagcagcagagggctctggggagcaggacttcacctttgaaacctcgggggagaatacggctgtagtggccgtggagcctgaccgccggaaccagtccccagtggatcagggggccacgggggcctcacagggcctcctggacaggaaagaggtgctgggaggggtcattgccggaggcctcgtggggctcatctttgctgtgtgcctggtgggtttcatgctgtaccgcatgaagaagaaggacgaaggcagctactccttggaggagccgaaacaagccaacggcggggcctaccagaagcccaccaaacaggaggaattctatgcctgacgcgggagccatgcgccccctccgccctgccactcactaggcccccacttgcctcttccttgaagaactgcaggccctggcctcccctgccaccaggccacctccccagcattccagcccctctggtcgctcctgcccacggagtcgtggggtgtgctgggagctccactctgcttctctgacttctgcctggagacttagggcaccaggggtttctcgcataggacctttccaccacagccagcacctggcatcgcaccattctgactcggtttctccaaactgaagcagcctctccccaggtccagctctggaggggagggggatccgactgctttggacctaaatggcctcatgtggctggaagatcctgcgggtggggcttggggctcacacacctgtagcacttactggtaggaccaagcatcttgggggggtggccgctgagtggcaggggacaggagtccactttgtttcgtggggaggtctaatctagatatcgacttgtttttgcacatgtttcctctagttctttgttcatagcccagtagaccttgttacttctgaggtaagttaagtaagttgattcggtatccccccatcttgcttccctaatctatggtcgggagacagcatcagggttaagaagactttttttttttttttttaaactaggagaaccaaatctggaagccaaaatgtaggcttagtttgtgtgttgtctcttgagtttgtcgctcatgtgtgcaacagggtatggactatctgtctggtggccccgtttctggtggtctgttggcaggctggccagtccaggctgccgtggggccgccgcctctttcaagcagtcgtgcctgtgtccatgcgctcagggccatgctgaggcctgggccgctgccacgttggagaagcccgtgtgagaagtgaatgctgggactcagccttcagacagagaggactgtagggagggcggcaggggcctggagatcctcctgcagaccacgcccgtcctgcctgtggcgccgtctccaggggctgcttcctcctggaaattgacgaggggtgtcttgggcagagctggctctgagcgcctccatccaaggccaggttctccgttagctcctgtggccccaccctgggccctgggctggaatcaggaatattttccaaagagtgatagtcttttgcttttggcaaaactctacttaatccaatgggtttttccctgtacagtagattttccaaatgtaataaactttaatataaagtagtcctgtgaatgccactgccttcgcttcttgcctctgtgctgtgtgtgacgtgaccggacttttctgcaaacaccaacatgttgggaaacttggctcgaatctctgtgccttcgtctttcccatggggagggattctggttccagggtccctctgtgtatttgcttttttgttttggctgaaattctcctggaggtcggtaggttcagccaaggttttataaggctgatgtcaatttctgtgttgccaagctccaagccccatcttctaaatggcaaaggaaggtggatggccccagcacagcttgacctgaggctgtggtcacagcggaggtgtggagccgaggcctaccccgcagacaccttggacatcctcctcccacccggctgcagaggccagaggcccccagcccagggctcctgcacttacttgcttatttgacaacgtttcagcgactccgttggccactccgagaggtgggccagtctgtggatcagagatgcaccaccaagccaagggaacctgtgtccggtattcgatactgcgactttctgcctggagtgtatgactgcacatgactcgggggtggggaaaggggtcggctgaccatgctcatctgctggtccgtgggacggtgcccaagccagaggctgggttcatttgtgtaacgacaataaacggtacttgtcatttcgggc

SEQ ID NO: 18521 - DNA, 6392 bp, Homo sapiens
  source 1..6392: mol_type = unassigned DNA
gcccagcgctggcgcagtgagaacttcgagagacccgtggacctggagggctctggggatgatgactcctttcccgatgatgaactggatgacctctactcggggtcgggctcgggctgtaagtacccccctccctacctctgcctgggggcagtgaccagtctgtatccagcctcaactctgagaagcccacggggggcttgcttcagtgaggcagggggcattcactgcctgggtcaggcaagttcttcttgctctggatccccagaacaagaagggcagaacatccttctggggatagaacaagacctgggaggacctcagggcccagaatgtccaggtctccagggtcccacgtctgcatctttgtgtgtgctatgtggctttctctgcagaccttgcttggttccggtggtcccgtcaggtgcaataagctgtggccaatggtggggttagggcagtgatgacacagggcaggtgcttcaagtggtgcctgggatggccccgccctggggaaggggagccaggtcagctgggtctagcagaatctcgggagagaagggcaccgcgaaccccactctgccatgtagcaactgtgtgcccctcggtgctccccctccctgaatccctgtattttcacctgtggatggtgagaaatacgacttcttctcagtgcctctaggagggtttgggataggaagctggggtctggcacagaggaggagctctcaaaatggtagcaaaaagaaggcagctgagactgggcccagtgagggcacgggctggcatctgaggagatggtacggggtctgcacgccacagagctggctccccacagccctcgcctctggtctcccctccttagccaagtcctttgagcctctttcaaattaatctttgtaaaacccgtttatattgggtcacatctctattcgcaaagttccctggctcccctccctcctgcctggttccgagcccaggagctggctgtggcttctccctcccccatcccctactccccatctcatttcctcccaagttccttcactgtcccggctttgcgtcagccagattgctcaagcagttcccctgcctcaagggcttcttttcccttttaccctccgcctctgcctctgggggaagcccttagtgtaccacccctgccttgagcttgtggtaggggtgcctttggggtctgactcttcccagaatgccactcctgtgttcccctgcaagccccagcaagttttgcagccagtagcgcctcagttgctgctgcctggattcaacctcatagaaactgtaggctgggtgggcaggaatagtcaaggaaggcttcccgggagaggcggcccccagaatttttgacttggcagagagaagttggggaacatcagcaactgaccacctttagctgggctgtgccttcctcctttctctcatcttttctgggaaaattgggtaaagagagggggttgggagacctaatcttgatggccattgcttacctgggatcctcatgcccctcacaaccacccagctccctagctctctccctctcccccaccccctcagacttcgagcaggagtcgggcattgagacagccatgcgcttcagcccagatgtagccctggcggtgtccaccacacctgcggtgctgcccaccacgaacatccagcctgtgggcacaccatttgaagagctcccctctgagcgccccaccctggagccagccaccagccccctggtggtgacagaagtcccggaagagcccagccagagagccaccaccgtctccactaccatggctaccactgctgccacaagcacaggggacccgactgtggccacagtgcctgccacagtggccaccgccacccccagcacccctgcagcacccccttttacggccaccactgctgttataaggaccactggcgtacggaggcttctgcctctcccactgaccacagtggctacggcacgggccactacccccgaggcgccctccccgcccaccacggcggctgtcttggacaccgaggccccaacacccaggctggtcagcacagctacctcccggccaagagcccttcccaggccggccaccacccaggagcctgacatccctgagaggagcaccctgcccctggggaccactgcccctggacccacagaggtggctcagaccccaactccagagaccttcctgaccacaatccgggatgagccagaggttccggtgagtggggggcccagtggagacttcgagctgccagaagaagagaccacacaaccagacacagccaatgaggtggtagctgtgggaggggctgcggccaaggcatcatctccacctgggacactgcccaagggtgcccgcccgggccctggcctcctggacaatgccatcgactcgggcagctcagctgctcagctgcctcagaagagtatcctggagcggaaggaggtgctcgtagctgtgattgtgggcggggtggtgggcgccctctttgctgccttcttggtcacactgctcatctatcgtatgaagaaaaaggatgagggcagctacacgctggaggaacccaagcaggcgagcgtcacataccagaagcctgacaagcaggaggagttctatgcctagtggagccacagtgcctccctgcagcctcaacaccaccctgctgtccagtccccagcctggccccaccagcccaagcctgggactgggcctggaacctggccccagttcttctctgccctctctcccaaggtctgcccaggctgccagcctcacacagatcttccccgaggaagaggggctgctgccatctgccccagactgtgcccttacgagctcatctcttgttcccctcatccctgccaccagtctggggcttcaggacctcatgtcagatggatgggaggaagaaagctcctgattggctggtggtggaagaaagggtggggcttgagatgagcctgagccctgacttggcacccacagtgctcactgagatctcctttttggggcagagaggcactcaggctggtttccaggacaaacatttggtaaacacagcccttgaaatcatctagacactgcaacctcttgctcgtatcccagggcctctctctagctgggtgagagggtgtcccttgtcaccagcctgttttgtcctggtctctctggggttgttgaatctctcctcttgcctgccaagtacacatgtacccagacttcatttctttctgcatcttcccccaagaaacagcttcctgagggtgctggggcagccactggtgaggaggggctgctctgatgtccctcctatgaggggactctgcacagacaccattgcccacactatcaccatattttcactcagtcacacacaagacaaaagcatgcaatgacaaaaccatacgcaatcctgaccgcccagccaatcaagacatatcacagaacacacgcgtccttccaagaatgtttatcctcatgcatcacttacacacccccagacacgtactgcaatgcaagtcactagtcatggtcacatgacagtgacagtgtggcctcctcctaccccaaatacacccacactctggcaccacacacattgtctccagctttcaggcttactggggagggtggaatcgagccagaacaatcagcccatattgggtccccctaagttgccccgtcatactcagtcccatgccatggtgcccacaccaaccatgcagccgccaaccccagccagtgtcagacacaatcccatgtggatgcacagtctcactccacatgacctgctctcaatgctggagggaaacaggcaggcccttgcctttctcggaaaaagtgtggggccacagcccttttagggcattgcatgcaggtgggcctggcttcacccctacctgcttcctccccaccgcagctggcagagggggaggtttggggccagacccccactagctgggagcctgggggctcctctaaggctgaggaaggaaatttggccccaggttgttggggggtcttgggtctcccaggacggaaggcccagggcagggagggggcatgtggttgggctcctttatctccctgtgtccccttcctgctttgagctagggggctgactctgcctcccaggacacaagtctccaaagtgcctgtgagggcgggccctccgcaccctctgccctctgcctggcaggccaacctcagcccacctgcccagaggccctccctgtggacaccccctcacctatttggccaaacaattctggctgcagcttcaggggccatggctggaagcagcccctgcagatccctcaggccccgaggtcagggtttgagggatgagaccaggtgatagtgggggaggggttacttcctttgttacctagcaagtagggctatttccatcggtattttaaatgtggggtcacagatcttttggggagggtgtgcttggcagggggcctcttggagccaaagggatgtggtgtgagttgcgattggctggcactcacacccccacccctcacccacatcccagattcaagtcaggaaggcaggttttatttcagggcccttttcaagatgccctggcagcagatttctgcaggatgaggggtagcggtgtgtaggcagtgagggggaggttccaggggctgtcccacagcctgtcttttccaggctgggctccatcttccagtcccaaaaccctccttcacagggcccagaggcttgtgaggaagccaggtggacccagccttagaagagtgggcatggggggcccctgatatctggagggggcgggttggcctcagtcatctttggagcagaagggctgggtcctggggccacagaccacaaggctcagcctccctaccctgctccctggggtgctgctgtcttggagagcacagctctggtgagacggcctgggcaggccgaggctgagaaaccagggaggatagaggagaaaagggcttgggcccccagccccagaagatgctggaccccaggtgggagacccaacagtgggtgcagtttctcagtagggctggagccaatggtgggggtggccccggcaggcctggctcctcacatcccaggggttggcttctgatttggggcttgggctccaggcactggcttctcttctctgtgtccttagcatttgagagaagaggccaggggccttgttcatggatccctggacccaaggcagatgtccaggctttatcctcctgaggatgaggagtctgaccagcccaaatctgccctggccggcctgaccggggcaaggcagtccaagagagttcagtgaggaccagctaggctctcccaggtgcaatgtgggtgcagggccctcatgtccccctacccctgcctgtgatggagtgttctgaggggctttggcatttgctggaagcacagggagttccaaatgagagggagcttctgtggcttgagagcctctggggccttggctgccagagcacgaggcaggccaggacctggagagcccagaccctgtctccaggaggccaggaggccagatgggggccttgcctgaaagactggtccccttgatcgctggaggcatgtgggtggcaaccagggctgggcagggcttagggtgtgtgggccaaacccccctggggttggcaaagccgcctgtcaggcctcctggtgggggcccctggacacagggagcagaccctctgcctcatggggtaggagtggctgcctcctgtgttctctggatttcttctcccaacaactacaaccctggacttgcctccccaggcctcttgcctgtaaatagaagcccgcaaactgtacagatttacagaggcatcgagactgggccctgggagttgccatctgagagccgatggccccagcatcccccaggtgcctgcctggcaccacagtgaccctggcctcagcgtggcaaatgcatgtaaatatttttcgtaggcagcgtggctccagagagccccctgaagacagtgtccctccctcctgtgagtcctttctcctgtacagaacctgcctggggtgggtgggggtctgccattccctcccccaggccttccctgccccttctctcccctgtaacctgtttattaaccatacctgtcctgagttcatggccaaaaccttaaataagaaaaacaaaagaaaaagacagtggaaaaaagagaccaaggcgcctgccccactgcgggtactctcctgttccagccttgtgaaggaactggttttgtttttgtttttttttttttttttttttttttgtttgtttgtttttttaacacttcctgtgctgtgcccatttataagaggaaataaaattaagctgaaatg

SEQ ID NO: 18522 - DNA, 1580 bp, Homo sapiens
  source 1..1580: mol_type = unassigned DNA
gctgtgggcgcggagctgcgaggcggagccgggcggccgagccgggagcccgcgagcctagagcgcgtcggtccagccgccgggccgcgccgccgccaagcagccgccccgcgcgccgcgcctcgggaacaaaggcgcccgcccgccgcccgccgcccgcgcccgcgccgccgccatgaagccggggccgccgcaccgtgccggggccgcccacggggccggcgccggggccggggccgcggccgggcccggggcccgcgggctgctcctgccaccgctgctgctgctgctgctggcggggcgcgccgcgggggcccagcgctggcgcagtgagaacttcgagagacccgtggacctggagggctctggggatgatgactcctttcccgatgatgaactggatgacctctactcggggtcgggctcgggctacttcgagcaggagtcgggcattgagacagccatgcgcttcagcccagatgtagccctggcggtgtccaccacacctgcggtgctgcccaccacgaacatccagcctgtgggcacaccatttgaagagctcccctctgagcgccccaccctggagccagccaccagccccctggtggtgacagaagtcccggaagagcccagccagagagccaccaccgtctccactaccatggctaccactgctgccacaagcacaggggacccgactgtggccacagtgcctgccacagtggccaccgccacccccagcacccctgcagcacccccttttacggccaccactgctgttataaggaccactggcgtacggaggcttctgcctctcccactgaccacagtggctacggcacgggccactacccccgaggcgccctccccgcccaccacggcggctgtcttggacaccgaggccccaacacccaggctggtcagcacagctacctcccggccaagagcccttcccaggccggccaccacccaggagcctgacatccctgagaggagcaccctgcccctggggaccactgcccctggacccacagaggtggctcagaccccaactccagagaccttcctgaccacaatccgggatgagccagaggttccggtgagtggggggcccagtggagacttcgagctgccagaagaagagaccacacaaccagacacagccaatgaggtggtagctgtgggaggggctgcggccaaggcatcatctccacctgggacactgcccaagggtgcccgcccgggccctggcctcctggacaatgccatcgactcgggcagctcagctgctcagctgcctcagaagagtatcctggagcggaaggaggtgctcgtagctgtgattgtgggcggggtggtgggcgccctctttgctgccttcttggtcacactgctcatctatcgtatgaagaaaaaggatgagggcagctacacgctggaggaacccaagcaggcgagcgtcacataccagaagcctgacaagcaggaggagttctatgcctagtggagccacagtgcctccctgcagcctcaacaccaccctgctgtccagtccccagcctggccccaccagcccaagc

SEQ ID NO: 18523 - DNA, 589 bp, Homo sapiens
  source 1..589: mol_type = unassigned DNA
gtctaggagcgatgtgtgtttagggaacatacgtggccatggcggtgggtccgtgttgtgggccttggtgaggcccagcgctggcgcagtgagaacttcgagagacccgtggacctggagggctctggggatgatgactcctttcccgatgatgaactggatgacctctactcggggtcgggctcgggctacttcgagcaggagtcgggcattgagacagccatgcgcttcagcccagatgtagccctggcggtgtccaccacacctgcggtgctgcccaccacgaacatccagcctgtgggcacaccatttgaagagctcccctctgagcgccccaccctggagccagccaccagccccctggtggtgacagaagtcccggaagagcccagccagagagccaccaccgtctccactaccatggctaccactgctgccacaagcacaggggacccgactgtggccacagtgcctgccacagtggccaccgccacccccagcacccctgcagcacccccttttacggccaccactgctgttataaggaccactggcgtacggaggcttctgcctctcccactgaccacag

SEQ ID NO: 18524 - DNA, 355 bp, Homo sapiens
  source 1..355: mol_type = unassigned DNA
ctgctgcctcccaggctccgttccccaacccctatttctctgtcccctctgggagttgcagctaccagcaccccctctgtagtgttcctgagagggcctcatgagtcccagcgcccatgcctgcaggtcccaggtgtcctcgcattaagttcccgctgagcatcccaggcatgctgacacgctgagccctctgtggctgcttttagatgtgcagtcaagatgaaaaatgaccagtttctaagagaaagtcatcagccagacactgaaagccttctgggatgggaccccaggcccagcgctggcgcagtgagaacttcgagagacccgtggacctggagggctctggggatgatga

SEQ ID NO: 18525 - DNA, 2613 bp, Homo sapiens
  source 1..2613: mol_type = unassigned DNA
actcgccgcagcctgcgcgccttctccagtccgcggtgccatggcccccgcccgtctgttcgcgctgctgctgttcttcgtaggcggagtcgccgagtcgatccgagagactgaggtcatcgacccccaggacctcctagaaggccgatacttctccggagccctaccagacgatgaggatgtagtggggcccgggcaggaatctgatgactttgagctgtctggctctggagatctggatgacttggaagactccatgatcggccctgaagttgtccatcccttggtgcctctagataaccatatccctgagagggcagggtctgggagccaagtccccaccgaacccaagaaactagaggagaatgaggttatccccaagagaatctcacccgttgaagagagtgaggatgtgtccaacaaggtgtcaatgtccagcactgtgcagggcagcaacatctttgagagaacggaggtcctggcagctctgattgtgggtggcatcgtgggcatcctctttgccgtcttcctgatcctactgctcatgtaccgtatgaagaagaaggatgaaggcagctatgacctgggcaagaaacccatctacaagaaagcccccaccaatgagttctacgcgtgaagcttgcttgtgggcactggcttggactttagcggggagggaagccaggggattttgaagggtggacattagggtagggtgaggtcaacctaatactgacttgtcagtatctccagctctgattacctttgaagtgttcagaagagacattgtcttctactgttctgccaggttcttcttgagctttgggcctcagttgccctggcagaaaaatggattcaacttggcctttctgaaggcaagactgggattggatcacttcttaaacttccagttaagaatctaggtccgccctcaagcccatactgaccatgcctcatccagagctcctctgaagccagggggctaacggatgttgtgtggagtcctggctggaggtcctcccccagtggccttcctcccttcctttcacagccggtctctctgccaggaaatgggggaaggaactagaaccacctgcaccttgagatgtttctgtaaatgggtacttgtgatcacactacgggaatctctgtggtatatacctggggccattctaggctctttcaagtgacttttggaaatcaaccttttttatttgggggggaggatggggaaaagagctgagagtttatgctgaaatggatttatagaatatttgtaaatctatttttagtgtttgttcgtttttttaactgttcattcctttgtgcagagtgtatatctctgcctgggcaagagtgtggaggtgccgaggtgtcttcattctctcgcacatttccacagcacctgctaagtttgtatttaatggtttttgtttttgtttttgtttgtttcttgaaaatgagagaagagccggagagatgatttttattaattttttttttttttttttttttttactatttatagctttagatagggcctcccttcccctcttctttctttgttctctttcattaaaccccttccccagttttttttttatactttaaaccccgctcctcatggccttggccctttctgaagctgcttcctcttataaaatagcttttgccgaaacatagtttttttttagcagatcccaaaatataatgaaggggatggtgggatatttgtgtctgtgttcttataatatattattattcttccttggttctagaaaaatagataaatatatttttttcaggaaatagtgtggtgtttccagtttgatgttgctgggtggttgagtgagtgaattttcatgtggctgggtgggtttttgcctttttctcttgccctgttcctggtgccttctgatggggctggaatagttgaggtggatggttctaccctttctgccttctgtttgggacccagctggtgttctttggtttgctttcttcaggctctagggctgtgctatccaatacagtaaccacatgcggctgtttaaagttaagccaattaaaatcacataagattaaaaattccttcctcagttgcactaaccacgtttctagaggcgtcactgtatgtagttcatggctactgtactgacagcgagagcatgtccatctgttggacagcactattctagagaactaaactggcttaacgagtcacagcctcagctgtgctgggacgacccttgtctccctgggtaggggggggggaatgggggagggctgatgaggccccagctggggcctgttgtctgggaccctccctctcctgagaggggaggcctggtggcttagcctgggcaggtcgtgtctcctcctgaccccagtggctgcggtgaggggaaccaccctcccttgctgcaccagtggccattagctcccgtcaccactgcaacccagggtcccagctggctgggtcctcttctgcccccagtgcccttccccttgggctgtgttggagtgagcacctcctctgtaggcacctctcacactgttgtctgttactgattttttttgataaaaagataataaaacctggtactttctaaa

SEQ ID NO: 18526 - DNA, 10397 bp, Homo sapiens
  source 1..10397: mol_type = unassigned DNA
cctcagcgctgggcggccgctcacctcgggccggggggcgccgcgcctcccgcggagtggccgcgcccgctcggagccgtcccgcctgtcctgcccgcccgtccgtccggcgcggcgctcggggtggcggctgctcggcatggcccggggcgcccggccctcggcggccggtggcggcggcggcggcgcggagccccctgagcgcgcgggccccgggcggccgcggggatccccgcccggccgcgcccgcccctcgctggcgccgcgccccggcccggagccctcgcgaccccgggcggcgcccgagacctccggcggggacacggcgggcgcggggcggtgcggcgggcggcgggcggcaaagttggggccgggccgccgcggctggtgggcgctgctggcgctgcagctgcacttgctccgggcgctggcgcaagatgatgttgctccatattttaaaacggagccaggcctaccacagatccacctggaagggaaccgccttgttctcacctgccttgccgaagggagctggcctttggagttcaagtggatgcgcgatgacagtgagctcaccacctacagcagcgaatataagtacattattccatctttgcagaagctcgatgctgggttttaccgctgcgtggtgcgaaacagaatgggagcactcctgcaaagaaaatcagaagttcaagtcgcatatatgggaagtttcatggatacggaccagaggaaaacagtttctcaaggacgtgcagcgattctaaacctgctgcccatcaccagctaccccagacctcaagtgacttggtttagagaagggcacaagattattccaagcaacagaatagccatcacattggagaatcagctggtgatcctcgccaccacaaccagtgatgccggggcatactacgtgcaggccgtgaatgagaaaaatggagaaaacaagacaagcccattcattcatttgagcatagcaagagatgttggcacacctgaaaccatggccccaaccattgtggttcccccgggcaacagaagtgtggtggctggatccagtgagaccaccttggaatgtatagccagtgccaggcctgtggaggacctgagtgtgacctggaagaggaatggagtgagaatcaccagtggcctccacagctttggaagacgcctcaccatcagcaacccgacgtccgcggacaccgggccatacgtctgcgaggcggcgctgccggggagcgcttttgaaccggccagggcgacggcctttcttttcatcatagagccaccatattttactgctgagcccgagagtcggatttcagctgaagtagaagaaactgtggacatcggatgtcaagccatgggggtcccccttcccaccctccagtggtacaaggatgccatctccatcagcaggctccagaatcctcgatacaaagtgctcgccagcggaggcctgcgcatccagaagctgcgtccagaggactccggaatcttccagtgcttcgccagcaatgaaggaggggagatccagacccacacctacctggatgtaaccaatatcgctccagtgttcacccagcggccagtggacaccacagttactgacgggatgacagccattctaaggtgtgaggtgtccggggctcccaaacccgccatcacctggaaaagagaaaaccacattctggccagtggctctgtccggattcctaggttcatgcttcttgaatcggggggtctacagatcgcgcccgtcttcatccaggatgccggcaactacacctgctatgcggccaacacagagggctccctgaatgcatcggccacgctcactgtgtggaatcggacgtccatcgtccaccctcctgaggaccacgtggtgattaaggggaccacggccacgctgcactgtggtgccacacatgacccccgggtttcactccgctacgtttggaagaaggacaacgtggccctgactccatcgagcacgtctaggatcgtggtggagaaggacgggtcccttctcatcagccagacgtggtcaggcgacatcggtgactacagctgcgagattgtttctgaaggagggaatgactccaggatggcccggctggaagtgattgaactgcctcattcacctcagaacctcctggtcagccctaattcttcccacagccacgccgtggtgctctcttgggtccggccctttgatggaaacagtcctattctttattacatcgtggagctctctgaaaacaactctccatggaaggtgcatctgtcaaacgttggccctgagatgacaggcgtcaccgtgagtggcctgactccggctcgtacctatcaattccgggtgtgcgcggtgaatgaagtgggcaggggccagtacagcgccgagacaagcaggttgatgctacctgaagaaccacccagtgctcccccgaaaaatatagtggccagtgggcggactaatcagtccattatggtccagtggcagccacccccagaaacagagcacaacggggtgttgcgtggatacatcctcaggtaccgcctggctggccttcccggagagtaccagcagcggaacatcaccagcccggaggtgaactactgcctggtgacagacctgatcatctggacacagtatgagatacaggtggcggcgtacaacggggccggtctgggcgtcttcagcagggcagtgaccgagtacaccttgcagggagtgcccaccgcgcccccgcagaacgtgcagacggaagccgtgaactccaccaccattcagttcctgtggaaccctccgcctcagcagtttatcaatggcatcaaccagggatacaagcttctggcatggccggcagatgcccccgaggctgtcactgtggtcactattgccccagatttccacggagtccaccatggacacataacgaacctgaagaagtttaccgcctacttcacttccgttctgtgcttcaccacccctggggacgggcctcccagcacacctcagctggtctggactcaggaagacaaaccaggagctgtgggacatctgagtttcacagagatcttggacacatctctcaaggtcagctggcaggagcccctggagaaaaatggcatcattactggctatcagatctcttgggaagtgtacggcaggaacgactctcgtctcacgcacaccctgaacagcacgacgcacgagtacaagatccaaggcctctcatctctcaccacctacaccatcgacgtggccgctgtgactgccgtgggcactggcctggtgacttcatccaccatttcttctggagtgcccccagaccttcctggtgccccatccaacctggtcatttccaacatcagccctcgctccgccacccttcagttccggccaggctatgacgggaaaacgtccatctccaggtggattgttgaggggcaggtgggagctatcggcgacgaggaggagtgggtcaccctctatgaagaggagaatgagcctgatgcccagatgctggagatcccaaacctcacaccctacactcactacagatttcgaatgaagcaagtgaacattgttgggccgagcccctacagtccgtcttcccgggtcatccagaccctgcaggccccacccgacgtggctccaaccagcgtcacggtccgtactgccagtgagaccagcctgcggcttcgctgggtgcccctgccggattctcagtacaacgggaaccccgagtccgtgggctacaggattaagtactggcgctcagacctccagtcctcagcagtggcccaagtcgtcagtgaccggctggagagagaattcaccatcgaggagctggaggagtggatggaatacgagctgcagatgcaggccttcaacgccgtcggggctgggccgtggagcgaggtggtgcggggccggacgcgggagtcagttccttcagccgcccctgagaacgtgtcagccgaggctgtcagctcgacccagattttactgacatggacatccgtgccggaacaggaccagaatgggctcatactgggctacaagatcctgttccgggccaaagacctggatcccgagcccaggagccacatcgtgcgagggaaccacacgcagtcggccctgctggcaggcctgcgcaagttcgtgctctacgagctccaggtgctggcgttcacccgcatcgggaacggggtccccagcacgcccctcatcctggagcgcaccaaagacgatgccccaggcccaccagtgaggctcgtgttccccgaagtgagactcacctccgtgcggatagtgtggcaacctccggaggagcccaacggcatcatcctggggtaccagattgcctaccgcctggccagcagcagcccccacaccttcaccaccgtggaggtcggcgccacagtgaggcagttcacagccaccgacctggccccggagtccgcatacatcttcaggctgtccgccaagacgaggcagggctggggggagccactggaggccaccgtcatcaccaccgagaagagagagcggccggcaccccccagagagctcctggtgccccaggcagaagtgaccgcacgcagcctccggctccagtgggtcccgggcagcgacggggcctcccccatccggtacttcaccatgcaggtgcgagagctgcctcggggtgagtggcagacctactcctcgtccatcagccatgaggcgacagcatgcgtcgttgacagactgaggcccttcacctcctacaagctgcgcctgaaagccaccaacgacattggggacagtgacttcagttcagagacagaggcggtgaccacgctgcaggatgttccaggagagcccccgggatctgtctcagcgacgccacacaccacgtcctctgtcctgatacagtggcagcctccgagggacgaaagcctgaatggccttcttcagggatacaggatctactacagggagctggagtatgaagccgggtcaggcactgaggccaagacgctcaaaaaccctatagctttacatgctgagctcacagcccaaagcagcttcaagacggtgaacagcagctccacatcgacgatgtgtgaactaacacatttaaagaagtaccggcgctatgaagtaataatgaccgcctataacatcatcggcgagagcccagccagcgcgcccgtggaggtctttgtcggcgaggctgccccggccatggccccgcagaacgtgcaggtgaccccactcacggccagccagctggaggtcacgtgggacccaccacccccggagagccagaatgggaacatccaaggctacaagatttactactgggaggcagacagccagaacgaaacggagaaaatgaaggtcctcttcctccccgagcccgtggtgaggctgaagaacctgaccagccataccaagtacctggtcagcatatcagccttcaacgccgccggagatggacctaagagtgacccccagcaggggcgcacccaccaggccgcccctggggcccccagctttctggcgttctcagaaataacctccaccacgctcaacgtgtcctggggcgagcctgcggcggccaacggcatcctgcagggctatcgggtggtgtacgagcccttggcccctgtacaaggggtgagcaaggtggtgaccgtggaagtgagagggaactggcagcgctggctgaaggtgcgggacctcaccaagggagtgacctatttcttccgtgtccaagcgcggaccatcacctacgggcccgagctccaagccaatatcacagccgggccagccgagggatccccgggctcgcctagagatgtcctggtcaccaagtccgcctctgaactgacgctgcagtggactgagggacactctggcgacacacctaccacgggctatgtgatcgaggcccggccctcagatgaaggcttatgggacatgtttgtgaaggacatcccgcggagcgccacatcctacaccctcagcctggataagctccggcaaggagtgacttacgagttccgggtggtggctgtgaatgaggcgggctacggggagcccagcaacccctccacggctgtgtcagctcaagtggaagccccattctacgaggagtggtggttcctcctggtgatggctctgtccagcctgatcgtcatcctgctggtggtgttcgccctcgtcctgcacgggcagaataagaagtataagaactgcagcacaggaaaggggatctccaccatggaggagtctgtgaccctggacaacggaggatttgctgccctggagctcagcagccgccacctcaatgtcaagagcaccttctccaagaagaacgggaccaggtccccaccccggcctagccccggcggcctgcactactcagacgaggacatctgcaacaagtacaacggcgccgtgctgaccgagagcgtgagcctcaaggagaagtcggcagatgcatcagaatctgaggccacggactctgactacgaggacgcgctgcccaagcactccttcgtgaaccactacatgagcgaccccacctactacaactcatggaagcgcagggcccagggccgcgcacctgcgccgcacaggtacgaggcggtggcgggctccgaggcgggcgcgcagctgcacccggtcatcaccacgcagagcgcgggcggcgtctacacccccgctggccccggcgcgcgaactccgctcaccggcttctcctccttcgtgtgagcaaagcgccgcgcctccctcagggcggaacggaggcaactttccggagtctatttttgttaagacaatcaactccaataactgagctgaagtttttgtttaaaaagaaaaaaatctgataagtgatgattttacctacttgtggacactagatttcaattaggaaggtttttttaaacggctttttgtaacttcgctgcaggaagcaggtttgtttctttttcttttctttttaagagaaggtgtatttcactggtgcaatggcttggcacctccggggcctgggaggacctcagacctccccagccctgggtttctccgtcttcaagaccaactaggaagggtcaagcggggagagggagtggagggtcaggtgagatctcagagctgccccggccggcccccgtctctttctacctcctcttccagagaaccagcggctcacacccttctcaacgcaggacatcctcggcggctcctggggtttgaagagcaaacgtttttccctgggctcagtgcgttttgtcccaacttcatctgtttctgaaatgttctcacttggcagtgtctagtcaaggagtcggctttcaggttcctgacggccaggcagggatgctaaggtgtggctcagccgtcactgtctgtgtcactgcagtggtgcggtcctcaggcttttctgcctgtctttcccccttccttctcacctgacagcgagggagagggaagcctcttagggctggaagccaccacgctggccctctccttccccgaacacagcacacggtcaactccgcgggacacgaggacacgggacggcgtctccagaattgcttgttacgtaggaagcgtgcattgttaaccagagtatttttaaaatctttttatctttttttaaactatgtcacatgaaatgaatgcgtctttgctgtctccaggtgcctttttattaattgttcagctttgtacatgggaaagatgaaaagcaacagtgtctgcaaataaagcaaaacagctctgagaacacacgctcccgactcgcctcgtgcacaccaggccgtcccctccctctgtcctggcttctgctggctgctcgcagcagccaccgcttctccaccactggcgctgctgctgccccctctcccagtccgaggccagcttttagccttaacaggttttttggaaatgtttcttttttttatttaaaattgtcattgtttggtttaaatttttcagctagatgaaaagagtatgaactactttggaaaacttaacagctcagagatggccatgcctccagcccctcacgtcatctttgcaacagacgactgggctgccatggtccacccctcagcccgggtcccgggtctggatggaacgggagcactgctggtgcccactggcgtgtgtgccccgggtccctgtaagtgccccctcaccagcagcagcgtgacacacacaagactcaagaccaccctgtcagtgccccccagtgcacggcaaacgggcaggtgccgttcccccagtgacctgagggtaggggacaactgagcagtatctgaccagtgccacccaggagccagtctcctggccacatgcagaaagtgtggcccctgcttacctagatgttttgtgcacctccatgggcagagggtgtggatattgcctggattctgtgctgtcagcgttgctgagtatggccccaggagaccaaggagagttttgtataggctggaaaaccccttttcagtctttccaaaattagagggtatggcaagtttccttttttctctcctcccttccttcccctccttcctttcctttacccctcctttccttccttcctcccttcctctcttctttcctccctccctccctccttccctcccttccttcctctctttcctccttccttccctcccttctttccctccctcccttcctctctcccctattccttcttccttttctcctcctttttctgagtggagggggaaatattctaaaccaaaaatcctagatgctctgcccaaagccacttctgcatgagaatcgcaacccacagttccccggatgagactcaccacagtggacagtgccacctccttcccctcggccccggagagggcgaagtgggcgggaagccaggatgtgagcactggaatttcttggaagagaagcgataaatggagaccatggccagcgctgctttctgtgcactctgatgactgctctctgcagccatgaggatgtggctttacatgccagggagagtgttgagacgtcttaggttgaggatgagcagattcgagatatgtttgttgctctcgggttttcgatacaacatcatgacacttctgtttcaagctcatgttttccgtctcccctccactcttagtaaaccttgatctgtacggagcggcctgtccgaggctacgccggcctcctggctgctgctggactgtgcttaggacagcgcccatgcctcggagggactctgtcccatgagaaccacctgtgcaaaggaacagagctggatgtttccaggtagattttggcctcccagagcaatgcggcatttgagaagcaacagttcctaactccttatcttcagggaaggaaaagaaaatcacagcctaggaagatggaggttggattttaatctcggttttaaaaagaggacaaacaaaatgtctctaagccaggctagatggaatgtgctcccgctctctcctgccgtgctgaaagtcatgccttgcggatgcctcatgacagcagtggctgagtctccccacccacccccaacgtggctcatttcagattgcttcggccccaccctgcaaggatgtggtcacggagtggccaggaggctccgtctgagccacagggatgggtgtgcagagctccctcctcctggggtgccagggcagagattccaggcaggtgagcccagagagagctgccaggccacaccccctcggcctcctgcacggccaccttctgggtgaatcggtccagcccaagcccctctccccagcctcgccttcagcctctctcccagcctgcttttataaggcgcacttcactcaatgctgtagccaaaaaacgaggggccccagggagaggggacccagatggccacacacggaacgcgcctccacagccccgggaggtggctcactctgtacaggtcttcggaggccgtgtttgtatctaactgtgactgggctgaagcatgatgtttgcctaatggttcgtagcatggtttttatttcttacgcattcttggcacacagtgtagctatcctcctgacgagcaacccgtctgcgtacctaagtgtggctccccgtgggtcagcgtcctggtagcatggatccagtctgaaaggtgaggacaacgtggaaactcatgagctgagcctgcccgctgggacacgtctccttcccgcgtcaccttctggtttagggagccgtcaggtccctaaacgttccctacaactttttctgaaattgtgcagaaaaacagatctcattaaaagaaaaaaagaaacaacttgtaggaagacagagaggtgctatgggtacaatttttaataaaaacattattttgttccttaaa

SEQ ID NO: 18527 - DNA, 7606 bp, Homo sapiens
  source 1..7606: mol_type = unassigned DNA
atggcccggggcgcccggccctcggcggccggtggcggcggcggcggcgcggagccccctgagcgcgcgggccccgggcggccgcggggatccccgcccggccgcgcccgcccctcgctggcgccgcgccccggcccggagccctcgcgaccccgggcggcgcccgagacctccggcggggacacggcgggcgcggggcggtgcggcgggcggcgggcggcaaagttggggccgggccgccgcggctggtgggcgctgctggcgctgcagctgcacttgctccgggcgctggcgcaagatgatgttgctccatattttaaaacggagccaggcctaccacagatccacctggaagggaaccgccttgttctcacctgccttgccgaagggagctggcctttggagttcaagtggatgcgcgatgacagtgagctcaccacctacagcagcgaatataagtacattattccatctttgcagaagctcgatgctgggttttaccgctgcgtggtgcgaaacagaatgggagcactcctgcaaagaaaatcagaagttcaagtcgcatatatgggaagtttcatggatacggaccagaggaaaacagtttctcaaggacgtgcagcgattctaaacctgctgcccatcaccagctaccccagacctcaagtgacttggtttagagaagggcacaagattattccaagcaacagaatagccatcacattggagaatcagctggtgatcctcgccaccacaaccagtgatgccggggcatactacgtgcaggccgtgaatgagaaaaatggagaaaacaagacaagcccattcattcatttgagcatagcaagagatgttggcacacctgaaaccatggccccaaccattgtggttcccccgggcaacagaagtgtggtggctggatccagtgagaccaccttggaatgtatagccagtgccaggcctgtggaggacctgagtgtgacctggaagaggaatggagtgagaatcaccagtggcctccacagctttggaagacgcctcaccatcagcaacccgacgtccgcggacaccgggccatacgtctgcgaggcggcgctgccggggagcgcttttgaaccggccagggcgacggcctttcttttcatcatagagccaccatattttactgctgagcccgagagtcggatttcagctgaagtagaagaaactgtggacatcggatgtcaagccatgggggtcccccttcccaccctccagtggtacaaggatgccatctccatcagcaggctccagaatcctcgatacaaagtgctcgccagcggaggcctgcgcatccagaagctgcgtccagaggactccggaatcttccagtgcttcgccagcaatgaaggaggggagatccagacccacacctacctggatgtaaccaatatcgctccagtgttcacccagcggccagtggacaccacagttactgacgggatgacagccattctaaggtgtgaggtgtccggggctcccaaacccgccatcacctggaaaagagaaaaccacattctggccagtggctctgtccggattcctaggttcatgcttcttgaatcggggggtctacagatcgcgcccgtcttcatccaggatgccggcaactacacctgctatgcggccaacacagagggctccctgaatgcatcggccacgctcactgtgtggaatcggacgtccatcgtccaccctcctgaggaccacgtggtgattaaggggaccacggccacgctgcactgtggtgccacacatgacccccgggtttcactccgctacgtttggaagaaggacaacgtggccctgactccatcgagcacgtctaggatcgtggtggagaaggacgggtcccttctcatcagccagacgtggtcaggcgacatcggtgactacagctgcgagattgtttctgaaggagggaatgactccaggatggcccggctggaagtgattgaactgcctcattcacctcagaacctcctggtcagccctaattcttcccacagccacgccgtggtgctctcttgggtccggccctttgatggaaacagtcctattctttattacatcgtggagctctctgaaaacaactctccatggaaggtgcatctgtcaaacgttggccctgagatgacaggcgtcaccgtgagtggcctgactccggctcgtacctatcaattccgggtgtgcgcggtgaatgaagtgggcaggggccagtacagcgccgagacaagcaggttgatgctacctgaagaaccacccagtgctcccccgaaaaatatagtggccagtgggcggactaatcagtccattatggtccagtggcagccacccccagaaacagagcacaacggggtgttgcgtggatacatcctcaggtaccgcctggctggccttcccggagagtaccagcagcggaacatcaccagcccggaggtgaactactgcctggtgacagacctgatcatctggacacagtatgagatacaggtggcggcgtacaacggggccggtctgggcgtcttcagcagggcagtgaccgagtacaccttgcagggagtgcccaccgcgcccccgcagaacgtgcagacggaagccgtgaactccaccaccattcagttcctgtggaaccctccgcctcagcagtttatcaatggcatcaaccagggatacaagcttctggcatggccggcagatgcccccgaggctgtcactgtggtcactattgccccagatttccacggagtccaccatggacacataacgaacctgaagaagtttaccgcctacttcacttccgttctgtgcttcaccacccctggggacgggcctcccagcacacctcagctggtctggactcaggaagacaaaccaggagctgtgggacatctgagtttcacagagatcttggacacatctctcaaggtcagctggcaggagcccctggagaaaaatggcatcattactggctatcagatctcttgggaagtgtacggcaggaacgactctcgtctcacgcacaccctgaacagcacgacgcacgagtacaagatccaaggcctctcatctctcaccacctacaccatcgacgtggccgctgtgactgccgtgggcactggcctggtgacttcatccaccatttcttctggagtgcccccagaccttcctggtgccccatccaacctggtcatttccaacatcagccctcgctccgccacccttcagttccggccaggctatgacgggaaaacgtccatctccaggtggattgttgaggggcaggtgggagctatcggcgacgaggaggagtgggtcaccctctatgaagaggagaatgagcctgatgcccagatgctggagatcccaaacctcacaccctacactcactacagatttcgaatgaagcaagtgaacattgttgggccgagcccctacagtccgtcttcccgggtcatccagaccctgcaggccccacccgacgtggctccaaccagcgtcacggtccgtactgccagtgagaccagcctgcggcttcgctgggtgcccctgccggattctcagtacaacgggaaccccgagtccgtgggctacaggattaagtactggcgctcagacctccagtcctcagcagtggcccaagtcgtcagtgaccggctggagagagaattcaccatcgaggagctggaggagtggatggaatacgagctgcagatgcaggccttcaacgccgtcggggctgggccgtggagcgaggtggtgcggggccggacgcgggagtcagttccttcagccgcccctgagaacgtgtcagccgaggctgtcagctcgacccagattttactgacatggacatccgtgccggaacaggaccagaatgggctcatactgggctacaagatcctgttccgggccaaagacctggatcccgagcccaggagccacatcgtgcgagggaaccacacgcagtcggccctgctggcaggcctgcgcaagttcgtgctctacgagctccaggtgctggcgttcacccgcatcgggaacggggtccccagcacgcccctcatcctggagcgcaccaaagacgatgccccaggcccaccagtgaggctcgtgttccccgaagtgagactcacctccgtgcggatagtgtggcaacctccggaggagcccaacggcatcatcctggggtaccagattgcctaccgcctggccagcagcagcccccacaccttcaccaccgtggaggtcggcgccacagtgaggcagttcacagccaccgacctggccccggagtccgcatacatcttcaggctgtccgccaagacgaggcagggctggggggagccactggaggccaccgtcatcaccaccgagaagagagagcggccggcaccccccagagagctcctggtgccccaggcagaagtgaccgcacgcagcctccggctccagtgggtcccgggcagcgacggggcctcccccatccggtacttcaccatgcaggtgcgagagctgcctcggggtgagtggcagacctactcctcgtccatcagccatgaggcgacagcatgcgtcgttgacagactgaggcccttcacctcctacaagctgcgcctgaaagccaccaacgacattggggacagtgacttcagttcagagacagaggcggtgaccacgctgcaggatgttccaggagagcccccgggatctgtctcagcgacgccacacaccacgtcctctgtcctgatacagtggcagcctccgagggacgaaagcctgaatggccttcttcagggatacaggatctactacagggagctggagtatgaagccgggtcaggcactgaggccaagacgctcaaaaaccctatagctttacatgctgagctcacagatttaaagaagtaccggcgctatgaagtaataatgaccgcctataacatcatcggcgagagcccagccagcgcgcccgtggaggtctttgtcggcgaggctgccccggccatggccccgcagaacgtgcaggtgaccccactcacggccagccagctggaggtcacgtgggacccaccacccccggagagccagaatgggaacatccaaggctacaagatttactactgggaggcagacagccagaacgaaacggagaaaatgaaggtcctcttcctccccgagcccgtggtgaggctgaagaacctgaccagccataccaagtacctggtcagcatatcagccttcaacgccgccggagatggacctaagagtgacccccagcaggggcgcacccaccaggccgcccctggggcccccagctttctggcgttctcagaaataacctccaccacgctcaacgtgtcctggggcgagcctgcggcggccaacggcatcctgcagggctatcgggtggtgtacgagcccttggcccctgtacaaggggtgagcaaggtggtgaccgtggaagtgagagggaactggcagcgctggctgaaggtgcgggacctcaccaagggagtgacctatttcttccgtgtccaagcgcggaccatcacctacgggcccgagctccaagccaatatcacagccgggccagccgagggatccccgggctcgcctagagatgtcctggtcaccaagtccgcctctgaactgacgctgcagtggactgagggacactctggcgacacacctaccacgggctatgtgatcgaggcccggccctcagatgaaggcttatgggacatgtttgtgaaggacatcccgcggagcgccacatcctacaccctcagcctggataagctccggcaaggagtgacttacgagttccgggtggtggctgtgaatgaggcgggctacggggagcccagcaacccctccacggctgtgtcagctcaagtggaagccccattctacgaggagtggtggttcctcctggtgatggctctgtccagcctgatcgtcatcctgctggtggtgttcgccctcgtcctgcacgggcagaataagaagtataagaactgcagcacaggaaaggggatctccaccatggaggagtctgtgaccctggacaacggaggatttgctgccctggagctcagcagccgccacctcaatgtcaagagcaccttctccaagaagaacgggaccaggtccccaccccggcctagccccggcggcctgcactactcagacgaggacatctgcaacaagtacaacggcgccgtgctgaccgagagcgtgagcctcaaggagaagtcggcagatgcatcagaatctgaggccacggactctgactacgaggacgcgctgcccaagcactccttcgtgaaccactacatgagcgaccccacctactacaactcatggaagcgcagggcccagggccgcgcacctgcgccgcacaggtacgaggcggtggcgggctccgaggcgggcgcgcagctgcacccggtcatcaccacgcagagcgcgggcggcgtctacacccccgctggccccggcgcgcgaactccgctcaccggcttctcctccttcgtgtgagcaaagcgccgcgcctccctcagggcggaacggaggcaactttccggagtctatttttgttaagacaatcaactccaataactgagctgaagtttttgtttaaaaagaaaaaaatctgataagtgatgattttacctacttgtggacactagatttcaattaggaaggtttttttaaacggctttttgtaacttcgctgcaggaagcaggtttgtttctttttcttttctttttaagagaaggtgtatttcactggtgcaatggcttggcacctccggggcctgggaggacctcagacctccccagccctgggtttctccgtcttcaagaccaactaggaagggtcaagcggggagagggagtggagggtcaggtgagatctcagagctgccccggccggcccccgtctctttctacctcctcttccagagaaccagcggctcacacccttctcaacgcaggacatcctcggcggctcctggggtttgaagagcaaacgtttttccctgggctcagtgcgttttgtcccaacttcatctgtttctgaaatgttctcacttggcagtgtctagtcaaggagtcggctttcaggttcctgacggccaggcagggatgctaaggtgtggctcagccgtcactgtctgtgtcactgcagtggtgcggtcctcaggcttttctgcctgtctttcccccttccttctcacctgacagcgagggagagggaagcctcttagggctggaagccaccacgctggccctctccttccccgaacacagcacacggtcaactccgcgggacacgaggacacgggacggcgtctccagaattgcttgttacgtaggaagcgtgcattgttaaccagagtatttttaaaatctttttatctttttttaaactatgtcacatgaaatgaatgcgtctttgctgtctccaggtgcctttttattaattgttcagctttgtacatgggaaagatgaaaagcaacagtgtctgcaaataaagcaaaacagctctgagaacac

SEQ ID NO: 18528 - DNA, 554 bp, Homo sapiens
  source 1..554: mol_type = unassigned DNA
caggagatgttggcacacctgaaaccatggccccaaccattgtggttcccccgggcaacagaagtgtggtggctggatccagtgagaccaccttggaatgtatagccagtgccaggcctgtggaggacctgagtgtgacctggaagaggaatggagtgagaatcaccagtggcctccacagctttggaagacgcctcaccatcagcaacccgacgtccgcggacaccgggccatacgtctgcgaggcggcgctgccggggagcgcttttgaaccggccagggcgacggcctttcttttcatcataggtcccaccttgttttaaagatacagtcaatataggaggcatgccaagctatcttatccacattcaacacaattataatgaaagtaaaccagctctggaagacagttcccagaaattaattatcgcacagaaagtgaacacaacagccttttgttatcatgataatgaaatcaccaccaccttaatacttgacaaacttggccatgcctctgttgaatttctgctgaataaactggaaaaatgttgcaa

SEQ ID NO: 18529 - DNA, 494 bp, Homo sapiens
  source 1..494: mol_type = unassigned DNA
aggagatgttggcacacctgaaaccatggccccaaccattgtggttcccccgggcaacagaagtgtggtggctggatccagtgagaccaccttggaatgtatagccagtgccaggcctgtggaggacctgagtgtgacctggaagaggaatggagtgagaatcaccagtggcctccacagctttggaagacgcctcaccatcagcaacccgacgtccgcggacaccgggccatacgtctgcgaggcggcgctgccggggagcgcttttgaaccggccagggcgacggcctttcttttcatcataggtaatgcgggagcctctaagtggtgttgccagcatctcagatagcatccgacactgactcttctgcagaaacaaaatagcgtatttcagtggctttatttgtaactcggcaaatgaaggtgaggttgagtttaccttcgaaatccttcctagccttctttcccaagaatataagtccattaaatccaaa

SEQ ID NO: 18530 - DNA, 493 bp, Homo sapiens
  source 1..493: mol_type = unassigned DNA
atcggacgtccatcgtccaccctcctgaggaccacgtggtgattaaggggaccacggccacgctgcactgtggtgccacacatgacccccgggtttcactccgctacgtttggaagaaggacaacgtggccctgactccatcgagcacgtctaggatcgtggtggagaaggacgggtcccttctcatcagccagacgtggtcaggcgacatcggtgactacagctgcgagattgtttctgaaggagggaatgactccaggatggcccggctggaagtgatgtgagtactgagacgtttggtgttagccagtccgcggttttctccgttactgtgcccctgttagtgactgccacttcacaagtgtcacgcccggcttgtgtcccaagtcagcggtcagaggccagcgcatcatgctgcataactacatatatggacaaggtttttttgtggtttctttcaacttcggaattgagaagtttcgtttttggtgta

SEQ ID NO: 18531 - DNA, 3113 bp, Homo sapiens
  source 1..3113: mol_type = unassigned DNA
gggcactaactcaagctcccctggagcgcagtcactttacaaccaccttcctccccaaatgccagcatggacaaattagatccagaagccctgcacacagccatcctcagggagaaagcacagttggctgggccttgattcacgaagggggcctgccccatgccacggcggtccctcctggcacccgcctcctgataaccctcgtgctgtgtcgataccacagatcctgttccgggccaaagacctggatcccgagcccaggagccacatcgtgcgagggaaccacacgcagtcggccctgctggcaggcctgcgcaagttcgtgctctacgagctccaggtgctggcgttcacccgcatcgggaacggggtccccagcacgcccctcatcctggagcgcaccaaagacgatgccccaggcccaccagtgaggctcgtgttccccgaagtgagactcacctccgtgcggatagtgtggcaacctccggaggagcccaacggcatcatcctggggtaccagattgcctaccgcctggccagcagcagcccccacaccttcaccaccgtggaggtcggcgccacagtgaggcagttcacagccaccgacctggccccggagtccgcatacatcttcaggctgtccgccaagacgaggcagggctggggggagccactggaggccaccgtcatcaccaccgagaagagagagcggccggcaccccccagagagctcctggtgccccaggcagaagtgaccgcacgcagcctccggctccagtgggtcccgggcagcgacggggcctcccccatccggtacttcaccatgcaggtgcgagagctgcctcggggtgagtggcagacctactcctcgtccatcagccatgaggcgacagcatgcgtcgttgacagactgaggcccttcacctcctacaagctgcgcctgaaagccaccaacgacattggggacagtgacttcagttcagagacagaggcggtgaccacgctgcaggatgttccaggagagcccccgggatctgtctcagcgacgccacacaccacgtcctctgtcctgatacagtggcagcctccgagggacgaaagcctgaatggccttcttcagggatacaggatctactacagggagctggagtatgaagccgggtcaggcactgaggccaagacgctcaaaaaccctatagctttacatgctgagctcacagcccaaagcagcttcaagacggtgaacagcagctccacatcgacgatgtgtgaactaacacatttaaagaagtaccggcgctatgaagtaataatgaccgcctataacatcatcggcgagagcccagccagcgcgcccgtggaggtctttgtcggcgaggctgccccggccatggccccgcagaacgtgcaggtgaccccactcacggccagccagctggaggtcacgtgggacccaccacccccggagagccagaatgggaacatccaaggctacaagatttactactgggaggcagacagccagaacgaaacggagaaaatgaaggtcctcttcctccccgagcccgtggtgaggctgaagaacctgaccagccataccaagtacctggtcagcatatcagccttcaacgccgccggagatggacctaagagtgacccccagcaggggcgcacccaccaggccgcccctggggcccccagctttctggcgttctcagaaataacctccaccacgctcaacgtgtcctggggcgagcctgcggcggccaacggcatcctgcagggctatcgggtggtgtacgagcccttggcccctgtacaaggggtgagcaaggtggtgaccgtggaagtgagagggaactggcagcgctggctgaaggtgcgggacctcaccaagggagtgacctatttcttccgtgtccaagcgcggaccatcacctacgggcccgagctccaagccaatatcacagccgggccagccgagggatccccgggctcgcctagagatgtcctggtcaccaagtccgcctctgaactgacgctgcagtggactgagggacactctggcgacacacctaccacgggctatgtgatcgaggcccggccctcagatgaaggcttatgggacatgtttgtgaaggacatcccgcggagcgccacatcctacaccctcagcctggataagctccggcaaggagtgacttacgagttccgggtggtggctgtgaatgaggcgggctacggggagcccagcaacccctccacggctgtgtcagctcaagtggaagccccattctacgaggagtggtggttcctcctggtgatggctctgtccagcctgatcgtcatcctgctggtggtgttcgccctcgtcctgcacgggcagaataagaagtataagaactgcagcacaggaaaggggatctccaccatggaggagtctgtgaccctggacaacggaggatttgctgccctggagctcagcagccgccacctcaatgtcaagagcaccttctccaagaagaacgggaccaggtccccaccccggcctagccccggcggcctgcactactcagacgaggacatctgcaacaagtacaacggcgccgtgctgaccgagagcgtgagcctcaaggagaagtcggcagatgcatcagaatctgaggccacggactctgactacgaggacgcgctgcccaagcactccttcgtgaaccactacatgagcgaccccacctactacaactcatggaagcgcagggcccagggccgcgcacctgcgccgcacagtgtagctatcctcctgacgagcaacccgtctgcgtacctaagtgtggctccccgtgggtcagcgtcctggtagcatggatccagtctgaaaggtgaggacaacgtggaaactcatgagctgagcctgcccgctgggacacgtctccttcccgcgtcaccttctggtttagggagccgtcaggtccctaaacgttccctacaactttttctgaaattgtgcagaaaaacagatctcattaaaagaaaaaaagaaacaacttgtaggaagacagagaggtgctatgggtacaatttttaataaaaacattattttgttccttaaa

SEQ ID NO: 18532 - DNA, 433 bp, Homo sapiens
  source 1..433: mol_type = unassigned DNA
cctccgagggacgaaagcctgaatggccttcttcagggatacaggatctactacagggagctggagtatgaagccgggtcaggcactgaggccaagacgctcaaaaaccctatagctttacatgctgagctcacagcccaaagcagcttcaagacggtgaacagcagctccacatcgacgatgtgtgaactaacacatttaaagaagtaccggcgctatgaagtaataatgaccgcctataacatcatcggcgagagcccagccagcgcgcccgtggaggtctttgtcggcgaggctgatcagatcctgtccctatccctctccgggcccagcgtgccgcaggtaatgagagcaacgccattccttcggccaaggagaccacagaacctcaccctcctcgctggctggtgactttaaagagttccctgacttc

SEQ ID NO: 18533 - DNA, 2108 bp, Homo sapiens
  source 1..2108: mol_type = unassigned DNA
atttctctgaaggtttgacatccatagaagttccaagtcagcaggttcagcaagagggggctgttgccatggctctgatggtgcccggtcccctcatgtgctgcttgtctttctcataagctgcttgtctttctcataagcgtgtttctgacagcttgtcagcccggcttcccaccccttcctgggatcagcctgcaacacgggctttcttcgtcatcttaacatgcaatgcattttgcctcctgccttgaatgaggatccgatggaagatgaaggcttatgggacatgtttgtgaaggacatcccgcggagcgccacatcctacaccctcagcctggataagctccggcaaggagtgacttacgagttccgggtggtggctgtgaatgaggcgggctacggggagcccagcaacccctccacggctgtgtcagctcaagtggaagccccattctacgaggagtggtggttcctcctggtgatggctctgtccagcctgatcgtcatcctgctggtggtgttcgccctcgtcctgcacgggcagaataagaagtataagaactgcagcacaggaaaggggatctccaccatggaggagtctgtgaccctggacaacggaggatttgctgccctggagctcagcagccgccacctcaatgtcaagagcaccttctccaagaagaacgggaccaggtccccaccccggcctagccccggcggcctgcactactcagacgaggacatctgcaacaagtacaacggcgccgtgctgaccgagagcgtgagcctcaaggagaagtcggcagatgcatcagaatctgaggccacggactctgactacgaggacgcgctgcccaagcactccttcgtgaaccactacatgagcgaccccacctactacaactcatggaagcgcagggcccagggccgcgcacctgcgccgcacaggtacgaggcggtggcgggctccgaggcgggcgcgcagctgcacccggtcatcaccacgcagagcgcgggcggcgtctacacccccgctggccccggcgcgcgaactccgctcaccggcttctcctccttcgtgtgagcaaagcgccgcgcctccctcagggcggaacggaggcaactttccggagtctatttttgttaagacaatcaactccaataactgagctgaagtttttgtttaaaaagaaaaaaatctgataagtgatgattttacctacttgtggacactagatttcaattaggaaggtttttttaaacggctttttgtaacttcgctgcaggaagcaggtttgtttctttttcttttctttttaagagaaggtgtatttcactggtgcaatggcttggcacctccggggcctgggaggacctcagacctccccagccctgggtttctccgtcttcaagaccaactaggaagggtcaagcggggagagggagtggagggtcaggtgagatctcagagctgccccggccggcccccgtctctttctacctcctcttccagagaaccagcggctcacacccttctcaacgcaggacatcctcggcggctcctggggtttgaagagcaaacgtttttccctgggctcagtgcgttttgtcccaacttcatctgtttctgaaatgttctcacttggcagtgtctagtcaaggagtcggctttcaggttcctgacggccaggcagggatgctaaggtgtggctcagccgtcactgtctgtgtcactgcagtggtgcggtcctcaggcttttctgcctgtctttcccccttccttctcacctgacagcgagggagagggaagcctcttagggctggaagccaccacgctggccctctccttccccgaacacagcacacggtcaactccgcgggacacgaggacacgggacggcgtctccagaattgcttgttacgtaggaagcgtgcattgttaaccagagtatttttaaaatctttttatctttttttaaactatgtcacatgaaatgaatgcgtctttgctgtctccaggtgcctttttattaattgttcagctttgtacatgggaaagatgaaaagcaacagtgtctgcaaataaagcaaaacagctctgagaacac

SEQ ID NO: 18534 - DNA, 558 bp, Homo sapiens
  source 1..558: mol_type = unassigned DNA
ttattaatggctttaattttgagtttattcatgttttcttatatgtgaggtttataataaatcatacatacatatatttactgtggggagatatgcataacctaacgtttcccactatgaccatttcaagtgtccagttcagtagcattgagcacgttgttctacaatcatcacaccattcatctccagaacgctcttcgacttgcgaaactgagactccgtccccattcagcactcactccgcatccagtgcccctgatgcctcatccagggctgctgcaagccgacccaccaggcaggtgcatggggctcgcatctgggacttcgcacttctaacctctgctctcgcctccccatccctcttgcagatgaaggcttatgggacatgtttgtgaaggacatcccgcggagcgccacatcctacaccctcagcctggataagctccggcaaggagtgacttacgagttccgggtggtggctgtgaatgaggcgggctacggggagcccagcaacccctccacggctgtgtcagctcaagtggaagccccattctacga

SEQ ID NO: 18535 - DNA, 10258 bp, Homo sapiens
  source 1..10258: mol_type = unassigned DNA
atggcccggggcgcccggccctcggcggccggtggcggcggcggcggcgcggagccccctgagcgcgcgggccccgggcggccgcggggatccccgcccggccgcgcccgcccctcgctggcgccgcgccccggcccggagccctcgcgaccccgggcggcgcccgagacctccggcggggacacggcgggcgcggggcggtgcggcgggcggcgggcggcaaagttggggccgggccgccgcggctggtgggcgctgctggcgctgcagctgcacttgctccgggcgctggcgcaaggtaggtgcgccccatattttaaaacggagccaggcctaccacagatccacctggaagggaaccgccttgttctcacctgccttgccgaagggagctggcctttggagttcaagtggatgcgcgatgacagtgagctcaccacctacagcagcgaatataagtacattattccatctttgcagaagctcgatgctgggttttaccgctgcgtggtgcgaaacagaatgggagcactcctgcaaagaaaatcagaagttcaagtcgcatatatgggaagtttcatggatacggaccagaggaaaacagtttctcaaggacgtgcagcgattctaaacctgctgcccatcaccagctaccccagacctcaagtgacttggtttagagaagggcacaagattattccaagcaacagaatagccatcacattggagaatcagctggtgatcctcgccaccacaaccagtgatgccggggcatactacgtgcaggccgtgaatgagaaaaatggagaaaacaagacaagcccattcattcatttgagcatagcaagagatgttggcacacctgaaaccatggccccaaccattgtggttcccccgggcaacagaagtgtggtggctggatccagtgagaccaccttggaatgtatagccagtgccaggcctgtggaggacctgagtgtgacctggaagaggaatggagtgagaatcaccagtggcctccacagctttggaagacgcctcaccatcagcaacccgacgtccgcggacaccgggccatacgtctgcgaggcggcgctgccggggagcgcttttgaaccggccagggcgacggcctttcttttcatcatagagccaccatattttactgctgagcccgagagtcggatttcagctgaagtagaagaaactgtggacatcggatgtcaagccatgggggtcccccttcccaccctccagtggtacaaggatgccatctccatcagcaggctccagaatcctcgatacaaagtgctcgccagcggaggcctgcgcatccagaagctgcgtccagaggactccggaatcttccagtgcttcgccagcaatgaaggaggggagatccagacccacacctacctggatgtaaccaatatcgctccagtgttcacccagcggccagtggacaccacagttactgacgggatgacagccattctaaggtgtgaggtgtccggggctcccaaacccgccatcacctggaaaagagaaaaccacattctggccagtggctctgtccggattcctaggttcatgcttcttgaatcggggggtctacagatcgcgcccgtcttcatccaggatgccggcaactacacctgctatgcggccaacacagagggctccctgaatgcatcggccacgctcactgtgtggaatcggacgtccatcgtccaccctcctgaggaccacgtggtgattaaggggaccacggccacgctgcactgtggtgccacacatgacccccgggtttcactccgctacgtttggaagaaggacaacgtggccctgactccatcgagcacgtctaggatcgtggtggagaaggacgggtcccttctcatcagccagacgtggtcaggcgacatcggtgactacagctgcgagattgtttctgaaggagggaatgactccaggatggcccggctggaagtgattgaactgcctcattcacctcagaacctcctggtcagccctaattcttcccacagccacgccgtggtgctctcttgggtccggccctttgatggaaacagtcctattctttattacatcgtggagctctctgaaaacaactctccatggaaggtgcatctgtcaaacgttggccctgagatgacaggcgtcaccgtgagtggcctgactccggctcgtacctatcaattccgggtgtgcgcggtgaatgaagtgggcaggggccagtacagcgccgagacaagcaggttgatgctacctgaagaaccacccagtgctcccccgaaaaatatagtggccagtgggcggactaatcagtccattatggtccagtggcagccacccccagaaacagagcacaacggggtgttgcgtggatacatcctcaggtaccgcctggctggccttcccggagagtaccagcagcggaacatcaccagcccggaggtgaactactgcctggtgacagacctgatcatctggacacagtatgagatacaggtggcggcgtacaacggggccggtctgggcgtcttcagcagggcagtgaccgagtacaccttgcagggagtgcccaccgcgcccccgcagaacgtgcagacggaagccgtgaactccaccaccattcagttcctgtggaaccctccgcctcagcagtttatcaatggcatcaaccagggatacaagcttctggcatggccggcagatgcccccgaggctgtcactgtggtcactattgccccagatttccacggagtccaccatggacacataacgaacctgaagaagtttaccgcctacttcacttccgttctgtgcttcaccacccctggggacgggcctcccagcacacctcagctggtctggactcaggaagacaaaccaggagctgtgggacatctgagtttcacagagatcttggacacatctctcaaggtcagctggcaggagcccctggagaaaaatggcatcattactggctatcagatctcttgggaagtgtacggcaggaacgactctcgtctcacgcacaccctgaacagcacgacgcacgagtacaagatccaaggcctctcatctctcaccacctacaccatcgacgtggccgctgtgactgccgtgggcactggcctggtgacttcatccaccatttcttctggagtgcccccagaccttcctggtgccccatccaacctggtcatttccaacatcagccctcgctccgccacccttcagttccggccaggctatgacgggaaaacgtccatctccaggtggattgttgaggggcaggtgggagctatcggcgacgaggaggagtgggtcaccctctatgaagaggagaatgagcctgatgcccagatgctggagatcccaaacctcacaccctacactcactacagatttcgaatgaagcaagtgaacattgttgggccgagcccctacagtccgtcttcccgggtcatccagaccctgcaggccccacccgacgtggctccaaccagcgtcacggtccgtactgccagtgagaccagcctgcggcttcgctgggtgcccctgccggattctcagtacaacgggaaccccgagtccgtgggctacaggattaagtactggcgctcagacctccagtcctcagcagtggcccaagtcgtcagtgaccggctggagagagaattcaccatcgaggagctggaggagtggatggaatacgagctgcagatgcaggccttcaacgccgtcggggctgggccgtggagcgaggtggtgcggggccggacgcgggagtcagttccttcagccgcccctgagaacgtgtcagccgaggctgtcagctcgacccagattttactgacatggacatccgtgccggaacaggaccagaatgggctcatactgggctacaagatcctgttccgggccaaagacctggatcccgagcccaggagccacatcgtgcgagggaaccacacgcagtcggccctgctggcaggcctgcgcaagttcgtgctctacgagctccaggtgctggcgttcacccgcatcgggaacggggtccccagcacgcccctcatcctggagcgcaccaaagacgatgccccaggcccaccagtgaggctcgtgttccccgaagtgagactcacctccgtgcggatagtgtggcaacctccggaggagcccaacggcatcatcctggggtaccagattgcctaccgcctggccagcagcagcccccacaccttcaccaccgtggaggtcggcgccacagtgaggcagttcacagccaccgacctggccccggagtccgcatacatcttcaggctgtccgccaagacgaggcagggctggggggagccactggaggccaccgtcatcaccaccgagaagagagagcggccggcaccccccagagagctcctggtgccccaggcagaagtgaccgcacgcagcctccggctccagtgggtcccgggcagcgacggggcctcccccatccggtacttcaccatgcaggtgcgagagctgcctcggggtgagtggcagacctactcctcgtccatcagccatgaggcgacagcatgcgtcgttgacagactgaggcccttcacctcctacaagctgcgcctgaaagccaccaacgacattggggacagtgacttcagttcagagacagaggcggtgaccacgctgcaggatgttccaggagagcccccgggatctgtctcagcgacgccacacaccacgtcctctgtcctgatacagtggcagcctccgagggacgaaagcctgaatggccttcttcagggatacaggatctactacagggagctggagtatgaagccgggtcaggcactgaggccaagacgctcaaaaaccctatagctttacatgctgagctcacagcccaaagcagcttcaagacggtgaacagcagctccacatcgacgatgtgtgaactaacacatttaaagaagtaccggcgctatgaagtaataatgaccgcctataacatcatcggcgagagcccagccagcgcgcccgtggaggtctttgtcggcgaggctgccccggccatggccccgcagaacgtgcaggtgaccccactcacggccagccagctggaggtcacgtgggacccaccacccccggagagccagaatgggaacatccaaggctacaagatttactactgggaggcagacagccagaacgaaacggagaaaatgaaggtcctcttcctccccgagcccgtggtgaggctgaagaacctgaccagccataccaagtacctggtcagcatatcagccttcaacgccgccggagatggacctaagagtgacccccagcaggggcgcacccaccaggccgcccctggggcccccagctttctggcgttctcagaaataacctccaccacgctcaacgtgtcctggggcgagcctgcggcggccaacggcatcctgcagggctatcgggtggtgtacgagcccttggcccctgtacaaggggtgagcaaggtggtgaccgtggaagtgagagggaactggcagcgctggctgaaggtgcgggacctcaccaagggagtgacctatttcttccgtgtccaagcgcggaccatcacctacgggcccgagctccaagccaatatcacagccgggccagccgagggatccccgggctcgcctagagatgtcctggtcaccaagtccgcctctgaactgacgctgcagtggactgagggacactctggcgacacacctaccacgggctatgtgatcgaggcccggccctcagatgaaggcttatgggacatgtttgtgaaggacatcccgcggagcgccacatcctacaccctcagcctggataagctccggcaaggagtgacttacgagttccgggtggtggctgtgaatgaggcgggctacggggagcccagcaacccctccacggctgtgtcagctcaagtggaagccccattctacgaggagtggtggttcctcctggtgatggctctgtccagcctgatcgtcatcctgctggtggtgttcgccctcgtcctgcacgggcagaataagaagtataagaactgcagcacaggaaaggggatctccaccatggaggagtctgtgaccctggacaacggaggatttgctgccctggagctcagcagccgccacctcaatgtcaagagcaccttctccaagaagaacgggaccaggtccccaccccggcctagccccggcggcctgcactactcagacgaggacatctgcaacaagtacaacggcgccgtgctgaccgagagcgtgagcctcaaggagaagtcggcagatgcatcagaatctgaggccacggactctgactacgaggacgcgctgcccaagcactccttcgtgaaccactacatgagcgaccccacctactacaactcatggaagcgcagggcccagggccgcgcacctgcgccgcacaggtacgaggcggtggcgggctccgaggcgggcgcgcagctgcacccggtcatcaccacgcagagcgcgggcggcgtctacacccccgctggccccggcgcgcgaactccgctcaccggcttctcctccttcgtgtgagcaaagcgccgcgcctccctcagggcggaacggaggcaactttccggagtctatttttgttaagacaatcaactccaataactgagctgaagtttttgtttaaaaagaaaaaaatctgataagtgatgattttacctacttgtggacactagatttcaattaggaaggtttttttaaacggctttttgtaacttcgctgcaggaagcaggtttgtttctttttcttttctttttaagagaaggtgtatttcactggtgcaatggcttggcacctccggggcctgggaggacctcagacctccccagccctgggtttctccgtcttcaagaccaactaggaagggtcaagcggggagagggagtggagggtcaggtgagatctcagagctgccccggccggcccccgtctctttctacctcctcttccagagaaccagcggctcacacccttctcaacgcaggacatcctcggcggctcctggggtttgaagagcaaacgtttttccctgggctcagtgcgttttgtcccaacttcatctgtttctgaaatgttctcacttggcagtgtctagtcaaggagtcggctttcaggttcctgacggccaggcagggatgctaaggtgtggctcagccgtcactgtctgtgtcactgcagtggtgcggtcctcaggcttttctgcctgtctttcccccttccttctcacctgacagcgagggagagggaagcctcttagggctggaagccaccacgctggccctctccttccccgaacacagcacacggtcaactccgcgggacacgaggacacgggacggcgtctccagaattgcttgttacgtaggaagcgtgcattgttaaccagagtatttttaaaatctttttatctttttttaaactatgtcacatgaaatgaatgcgtctttgctgtctccaggtgcctttttattaattgttcagctttgtacatgggaaagatgaaaagcaacagtgtctgcaaataaagcaaaacagctctgagaacacacgctcccgactcgcctcgtgcacaccaggccgtcccctccctctgtcctggcttctgctggctgctcgcagcagccaccgcttctccaccactggcgctgctgctgccccctctcccagtccgaggccagcttttagccttaacaggttttttggaaatgtttcttttttttatttaaaattgtcattgtttggtttaaatttttcagctagatgaaaagagtatgaactactttggaaaacttaacagctcagagatggccatgcctccagcccctcacgtcatctttgcaacagacgactgggctgccatggtccacccctcagcccgggtcccgggtctggatggaacgggagcactgctggtgcccactggcgtgtgtgccccgggtccctgtaagtgccccctcaccagcagcagcgtgacacacacaagactcaagaccaccctgtcagtgccccccagtgcacggcaaacgggcaggtgccgttcccccagtgacctgagggtaggggacaactgagcagtatctgaccagtgccacccaggagccagtctcctggccacatgcagaaagtgtggcccctgcttacctagatgttttgtgcacctccatgggcagagggtgtggatattgcctggattctgtgctgtcagcgttgctgagtatggccccaggagaccaaggagagttttgtataggctggaaaaccccttttcagtctttccaaaattagagggtatggcaagtttccttttttctctcctcccttccttcccctccttcctttcctttacccctcctttccttccttcctcccttcctctcttctttcctccctccctccctccttccctcccttccttcctctctttcctccttccttccctcccttctttccctccctcccttcctctctcccctattccttcttccttttctcctcctttttctgagtggagggggaaatattctaaaccaaaaatcctagatgctctgcccaaagccacttctgcatgagaatcgcaacccacagttccccggatgagactcaccacagtggacagtgccacctccttcccctcggccccggagagggcgaagtgggcgggaagccaggatgtgagcactggaatttcttggaagagaagcgataaatggagaccatggccagcgctgctttctgtgcactctgatgactgctctctgcagccatgaggatgtggctttacatgccagggagagtgttgagacgtcttaggttgaggatgagcagattcgagatatgtttgttgctctcgggttttcgatacaacatcatgacacttctgtttcaagctcatgttttccgtctcccctccactcttagtaaaccttgatctgtacggagcggcctgtccgaggctacgccggcctcctggctgctgctggactgtgcttaggacagcgcccatgcctcggagggactctgtcccatgagaaccacctgtgcaaaggaacagagctggatgtttccaggtagattttggcctcccagagcaatgcggcatttgagaagcaacagttcctaactccttatcttcagggaaggaaaagaaaatcacagcctaggaagatggaggttggattttaatctcggttttaaaaagaggacaaacaaaatgtctctaagccaggctagatggaatgtgctcccgctctctcctgccgtgctgaaagtcatgccttgcggatgcctcatgacagcagtggctgagtctccccacccacccccaacgtggctcatttcagattgcttcggccccaccctgcaaggatgtggtcacggagtggccaggaggctccgtctgagccacagggatgggtgtgcagagctccctcctcctggggtgccagggcagagattccaggcaggtgagcccagagagagctgccaggccacaccccctcggcctcctgcacggccaccttctgggtgaatcggtccagcccaagcccctctccccagcctcgccttcagcctctctcccagcctgcttttataaggcgcacttcactcaatgctgtagccaaaaaacgaggggccccagggagaggggacccagatggccacacacggaacgcgcctccacagccccgggaggtggctcactctgtacaggtcttcggaggccgtgtttgtatctaactgtgactgggctgaagcatgatgtttgcctaatggttcgtagcatggtttttatttcttacgcattcttggcacacagtgtagctatcctcctgacgagcaacccgtctgcgtacctaagtgtggctccccgtgggtcagcgtcctggtagcatggatccagtctgaaaggtgaggacaacgtggaaactcatgagctgagcctgcccgctgggacacgtctccttcccgcgtcaccttctggtttagggagccgtcaggtccctaaacgttccctacaactttttctgaaattgtgcagaaaaacagatctcattaaaagaaaaaaagaaacaacttgtaggaagacagagaggtgctatgggtacaatttttaataaaaacattattttgttccttaaa

SEQ ID NO: 18536 - DNA, 6459 bp, Homo sapiens
  source 1..6459: mol_type = unassigned DNA
gggtcctggagctctctcggcccggcaggtttcgctcccgcccctccggccttccacagctgtcctggccgcagggtgttcaaggcgggacacaccaggctagagatccgcgatcgggccccgcctcaggctctgtgcacacccctgcctggtgacctccattggtgctccagcgtgaacatggtgcaaagataccagtctcctgtccgagtctacaagtacccgtttgagctggtcatggcggcctacgagaagcgtttccccacgtgcccacagatcccagtcttcctgggcagcgaggtcttgcgcgagtcccgcagcccggacggggctgtgcacgtggtggagcggagctgccggctgcgcgtggacgccccgcggctgctgcggaagatcgcaggtgttgagcacgtggtcttcgtgcagacaaacatcttgaactggaaggagaggacgctcctcatcgaagcgcacaatgagaccttcgccaaccgcgtggtggtgaacgagcactgcagctacacggtccaccctgagaatgaagactggacttgcttcgagcagtctgcctcactggacattcggtctttctttggctttgaaaatgccttggagaagatcgccatgaagcagtacaccgccaacgtcaagagggggaaggaggtgattgagcattacctgaatgagctcatctcccagggtacctcgcacattccgcgctggacgcctgccccagtccgtgaggaggatgcccgcaaccaggctggaccgagggaccccagctccctggaggcccacgggccccgtagcaccctggggcccgctctggaggcggtcagtatggacggggacaagctggatgcggactacattgagaggtgcctgggccacctcacgcccatgcaggagagctgcctgatccagcttcggcactggttacaggagacccacaaaggcaagattcccaaagatgagcacatccttcggttcctgcgggctcatgacttccacctggacaaggcccgggaaatgctgcgccagtccttgagctggcgcaagcagcaccaggtggatctcctccttcagacctggcaaccccctgccctgctggaggagttctatgcagggggctggcattaccaggacatagatggccgccccctctacatcctccgcctgggccagatggacaccaaaggcttgatgaaggccgtgggggaggaggcgctgctgcggcatgttctctccgtcaacgaggaaggacagaagcggtgtgaggggagcacaaggcagctgggccgtcccatcagctcctggacctgcctgctagacctggagggactcaacatgcggcacctgtggcggccgggggtgaaggccctgctgcggatgattgaggtggttgaggacaattacccagagaccctgggtcggctgctcatcgtgcgagccccccgagtcttccccgtgctctggacactgatcagccccttcatcaatgagaacaccaggcggaagttcctcatctacagtggcagcaactaccagggacccggaggccttgtggactatctggatagagaagtgatccctgacttccttgggggagagagtgtgtgtaatgtccccgaaggagggctggtccccaagtccctctacatgacagaagaggagcaggagcacacggaccagctgtggcagtggagtgagacctaccattcagccagcgtgctccgcggagccccccacgaggtggccgtggagatcctggaaggagagtcggtcatcacctgggactttgacatcctgcgaggggacgtggtgttcagcctgtaccacaccaagcaggcgcccaggctgggcgcccgggaaccggggaccagggccagcgggcagctgatcgacaaaggctgggtcctgggcagggattacagccgtgtggaggctccccttgtctgccgggagggggagagcatccagggctcccatgtgacccggtggcccggcgtctacctgctccagtggcaaatgcacagcccccccagcagcgtggcctgcagcctcccgggtgtggacgatgtcctgacggctctgcacagccccgggcccaagtgcaaacttctctactactgtgaggtgctcgcctctgaggacttcaggggctccatgtccagcctggaatcctgcaccagcggcttctcccagctcagcgccgccacctcgtcctcctcctccggccagtctcatagcagctccctggtctccagatagccgggcccagtgtttcagggccgcccgctcgcctccagtgtccagaaatgtccagaatgagaagccagctaactgcagggcctgggaccatgtgggctggagccccaggcctagatgctgcccaagttggggtgtctggagcggatggcaaggatccagaactggcctgtgggtggtgtcagggctcttgaaattgcaaggacagaaccatctccttccggcttcgtgtaaggaagaccaagccaaggccaaggtgtctaccataccacacctttgggacatccgggcttagcgacgtcagccaggcccatctcctctctgtccacctcttgctctgctttcgccatgcaggggaccatcactatcaggtgcccttctcctccctgcagcttgcctgcataagagagcctcttcctcccaaaggctccagcccacttcccagagctgagtcttagcctggaagggggagcgattgccaggtcaattcctgaaccaatcacagttgccaggcacactggagaatgctgattggccagcagggtcatgcccaatctggaccaatcaccgtgatccagggttgcagtgaggtgcagtgattggccagcctggatcacatgcacatctctggaaccaaccacctgctctcaaaagcactagtgggtgcctcgaggagtactggggtcccccctaagaagaaggaggaaggatgctggggaggcagaaatgaagggtgtttaccttggcatctgattgcataacgttctgttatgcagtatcaagatgtgcttggtgagcagttaagtgagttacaggcgctgctctttgtggggaacagcacatcctgaagtgaaaatccatgttccctgcacttggccagcatggcctaagcctgaccatccctgattggagagggtgggagagccctgggtttctgctaagttccaggcagtgatggggtgactgaggctgtctgtataccccactggagatgcctttctctcctagggaactgtttaattatgactgtttttggttgtaagccacagagacccatgcccaggtgcttcaacacaaaagcatgatcattcatgggtgcatagaactggccagtccaggagggcttgcttcaggtaaggctagatccagggtctcaacatggagtctcgattccccccgcgagtggaggctgctgtgtttgccctggggcagatatgactctggaactaggttcaatattgacatgagttcccctagttactacacaggagcgtcttgggtctccttggggcctgaggacatttctcctttcctttcctggactccccaaaaggcagccagtcaggggtcaccaacttgaagcctgatctggcctgcttttagtgttgcttttttgcctttagaatggtttaaaaattgaggcatttcgcatcgaaatcaggatttctggcttcccttaggcatttgggagcaccagcagaatggggtcactattgttgcatgaagacaacacctctgcacccctggatgtggccacgccagtccctaccccattgacttgcgcccagcccacattacacatcctcatgacctgcgtggcaggagtctcactgacatggctctgtcagcagtggctggtacccttgtctcctggccttgcttagagttggggctcatctctgctgcagtaactgagccaaggggtggttttgtggccacaagaatcatctttatgcaggctcagcaatgcagggccaggaaacttatatctacgccagcctcaaccccaaacccaaggaagagagaaagtgtcatcttttcagatacatccttcttcctgctgggagagagccttgcccaccttcctgttggctctctgtccgcttctcaggtatctgaacaaaatagattgctttgcactctgcgtcaaggtgtgtgtgcacatgtgtgcataagagaccgactgattggaaggagacgttctcaaaactaattgctcccatatcaccaggcatttattgctgagagcaacttgcaatattttcaactatctttaagtgaatttctagcttttctcttaaaaactaggtgttatcctacaagtatgctgggataagctgccctggcagtctttatacatttattgtctagccccagagaaggacacagaagccttttacggaaggaagctggaactgcctgttccagaggcgggtggggggaggggagtctgctatcagctgtccacccttaacagtgggggtgaggaacctcaggccctttcagttctgctcttgagagtgctctctccctagggaaaaccagcccaaactggcttaagcaacaaagcaaattccctgggtcctgtactagggatggctgaaggtgggtgctgcttcagatatggctggatccaggagcttaatgtcctcaggcctctcaactgcacccaggcctcttgactctgcatctctttgcatgctgacctcattctttcttccacctggcgggaaagatggctgccagcagccccaagcctataatttcaggattcacactctaagagatgcttttccatctcaaatctcatggaaggctctgattggcccagctcgagtcacatgcttattcctgtgggccacactggcaaggaactagggtcccgtgattgacattccctgcagaagccgcagcaggattggggagggccattcccccaatggacaagagaagctggaccacagaaccagcaggtatccatggtggcatctgctacggccggctctcctcccatgtggaggtctcggggacccacgtggaagcattatcaaggtcattcttcttgccttcgggaggactggaattaaaaataatccaaggaagggattgccaagcttttggcttttgaatttcccctgagccacaaaggctggaagtgccttggcttgggcttcttgcatcattagttcattaatccattgtgaccaggacagaagcaacccacaagcagcattactgttggtgtttgggcacctgggccttgaatttaggccaggactcaaaccccagccttcctttcactagctgtgtaaccttgaccaggtgacttaacctctctgtgcctcagtttcctcatctgtaaagtgaggatagcagtgcctacctcaataggttgtagtgggacgaaatgagggagtagctgtaaagctttcagcacagctcccagaacacagaaagcgctccattaatgtcagtggtcattctgattacttaatgcttcgcatccaaagactcgttttcttcctgaggtcgcctatccctgtttttcgttattgcacccagagaaaagtaggtgtcaagaattattgccctctgagttgggtgtgcagtctttctcttttagaaactgcttgtgtgggcggggcgtggtggctcatgcctataatcccaacactttgggaggctgaggccggctgatcgcttgagtgcaggagttcaagaccagcctgggcaacatagtgagaccctgtctctacaaaaaattaaaaaatgagccaggcgtggtggtgcgtgcctatagtctcagctgctcgggaggctgaggcagaaggattgcttggaggtcaaggctggagtgagccatgatctcacccctgtacttcatcctgggtgacaaagcaagaccctgtctcaaaaaaagaagaaagaagctgcttgtgttttctgggtaagtccacccatctgagggagtgtattctgagtggtatttcccttggcagttagaaaatgttttttcccagaggttgaagtatggagagtttgagactctttttttctaccctgcactctctggaattccccctccctgctgtaaaatttattgtccaatgagaatagtataattgttttcaacaaagtctctttgagccagtgaaacacgatgggtttttttgtttgcctgatcacttgctccaaccagcagcattaaatgttttccatttggataaacttgcatcgtcagcttcctaaaaccctggaggtttcccgtgggctcgttcaagaactttccagctgttgtttaaaagactttagagctagcttgttcagcctgtggcctgcaggctgcacgcggccccggactgctttgaatgtgctccaacacgagttcgtaaactttcttaaaatactgag

SEQ ID NO: 18537 - DNA, 576 bp, Homo sapiens
  source 1..576: mol_type = unassigned DNA
agtcactcctcgccccaggctctgtgcacacccctgcctggtgacctccattggtgctccagcgtgaacatggtgcaaagataccagtctcctgtccgagtctacaagtacccgtttgagctggtcatggcggcctacgagaagcgtttccccacgtgcccacagatcccagtcttcctgggcagcgaggtcttgcgcgagtcccgcagcccggacggggctgtgcacgtggtggagcggagctgccggctgcgcgtggacgccccgcggctgctgcggaagatcgcaggtgttgagcacgtggtcttcgtgcagacaaacatcttgaactggaaggagaggacgctcctcatcgaagcgcacaatgagaccttcgccaaccgcgtggtggtgaacgagcactgcagctacacggtccaccctgagaatgaagactggacttgcttcgagcagtctgcctcactggacattcggtctttctttggctttgaaaatgccttggagaagatcgccatgaagcagtacaccgccaacgtcaagagggggaaggaggtgattgagcattacctgaatgag

SEQ ID NO: 18538 - DNA, 4030 bp, Homo sapiens
  source 1..4030: mol_type = unassigned DNA
agccgagaaagggtttgacgtggcagttcccagcccagctgcaactccgagcgtgagtccaggctaaggggacgccggccggggaagaggcgcggcgggagaagcgaccgcagcgggagcccggccaccgagggctgccggcactaggcgcagagccgccagcgctcggaagcccgcggggtgcgggagcgggaacagacttcttttgtagaattatcctatggaatgatattttcataatgagtcaacaaggttacgtggctacacctccgtattctcagcctcagcctggaataggcctttctccacctcattatgggcactatggggatccgtcgcacacagcatctccaacaggtatgatgaagccagcagggcctttgggggccaccgccactaggggaatgttgcctccgggtcccccacctcctggaccccatcagtttggtcagaatggagctcatgccactggtcaccctccccaaagatttccaggccctccacctgtcaacaatgtggcatcctcacatgcaccataccaaccctctgcacaatcttcttatccaggtcctatatccacttcatctgtcacccagctgggcagccagctcagtgctatgcaaatcaacagctatggttcaggcatggctcctccaagccagggaccccctggccctctgtcagccacatcattgcagactcctccacgacctccacagccttccattttgcagcctggatctcaagttcttccaccaccacccaccacactcaatggtcctggtgcctcacctttgcctctaccaatgtacagaccagatgggctctctgggcctcctcctccaaatgcccagtaccagcccccacctcttccaggccagaccttgggtgctggatatcctccgcagcaggccaactctggtccccagatggcaggcgcacaactgtcttacccaggaggcttccctggaggtcctgcacagatggctggtccgccacagccccagaagaagctggatcctgactctatccctagcccaatccaggtgattgagaatgatagagccagcagaggaggacaagtttatgccaccaacaccagaggccagatccctcccctggtcactacagattgcatgatacaagaccaaggaaatgccagtcctcgattcatccgttgtacaacatactgttttccatgcacgtcagatatggctaagcaagctcagattccattagctgctgtcatcaagccctttgccaccattccttcaaatgagagtcccctttacttggtaaatcacggcgagagtggaccagtcagatgcaacaggtgcaaggcctacatgtgcccatttatgcagttcatcgaaggaggaaggagatatcagtgtggattttgcaactgtgtgaatgatgttccaccattctatttccaacatctggaccacattggaagaagactggaccactatgagaaaccagagttatctctaggatcttatgaatatgttgccactttggattattgcagaaagagtaagcctcccaacccaccagcctttatcttcatgattgatgtttcatatagtaacataaagaatggacttgtcaagctcatatgtgaagaactgaagaccatgctggaaaaaattccaaaggaagagcaagaagagacgtctgcaattcgagtgggttttatcacatataacaaagttctccatttctttaatgtgaagagtaatctggcccagcctcagatgatggtggtgactgatgttggagaagtctttgttcctttgttggatggtttccttgtcaactatcaagaatcccaatctgtgattcataatttgttggaccagattccagacatgtttgcagactctaatgaaaatgagactgtctttgctcctgtcatccaggctggcatggaagcactaaaggcagcagactgtcctgggaagctgttcatcttccattcttccttgccaactgctgaagcaccagggaagctcaaaaacagagatgacaaaaaactggttaatacagacaaagagaagatacttttccagccccaaacaaatgtctatgactcattggccaaggactgcgtggctcacggctgctctgtgacactcttcctctttcctagtcagtatgtggacgtggcctcgctggggctggttcctcagctcactggaggaaccctttacaaatacaacaatttccagatgcacttggatagacaacaatttttgaacgacctcagaaatgatattgaaaagaaaataggctttgatgctattatgagggttcgtaccagcacaggtttcagagccactgatttctttggtggaatcttgatgaacaacaccaccgatgtagaaatggctgccatcgattgtgacaaggcagtgaccgtggagttcaagcacgatgacaaactcagtgaagacagtggagccttaatccagtgtgctgtgctttacacgacaatcagtggtcaaagaagacttcggattcacaatcttggcttaaactgcagctctcagctagctgatctttataagagctgtgagacagatgctcttatcaacttctttgccaagtcagcttttaaagcagttctccaccagcctttgaaggtcatccgggaaattctagttaatcagactgcccatatgttggcatgttaccggaagaattgtgcaagtccttctgcagcaagccagcttattctaccagattccatgaaagtattgccagtgtacatgaattgcttgttgaaaaactgtgtactactcagcagaccagagatctcaactgatgaacgagcataccagagacagctggtcatgaccatgggtgtggctgactctcagcttttcttctacccacaacttctgcccatacacacgttagatgtcaagagtacaatgttacctgctgccgttcgttgctctgagtcccgtctttcagaagaaggaatattcttactggctaatggtctacacatgttcctgtggttgggagtaagcagcccaccagaactgatccaaggaatatttaatgtgccatcttttgcacatatcaacacagatatgacattgctgcctgaagtgggaaacccatactctcaacaactcagaatgataatgggtattatccaacaaaagaggccatattcaatgaagctcacaattgtaaagcagcgagaacaaccagaaatggttttccgacagttcctggtagaagacaaaggactttacggaggctcttcttatgtggatttcctttgttgtgttcacaaggagatctgtcagctgcttaattaattgaaacttctctgtcattgatgttgcatttccaaggagataatctccttcttggtgcctaattttctagatgataataggctagttttgatttcttgctcattttcagaataactttccaggaagagatggcatttagaacttcagctttggtgctcaggtataaagccaattaaggtacaattgtaccataaagggaacaatctgtttctgattgcacagtttctaatttttaaaactgatgtggtttgcatttcataaaaggcaaagtttacagaaccataaacattctcaattttctttatgctagacatataaattatttttcaaactgtatagatttggggtaaaaagttgtctcagttcctctcccaattgcaatgagaaaaaaaagcttaatttttacattatacttaattttctaaaaccatgtaactccattgaacacatttttcaacttaaggtctgcatagcagacttttaataaccttgggatttatctggtagaacaatatgtgttctacatttttttcataattatatattgtgtatgttaaaactattttccagttgttttgtctgtaaaactgtctttatcaatatgcttaatggttctttgtacaattttgaaagtttctacctgtatataatggatgttaaccagtatcaataaatcacttcgtataatctta

SEQ ID NO: 18539 - DNA, 3915 bp, Homo sapiens
  source 1..3915: mol_type = unassigned DNA
cttgtgtctcaacacagcagattatgttccctcagttccaccattctatttccaacatctggaccacattggaagaagactggaccactatgagaaaccagagttatctctaggatcttatgaatatgttgccactttggattattgcagacagtattcacaatagccaaaaggaggaagcaaccaggtgtctatggaagaagaatggataagcaaaatgtggtatatacgtacaatggaatatcattcagcctcaaaaaggaagaaaagtctgacccatgctacaacatggatgaatgttgaggatgttatgctaagtaaaataagccagccacaaaaaggataaatatggaatgattctatatgaggtcactaaagttgtttgcctgtggctctcttttctaaatattttgtaagatgcaactgaaggatcacttcctaaaagctgtttgaacaccagccagtaaagggaccaacaactaaaaaacatgttcgtagcagctgctttatgtcacagtgattattttaaacagataaagaaaacgcctgacgttctatgttaccgcaaatatgtaaaaaactagaagagtaagcctcccaacccaccagcctttatcttcatgattgatgtttcatatagtaacataaagaatggacttgtcaagctcatatgtgaagaactgaagaccatgctggaaaaaattccaaaggaagagcaagaagagacgtctgcaattcgagtgggttttatcacatataacaaagttctccatttctttaatgtgaagagtaatctggcccagcctcagatgatggtggtgactgatgttggagaagtctttgttcctttgttggatggtttccttgtcaactatcaagaatcccaatctgtgattcataatttgttggaccagattccagacatgtttgcagactctaatgaaaatgagactgtctttgctcctgtcatccaggctggcatggaagcactaaaggcagcagactgtcctgggaagctgttcatcttccattcttccttgccaactgctgaagcaccagggaagctcaaaaacagagatgacaaaaaactggttaatacagacaaagagaagatacttttccagccccaaacaaatgtctatgactcattggccaaggactgcgtggctcacggctgctctgtgacactcttcctctttcctagtcagtatgtggacgtggcctcgctggggctggttcctcagctcactggaggaaccctttacaaatacaacaatttccagatgcacttggatagacaacaatttttgaacgacctcagaaatgatattgaaaagaaaataggctttgatgctattatgagggttcgtaccagcacaggtttcagagccactgatttctttggtggaatcttgatgaacaacaccaccgatgtagaaatggctgccatcgattgtgacaaggcagtgaccgtggagttcaagcacgatgacaaactcagtgaagacagtggagccttaatccagtgtgctgtgctttacacgacaatcagtggtcaaagaagacttcggattcacaatcttggcttaaactgcagctctcagctagctgatctttataagagctgtgagacagatgctcttatcaacttctttgccaagtcagcttttaaagcagttctccaccagcctttgaaggtcatccgggaaattctagttaatcagactgcccatatgttggcatgttaccggaagaattgtgcaagtccttctgcagcaagccagttcacttgtgaaaaataatatctatgaagatggagagattcctaaaggaattccactattttaccatagagcccaaagtttccttgacccaagcaagaccatcaaggagctatctggattgtatgatactggacctcagtagaactacttttactgaattgctggagccaaaactaggctgcagcaagagaaggcaattagggtacaaaatctaaggaagctgtcattctgaggatcatatgatagatgctgggttaagacatatggctgggcatggtggctcatgcctgtaatcccagccctttgagaggccaaggcaggtggatcacttgaggtcaggagttcaagaccagcctgggcaacatggtgaaaccccacatctactaaaaatacaaaaacagctgggcgtggtggcatggacctctaatcccagttacttaggaggctgaggcaggagaatagcttgaacccaggaggtggacgttgcagtgagccgagatcatgccactcgactccagcgtgggcaaaaaaaaaaaaaaaaaaaaaaagacatataactagaaacaagataaattaggctgggtgcagtggctcacacttgtaatcctagcactttgggaggccaagacaggaggattgcttgaggccagcagttgaaggccagcctgggcaacatatcgaaacctccacctctactaaaaataaaaacttagccaggtgtagtggtacatgcctatagtcccagccactcaggaggctgaggcaagaggatccctggaacccaggagcttgaggatgcagcgagctatgattgtgccaccatactctagcctggatgacaaacttattctaccagattccatgaaagtattgccagtgtacatgaattgcttgttgaaaaactgtgtactactcagcagaccagagatctcaactgatgaacgagcataccagagacagctggtcatgaccatgggtgtggctgactctcagcttttcttctacccacaacttctgcccatacacacgttagatgtcaagagtacaatgttacctgctgccgttcgttgctctgagtcccgtctttcagaagaaggaatattcttactggctaatggtctacacatgttcctgtggttgggagtaagcagcccaccagaactgatccaaggaatatttaatgtgccatcttttgcacatatcaacacagatatgacattgctgcctgaagtgggaaacccatactctcaacaactcagaatgataatgggtattatccaacaaaagaggccatattcaatgaagctcacaattgtaaagcagcgagaacaaccagaaatggttttccgacagttcctggtagaagacaaaggactttacggaggctcttcttatgtggatttcctttgttgtgttcacaaggagatctgtcagctgcttaattaattgaaacttctctgtcattgatgttgcatttccaaggagataatctccttcttggtgcctaattttctagatgataataggctagttttgatttcttgctcattttcagaataactttccaggaagagatggcatttagaacttcagctttggtgctcaggtataaagccaattaaggtacaattgtaccataaagggaacaatctgtttctgattgcacagtttctaatttttaaaactgatgtggtttgcatttcataaaaggcaaagtttacagaaccataaacattctcaattttctttatgctagacatataaattatttttcaaactgtatagatttggggtaaaaagttgtctcagttcctctcccaattgcaatgagaaaaaaaagcttaatttttacattatacttaattttctaaaaccatgtaactccattgaacacatttttcaacttaaggtctgcatagcagacttttaataaccttgggatttatctggtagaacaatatgtgttctacatttttttcataattatatattgtgtatgttaaaactattttccagttgttttgtctgtaaaactgtctttatcaatatgcttaatggttctttgtacaattttgaaagtttctacctgtatataatggatgttaaccagtatcaataaatcacttcgtat

SEQ ID NO: 18540 - DNA, 2626 bp, Homo sapiens
  source 1..2626: mol_type = unassigned DNA
accagagccaggcccatgctgtggatcagaagcgaccataaacaagaaaatccaatctgtcttctggctttcttgagagtcccctttacttggtaaatcacggcgagagtggaccagtcagatgcaacaggtgcaaggcctacatgtgcccatttatgcagttcatcgaaggaggaaggagatatcagtgtggattttgcaactgtgtgaatgatgttccaccattctatttccaacatctggaccacattggaagaagactggaccactatgagaaaccagagttatctctaggatcttatgaatatgttgccactttggattattgcagaaagagtaagcctcccaacccaccagcctttatcttcatgattgatgtttcatatagtaacataaagaatggacttgtcaagctcatatgtgaagaactgaagaccatgctggaaaaaattccaaaggaagagcaagaagagacgtctgcaattcgagtgggttttatcacatataacaaagttctccatttctttaatgtgaagagtaatctggcccagcctcagatgatggtggtgactgatgttggagaagtctttgttcctttgttggatggtttccttgtcaactatcaagaatcccaatctgtgattcataatttgttggaccagattccagacatgtttgcagactctaatgaaaatgagactgtctttgctcctgtcatccaggctggcatggaagcactaaaggcagcagactgtcctgggaagctgttcatcttccattcttccttgccaactgctgaagcaccagggaagctcaaaaacagagatgacaaaaaactggttaatacagacaaagagaagatacttttccagccccaaacaaatgtctatgactcattggccaaggactgcgtggctcacggctgctctgtgacactcttcctctttcctagtcagtatgtggacgtggcctcgctggggctggttcctcagctcactggaggaaccctttacaaatacaacaatttccagatgcacttggatagacaacaatttttgaacgacctcagaaatgatattgaaaagaaaataggctttgatgctattatgagggttcgtaccagcacaggtttcagagccactgatttctttggtggaatcttgatgaacaacaccaccgatgtagaaatggctgccatcgattgtgacaaggcagtgaccgtggagttcaagcacgatgacaaactcagtgaagacagtggagccttaatccagtgtgctgtgctttacacgacaatcagtggtcaaagaagacttcggattcacaatcttggcttaaactgcagctctcagctagctgatctttataagagctgtgagacagatgctcttatcaacttctttgccaagtcagcttttaaagcagttctccaccagcctttgaaggtcatccgggaaattctagttaatcagactgcccatatgttggcatgttaccggaagaattgtgcaagtccttctgcagcaagccagcttattctaccagattccatgaaagtattgccagtgtacatgaattgcttgttgaaaaactgtgtactactcagcagaccagagatctcaactgatgaacgagcataccagagacagctggtcatgaccatgggtgtggctgactctcagcttttcttctacccacaacttctgcccatacacacgttagatgtcaagagtacaatgttacctgctgccgttcgttgctctgagtcccgtctttcagaagaaggaatattcttactggctaatggtctacacatgttcctgtggttgggagtaagcagcccaccagaactgatccaaggaatatttaatgtgccatcttttgcacatatcaacacagatatgacattgctgcctgaagtgggaaacccatactctcaacaactcagaatgataatgggtattatccaacaaaagaggccatattcaatgaagctcacaattgtaaagcagcgagaacaaccagaaatggttttccgacagttcctggtagaagacaaaggactttacggaggctcttcttatgtggatttcctttgttgtgttcacaaggagatctgtcagctgcttaattaattgaaacttctctgtcattgatgttgcatttccaaggagataatctccttcttggtgcctaattttctagatgataataggctagttttgatttcttgctcattttcagaataactttccaggaagagatggcatttagaacttcagctttggtgctcaggtataaagccaattaaggtacaattgtaccataaagggaacaatctgtttctgattgcacagtttctaatttttaaaactgatgtggtttgcatttcataaaaggcaaagtttacagaaccataaacattctcaattttctttatgctagacatataaattatttttcaaactgtatagatttggggtaaaaagttgtctcagttcctctcccaattgcaatgagaaaaaaaagcttaatttttacattatacttaattttctaaaaccatgtaactccattgaacacatttttcaacttaaggtctgcatagcagacttttaataacctt

SEQ ID NO: 18541 - DNA, 422 bp, Homo sapiens
  source 1..422: mol_type = unassigned DNA
attgtcttctgtcaattatgggaatgggtgccaataatttttagtgcattttccccacagttttggttttcaggtaatgaactacaccaatgttcaagtacatggttttatgtttttaacattatgataatctcatattgctacttctatctaaatgttataaactgtactaaaactttgattttcttaaatctaagacattgctgcctgaagtgggaaacccatactctcaacaactcagaatgataatgggtattatccaacaaaagaggccatattcaatgaagctcacaattgtaaagcagcgagaacaaccagaaatggttttccgacagttcctggtagaagacaaaggactttacggaggctcttcttatgtggatttcctttgttgtgttcacaaggagatctgtcagctgctt

SEQ ID NO: 18542 - DNA, 2969 bp, Homo sapiens
  source 1..2969: mol_type = unassigned DNA
atcatttaattatcataacccaattatgaagtagatatactattattccatattcagctaaaaaaaaaaaacactgagaaaaagacagggtaagtaatttgcccagggtcacacacctgctaaaagacagagctgggattgcatcctaagcagtgagtgggtagtgctgataacagctacaccagactgctgtagcactagataaaataaaaacaactgctgctctttgaatgcctactctgtgccagttactgtgtgctctaggtgttttacatgggttaccagttaatccttacatccttacaagttcagaagcaaataatgtttcagtcttacagatgaagctcagggaattgttctcagtaaagatcaagcgtatgaaacaaaaaattgtctttttcagcttattctaccagattccatgaaagtattgccagtgtacatgaattgcttgttgaaaaactgtgtactactcagcagaccagagatctcaactgatgaacgagcataccagagacagctggtcatgaccatgggtgtggctgactctcagcttttcttctacccacaacttctgcccatacacacgttagatgtcaagagtacaatgttacctgctgccgttcgttgctctgagtcccgtctttcagaagaaggaatattcttactggctaatggtctacacatgttcctgtggttgggagtaagcagcccaccagaactgatccaaggaatatttaatgtgccatcttttgcacatatcaacacagatatggtaagtattattttcattgcttttgtggtaatatgaaaaatataaattcgtaaatgtttttatttatgtgcagtcaaatattacagaaagaaaaataataaggcatatatttctgtatatgaaagaaataatttcatgttttgatcaatatcaattagctggtataaagttatttgtatagagtactttcaaacaactaaaatatgtgactttaatagaaaatgctaacacttccagatcattaactatgtgccagtctctgtactctaaatacttaaatataccatttcagttaattgtcataacaaatcagtgagatggatatggtctcaacattttacagaggaatcagttgaggcttggagacaagttccttcaggtagtaaagtggcagagatgggaactgaattcagttcttatgctctggactcatccctggtgctgaactgcatactcagaagaatgtagaaatctttcataagtgtttggctacagactaaatcagattactgagttaacaaataataattccataaaaagagactatacacccctctgttgcaataacaacaaaagaaattgtgagtttgatgttaaattaatacaaatgactattttaaagtatcttaggaaaacccagcttataatttgtacaagagtcaacatttattgcaaacgttatttgtagaccattgttgtgtgagcatcactgccgatggctattgtttgactctgatagtggattccagtagagctcagcagatagttagtttcctgaaggctcacttacattgtggcaagatggcttaagtctagttgttgaacccaattgtatgaagtacagtttatcaatatatatagcatcttgcagaaagaggcaagattaaaattcaaggccatgacaggtgatcagtttagagagctgcatattcatgaggaatgtcaaaagtgtatttttaagagaattcaggggcatcaatattccagttagagattggttttaagatgaagatttagaaattgatatctgcatatgtttgaaattaagaaatgattataaatgcaatttaaaaaaataaaattcagtaggcaaagaactatgagtctgaagaatgtttatataaaagttaaggaagcttcctcttgtaatatattgacatagtaaatgctgaatgcatagttgctgaactgaacatccacaggaaatagccagtgtctctaccacaaggcagcagattggtaggtctgtgcttatatcagcatactggtatttccttgactttcatcaacaaaatgaaacaaagttaaaaaccaaatgtaagctactttctttttagaggcagctggcactttaaaacacatacatgaagaatacttacgttgtttgttgaataaatagatctaccataatatgccacataatgcatataggggatgggagtgtgaatgtaaataatgaattttttgctttccttactcctgtgaaaaacattgaccataaacttttcctgacacttgaggtttatggtgaaacattctaactcacatgttctctggccaactcacagtgatgcattggctgttggcatcttcttgctgagaagcaaacattagcattttactctgtcttaacggaagaaatgtaagtcaaaatccttcatatcacctggatgccacgtgcagctggattggcctgtagaccactaaccagatttctgggctatctaagacgctgcattccctttgagaaatcaacatttggtagtttgttttaatgccggaacagtagtacttggatggaattttccatccactgaaggaacaaagtacattcttttctctcgcaacatagccttgaatcttgaaaagggatcaaactttcacaggaagttgtttgcataaaacatatactattgtctcttggtatccatggggaattggttccagaatactctataaattaacagatgctgaagtccctcatataaaatggcatggtatttgcatataacttgtacatatacccccatatattttaaatcatctctagattacttataacaccagctgggcacggtggctcacacctataatcccagcactttgggaggctgaagcgggaggattgcttgagtgcaggcgttcaagaccagcctgggcaacatagtgagaccctctctctatcaaaaaaaaa

SEQ ID NO: 18543 - DNA, 3806 bp, Homo sapiens
  source 1..3806: mol_type = unassigned DNA
atggaacatcagaggctaagctcaggtggcaacaggatgggtcagatcaaggaagactgagactccggaccaagcctcacggctggtgagggccagggactcaatcacaggaacaagacttcttttgtagaattatcctatggaatgatattttcataatgagtcaacaaggttacgtggctacacctccgtattctcagcctcagcctggaataggcctttctccacctcattatgggcactatggggatccgtcgcacacagcatctccaacaggaagaaaactgaggtccttaaagataagcttcttgcccaggttcatacaactaataagtaaccagtggggccttgaactactctaacccaagcccagtgatttctctcctttactgcaatttctcaagaagaaaagagagaaatgtctgaagacagttccaaagagaagtctttaaaggtatgatgaagccagcagggcctttgggggccaccgccactaggggaatgttgcctccgggtcccccacctcctggaccccatcagtttggtcagaatggagctcatgccactggtcaccctccccaaagatttccaggccctccacctgtcaacaatgtggcatcctcacatgcaccataccaaccctctgcacaatcttcttatccaggtcctatatccacttcatctgtcacccagctgggcagccagctcagtgctatgcaaatcaacagctatggttcaggcatggctcctccaagccagggaccccctggccctctgtcagccacatcattgcagactcctccacgacctccacagccttccattttgcagcctggatctcaagttcttccaccaccacccaccacactcaatggtcctggtgcctcacctttgcctctaccaatgtacagaccagatgggctctctgggcctcctcctccaaatgcccagtaccagcccccacctcttccaggccagaccttgggtgctggatatcctccgcagcaggccaactctggtccccagatggcaggcgcacaactgtcttacccaggaggcttccctggaggtcctgcacagatggctggtccgccacagccccagaagaagctggatcctgactctatccctagcccaatccaggtgattgagaatgatagagccagcagaggaggacaagtttatgccaccaacaccagaggccagatccctcccctggtcactacagattgcatgatacaagaccaaggaaatgccagtcctcgattcatccgttgtacaacatactgttttccatgcacgtcagatatggctaagcaagctcagattccattagctgctgtcatcaagccctttgccaccattccttcaaatgagagtcccctttacttggtaaatcacggcgagagtggaccagtcagatgcaacaggtgcaaggcctacatgtgcccatttatgcagttcatcgaaggaggaaggagatatcagtgtggattttgcaactgtgtgaatgatgttccaccattctatttccaacatctggaccacattggaagaagactggaccactatgagaaaccagagttatctctaggatcttatgaatatgttgccactttggattattgcagacagtattcacaatagccaaaaggaggaagcaaccaggtgtctatggaagaagaatggataagcaaaatgtggtatatacgtacaatggaatatcattcagcctcaaaaaggaagaaaagtctgacccatgctacaacatggatgaatgttgaggatgttatgctaagtaaaataagccagccacaaaaaggataaatatggaatgattctatatgaggtcactaaagttgtttgcctgtggctctcttttctaaatattttgtaagatgcaactgaaggatcacttcctaaaagctgtttgaacaccagccagtaaagggaccaacaactaaaaaacatgttcgtagcagctgctttatgtcacagtgattattttaaacagataaagaaaacgcctgacgttctatgttaccgcaaatatgtaaaaaactagaagagtaagcctcccaacccaccagcctttatcttcatgattgatgtttcatatagtaacataaagaatggacttgtcaagctcatatgtgaagaactgaagaccatgctggaaaaaattccaaaggaagagcaagaagagacgtctgcaattcgagtgggttttatcacatataacaaagttctccatttctttaatgtgaagagtaatctggcccagcctcagatgatggtggtgactgatgttggagaagtctttgttcctttgttggatggtttccttgtcaactatcaagaatcccaatctgtgattcataatttgttggaccagattccagacatgtttgcagactctaatgaaaatgagactgtctttgctcctgtcatccaggctggcatggaagcactaaaggcagcagactgtcctgggaagctgttcatcttccattcttccttgccaactgctgaagcaccagggaagctcaaaaacagagatgacaaaaaactggttaatacagacaaagagaagatacttttccagccccaaacaaatgtctatgactcattggccaaggactgcgtggctcacggctgctctgtgacactcttcctctttcctagtcagtatgtggacgtggcctcgctggggctggttcctcagctcactggaggaaccctttacaaatacaacaatttccagatgcacttggatagacaacaatttttgaacgacctcagaaatgatattgaaaagaaaataggctttgatgctattatgagggttcgtaccagcacaggtttcagagccactgatttctttggtggaatcttgatgaacaacaccaccgatgtagaaatggctgccatcgattgtgacaaggcagtgaccgtggagttcaagcacgatgacaaactcagtgaagacagtggagccttaatccagtgtgctgtgctttacacgacaatcagtggtcaaagaagacttcggattcacaatcttggcttaaactgcagctctcagctagctgatctttataagagctgtgagacagatgctcttatcaacttctttgccaagtcagcttttaaagcagttctccaccagcctttgaaggtcatccgggaaattctagttaatcagactgcccatatgttggcatgttaccggaagaattgtgcaagtccttctgcagcaagccagttcacttgtgaaaaataatatctatgaagatggagagattcctaaaggaattccactattttaccatagagcccaaagtttccttgacccaagcaagaccatcaaggagctatctggattgtatgatactggacctcagtagaactacttttactgaattgctggagccaaaactaggctgcagcaagagaaggcaattagggtacaaaatctaaggaagctgtcattctgaggatcatatgatagatgctgggttaagacatatggctgggcatggtggctcatgcctgtaatcccagccctttgagaggccaaggcaggtggatcacttgaggtcaggagttcaagaccagcctgggcaacatggtgaaaccccacatctactaaaaatacaaaaacagctgggcgtggtggcatggacctctaatcccagttacttaggaggctgaggcaggagaatagcttgaacccaggaggtggacgttgcagtgagccgagatcatgccactcgactccagcgtgggcaaaaaaaaaaaaaaaa

SEQ ID NO: 18544 - DNA, 351 bp, Homo sapiens
  source 1..351: mol_type = unassigned DNA
actgcagctctcagctagctgatctttataagagctgtgagacagatgctcttatcaacttctttgccaagtcagcttttaaagcagttctccaccagcctttgaaggtcatccgggaaattctagttaatcagactgcccatatgttggcatgttaccggaagaattgtgcaagtccttctgcagcaagccaggtgagctacctattgcacatagatgttaaagtgttacaaacgactactcatttcttcagcacatagctatagaaggcttatgatgttgcaggcacttagatgctgttacagtaaacagtgtagctgagaagattaagaatgcaatttgggggggctg

SEQ ID NO: 18545 - DNA, 576 bp, Homo sapiens
  source 1..576: mol_type = unassigned DNA
ctcagttagtgaaggaagtagagaagaaaacacagttcagagtcagtaccttatcagcctgtactctgttgacatatcaaagaaattgggaagagcaagaagagacgtctgcaattcgagtgggttttatcacatataacaaagttctccatttctttaatgtgaagagtaatctggcccagcctcagatgatggtggtgactgatgttggagaagtctttgttcctttgttggatggtttccttgtcaactatcaagaatcccaatctgtgattcataatttgttggaccagattccagacatgtttgcagactctaatgaaaatgagactgtctttgctcctgtcatccaggctggcatggaagcactaaaggcagcagactgtcctgggaagctgttcatcttccattcttccttgccaactgctgaagcaccagggaagctcaaaaacagagatgacaaaaaactggttaatacagacaaagagaagatacttttccagccccaaacaaatgtctatgactcattggccaaggactgcgtggctcacggctgctctgtgacactcttcctct

SEQ ID NO: 18546 - DNA, 1870 bp, Homo sapiens
  source 1..1870: mol_type = unassigned DNA
atatggaacatcagaggctaagctcaggtggcaacaggatgggtcagatcaaggaagactgagactccggaccaagcctcacggctggtgagggccagggactcaatcacaggaacaagacttcttttgtagaattatcctatggaatgatattttcataatgagtcaacaaggttacgtggctacacctccgtattctcagcctcagcctggaataggcctttctccacctcattatgggcactatggggatccgtcgcacacagcatctccaacaggtatgatgaagccagcagggcctttgggggccaccgccactaggggaatgttgcctccgggtcccccacctcctggaccccatcagtttggtcagaatggagctcatgccactggtcaccctccccaaaggttcaggcatggctcctccaagccagggaccccctggccctctgtcagccacatcattgcagactcctccacgacctccacagccttccattttgcagcctggatctcaagttcttccaccaccacccaccacactcaatggtcctggtgcctcacctttgcctctaccaatgtacagaccagatgggctctctgggcctcctcctccaaatgcccagtaccagcccccacctcttccaggccagaccttgggtgctggatatcctccgcagcaggccaactctggtccccagatggcaggcgcacaactgtcttacccaggaggcttccctggaggtcctgcacagatggctggtccgccacagccccagaagaagctggatcctgactctatccctagcccaatccaggtgattgagaatgatagagccagcagaggaggacaagtttatgccaccaacaccagaggccagatccctcccctggtcactacagattgcatgatacaagaccaaggaaatgccagtcctcgattcatccgttgtacaacatactgttttccatgcacgtcagatatggctaagcaagctcagattccattagctgctgtcatcaagccctttgccaccattccttcaaatgagagtcccctttacttggtaaatcacggcgagagtggaccagtcagatgcaacaggtgcaaggcctacatgtgcccatttatgcagttcatcgaaggaggaaggagatatcagtgtggattttgcaactgtgtgaatgatgttttagaggaaaaaatcctgagaagggacagaggcttctcccaaagcatttggacaaagtcctccagcgagcccaccagctcctcagatgtcttcacccaagcccccagctttcttagaaaggtgaccaaaatcatacccaccatgaagagcagcaaggatcttcagtttgctgtgactctttggcctcctacccaaagtgtcggctcagggccttaaaaggcccagccacttccaggaagagaaaaacgactcagaattcttgtgtctcaacacagcagattatgttccctcagttccaccattctatttccaacatctggaccacattggaagaagactggaccactatgagaaaccagagttatctctaggatcttatgaatatgttgccactttggattattgcagaaagagtaagcctcccaacccaccagcctttatcttcatgattgatgtttcatatagtaacataaagaatggacttgtcaagctcatatgtgaagaactgaagaccatgctggaaaaaattccaaaggaagagcaagaagagacgtctgcaattcgagtgggttttatcacatataacaaagttctccatttctttaatgtgaagagtaatctggcccagcctcagatgatggtggtgactgatgttggagaagtctttgttcctttgt

SEQ ID NO: 18547 - DNA, 580 bp, Homo sapiens
  source 1..580: mol_type = unassigned DNA
acatgtgcccatttatgcagttcatcgaaggaggaaggagatatcagtgtggattttgcaactgtgtgaatgatgttccaccattctatttccaacatctggaccacattggaagaagactggaccactatgagaaaccagagttatctctaggatcttatgaatatgttgccactttggattattgcagagtaagtgttcccagaacttcaagtgtttatacattgatgttaaattcaagtgaataactttcatatgtaaagaactgactcttgattcacaaacaaagcattttggtggtaccatggagtggtagaaatgcctaagacacagatcccatctcctaggttgttaacatgattcaactgccaaaccatctactggaggaattatttttaaaaactgaaatgtggtgtcagaaatagaaaacaataattttttatgtccttgccagacagaatatacctggttcttaatgcagtagttccgtacagtgcctctgcctcccttattttgtaaagagtctcagaaaaacttcccttccaagagaaaagctcaaccaaaatggttagtaggacta

SEQ ID NO: 18548 - DNA, 1319 bp, Homo sapiens
  source 1..1319: mol_type = unassigned DNA
aagttaattacatatggaacatcagaggctaagctcaggtggcaacaggatgggtcagatcaaggaagactgagactccggaccaagcctcacggctggtgagggccagggactcaatcacaggaacaagacttcttttgtagaattatcctatggaatgatattttcataatgagtcaacaaggttacgtggctacacctccgtattctcagcctcagcctggaataggcctttctccacctcattatgggcactatggggatccgtcgcacacagcatctccaacaggtatgatgaagccagcagggcctttgggggccaccgccactaggggaatgttgcctccgggtcccccacctcctggaccccatcagtttggtcagaatggagctcatgccactggtcaccctccccaaagatttccaggccctccacctgtcaacaatgtggcatcctcacatgcaccataccaaccctctgcacaatcttcttatccaggtcctatatccacttcatctgtcacccagctgggcagccagctcagtgctatgcaaatcaacagctatgatcatggaaagagtggaagctcagatgttgtgaggcagaaaagagaagataggagaggaaagagtcacagtactgagatttacatcaacagaaatgctgtatatcctgttcaggcatggctcctccaagccagggaccccctggccctctgtcagccacatcattgcagactcctccacgacctccacagccttccattttgcagcctggatctcaagttcttccaccaccacccaccacactcaatggtcctggtgcctcacctttgcctctaccaatgtacagaccagatgggctctctgggcctcctcctccaaatgcccagtaccagcccccacctcttccaggccagaccttgggtgctggatatcctccgcagcaggccaactctggtccccagatggcaggcgcacaactgtcttacccaggaggcttccctggaggtcctgcacagatggctggtccgccacagccccagaagaagctggatcctgactctatccctagcccaatccaggtgattgagaatgatagagccagcagaggaggacaagtttatgccaccaacaccagaggccagatccctcccctggtcactacagattgcatgatacaagaccaaggaaatgccagtcctcgattcatccgttgtacaacatactgttttccatgcacgtcagatatggctaagcaagctcagattccattagctgctgtcatcaagccctttgccaccattccttcaaatgag

SEQ ID NO: 18549 - DNA, 602 bp, Homo sapiens
  source 1..602: mol_type = unassigned DNA
gtagtgcattgcacgggtacgtcatcaaatgtgcgtgtacacgtgccagattcgcctttaaacgacttcttttgtagaattatcctatggaatgatattttcataatgagtcaacaaggttacgtggctacacctccgtattctcagcctcagcctggaataggcctttctccacctcattatgggcactatggggatccgtcgcacacagcatctccaacaggtatgatgaagccagcagggcctttgggggccaccgccactaggggaatgttgcctccgggtcccccacctcctggaccccatcagtttggtcagaatggagctcatgccactggtcaccctccccaaagatttccaggccctccacctgtcaacaatgtggcatcctcacatgcaccataccaaccctctgcacaatcttcttatccaggtcctatatccacttcatctgtcacccagctgggcagccagctcagtgctatgcaaatcaacagctatggttcaggcatggctcctccaagccagggaccccctggccctctgtcagccacatcattgcagactcctccacgacctccacagccttccattttgcagcc

SEQ ID NO: 18550 - DNA, 561 bp, Homo sapiens
  source 1..561: mol_type = unassigned DNA
aagctcaggtggcaacaggatgggtcagatcaaggaagactgagactccggaccaagcctcacggctggtgagggccagggactcaatcacaggaacaagacttcttttgtagaattatcctatggaatgatattttcataatgagtcaacaaggttacgtggctacacctccgtattctcagcctcagcctggaataggcctttctccacctcattatgggcactatggggatccgtcgcacacagcatctccaacaggtacagtgtgttattttgacttgtatgtgattattcagttctcaggctcagagacataagatgttctgaaagaggagatttgaaagcattgaatgatcattatataatgaaatggcttgagattacaggatcatttggaaaaggctctcatagcagaactctacatcactagtttggttattgcatgcaatacaagtttggtttttaaatatagactaaaacaaacacttcctgttttatttttactgtgagtcttgttcttgctgttaattagtggtgtaaggctattgtaaacattgaat

SEQ ID NO: 18551 - DNA, 2786 bp, Homo sapiens
  source 1..2786: mol_type = unassigned DNA
gcggctggtccaagcccggcgctgggggcgcgcagccgagaaagggtttgacgtggcagttcccagcccagctgcaactccgagcgtgagtccaggctaaggggacgccggccggggaagaggcgcggcgggagaagcgaccgcagcgggagcccggccaccgagggctgccggcactaggcgcagagccgccagcgctcggaagcccgcggggtgcgggagcgggaacagacttcttttgtagaattatcctatggaatgatattttcataatgagtcaacaaggttacgtggctacacctccgtattctcagcctcagcctggaataggcctttctccacctcattatgggcactatggggatccgtcgcacacagcatctccaacaggtatgatgaagccagcagggcctttgggggccaccgccactaggggaatgttgcctccgggtcccccacctcctggaccccatcagtttggtcagaatggagctcatgccactggtcaccctccccaaagatttccaggccctccacctgtcaacaatgtggcatcctcacatgcaccataccaaccctctgcacaatcttcttatccaggtcctatatccacttcatctgtcacccagctgggcagccagctcagtgctatgcaaatcaacagctatggttcaggcatggctcctccaagccagggaccccctggccctctgtcagccacatcattgcagactcctccacgacctccacagccttccattttgcagcctggatctcaagttcttccaccaccacccaccacactcaatggtcctggtgcctcacctttgcctctaccaatgtacagaccagatgggctctctgggcctcctcctccaaatgcccagtaccagcccccacctcttccaggccagaccttgggtgctggatatcctccgcagcaggccaactctggtccccagatggcaggcgcacaactgtcttacccaggaggcttccctggaggtcctgcacagatggctggtccgccacagccccagaagaagctggatcctgactctatccctagcccaatccaggtgattgagaatgatagagccagcagaggaggacaagtttatgccaccaacaccagaggccagatccctcccctggtcactacagattgcatgatacaagaccaaggaaatgccagtcctcgattcatccgttgtacaacatactgttttccatgcacgtcagatatggctaagcaagctcagattccattagctgctgtcatcaagccctttgccaccattccttcaaatgagagtcccctttacttggtaaatcacggcgagagtggaccagtcagatgcaacaggtgcaaggcctacatgtgcccatttatgcagttcatcgaaggaggaaggagatatcagtgtggattttgcaactgtgtgaatgatgttccaccattctatttccaacatctggaccacattggaagaagactggaccactatgagaaaccagagttatctctaggatcttatgaatatgttgccactttggattattgcagaaagagtaagcctcccaacccaccagcctttatcttcatgattgatgtttcatatagtaacataaagaatggacttgtcaagctcatatgtgaagaactgaagaccatgctggaaaaaattccaaaggaagagcaagaagagacgtctgcaattcgagtgggttttatcacatataacaaagttctccatttctttaatgtgaagagtaatctggcccagcctcagatgatggtggtgactgatgttggagaagtctttgttcctttgttggatggtttccttgtcaactatcaagaatcccaatctgtgattcataatttgttggaccagattccagacatgtttgcagactctaatgaaaatgagactgtctttgctcctgtcatccaggctggcatggaagcactaaaggcagcagactgtcctgggaagctgttcatcttccattcttccttgccaactgctgaagcaccagggaagctcaaaaacagagatgacaaaaaactggttaatacagacaaagagaagatacttttccagccccaaacaaatgtctatgactcattggccaaggactgcgtggctcacggctgctctgtgacactcttcctctttcctagtcagtatgtggacgtggcctcgctggggctggttcctcagctcactggaggaaccctttacaaatacaacaatttccagatgcacttggatagacaacaatttttgaacgacctcagaaatgatattgaaaagaaaataggctttgatgctattatgagggttcgtaccagcacaggtttcagagccactgatttctttggtggaatcttgatgaacaacaccaccgatgtagaaatggctgccatcgattgtgacaaggcagtgaccgtggagttcaagcacgatgacaaactcagtgaagacagtggagccttaatccagtgtgctgtgctttacacgacaatcagtggtcaaagaagacttcggattcacaatcttggcttaaactgcagctctcagctagctgatctttataagagctgtgagacagatgctcttatcaacttctttgccaagtcagcttttaaagcagttctccaccagcctttgaaggtcatccgggaaattctagttaatcagactgcccatatgttggcatgttaccggaagaattgtgcaagtccttctgcagcaagccagttcacttgtgaaaaataa

SEQ ID NO: 18552 - DNA, 4520 bp, Homo sapiens
  source 1..4520: mol_type = unassigned DNA
cggcaggtggccccgcgcgcggcggccggcccggccgggggcgggcgggaaggtggcgcctcgggcgggggccggtccctgcaccaggtgacctgttccggcccggatccgggcggcctcgccatgcagcggcgcggcgcggggctcgggtggccgcggcagcagcagcagcaacccccgccgctcgcggtcggcccccgggccgcagccatggtcccgagtggcggcgtcccccagggcctcggcggccgctctgcctgcgcgctgctcctgctctgctacctgaatgttgtaccatctttgggtaggcagacttccctgacgacatcagtgatacccaaagctgagcagagcgtggcttacaaagactttatttattttactgtctttgaaggaaacgttcgcaacgtttctgaagtctcggttgagtatttatgctctcagccttgtgttgtcaatttggaagcagttgtttcatctgagttcagaagtagcattcccgtgtacaaaaaaaggtggaagaatgagaaacatcttcacaccagcaggacacaaatagtacatgtgaaatttccaagcattatggtttacagagatgattatttcatcagacattccatctctgtatctgcagtgatagtacgcgcctggattactcacaaatacagtggcagagactggaatgttaaatgggaggaaaacttgctccatgctgtagcaaagaattataccctcctgcagaccatcccgccttttgaacgccctttcaaagatcatcaagtgtgccttgagtggaacatgggttatatttggaaccttcgggcaaacaggattccacagtgtcctctggaaaatgatgtggttgccctgcttggctttccttatgcctccagtggagaaaacacaggcattgtcaagaagttcccgaggtttcggaaccgagagctggaggccactcgacgccagaggatggattacccagtgtttactgtttcattgtggctttatttactccattattgcaaggccaacctctgtgggattctgtactttgttgactctaatgagatgtacggcacaccttctgtatttcttacggaagagggctatttgcatattcagatgcatcttgtcaaaggggaagaccttgctgtaaaaactaaattcatcatacctttgaaggagtggtttcgactggatatctcttttaacggaggccagatagtagtaaccactagcattggacaggatttgaaaagctaccacaatcagaccattagcttccgggaggatttccattataatgacacagctgggtacttcattattggagggagcaggtatgtggctggcattgaagggttttttggacccctgaagtactatcgccttcgcagtctgcaccccgcccagatttttaatcccctccttgagaagcaacttgctgaacaaatcaagttatattatgaaaggtgtgctgaggttcaagaaatagtatctgtgtatgcatctgcagcaaagcacgggggcgagagacaagaagcatgccacctccacaactcctacctggacctccagcgcaggtatgggagaccctcgatgtgcagagccttcccctgggagaaggagctgaaagacaaacaccccagcttgttccaggcattgctggagatggatctgctgaccgtgccaaggaaccaaaatgaatctgtatcagaaatcggtgggaagatatttgagaaggctgtaaagagactctctagcattgatggtcttcaccaaattagctctatcgtcccctttctgacggattccagctgctgtggataccataaagcatcctactaccttgcagtcttttatgagactggattaaatgttcctcgggatcagctgcagggcatgttgtatagtttggttggaggccaggggagtgagaggctgtcttcaatgaatcttgggtataaacactaccagggtattgacaactaccccctggactgggaactgtcgtatgcctactacagcaacattgccaccaagacaccccttgaccagcacacactgcaaggagatcaggcatatgttgaaacaattagactaaaagatgatgaaatactcaaggtacaaaccaaagaagatggagatgtctttatgtggttgaagcatgaagctacccgaggcaatgcagcagctcagcaacgattggcccagatgctgttctgggggcagcaaggtgtggccaagaatcccgaagcagcaattgagtggtacgccaagggcgccctggagacggaggatcctgcgttaatctatgactatgccattgtgctattcaagggtcaaggagtaaaaaagaacagacggcttgccttagagctgatgaagaaagcagcttccaagggattgcatcaggcagtcaatggcctgggatggtattaccacaaattcaagaaaaattacgccaaagcagcaaagtactggttaaaagcagaagaaatggggaacccagatgcgtcatacaatcttggagtcctgcatttggatggcatcttccctggagttcctggaaggaatcaaactttagctggtgaatatttccataaggctgcgcaaggtggacacatggaagggaccttgtggtgttctctctactatatcacaggcaacctggagacattccctagagatcctgagaaagctgttgtatgggcaaaacatgtagctgagaaaaatggctacttgggccatgtcatccgcaaaggcctcaatgcctacctggaaggttcatggcatgaagctttgctgtattatgttttagcagcagaaactggaattgaagtgtcacagacaaatttagcacacatctgtgaggagaggccagacctggccaggagatacttgggtgttaactgtgtttggagatactataatttctctgtttttcaaatcgatgctccttcctttgcatatttgaagatgggagacctttactactatggccaccaaaaccagtcacaagacctggagttgtctgtgcagatgtacgcccaagccgccctggatggagactcccagggattttttaacctggccctgctaatcgaggaaggtacgataatcccacaccatatcttggatttcttggaaattgactcaactctccattctaataacatctccattctccaggaactgtacgaaaggtgctggagccacagtaacgaggagtccttcagcccctgctccttggcctggctttacctgcacttgcggcttctctggggtgctatcctgcactcagccctgatctactttctgggaacctttctgctatccatattgatcgcctggactgtgcagtatttccagtctgtctcagcaagcgatccccctccaagaccatcccaggcctccccagacactgccacgtccactgcaagtccagctgtgactccagctgcagatgcctctgaccaagaccagcccacagtaactaataacccggagccacgtgggtgaactgtgcactccagttctctccagatgagagagaatcttttcaacagctggtattgggaagctggggccagggcatgatcctgataaacaccttaaatgtcttgtcaactggatgcaaattttgcaattggtgtcattttttttaaagtcaaattacaaggaagtacccagatcaggcagtggtaataccaaaggtcatcaaacacatacaaggaacatcttgatcatagggcatgtggggaagtttactgggccatcacagacttttgttctagtgattgtatgtattaggagtcatagcatgccctacggcagatctggattcttatacactaagatgtgtcttaagaatcacagtgcgtgcttcatccctttattgaagaacagaaaattatgactactctacaaggtggataatattttggtacctgtgcttgccacagccctgttcctcaaagctgaattgatagatttctctttgacttccaagacctagcagttataaggcaccttgaaataaattgtttgtgcctggaaatgcagggagggcaatagctttgtaaattggtttacatttttctccttgaatttttctagggtcctagtgcttccgaatcatttaatggcattgtcggatatcttttacatttcaattgcaatccatgaaattacatttagaagattcttagtacttaactgtagtcttctccatgaattacacgttagaatagactggcagcaacggaatatgcagcaagtaagcctctagcttatagtttcatccctacccctcatgcctgcgtgagtctgtacagggatatgtgtgtgtgtgtgtgtgtgtgtgtgttagagaggaagaggaagagcagaatgtctgtatactacatgctgctaaggtagtgaataaatcagtaatgcaatattgtgggtccaaactactctttgcactactttatttacagtagtaaataaaattatttttatacaattgactacca

SEQ ID NO: 18553 - DNA, 4369 bp, Homo sapiens
  source 1..4369: mol_type = unassigned DNA
tcaaaatccatcctgaaggcctgggagccgggcagctgcgcggcacaactccagggggcacactcgccctgcgccctgcgggaatggcgccccggccaaaaaagcaaccagacaaaaacccattgcacgggcgggaactgaatgttgtaccatctttgggtaggcagacttccctgacgacatcagtgatacccaaagctgagcagagcgtggcttacaaagactttatttattttactgtctttgaaggaaacgttcgcaacgtttctgaagtctcggttgagtatttatgctctcagccttgtgttgtcaatttggaagcagttgtttcatctgagttcagaagtagcattcccgtgtacaaaaaaaggtggaagaatgagaaacatcttcacaccagcaggacacaaatagtacatgtgaaatttccaagcattatggtttacagagatgattatttcatcagacattccatctctgtatctgcagtgatagtacgcgcctggattactcacaaatacagtggcagagactggaatgttaaatgggaggaaaacttgctccatgctgtagcaaagaattataccctcctgcagaccatcccgccttttgaacgccctttcaaagatcatcaagtgtgccttgagtggaacatgggttatatttggaaccttcgggcaaacaggattccacagtgtcctctggaaaatgatgtggttgccctgcttggctttccttatgcctccagtggagaaaacacaggcattgtcaagaagttcccgaggtttcggaaccgagagctggaggccactcgacgccagaggatggattacccagtgtttactgtttcattgtggctttatttactccattattgcaaggccaacctctgtgggattctgtactttgttgactctaatgagatgtacggcacaccttctgtatttcttacggaagagggctatttgcatattcagatgcatcttgtcaaaggggaagaccttgctgtaaaaactaaattcatcatacctttgaaggagtggtttcgactggatatctcttttaacggaggccagatagtagtaaccactagcattggacaggatttgaaaagctaccacaatcagaccattagcttccgggaggatttccattataatgacacagctgggtacttcattattggagggagcaggtatgtggctggcattgaagggttttttggacccctgaagtactatcgccttcgcagtctgcaccccgcccagatttttaatcccctccttgagaagcaacttgctgaacaaatcaagttatattatgaaaggtgtgctgaggttcaagaaatagtatctgtgtatgcatctgcagcaaagcacgggggcgagagacaagaagcatgccacctccacaactcctacctggacctccagcgcaggtatgggagaccctcgatgtgcagagccttcccctgggagaaggagctgaaagacaaacaccccagcttgttccaggcattgctggagatggatctgctgaccgtgccaaggaaccaaaatgaatctgtatcagaaatcggtgggaagatatttgagaaggctgtaaagagactctctagcattgatggtcttcaccaaattagctctatcgtcccctttctgacggattccagctgctgtggataccataaagcatcctactaccttgcagtcttttatgagactggattaaatgttcctcgggatcagctgcagggcatgttgtatagtttggttggaggccaggggagtgagaggctgtcttcaatgaatcttgggtataaacactaccagggtattgacaactaccccctggactgggaactgtcgtatgcctactacagcaacattgccaccaagacaccccttgaccagcacacactgcaaggagatcaggcatatgttgaaacaattagactaaaagatgatgaaatactcaaggtacaaaccaaagaagatggagatgtctttatgtggttgaagcatgaagctacccgaggcaatgcagcagctcagcaacgattggcccagatgctgttctgggggcagcaaggtgtggccaagaatcccgaagcagcaattgagtggtacgccaagggcgccctggagacggaggatcctgcgttaatctatgactatgccattgtgctattcaagggtcaaggagtaaaaaagaacagacggcttgccttagagctgatgaagaaagcagcttccaagggattgcatcaggcagtcaatggcctgggatggtattaccacaaattcaagaaaaattacgccaaagcagcaaagtactggttaaaagcagaagaaatggggaacccagatgcgtcatacaatcttggagtcctgcatttggatggcatcttccctggagttcctggaaggaatcaaactttagctggtgaatatttccataaggctgcgcaaggtggacacatggaagggaccttgtggtgttctctctactatatcacaggcaacctggagacattccctagagatcctgagaaagctgttgtatgggcaaaacatgtagctgagaaaaatggctacttgggccatgtcatccgcaaaggcctcaatgcctacctggaaggttcatggcatgaagctttgctgtattatgttttagcagcagaaactggaattgaagtgtcacagacaaatttagcacacatctgtgaggagaggccagacctggccaggagatacttgggtgttaactgtgtttggagatactataatttctctgtttttcaaatcgatgctccttcctttgcatatttgaagatgggagacctttactactatggccaccaaaaccagtcacaagacctggagttgtctgtgcagatgtacgcccaagccgccctggatggagactcccagggattttttaacctggccctgctaatcgaggaaggtacgataatcccacaccatatcttggatttcttggaaattgactcaactctccattctaataacatctccattctccaggaactgtacgaaaggtgctggagccacagtaacgaggagtccttcagcccctgctccttggcctggctttacctgcacttgcggcttctctggggtgctatcctgcactcagccctgatctactttctgggaacctttctgctatccatattgatcgcctggactgtgcagtatttccagtctgtctcagcaagcgatccccctccaagaccatcccaggcctccccagacactgccacgtccactgcaagtccagctgtgactccagctgcagatgcctctgaccaagaccagcccacagtaactaataacccggagccacgtgggtgaactgtgcactccagttctctccagatgagagagaatcttttcaacagctggtattgggaagctggggccagggcatgatcctgataaacaccttaaatgtcttgtcaactggatgcaaattttgcaattggtgtcattttttttaaagtcaaattacaaggaagtacccagatcaggcagtggtaataccaaaggtcatcaaacacatacaaggaacatcttgatcatagggcatgtggggaagtttactgggccatcacagacttttgttctagtgattgtatgtattaggagtcatagcatgccctacggcagatctggattcttatacactaagatgtgtcttaagaatcacagtgcgtgcttcatccctttattgaagaacagaaaattatgactactctacaaggtggataatattttggtacctgtgcttgccacagccctgttcctcaaagctgaattgatagatttctctttgacttccaagacctagcagttataaggcaccttgaaataaattgtttgtgcctggaaatgcagggagggcaatagctttgtaaattggtttacatttttctccttgaatttttctagggtcctagtgcttccgaatcatttaatggcattgtcggatatcttttacatttcaattgcaatccatgaaattacatttagaagattcttagtacttaactgtagtcttctccatgaattacacgttagaatagactggcagcaacggaatatgcagcaagtaagcctctagcttatagtttcatccctacccctcatgcctgcgtgagtctgtacagggatatgtgtgtgtgtgtgtgtgtgtgtgtgttagagaggaagaggaagagcagaatgtctgtatactacatgctgctaaggtagtgaataaatcagtaatgcaatattgtgggtccaaactactctttgcactactttatttacagtagtaaataaaattatttttatacaattga

SEQ ID NO: 18554 - DNA, 2344 bp, Homo sapiens
  source 1..2344: mol_type = unassigned DNA
aatctgtatgacaaacctgtacatgtacccctaaagttgaaacagaagttaaaaacaaaacacaaaaaacatgatcctgagttctttcaatggcaacaatccagtttaattggtcaagttctaatggtaagtaccacatcgtttattgcttgtttcttaatctggccacctgctcggcttgtgatggagggtgtgcattctccaggcagtgtaatagtacccatcctttatgaagcatgtctttggtcgggccctctaactgtgtttattttattggatccgtacagcccaataagacaggtcttacctctaaggatcaagaacaaggtgtcagaggaagaggtaggaaaatataccatagtgggaatctgtgccaagaggagtcatgagaagaggtttctgcaccagcctaggaaagttgagatgagtgcccttaggtgatcccgtgcaagggaggcaccgccttgggttgtcagtcattggaagccgccctagccacagaaatattttgtcagatttccaacagggctatggcaactgagggcatagtctgtaggcaatggacatggtattcgactcagtattcttgtttcgtttatgatacaagggcacgttttccagtaagttctattctgagagagtgagcgagaaaggacggatctcccggttgactggcttcggagcagatgggacacagcagcttctgaaagcctcctggttctcctgcaaataaatttctcagatgcatatatttagggaaacaattcatcaatgaagatgacaaaaccatctggctctagagacttaaaaaaaattttagaggttgtaaacatttacattctgatgaagagtgtgtgtctaggttttatttcaaggatttgatgagtttggtttgtggcttgtttttagggattttttaacctggccctgctaatcgaggaaggtacgataatcccacaccatatcttggatttcttggaaattgactcaactctccattctaataacatctccattctccaggaactgtacgaaaggtgctggagccacagtaacgaggagtccttcagcccctgctccttggcctggctttacctgcacttgcggcttctctggggtgctatcctgcactcagccctgatctactttctgggaacctttctgctatccatattgatcgcctggactgtgcagtatttccagtctgtctcagcaagcgatccccctccaagaccatcccaggcctccccagacactgccacgtccactgcaagtccagctgtgactccagctgcagatgcctctgaccaagaccagcccacagtaactaataacccggagccacgtgggtgaactgtgcactccagttctctccagatgagagagaatcttttcaacagctggtattgggaagctggggccagggcatgatcctgataaacaccttaaatgtcttgtcaactggatgcaaattttgcaattggtgtcattttttttaaagtcaaattacaaggaagtacccagatcaggcagtggtaataccaaaggtcatcaaacacatacaaggaacatcttgatcatagggcatgtggggaagtttactgggccatcacagacttttgttctagtgattgtatgtattaggagtcatagcatgccctacggcagatctggattcttatacactaagatgtgtcttaagaatcacagtgcgtgcttcatccctttattgaagaacagaaaattatgactactctacaaggtggataatattttggtacctgtgcttgccacagccctgttcctcaaagctgaattgatagatttctctttgacttccaagacctagcagttataaggcaccttgaaataaattgtttgtgcctggaaatgcagggagggcaatagctttgtaaattggtttacatttttctccttgaatttttctagggtcctagtgcttccgaatcatttaatggcattgtcggatatcttttacatttcaattgcaatccatgaaattacatttagaagattcttagtacttaactgtagtcttctccatgaattacacgttagaatagactggcagcaacggaatatgcagcaagtaagcctctagcttatagtttcatccctacccctcatgcctgcgtgagtctgtacagggatatgtgtgtgtgtgtgtgtgtgtgtgtgttagagaggaagaggaagagcagaatgtctgtatactacatgctgctaaggtagtgaataaatcagtaatgcaatattgtgggtccaaactactctttgcactactttatttacagtagtaaataaaattatttttatacaattg

SEQ ID NO: 18555 - DNA, 739 bp, Homo sapiens
  source 1..739: mol_type = unassigned DNA
agtcctgagtcgtgccaccaaagttggctgacacgtcaagatgccctgggctttgtctgcaggtgctggagccacagtaacgaggagtccttcagcccctgctccttggcctggctttacctgcacttgcggcttctctggggtgctatcctgcactcagccctgatctactttctgggaacctttctgctatccatattgatcgcctggactgtgcagtatttccagtctgtctcagcaagcgatccccctccaagaccatcccaggcctccccagacactgccacgtccactgcaagtccagctgtgactccagctgcagatgcctctgaccaagaccagcccacagtaactaataacccggagccacgtgggtgaactgtgcactccagttctctccagatgagagagaatcttttcaacagctggtattgggaagctggggccagggcatgatcctgataaacaccttaaatgtcttgtcaactggatgcaaattttgcaattggtgtcattttttttaaagtcaaattacaaggaagtacccagatcaggcagtggtaataccaaaggtcatcaaacacatacaaggaacatcttgatcatagggcatgtggggaagtttactgggccatcacagacttttgttctagtgattgtatgtattaggagtcatagcatgccctacggcagatctggattcttatacactaagatgtgtcttaagaatcacagtgcg

SEQ ID NO: 18556 - DNA, 3500 bp, Homo sapiens
  source 1..3500: mol_type = unassigned DNA
cacactcgccctgcgccctgcgggaatggcgccccggccaaaaaagcaaccagacaaaaacccattgcacgggcgggaactggtctgtgcgacccgcaaaagggaatgttgtaccatctttgggtaggcagacttccctgacgacatcagtgatacccaaagctgagcagagcgtggcttacaaagactttatttattttactgtctttgaaggaaacgttcgcaacgtttctgaagtctcggttgagtatttatgctctcagccttgtgttgtcaatttggaagcagttgtttcatctgagttcagaagtagcattcccgtgtacaaaaaaaggtggaagaatgagaaacatcttcacaccagcaggacacaaatagtacatgtgaaatttccaagcattatggtttacagagatgattatttcatcagacattccatctctgtatctgcagtgatagtacgcgcctggattactcacaaatacagtggcagagactggaatgttaaatgggaggaaaacttgctccatgctgtagcaaagaattataccctcctgcagaccatcccgccttttgaacgccctttcaaagatcatcaagtgtgccttgagtggaacatgggttatatttggaaccttcgggcaaacaggattccacagtgtcctctggaaaatgatgtggttgccctgcttggctttccttatgcctccagtggagaaaacacaggcattgtcaagaagttcccgaggtttcggaaccgagagctggaggccactcgacgccagaggatggattacccagtgtttactgtttcattgtggctttatttactccattattgcaaggccaacctctgtgggattctgtactttgttgactctaatgagatgtacggcacaccttctgtatttcttacggaagagggctatttgcatattcagatgcatcttgtcaaaggggaagaccttgctgtaaaaactaaattcatcatacctttgaaggagtggtttcgactggatatctcttttaacggaggccagatagtagtaaccactagcattggacaggatttgaaaagctaccacaatcagaccattagcttccgggaggatttccattataatgacacagctgggtacttcattattggagggagcaggtatgtggctggcattgaagggttttttggacccctgaagtactatcgccttcgcagtctgcaccccgcccagatttttaatcccctccttgagaagcaacttgctgaacaaatcaagttatattatgaaaggtgtgctgaggttcaagaaatagtatctgtgtatgcatctgcagcaaagcacgggggcgagagacaagaagcatgccacctccacaactcctacctggacctccagcgcaggtatgggagaccctcgatgtgcagagccttcccctgggagaaggagctgaaagacaaacaccccagcttgttccaggcattgctggagatggatctgctgaccgtgccaaggaaccaaaatgaatctgtatcagaaatcggtgggaagatatttgagaaggctgtaaagagactctctagcattgatggtcttcaccaaattagctctatcgtcccctttctgacggattccagctgctgtggataccataaagcatcctactaccttgcagtcttttatgagactggattaaatgttcctcgggatcagctgcagggcatgttgtatagtttggttggaggccaggggagtgagaggctgtcttcaatgaatcttgggtataaacactaccagggtattgacaactaccccctggactgggaactgtcgtatgcctactacagcaacattgccaccaagacaccccttgaccagcacacactgcaaggagatcaggcatatgttgaaacaattagactaaaagatgatgaaatactcaaggtacaaaccaaagaagatggagatgtctttatgtggttgaagcatgaagctacccgaggcaatgcagcagctcagcaacgattggcccagatgctgttctgggggcagcaaggtgtggccaagaatcccgaagcagcaattgagtggtacgccaagggcgccctggagacggaggatcctgcgttaatctatgactatgccattgtgctattcaagggtcaaggagtaaaaaagaacagacggcttgccttagagctgatgaagaaagcagcttccaagggattgcatcaggcagtcaatggcctgggatggtattaccacaaattcaagaaaaattacgccaaagcagcaaagtactggttaaaagcagaagaaatggggaacccagatgcgtcatacaatcttggagtcctgcatttggatggcatcttccctggagttcctggaaggaatcaaactttagctggtgaatatttccataaggctgcgcaaggtggacacatggaagggaccttgtggtgttctctctactatatcacaggcaacctggagacattccctagagatcctgagaaagctgttgtatgggcaaaacatgtagctgagaaaaatggctacttgggccatgtcatccgcaaaggcctcaatgcctacctggaaggttcatggcatgaagctttgctgtattatgttttagcagcagaaactggaattgaagtgtcacagacaaatttagcacacatctgtgaggagaggccagacctggccaggagatacttgggtgttaactgtgtttggagatactataatttctctgtttttcaaatcgatgctccttcctttgcatatttgaagatgggagacctttactactatggccaccaaaaccagtcacaagacctggagttgtctgtgcagatgtacgcccaagccgccctggatggagactcccagggattttttaacctggccctgctaatcgaggaaggtacgataatcccacaccatatcttggatttcttggaaattgactcaactctccattctaataacatctccattctccaggaactgtacgaaaggtgctggagccacagtaacgaggagtccttcagcccctgctccttggcctggctttacctgcacttgcggcttctctggggtgctatcctgcactcagccctgatctactttctgggaacctttctgctatccatattgatcgcctggactgtgcagtatttccagtctgtctcagcaagcgatccccctccaagaccatcccaggcctccccagacactgccacgtccactgcaagtccagctgtgactccagctgcagatgcctctgaccaagaccagcccacagtaactaataacccggagccacgtgggtgaactgtgcactccagttctctccagatgagagagaatcttttcaacagctggtattgggaagctggggccagggcatgatcctgataaacaccttaaatgtcttgtcaactggatgcaaattttgcaattggtgtcattttttttaaagtcaaattacaa

SEQ ID NO: 18557 - DNA, 1326 bp, Homo sapiens
  source 1..1326: mol_type = unassigned DNA
tgtacgcccaagccgccctggatggagactcccagggattttttaacctggccctgctaatcgaggaaggtacgataatcccacaccatatcttggatttcttggaaattgactcaactctccattctaataacatctccattctccaggaactgtacgaaaggtgctggagccacagtaacgaggagtccttcagcccctgctccttggcctggctttacctgcacttgcggcttctctggggtgctatcctgcactcagccctgatctactttctgggaacctttctgctatccatattgatcgcctggactgtgcagtatttccagtctgtctcagaattctgcctctgtgtgcctgaaaacacagcgccaaagctcctggcagcatgaagtcttccctttcatttcagtcaagcaatcagatgtgtaagaggataaacaaacactcgtaatgaataaaaatcctcggccacacggactcagagggagggactgagcaggaatcgtaaagtgggcatttagctgagcatggtttccactaatcattgttatttttctgagccagtatagaatagttaaggacaagggagccctgcttgcttctgtttgggcttagagtccaggcttggctactcattagctgtatgactcatggcaagttatttaaccttcctgatccccaaatttctcatcaatacaatgaggttatgagagtagctacttcctaggaacataaaatgaaaaaaatattaagtgaaaaaaaatgcacgtaagatacttaccaaaatgacggctgtagttaaacgttagctgttatatttatctggcatataaaaccttctcaataaatgttagctcttacatttactcctctattagaccataagctgagtaagaggaaggccccagtcgtgtcatttgtgataactcatgcatagtaggtactcacacccacagacgactccggtctctcaagagacaagaaaactgattttttaccatctcggacggctacaaaagggtataataactcatgaaggcaaacagagacatttacaaatgggtagattaggactggacatggcattggagcatttgcgtagctgttatttctgtagcagataatggaaagtgaaaggggtgcacgtcagcgtctcttccacggtgagaaggaagtcactgttgcaagaagctaatgcgaaatcatttctctctgatttacctgaggaggttaacaaggacccatcaaaaccttccaggcttgatgccccatagtctgctggttaataaacttcactcatgcaaattctgtcccatccttaaa

SEQ ID NO: 18558 - DNA, 429 bp, Homo sapiens
  source 1..429: mol_type = unassigned DNA
acaaatttagcacacatctgtgaggagaggccagacctggccaggagatacttgggtgttaactgtgtttggagatactataatttctctgtttttcaaatcgatgctccttcctttgcatatttgaagatgggagacctttactactatggccaccaaaaccagtcacaagacctggagttgtctgtgcagatgtacgcccaagccgccctggatggagactcccagggattttttaacctggccctgctaatcgaggaaggtacgataatcccacaccatatcttggatttcttggaaattgactcaactctccattctaataacatctccattctccaggaactgtacgaaagatctactttctgggaacctttctgctatccatattgatcgcctggactgtgcagtatttccagtctgtctcag

SEQ ID NO: 18559 - DNA, 560 bp, Homo sapiens
  source 1..560: mol_type = unassigned DNA
tagagaacaaagcaaaatagggaaagctaataataagtcagtaaacatgacttaatagagtactagaactcttggtagagattatattttttcatattggtggatatatttcattatgtatcttacatgtctttgtttccataaaagacaactcctaatcattcataagaaagggcactaaatgaaaagctctcagaatgcattttctttaccttaacattcagttctggtttgttgctctataaaaattctaactagcaaaatattccccaagtgggatttattgagagcatatgaagaaaaacattttattaaatttgccatggtttgcgtattttctcttcccttttttttttcagatgggcaaaacatgtagctgagaaaaatggctacttgggccatgtcatccgcaaaggcctcaatgcctacctggaaggttcatggcatgaagctttgctgtattatgttttagcagcagaaactggaattgaagtgtcacagacaaatttagcacacatctgtgaggagaggccagacctggccaggagatacttgggtgt

SEQ ID NO: 18560 - DNA, 404 bp, Homo sapiens
  source 1..404: mol_type = unassigned DNA
actttagctggtgaatatttccataaggctgcgcaaggtggacacatggaagggaccttgtggtgttctctctactatatcacaggcaacctggagacattccctagagatcctgagaaagctgttgtaaaaagtttgtcgacctctgttttaggccaccctcacactgataccctggctctccaaaagattgttcttcataacacatttgggttcaaattcaacctgacctgaccttggtgataaacttgacttagactgacttgaagttttttatcattgttatttagtatatttgacatgaatattcatgttttgtggattttctgttatcctcttgttaatgatttctagcttaatttcactgtgatcagagaatatattctgaatgattccaatccttt

SEQ ID NO: 18561 - DNA, 611 bp, Homo sapiens
  source 1..611: mol_type = unassigned DNA
agtggcggcggcggcgggtccggaggtggcggcaggtggccccgcgcgcggcggccggcccggccgggggcgggcgggaaggtggcgcctcgggcgggggccggtccctgcaccaggtgacctgttccggcccggatccgggcggcctcgccatgcagcggcgcggcgcggggctcgggtggccgcggcagcagcagcagcaacccccgccgctcgcggtcggcccccgggccgcagccatggtcccgagtggcggcgtcccccagggcctcggcggccgctctgcctgcgcgctgctcctgctctgctacctgatgtggttgccctgcttggctttccttatgcctccagtggagaaaacacaggcattgtcaagaagttcccgaggtttcggaaccgagagctggaggccactcgacgccagaggatggattacccagtgtttactgtttcattgtggctttatttactccattattgcaaggccaacctctgtgggattctgtactttgttgactctaatgagatgtacggcacaccttctgtatttcttacggaagagggctatttgcatattcagatgcatcttgtcaaaggggaagaccttgctg

SEQ ID NO: 18562 - DNA, 553 bp, Homo sapiens
  source 1..553: mol_type = unassigned DNA
ttgcaaaggacacaaaaggccgacttaaaagaatgttgtaccatctttgggtaggcagacttccctgacgacatcagtgatacccaaagctgagcagagcgtggcttacaaagactttatttattttactgtctttgaaggaaacgttcgcaacgtttctgaagtctcggttgagtatttatgctctcagccttgtgttgtcaatttggaagcagttgtttcatctgagttcagaagtagcattcccgtgtacaaaaaaaggtggaagaatgagaaacatcttcacaccagcaggacacaaatagtacatgtgaaatttccaagcattatggtttacagagatgattatttcatcagacattccatctctgtatctgcagtgatagtacgcgcctggattactcacaaatacagtggcagagactggaatgttaaatgggaggaaaacttgctccatgctgtagcaaagaattataccctcctgcagaccatcccgccttttgaacgccctttcaaagatcatcaagtgtgccttgagtggaacatgggttat

SEQ ID NO: 18563 - DNA, 605 bp, Homo sapiens
  source 1..605: mol_type = unassigned DNA
ggtggcggcggcaccacacaaaaccctcgggaaacatccagaacgtgccgcgaaccagccggcagggtggggcgcagcccggctgcaaacatgccagcaaggaggcagtcccaaccccgcagaatgttgtaccatctttgggtaggcagacttccctgacgacatcagtgatacccaaagctgagcagagcgtggcttacaaagactttatttattttactgtctttgaaggaaacgttcgcaacgtttctgaagtctcggttgagtatttatgctctcagccttgtgttgtcaatttggaagcagttgtttcatctgagttcagaagtagcattcccgtgtacaaaaaaaggtggaagaatgagaaacatcttcacaccagcaggacacaaatagtacatgtgaaatttccaagcattatggtttacagagatgattatttcatcagacattccatctctgtatctgcagtgatagtacgcgcctggattactcacaaatacagtggcagagactggaatgttaaatgggaggaaaacttgctccatgctgtagcaaagaattataccctcctgcagaccatcccgccttttgaacgccctttc

SEQ ID NO: 18564 - DNA, 558 bp, Homo sapiens
  source 1..558: mol_type = unassigned DNA
aaagagcgcagtggtggcggtggcggcggcaccacacaaaaccctcgggaaacatccagaacgtgccgcgaaccagccggcagggtggggcgcagcccggctgcaaacatgccagcaaggaggcagtcccaaccccgcaggtggacaggtggagaatgttgtaccatctttgggtaggcagacttccctgacgacatcagtgatacccaaagctgagcagagcgtggcttacaaagactttatttattttactgtctttgaaggaaacgttcgcaacgtttctgaagtctcggttgagtatttatgctctcagccttgtgttgtcaatttggaagcagttgtttcatctgagttcagaagtagcattcccgtgtacaaaaaaaggtggaagaatgagaaacatcttcacaccagcaggacacaaatagtacatgtgaaatttccaagcattatggtttacagagatgattatttcatcagacattccatctctgtatctgcagtgatagtacgcgcctggattactcacaaatacagtggcagagactggaatgttaa

SEQ ID NO: 18565 - DNA, 1633 bp, Homo sapiens
  source 1..1633: mol_type = unassigned DNA
aagtcgcagatgtgacgatgcaaaaacgcccgtcgggggcgcgtctctttcagcagccaatgggctctgcccaccttcgtcctcgtcagcattttgtctaatcgcggcctgtgacgctcgaagggcggggagcagagggagatacagaaaccgacaggggccaggcgcccggtggctccgaagcggggaagtgggacaagatggtttacatctcgaacggacaagtgttggacagccggagtcagtctccatggagattatctttgataacagatttcttctggggaatagctgagtttgtggttttgtttttcaaaactctgcttcagcaagatgtgaaaaaaagaagaagctatggaaactcatctgattccagatatgatgatggaagagggccaccaggaaaccctccccgaagaatgggtagaatcaatcatctgcgtggccctagtccccctccaatggctggtggatgaggaaggtaaatgtctgctctaagaagcagacaaccggacatgcgcattcatagcagaaggaaaccatcaagaagtggaaggctgaccatgatgagcagtagatgaatgtgtatgtctaaacaaggactgctctgtgtcctcacagatgaatgaggtcatgctgggaattccctctgcagggaactggcctgactgacatgcagttccataaatgcagatgtttgtctcattacctttttgtatagtttattaaagtattaatatagttttaataagtaaatatttttaggttgcagaatggactcctcatctttatattcacgaaaaagcaatctgaagaaaacaaataaaagcctgtgtatttagcactgttagtgtcaccttttcaacttctgaaacactgttcattgttaactttttctcatttataaatcactgtatttattttagtagtatgcatagcatatctgtgctcttgaattaatttttatctttaacatatttgtctcatcaatctttaatacactgtgtctaatttgctaccaaatgtaattatcagggtatttataaaaccatagctaacaaaactgagctacaaaatgaaaatttactaaatagtttttaaaatcatggacttcagcctggcgcggtggctcatgcctgtaatcccagcactgtgggaggctgaggcgggcagatcgcctaagttcacgagtttgagaccagcctgcagcatgacgaaacctaaaataacaaaaattagccaggcgtggtagagtgcacctgtaatccctgctactcaggaggcggaggcaggagaatcgcttcaacccgggaggcggaggttgctgtgagcatgccactgcactcctgcctaggcaacagagtgagaccctgtctcaaaaaaataaataaaaccatgggcttccatgctatcttgacaaatttgcactctatagcatcactcaaaatactgcctattggctttaaactccatctgaatactgataactttcacattctttcactagagtggaagctctgagactaggaattttgttgtctttaccccagtcctttgaatagtgactacatgtaagatagtcatgtagtatttattggaaataaatatttattggaaaaacgaaaacagataa

SEQ ID NO: 18566 - DNA, 611 bp, Homo sapiens
  source 1..611: mol_type = unassigned DNA
ggcggggagcagagggagatacagaaaccgacaggggccaggcgcccggtggctccgaagcggggaagtgggacaagatggtttacatctcgaacggacaagtgttggacagccggagtcagtctccatggagattatctttgataacagatttcttctggggaatagctgagtttgtggttttgtttttcaaaactctgcttcagcaagatgtgaaaaaaagaagaagctatggaaactcatctgattccagatatgatgatggaagagggaaaccctccccgaagaatgggtagaatcaatcatctgcgtggccctagtccccctccaatggctggtggatgaggaaggtaaatgtctgctctaagaagcagacaaccggacatgcgcattcatagcagaaggaaaccatcaagaagtggaaggctgaccatgatgagcagtagatgaatgtgtatgtctaaacaaggactgctctgtgtcctcacagatgaatgaggtcatgctgggaattccctctgcagggaactggcctgactgacatgcagttccataaatgcagatgtttgtctcattacctttttgtatagtttattaaagtattaatatag

SEQ ID NO: 18567 - DNA, 574 bp, Homo sapiens
  source 1..574: mol_type = unassigned DNA
agagggagatacagaaaccgacaggggccaggcgcccggtggctccgaagcggggaagtgggacaagatggtttacatctcgaacggacaagtgttggacagccggagtcagtctccatggagattatctttgataacagatttcttctggggaatagctgagtttgtggttttgttgtaagtatagaagagctcttaattgccctgatatttaagttgacaggtatacatcatgtgcattatgttagggatcttaaataagctcaactttcctgaaacagttttctattgcaatttaaaaaatagctttacacagggaaatagatgttagtgataaagttgctaccaccagatagcttatgattatgagtatatgttagttggattggtaaacttgaccacatcttaaccttggtggtaactacttcaacctatggctgggtccgtcaattctgatgctaaatgactggacctcactttctctctactattcttgttttgtttttttctttgtgcatgcaactttcattccatattatataacaagtaaataaaaggttttatatcctggttt

SEQ ID NO: 18568 - DNA, 340 bp, Homo sapiens
  source 1..340: mol_type = unassigned DNA
gcggcctgtgacgctcgaagggcggggagcagagggagatacagaaaccgacaggggccaggcgcccggtggctccgaagcggggaagtgggacaagatggtttacatctcgaacggagcaagttaattattaccggaatggagaatccgagagacttaattctgcgaacccacaaagaagatgaccggaaaggaaggacatgactgtgtcagatcagtgctagagctgcctgcccacctgtttgactcaggacaagtgttggacagccggagtcagtctccatggagattatctttgataacagatttcttctggggaatagctgagtttgtggttttg

SEQ ID NO: 18569 - DNA, 814 bp, Homo sapiens
  source 1..814: mol_type = unassigned DNA
cgcccgtcgggggcgcgtctctttcagcagccaatgggctctgcccaccttcgtcctcgtcagcattttgtctaatcgcggcctgtgacgctcgaagggcggggagcagagggagatacagaaaccgacaggggccaggcgcccggtggctccgaagcggggaagtgggacaagatggtttacatctcgaacggacaagtgttggacagccggagtcagtctccatggagattatctttgataacagatttcttctggggaatagctgagtttgtggttttgtttttcaaaactctgcttcagcaagatgtgaaaaaaagaagaagctatggaaactcatctgattccagatatgatgatggaagagggccaccaggaaaccctccccgaagaatgggtagaatcaatcatctgcgtggccctagtccccctccaatggctggtggaggaaggtaaatgtctgctctaagaagcagacaaccggacatgcgcattcatagcagaaggaaaccatcaagaagtggaaggctgaccatgatgagcagtagatgaatgtgtatgtctaaacaaggactgctctgtgtcctcacagatgaatgaggtcatgctgggaattccctctgcagggaactggcctgactgacatgcagttccataaatgcagatgtttgtctcattacctttttgtatagtttattaaagtattaatatagttttaataagtaaatatttttaggttgcagaatggactcctcatctttatattcacgaaaaagcaatctgaagaaaacaaataaaagcctgtgtatttagc

SEQ ID NO: 18570 - DNA, 1054 bp, Homo sapiens
  source 1..1054: mol_type = unassigned DNA
ggaagaaaccgaggcccagggattacacagccagtagagagaggacagagcatggagctcctggagaggcagtggataattcttcccgacagaggagctgactgttgaaccccttctttgaaggagagtccgtgctgccaaatcgaagaagagaaacgccctggctggaaagcagagagaacagcagtcgcaggttcggctcagaaactccagtgtccctcagcgtctcgccggcaccctctgccggcgtgaggtggcgctgcctggccgcatcctgggggagcgtccacatcctcggtcgacaaaaggagcgtcgacactctcggacctgggaaagtgacggcccaaacgccagggaggagccaggacctcgccctgagctagcgggagcttgcgcatcatctgcggccgggtcccgatgagcctcctgttgcctccgctggcgctgctgctgcttctcgcggcgcttgtggccccagccacagccgccactgcctaccggccggactggaaccgtctgagcggcctaacccgcgcccgggtagagacctgcgggggatgacagctgaaccgcctaaaggaggtgaaggctttcgtcacgcaggacattccattctatcacaacctggtgatgaaacacctccctggggccgaccctgagctcgtgctgctgggccgccgctacgaggaactagagcgcatcccactcagtgaaatgacccgcgaagagatcaatgcgctagtgcaggagctcggcttctaccgcaaggcggcgcccgacgcgcaggtgccccccgagtacgtgtgggcgcccgcgaagcccccagaggaaacttcggaccacgctgacctgtaggtccgggggcgcggcggagctgggacctacctgcctgagtcctggagacagaatgaagcgctcagcatcccgggaatacttctcttgctgagagccgatgcccgtccccgggccagcagggatggggttggggaggttctcccaaccccactttcttccttccccagctccactaaattccctcctgccttaactgag

SEQ ID NO: 18571 - DNA, 2070 bp, Homo sapiens
  source 1..2070: mol_type = unassigned DNA
cttgcgcatcatctgcggccgggtcccgatgagcctcctgttgcctccgctggcgctgctgctgcttctcgcggcgcttgtggccccagccacagccgccactgcctaccggccggactggaaccgtctgagcggcctaacccgcgcccgggtagaggtgagtacgccggcctccagccccggcactatcgttccccaaccctgcggccccatgggagcaccgtccgtcccggccccaagaccacctcgaaccgcgagtctccctgctttccccctggcgccgggaccatccctcctgttccctagccccagatggccccagcatccaccgtggaagcctgagacaccgactttggggcctggaactccgaacccttccccagctccccctacccggtccgacagcggacacccagacacactgacgcagtctcctaactcttctcgtggcctatgactcccaatcctgtcccaacttcccatcccccatcacttcatgttttcctggaattcccccccgacccggttccagggctggaggctccagaaagtctcttttccttctcctggggggaaagaagactttctgggtgcctcctcccatatgcaggatccggggaagggggccaactcggaggggcaaccgagttgggaacttggttgccaacatttactctgcagcagcctcccatcctcccccaaccaggaaattcccgttcggagtccctgtcttgctatgtgactttgaccatcacagcccgcctctgagctttttgtcagctctgtctgacaaaagggtgtagaatggttgggtgccggtggtgcacgcctgtaatcccagcactttgggaggccaaggcaggaggattgcttgagcccaggagttcaagaccagcttgggggacatagtgagaccctgtctctaagaaaagggctgagggtaggatggaggagggctggagtgggtggtcctggggtctagactcctgctggatggtggcatctcctcagggaaggcagggaggagccctcccatcctcccatgtcagggaagcaaccacatggtctgtggggctgggccgcaggtggcaggcagggtgaggtctgcctgtgtagagtagggaccagatggtaggtgtctccaatgggggcccccagggccattctgaggtgtttccttctgctctgcctccactgtgagatttcagggatcaaaggccaagcccaggtctctactgcttaagaggagcagggtgatcatttcccctgggcattgggagtcagtccacagccagtaggatgtacaggccccaaggctggcaggcacactgtgggtctctggccttgctcttttcccctggtgtctctaggcctgagtctccccacctgtatacacagttcccccttctgcccacaagggtccagcatttccttcagaccttgggaactgctgatccggggataactcacagcccgacccaactcagggataaggaagtatggctttggggatgtgactggaataaacgtgaaggactcctgacctatcccattttatccccctccagacctgcgggggatgacagctgaaccgcctaaaggaggtgaaggctttcgtcacgcaggacattccattctatcacaacctggtgatgaaacacctccctggggccgaccctgagctcgtgctgctgggccgccgctacgaggaactagagcgcatcccactcagtgaaatgacccgcgaagagatcaatgcgctagtgcaggagctcggcttctaccgcaaggcggcgcccgacgcgcaggtgccccccgagtacgtgtgggcgcccgcgaagcccccagaggaaacttcggaccacgctgacctgtaggtccgggggcgcggcggagctgggacctacctgcctgagtcctggagacagaatgaagcgctcagcatcccgggaatacttctcttgctgagagccgatgcccgtccccgggccagcagggatggggttggggaggttctcccaaccccactttcttccttccccagctccactaaattccctcctgccttaa

SEQ ID NO: 18572 - DNA, 694 bp, Homo sapiens
  source 1..694: mol_type = unassigned DNA
agacgtggcgcagcgactcggaggttcgcctccagcttgcgcatcatctgcggccgggtcccgatgagcctcctgttgcctccgctggcgctgctgctgcttctcgcggcgcttgtggccccagccacagccgccactgcctaccggccggactggaaccgtctgagcggcctaacccgcgcccgggtagagacctgcgggggatgacagctgaaccgcctaaaggaggtgaaggctttcgtcacgcaggacattccattctatcacaacctggtgatgaaacacctccctggggccgaccctgagctcgtgctgctgggccgccgctacgaggaactagagcgcatcccactcagtgaaatgacccgcgaagagatcaatgcgctagtgcaggagctcggcttctaccgcaaggcggcgcccgacgcgcaggtgccccccgagtacgtgtgggcgcccgcgaagcccccagaggaaacttcggaccacgctgacctgtaggtccgggggcgcggcggagctgggacctacctgcctgagtcctggagacagaatgaagcgctcagcatcccgggaatacttctcttgctgagagccgatgcccgtccccgggccagcagggatggggttggggaggttctcccaaccccactttcttccttccccagctccactaaattccctcctgccttaa

SEQ ID NO: 18573 - DNA, 703 bp, Homo sapiens
  source 1..703: mol_type = unassigned DNA
gcatcatctgcggccgggtcccgatgagcctcctgttgcctccgctggcgctgctgctgcttctcgcggcgcttgtggccccagccacagccgccactgcctaccggccggactggaaccgtctgagcggcctaacccgcgcccgggtagaggcctgagtctccccacctgtatacacagttcccccttctgcccacaagggtccagcatttccttcagaccttgggaactgctgatccggggataactcacagcccgacccaactcagggataaggaagtatggctttggggatgtgactggaataaacgtgaaggactcctgacctatcccattttatccccctccagacctgcgggggatgacagctgaaccgcctaaaggaggtgaaggctttcgtcacgcaggacattccattctatcacaacctggtgatgaaacacctccctggggccgaccctgagctcgtgctgctgggccgccgctacgaggaactagagcgcatcccactcagtgaaatgacccgcgaagagatcaatgcgctagtgcaggagctcggcttctaccgcaaggcggcgcccgacgcgcaggtgccccccgagtacgtgtgggcgcccgcgaagcccccagaggaaacttcggaccacgctgacctgtaggtccgggggcgcggcggagctgggacctacctgcctgagtcctg

SEQ ID NO: 18574 - DNA, 605 bp, Homo sapiens
  source 1..605: mol_type = unassigned DNA
actcggaggttcgcctccagcttgcgcatcatctgcggccgggtcccgatgagcctcctgttgcctccgctggcgctgctgctgcttctcgcggcgcttgtggccccagccacagccgccactgcctaccggccggactggaaccgtctgagcggcctaacccgcgcccgggtagagggtccagcatttccttcagaccttgggaactgctgatccggggataactcacagcccgacccaactcagggataaggaagtatggctttggggatgtgactggaataaacgtgaaggactcctgacctatcccattttatccccctccagacctgcgggggatgacagctgaaccgcctaaaggaggtgaaggctttcgtcacgcaggacattccattctatcacaacctggtgatgaaacacctccctggggccgaccctgagctcgtgctgctgggccgccgctacgaggaactagagcgcatcccactcagtgaaatgacccgcgaagagatcaatgcgctagtgcaggagctcggcttctaccgcaaggcggcgcccgacgcgcaggtgccccccgagtacgtgtgggcgcccgcgaagccccc

SEQ ID NO: 18575 - DNA, 673 bp, Homo sapiens
  source 1..673: mol_type = unassigned DNA
tgggcttcagtgtctcgtctgtacctcgagtagactgaggtcatggtctctgatgctctggttcctccccaggtgaaggctttcgtcacgcaggacattccattctagtatccttctgttctgggggaggggaaatgggatgggcacctgggagaatctccacgtaacttcagaaaggggtggcagatggttttcaactgacaagttgaattgattggtagtggctcccagaggattctgaggtggtctccatgttgggtgggcaagagagattgactagtgatgactgccacagaatggagaggagggccctttacttctttgaaccctaattttctcacgtataagcggagaccctggcccctcccgggcacagagtaagctctgagcaaaggaggcaatgctgttcccatcagtaaggctgcggaaaccaccacctccctctgcccaccaccccgctccttaacaccacctccagtcacaacctggtgatgaaacacctccctggggccgaccctgagctcgtgctgctgggccgccgctacgaggaactagagcgcatcccactcagtgaaatgacccgcgaagagatcaatgcgctagtgcaggagctcggcttctaccgcaaggcggcgcccgacgcgcaggtgccccccgagtacgtgtgggcgcc

SEQ ID NO: 18576 - DNA, 500 bp, Homo sapiens
  source 1..500: mol_type = unassigned DNA
gcctccagcttgcgcatcatctgcggccgggtcccgatgagcctcctgttgcctccgctggcgctgctgctgcttctcgcggcgcttgtggccccagccacagccgccactgcctaccggccggactggaaccgtctgagcggcctaacccgcgcccgggtagagggataaggaagtatggctttggggatgtgactggaataaacgtgaaggactcctgacctatcccattttatccccctccagacctgcgggggatgacagctgaaccgcctaaaggaggtgaaggctttcgtcacgcaggacattccattctatcacaacctggtgatgaaacacctccctggggccgaccctgagctcgtgctgctgggccgccgctacgaggaactagagcgcatcccactcagtgaaatgacccgcgaagagatcaatgcgctagtgcaggagctcggcttctaccgcaaggcggcgcccgacgcgcaggtgccccccgagta

SEQ ID NO: 18577 - DNA, 334 bp, Homo sapiens
  source 1..334: mol_type = unassigned DNA
ctcgcggcgcttgtggccccagccacagccgccactgcctaccggccggactggaaccgtctgagcggcctaacccgcgcccgggtagagacctgcgggggatgacagctgaaccgcctaaaggaggtgaaggctttcgtcacgcaggacattccattctatcacaacctggtgatgaaacacctccctggggccgaccctgagctcgtgctgctgggccgccgctacgaggaactagaggtgaggccgtgggaggtgggctgggggcgaggccagaggcgaggcccagcctgctgaccccgcccctcctccgcctcagcgcatcccactcagt

SEQ ID NO: 18578 - DNA, 707 bp, Homo sapiens
  source 1..707: mol_type = unassigned DNA
gcgactcggaggttcgcctccagcttgcgcatcatctgcggccgggtcccgatgagcctcctgttgcctccgctggcgctgctgctgcttctcgcggcgcttgtggccccagccacagccgccactgcctaccggccggactggaaccgtctgagcggcctaacccgcgcccgggtagagacctgcgggggatgacagctgaaccgcctaaaggaggtgagtttgaaggaagaggtccctagctctgttccccctgagcctcttggggagtgggcaacatggtcccaatgactggggcggggaggggggaaggatccctaggctgagagtctagcctaggctgagagtctagcctgcacctgacttgctttatgacctcactgggcttcagtgtctcgtctgtacctcgagtagactgaggtcatggtctctgatgctctggttcctccccaggtgaaggctttcgtcacgcaggacattccattctagtatccttctgttctgggggaggggaaatgggatgggcacctgggagaatctccacgtaacttcagaaaggggtggcagatggttttcaactgacaagttgaattgattggtagtggctcccagaggattctgaggtggtctccatgttgggtgggcaagagagattgactagtgatgactgccacagaatggagaggagggccctttacttctttgaa

SEQ ID NO: 18579 - DNA, 689 bp, Homo sapiens
  source 1..689: mol_type = unassigned DNA
agacgtggcgcagcgactcggaggttcgcctccagcttgcgcatcatctgcggccgggtcccgatgagcctcctgttgcctccgctggcgctgctgctgcttctcgcggcgcttgtggccccagccacagccgccactgcctaccggccggactggaaccgtctgagcggcctaacccgcgcccgggtagagacctgcgggggacagctgaaccgcctaaaggaggtgaaggctttcgtcacgcaggacattccattctatcacaacctggtgatgaaacacctccctggggccgaccctgagctcgtgctgctgggccgccgctacgaggaactagagcgcatcccactcagtgaaatgacccgcgaagagatcaatgcgctagtgcaggagctcggcttctaccgcaaggcggcgcccgacgcgcaggtgccccccgagtacgtgtgggcgcccgcgaagcccccagaggaaacttcggaccacgctgacctgtaggtccgggggcgcggcggagctgggacctacctgcctgagtcctggagacagaatgaagcgctcagcatcccgggaatacttctcttgctgagagccgatgcccgtccccgggccagcagggatggggttggggaggttctcccaaccccactttcttccttccccagctccactaaattccctcctgcctt

SEQ ID NO: 18580 - DNA, 2256 bp, Homo sapiens
  source 1..2256: mol_type = unassigned DNA
aaacaatggggtgtgggctgtcacatggccctgcctaagtaaccacattctcgcttcctccttccacacacagccattgggggttgctcggatccgggactgccgcagggggtgccacagcagtgcctggcagcgtgggctgggaccttgtcactaaagcagagaagccacttcttctgggcccacgaggcagctgtcccatgctctgctgagcacggtggtgccatgcctctgcaactcctcctgttgctgatcctactgggccctggcaacagcttgcagctgtgggacacctgggcagatgaagccgagaaagccttgggtcccctgcttgcccgggaccggagacaggccaccgaatatgagtacctagattatgatttcctgccagaaacggagcctccagaaatgctgaggaacagcactgacaccactcctctgactgggcctggaacccctgagtctaccactgtggagcctgctgcaaggcgttctactggcctggatgcaggaggggcagtcacagagctgaccacggagctggccaacatggggaacctgtccacggattcagcagctatggagatacagaccactcaaccagcagccacggaggcacagaccactcaaccagtgcccacggaggcacagaccactccactggcagccacagaggcacagacaactcgactgacggccacggaggcacagaccactccactggcagccacagaggcacagaccactccaccagcagccacggaagcacagaccactcaacccacaggcctggaggcacagaccactgcaccagcagccatggaggcacagaccactgcaccagcagccatggaagcacagaccactccaccagcagccatggaggcacagaccactcaaaccacagccatggaggcacagaccactgcaccagaagccacggaggcacagaccactcaacccacagccacggaggcacagaccactccactggcagccatggaggccctgtccacagaacccagtgccacagaggccctgtccatggaacctactaccaaaagaggtctgttcatacccttttctgtgtcctctgttactcacaagggcattcccatggcagccagcaatttgtccgtcaactacccagtgggggccccagaccacatctctgtgaagcagtgcctgctggccatcctaatcttggcgctggtggccactatcttcttcgtgtgcactgtggtgctggcggtccgcctctcccgcaagggccacatgtaccccgtgcgtaattactcccccaccgagatggtctgcatctcatccctgttgcctgatgggggtgaggggccctctgccacagccaatgggggcctgtccaaggccaagagcccgggcctgacgccagagcccagggaggaccgtgagggggatgacctcaccctgcacagcttcctcccttagctcactctgccatctgttttggcaagaccccacctccacgggctctcctgggccacccctgagtgcccagaccccattccacagctctgggcttcctcggagacccctggggatggggatcttcagggaaggaactctggccacccaaacaggacaagagcagcctggggccaagcagacgggcaagtggagccacctctttcctccctccgcggatgaagcccagccacatttcagccgaggtccaaggcaggaggccatttacttgagacagattctctcctttttcctgtcccccatcttctctgggtccctctaacatctcccatggctctccccgcttctcctggtcactggagtctcctccccatgtacccaaggaagatggagctcccccatcccacacgcactgcactgccattgtcttttggttgccatggtcaccaaacaggaagtggacattctaagggaggagtactgaagagtgacggacttctgaggctgtttcctgctgctcctctgacttggggcagcttgggtcttcttgggcacctctctgggaaaacccagggtgaggttcagcctgtgagggctgggatgggtttcgtgggcccaagggcagacctttctttgggactgtgtggaccaaggagcttccatctagtgacaagtgacccccagctatcgcctcttgccttcccctgtggccactttccagggtggactctgtcttgttcactgcagtatcccaactgcaggtccagtgcaggcaataaatatgtgatggacaaa

SEQ ID NO: 18581 - DNA, 1704 bp, Homo sapiens
  source 1..1704: mol_type = unassigned DNA
aatcatccgagaaccttggagggtggacagtgccccttttacagatgagaaaactgaggcttgaaggggagaagcagctgcctctggcggcatggcttctggctgcaggatgcccatggagttcgtggtgaccctaggcctgtgtctcggcttcctttgctgaacttgaacaggaagatggcagtgggggccagtggtctagaaggagataagatggctggtgccatgcctctgcaactcctcctgttgctgatcctactgggccctggcaacagcttgcagctgtgggacacctgggcagatgaagccgagaaagccttgggtcccctgcttgcccgggaccggagacaggccaccgaatatgagtacctagattatgatttcctgccagaaacggagcctccagaaatgctgaggaacagcactgacaccactcctctgactgggcctggaacccctgagtctaccactgtggagcctgctgcaaggcgttctactggcctggatgcaggaggggcagtcacagagctgaccacggagctggccaacatggggaacctgtccacggattcagcagctatggagatacagaccactcaaccagcagccacggaggcacagaccactcaaccagtgcccacggaggcacagaccactccactggcagccacagaggcacagacaactcgactgacggccacggaggcacagaccactccactggcagccacagaggcacagaccactccaccagcagccacggaagcacagaccactcaacccacaggcctggaggcacagaccactgcaccagcagccatggaggcacagaccactgcaccagcagccatggaagcacagaccactccaccagcagccatggaggcacagaccactcaaaccacagccatggaggcacagaccactgcaccagaagccacggaggcacagaccactcaacccacagccacggaggcacagaccactccactggcagccatggaggccctgtccacagaacccagtgccacagaggccctgtccatggaacctactaccaaaagaggtctgttcatacccttttctgtgtcctctgttactcacaagggcattcccatggcagccagcaatttgtccgtcaactacccagtgggggccccagaccacatctctgtgaagcagtgcctgctggccatcctaatcttggcgctggtggccactatcttcttcgtgtgcactgtggtgctggcggtccgcctctcccgcaagggccacatgtaccccgtgcgtaattactcccccaccgagatggtctgcatctcatccctgttgcctgatgggggtgaggggccctctgccacagccaatgggggcctgtccaaggccaagagcccgggcctgacgccagagcccagggaggaccgtgagggggatgacctcaccctgcacagcttcctcccttagctcactctgccatctgttttggcaagaccccacctccacgggctctcctgggccacccctgagtgcccagaccccattccacagctctgggcttcctcggagacccctggggatggggatcttcagggaaggaactctggccacccaaacaggacaagagcagcctggggccaagcagacgggcaagtggagccacctctttcctccctccgcggatgaagcccagccacatttcagccg

SEQ ID NO: 18582 - DNA, 1613 bp, Homo sapiens
  source 1..1613: mol_type = unassigned DNA
cccattgtctcctcctaggtgccatgcctctgcaactcctcctgttgctgatcctactgggccctggcaacagcttgcagctgtgggacacctgggcagatgaagccgagaaagccttgggtcccctgcttgcccgggaccggagacaggccaccgaatatgagtacctagattatgatttcctgccagaaacggagcctccagaaatgctgaggaacagcactgacaccactcctctgactgggcctggaacccctgagtctaccactgtggagcctgctgcaaggcgttctactggcctggatgcaggaggggcagtcacagagctgaccacggagctggccaacatggggaacctgtccacggattcagcagctatggagatacagaccactcaaccagcagccacggaggcacagaccactccactggcagccacagaggcacagacaactcgactgacggccacggaggcacagaccactccactggcagccacagaggcacagaccactccaccagcagccacggaagcacagaccactcaacccacaggcctggaggcacagaccactgcaccagcagccatggaggcacagaccactgcaccagcagccatggaagcacagaccactccaccagcagccatggaggcacagaccactcaaaccacagccatggaggcacagaccactgcaccagaagccacggaggcacagaccactcaacccacagccacggaggcacagaccactccactggcagccatggaggccctgtccacagaacccagtgccacagaggccctgtccatggaacctactaccaaaagaggtctgttcatacccttttctgtgtcctctgttactcacaagggcattcccatggcagccagcaatttgtccgtcaactacccagtgggggccccagaccacatctctgtgaagcagtgcctgctggccatcctaatcttggcgctggtggccactatcttcttcgtgtgcactgtggtgctggcggtccgcctctcccgcaagggccacatgtaccccgtgcgtaattactcccccaccgagatggtctgcatctcatccctgttgcctgatgggggtgaggggccctctgccacagccaatgggggcctgtccaaggccaagagcccgggcctgacgccagagcccagggaggaccgtgagggggatgacctcaccctgcacagcttcctcccttagctcactctgccatctgttttggcaagaccccacctccacgggctctcctgggccacccctgagtgcccagaccccattccacagctctgggcttcctcggagacccctggggatggggatcttcagggaaggaactctggccacccaaacaggacaagagcagcctggggccaagcagacgggcaagtggagccacctctttcctccctccgcggatgaagcccagccacatttcagccgaggtccaaggcaggaggccatttacttgagacagattctctcctttttcctgtcccccatcttctctgggtccctctaacatctcccatggctctccccgcttctcctggtcactggagtctcctccccatgtacccaagg

SEQ ID NO: 18583 - DNA, 934 bp, Homo sapiens
  source 1..934: mol_type = unassigned DNA
aaactttacggcacggcgggcggtgcgtggggcggtggctggcctggtgggggcgggggctgcttcttaaaggagccgtcagagggtccccagcggccccagggtgggaaggggccagagtggagagatgctgctgcggaagtcctcggtggagtgtgagaaggcagccagtgttggcctggaagacctctagaacctgagaagaggcagcgatcctggggcagagtccagggcagctcaaggctcctccacacacacacccgctgaaccctgagcaccctgagctgctgagatggggcgggccggggctgccgccgtgatcccgggcctggccctgctctgggcagtggggctggggagtgccgcccccagccccccacgccttcggctctccttccaagagctccaggcctggcatggtctccagactttcagcctggagcgaacctgctgctaccaggccttgctggtggatgaggagcgtggacgcctgtttgtgggtgccgagaaccatgtggcctccctcaacctggacaacatcagcaagcgggccaagaagctggcctggccggcccctgtggaatggcgagaggagtgcaactgggcagggaaggacattggtactgagtgcatgaacttcgtgaagttgctgcatgcctacaaccgcacccatttgctggcctgtggcacgggagccttccacccaacctgtgcctttgtggaagtgggccaccgggcagaggagcccgtcctccggctggacccaggaaggatagaggatggcaaggggaagagtccttatgaccccaggcatcgggctgcctccgtgctggtgggggaggagctatactcaggggtggcagcagacctcatgggacgagactttaccatctttcgcagcctagggcaacgtccaagtctccgaacagagcca

SEQ ID NO: 18584 - DNA, 3158 bp, Homo sapiens
  source 1..3158: mol_type = unassigned DNA
gtgggtggcacattgtgaattaatgtctgtgagtgtgtatacaagagaggagattactgggaagggtgacgtggtgaggcgggcttgccagtgcagggtgaccctgagggtgtgcccagtggcgtgggtgtgtctgtgattgtggccaggcggggcaccctcggaggggagggttcggaagtggaatgcgaccccccagcctctttcccctaggggctgtaatctgatccctggggactccccccctagcctcccgccctcgccctcactgctgactcctcttccagatcctggggcagagtccagggcagctcaaggctcctccacacacacacccgctgaaccctgagcaccctgagctgctgagatggggcgggccggggctgccgccgtgatcccgggcctggccctgctctgggcagtggggctggggagtgccgcccccagccccccacgccttcggctctccttccaagagctccaggcctggcatggtctccagactttcagcctggagcgaacctgctgctaccaggccttgctggtggatgaggagcgtggacgcctgtttgtgggtgccgagaaccatgtggcctccctcaacctggacaacatcagcaagcgggccaagaagctggcctggccggcccctgtggaatggcgagaggagtgcaactgggcagggaaggacattggtactgagtgcatgaacttcgtgaagttgctgcatgcctacaaccgcacccatttgctggcctgtggcacgggagccttccacccaacctgtgcctttgtggaagtgggccaccgggcagaggagcccgtcctccggctggacccaggaaggatagaggatggcaaggggaagagtccttatgaccccaggcatcgggctgcctccgtgctggggaggagctatactcaggggtggcagcagacctcatgggacgagactttaccatctttcgcagcctagggcaacgtccaagtctccgaacagagccacacgactcccgctggctcaatgagcccaagtttgtcaaggtattttggatcccggagagcgagaacccagacgacgacaaaatctacttcttctttcgtgagacggcggtagaggcggcgccggcactgggacgcctgtccgtgtcccgcgttggccagatctgccggaacgacgtgggcggccagcgcagcctggtcaacaagtggacgacgttcctgaaggcgcggctggtgtgctcggtgcccggcgtcgagggcgacacccacttcgatcagctccgtgagtgcgggagtgggtatggggttggggaggggggcagcggcgcagactccgggagcccccgccgcagcggggctgtgcgccctaccccagctaggccccttccccgcagaggatgtgtttctgttgtcctcgcgggaccaccggaccccgctgctctatgccgtcttctccacgtccagcagcatcttccagggctctgcggtgtgcgtgtacagcatgaacgacgtgcgccgggccttcttgggaccctttgcacacaaggaggggcccatgcaccagtgggtgtcataccagggtcgcgtcccctacccgcggccaggcatgtgccccagcaagacctttggcaccttcagttccaccaaggacttcccagacgatgtcatccagtttgcgcggaaccaccccctcatgtacaactctgtcctgcccactggggggcgccctcttttcctacaagttggagccaattacaccttcactcaaattgccgcggaccgggttgcagccgctgacggacactatgacgtcctcttcattggcacagacgttggcacggtgctgaaggtgatctcggtccccaagggcagtaggcccagcgcagaggggctgctcctggaggagctgcacgtgtttgaggactcggccgctgtcaccagcatgcaaatttcttccaagaggcaccagctgtacgtagcctcgcggagcgcggtggcccagatcgcgttgcaccgctgcgctgcccacggccgcgtctgcaccgaatgctgtctggcgcgtgacccctactgcgcctgggacggggtcgcgtgcacgcgcttccagcccagtgccaagaggcggttccggcggcaagacgtaaggaatggcgaccccagcacgttgtgctccggagactcgtctcgtcccgcgctgctggaacacaaggtgttcggcgtggagggcagcagcgcctttctggagtgtgagccccgctcgctgcaggcgcgcgtggagtggactttccagcgcgcaggggtgacagcccacacccaggtgctggcagaggagcgcaccgagcgcaccgcccggggactactgctgcgcaggctgcggcgccgggactcgggcgtgtacttgtgcgccgccgtcgagcagggctttacgcaaccgctgcgtcgcctgtcgctgcacgtgttgagtgctacgcaggccgaacgactggcgcgggccgaggaggctgcgcccgccgcgccgccgggccccaaactctggtaccgggactttctgcagctggtggagccgggcggaggtggcagcgcgaactccctgcgcatgtgccgcccgcagcctgcgctgcagtcactgcccctggagtcgcggagaaagggccgtaaccggaggacccacgcccctgagcctcgcgctgagcgggggccgcgcagcgcaacgcactggtgaccagactgtccccacgccgggaaccaagcaggagacgacaggcgagagaggagccagacagaccctgaaaagaaggacgggttggggccgggcacattgggggtcaccggccgatggagacaccaaccgacaggccctggctgagggcagctgcgcgggcttatttattaacaggataacccttgaatgtagcagccccgggagggcggcacaggtcgggcgcaggattcagccggagggaagggacggggaagccgagctccagagcaacgaccagggccgaggaggtgcctggagtgcccaccctgggagacagaccccacctccttgggtagtgagcagtgagcagaaagctgtgaacaggctgggctgctggaggtggggcgaggcaggccgactgtactaaagtaacgcaataaacgcattatcagcc

SEQ ID NO: 18585 - DNA, 2958 bp, Homo sapiens
  source 1..2958: mol_type = unassigned DNA
tctgtgattgtggccaggcggggcaccctcggaggggagggttcggaagtggaatgcgaccccccagcctctttcccctaggggctgtaatctgatccctggggactccccccctagcctcccgccctcgccctcactgctgactcctcttccagatcctggggcagagtccagggcagctcaaggctcctccacacacacacccgctgaaccctgagcaccctgagctgctgagatggggcgggccggggctgccgccgtgatcccgggcctggccctgctctgggcagtggggctggggagtgccgcccccagccccccacgccttcggctctccttccaagagctccaggcctggcatggtctccagactttcagcctggagcgaacctgctgctaccaggccttgctggtggatgaggagcgtggacgcctgtttgtgggtgccgagaaccatgtggcctccctcaacctggacaacatcagcaagcgggccaagaagctggcctggccggcccctgtggaatggcgagaggagtgcaactgggcagggaaggacattggtactgagtgcatgaacttcgtgaagttgctgcatgcctacaaccgcacccatttgctggcctgtggcacgggagccttccacccaacctgtgcctttgtggaagtgggccaccgggcagaggagcccgtcctccggctggacccaggaaggatagaggatggcaaggggaagagtccttatgaccccaggcatcgggctgcctccgtgctggtgggggaggagctatactcaggggtggcagcagacctcatgggacgagactttaccatctttcgcagcctagggcaacgtccaagtctccgaacagagccacacgactcccgctggctcaatgagcccaagtttgtcaaggtattttggatcccggagagcgagaacccagacgacgacaaaatctacttcttctttcgtgagacggcggtagaggcggcgccggcactgggacgcctgtccgtgtcccgcgttggccagatctgccggaacgacgtgggcggccagcgcagcctggtcaacaagtggacgacgttcctgaaggcgcggctggtgtgctcggtgcccggcgtcgagggcgacacccacttcgatcagctccaggatgtgtttctgttgtcctcgcgggaccaccggaccccgctgctctatgccgtcttctccacgtccagcagcatcttccagggctctgcggtgtgcgtgtacagcatgaacgacgtgcgccgggccttcttgggaccctttgcacacaaggaggggcccatgcaccagtgggtgtcataccagggtcgcgtcccctacccgcggccaggcatgtgccccagcaagacctttggcaccttcagttccaccaaggacttcccagacgatgtcatccagtttgcgcggaaccaccccctcatgtacaactctgtcctgcccactggggggcgccctcttttcctacaagttggagccaattacaccttcactcaaattgccgcggaccgggttgcagccgctgacggacactatgacgtcctcttcattggcacagacgttggcacggtgctgaaggtgatctcggtccccaagggcagtaggcccagcgcagaggggctgctcctggaggagctgcacgtgtttgaggactcggccgctgtcaccagcatgcaaatttcttccaagaggcaccagctgtacgtagcctcgcggagcgcggtggcccagatcgcgttgcaccgctgcgctgcccacggccgcgtctgcaccgaatgctgtctggcgcgtgacccctactgcgcctgggacggggtcgcgtgcacgcgcttccagcccagtgccaagaggcggttccggcggcaagacgtaaggaatggcgaccccagcacgttgtgctccggagactcgtctcgtcccgcgctgctggaacacaaggtgttcggcgtggagggcagcagcgcctttctggagtgtgagccccgctcgctgcaggcgcgcgtggagtggactttccagcgcgcaggggtgacagcccacacccaggtgctggcagaggagcgcaccgagcgcaccgcccggggactactgctgcgcaggctgcggcgccgggactcgggcgtgtacttgtgcgccgccgtcgagcagggctttacgcaaccgctgcgtcgcctgtcgctgcacgtgttgagtgctacgcaggccgaacgactggcgcgggccgaggaggctgcgcccgccgcgccgccgggccccaaactctggtaccgggactttctgcagctggtggagccgggcggaggtggcagcgcgaactccctgcgcatgtgccgcccgcagcctgcgctgcagtcactgcccctggagtcgcggagaaagggccgtaaccggaggacccacgcccctgagcctcgcgctgagcgggggccgcgcagcgcaacgcactggtgaccagactgtccccacgccgggaaccaagcaggagacgacaggcgagagaggagccagacagaccctgaaaagaaggacgggttggggccgggcacattgggggtcaccggccgatggagacaccaaccgacaggccctggctgagggcagctgcgcgggcttatttattaacaggataacccttgaatgtagcagccccgggagggcggcacaggtcgggcgcaggattcagccggagggaagggacggggaagccgagctccagagcaacgaccagggccgaggaggtgcctggagtgcccaccctgggagacagaccccacctccttgggtagtgagcagtgagcagaaagctgtgaacaggctgggctgctggaggtggggcgaggcaggccgactgtactaaagtaacgcaataaacgcattatcagccaaagctggaatggccccagcagaaaaccccagtcctcggc

SEQ ID NO: 18586 - DNA, 1061 bp, Homo sapiens
  source 1..1061: mol_type = unassigned DNA
tggggcagagtccagggcagctcaaggctcctccacacacacacccgctgaaccctgagcaccctgagctgctgagatggggcgggccggggctgccgccgtgatcccgggcctggccctgctctgggcagtggggctggggagtgccgcccccagccccccacgccttcggctctccttccaagagctccaggcctggcatggtctccagactttcagcctggagcgaacctgctgctaccaggccttgctggtggatgaggagcgtggacgcctgtttgtgggtgccgagaaccatgtggcctccctcaacctggacaacatcagcaagcgggccaagaaggtgccagggactcccaaccccagcactccccagggaaggagccctgggaccccactccagcctggagagacccagaggaatggctccctgagactgagtgcatgaacttcgtgaagttgctgcatgcctacaaccgcacccatttgctggcctgtggcacgggagccttccacccaacctgtgcctttgtggaagtgggccaccgggcagaggagcccgtcctccggctggacccaggaaggatagaggatggcaaggggaagagtccttatgaccccaggcatcgggctgcctccgtgctggtgggggaggagctatactcaggggtggcagcagacctcatgggacgagactttaccatctttcgcagcctagggcaacgtccaagtctccgaacagagccacacgactcccgctggctcaatgagcccaagtttgtcaaggtattttggatcccggagagcgagaacccagacgacgacaaaatctacttcttctttcgtgagacggcggtagaggcggcgccggcactgggacgcctgtccgtgtcccgcgttggccagatctgccggaacgacgtgggcggccagcgcagcctggtcaacaagtggacgacgttcctgaaggcgcggctggtgtgctcggtgcccggcgtcgagggcgacacccacttcgatcagctccgtgagtgcgggagtgggtatggggttggggaggg

SEQ ID NO: 18587 - DNA, 2755 bp, Homo sapiens
  source 1..2755: mol_type = unassigned DNA
gcagagtccagggcagctcaaggctcctccacacacacacccgctgaaccctgagcaccctgagctgctgagatggggcgggccggggctgccgccgtgatcccgggcctggccctgctctgggcagtggggctggggagtgccgcccccagccccccacgccttcggctctccttccaagagctccaggcctggcatggtctccagactttcagcctggagcgaacctgctgctaccaggccttgctggtggatgaggagcgtggacgcctgtttgtgggtgccgagaaccatgtggcctccctcaacctggacaacatcagcaagcgggccaagaagctggcctggccggcccctgtggaatggcgagaggagtgcaactgggcagggaaggacattggtactgagtgcatgaacttcgtgaagttgctgcatgcctacaaccgcacccatttgctggcctgtggcacgggagccttccacccaacctgtgcctttgtggaagtgggccaccgggcagaggagcccgtcctccggctggacccaggaaggatagaggatggcaaggggaagagtccttatgaccccaggcatcgggctgcctccgtgctggtgggggaggagctatactcaggggtggcagcagacctcatgggacgagactttaccatctttcgcagcctagggcaacgtccaagtctccgaacagagccacacgactcccgctggctcaatgagcccaagtttgtcaaggtattttggatcccggagagcgagaacccagacgacgacaaaatctacttcttctttcgtgagacggcggtagaggcggcgccggcactgggacgcctgtccgtgtcccgcgttggccagatctgccggaacgacgtgggcggccagcgcagcctggtcaacaagtggacgacgttcctgaaggcgcggctggtgtgctcggtgcccggcgtcgagggcgacacccacttcgatcagctccaggatgtgtttctgttgtcctcgcgggaccaccggaccccgctgctctatgccgtcttctccacgtccagcatcttccagggctctgcggtgtgcgtgtacagcatgaacgacgtgcgccgggccttcttgggaccctttgcacacaaggaggggcccatgcaccagtgggtgtcataccagggtcgcgtcccctacccgcggccaggcatgtgccccagcaagacctttggcaccttcagttccaccaaggacttcccagacgatgtcatccagtttgcgcggaaccaccccctcatgtacaactctgtcctgcccactggggggcgccctcttttcctacaagttggagccaattacaccttcactcaaattgccgcggaccgggttgcagccgctgacggacactatgacgtcctcttcattggcacagacgttggcacggtgctgaaggtgatctcggtccccaagggcagtaggcccagcgcagaggggctgctcctggaggagctgcacgtgtttgaggactcggccgctgtcaccagcatgcaaatttcttccaagaggcaccagctgtacgtagcctcgcggagcgcggtggcccagatcgcgttgcaccgctgcgctgcccacggccgcgtctgcaccgaatgctgtctggcgcgtgacccctactgcgcctgggacggggtcgcgtgcacgcgcttccagcccagtgccaagaggcggttccggcggcaagacgtaaggaatggcgaccccagcacgttgtgctccggagactcgtctcgtcccgcgctgctggaacacaaggtgttcggcgtggagggcagcagcgcctttctggagtgtgagccccgctcgctgcaggcgcgcgtggagtggactttccagcgcgcaggggtgacagcccacacccaggtgctggcagaggagcgcaccgagcgcaccgcccggggactactgctgcgcaggctgcggcgccgggactcgggcgtgtacttgtgcgccgccgtcgagcagggctttacgcaaccgctgcgtcgcctgtcgctgcacgtgttgagtgctacgcaggccgaacgactggcgcgggccgaggaggctgcgcccgccgcgccgccgggccccaaactctggtaccgggactttctgcagctggtggagccgggcggaggtggcagcgcgaactccctgcgcatgtgccgcccgcagcctgcgctgcagtcactgcccctggagtcgcggagaaagggccgtaaccggaggacccacgcccctgagcctcgcgctgagcgggggccgcgcagcgcaacgcactggtgaccagactgtccccacgccgggaaccaagcaggagacgacaggcgagagaggagccagacagaccctgaaaagaaggacgggttggggccgggcacattgggggtcaccggccgatggagacaccaaccgacaggccctggctgagggcagctgcgcgggcttatttattaacaggataacccttgaatgtagcagccccgggagggcggcacaggtcgggcgcaggattcagccggagggaagggacggggaagccgagctccagagcaacgaccagggccgaggaggtgcctggagtgcccaccctgggagacagaccccacctccttgggtagtgagcagtgagcagaaagctgtgaacaggctgggctgctggaggtggggcgaggcaggccgactgtactaaagtaacgcaataaacgcattatcagccaaa

SEQ ID NO: 18588 - DNA, 2292 bp, Homo sapiens
  source 1..2292: mol_type = unassigned DNA
gaaccctgagcaccctgagctgctgagatggggcgggccggggctgccgccgtgatcccgggcctggccctgctctgggcagtggggctggggagtgccgcccccagccccccacgccttcggctctccttccaagagctccaggcctggcatggtctccagactttcagcctggagcgaacctgctgctaccaggccttgctggtggatgaggagcgtggacgcctgtttgtgggtgccgagaaccatgtggcctccctcaacctggacaacatcagcaagcgggccaagaagctggcctggccggcccctgtggaatggcgagaggagtgcaactgggcagggaaggacattggtactgagtgcatgaacttcgtgaagttgctgcatgcctacaaccgcacccatttgctggcctgtggcacgggagccttccacccaacctgtgcctttgtggaagtgggccaccgggcagaggagcccgtcctccggctggacccaggaaggatagaggatggcaaggggaagagtccttatgaccccaggcatcgggctgcctccgtgctggtgggggaggagctatactcaggggtggcagcagacctcatgggacgagactttaccatctttcgcagcctagggcaacgtccaagtctccgaacagagccacacgactcccgctggctcaatgagcccaagtttgtcaaggtattttggatcccggagagcgagaacccagacgacgacaaaatctacttcttctttcgtgagacggcggtagaggcggcgccggcactgggacgcctgtccgtgtcccgcgttggccagatctgccggaacgacgtgggcggccagcgcagcctggtcaacaagtggacgacgttcctgaaggcgcggctggtgtgctcggtgcccggcgtcgagggcgacacccacttcgatcagctccgccccttccccgcagaggatgtgtttctgttgtcctcgcgggaccaccggaccccgctgctctatgccgtcttctccacgtccagcagcatcttccagggctctgcggtgtgcgtgtacagcatgaacgacgtgcgccgggccttcttgggaccctttgcacacaaggaggggcccatgcaccagtgggtgtcataccagggtcgcgtcccctacccgcggccaggcatgtgccccagcaagacctttggcaccttcagttccaccaaggacttcccagacgatgtcatccagtttgcgcggaaccaccccctcatgtacaactctgtcctgcccactggggggcgccctcttttcctacaagttggagccaattacaccttcactcaaattgccgcggaccgggttgcagccgctgacggacactatgacgtcctcttcattggcacagacgttggcacggtgctgaaggtgatctcggtccccaagggcagtaggcccagcgcagaggggctgctcctggaggagctgcacgtgtttgaggactcggccgctgtcaccagcatgcaaatttcttccaagaggcaccagctgtacgtagcctcgcggagcgcggtggcccagatcgcgttgcaccgctgcgctgcccacggccgcgtctgcaccgaatgctgtctggcgcgtgacccctactgcgcctgggacggggtcgcgtgcacgcgcttccagcccagtgccaagaggcggttccggcggcaagacgtaaggaatggcgaccccagcacgttgtgctccggagactcgtctcgtcccgcgctgctggaacacaaggtgttcggcgtggagggcagcagcgcctttctggagtgtgagccccgctcgctgcaggcgcgcgtggagtggactttccagcgcgcaggggtgacagcccacacccaggtgctggcagaggagcgcaccgagcgcaccgcccggggactactgctgcgcaggctgcggcgccgggactcgggcgtgtacttgtgcgccgccgtcgagcagggctttacgcaaccgctgcgtcgcctgtcgctgcacgtgttgagtgctacgcaggccgaacgactggcgcgggccgaggaggctgcgcccgccgcgccgccgggccccaaactctggtaccgggactttctgcagctggtggagccgggcggaggtggcagcgcgaactccctgcgcatgtgccgcccgcagcctgcgctgcagtcactgcccctggagtcgcggagaaagggccgtaaccggaggacccacgcccctgagcctcgcgctgagcgggggccgcgcagcgcaacgcactggtga

SEQ ID NO: 18589 - DNA, 2710 bp, Homo sapiens
  source 1..2710: mol_type = unassigned DNA
gctaaaacagaggcctgcctgttctggctgggatgagggcagggaggtcgaggtggctgaggtctgggggtggtgagtcagggtgggggctcgtgtaattcttctggggtgcctctgagtcatgggaggctttgcaggcctgtgcttccccagacacccaccctcgtgaggcctgggctggtcagcaagggcccccaggtccctgtagcccatgttagtacttgcctgggctgatgccgaagagagggaggggtgaggatgccactggtgagctgggacctcttaaggctacgtccctgggggaagcctcacacctccaaccctactagactgagtgcatgaacttcgtgaagttgctgcatgcctacaaccgcacccatttgctggcctgtggcacgggagccttccacccaacctgtgcctttgtggaagtgggccaccgggcagaggagcccgtcctccggctggacccaggaaggatagaggatggcaaggggaagagtccttatgaccccaggcatcgggctgcctccgtgctggtgggggaggagctatactcaggggtggcagcagacctcatgggacgagactttaccatctttcgcagcctagggcaacgtccaagtctccgaacagagccacacgactcccgctggctcaatgagcccaagtttgtcaaggtattttggatcccggagagcgagaacccagacgacgacaaaatctacttcttctttcgtgagacggcggtagaggcggcgccggcactgggacgcctgtccgtgtcccgcgttggccagatctgccggaacgacgtgggcggccagcgcagcctggtcaacaagtggacgacgttcctgaaggcgcggctggtgtgctcggtgcccggcgtcgagggcgacacccacttcgatcagctccaggatgtgtttctgttgtcctcgcgggaccaccggaccccgctgctctatgccgtcttctccacgtccagcatcttccagggctctgcggtgtgcgtgtacagcatgaacgacgtgcgccgggccttcttgggaccctttgcacacaaggaggggcccatgcaccagtgggtgtcataccagggtcgcgtcccctacccgcggccaggcatgtgccccagcaagacctttggcaccttcagttccaccaaggacttcccagacgatgtcatccagtttgcgcggaaccaccccctcatgtacaactctgtcctgcccactggggggcgccctcttttcctacaagttggagccaattacaccttcactcaaattgccgcggaccgggttgcagccgctgacggacactatgacgtcctcttcattggcacagacgttggcacggtgctgaaggtgatctcggtccccaagggcagtaggcccagcgcagaggggctgctcctggaggagctgcacgtgtttgaggactcggccgctgtcaccagcatgcaaatttcttccaagaggcaccagctgtacgtagcctcgcggagcgcggtggcccagatcgcgttgcaccgctgcgctgcccacggccgcgtctgcaccgaatgctgtctggcgcgtgacccctactgcgcctgggacggggtcgcgtgcacgcgcttccagcccagtgccaagaggcggttccggcggcaagacgtaaggaatggcgaccccagcacgttgtgctccggagactcgtctcgtcccgcgctgctggaacacaaggtgttcggcgtggagggcagcagcgcctttctggagtgtgagccccgctcgctgcaggcgcgcgtggagtggactttccagcgcgcaggggtgacagcccacacccaggtgctggcagaggagcgcaccgagcgcaccgcccggggactactgctgcgcaggctgcggcgccgggactcgggcgtgtacttgtgcgccgccgtcgagcagggctttacgcaaccgctgcgtcgcctgtcgctgcacgtgttgagtgctacgcaggccgaacgactggcgcgggccgaggaggctgcgcccgccgcgccgccgggccccaaactctggtaccgggactttctgcagctggtggagccgggcggaggtggcagcgcgaactccctgcgcatgtgccgcccgcagcctgcgctgcagtcactgcccctggagtcgcggagaaagggccgtaaccggaggacccacgcccctgagcctcgcgctgagcgggggccgcgcagcgcaacgcactggtgaccagactgtccccacgccgggaaccaagcaggagacgacaggcgagagaggagccagacagaccctgaaaagaaggacgggttggggccgggcacattgggggtcaccggccgatggagacaccaaccgacaggccctggctgagggcagctgcgcgggcttatttattaacaggataacccttgaatgtagcagccccgggagggcggcacaggtcgggcgcaggattcagccggagggaagggacggggaagccgagctccagagcaacgaccagggccgaggaggtgcctggagtgcccaccctgggagacagaccccacctccttgggtagtgagcagtgagcagaaagctgtgaacaggctgggctgctggaggtggggcgaggcaggccgactgtactaaagtaacgcaataaacgcattatcagccaaagctggaatggccccagcagaaaacccca

SEQ ID NO: 18590 - DNA, 2221 bp, Homo sapiens
  source 1..2221: mol_type = unassigned DNA
ctgatcctttggattcggtccgcgcagagcgccaactggacatggtgctagaggttgggtggtcagacactgtgatcccgggtgctgtgcccgcactacgggaaggggaagcagcgcgtgggtctcgcatcaggaggcaaggccaggacccgctgacccatgcctcctgccgcggtcagagcccaagtttgtcaaggtattttggatcccggagagcgagaacccagacgacgacaaaatctacttcttctttcgtgagacggcggtagaggcggcgccggcactgggacgcctgtccgtgtcccgcgttggccagatctgccggaacgacgtgggcggccagcgcagcctggtcaacaagtggacgacgttcctgaaggcgcggctggtgtgctcggtgcccggcgtcgagggcgacacccacttcgatcagctccaggatgtgtttctgttgtcctcgcgggaccaccggaccccgctgctctatgccgtcttctccacgtccagcatcttccagggctctgcggtgtgcgtgtacagcatgaacgacgtgcgccgggccttcttgggaccctttgcacacaaggaggggcccatgcaccagtgggtgtcataccagggtcgcgtcccctacccgcggccaggcatgtgccccagcaagacctttggcaccttcagttccaccaaggacttcccagacgatgtcatccagtttgcgcggaaccaccccctcatgtacaactctgtcctgcccactggggggcgccctcttttcctacaagttggagccaattacaccttcactcaaattgccgcggaccgggttgcagccgctgacggacactatgacgtcctcttcattggcacagacgttggcacggtgctgaaggtgatctcggtccccaagggcagtaggcccagcgcagaggggctgctcctggaggagctgcacgtgtttgaggactcggccgctgtcaccagcatgcaaatttcttccaagaggcaccagctgtacgtagcctcgcggagcgcggtggcccagatcgcgttgcaccgctgcgctgcccacggccgcgtctgcaccgaatgctgtctggcgcgtgacccctactgcgcctgggacggggtcgcgtgcacgcgcttccagcccagtgccaagaggcggttccggcggcaagacgtaaggaatggcgaccccagcacgttgtgctccggagactcgtctcgtcccgcgctgctggaacacaaggtgttcggcgtggagggcagcagcgcctttctggagtgtgagccccgctcgctgcaggcgcgcgtggagtggactttccagcgcgcaggggtgacagcccacacccaggtgctggcagaggagcgcaccgagcgcaccgcccggggactactgctgcgcaggctgcggcgccgggactcgggcgtgtacttgtgcgccgccgtcgagcagggctttacgcaaccgctgcgtcgcctgtcgctgcacgtgttgagtgctacgcaggccgaacgactggcgcgggccgaggaggctgcgcccgccgcgccgccgggccccaaactctggtaccgggactttctgcagctggtggagccgggcggaggtggcagcgcgaactccctgcgcatgtgccgcccgcagcctgcgctgcagtcactgcccctggagtcgcggagaaagggccgtaaccggaggacccacgcccctgagcctcgcgctgagcgggggccgcgcagcgcaacgcactggtgaccagactgtccccacgccgggaaccaagcaggagacgacaggcgagagaggagccagacagaccctgaaaagaaggacgggttggggccgggcacattgggggtcaccggccgatggagacaccaaccgacaggccctggctgagggcagctgcgcgggcttatttattaacaggataacccttgaatgtagcagccccgggagggcggcacaggtcgggcgcaggattcagccggagggaagggacggggaagccgagctccagagcaacgaccagggccgaggaggtgcctggagtgcccaccctgggagacagaccccacctccttgggtagtgagcagtgagcagaaagctgtgaacaggctgggctgctggaggtggggcgaggcaggccgactgtactaaagtaacgcaataaacgcattatcagccaaagctggaatggccccagcagaaaa

SEQ ID NO: 18591 - DNA, 594 bp, Homo sapiens
  source 1..594: mol_type = unassigned DNA
gattcggtccgcgcagagcgccaactggacatggtgctagaggttgggtggtcagacactgtgatcccgggtgctgtgcccgcactacgggaaggggaagcagcgcgtgggtctcgcatcaggaggcaaggccaggacccgctgacccatgcctcctgccgcggtcagagcccaagtttgtcaaggtattttggatcccggagagcgagaacccagacgacgacaaaatctacttcttctttcgtgagacggcggtagaggcggcgccggcactgggacgcctgtccgtgtcccgcgttggccagatctgccggaacgacgtgggcggccagcgcagcctggtcaacaagtggacgacgttcctgaaggcgcggctggtgtgctcggtgcccggcgtcgagggcgacacccacttcgatcagctcctgccccagcaagacctttggcaccttcagttccaccaaggacttcccagacgatgtcatccagtttgcgcggaaccaccccctcatgtacaactctgtcctgcccactggggggcgccctcttttcctacaagttggagccaattacaccttcactcaaattgccgcg

SEQ ID NO: 18592 - DNA, 1011 bp, Homo sapiens
  source 1..1011: mol_type = unassigned DNA
aactggacatggtgctagaggttgggtggtcagacactgtgatcccgggtgctgtgcccgcactacgggaaggggaagcagcgcgtgggtctcgcatcaggaggcaaggccaggacccgctgacccatgcctcctgccgcggtcagagcccaagtttgtcaaggtattttggatcccggagagcgagaacccagacgacgacaaaatctacttcttctttcgtgagacggcggtagaggcggcgccggcactgggacgcctgtccgtgtcccgcgttggccagatctgccggaacgacgtgggcggccagcgcagcctggtcaacaagtggacgacgttcctgaaggcgcggctggtgtgctcggtgcccggcgtcgagggcgacacccacttcgatcagctccgtgagtgcgggagtgggtatggggttggggaggggggcagcggcgcagactccgggagcccccgccgcagcggggctgtgcgccctaccccagctaggccccttccccgcagaggatgtgtttctgttgtcctcgcgggaccaccggaccccgctgctctatgccgtcttctccacgtccagcatcttccagggctctgcggtgtgcgtgtacagcatgaacgacgtgcgccgggccttcttgggaccctttgcacacaaggaggggcccatgcaccagtgggtgtcataccagggtcgcgtcccctacccgcggccaggcatggttcgtagcccagggacttctgctacaacccacttcaaagcctcaagggtttgagaacttggcctggggtcttcttggtgaatgtggtttcttcctttagttatgggtgggaaaacgtttccatcataagacaaggcttgtttcccgcctctgacttcctagggcaaggctgatctcctctctaattctcagggcagggttctgtccccatccccctccatgttcccagaggctgggcatggagggctgcctatcaagcccccatatctatatccctgctgtg

SEQ ID NO: 18593 - DNA, 2065 bp, Homo sapiens
  source 1..2065: mol_type = unassigned DNA
gacatggtgctagaggttgggtggtcagacactgtgatcccgggtgctgtgcccgcactacgggaaggggaagcagcgcgtgggtctcgcatcaggaggcaaggccaggacccgctgacccatgcctcctgccgcggtcagagcccaagtttgtcaagaacgacgtgggcggccagcgcagcctggtcaacaagtggacgacgttcctgaaggcgcggctggtgtgctcggtgcccggcgtcgagggcgacacccacttcgatcagctcctgccccagcaagacctttggcaccttcagttccaccaaggacttcccagacgatgtcatccagtttgcgcggaaccaccccctcatgtacaactctgtcctgcccactggggggcgccctcttttcctacaagttggagccaattacaccttcactcaaattgccgcggaccgggttgcagccgctgacggacactatgacgtcctcttcattggcacagacgttggcacggtgctgaaggtgatctcggtccccaagggcagtaggcccagcgcagaggggctgctcctggaggagctgcacgtgtttgaggactcggccgctgtcaccagcatgcaaatttcttccaagagggcggttccggcggcaagacgtaaggaatggcgaccccagcacgttgtgctccggagactcgtctcgtcccgcgctgctggaacacaaggtgttcggcgtggagggcagcagcgcctttctggagtgtgagccccgctcgctgcaggcgcgcgtggagtggactttccagcgcgcaggggtgacagcccacacccaggtgctggcagaggagcgcaccgagcgcaccgcccggggactactgctgcgcaggctgcggcgccgggactcgggcgtgtacttgtgcgccgccgtcgagcagggctttacgcaaccgctgcgtcgcctgtcgctgcacgtgttgagtgctacgcaggccgaacgactggcgcgggccgaggaggctgcgcccgccgcgccgccgggccccaaactctggtaccgggactttctgcagctggtggagccgggcggaggtggcagcgcgaactccctgcgcatgtgccgcccgcagcctgcgctgcagtcactgcccctggagtcgcggagaaagggccgtaaccggaggacccacgcccctgagcctcgcgctgagcgggggccgcgcagcgcaacgcactggtgaccagactgtccccacgccgggaaccaagcaggagacgacaggcgagagaggagccagacagaccctgaaaagaaggacgggttggggccgggcacattgggggtcaccggccgatggagacaccaaccgacaggccctggctgagggcagctgcgcgggcttatttattaacaggataacccttgaatgtagcagccccgggagggcggcacaggtcgggcgcaggattcagccggagggaagggacggggaagccgagctccagagcaacgaccagggccgaggaggtgcctggagtgcccaccctgggagacagaccccacctccttgggtagtgagcagtgagcagaaagctgtgaacaggctgggctgctggaggtggggcgaggcaggccgactgtactaaagtaacgcaataaacgcattatcagccaaagctggaatggccccagcagaaaaccccagtcctcggccttgctatgtggtcttgggcaccttactagcggtgtcagggcccgagtttctcctgtccaaggttgcctggtgaggattaaaggtggttccggccaggcgcggtggctcacgcctgtaatcccaacactttcggaggcccaggcggacggatcacgaggtcaggagatggaaaccatcccggctaacacggtgaaaccccgtctgtactaaaaatacaaaaaattagtcgggcgtggtggcgggcgcctgtaatcctagctactcaggaggctgaggcaggagaattgcttgaacctgggaggtggaggttgcaatgagcctagatctcgccgctgcactccagcctgggcgacagagcgagactcc

SEQ ID NO: 18594 - DNA, 1765 bp, Homo sapiens
  source 1..1765: mol_type = unassigned DNA
atggtgctagaggttgggtggtcagacactgtgatcccgggtgctgtgcccgcactacgggaaggggaagcagcgcgtgggtctcgcatcaggaggcaaggccaggacccgctgacccatgcctcctgccgcggtcagagcccaagtttgtcaagaacgacgtgggcggccagcgcagcctggtcaacaagtggacgacgttcctgaaggcgcggctggtgtgctcggtgcccggcgtcgagggcgacacccacttcgatcagctccaggatgtgtttctgttgtcctcgcgggaccaccggaccccgctgctctatgccgtcttctccacgtccagcagcatcttccagggctctgcggtgtgcgtgtacagcatgaacgacgtgcgccgggccttcttgggaccctttgcacacaaggaggggcccatgcaccagtgggtgtcataccagggtcgcgtcccctacccgcggccaggcatgtgccccagcaagacctttggcaccttcagttccaccaaggacttcccagacgatgtcatccagtttgcgcggaaccaccccctcatgtacaactctgtcctgcccactggggggcgccctcttttcctacaagttggagccaattacaccttcactcaaattgccgcggaccgggttgcagccgctgacggacactatgacgtcctcttcattggcacagacgttggcacggtgctgaaggtgatctcggtccccaagggcagtaggcccagcgcagaggggctgctcctggaggagctgcacgtgtttgaggactcggccgctgtcaccagcatgcaaatttcttccaagaggcaccagctgtacgtagcctcgcggagcgcggtggcccagatcgcgttgcaccgctgcgctgcccacggccgcgtctgcaccgaatgctgtctggcgcgtgacccctactgcgcctgggacggggtcgcgtgcacgcgcttccagcccagtgccaagaggcggttccggcggcaagacgtaaggaatggcgaccccagcacgttgtgctccggagactcgtctcgtcccgcgctgctggaacacaaggtgttcggcgtggagggcagcagcgcctttctggagtgtgagccccgctcgctgcaggcgcgcgtggagtggactttccagcgcgcaggggtgacagcccacacccaggtgctggcagaggagcgcaccgagcgcaccgcccggggactactgctgcgcaggctgcggcgccgggactcgggcgtgtacttgtgcgccgccgtcgagcagggctttacgcaaccgctgcgtcgcctgtcgctgcacgtgttgagtgctacgcaggccgaacgactggcgcgggccgaggaggctgcgcccgccgcgccgccgggccccaaactctggtaccgggactttctgcagctggtggagccgggcggaggtggcagcgcgaactccctgcgcatgtgccgcccgcagcctgcgctgcagtcactgcccctggagtcgcggagaaagggccgtaaccggaggacccacgcccctgagcctcgcgctgagcgggggccgcgcagcgcaacgcactggtgaccagactgtccccacgccgggaaccaagcaggagacgacaggcgagagaggagccagacagaccctgaaaagaaggacgggttggggccgggcacattgggggtcaccggccgatggagacaccaaccgacaggccctggctgagggcagctgcgcgggcttatttatta

SEQ ID NO: 18595 - DNA, 3283 bp, Homo sapiens
  source 1..3283: mol_type = unassigned DNA
acgacgacaaaatctacttcttctttcgtgagacggcggtagaggcggcgccggcactgggacgcctgtccgtgtcccgcgttggccagatctgccgggtgaggagtccctgggccacacccggcgaccctgcccctacccctttgcctgccctggtctcgccctcatcccctttgatcgtcccggcagaacgacgtgggcggccagcgcagcctggtcaacaagtggacgacgttcctgaaggcgcggctggtgtgctcggtgcccggcgtcgagggcgacacccacttcgatcagctccgtgagtgcgggagtgggtatggggttggggaggggggcagcggcgcagactccgggagcccccgccgcagcggggctgtgcgccctaccccagctaggccccttccccgcagaggatgtgtttctgttgtcctcgcgggaccaccggaccccgctgctctatgccgtcttctccacgtccagcagcatcttccagggctctgcggtgtgcgtgtacagcatgaacgacgtgcgccgggccttcttgggaccctttgcacacaaggaggggcccatgcaccagtgggtgtcataccagggtcgcgtcccctacccgcggccaggcatggttcgtagcccagggacttctgctacaacccacttcaaagcctcaagggtttgagaacttggcctggggtcttcttggtgaatgtggtttcttcctttagttatgggtgggaaaacgtttccatcataagacaaggcttgtttcccgcctctgacttcctagggcaaggctgatctcctctctaattctcagggcagggttctgtccccatccccctccatgttcccagaggctgggcatggagggctgcctatcaagcccccatatctatatccctgctgtgcctccctttcccccacccccagtgccccagcaagacctttggcaccttcagttccaccaaggacttcccagacgatgtcatccagtttgcgcggaaccaccccctcatgtacaactctgtcctgcccactggggggcgccctcttttcctacaagttggagccaattacaccttcactcaaattgccgcggaccgggttgcagccgctgacggacactatgacgtcctcttcattggcacagacgttggcacggtgctgaaggtgatctcggtccccaagggcagtaggcccagcgcagaggggctgctcctggaggagctgcacgtgtttgaggtgaggcctcacccccagtcgcccgggacccccccaccccactaagccctgaccccgtcgcccctcctccctctcaggactcggccgctgtcaccagcatgcaaatttcttccaagagggtgagtgaccaggatgggggtcggggtgggatggactgagcttgtgcctggcgcgtcccaagcctctggccccttttggtagtttgcagtcccgggtttgagtacaggctctggctttgttagactgtgtgacctgaggcgtaagacctcagtgttcccatctgtcgagtggaagaagggatccctgaccgatgggaggcaggcgtggggtcgccctcggtcagcccagagcccctcgtgccccctagcaccagctgtacgtagcctcgcggagcgcggtggcccagatcgcgttgcaccgctgcgctgcccacggccgcgtctgcaccgaatgctgtctggcgcgtgacccctactgcgcctgggacggggtcgcgtgcacgcgcttccagcccagtgccaagaggcggttccggcggcaagacgtaaggaatggcgaccccagcacgttgtgctccggagactcgtctcgtcccgcgctgctggaacacaaggtgttcggcgtggagggcagcagcgcctttctggagtgtgagccccgctcgctgcaggcgcgcgtggagtggactttccagcgcgcaggggtgacagcccacacccaggtgagccttactccgccctccccgccaggctcctgtcccaccccctgcatccaggagaggccccgccctacccaacgaagccccgtccaaccagacccactccccgccctgtccagtttggtccctcacctgcactccacaagctgctgaggccccattgcgtccaacggggctcccgacccgcctcccctgaatcaaggagaagacccgccctcgaccctcccattaaggtccctgaccaccccccaccaagttcatgtaaaccccgcctctttcggattctcccttgaagaccaccagctcccaaacactcagccttaaaatgtgcgcctgcgggcacccctttcccgctccacctcggctcccaatgactctttgcttcttccgtcgcgtgctagggcccggaagccctgttcccggcccgacacccccgcctcacgctgccctctgcccgcaggtgctggcagaggagcgcaccgagcgcaccgcccggggactactgctgcgcaggctgcggcgccgggactcgggcgtgtacttgtgcgccgccgtcgagcagggctttacgcaaccgctgcgtcgcctgtcgctgcacgtgttgagtgctacgcaggccgaacgactggcgcgggccgaggaggctgcgcccgccgcgccgccgggccccaaactctggtaccgggactttctgcagctggtggagccgggcggaggtggcagcgcgaactccctgcgcatgtgccgcccgcagcctgcgctgcagtcactgcccctggagtcgcggagaaagggccgtaaccggaggacccacgcccctgagcctcgcgctgagcgggggccgcgcagcgcaacgcactggtgaccagactgtccccacgccgggaaccaagcaggagacgacaggcgagagaggagccagacagaccctgaaaagaaggacgggttggggccgggcacattgggggtcaccggccgatggagacaccaaccgacaggccctggctgagggcagctgcgcgggcttatttattaacaggataacccttgaatgtagcagccccgggagggcggcacaggtcgggcgcaggattcagccggagggaagggacggggaagccgagctccagagcaacgaccagggccgaggaggtgcctggagtgcccaccctgggagacagaccccacctccttgggtagtgagcagtgagcagaaagctgtgaacaggctgggctgctggaggtggggcgaggcaggccgactgtactaaagtaacgcaataaacgcattatcagccaaagctggaatggccccagcag

SEQ ID NO: 18596 - DNA, 1088 bp, Homo sapiens
  source 1..1088: mol_type = unassigned DNA
tgctgatggaagctctccctgttcagtcccatctccacatcctttcctgggctgtgtctccaccctgtggatgctgcccaacccacactcttccagtccacactcttcacaacccaaacatgctgagggtagacgcctcaaaggcgaggagacactagccccagctgtccgggagcaccaatggtcattaccccttctcatccctgcagacgttggcacggtgctgaaggtgatctcggtccccaagggcagtaggcccagcgcagaggggctgctcctggaggagctgcacgtgtttgaggactcggccgctgtcaccagcatgcaaatttcttccaagagggtgagtgaccaggatgggggtcggggtgggatggactgagcttgtgcctggcgcgtcccaagcctctggccccttttggtagtttgcagtcccgggtttgagtacaggctctggctttgttagactgtgtgacctgaggcgtaagacctcagtgttcccatctgtcgagtggaagaagggatccctgaccgatgggaggcaggcgtggggtcgccctcggtcagcccagagcccctcgtgccccctagcaccagctgtacgtagcctcgcggagcgcggtggcccagatcgcgttgcaccgctgcgctgcccacggccgcgtctgcaccgaatgctgtctggcgcgtgacccctactgcgcctgggacggggtcgcgtgcacgcgcttccagcccagtgccaagaggcggttccggcggcaagacgtaaggaatggcgaccccagcacgttgtgctccggagactcgtctcgtcccgcgctgctggaacacaaggtgttcggcgtggagggcagcagcgcctttctggagtgtgagccccgctcgctgcaggcgcgcgtggagtggactttccagcgcgcaggggtgacagcccacacccaggtgctggcagaggagcgcaccgagcgcaccgcccggggactactgctgcgcaggctgcggcgccgggactcgggcgtgtacttgtgcgccgccgtcgagcagggctttacgcaaccgctgcgtcgcctgtcgctgcacgtgtt

SEQ ID NO: 18597 - DNA, 2925 bp, Homo sapiens
  source 1..2925: mol_type = unassigned DNA
gggcgggggctgcttcttaaaggagccgtcagagggtccccagcggccccagggtgggaaggggccagagtggagagatgctgctgcggaagtcctcggtggagtgtgagaaggcagccagtgttggcctggaagacctctagaacctgagaagaggcagcgatcctggggcagagtccagggcagctcaaggctcctccacacacacacccgctgaaccctgagcaccctgagctgctgagatggggcgggccggggctgccgccgtgatcccgggcctggccctgctctgggcagtggggctggggagtgccgcccccagccccccacgccttcggctctccttccaagagctccaggcctggcatggtctccagactttcagcctggagcgaacctgctgctaccaggccttgctggtggatgaggagcgtggacgcctgtttgtgggtgccgagaaccatgtggcctccctcaacctggacaacatcagcaagcgggccaagaagctggcctggccggcccctgtggaatggcgagaggagtgcaactgggcagggaaggacattggtactgagtgcatgaacttcgtgaagttgctgcatgcctacaaccgcacccatttgctggcctgtggcacgggagccttccacccaacctgtgcctttgtggaagtgggccaccgggcagaggagcccgtcctccggctggacccaggaaggatagaggatggcaaggggaagagtccttatgaccccaggcatcgggctgcctccgtgctggtgggggaggagctatactcaggggtggcagcagacctcatgggacgagactttaccatctttcgcagcctagggcaacgtccaagtctccgaacagagccacacgactcccgctggctcaatgagcccaagtttgtcaaggtattttggatcccggagagcgagaacccagacgacgacaaaatctacttcttctttcgtgagacggcggtagaggcggcgccggcactgggacgcctgtccgtgtcccgcgttggccagatctgccggaacgacgtgggcggccagcgcagcctggtcaacaagtggacgacgttcctgaaggcgcggctggtgtgctcggtgcccggcgtcgagggcgacacccacttcgatcagctccaggatgtgtttctgttgtcctcgcgggaccaccggaccccgctgctctatgccgtcttctccacgtccagcagcatcttccagggctctgcggtgtgcgtgtacagcatgaacgacgtgcgccgggccttcttgggaccctttgcacacaaggaggggcccatgcaccagtgggtgtcataccagggtcgcgtcccctacccgcggccaggcatgtgccccagcaagacctttggcaccttcagttccaccaaggacttcccagacgatgtcatccagtttgcgcggaaccaccccctcatgtacaactctgtcctgcccactggggggcgccctcttttcctacaagttggagccaattacaccttcactcaaattgccgcggaccgggttgcagccgctgacggacactatgacgtcctcttcattggcacagacgttggcacggtgctgaaggtgatctcggtccccaagggcagtaggcccagcgcagaggggctgctcctggaggagctgcacgtgtttgaggactcggccgctgtcaccagcatgcaaatttcttccaagaggcaccagctgtacgtagcctcgcggagcgcggtggcccagatcgcgttgcaccgctgcgctgcccacggccgcgtctgcaccgaatgctgtctggcgcgtgacccctactgcgcctgggacggggtcgcgtgcacgcgcttccagcccagtgccaagaggcggttccggcggcaagacgtaaggaatggcgaccccagcacgttgtgctccggagactcgtctcgtcccgcgctgctggaacacaaggtgttcggcgtggagggcagcagcgcctttctggagtgtgagccccgctcgctgcaggcgcgcgtggagtggactttccagcgcgcaggggtgacagcccacacccaggtgctggcagaggagcgcaccgagcgcaccgcccggggactactgctgcgcaggctgcggcgccgggactcgggcgtgtacttgtgcgccgccgtcgagcagggctttacgcaaccgctgcgtcgcctgtcgctgcacgtgttgagtgctacgcaggccgaacgactggcgcgggccgaggaggctgcgcccgccgcgccgccgggccccaaactctggtaccgggactttctgcagctggtggagccgggcggaggtggcagcgcgaactccctgcgcatgtgccgcccgcagcctgcgctgcagtcactgcccctggagtcgcggagaaagggccgtaaccggaggacccacgcccctgagcctcgcgctgagcgggggccgcgcagcgcaacgcactggtgaccagactgtccccacgccgggaaccaagcaggagacgacaggcgagagaggagccagacagaccctgaaaagaaggacgggttggggccgggcacattgggggtcaccggccgatggagacaccaaccgacaggccctggctgagggcagctgcgcgggcttatttattaacaggataacccttgaatgtagcagccccgggagggcggcacaggtcgggcgcaggattcagccggagggaagggacggggaagccgagctccagagcaacgaccagggccgaggaggtgcctggagtgcccaccctgggagacagaccccacctccttgggtagtgagcagtgagcagaaagctgtgaacaggctgggctgctggaggtggggcgaggcaggccgactgtactaaagtaacgcaataaacgcattatcagcc

SEQ ID NO: 18598 - DNA, 5174 bp, Homo sapiens
  source 1..5174: mol_type = unassigned DNA
ggactgcgaaaggagcagggttgcggagctagggctccagcctgcggccgcgcattcttgcgtctggccagccgcgagctctaagggtcggccccgcccggtccgcccccgcggctccctgccaggctctcgcgggcgcgctcggggtggggcctcgcggctggcggagatgcggccggggctgcgcggtggtgatgcgagcctgcagggcggcgcgccggggcagccggagccgcgcgccgcggcgctgtaatcggacaccaagagcgctcgcccccggcctccggccactttccattcactccgaggtgcttgattgagcgacgcggagaagagctccgggtgccgcggcactgcagcgctgagattcctttacaaagaaactcagaggaccgggaagaaagaatttcacctttgcgacgtgctagaaaataaggtcgtctgggaaaaggactggagacacaagcgcatccaaccccggtagcaaactgatgacttttccgtgctgatttctttcaacctcggtattttcccttggatattaacttgcatatctgaagaaatggcattccggacaatttgcgtgttggttggagtatttatttgttctatctgtgtgaaaggatcttcccagccccaagcaagagtttatttaacatttgatgaacttcgagaaaccaagacctctgaatacttcagcctttcccaccatcctttagactacaggattttattaatggatgaagatcaggaccggatatatgtgggaagcaaagatcacattctttccctgaatattaacaatataagtcaagaagctttgagtgttttctggccagcatctacaatcaaagttgaagaatgcaaaatggctggcaaagatcccacacacggctgtgggaactttgtccgtgtaattcagactttcaatcgcacacatttgtatgtctgtgggagtggcgctttcagtcctgtctgtacttacttgaacagagggaggagatcagaggaccaagttttcatgattgactccaagtgtgaatctggaaaaggacgctgctctttcaaccccaacgtgaacacggtgtctgttatgatcaatgaggagcttttctctggaatgtatatagatttcatggggacagatgctgctatttttcgaagtttaaccaagaggaatgcggtcagaactgatcaacataattccaaatggctaagtgaacctatgtttgtagatgcacatgtcatcccagatggtactgatccaaatgatgctaaggtgtacttcttcttcaaagaaaaactgactgacaataacaggagcacgaaacagattcattccatgattgctcgaatatgtcctaatgacactggtggactgcgtagccttgtcaacaagtggaccactttcttaaaggcgaggctggtgtgctcggtaacagatgaagacggcccagaaacacactttgatgaattagaggatgtgtttctgctggaaactgataacccgaggacaacactagtgtatggcatttttacaacatcaagctcagttttcaaaggatcagccgtgtgtgtgtatcatttatctgatatacagactgtgtttaatgggccttttgcccacaaagaagggcccaatcatcagctgatttcctatcagggcagaattccatatcctcgccctggaacttgtccaggaggagcatttacacccaatatgcgaaccaccaaggagttcccagatgatgttgtcacttttattcggaaccatcctctcatgtacaattccatctacccaatccacaaaaggcctttgattgttcgtattggcactgactacaagtatacaaagatagctgtggatcgagtgaacgctgctgatgggagataccatgtcctgtttctcggaacagatcggggtactgtgcaaaaagtggttgttcttcctactaacaactctgtcagtggcgagctcattctggaggagctggaagtctttaagaatcatgctcctataacaacaatgaaaatttcatctaaaaagcaacagttgtatgtgagttccaatgaaggggtttcccaggtatctctgcaccgctgccacatctatggtacagcctgtgctgactgctgcctggcgcgggacccttattgcgcctgggatggccattcctgttccagattctacccaactgggaaacggaggagccgaagacaagatgtgagacatggaaacccactgactcaatgcagaggatttaatctaaaagcatacagaaatgcagctgaaattgtccagtatggagtaaaaaataacaccacttttctggagtgtgcccccaagtctccgcaggcatctatcaagtggctgttacagaaagacaaagacaggaggaaagaggttaagctgaatgaacgaataatagccacttcacagggactcctgatccgctctgttcagggttctgaccaaggactttatcactgcattgctacagaaaatagtttcaagcagaccatagccaagatcaacttcaaagttttagattcagaaatggtggctgttgtgacggacaaatggtccccatggacctgggccagctctgtgagggctttacccttccacccgaaggacatcatgggggcattcagccactcagaaatgcagatgattaaccaatattgcaaagacactcggcagcaacatcagcagggagatgaatcacagaaaatgagaggggactatggcaagttaaaggccctcatcaatagtcggaaaagtagaaacaggaggaatcagttgccagagtcataatattttcttatgtgggtcttatgcttccattaacaaatgctctgtcttcaatgatcaaattttgagcaaagaaacttgtgctttaccaaggggaattactgaaaaaggtgattactcctgaagtgagttttacacgaactgaaatgagcatgcattttcttgtatgatagtgactagcactagacatgtcatggtcctcatggtgcatataaatatatttaacttaacccagattttatttatatctttattcaccttttcttcaaaatcgatatggtggctgcaaaactagaattgttgcatccctcaattgaatgagggccatatccctgtggtattcctttcctgctttggggctttagaattctaattgtcagtgattttgtatatgaaaacaagttccaaatccacagcttttacgtagtaaaagtcataaatgcatatgacagaatggctatcaaaagaaatagaaaaggaagacagcatttaaagttgtataaaaacatgagttattcataaagagaaaatgatgagtttttatggttccaatgaaatatgttggggtttttttaagattgtaaaaataatcagttactggtatctgtcactgacctttgtttccttattcaggaagataaaaatcagtaacctaccccatgaagatatttggtgggagttatatcagtgaagcagtttggtttatattcttatgttatcaccttccaaacaaaagcacttactttttttggaagttatttattttagactcaaagaatataatctggcactactcagttattactgtttgttctcttattccctagtctgtgtggcaaattaaacaatataagaaggaaaaatttgaagtattagacttctaaataaggtgtgaaatcatcaaaaagaaaaatcaaagtagaaactactaattttttaagaggaatttataacaaatatggctagttttcaacttcagtactcaaattcaatgattcttccttttattaaaaccagtctcagatatcatactgatttttaagtcaacactatatattttatgatcttttcagtgtgatggcaaggtgcttgttatgtctagaaagtaagaaaacaatatgaggagacattctgtctttcaaaaggtaatggtacatacgttcactggtctctaagtgtaaaagtagtaaattttgtgatgaataaaataattatctcctaattgtatgttagaataattttattagaataatttcatactgaaattattttctccaaataaaaattagatggaaaaatgtgaaaaaaattattcatgctctcatatatattttaaaaacactacttttgcttttttatttaccttttaagacattttcatgcttccaggtaaaaacagatattgtaccatgtacctaatccaaatatcatataaacattttatttatagttaataatctatgatgaaggtaattaaagtagattatggcctttttaagtattgcagtctaaaacttcaaaaactaaaatcattgtcaaaattaatatgattattaatcagaatatcagaatatgattcactatttaaactatgataaattatgataatatatgaggaggcctcgctatagcaaaaatagttaaaatgctgacataacaccaaacttcattttttaaaaaatctgttgttccaaatgtgtataattttaaagtaatttctaaagcagtttattataatggtttgcctgcttaaaaggtataattaaacttcttttctcttctacattgacacacagaaatgtgtcaatgtaaagccaaaaccatcttctgtgtttatggccaatctattctcaaagttaaaagtaaaattgtttcagagtcacagttccctttatttcacataagcccaaactgatagacagtaacggtgtttagttttatactatatttgtgctatttaattctttctattttcacaattattaaattgtgtacactttcattacttttaaaaatgtagaaattcttcatgaacataactctgctgaatgtaaaagaaaattttttttcaaaaatgctgttaatgtatactactggtggttgattggttttattttatgtagcttgacaattcagtgacttaatatctattccatttgtattgtacataaaattttctagaaatacacttttttccaaagtgtaagtttgtgaatagattttagcatgatgaaactgtcataatggtgaatgttcaatctgtgtaagaaaacaaactaaatgtagttgtcacactaaaatttaattggatattgatgaaatcattggcctggcaaaataaaacatgttgaattcccca

SEQ ID NO: 18599 - DNA, 2415 bp, Homo sapiens
  source 1..2415: mol_type = unassigned DNA
acagttcaggaaacttaaaaggatggcatatggaagttgagtgaaggagaaagagagggaagtagaaaagaggagaaaaatgttaagcaaaaaaggtattttcccttggatattaacttgcatatctgaagaaatggcattccggacaatttgcgtgttggttggagtatttatttgttctatctgtgtgaaaggatcttcccagccccaagcaagagtttatttaacatttgatgaacttcgagaaaccaagacctctgaatacttcagcctttcccaccatcctttagactacaggattttattaatggatgaagatcaggaccggatatatgtgggaagcaaagatcacattctttccctgaatattaacaatataagtcaagaagctttgagtgttttctggccagcatctacaatcaaagttgaagaatgcaaaatggctggcaaagatcccacacacggctgtgggaactttgtccgtgtaattcagactttcaatcgcacacatttgtatgtctgtgggagtggcgctttcagtcctgtctgtacttacttgaacagagggaggagatcagaggaccaagttttcatgattgactccaagtgtgaatctggaaaaggacgctgctctttcaaccccaacgtgaacacggtgtctgttatgatcaatgaggagcttttctctggaatgtatatagatttcatggggacagatgctgctatttttcgaagtttaaccaagaggaatgcggtcagaactgatcaacataattccaaatggctaagtgaacctatgtttgtagatgcacatgtcatcccagatggtactgatccaaatgatgctaaggtgtacttcttcttcaaagaaaaactgactgacaataacaggagcacgaaacagattcattccatgattgctcgaatatgtcctaatgacactggtggactgcgtagccttgtcaacaagtggaccactttcttaaaggcgaggctggtgtgctcggtaacagatgaagacggcccagaaacacactttgatgaattagaggatgtgtttctgctggaaactgataacccgaggacaacactagtgtatggcatttttacaacatcaagctcagttttcaaaggatcagccgtgtgtgtgtatcatttatctgatatacagactgtgtttaatgggccttttgcccacaaagaagggcccaatcatcagctgatttcctatcagggcagaattccatatcctcgccctggaacttgtccaggaggagcatttacacccaatatgcgaaccaccaaggagttcccagatgatgttgtcacttttattcggaaccatcctctcatgtacaattccatctacccaatccacaaaaggcctttgattgttcgtattggcactgactacaagtatacaaagatagctgtggatcgagtgaacgctgctgatgggagataccatgtcctgtttctcggaacagatcggggtactgtgcaaaaagtggttgttcttcctactaacaactctgtcagtggcgagctcattctggaggagctggaagtctttaagaatcatgctcctataacaacaatgaaaatttcatctaaaaagcaacagttgtatgtgagttccaatgaaggggtttcccaggtatctctgcaccgctgccacatctatggtacagcctgtgctgactgctgcctggcgcgggacccttattgcgcctgggatggccattcctgttccagattctacccaactgggaaacggaggagccgaagacaagatgtgagacatggaaacccactgactcaatgcagaggatttaatctaaaagcatacagaaatgcagctgaaattgtccagtatggagtaaaaaataacaccacttttctggagtgtgcccccaagtctccgcaggcatctatcaagtggctgttacagaaagacaaagacaggaggaaagaggttaagctgaatgaacgaataatagccacttcacagggactcctgatccgctctgttcagggttctgaccaaggactttatcactgcattgctacagaaaatagtttcaagcagaccatagccaagatcaacttcaaagttttagattcagaaatggtggctgttgtgacggacaaatggtccccatggacctgggccagctctgtgagggctttacccttccacccgaaggacatcatgggggcattcagccactcagaaatgcagatgattaaccaatattgcaaagacactcggcagcaacatcagcagggagatgaatcacagaaaatgagaggggactatggcaagttaaaggccctcatcaatagtcggaaaagtagaaacaggaggaatcagttgccagagtcataatattttcttatgtgggtcttatgctt

SEQ ID NO: 18600 - DNA, 1318 bp, Homo sapiens
  source 1..1318: mol_type = unassigned DNA
gatgcggccggggctgcgcggtggtgatgcgagcctgcagggcggcgcgccggggcagccggagccgcgcgccgcggcgctgtaatcggacaccaagagcgctcgcccccggcctccggccactttccattcactccgaggtgcttgattgagcgacgcggagaagagctccgggtgccgcggcactgcagcgctgagattcctttacaaagaaactcagaggaccgggaagaaagaatttcacctttgcgacgtgctagaaaataaggtcgtctgggaaaaggactggagacacaagcgcatccaaccccggtagcaaactgatgacttttccgtgctgatttctttcaacctcggtattttcccttggatattaacttgcatatctgaagaaatggcattccggacaatttgcgtgttggttggagtatttatttgttctatctgtgtgaaaggatcttcccagccccaagcaagagtttatttaacatttgatggaccaagttttcatgattgactccaagtgtgaatctggaaaaggacgctgctctttcaaccccaacgtgaacacggtgtctgttatgatcaatgaggagcttttctctggaatgtatatagatttcatggggacagatgctgctatttttcgaagtttaaccaagaggaatgcggtcagaactgatcaacataattccaaatggctaagtgaacctatgtttgtagatgcacatgtcatcccagatggtactgatccaaatgatgctaaggtgtacttcttcttcaaagaaaaactgactgacaataacaggagcacgaaacagattcattccatgattgctcgaatatgtcctaatgacactggtggactgcgtagccttgtcaacaagtggaccactttcttaaaggcgaggctggtgtgctcggtaacagatgaagacggcccagaaacacactttgatgaattagaggatgtgtttctgctggaaactgataacccgaggacaacactagtgtatggcatttttacaacatcaagctcagttttcaaaggatcagccgtgtgtgtgtatcatttatctgatatacagactgtgtttaatgggccttttgcccacaaagaagggcccaatcatcagctgatttcctatcagggcagaattccatatcctcgccctggaactaatacttgtgtctgaagataacagtaattttttattcttgtgtcccctactgggcacatcaaagtgctttttggataaaatatgctcaagtaatggatacgtatattaacatataagtatattctgaaaactgacct

SEQ ID NO: 18601 - DNA, 383 bp, Homo sapiens
  source 1..383: mol_type = unassigned DNA
agctcagttttcaaaggatcagccgtgtgtgtgtatcatttatctgatatacagactgtgtttaatgggccttttgcccacaaagaagggcccaatcatcagctgatttcctatcagggcagaattccatatcctcgccctggaactctctaaagaagatggacagaacattaatcttgtataaaacagggaaaagcatcagcagatacagccgttttaagattggggaatcctggtgtggtggtgggcgcctgtagtcccagctacttgggaggctgaggcaggagaatggcgtgaacccgggaggggagcttgcagtgagctgagatcacaccactgcactccagcctgggcgacaaagcgagactcttgtctccaaaaac

SEQ ID NO: 18602 - DNA, 387 bp, Homo sapiens
  source 1..387: mol_type = unassigned DNA
gggaactttgtccgtgtaattcagactttcaatcgcacacatttgtatgtctgtgggagtggcgctttcagtcctgtctgtacttacttgaacagagggaggagatcagaggggaatatttgatgagcctacttcgtgtttggagcatcacatgcttttgttataccccatttctcttctattatttgcgagactgattcagagctttctgagatttcaacagtactcactcacctaaagagcctggaatccttgctacatgaagacctaaccacggttcttctcctgtgtctactatctttactccttgtcttctgttcctggaaaaagataaagcaatacaagtgaatcatgactttaaatgaatgaataaaacatcaacaaaaa

SEQ ID NO: 18603 - DNA, 577 bp, Homo sapiens
  source 1..577: mol_type = unassigned DNA
tttcactcctcatcactaggtgggatgtaaatcaaattgccctgtagactatcttcgtttcacctgccattgtatcaccagtattctttgcaattggttgtatatgtacttttgggagaaacatataaggtattttcccttggatattaacttgcatatctgaagaaatggcattccggacaatttgcgtgttggttggagtatttatttgttctatctgtgtgaaaggatcttcccagccccaagcaagagtttatttaacatttgatgagcctaccttgtacaatgctgtgtgctacatctgtgggtacaaaaagaagtgtggcgtgaatttggtcctcagcaaccacctactctaaacttcgagaaaccaagacctctgaatacttcagcctttcccaccatcctttagactacaggattttattaatggatgaagatcaggaccggatatatgtgggaagcaaagatcacattctttccctgaatattaacaatataagtcaagaagctttgagtgttttctggccagcatctacaatcaaagttgaagaatgcaaaatggctggcaaagatc

SEQ ID NO: 18604 - DNA, 785 bp, Homo sapiens
  source 1..785: mol_type = unassigned DNA
gatgcggccggggctgcgcggtggtgatgcgagcctgcagggcggcgcgccggggcagccggagccgcgcgccgcggcgctgtaatcggacaccaagagcgctcgcccccggcctccggccactttccattcactccgaggtgcttgattgagcgacgcggagaagagctccgggtgccgcggcactgcagcgctgagattcctttacaaagaaactcagaggaccgggaagaaagaatttcacctttgcgacgtgctagaaaataaggtcgtctgggaaaaggactggagacacaagcgcatccaaccccggtagcaaactgatgacttttccgtgctgatttctttcaacctcggtattttcccttggatattaacttgcatatctgaagaaatggcattccggacaatttgcgtgttggttggagtatttatttgttctatctgtgtgaaaggatcttcccagccccaagcaagagtttatttaacatttgatgagcctaccttgtacaatgctgtgtgctacatctgtgggtacaaaaagaagtgtggcgtgaatttggtcctcagcaaccacctactctaaacttcgagaaaccaagacctctgaatacttcagcctttcccaccatcctttagactacaggattttattaatggatgaagatcaggaccggatatatgtgggaagcaaagatcacattctttccctgaatattaacaatataagtcaagaagctttgagtgttttctggccagcatctacaatcaaagttgaagaatgc

SEQ ID NO: 18605 - DNA, 582 bp, Homo sapiens
  source 1..582: mol_type = unassigned DNA
atgcggccggggctgcgcggtggtgatgcgagcctgcagggcggcgcgccggggcagccggagccgcgcgccgcggcgctgtaatcggacaccaagagcgctcgcccccggcctccggccactttccattcactccgaggtgcttgattgagcgacgcggagaagagctccgggtgccgcggcactgcagcgctgagattcctttacaaagaaactcagaggaccgggaagaaagaatttcacctttgcgacgtgctagaaaataaggtcgtctgggaaaaggactggagacacaagcgcatccaaccccggtagcaaactgatgacttttccgtgctgatttctttcaacctcggtattttcccttggatattaacttgcatatctgaagaaatggcattccggacaatttgcgtgttggttggagtatttatttgttctatctgtgtgaaaggatcttcccagccccaagcaagagtttatttaacatttgatgtaacaaaacgaagacacagaaacacttcttcaccactgagcattcgagagtgatctataccattctttcatcaaatttgctctgtg

SEQ ID NO: 18606 - DNA, 542 bp, Homo sapiens
  source 1..542: mol_type = unassigned DNA
gatgcggccggggctgcgcggtggtgatgcgagcctgcagggcggcgcgccggggcagccggagccgcgcgccgcggcgctgtaatcggacaccaagagcgctcgcccccggcctccggccactttccattcactccgaggtgcttgattgagcgacgcggagaagagctccgggtgccgcggcactgcagcgctgagattcctttacaaagaaactcagaggaccgggaagaaagaatttcacctttgcgacgtgctagaaaataaggtcgtctgggaaaaggactggagacacaagcgcatccaaccccggtagcaaactgatgacttttccgtgctgatttctttcaacctcggtattttcccttggatattaacttgcatatctgaagaaatggcattccggacaatttgcgtgttggttggagtatttatttgttctatctgtgtgaaaggatcttcccagccccaagcaagagtttatttaacatttgatgtgtctcacgctgtcaccaggttggagtgcagtgacacgatctcgg

SEQ ID NO: 18607 - DNA, 6265 bp, Homo sapiens
  source 1..6265: mol_type = unassigned DNA
ttagattaaattaacaccatttgaaagagaacattgttttcatcatgaatgctaataaagatgaaagacttaaagccagaagccaagattttcacctttttcctgctttgatgatgctaagcatgaccatgttgtttcttccagtcactggcactttgaagcaaaatattccaagactcaagctaacctacaaagacttgctgctttcaaatagctgtattccctttttgggttcatcagaaggactggattttcaaactcttctcttagatgaggaaagaggcaggctgctcttgggagccaaagaccacatctttctactcagtctggttgacttaaacaaaaattttaagaagatttattggcctgctgcaaaggaacgggtggaattatgtaaattagctgggaaagatgccaatacagaatgtgcaaatttcatcagagtacttcagccctataacaaaactcacatatatgtgtgtggaactggagcatttcatccaatatgtgggtatattgatcttggagtctacaaggaggatattatattcaaactagacacacataatttggagtctggcagactgaaatgtcctttcgatcctcagcagccttttgcttcagtaatgacagatgagtacctctactctggaacagcttctgatttccttggcaaagatactgcattcactcgatcccttgggcctactcatgaccaccactacatcagaactgacatttcagagcactactggctcaatggagcaaaatttattggaactttcttcataccagacacctacaatccagatgatgataaaatatatttcttctttcgtgaatcatctcaagaaggcagtacctccgataaaaccatcctttctcgagttggaagagtttgtaagaatgatgtaggaggacaacgcagcctgataaacaagtggacgacttttcttaaggccagactgatttgctcaattcctggaagtgatggggcagatacttactttgatgagcttcaagatatttatttactccccacaagagatgaaagaaatcctgtagtatatggagtctttactacaaccagctccatcttcaaaggctctgctgtttgtgtgtatagcatggctgacatcagagcagtttttaatggtccatatgctcataaggaaagtgcagaccatcgttgggtgcagtatgatgggagaattccttatccacggcctggtacatgtccaagcaaaacctatgacccactgattaagtccacccgagattttccagatgatgtcatcagtttcataaagcggcactctgtgatgtataagtccgtatacccagttgcaggaggaccaacgttcaagagaatcaatgtggattacagactgacacagatagtggtggatcatgtcattgcagaagatggccagtacgatgtaatgtttcttggaacagacattggaactgtcctcaaagttgtcagcatttcaaaggaaaagtggaatatggaagaggtagtgctggaggagttgcagatattcaagcactcatcaatcatcttgaacatggaattgtctctgaagcagcaacaattgtacattggttcccgagatggattggttcagctctccttgcacagatgcgacacttatgggaaagcttgcgcagactgttgtcttgccagagacccctactgtgcctgggatggaaatgcatgctctcgatatgctcctacttctaaaaggagagctagacgccaagatgtaaaatatggcgacccaatcacccagtgctgggacatcgaagacagcattagtcatgaaactgctgatgaaaaggtgatttttggcattgaatttaactcaacctttctggaatgtatacctaaatcccaacaagcaactattaaatggtatatccagaggtcaggggatgagcatcgagaggagttgaagcccgatgaaagaatcatcaaaacggaatatgggctactgattcgaagtttgcagaagaaggattctgggatgtattactgcaaagcccaggagcacactttcatccacaccatagtgaagctgactttgaatgtcattgagaatgaacagatggaaaatacccagagggcagagcatgaggaggggaaggtcaaggatctattggctgagtcacggttgagatacaaagactacatccaaatccttagcagcccaaacttcagcctcgaccagtactgcgaacagatgtggcacagggagaagcggagacagagaaacaaggggggcccaaagtggaagcacatgcaggaaatgaagaagaaacgaaatcgaagacatcacagagacctggatgagctccctagagctgtagccacgtagttttctacttaatttaaagaaaagaattccttacctataaaaacattgccttctgttttgtatatcccttatagtaattcataaatgcttcccatggagttttgctaaggcacaagacaataatctgaataagacaatatgtgatgaatataagaaagggcaaaaaattcatttgaaccagttttccaagaacaaatcttgcacaagcaaagtataagaattatcctaaaaatagggggtttacagttgtaaatgttttatgttttgagttttggaatttattgtcatgtaaatagttgagctaagcaagccccgaatttgatagtgtataaggtgctttattccctcgaatgtccattaagcatggaatttaccatgcagttgtgctatgttcttatgaacagatatatcattcctattgagaaccagctaccttgtggtagggaataagaggtcagacacaaattaagacaactcccattatcaacaggaactttctcagtgagccattcactcctggagaatggtataggaatttggagaggtgcattatttctttctggccactggggttaaatttagtgtactacaacattgatttactgaagggcactaatgtttcccccaggatttctattgactagtcaggagtaacaggttcacagagagaagttggtgcttagttatgtgttttttagagtatatactaagctctacagggacagaatgcttaataaatactttaataagatatgggaaaatattttaataaaacaaggaaaacataatgatgtataatgcatcctgatgggaaggcatgcagatgggatttgttagaagacagaaggaaagacagccataaattctggctttggggaaaactcatatccccatgaaaaggaagaacaatcacaaataaagtgagagtaatgtaatggagctcttttcactagggtataagtagctgccaatttgtaattcatctgttaaaaaaaatctagattataacaaactgctagcaaaatctgaggaaacataaattcttctgaagaatcataggaagagtagacattttatttataaccaatgatatttcagtatatattttctctcttttaaaaaatatttatcatactctgtatattatttctttttactgcctttattctctcctgtatattggattttgtgattatatttgagtgaataggagaaaacaatatataacacacagagaattaagaaaatgacatttctggggagtggggatatatatttgttgaataacagaacgagtgtaaaattttaacaacggaaagggttaaattaactctttgacatcttcactcaaccttttctcattgctgagttaatctgttgtaattgtagtattgtttttgtaatttaacaataaataagcctgctacatgtaaaaagaaccaaactcacaatattaacataaacatctttcatattttgttagtactttcaaatgttttcaatttgactttccctctgaatatgcatggtgtgtttcctgtctgtttaagcagaactcacctttccttcttgtaacacagaacccttagccttcttctgttttgccttttcacgccctttatagtgtgaaatgaaaaattagtcacttcctcacatggaaggcagcttttcagaaaataacagacattgctcgtttctcatgcattctacatatcttgaaagaaaagtctgtgagaaaaccctgtgattagagggcaacttaatgcaagatctgtggctctatgttgagagcattctctctctgttatttttattttatttgcattgcttacctatctcaaagtagtcaaactgatatatgagattgagtactcccttttgatattatactgatgaatatttgtaggtgtttcactataaggaacagctaaggaataattttaataaaagtgaaccagaacaaatcactcatttaaaaagtaattcagaagaacagtgtggcatgatcagacttctaattgaatagcgtaacaacagtgtttgtaattatagatttgcttggacaaaatattccaggaactcatagcgagctcaaagcaattaagtgggaacatttttaatttaaaaaaaatttccaaatatttgtgggtccgacagtaatgatcaaaatatgaatgactttggaaaatttacatgaagctcaagtgttaggattgacttatgaaaataaattttatttctatccaaatttgaatgtccaaaccattttttagttacttctttctaatcctagttattcagacaaaatttggaaacttattttatgaccacatctaatattctggctgctttggatacaatactcttgatttatgataattagttaaaatatattaaaaatattattagtaaaataaaatttcacacaataaaaaacaacatagagtacacatatttatatgtatttttaaagataaagaatatctaaaatgtgtttttttcttagctttttagttgtctagaacatttagagaaagagtatgaatatattaaatccacaaacacactatatacttcctcaccactgactattttatcaaatttgccttaaaataatgaaaaagaaaagtatagttaatggtttcaaatatgctaagaaattgactctgcggaggggatcttaaaatgcctgtttactcatgttttcgtatttttcttgtctctaatacttttgtctttgtctgccttgtgtgttcttttctgaatttcatttcagcaatttatgctgctaaatagaatcccgcatgtctgcattcatttacattcaacttattgtaaattttgagattttatttagaaatgaattgtctaattaatttatgtagagtccttttttccaaagagctcaaaacactacatccacattattgacttttggaaaccaaccaaattacttaagaaatggaaaagtagtcacagagaaatttagtaatttgcaaaagccacaacagtagtggaagaattaaaattcataaagtctcatcattctgttggctaaaataatgctctttacaatatgctggctacaaaatggtcttactcttgaattttgcttttggttcatattttggttcttcatattctagtatgttttgttcctgctgaattttacagactcagctaaacaataagttattagtagtcacttgttttcattatcataattgaatttccaagaacaacttgatatcattcagctgtccaaaaaataataagagcattcattaaatactgattttcttaaacttaaatgttgtatttcatatttatttatataatacaaatggaaatcaaaactgaaatagcctccctttagaatgtcacatttttcttagaaaacattttggaattggttaaccttattgggaatggataatttagaaacaaaccaaaaaaaaaaaaagatatttgaagtgtttttataggagatgtatttttatcatagtaaatgatcacaattttaaataattcatcttacaagtcaggtaaaataaaatcgattcccagattccatacattaggagtgcaaagacaggatcatacacatgacttatacctctcatttaaatattttatagtataaagtatttatggaaagggtttgagatagatgatttttgggaaagggcaaaatgtgtcagatgccctagttaatcatgtaatttaattctggtattgtgagtggttagcaatcaattttgaatttataattctgctattttaaaagaaatgtagtcttgtagtatgaaataattaaaaattgttaaatgtatattttggttgtattataataaaatgcaaacatgactgttctatgattataaaaa

SEQ ID NO: 18608 - DNA, 1503 bp, Homo sapiens
  source 1..1503: mol_type = unassigned DNA
aacaaaactacagcaagacacagaaaggtgtgagctctggaactacacagttcatccattctccatgcagtctttcattttgaaaggagccaccttctatagaagatatttatttactccccacaagagatgaaagaaatcctgtagtatatggagtctttactacaaccagctccatcttcaaaggctctgctgtttgtgtgtatagcatggctgacatcagagcagtttttaatggtccatatgctcataaggaaagtgcagaccatcgttgggtgcagtatgatgggagaattccttatccacggcctggtacatgtccaagcaaaacctatgacccactgattaagtccacccgagattttccagatgatgtcatcagtttcataaagcggcactctgtgatgtataagtccgtatacccagttgcaggaggaccaacgttcaagagaatcaatgtggattacagactgacacagatagtggtggatcatgtcattgcagaagatggccagtacgatgtaatgtttcttggaacagacattggaactgtcctcaaagttgtcagcatttcaaaggaaaagtggaatatggaagaggtagtgctggaggagttgcagatattcaagcactcatcaatcatcttgaacatggaattgtctctgaagcagcaacaattgtacattggttcccgagatggattggttcagctctccttgcacagatgcgacacttatgggaaagcttgcgcagactgttgtcttgccagagacccctactgtgcctgggatggaaatgcatgctctcgatatgctcctacttctaaaaggagagctagacgccaagatgtaaaatatggcgacccaatcacccagtgctgggacatcgaagacagcattagtcatgaaactgctgatgaaaaggtgatttttggcattgaatttaactcaacctttctggaatgtatacctaaatcccaacaagcaactattaaatggtatatccagaggtcaggggatgagcatcgagaggagttgaagcccgatgaaagaatcatcaaaacggaatatgggctactgattcgaagtttgcagaagaaggattctgggatgtattactgcaaagcccaggagcacactttcatccacaccatagtgaagctgactttgaatgtcattgagaatgaacagatggaaaatacccagagggcagagcatgaggaggggaaggtcaaggatctattggctgagtcacggttgagatacaaagactacatccaaatccttagcagcccaaacttcagcctcgaccagtactgcgaacagatgtggcacagggagaagcggagacagagaaacaaggggggcccaaagtggaagcacatgcaggaaatgaagaagaaacgaaatcgaagacatcacagagacctggatgagctccctagagctgtagccacgtagttttctacttaatttaaagaaaagaattccttacctataaaaa

SEQ ID NO: 18609 - DNA, 1257 bp, Homo sapiens
  source 1..1257: mol_type = unassigned DNA
cagtacctccgataaaaccatcctttctcgagttggaagagtttgtaagaatgatgtaggaggacaacgcagcctgataaacaagtggacgacttttcttaaggccagactgatttgctcaattcctggaagtgatggggcagatacttactttgatgagcttcgtaagttccttctttccttctttcttggaaaggccttactgcctaattaagtaacttggcatttatttccctttggctccaaatgcctgattaattttacctgagcaaaccttacaggagtggttcttactaaaattcacacgcaaagtacacggaagtgctctaggtctgggcacacgtcataatgcagtaactcttctctttgtaagagtcctcaaagtaagtgaaggaaacaaaactacagcaagacacagaaaggtgtgagctctggaactacacagttcatccattctccatgcagtctttcattttgaaaggagccaccttctataggtaggaaaatcttggattccttattccacgggtgccctctgctggcaagtacaggagatttggtgaacactgtccctccgacttgttaatgaaagaataatcagaagcagtagacagcttcttctatttcacttctcctcttcactccctcaaaaactccttccaagtcctacaatgatttttttcttttttgtttatgtataatgttagcatcattagcttttagcttcttgaacttgttcttatttttgccatgtaatgtaaaaatgataatctatatcatggaattatttcatcagtattgtgtattttccaacttaaagtatacattgagtaatcgtggatgacctctcctattgtatgtaagcacattcacatcttaatcttttaaagaatattatttgcacataacttactgtcaatacggcactaatttgggggtagctattttcttattgttaccaaataggtaaatgaggtcaggtgtggtggctcacacctgaaatcccagcactttgggaggccgaggtgtttggaccacttgaggtcaggagtttaagaccagcctggccaacatggcgaaaccctatctctactaaaaataaaaaaaaaaattagccgggctggtggtgggcacctgtaatcctagatactagggaggctgaggcaggagaattgcttgaacccaggagggagaggttgcagtgggcagagattgtgccactgcattccagcctgggtgacacagcaagactccatc

SEQ ID NO: 18610 - DNA, 1605 bp, Homo sapiens
  source 1..1605: mol_type = unassigned DNA
agcttcccggctctgccagggctgccggcggctccgcttgctcagccagggctgcggctcagaggaacgcgcgccggtgccccgggttgccgcgccgctggacctcagcctgcatcccgttcccctctccctgaaaaggcaccaggaaaagagagagggagagaagagttcacagcaggtctttacacttggactagaactgtaacatctgctgtcctggttgccaggcttttgaacatacactgttggttctcctggatcttcaccttaccaactgcagatcttgggactcatcagcctcaataattatattaaattaacaccatttgaaagagaacattgttttcatcatgaatgctaataaagatgaaagacttaaagccagaagccaagattttcacctttttcctgctttgatgatgctaagcatgaccatgttgtttcttccagtcactggcactttgaagcaaaatattccaagactcaagctaacctacaaagacttgctgctttcaaatagctgtattccctttttgggttcatcagaaggactggattttcaaactcttctcttagatgaggaaagaggcaggctgctcttgggagccaaagaccacatctttctactcagtctggttgacttaaacaaaaattttaagaagatttattggcctgctgcaaaggaacgggtggaattatgtaaattagctgggaaagatgccaatacagaatgtgcaaatttcatcagagtacttcagccctataacaaaactcacatatatgtgtgtggaactggagcatttcatccaatatgtgggtatattgatcttggagtctacaaggaggatattatattcaaactagacacacataatttggagtctggcagactgaaatgtcctttcgatcctcagcagccttttgcttcagtaatgacagatgagtacctctactctggaacagcttctgatttccttggcaaagatactgcattcactcgatcccttgggcctactcatgaccaccactacatcagaactgacatttcagagcactactggctcaatggagcaaaatttattggaactttcttcataccagacacctacaatccagatgatgataaaatatatttcttctttcgtgaatcatctcaagaaggcagtacctccgataaaaccatcctttctcgagttggaagagtttgtaaggagaatttgtgctttgaagattgatcttatttctgaacatagtcaaagtaatttggagctgtatttggagaaagttgcataaatgatttgaacaatgcaaattttggtcaagagatatcaatgaagagagacacaataaataaactgacttaaaagataattttactgggcaatattgatcaatgagagcctgaggcgaataagtgccttcatccacagaatatcttttaaacttaatatgtttataattatacatggtagagcacatttcctaatgaattatttttagtagtgttcctactttccagtcaaactacttactctatttttccaataaattgtttaaccttgaaggatttctaaagtccttgtcaagctctacagttctttcatt

SEQ ID NO: 18611 - DNA, 6476 bp, Homo sapiens
  source 1..6476: mol_type = unassigned DNA
cagtttggcaagtcagtgcaagaggctgacttctgagaggcttccaggagcccgaagagaggacctccacgggagaagggagtgcgtgtgctcggttttgtttttttctctcttttttttttttttttctgaatgaacagctttgcccaagtgactgaaaaatacagcttcttcctgaatctaccggcgtagttgctgaagagcgctctagacaggacatggctctgaagactcactctttggaatgtcctcttgctcccggcttataaacaactgtcccgaggaaagaaaggttttacatagccaaatacagcctgacaaatggcacttcggaactgtgctttctgatgacaacgcgttcgatttctgacaaagcctctcgcacgctgcccctggagggaagtcctaagtaaaactcagaccctccttaaagtgaggagcgagggcttggacggtgaacacggcagcatggcatccgcggggcacattatcaccttgctcctgtggggttacttactggagctttggacaggaggtcatacagctgatactacccacccccggttacgcctgtcacataaagagctcttgaatctgaacagaacatcaatatttcatagcccttttggatttcttgatctccatacaatgctgctggatgaatatcaagagaggctcttcgtgggaggcagggaccttgtatattccctcagcttggagagaatcagtgacggctataaagagatacactggccgagtacagctctaaaaatggaagaatgcataatgaagggaaaagatgcgggtgaatgtgcaaattatgttcgggttttgcatcactataacaggacacaccttctgacctgtggtactggagcttttgatccagtttgtgccttcatcagagttggatatcatttggaggatcctctgtttcacctggaatcacccagatctgagagaggaaggggcagatgtccttttgaccccagctcctccttcatctccactttaattggtagtgaattgtttgctggactctacagtgactactggagcagagacgctgcgatcttccgcagcatggggcgactggcccatatccgcactgagcatgacgatgagcgtctgttgaaagaaccaaaatttgtaggttcatacatgattcctgacaatgaagacagagatgacaacaaagtatatttcttttttactgagaaggcactggaggcagaaaacaatgctcacgcaatttacaccagggtcgggcgactctgtgtgaatgatgtaggagggcagagaatactggtgaataagtggagcactttcctaaaagcgagactcgtttgctcagtaccaggaatgaatggaattgacacatattttgatgaattagaggacgtttttttgctacctaccagagatcataagaatccagtgatatttggactctttaacactaccagtaatatttttcgagggcatgctatatgtgtctatcacatgtctagcattcgggcagccttcaacggaccatatgcacataaggaaggacctgaataccactggtcagtctatgaaggaaaagtcccttatccaaggcctggttcttgtgccagcaaagtaaatggagggagatacggaaccaccaaggactatcctgatgatgccatccgatttgcaagaagtcatccactaatgtaccaggccataaaacctgcccataaaaaaccaatattggtaaaaacagatggaaaatataacctgaaacaaatagcagtagatcgagtggaagctgaggatggccaatatgacgtcttgtttattgggacagataatggaattgtgctgaaagtaatcacaatttacaaccaagaaatggaatcaatggaagaagtaattctagaagaacttcagatattcaaggatccagttcctattatttctatggagatttcttcaaagcggcaacagctgtatattggatctgcttctgctgtggctcaagtcagattccatcactgtgacatgtatggaagtgcttgtgctgactgctgcctggctcgagacccttactgtgcctgggatggcatatcctgctcccggtattacccaacaggcacacatgcaaaaaggcgtttccggagacaagatgttcgacatggaaatgcagctcagcagtgctttggacaacagtttgttggggatgctttggataagactgaagaacatctggcttatggcatagagaacaacagtactttgctggaatgtaccccacgatctttacaagcgaaagttatctggtttgtacagaaaggacgtgagacaagaaaagaggaggtgaagacagatgacagagtggttaagatggaccttggtttactcttcctaaggttacacaaatcagatgctgggacctatttttgccagacagtagagcatagctttgtccatacggtccgtaaaatcaccttggaggtagtggaagaggagaaagtcgaggatatgtttaacaaggacgatgaggaggacaggcatcacaggatgccttgtcctgctcagagtagcatctcgcagggagcaaaaccatggtacaaggaattcttgcagctgatcggttatagcaacttccagagagtggaagaatactgcgagaaagtatggtgcacagatagaaagaggaaaaagcttaaaatgtcaccctccaagtggaagtatgccaaccctcaggaaaagaagctccgttccaaacctgagcattaccgcctgcccaggcacacgctggactcctgatggggtgagactatctactgtcttttgaagaatttatatttggaaagtaaaaaagtaaaaaaataaatcatccaacttctttgcattacttaaaagagatttctgtaatacaggaatgactatgaaggtgttataataaattattctacatactcatttgactggataaactttacataaaattaactaattttttaaataaatgcattgcttaatggtttctcattatgtttatcaaaaaacaactgtagctgttattttcagtacttggctgcttttctgtgaaaattattattttacttttggaagacaagattattagaatattgaagaaaaattggagacttataatcatggtaaatataaaactaaatatgttttaatatttctgaatttttcttttccatcacaatgtaagatatgcagaatacaagatactttggcattctcatgtgaactttctgtactctttaaggattattttattagtgttgtttaagccatgagtgttaagtagcaggtgtgttgtgagtgctgtaacccatgaaaggaaaaatgtcattctgaggcttgtgcccttcgtaaaatattcattaaagtacattcacactatttttgctttataacacagtctttaattttcactcactgtggaaataaaaactaaggtaacttctcagaaagatatcaaatctcagaaagaatgtcaaatcagatgaagttatagttaggattctaactactgtaaaagatttttgcttccctcttgtggtaaaaaaaattatattctcacacatttcttttttctctacagacggatatctgtttaggaaagatttgaaagcagattatcagtaggtacatggatacatcaagttcatttgcagaaacaaataactgaaataaaaaacatgttaatccttgtatcatactttaatatgaaagtattgtttatagataatttatctcacaagtcaaaaatgaagattttgcagcactgaaaatctattaaagctccaaattttaagtttctaaataatcttcgctgaaatctaaaatatactataacaaccgtgttttatttgtgaaaaaaatattaaagtgatttgctctcaaatatcaaattttcttctctcttttatattaagagacagaaaattgtttcatgagttcacttaactactgagatattcagagcatttttacctctctcttaaatgttataaaaaacaattgtatttttaagaatgtttatttatcaaagtctttccttcttctattaaatatttagcaattacctttctaaaatatgaaattttgtaagatgttttcacctaaataaaaattgaaagcaagtggattacacaggagaaccattatgaacatttatttagatattaatcttaaacagtgtttatttcagttttcaaagttagcttataggttatacatttaagttaaagtgctcataatcacttgcaatttcattgtaaaatgaacaaatacataaatattttaagaaaaatttaagtttattcagataagtcaccatgcttcaaaagatctaagaaatgcaaatatactgaaaattgacatcctctgaaaattccacttgctatttacccaagaatccactggaggtcattactgccattaaataataactgaaaagactatgtagtgaaatgtatttttaaaaactatattcagtaaaagcctgctcaatttggagaaatagaaccacaaacacagatcacaggggccttacaaagtttatgtctgaacaaataagtcaattaagtacactttattgaaaattgccttccattaacacacaagaaagaaagcaggattttctcctgtatctgaattttaaaattaaaaaggcagataagacataaatagttatcattttaattgcaataacacagacaagtagttaatgatgataacaatggtgtaacttgtaaactaaatatttggtaactgaagcaataggcagaggaaaatagcttttctatgacacaagtcataagaagtccatatactgaagagcgtttgattaaaataaagtgactattaaccagaaaagaaacattttacataaaatgctaaaatttattataggaaaataaatcaaacccaaagaaagtttattcaatgctaatttgaaagaaaattgataagaaaactttgagggcccaagtccacaatttggtgagaccactaaattttacatataattatacacacacatatgtacatatatatgtatataatcttgcttcccgcctgtttatggcagtactgaagagaaatgggaaagaagagggagggagagagaaagacgaagggagagagaaagcagtttccaaggatatgtttcatgtcccaccattttctcagtttctccctctctctcccaacacacacacacacacacccctcacatactataaaataaatcttcactgccctatcaaaatacaaataaatcaatctatgctgttctgtccttcttgagaatctaaaacataccacaaaaatacatccccagtcttttgttctgtctgaggttagaattaattcaaattcagaatctgttgtgagaaatgcccaggctttaaaaattaaaaatggatggatcttctctgaactcagggagggcacatacttagatacctacaagacttggaggaattaagagttcacccttcatctcaccaaattttccccatttttctctttcttgtagaaggagagaaaccatgctctctagcaacattgagcaaaaatcataaccactcatctaatttctaagaggcacctccatcgagggccggtctcctgcttctttagacctcttctatctttgttacaggagaggacctgtggatagacttagttttgacataaaacaatgcccattcacctcctccttcagcacaacgtcacccattgggcaagagatccagatttgttaacaaaaaagattttacttcgtgattccacgtctataattctatattgctaattttttcttttgtgtgaattactgaatatttcagagcaaagctatcaacttggagaaacagggattaaaaataaggataaacactaataagagctctagaaaaaagggaacagaaagtctgcctgtttagtaagtggcaattccatacatattttagagttttttctatctaaaattagttaaatacttagaatgtttgtaatgagtgttcgatatttgctataggttttagggttttgtaaatcttcatagtaattataaacatttgtaaaatttgtaaaatactataagtcattttgagtgttggtgttaagcatgaaacaaacagcagctgttgtccttaaaaatgaattgacctggccgggcgcggtggctcacgcctgtaatcccagcactttgggaggccgaggcgggtggatcatgaggtcaggagatcgagaccatcctggctaacaaggtgaaaccccgtctctactaaaaatacaaaaaattagccgggcgcggtggcgggcgcctgtagtcccagctacttgggaggctgaggcaggagaatggcgtgaacccgggaagcggagcttgcagtgagccgagattgcgccactgcagtccgcagtccggcctgggcgacagagcgagactccgtctc

SEQ ID NO: 18612 - DNA, 2414 bp, Homo sapiens
  source 1..2414: mol_type = unassigned DNA
aaactaaacagtgtcctataggcagctatcagctcagcatgtgttgtttacttggaaagtgaaagaaagtctcccactttgccttcccttagatgaacagagctcttgaatctgaacagaacatcaatatttcatagcccttttggatttcttgatctccatacaatgctgctggatgaatatcaagagaggctcttcgtgggaggcagggaccttgtatattccctcagcttggagagaatcagtgacggctataaagagatacactggccgagtacagctctaaaaatggaagaatgcataatgaagggaaaagatgcgggtgaatgtgcaaattatgttcgggttttgcatcactataacaggacacaccttctgacctgtggtactggagcttttgatccagtttgtgccttcatcagagttggatatcatttggaggatcctctgtttcacctggaatcacccagatctgagagaggaaggggcagatgtccttttgaccccagctcctccttcatctccactttaattggtagtgaattgtttgctggactctacagtgactactggagcagagacgctgcgatcttccgcagcatggggcgactggcccatatccgcactgagcatgacgatgagcgtctgttgaaagaaccaaaatttgtaggttcatacatgattcctgacaatgaagacagagatgacaacaaagtatatttcttttttactgagaaggcactggaggcagaaaacaatgctcacgcaatttacaccagggtcgggcgactctgtgtgaatgatgtaggagggcagagaatactggtgaataagtggagcactttcctaaaagcgagactcgtttgctcagtaccaggaatgaatggaattgacacatattttgatgaattagaggacgtttttttgctacctaccagagatcataagaatccagtgatatttggactctttaacactaccagtaatatttttcgagggcatgctatatgtgtctatcacatgtctagcattcgggcagccttcaacggaccatatgcacataaggaaggacctgaataccactggtcagtctatgaaggaaaagtcccttatccaaggcctggttcttgtgccagcaaagtaaatggagggagatacggaaccaccaaggactatcctgatgatgccatccgatttgcaagaagtcatccactaatgtaccaggccataaaacctgcccataaaaaaccaatattggtaaaaacagatggaaaatataacctgaaacaaatagcagtagatcgagtggaagctgaggatggccaatatgacgtcttgtttattgggacagataatggaattgtgctgaaagtaatcacaatttacaaccaagaaatggaatcaatggaagaagtaattctagaagaacttcagatattcaaggatccagttcctattatttctatggagatttcttcaaagcggcaacagctgtatattggatctgcttctgctgtggctcaagtcagattccatcactgtgacatgtatggaagtgcttgtgctgactgctgcctggctcgagacccttactgtgcctgggatggcatatcctgctcccggtattacccaacaggcacacatgcaaaaaggcgtttccggagacaagatgttcgacatggaaatgcagctcagcagtgctttggacaacagtttgttggggatgctttggataagactgaagaacatctggcttatggcatagagaacaacagtactttgctggaatgtaccccacgatctttacaagcgaaagttatctggtttgtacagaaaggacgtgagacaagaaaagaggaggtgaagacagatgacagagtggttaagatggaccttggtttactcttcctaaggttacacaaatcagatgctgggacctatttttgccagacagtagagcatagctttgtccatacggtccgtaaaatcaccttggaggtagtggaagaggagaaagtcgaggatatgtttaacaaggacgatgaggaggacaggcatcacaggatgccttgtcctgctcagagtagcatctcgcagggagcaaaaccatggtacaaggaattcttgcagctgatcggttatagcaacttccagagagtggaagaatactgcgagaaagtatggtgcacagatagaaagaggaaaaagcttaaaatgtcaccctccaagtggaagtatgccaaccctcaggaaaagaagctccgttccaaacctgagcattaccgcctgcccaggcacacgctggactcctgatggggtgagactatctactgtcttttgaagaatttatatttggaaagtaaaaaagtaaaaaaataaatcatccaacttctttgcattacttaaaagagatt

SEQ ID NO: 18613 - DNA, 626 bp, Homo sapiens
  source 1..626: mol_type = unassigned DNA
gttcaaactggacgaacctacaattatcaaaatctcctcttagcattaagaaggcagtcaggactcagcagagctcttgaatctgaacagaacatcaatatttcatagcccttttggatttcttgatctccatacaatgctgctggatgaatatcaagagaggctcttcgtgggaggcagggaccttgtatattccctcagcttggagagaatcagtgacggctataaagagatacactggccgagtacagctctaaaaatggaagaatgcataatgaagggaaaagatgcgggtgaatgtgcaaattatgttcgggttttgcatcactataacaggacacaccttctgacctgtggtactggagcttttgatccagtttgtgccttcatcagagttggatatcatttggaggatcctctgtttcacctggaatcacccagatctgagagaggaaggggcagatgtccttttgaccccagctcctccttcatctccactttaattggtagtgaattgtttgctggactctacagtgactactggagcagagacgctgcgatcttccgcagcatggggcgactggcccatatccgcactgagcatgacgatgagcgtctgttgaaag

SEQ ID NO: 18614 - DNA, 571 bp, Homo sapiens
  source 1..571: mol_type = unassigned DNA
gagcgctctagacaggacatggctctgaagactcactctttggaatgtcctcttgctcccggcttataaacaactgtcccgaggaaagaaaggttttacatagccaaatacagcctgacaaatggcacttcggaactgtgctttctgatgacaacgcgttcgatttctgacaaagcctctcgcacgctgcccctggagggaagtcctaagtaaaactcagaccctccttaaagtgaggagcgagggcttggacggtgaacacggcagcatggcatccgcggggcacattatcaccttgctcctgtggggttacttactggagctttggacaggaggtcatacagctgatactacccacccccggttacgcctgtcacataaagaatgaagagtgtttcttgtcagaggtgggatctcatctgggccttcacaacttgaatgaagaaaagacatggaggaggaaactgcaggctcaagtaaaaagagctcttgaatctgaacagaacatcaatatttcatagcccttttggatttcttgatctccatacaatgctgctggatgaatatcaag

SEQ ID NO: 18615 - DNA, 4899 bp, Homo sapiens
  source 1..4899: mol_type = unassigned DNA
atggccccctcggcctgggccatttgctggctgctagggggcctcctgctccatgggggtagctctggccccagccccggccccagtgtgccccgcctgcggctctcctaccgagacctcctgtctgccaaccgctctgccatctttctgggcccccagggctccctgaacctccaggccatgtacctagatgagtaccgagaccgcctctttctgggtggcctggacgccctctactctctgcggctggaccaggcatggccagatccccgggaggtcctgtggccaccgcagccaggacagagggaggagtgtgttcgaaagggaagagatcctttgacagagtgcgccaacttcgtgcgggtgctacagcctcacaaccggacccacctgctagcctgtggcactggggccttccagcccacctgtgccctcatcacagttggccaccgtggggagcatgtgctccacctggagcctggcagtgtggaaagtggccgggggcggtgccctcacgagcccagccgtccctttgccagcaccttcatagacggggagctgtacacgggtctcactgctgacttcctggggcgagaggccatgatcttccgaagtggaggtcctcggccagctctgcgttccgactctgaccagagtctcttgcacgacccccggtttgtgatggccgcccggatccctgagaactctgaccaggacaatgacaaggtgtacttcttcttctcggagacggtcccctcgcccgatggtggctcgaaccatgtcactgtcagccgcgtgggccgcgtctgcgtgaatgatgctgggggccagcgggtgctggtgaacaaatggagcactttcctcaaggccaggctggtctgctcggtgcccggccctggtggtgccgagacccactttgaccagctagaggatgtgttcctgctgtggcccaaggccgggaagagcctcgaggtgtacgcgctgttcagcaccgtcagtgccgtgttccagggcttcgccgtctgtgtgtaccacatggcagacatctgggaggttttcaacgggccctttgcccaccgagatgggcctcagcaccagtgggggccctatgggggcaaggtgcccttccctcgccctggcgtgtgccccagcaagatgaccgcacagccaggacggccttttggcagcaccaaggactacccagatgaggtgctgcagtttgcccgagcccaccccctcatgttctggcctgtgcggcctcgacatggccgccctgtccttgtcaagacccacctggcccagcagctacaccagatcgtggtggaccgcgtggaggcagaggatgggacctacgatgtcattttcctggggactgactcagggtctgtgctcaaagtcatcgctctccaggcagggggctcagctgaacctgaggaagtggttctggaggagctccaggtgtttaaggtgccaacacctatcaccgaaatggagatctctgtcaaaaggcaaatgctatacgtgggctctcggctgggtgtggcccagctgcggctgcaccaatgtgagacttacggcactgcctgtgcagagtgctgcctggcccgggacccatactgtgcctgggatggtgcctcctgtacccactaccgccccagccttggcaagcgccggttccgccggcaggacatccggcacggcaaccctgccctgcagtgcctgggccagagccaggaagaagaggcagtgggacttgtggcagccaccatggtctacggcacggagcacaatagcaccttcctggagtgcctgcccaagtctccccaggctgctgtgcgctggctcttgcagaggccaggggatgaggggcctgaccaggtgaagacggacgagcgagtcttgcacacggagcgggggctgctgttccgcaggcttagccgtttcgatgcgggcacctacacctgcaccactctggagcatggcttctcccagactgtggtccgcctggctctggtggtgattgtggcctcacagctggacaacctgttccctccggagccaaagccagaggagcccccagcccggggaggcctggcttccaccccacccaaggcctggtacaaggacatcctgcagctcattggcttcgccaacctgccccgggtggatgagtactgtgagcgcgtgtggtgcaggggcaccacggaatgctcaggctgcttccggagccggagccggggcaagcaggccaggggcaagagctgggcagggctggagctaggcaagaagatgaagagccgggtgcatgccgagcacaatcggacgccccgggaggtggaggccacgtagaagggggcagaggaggggtggtcaggatgggctggggggcccactagcagcccccagcatctcccacccacccagctagggcagaggggtcaggatgtctgtttgcctcttagagacaggtgtctctgcccccacaccgctactggggtctaatggaggggctgggttcttgaagcctgttccctgcccttctctgtgctcttagacccagctggagccagcaccctctggctgctggcagccccaagggatctgccatttgttctcagagatggcctggcttccgcaacacatttccgggtgtgcccagaggcaagagggttgggtggttctttcccagcctacagaacaatggccattctgagtgaccctcagagtgggtgtgtgggtgcgtctagggggtatcccggtagggggcctgcagggagccagagggtggaaatggcctctaagctagcaccccgtaagaagagcctacctgaccgacttggggagggaacacagaggtgttgggaaggtggagcaacaatgcacctcccctcctgtcgcgccgtgatatcttggtggctccctgccactgcccaccgcctcttctccatctgagaatcacggagaggtgtagataatctagaggcatagactgctagagcccccagggatctggggtggtcagggctcaggcttcactttgtaaaccaggtgggggcatctcacagcctgacttcccttccccaggccagggttgctgggatgcctgcccctcctgagaggaccccctccccattgtcaggctctccatgtccacgagcggggaggggtgggttctggggcattgttgtcccttgtgtctgtggactagagatagggtgggggagctggggaagggtgcaggcgggaagagtgggctgtctttcccagggtgatgcaagcatgccgcagccctggaggctgggaatgtggaggctctgtgagccctgcagccctcagaatcagggccagggatgcagaagattgagaggatatggagatggatagagggcaggagacccttaggatagattgtgggacccaggcaggaacaggtgtccacaagaactcaggatggcatcagttagctcagaagccacctggaagacccagtgtttccatctctggaatctctgttttatgctaaatggatttaggaagactgtttttcttttaagggggaaacaaggtagagaaaaggacgaagaagtgtaagtcccgctgattctcgggggtaaggctcggatggcaaggacgcgttctgcctgggcatgtaggggaggtgtttttgccatcaccagtttctcaggctggggagcacagaggggaggaggaggactaaatgaaaagttgttcccagcctgcacatgaacacattcatgacacacaaaactggctggaaggagataagagcactgggtttgagattccctccattaaaacaaccaagacaaagaaaggaggggaaaaaaagataaaaagcaagccagggttccctgccctattgaaactcaaacccagactgccttgggttttatctttcccttacccctggcacctccagagaactgggacctgaaatagtccctccgttctcccctttgaccatgtaataaatgaaccagaagcactgagattaacctatcaacgccctgagaagccttccagcctgcggtgctgtctgctgggaggtcagctggtcaaggcagaggaggagaggaggaaaggatgggggctgaagagcagaagggaggggagacagaggggattaaagaggggaggagagagtgcagagctccaggaaagggtatcagagctgcagccagctctgccctctaccctagggaggccagaaagacacaaacagccctccgggcctttacgctggactctggcttggcaggctccaggcagggtcctctgggaagttactctagaaaacgaagggaggaggagcacaagatcctcagcaacgaacacctgcacttagaaaaagtggacagcttctgccaaccacaccctacccatggtactgtatgctattaactcctggaaacgccccgtaaatgcgagttgtttttgtatttgtgtgttgagatgggccttgtggtttctctgtactcagagcacatttcttgtaattactattgttatttttattgtcatgactgcccctgagctctggtgagaaaagctgaatttacaaggaaagggatgaagttaatatttgcatcacataattatatcattactgtgtatctgtgtattgtactaaatggactgatgctgcgcacatgagctgaaaatgaagagccctcccatccattccatgagaaagaaggtcaccctgagtgacttctgtttcatgatttcccaaacaggttttagagctggaaaaggacttaaagaaagagactgggtggtgctttctagaaaggaggaagatgggtatcaggggaaggaaggagttagagggctttgtacaaagccgagattgctcattaaatgaggaacatcctggcc

SEQ ID NO: 18616 - DNA, 848 bp, Homo sapiens
  source 1..848: mol_type = unassigned DNA
gtagctctggccccagccccggccccagtgtgccccgcctgcggctctcctaccgagacagagtgcgccaacttcgtgcgggtgctacagcctcacaaccggacccacctgctagcctgtggcactggggccttccagcccacctgtgccctcatcacagttggccaccgtggggagcatgtgctccacctggagcctggcagtgtggaaagtggccgggggcggtgccctcacgagcccagccgtccctttgccagcaccttcatagacggggagctgtacacgggtctcactgctgacttcctggggcgagaggccatgatcttccgaagtggaggtcctcggccagctctgcgttccgactctgaccagagtctcttgcacgacccccggtttgtgatggccgcccggatccctgagaactctgaccaggacaatgacaaggtgtacttcttcttctcggagacggtcccctcgcccgatggtggctcgaaccatgtcactgtcagccgcgtgggccgcgtctgcgtgaatgatgctgggggccagcgggtgctggtgaacaaatggagcactttcctcaaggccaggctggtctgctcggtgcccggccctggtggtgccgagacccactttgaccagctagaggatgtgttcctgctgtggcccaaggccgggaagagcctcgaggtgtacgcgctgttcagcaccgtcagtgccgtgttccagggcttcgccgtctgtgtgtaccacatggcagacatctgggaggttttcaacgggccctttgcccaccgagatgggcctcagcaccagtgggggccctatgggggcaaggtgcccttccc

SEQ ID NO: 18617 - DNA, 616 bp, Homo sapiens
  source 1..616: mol_type = unassigned DNA
agcgggaccagagggcggctctgcaggcaggcggcagcggtgccctcagttccccagcatggccccctcggcctgggccatttgctggctgctagggggcctcctgctccatgggggtagctctggccccagccccggccccagtgtgccccgcctgcggctctcctaccgaggagccatggtccgaaagccttccagcaccatgtggatggaaacattttccagatacctcctgtctgccaaccgctctgccatctttctgggcccccagggctccctgaacctccaggccatgtacctagatgagtaccgagaccgcctctttctgggtggcctggacgccctctactctctgcggctggaccaggcatggccagatccccgggaggtcctgtggccaccgcagccaggacagagggaggagtgtgttcgaaagggaagagatcctttgacagagtgcgccaacttcgtgcgggtgctacagcctcacaaccggacccacctgctagcctgtggcactggggccttccagcccacctgtgccctcatcacagttggccaccgtggggagcatgtgctccacctggagcctggcagtgtggaaagtggccggggg

SEQ ID NO: 18618 - DNA, 2710 bp, Homo sapiens
  source 1..2710: mol_type = unassigned DNA
ggcaacccgctcgggtccccttccacactgtggaagctttgttctttcgctcttgctactgctagctctttgggtccacgctgcttttatgagctgtaacactcaccgcgaagatctgcagcttcactcctgagcccagcgagaccacgagcccaccgggaggaacgaacaactccagacgcgctgccttaagagctgtaacactcaccgtgaaggtctgcagcttcactcccgagccagcgagaccacgaacccaccagaaggaagaaactctgaacacatctgaacatcagaagggacagactccagacgcgccaccactctgctaacaccagatagtggaaagaaaccatgtgctgaaatgtttgacgacactgatggtttgactctgctaactggaatggcttattgtgcaagaaagtacacctggtcgggtcctggggctcatctctagcaccagcaaagatttctgaagacgtctttctagaaatgactggaaagtttcaagaggcataagatacagcatttcttctgaggccctgaagaagtatcaagtgggctttgacattgcggtggtgagagcgacccctcctcacctggagaactgggaaatgtggattctcagggaccgcgctgttcacgagctccaggctgtgctgctggccctggtcctggggcgctgagccgcatctgcaatagcacacctgcccggccacctgctgccgtgagcctttgctgctgaagcccctggggtcgcctctacctgatgaggatgtgcacccccattagggggctgctcatggcccttgcagtgatgtttgggacagcgatggcatttgcacccataccccggatcacctgggagcacagagaggtgcacctggtgcagtttcatgagccagacatctacaactactcagccttgctgctgagcgaggacaaggacaccttgtacataggtgcccgggaggcggtcttcgctgtgaacgcactcaacatctccgagaagcagcatgaggtgtattggaaggtctcagaagacaaaaaagcaaaatgtgcagaaaaggggaaatcaaaacagacagagtgcctcaactacatccgggtgctgcagccactcagcgccacttccctttacgtgtgtgggaccaacgcattccagccggcctgtgaccacctgaacttaacatcctttaagtttctggggaaaaatgaagatggcaaaggaagatgtccctttgacccagcacacagctacacatccgtcatggttgatggagaactttattcggggacgtcgtataattttttgggaagtgaacccatcatctcccgaaattcttcccacagtcctctgaggacagaatatgcaatcccttggctgaacgagcctagtttcgtgtttgctgacgtgatccgaaaaagcccagacagccccgacggcgaggatgacagggtctacttcttcttcacggaggtgtctgtggagtatgagtttgtgttcagggtgctgatcccacggatagcaagagtgtgcaagggggaccagggcggcctgaggaccttgcagaagaaatggacctccttcctgaaagcccgactcatctgctcccggccagacagcggcttggtcttcaatgtgctgcgggatgtcttcgtgctcaggtccccgggcctgaaggtgcctgtgttctatgcactcttcaccccacagctgaacaacgtggggctgtcggcagtgtgcgcctacaacctgtccacagccgaggaggtcttctcccacgggaagtacatgcagagcaccacagtggagcagtcccacaccaagtgggtgcgctataatggcccggtacccaagccgcggcctggagcgtgcatcgacagcgaggcacgggccgccaactacaccagctccttgaatttgccagacaagacgctgcagttcgttaaagaccaccctttgatggatgactcggtaaccccaatagacaacaggcccaggttaatcaagaaagatgtgaactacacccagatcgtggtggaccggacccaggccctggatgggactgtctatgatgtcatgtttgtcagcacagaccggggagctctgcacaaagccatcagcctcgagcacgctgttcacatcatcgaggagacccagctcttccaggactttgagccagtccagaccctgctgctgtcttcaaagaaggtcctgcagacattcgctttgtctgggagaagaatgggcgagctctggagacctgtgtccctgtgcagacccatgcactgcccgatggcagggcccatgcactcagctggctgcaggacgccatcagggaaagcgctgagtatcgctgctctgtcctctcctcagcagggaacaagacttcgaaggtgcaggttgctgtgatgagacctgaagtgacccaccaggagaggtggaccagagagctctctgcctggagggctgtggctggggagcacgaccggatgatgcagagctggaggaaggcgtgggaaagctgtagcaaggacaccctgtagccaccaggaaggagtccctgacaccgacctcaaccccaacaagaccctgctgccactgaccacagccacccccggagaaggcctggtcccccacaactgtgaactgtcttgcccaagcctgctctgaacacagccattgggccaccacctgatgggcagaggc

SEQ ID NO: 18619 - DNA, 5684 bp, Homo sapiens
  source 1..5684: mol_type = unassigned DNA
attacgtggctcctgtgttaatagaatcatggagggatcagcgtcggctcctgagcgtctgcagtcctgcacgtggctctggttttgcgattctgattctcttgatctaattgttggtgctgctactgcaccccacgatccctgtcttgagactgatctcccacactgcaaaggagtgacagccatgctatggaaccttgccacaccacggtggacaccgttctgtttggctgaaaaccagccatccaaaaataaaggaagatgaacagctctttagtgcttgtaattatgccatatgtgtttctgctttttccttctttgcctcatgaagatgaattttaaaggatacatatctggagctaatagacaattagatagtacttttttggttcacagactctgctaactggaatggcttattgtgcaagaaagtacacctggtcgggtcctggggctcatctctagcaccagcaaagatttctgaagacgtctttctagaaatgactggaaagtttcaagaggcataagatacagcatttcttctgaggccctgaagaagtatcaagtgggctttgacattgcggtggtgagagcgacccctcctcacctggagaactgggaaatgtggattctcagggaccgcgctgttcacgagctccaggctgtgctgctggccctggtcctggggcgctgagccgcatctgcaatagcacacctgcccggccacctgctgccgtgagcctttgctgctgaagcccctggggtcgcctctacctgatgaggatgtgcacccccattagggggctgctcatggcccttgcagtgatgtttgggacagcgatggcatttgcacccataccccggatcacctgggagcacagagaggtgcacctggtgcagtttcatgagccagacatctacaactactcagccttgctgctgagcgaggacaaggacaccttgtacataggtgcccgggaggcggtcttcgctgtgaacgcactcaacatctccgagaagcagcatgaggtgtattggaaggtctcagaagacaaaaaagcaaaatgtgcagaaaaggggaaatcaaaacagacagagtgcctcaactacatccgggtgctgcagccactcagcgccacttccctttacgtgtgtgggaccaacgcattccagccggcctgtgaccacctgaacttaacatcctttaagtttctggggaaaaatgaagatggcaaaggaagatgtccctttgacccagcacacagctacacatccgtcatggttgatggagaactttattcggggacgtcgtataattttttgggaagtgaacccatcatctcccgaaattcttcccacagtcctctgaggacagaatatgcaatcccttggctgaacgagcctagtttcgtgtttgctgacgtgatccgaaaaagcccagacagccccgacggcgaggatgacagggtctacttcttcttcacggaggtgtctgtggagtatgagtttgtgttcagggtgctgatcccacggatagcaagagtgtgcaagggggaccagggcggcctgaggaccttgcagaagaaatggacctccttcctgaaagcccgactcatctgctcccggccagacagcggcttggtcttcaatgtgctgcgggatgtcttcgtgctcaggtccccgggcctgaaggtgcctgtgttctatgcactcttcaccccacagctgaacaacgtggggctgtcggcagtgtgcgcctacaacctgtccacagccgaggaggtcttctcccacgggaagtacatgcagagcaccacagtggagcagtcccacaccaagtgggtgcgctataatggcccggtacccaagccgcggcctggagcgtgcatcgacagcgaggcacgggccgccaactacaccagctccttgaatttgccagacaagacgctgcagttcgttaaagaccaccctttgatggatgactcggtaaccccaatagacaacaggcccaggttaatcaagaaagatgtgaactacacccagatcgtggtggaccggacccaggccctggatgggactgtctatgatgtcatgtttgtcagcacagaccggggagctctgcacaaagccatcagcctcgagcacgctgttcacatcatcgaggagacccagctcttccaggactttgagccagtccagaccctgctgctgtcttcaaagaagggcaacaggtttgtctatgctggctctaactcgggcgtggtccaggccccgctggccttctgtgggaagcacggcacctgcgaggactgtgtgctggcgcgggacccctactgcgcctggagcccgcccacagcgacctgcgtggctctgcaccagaccgagagccccagcaggggtttgattcaggagatgagcggcgatgcttctgtgtgcccggataaaagtaaaggaagttaccggcagcattttttcaagcacggtggcacagcggaactgaaatgctcccaaaaatccaacctggcccgggtcttttggaagttccagaatggcgtgttgaaggccgagagccccaagtacggtcttatgggcagaaaaaacttgctcatcttcaacttgtcagaaggagacagtggggtgtaccagtgcctgtcagaggagagggttaagaacaaaacggtcttccaagtggtcgccaagcacgtcctggaagtgaaggtggttccaaagcccgtagtggcccccaccttgtcagttgttcagacagaaggtagtaggattgccaccaaagtgttggtggcatccacccaagggtcttctcccccaaccccagccgtgcaggccacctcctccggggccatcacccttcctcccaagcctgcgcccaccggcacatcctgcgaaccaaagatcgtcatcaacacggtcccccagctccactcggagaaaaccatgtatcttaagtccagcgacaaccgcctcctcatgtccctcttcctcttcttctttgttctcttcctctgcctctttttctacaactgctataagggatacctgcccagacagtgcttgaaattccgctcggccctactaattgggaagaagaagcccaagtcagatttctgtgaccgtgagcagagcctgaaggagacgttagtagagccagggagcttctcccagcagaatggggagcaccccaagccagccctggacaccggctatgagaccgagcaagacaccatcaccagcaaagtccccacggatagggaggactcacagaggatcgacgacctttctgccagggacaagccctttgacgtcaagtgtgagctgaagttcgctgactcagacgcagatggagactgaggccggctgtgcatccccgctggtgcctcggctgcgacgtgtccaggcgtggagagttttgtgtttctcctgttcagtatccgagtctcgtgcagtgctgcgtaggttagcccgcatcgtgcagacaacctcagtcctcttgtctattttctcttgggttgagcctgtgacttggtttctctttgtccttttggaaaaatgacaagcattgcatcccagtcttgtgttccgaagtcagtcggagtacttgaagaaggcccacgggcggcacggagttcctgagccctttctgtagtgggggaaaggtggctggacctctgttggctgagaagagcatcccttcagcttcccctccccgtagcagccactaaaagattatttaattccagattggaaatgacattttagtttatcagattggtaacttatcgcctgttgtccagattggcacgaaccttttcttccacttaattatttttttaggattttgctttgattgtgtttatgtcatgggtcatttttttttagttacagaagcagttgtgttaatatttagaagaagatgtatatcttccagattttgttatatatttggcataaaatacggcttacgttgcttaagattctcagggataaacttccttttgctaaatgcattctttctgcttttagaaatgtagacataaacactccccggagcccactcaccttttttctttttctttttttttttttaactttattccttgagggaagcattgtttttggagagattttctttctgtacttcgttttacttttctttttttttaacttttactctctcgaagaagaggaccttcccacatccacgaggtgggttttgagcaagggaaggtagcctggatgagctgagtggagccaggctggcccagagctgagatgggagtgcggtacaatctggagcccacagctgtcggtcagaacctcctgtgagacagatggaaccttcacaagggcgcctttggttctctgaacatctcctttctcttcttgcttcaattgcttacccactgcctgcccagactttctatccagcctcactgagctgcccactactggaagggaactgggcctcggtggccggggccgcgagctgtgaccacagcaccctcaagcatacggcgctgttcctgccactgtcctgaagatgtgaatgggtggtacgatttcaacactggttaatttcacactccatctccccgctttgtaaatacccatcgggaagagactttttttccatggtgaagagcaataaactctggatgtttgtgcgcgtgtgtggacagtcttatcttccagcatgataggatttgaccattttggtgtaaacatttgtgttttataagatttaccttgtttttatttttctactttgaattgtatacatttggaaagtacccaaataaatgagaagcttctatccttgatttggggaagacattccttagcggaggctgtgcagcctcccgcccctgcatggcccaggcgggacagctgggctcgctcttttctgtccgtttcctgctgtgttttgccctctctggcctgtgacgtgctcctggcgacttcttcctcagtgccctctcttttctgtcctctctgtctcacagcctcgtctcctaagcccctccctcctcctggctcctcttccctgtcctgtctgggccatgtgggggacaggaggctttcctctccctggaccccctggccagcctcgggtgcggggcccgacagcagctcgagggtctccttgctgccgcccttcctgagtgaccaggcacagcacgtgcacgccctggggaacttctacctcttctgccaggccacaggtgagttgggccctctctgtcccctgtgccctgtccatctgtctcctcccacaggtggggggcgggcgggggcatcctccacatccctccacatgttcctttaccttccttatctgtcctggctgcgtccctcgggttgagccgtttcacgctttcattgtgggtccatcccgagggaaactgtagacagtgtgaagccacttctagtgtacaggggtcaaccagtgttttctgtaaagggctagatatttaggccttgtgggctgcaggctgtgtcacagccactaagctctgctgttgtattgtaaaaccagccatagtcaatacacaacgagtggtcagggctgtgtgccagtaaaactttatttataaaaatgcacggtgggccagatttgccccaaaggccccagtttcccaacctgtggtatataggattgcttctccctt

SEQ ID NO: 18620 - DNA, 4824 bp, Homo sapiens
  source 1..4824: mol_type = unassigned DNA
ggcaacccgctcgggtccccttccacactgtggaagctttgttctttcgctcttgctactgctagctctttgggtccacgctgcttttatgagctgtaacactcaccgcgaagatctgcagcttcactcctgagcccagcgagaccacgagcccaccgggaggaacgaacaactccagacgcgctgccttaagagctgtaacactcaccgtgaaggtctgcagcttcactcccgagccagcgagaccacgaacccaccagaaggaagaaactctgaacacatctgaacatcagaagggacagactccagacgcgccaccactctgctaacaccagatagtggaaagaaaccatgtgctgaaatgtttgacgacactgatggtttgactctgctaactggaatggcttattgtgcaagaaagtacacctggtcgggtcctggggctcatctctagcaccagcaaagatttctgaagacgtctttctagaaatgactggaaagtttcaagaggcataagatacagcatttcttctgaggccctgaagaagtatcaagtgggctttgacattgcggtggtgagagcgacccctcctcacctggagaactgggaaatgtggattctcagggaccgcgctgttcacgagctccaggctgtgctgctggccctggtcctggggcgctgagccgcatctgcaatagcacacctgcccggccacctgctgccgtgagcctttgctgctgaagcccctggggtcgcctctacctgatgaggatgtgcacccccattagggggctgctcatggcccttgcagtgatgtttgggacagcgatggcatttgcacccataccccggatcacctgggagcacagagaggtgcacctggtgcagtttcatgagccagacatctacaactactcagccttgctgctgagcgaggacaaggacaccttgtacataggtgcccgggaggcggtcttcgctgtgaacgcactcaacatctccgagaagcagcatgaggtgtattggaaggtctcagaagacaaaaaagcaaaatgtgcagaaaaggggaaatcaaaacagacagagtgcctcaactacatccgggtgctgcagccactcagcgccacttccctttacgtgtgtgggaccaacgcattccagccggcctgtgaccacctgaacttaacatcctttaagtttctggggaaaaatgaagatggcaaaggaagatgtccctttgacccagcacacagctacacatccgtcatggttgatggagaactttattcggggacgtcgtataattttttgggaagtgaacccatcatctcccgaaattcttcccacagtcctctgaggacagaatatgcaatcccttggctgaacgagcctagtttcgtgtttgctgacgtgatccgaaaaagcccagacagccccgacggcgaggatgacagggtctacttcttcttcacggaggtgtctgtggagtatgagtttgtgttcagggtgctgatcccacggatagcaagagtgtgcaagggggaccagggcggcctgaggaccttgcagaagaaatggacctccttcctgaaagcccgactcatctgctcccggccagacagcggcttggtcttcaatgtgctgcgggatgtcttcgtgctcaggtccccgggcctgaaggtgcctgtgttctatgcactcttcaccccacagctgaacaacgtggggctgtcggcagtgtgcgcctacaacctgtccacagccgaggaggtcttctcccacgggaagtacatgcagagcaccacagtggagcagtcccacaccaagtgggtgcgctataatggcccggtacccaagccgcggcctggagcgtgcatcgacagcgaggcacgggccgccaactacaccagctccttgaatttgccagacaagacgctgcagttcgttaaagaccaccctttgatggatgactcggtaaccccaatagacaacaggcccaggttaatcaagaaagatgtgaactacacccagatcgtggtggaccggacccaggccctggatgggactgtctatgatgtcatgtttgtcagcacagaccggggagctctgcacaaagccatcagcctcgagcacgctgttcacatcatcgaggagacccagctcttccaggactttgagccagtccagaccctgctgctgtcttcaaagaagggcaacaggtttgtctatgctggctctaactcgggcgtggtccaggccccgctggccttctgtgggaagcacggcacctgcgaggactgtgtgctggcgcgggacccctactgcgcctggagcccgcccacagcgacctgcgtggctctgcaccagaccgagagccccagcaggggtttgattcaggagatgagcggcgatgcttctgtgtgcccggataaaagtaaaggaagttaccggcagcattttttcaagcacggtggcacagcggaactgaaatgctcccaaaaatccaacctggcccgggtcttttggaagttccagaatggcgtgttgaaggccgagagccccaagtacggtcttatgggcagaaaaaacttgctcatcttcaacttgtcagaaggagacagtggggtgtaccagtgcctgtcagaggagagggttaagaacaaaacggtcttccaagtggtcgccaagcacgtcctggaagtgaaggtggttccaaagcccgtagtggcccccaccttgtcagttgttcagacagaaggtagtaggattgccaccaaagtgttggtggcatccacccaagggtcttctcccccaaccccagccgtgcaggccacctcctccggggccatcacccttcctcccaagcctgcgcccaccggcacatcctgcgaaccaaagatcgtcatcaacacggtcccccagctccactcggagaaaaccatgtatcttaagtccagcgacaaccgcctcctcatgtccctcttcctcttcttctttgttctcttcctctgcctctttttctacaactgctataagggatacctgcccagacagtgcttgaaattccgctcggccctactaattgggaagaagaagcccaagtcagatttctgtgaccgtgagcagagcctgaaggagacgttagtagagccagggagcttctcccagcagaatggggagcaccccaagccagccctggacaccggctatgagaccgagcaagacaccatcaccagcaaagtccccacggatagggaggactcacagaggatcgacgacctttctgccagggacaagccctttgacgtcaagtgtgagctgaagttcgctgactcagacgcagatggagactgaggccggctgtgcatccccgctggtgcctcggctgcgacgtgtccaggcgtggagagttttgtgtttctcctgttcagtatccgagtctcgtgcagtgctgcgtaggttagcccgcatcgtgcagacaacctcagtcctcttgtctattttctcttgggttgagcctgtgacttggtttctctttgtccttttggaaaaatgacaagcattgcatcccagtcttgtgttccgaagtcagtcggagtacttgaagaaggcccacgggcggcacggagttcctgagccctttctgtagtgggggaaaggtggctggacctctgttggctgagaagagcatcccttcagcttcccctccccgtagcagccactaaaagattatttaattccagattggaaatgacattttagtttatcagattggtaacttatcgcctgttgtccagattggcacgaaccttttcttccacttaattatttttttaggattttgctttgattgtgtttatgtcatgggtcatttttttttagttacagaagcagttgtgttaatatttagaagaagatgtatatcttccagattttgttatatatttggcataaaatacggcttacgttgcttaagattctcagggataaacttccttttgctaaatgcattctttctgcttttagaaatgtagacataaacactccccggagcccactcaccttttttctttttctttttttttttttaactttattccttgagggaagcattgtttttggagagattttctttctgtacttcgttttacttttctttttttttaacttttactctctcgaagaagaggaccttcccacatccacgaggtgggttttgagcaagggaaggtagcctggatgagctgagtggagccaggctggcccagagctgagatgggagtgcggtacaatctggagcccacagctgtcggtcagaacctcctgtgagacagatggaaccttcacaagggcgcctttggttctctgaacatctcctttctcttcttgcttcaattgcttacccactgcctgcccagactttctatccagcctcactgagctgcccactactggaagggaactgggcctcggtggccggggccgcgagctgtgaccacagcaccctcaagcatacggcgctgttcctgccactgtcctgaagatgtgaatgggtggtacgatttcaacactggttaatttcacactccatctccccgctttgtaaatacccatcgggaagagactttttttccatggtgaagagcaataaactctggatgtttgtgcgcgtgtgtggacagtcttatcttccagcatgataggatttgaccattttggtgtaaacatttgtgttttataagatttaccttgtttttatttttctactttgaattgtatacatttggaaagtacccaaataaatgagaagcttctatccttga

SEQ ID NO: 18621 - DNA, 4382 bp, Homo sapiens
  source 1..4382: mol_type = unassigned DNA
agcgctctcgcgcgccgcagcatcccagccgccgctgccgccgccgggcctccccgccaccccctccccggcccggccgcctcccgccgctgccgccgccgccgccgccgccattcctggcgcccgaactcgcccggccgggagccgccgcgggcaggacgcgcgctgcagactctgctaacaccagatagtggaaagaaaccatgtgctgaaatgtttgacgacactgatggtttgcatttcttctgaggccctgaagaagtatcaagtgggctttgacattgcggtggtgagagcgacccctcctcacctggagaactgggaaatgtggattctcagggaccgcgctgttcacgagctccaggctgtgctgctggccctggtcctggggcgctgagccgcatctgcaatagcacacctgcccggccacctgctgccgtgagcctttgctgctgaagcccctggggtcgcctctacctgatgaggatgtgcacccccattagggggctgctcatggcccttgcagtgatgtttgggacagcgatggcatttgcacccataccccggatcacctgggagcacagagaggtgcacctggtgcagtttcatgagccagacatctacaactactcagccttgctgctgagcgaggacaaggacaccttgtacataggtgcccgggaggcggtcttcgctgtgaacgcactcaacatctccgagaagcagcatgaggtgtattggaaggtctcagaagacaaaaaagcaaaatgtgcagaaaaggggaaatcaaaacagacagagtgcctcaactacatccgggtgctgcagccactcagcgccacttccctttacgtgtgtgggaccaacgcattccagccggcctgtgaccacctgaacttaacatcctttaagtttctggggaaaaatgaagatggcaaaggaagatgtccctttgacccagcacacagctacacatccgtcatggttgatggagaactttattcggggacgtcgtataattttttgggaagtgaacccatcatctcccgaaattcttcccacagtcctctgaggacagaatatgcaatcccttggctgaacgagcctagtttcgtgtttgctgacgtgatccgaaaaagcccagacagccccgacggcgaggatgacagggtctacttcttcttcacggaggtgtctgtggagtatgagtttgtgttcagggtgctgatcccacggatagcaagagtgtgcaagggggaccagggcggcctgaggaccttgcagaagaaatggacctccttcctgaaagcccgactcatctgctcccggccagacagcggcttggtcttcaatgtgctgcgggatgtcttcgtgctcaggtccccgggcctgaaggtgcctgtgttctatgcactcttcaccccacagctgaacaacgtggggctgtcggcagtgtgcgcctacaacctgtccacagccgaggaggtcttctcccacgggaagtacatgcagagcaccacagtggagcagtcccacaccaagtgggtgcgctataatggcccggtacccaagccgcggcctggagcgtgcatcgacagcgaggcacgggccgccaactacaccagctccttgaatttgccagacaagacgctgcagttcgttaaagaccaccctttgatggatgactcggtaaccccaatagacaacaggcccaggttaatcaagaaagatgtgaactacacccagatcgtggtggaccggacccaggccctggatgggactgtctatgatgtcatgtttgtcagcacagaccggggagctctgcacaaagccatcagcctcgagcacgctgttcacatcatcgaggagacccagctcttccaggactttgagccagtccagaccctgctgctgtcttcaaagaagggcaacaggtttgtctatgctggctctaactcgggcgtggtccaggccccgctggccttctgtgggaagcacggcacctgcgaggactgtgtgctggcgcgggacccctactgcgcctggagcccgcccacagcgacctgcgtggctctgcaccagaccgagagccccagcaggggtttgattcaggagatgagcggcgatgcttctgtgtgcccggataaaagtaaaggaagttaccggcagcattttttcaagcacggtggcacagcggaactgaaatgctcccaaaaatccaacctggcccgggtcttttggaagttccagaatggcgtgttgaaggccgagagccccaagtacggtcttatgggcagaaaaaacttgctcatcttcaacttgtcagaaggagacagtggggtgtaccagtgcctgtcagaggagagggttaagaacaaaacggtcttccaagtggtcgccaagcacgtcctggaagtgaaggtggttccaaagcccgtagtggcccccaccttgtcagttgttcagacagaaggtagtaggattgccaccaaagtgttggtggcatccacccaagggtcttctcccccaaccccagccgtgcaggccacctcctccggggccatcacccttcctcccaagcctgcgcccaccggcacatcctgcgaaccaaagatcgtcatcaacacggtcccccagctccactcggagaaaaccatgtatcttaagtccagcgacaaccgcctcctcatgtccctcttcctcttcttctttgttctcttcctctgcctctttttctacaactgctataagggatacctgcccagacagtgcttgaaattccgctcggccctactaattgggaagaagaagcccaagtcagatttctgtgaccgtgagcagagcctgaaggagacgttagtagagccagggagcttctcccagcagaatggggagcaccccaagccagccctggacaccggctatgagaccgagcaagacaccatcaccagcaaagtccccacggatagggaggactcacagaggatcgacgacctttctgccagggacaagccctttgacgtcaagtgtgagctgaagttcgctgactcagacgcagatggagactgaggccggctgtgcatccccgctggtgcctcggctgcgacgtgtccaggcgtggagagttttgtgtttctcctgttcagtatccgagtctcgtgcagtgctgcgtaggttagcccgcatcgtgcagacaacctcagtcctcttgtctattttctcttgggttgagcctgtgacttggtttctctttgtccttttggaaaaatgacaagcattgcatcccagtcttgtgttccgaagtcagtcggagtacttgaagaaggcccacgggcggcacggagttcctgagccctttctgtagtgggggaaaggtggctggacctctgttggctgagaagagcatcccttcagcttcccctccccgtagcagccactaaaagattatttaattccagattggaaatgacattttagtttatcagattggtaacttatcgcctgttgtccagattggcacgaaccttttcttccacttaattatttttttaggattttgctttgattgtgtttatgtcatgggtcatttttttttagttacagaagcagttgtgttaatatttagaagaagatgtatatcttccagattttgttatatatttggcataaaatacggcttacgttgcttaagattctcagggataaacttccttttgctaaatgcattctttctgcttttagaaatgtagacataaacactccccggagcccactcaccttttttctttttctttttttttttttaactttattccttgagggaagcattgtttttggagagattttctttctgtacttcgttttacttttctttttttttaacttttactctctcgaagaagaggaccttcccacatccacgaggtgggttttgagcaagggaaggtagcctggatgagctgagtggagccaggctggcccagagctgagatgggagtgcggtacaatctggagcccacagctgtcggtcagaacctcctgtgagacagatggaaccttcacaagggcgcctttggttctctgaacatctcctttctcttcttgcttcaattgcttacccactgcctgcccagactttctatccagcctcactgagctgcccactactggaagggaactgggcctcggtggccggggccgcgagctgtgaccacagcaccctcaagcatacggcgctgttcctgccactgtcctgaagatgtgaatgggtggtacgatttcaacactggttaatttcacactccatctccccgctttgtaaatacccatcgggaagagactttttttccatggtgaagagcaataaactctggatgtttgtg

SEQ ID NO: 18622 - DNA, 969 bp, Homo sapiens
  source 1..969: mol_type = unassigned DNA
gagaggctccccgcccacaggtgctcacattctggctcgggggacgaggttgggcttcgaggtggtgtgcttcagcctctggctgcagccccttctcacctatagtgaggccgggaagatgaccgggagtgccaggctcatgcatcctctgctgcagggaggagatctggaggtggggactgaacagcctccccactggctaagagaaacacgtgcagagaagcgctttgctggagggcaggcacctgtgggtgcccagacaggggagagagggatttggacctaaggcccagtgagccctgacatagcacgtggattctgcaggaaggtcacagacctgccttgtttgcctctggttctgagtacctctcctccttactgcaatgtcccctgaaggtacactctggctgcttcccacacactggtgcagaagcagaggccatgctcctggatgcctgcttgcctgatgctagttcttctctgtctcatacacgcagggcaacaggtttgtctatgctggctctaactcgggcgtggtccaggccccgctggccttctgtgggaagcacggcacctgcgaggactgtgtgctggcgcgggacccctactgcgcctggagcccgcccacagcgacctgcgtggctctgcaccagaccgagagccccagcaggggtttgattcaggagatgagcggcgatgcttctgtgtgcccggataaaagtaaaggaagttaccggcagcattttttcaagcacggtggcacagcggaactgaaatgctcccaaaaatccaacctggcccgggtcttttggaagttccagaatggcgtgttgaaggccgagagccccaagtacggtcttatgggcagaaaaaacttgctcatcttcaacttgtcagaaggagacagtggggtgtaccagtgcctgtcagaggagagggttaagaacaaaacggtcttccaagtggtcg

SEQ ID NO: 18623 - DNA, 176 bp, Homo sapiens
  source 1..176: mol_type = unassigned DNA
gagagccccagcaggtatggggcgggatgcgctgcctggggatgtcccccatgtgtgtgggtgaataacacgtgccggttgttttgcaggggtttgattcaggagatgagcggcgatgcttctgtgtgcccggataaaagtaaaggaagttaccggcagcattttttcaagcacgg

SEQ ID NO: 18624 - DNA, 599 bp, Homo sapiens
  source 1..599: mol_type = unassigned DNA
gttggtgaggattcttggggtcaaccatggaacagtttattttccttggaaaaaaactggaataacccataacacttgggtttccagttgtctgttttgccaaagccttttcctttttttgtttctaatgcgaaatcatcattgttttctaagtatctgtggagggaatgacttgagagtgaagagtgtgaagtttgccgctgtggtcactgtccttggtttctgtgtctgggttagtgtcactgacctgtagctttggccctgcagaccggggagctctgcacaaagccatcagcctcgagcacgctgttcacatcatcgaggagacccagctcttccaggactttgagccagtccagaccctgctgctgtcttcaaagaagggcaacaggtttgtctatgctggctctaactcgggcgtggtccaggccccgctggccttctgtgggaagcacggcacctgcgaggactgtgtgctggcgcgggacccctactgcgcctggagcccgcccacagcgacctgcgtggctctgcaccagaccgagagccccagcaggggtttgattcaggagatgagcggcgatgcttctgtgtgcccg

SEQ ID NO: 18625 - DNA, 528 bp, Homo sapiens
  source 1..528: mol_type = unassigned DNA
cgggaagtacatgcagagcaccacagtggagcagtcccacaccaagtgggtgcgctataatggcccggtacccaagccgcggcctggagcgtgcatcgacagcgaggcacgggccgccaactacaccagctccttgaatttgccagacaagacgctgcagttcgttaaagaccaccctttgatggatgactcggtaaccccaatagacaacaggcccaggttaatcaagaaagatgtgaactacacccagatcgtggtggaccggacccaggccctggatgggactgtctatgatgtcatgtttgtcagcacaggtgggttccgagggcttggcaggcttgacagtgacagcacatctgtgtcctctggtaggaaaactgggaaatccaattattctttcgtgagtagttccattgcctccctcgaggtgacctgggaggtttgtgggagcgtaagaagatttctgagaagtcaccacaccaggtggctttcagatctgggaccaccaggctactggaggtacttgtt

SEQ ID NO: 18626 - DNA, 907 bp, Homo sapiens
  source 1..907: mol_type = unassigned DNA
agagcccttgaaacccctgcagtcaggacagacgtcccaggcgagcagaggccctgcgtgaggatggggcggcggggccagatggtgtcctgagtatccatcctccctggtggctgaggacacgctgaccagcgtggggtcaggagcatggcccctggaaagcaaagatttctgaagacgtctttctagaaatgactggaaagtttcaagaggcataagatacagcatttcttctgaggccctgaagaagtatcaagtgggctttgacattgcggtggtgagagcgacccctcctcacctggagaactgggaaatgtggattctcagggaccgcgctgttcacgagctccaggctgtgctgctggccctggtcctggggcgctgagccgcatctgcaatagcacacctgcccggccacctgctgccgtgagcctttgctgctgaagcccctggggtcgcctctacctgatgaggatgtgcacccccattagggggctgctcatggcccttgcagtgatgtttgggacagcgatggcatttgcacccataccccggatcacctgggagcacagagaggtgcacctggtgcagtttcatgagccagacatctacaactactcagccttgctgctgagcgaggacaaggacaccttgtacataggtgcccgggaggcggtcttcgctgtgaacgcactcaacatctccgagaagcagcatgaggtgtattggaaggtctcagaagacaaaaaagcaaaatgtgcagaaaaggggaaatcaaaacagacagagtgcctcaactacatccgggtgctgcagccactcagcgccacttccctttacgtgtgtgggaccaacgcattccagccggcctgtgaccacctgaacttaacatcctttaagtttctgg

SEQ ID NO: 18627 - DNA, 602 bp, Homo sapiens
  source 1..602: mol_type = unassigned DNA
ggtagctggaggagcgggaagcactgactcctgaagaccctggcttcgctttcctgtgtccgttgggctgtccacttctaagactctctttgtcccccgctgccttccgtattcctcagcagatggacccggcatttcttctgaggccctgaagaagtatcaagtgggctttgacattgcggtggtgagagcgacccctcctcacctggagaactgggaaatgtggattctcagggaccgcgctgttcacgagctccaggctgtgctgctggccctggtcctggggcgctgagccgcatctgcaatagcacacctgcccggccacctgctgccgtgagcctttgctgctgaagcccctggggtcgcctctacctgatgaggatgtgcacccccattagggggctgctcatggcccttgcagtgatgtttgggacagcgatggcatttgcacccataccccggatcacctgggagcacagagaggtgcacctggtgcagtttcatgagccagacatctacaactactcagccttgctgctgagcgaggacaaggacaccttgtacataggtgcccgggaggcggtcttcgctgtgaacgcact

SEQ ID NO: 18628 - DNA, 826 bp, Homo sapiens
  source 1..826: mol_type = unassigned DNA
ggcaacccgctcgggtccccttccacactgtggaagctttgttctttcgctcttgctactgctagctctttgggtccacgctgcttttatgagctgtaacactcaccgcgaagatctgcagcttcactcctgagcccagcgagaccacgagcccaccgggaggaacgaacaactccagacgcgctgccttaagagctgtaacactcaccgtgaaggtctgcagcttcactcccgagccagcgagaccacgaacccaccagaaggaagaaactctgaacacatctgaacatcagaagggacagactccagacgcgccaccactctgctaacaccagatagtggaaagaaaccatgtgctgaaatgtttgacgacactgatggtttgcatttcttctgaggccctgaagaagtatcaagtgggctttgacattgcggtggtgagagcgacccctcctcacctggagaactgggaaatgtggattctcagggaccgcgctgttcacgagctccaggctgtgctgctggccctggtcctggggcgctgagccgcatctgcaatagcacacctgcccggccacctgctgccgtgagcctttgctgctgaagcccctggggtcgcctctacctgatgaggatgtgcacccccattagggggctgctcatggcccttgcagtgatgtttgggacagcgatggcatttgcacccataccccggatcacctgggagcacagagaggtgcacctggtgcagtttcatgagccagacatctacaactactcagccttgctgctgagcgaggacaaggacaccttgtacataggtgcc

SEQ ID NO: 18629 - DNA, 563 bp, Homo sapiens
  source 1..563: mol_type = unassigned DNA
agtcaggacagacgtcccaggcgagcagaggccctgcgtgaggatggggcggcggggccagatggtgtcctgagtatccatcctccctggtggctgaggacacgctgaccagcgtggggtcaggagcatggcccctggaaagcatttcttctgaggccctgaagaagtatcaagtgggctttgacattgcggtggtgagagcgacccctcctcacctggagaactgggaaatgtggattctcagggaccgcgctgttcacgagctccaggctgtgctgctggccctggtcctggggcgctgagccgcatctgcaatagcacacctgcccggccacctgctgccgtgagcctttgctgctgaagcccctggggtcgcctctacctgatgaggatgtgcacccccattagggggctgctcatggcccttgcagtgatgtttgggacagcgatggcatttgcacccataccccggatcacctgggagcacagagaggtgcacctggtgcagtttcatgagccagacatctacaactactcagccttgctgctgagcgaggacaagg

SEQ ID NO: 18630 - DNA, 433 bp, Homo sapiens
  source 1..433: mol_type = unassigned DNA
tttggtcgcggaggccgcggaccctgtgcactggacccggcgccgcgcactcagacagactctgctaacaccagatagtggaaagaaaccatgtgctgaaatgtttgacgacactgatggtttgcaaagatttctgaagacgtctttctagaaatgactggaaagtttcaagaggcataagatacagcatttcttctgaggccctgaagaagtatcaagtgggctttgacattgcggtggtgagagcgacccctcctcacctggagaactgggaaatgtggattctcagggaccgcgctgttcacgagctccaggctgtgctgctggccctggtcctggggcgctgagccgcatctgcaatagcacacctgcccggccacctgctgccgtgagcctttgctgctgaagcccctggggtcgcctctacctgatg

SEQ ID NO: 18631 - DNA, 317 bp, Homo sapiens
  source 1..317: mol_type = unassigned DNA
agaaggtttaaactcacaataatttgttttcagtgcctttctaggagtgttgctgagtttaagtggatgcacagtttaagggcttaaatagccttgtttcccattattttcacagcaaagatttctgaagacgtctttctagaaatgactggaaagtttcaagaggcataagatacagcatttcttctgaggccctgaagaagtatcaagtgggctttgacattgcggtggtgagagcgacccctcctcacctggagaactgggaaatgtggattctcagggaccgcgctgttcacgagctccaggctgtgctgctg

SEQ ID NO: 18632 - DNA, 493 bp, Homo sapiens
  source 1..493: mol_type = unassigned DNA
gcctgcggagaaggctcaccacgggaccttgtccctgcgctgaagggtgccttgttgtggctggagcagtcctggcctgagccccaactaataacagagcccttgaaacccctgcagtcaggacagacgtcccaggcgagcagaggccctgcgtgaggatggggcggcggggccagatggtgtcctgagtatccatcctccctggtggctgaggacacgctgaccagcgtggggtcaggagcatggcccctggaaagactctgctaactggaatggcttattgtgcaagaaagtacacctggtcgggtcctggggctcatctctagcaccagcaaagatttctgaagacgtctttctagaaatgactggaaagtttcaagaggcataagatacagcatttcttctgaggccctgaagaagtatcaagtgggctttgacattgcggtggtgagagcgacccctcctcacctggagaactgggaaatgtggattc

SEQ ID NO: 18633 - DNA, 4503 bp, Homo sapiens
  source 1..4503: mol_type = unassigned DNA
actctgctaacaccagatagtggaaagaaaccatgtgctgaaatgtttgacgacactgatggtttgactctgctaactggaatggcttattgtgcaagaaagtacacctggtcgggtcctggggctcatctctagcaccagcaaagatttctgaagacgtctttctagaaatgactggaaagtttcaagaggcataagatacagcatttcttctgaggccctgaagaagtatcaagtgggctttgacattgcggtggtgagagcgacccctcctcacctggagaactgggaaatgtggattctcagggaccgcgctgttcacgagctccaggctgtgctgctggccctggtcctggggcgctgagccgcatctgcaatagcacacctgcccggccacctgctgccgtgagcctttgctgctgaagcccctggggtcgcctctacctgatgaggatgtgcacccccattagggggctgctcatggcccttgcagtgatgtttgggacagcgatggcatttgcacccataccccggatcacctgggagcacagagaggtgcacctggtgcagtttcatgagccagacatctacaactactcagccttgctgctgagcgaggacaaggacaccttgtacataggtgcccgggaggcggtcttcgctgtgaacgcactcaacatctccgagaagcagcatgaggtgtattggaaggtctcagaagacaaaaaagcaaaatgtgcagaaaaggggaaatcaaaacagacagagtgcctcaactacatccgggtgctgcagccactcagcgccacttccctttacgtgtgtgggaccaacgcattccagccggcctgtgaccacctgaacttaacatcctttaagtttctggggaaaaatgaagatggcaaaggaagatgtccctttgacccagcacacagctacacatccgtcatggttgatggagaactttattcggggacgtcgtataattttttgggaagtgaacccatcatctcccgaaattcttcccacagtcctctgaggacagaatatgcaatcccttggctgaacgagcctagtttcgtgtttgctgacgtgatccgaaaaagcccagacagccccgacggcgaggatgacagggtctacttcttcttcacggaggtgtctgtggagtatgagtttgtgttcagggtgctgatcccacggatagcaagagtgtgcaagggggaccagggcggcctgaggaccttgcagaagaaatggacctccttcctgaaagcccgactcatctgctcccggccagacagcggcttggtcttcaatgtgctgcgggatgtcttcgtgctcaggtccccgggcctgaaggtgcctgtgttctatgcactcttcaccccacagctgaacaacgtggggctgtcggcagtgtgcgcctacaacctgtccacagccgaggaggtcttctcccacgggaagtacatgcagagcaccacagtggagcagtcccacaccaagtgggtgcgctataatggcccggtacccaagccgcggcctggagcgtgcatcgacagcgaggcacgggccgccaactacaccagctccttgaatttgccagacaagacgctgcagttcgttaaagaccaccctttgatggatgactcggtaaccccaatagacaacaggcccaggttaatcaagaaagatgtgaactacacccagatcgtggtggaccggacccaggccctggatgggactgtctatgatgtcatgtttgtcagcacagaccggggagctctgcacaaagccatcagcctcgagcacgctgttcacatcatcgaggagacccagctcttccaggactttgagccagtccagaccctgctgctgtcttcaaagaagggcaacaggtttgtctatgctggctctaactcgggcgtggtccaggccccgctggccttctgtgggaagcacggcacctgcgaggactgtgtgctggcgcgggacccctactgcgcctggagcccgcccacagcgacctgcgtggctctgcaccagaccgagagccccagcaggggtttgattcaggagatgagcggcgatgcttctgtgtgcccggataaaagtaaaggaagttaccggcagcattttttcaagcacggtggcacagcggaactgaaatgctcccaaaaatccaacctggcccgggtcttttggaagttccagaatggcgtgttgaaggccgagagccccaagtacggtcttatgggcagaaaaaacttgctcatcttcaacttgtcagaaggagacagtggggtgtaccagtgcctgtcagaggagagggttaagaacaaaacggtcttccaagtggtcgccaagcacgtcctggaagtgaaggtggttccaaagcccgtagtggcccccaccttgtcagttgttcagacagaaggtagtaggattgccaccaaagtgttggtggcatccacccaagggtcttctcccccaaccccagccgtgcaggccacctcctccggggccatcacccttcctcccaagcctgcgcccaccggcacatcctgcgaaccaaagatcgtcatcaacacggtcccccagctccactcggagaaaaccatgtatcttaagtccagcgacaaccgcctcctcatgtccctcttcctcttcttctttgttctcttcctctgcctctttttctacaactgctataagggatacctgcccagacagtgcttgaaattccgctcggccctactaattgggaagaagaagcccaagtcagatttctgtgaccgtgagcagagcctgaaggagacgttagtagagccagggagcttctcccagcagaatggggagcaccccaagccagccctggacaccggctatgagaccgagcaagacaccatcaccagcaaagtccccacggatagggaggactcacagaggatcgacgacctttctgccagggacaagccctttgacgtcaagtgtgagctgaagttcgctgactcagacgcagatggagactgaggccggctgtgcatccccgctggtgcctcggctgcgacgtgtccaggcgtggagagttttgtgtttctcctgttcagtatccgagtctcgtgcagtgctgcgtaggttagcccgcatcgtgcagacaacctcagtcctcttgtctattttctcttgggttgagcctgtgacttggtttctctttgtccttttggaaaaatgacaagcattgcatcccagtcttgtgttccgaagtcagtcggagtacttgaagaaggcccacgggcggcacggagttcctgagccctttctgtagtgggggaaaggtggctggacctctgttggctgagaagagcatcccttcagcttcccctccccgtagcagccactaaaagattatttaattccagattggaaatgacattttagtttatcagattggtaacttatcgcctgttgtccagattggcacgaaccttttcttccacttaattatttttttaggattttgctttgattgtgtttatgtcatgggtcatttttttttagttacagaagcagttgtgttaatatttagaagaagatgtatatcttccagattttgttatatatttggcataaaatacggcttacgttgcttaagattctcagggataaacttccttttgctaaatgcattctttctgcttttagaaatgtagacataaacactccccggagcccactcaccttttttctttttctttttttttttttaactttattccttgagggaagcattgtttttggagagattttctttctgtacttcgttttacttttctttttttttaacttttactctctcgaagaagaggaccttcccacatccacgaggtgggttttgagcaagggaaggtagcctggatgagctgagtggagccaggctggcccagagctgagatgggagtgcggtacaatctggagcccacagctgtcggtcagaacctcctgtgagacagatggaaccttcacaagggcgcctttggttctctgaacatctcctttctcttcttgcttcaattgcttacccactgcctgcccagactttctatccagcctcactgagctgcccactactggaagggaactgggcctcggtggccggggccgcgagctgtgaccacagcaccctcaagcatacggcgctgttcctgccactgtcctgaagatgtgaatgggtggtacgatttcaacactggttaatttcacactccatctccccgctttgtaaatacccatcgggaagagactttttttccatggtgaagagcaataaactctggatgtttgtgcgcgtgtgtggacagtcttatcttccagcatgataggatttgaccattttggtgtaaacatttgtgttttataagatttaccttgtttttatttttctactttgaattgtatacatttggaaagtacccaaataaatgagaagcttctatcctt

SEQ ID NO: 18634 - DNA, 4275 bp, Homo sapiens
  source 1..4275: mol_type = unassigned DNA
actctgctaacaccagatagtggaaagaaaccatgtgctgaaatgtttgacgacactgatggtttgactctgctaactggaatggcttattgtgcaagaaagtacacctggtcgggtcctggggctcatctctagcaccagcaaagatttctgaagacgtctttctagaaatgactggaaagtttcaagaggcataagatacagcatttcttctgaggccctgaagaagtatcaagtgggctttgacattgcggtggtgagagcgacccctcctcacctggagaactgggaaatgtggattctcagggaccgcgctgttcacgagctccaggctgtgctgctggccctggtcctggggcgctgagccgcatctgcaatagcacacctgcccggccacctgctgccgtgagcctttgctgctgaagcccctggggtcgcctctacctgatgaggatgtgcacccccattagggggctgctcatggcccttgcagtgatgtttgggacagcgatggcatttgcacccataccccggatcacctgggagcacagagaggtgcacctggtgcagtttcatgagccagacatctacaactactcagccttgctgctgagcgaggacaaggacaccttgtacataggtgcccgggaggcggtcttcgctgtgaacgcactcaacatctccgagaagcagcatgaggtgtattggaaggtctcagaagacaaaaaagcaaaatgtgcagaaaaggggaaatcaaaacagacagagtgcctcaactacatccgggtgctgcagccactcagcgccacttccctttacgtgtgtgggaccaacgcattccagccggcctgtgaccacctgaacttaacatcctttaagtttctggggaaaaatgaagatggcaaaggaagatgtccctttgacccagcacacagctacacatccgtcatggttgatggagaactttattcggggacgtcgtataattttttgggaagtgaacccatcatctcccgaaattcttcccacagtcctctgaggacagaatatgcaatcccttggctgaacgagcctagtttcgtgtttgctgacgtgatccgaaaaagcccagacagccccgacggcgaggatgacagggtctacttcttcttcacggaggtgtctgtggagtatgagtttgtgttcagggtgctgatcccacggatagcaagagtgtgcaagggggaccagggcggcctgaggaccttgcagaagaaatggacctccttcctgaaagcccgactcatctgctcccggccagacagcggcttggtcttcaatgtgctgcgggatgtcttcgtgctcaggtccccgggcctgaaggtgcctgtgttctatgcactcttcaccccacagctgaacaacgtggggctgtcggcagtgtgcgcctacaacctgtccacagccgaggaggtcttctcccacgggaagtacatgcagagcaccacagtggagcagtcccacaccaagtgggtgcgctataatggcccggtacccaagccgcggcctggagcgtgcatcgacagcgaggcacgggccgccaactacaccagctccttgaatttgccagacaagacgctgcagttcgttaaagaccaccctttgatggatgactcggtaaccccaatagacaacaggcccaggttaatcaagaaagatgtgaactacacccagatcgtggtggaccggacccaggccctggatgggactgtctatgatgtcatgtttgtcagcacagaccggggagctctgcacaaagccatcagcctcgagcacgctgttcacatcatcgaggagacccagctcttccaggactttgagccagtccagaccctgctgctgtcttcaaagaagggcaacaggtttgtctatgctggctctaactcgggcgtggtccaggccccgctggccttctgtgggaagcacggcacctgcgaggactgtgtgctggcgcgggacccctactgcgcctggagcccgcccacagcgacctgcgtggctctgcaccagaccgagagccccagcaggggtttgattcaggagatgagcggcgatgcttctgtgtgcccggcctcgtctcctaagcccctccctcctcctggctcctcttccctgtcctgtctgggccatgtgggggacaggaggctttcctctccctggaccccctggccagcctcgggtgcggggcccgacagcagctcgagggtctccttgctgccgcccttcctgagtgaccaggcacagcacgtgcacgccctggggaacttctacctcttctgccaggccacaggtcctgcagacattcgctttgtctgggagaagaatgggcgagctctggagacctgtgtccctgtgcagacccatgcactgcccgatggcagggcccatgcactcagctggctgcaggacgccatcagggaaagcgctgagtatcgctgctctgtcctctcctcagcagggaacaagacttcgaaggtgcaggttgctgtgatgagacctgaagtgacccaccaggagaggtggaccagagagctctctgcctggagggctgtggctggggagcacgaccggatgatgcagagctggaggaaggcgtgggaaagctgtagcaaggacaccctgtagccaccaggaaggagtccctgacaccgacctcaaccccaacaagaccctgctgccactgaccacagccacccccggagaaggcctggtcccccacaactgtgaactgtcttgcccaagcctgctctgaacacagccattgggccaccacctgatgggcagaggcgggacagtggagaagcctggaacccaagtgggcctgtgacaggaactaagacttaaaaaattaggtgcttacctgggacagtaagttctgtctggcacaagcaggtaaccaggatggctaacaggctttgatagctgctcgtgaactaaaacagcagggtgtgtgcaggttcctcctctacggtcaggcagcaggctctgaaggctgatcctacaccgtcccagtgactccccttgacagagtgcccccaccccctaatagccaacagggttagcatggccagcacagatcgctgcttttattgatgcaaatcaagcctgctgcttctcctccctgcagacttagccaaggaactccaagatgcatgactgggacaagaaaaggtgagactccacatggaaatgccttgccctaaaccttgaatgactgtgagatgcgatctgggagtgcatctgtcaagtctttgtgttttcttcactaacctcagaatactgggctctattttatcaagcgctgcagtttatgcctctgtcccgtcaatgctcagcttctgcaacaggacaccaaacttgatgcagaaagccaaataggtcaattatgcaaatctcctggtgccatattaaatttcttgacgatggaatgagtctcatgagtgttttgttctacctgctttcaagtctctaattattaaagctgtatctctgaagactgtgtcactgtgtgtgtgaacttgtcctaaagctactcagcctttaatcttacacacacgtctcttcttgtctgttgaatgacagttttcatgtctatcataaaaccaaagcctctgttaaaagtcaagccgcacccctctggtgatcctagcaaatactgagtgtcttcccagcagtgtgacaatgacctgttttgcatcccctctttctggagctggacaaattctctaccagcctttgtgtgggatcagcatacatcgcctgctaattccttcaggatccatcacaacaggtgtcctgaagatgctggagacaccctggttgtctccacacgttccccctccgcaccccaagtcgagaggcccagctgcctgtgaggtgtgtgcttgcccatccagccaaggatgccagtcttgctcacggaaccatcacatactcataacctgaagttttcctgtaaaatatccatcagctcactgtggttcttgctttgggtgtggcttcaaccactacaaactgatgagtgaaatgctatgggctttaggcttatattcttggtgctgttttctgtctcttctcctgaagtctggatttcaagcactttcacacttaacaaaataattacatacttgaagttttcgtaatgtggagtgttctactgggaaatggagttatgaggatgaatttctgagtctttctttgctctgctggaaaaaataaaaatagagttgtacattg

SEQ ID NO: 18635 - DNA, 4258 bp, Homo sapiens
  source 1..4258: mol_type = unassigned DNA
ccccgccaccccctccccggcccggccgcctcccgccgctgccgccgccgccgccgccgccattcctggcgcccgaactcgcccggccgggagccgccgcgggcaggacgcgcgctgcagcaaagatttctgaagacgtctttctagaaatgactggaaagtttcaagaggcataagatacagcatttcttctgaggccctgaagaagtatcaagtgggctttgacattgcggtggtgagagcgacccctcctcacctggagaactgggaaatgtggattctcagggaccgcgctgttcacgagctccaggctgtgctgctggccctggtcctggggcgctgagccgcatctgcaatagcacacctgcccggccacctgctgccgtgagcctttgctgctgaagcccctggggtcgcctctacctgatgaggatgtgcacccccattagggggctgctcatggcccttgcagtgatgtttgggacagcgatggcatttgcacccataccccggatcacctgggagcacagagaggtgcacctggtgcagtttcatgagccagacatctacaactactcagccttgctgctgagcgaggacaaggacaccttgtacataggtgcccgggaggcggtcttcgctgtgaacgcactcaacatctccgagaagcagcatgaggtgtattggaaggtctcagaagacaaaaaagcaaaatgtgcagaaaaggggaaatcaaaacagacagagtgcctcaactacatccgggtgctgcagccactcagcgccacttccctttacgtgtgtgggaccaacgcattccagccggcctgtgaccacctgaacttaacatcctttaagtttctggggaaaaatgaagatggcaaaggaagatgtccctttgacccagcacacagctacacatccgtcatggttgatggagaactttattcggggacgtcgtataattttttgggaagtgaacccatcatctcccgaaattcttcccacagtcctctgaggacagaatatgcaatcccttggctgaacgagcctagtttcgtgtttgctgacgtgatccgaaaaagcccagacagccccgacggcgaggatgacagggtctacttcttcttcacggaggtgtctgtggagtatgagtttgtgttcagggtgctgatcccacggatagcaagagtgtgcaagggggaccagggcggcctgaggaccttgcagaagaaatggacctccttcctgaaagcccgactcatctgctcccggccagacagcggcttggtcttcaatgtgctgcgggatgtcttcgtgctcaggtccccgggcctgaaggtgcctgtgttctatgcactcttcaccccacagctgaacaacgtggggctgtcggcagtgtgcgcctacaacctgtccacagccgaggaggtcttctcccacgggaagtacatgcagagcaccacagtggagcagtcccacaccaagtgggtgcgctataatggcccggtacccaagccgcggcctggagcgtgcatcgacagcgaggcacgggccgccaactacaccagctccttgaatttgccagacaagacgctgcagttcgttaaagaccaccctttgatggatgactcggtaaccccaatagacaacaggcccaggttaatcaagaaagatgtgaactacacccagatcgtggtggaccggacccaggccctggatgggactgtctatgatgtcatgtttgtcagcacagaccggggagctctgcacaaagccatcagcctcgagcacgctgttcacatcatcgaggagacccagctcttccaggactttgagccagtccagaccctgctgctgtcttcaaagaagggcaacaggtttgtctatgctggctctaactcgggcgtggtccaggccccgctggccttctgtgggaagcacggcacctgcgaggactgtgtgctggcgcgggacccctactgcgcctggagcccgcccacagcgacctgcgtggctctgcaccagaccgagagccccagcaggggtttgattcaggagatgagcggcgatgcttctgtgtgcccggcctcgtctcctaagcccctccctcctcctggctcctcttccctgtcctgtctgggccatgtgggggacaggaggctttcctctccctggaccccctggccagcctcgggtgcggggcccgacagcagctcgagggtctccttgctgccgcccttcctgagtgaccaggcacagcacgtgcacgccctggggaacttctacctcttctgccaggccacaggtcctgcagacattcgctttgtctgggagaagaatgggcgagctctggagacctgtgtccctgtgcagacccatgcactgcccgatggcagggcccatgcactcagctggctgcaggacgccatcagggaaagcgctgagtatcgctgctctgtcctctcctcagcagggaacaagacttcgaaggtgcaggttgctgtgatgagacctgaagtgacccaccaggagaggtggaccagagagctctctgcctggagggctgtggctggggagcacgaccggatgatgcagagctggaggaaggcgtgggaaagctgtagcaaggacaccctgtagccaccaggaaggagtccctgacaccgacctcaaccccaacaagaccctgctgccactgaccacagccacccccggagaaggcctggtcccccacaactgtgaactgtcttgcccaagcctgctctgaacacagccattgggccaccacctgatgggcagaggcgggacagtggagaagcctggaacccaagtgggcctgtgacaggaactaagacttaaaaaattaggtgcttacctgggacagtaagttctgtctggcacaagcaggtaaccaggatggctaacaggctttgatagctgctcgtgaactaaaacagcagggtgtgtgcaggttcctcctctacggtcaggcagcaggctctgaaggctgatcctacaccgtcccagtgactccccttgacagagtgcccccaccccctaatagccaacagggttagcatggccagcacagatcgctgcttttattgatgcaaatcaagcctgctgcttctcctccctgcagacttagccaaggaactccaagatgcatgactgggacaagaaaaggtgagactccacatggaaatgccttgccctaaaccttgaatgactgtgagatgcgatctgggagtgcatctgtcaagtctttgtgttttcttcactaacctcagaatactgggctctattttatcaagcgctgcagtttatgcctctgtcccgtcaatgctcagcttctgcaacaggacaccaaacttgatgcagaaagccaaataggtcaattatgcaaatctcctggtgccatattaaatttcttgacgatggaatgagtctcatgagtgttttgttctacctgctttcaagtctctaattattaaagctgtatctctgaagactgtgtcactgtgtgtgtgaacttgtcctaaagctactcagcctttaatcttacacacacgtctcttcttgtctgttgaatgacagttttcatgtctatcataaaaccaaagcctctgttaaaagtcaagccgcacccctctggtgatcctagcaaatactgagtgtcttcccagcagtgtgacaatgacctgttttgcatcccctctttctggagctggacaaattctctaccagcctttgtgtgggatcagcatacatcgcctgctaattccttcaggatccatcacaacaggtgtcctgaagatgctggagacaccctggttgtctccacacgttccccctccgcaccccaagtcgagaggcccagctgcctgtgaggtgtgtgcttgcccatccagccaaggatgccagtcttgctcacggaaccatcacatactcataacctgaagttttcctgtaaaatatccatcagctcactgtggttcttgctttgggtgtggcttcaaccactacaaactgatgagtgaaatgctatgggctttaggcttatattcttggtgctgttttctgtctcttctcctgaagtctggatttcaagcactttcacacttaacaaaataattacatacttgaagttttcgtaatgtggagtgttctactgggaaatggagttatgaggatgaatttctgagtctttctttgctctgctggaaaaaataaaaatagagttgtacattgttca

SEQ ID NO: 18636 - DNA, 2396 bp, Homo sapiens
  source 1..2396: mol_type = unassigned DNA
gtatacatttggaaagtacccaaataaatgagaagcttctatccttgatttggggaagacattccttagcggaggctgtgcagcctcccgcccctgcatggcccaggcgggacagctgggctcgctcttttctgtccgtttcctgctgtgttttgccctctctggcctgtgacgtgctcctggcgacttcttcctcagtgccctctcttttctgtcctctctgtctcacagcctcgtctcctaagcccctccctcctcctggctcctcttccctgtcctgtctgggccatgtgggggacaggaggctttcctctccctggaccccctggccagcctcgggtgcggggcccgacagcagctcgagggtctccttgctgccgcccttcctgagtgaccaggcacagcacgtgcacgccctggggaacttctacctcttctgccaggccacaggtcctgcagacattcgctttgtctgggagaagaatgggcgagctctggagacctgtgtccctgtgcagacccatgcactgcccgatggcagggcccatgcactcagctggctgcaggacgccatcagggaaagcgctgagtatcgctgctctgtcctctcctcagcagggaacaagacttcgaaggtgcaggttgctgtgatgagacctgaagtgacccaccaggagaggtggaccagagagctctctgcctggagggctgtggctggggagcacgaccggatgatgcagagctggaggaaggcgtgggaaagctgtagcaaggacaccctgtagccaccaggaaggagtccctgacaccgacctcaaccccaacaagaccctgctgccactgaccacagccacccccggagaaggcctggtcccccacaactgtgaactgtcttgcccaagcctgctctgaacacagccattgggccaccacctgatgggcagaggcgggacagtggagaagcctggaacccaagtgggcctgtgacaggaactaagacttaaaaaattaggtgcttacctgggacagtaagttctgtctggcacaagcaggtaaccaggatggctaacaggctttgatagctgctcgtgaactaaaacagcagggtgtgtgcaggttcctcctctacggtcaggcagcaggctctgaaggctgatcctacaccgtcccagtgactccccttgacagagtgcccccaccccctaatagccaacagggttagcatggccagcacagatcgctgcttttattgatgcaaatcaagcctgctgcttctcctccctgcagacttagccaaggaactccaagatgcatgactgggacaagaaaaggtgagactccacatggaaatgccttgccctaaaccttgaatgactgtgagatgcgatctgggagtgcatctgtcaagtctttgtgttttcttcactaacctcagaatactgggctctattttatcaagcgctgcagtttatgcctctgtcccgtcaatgctcagcttctgcaacaggacaccaaacttgatgcagaaagccaaataggtcaattatgcaaatctcctggtgccatattaaatttcttgacgatggaatgagtctcatgagtgttttgttctacctgctttcaagtctctaattattaaagctgtatctctgaagactgtgtcactgtgtgtgtgaacttgtcctaaagctactcagcctttaatcttacacacacgtctcttcttgtctgttgaatgacagttttcatgtctatcataaaaccaaagcctctgttaaaagtcaagccgcacccctctggtgatcctagcaaatactgagtgtcttcccagcagtgtgacaatgacctgttttgcatcccctctttctggagctggacaaattctctaccagcctttgtgtgggatcagcatacatcgcctgctaattccttcaggatccatcacaacaggtgtcctgaagatgctggagacaccctggttgtctccacacgttccccctccgcaccccaagtcgagaggcccagctgcctgtgaggtgtgtgcttgcccatccagccaaggatgccagtcttgctcacggaaccatcacatactcataacctgaagttttcctgtaaaatatccatcagctcactgtggttcttgctttgggtgtggcttcaaccactacaaactgatgagtgaaatgctatgggctttaggcttatattcttggtgctgttttctgtctcttctcctgaagtctggatttcaagcactttcacacttaacaaaataattacatacttgaagttttcgtaatgtggagtgttctactgggaaatggagttatgaggatgaatttctgagtctttctttgctctgctggaaaaaataaaaatagagttgtacattg

SEQ ID NO: 18637 - DNA, 1837 bp, Homo sapiens
  source 1..1837: mol_type = unassigned DNA
agcccagagaaaaacaacagaggtttgcggcagaagtggccaatgtcgggcccagagtccatgctcaaggctggaagcccatcctggatgtgctgcactcggcagtcctagtgtaattctgcagggcctggcccctgccagggtctgagctctccagcctgtggcatctactcccctccaagcccaccccagtgtctcaattggagagacaggccctcatggtccccactctggcccagccccctctgcacacagctggccgagctctgggcctctccatgctgtggccctggtgatggcagagccttgggatgtctctgtccatgtggtcacaggacatgtgtgtggcagcagggccatggtggggtgggatgctgttccaaggcccagaaccattctgtaagaaaccagcacagcgctgcaagaaagggggtcctaggggacacaggccacacaggtgtgctttgaaaaatggcaattaaggtcaaagagcaggaagtccacaggacgggccaaggccaaggctcccgctggccatggggaagccacctccagggcagtcccagggactgaattggaagttgtcccaagtcacttcaggtccaactgggacagcagaggtaacccccctgcaccctcatggggcagcttctttgggtcctaaatgtggactcagaggtggaaacggtctgtgtccccaggtcctgcagacattcgctttgtctgggagaagaatgggcgagctctggagacctgtgtccctgtgcagacccatgcactgcccgatggcagggcccatgcactcagctggctgcaggacgccatcagggaaagcgctgagtatcgctgctctgtcctctcctcagcagggaacaagacttcgaaggtgcaggttgctgtgatgagacctgaagtgacccaccaggagaggtggaccagagagctctctgcctggagggctgtggctggggagcacgaccggatgatgcagagctggaggaaggcgtgggaaagctgtagcaaggacaccctgtagccaccaggaaggagtccctgacaccgacctcaaccccaacaagaccctgctgccactgaccacagccacccccggagaaggcctggtcccccacaactgtgaactgtcttgcccaagcctgctctgaacacagccattgggccaccacctgatgggcagaggcgggacagtggagaagcctggaacccaagtgggcctgtgacaggaactaagacttaaaaaattaggtgcttacctgggacagtaagttctgtctggcacaagcaggtaaccaggatggctaacaggctttgatagctgctcgtgaactaaaacagcagggtgtgtgcaggttcctcctctacggtcaggcagcaggctctgaaggctgatcctacaccgtcccagtgactccccttgacagagtgcccccaccccctaatagccaacagggttagcatggccagcacagatcgctgcttttattgatgcaaatcaagcctgctgcttctcctccctgcagacttagccaaggaactccaagatgcatgactgggacaagaaaaggtgagactccacatggaaatgccttgccctaaaccttgaatgactgtgagatgcgatctgggagtgcatctgtcaagtctttgtgttttcttcactaacctcagaatactgggctctattttatcaagcgctgcagtttatgcctctgtcccgtcaatgctcagcttctgcaacaggacaccaaacttgatgcagaaagccaaataggtcaattatgcaaatctcctggtgccatattaaatttcttgacgatgg

SEQ ID NO: 18638 - DNA, 3053 bp, Homo sapiens
  source 1..3053: mol_type = unassigned DNA
tttgttttacctgctcagtgttctgaactccttccttttcactactaagcattctccatgaagccacacttcattttgtcattgtgaggttgatggacatctagggcaaatctaacttctaaagaccaattcttacgaggtgtcatggtcaagcagaggccatggccggcactggtctaggtggcccatggcccatttgggggccttggtgggcctcgaggaagggcaggtgctggtcagggagccgggtcgctaggcagcaggtgggtgtcaccccagtccacgctgctggggtgcctggcctgatgcaggctgtgcctgagggagacagaagcagcagagtaggctggccggcctccccagccccaccacaagcaggagcttcagagacagaaggagcacctgcaccccctcacctgccctccagggcctggcctggccctcccagctcaactccagggtctgtacgctctggggctggagcttagtgggactgtggcccccctcagccctttctgcatttgagtggaagccagtgtgcgaagcagatcaaaatggatgtgcttgtttttccttcagtaagaacagggagttgagcctgtcccaacatggccagcagcccctggagggccaacagacttcacgagcaaggaaggccgggaggtgacctgctgaccagaacttacttgtgcccctcccccccgcccaaaacccccaacattctggttttcacagccccaccccagccacctggaacaaatagtgtctaggagtagccctcagggttggccgcgcagacttcttgccctgggatgaggctggcctccccaggcgaggcagcctgggccacaggggaacgtctctgcctcgcccaccctcctgatctctccatcagacaagctgaggccagccaggctccaccctggcaggttgcaacagatggtctgagtgtgtgtgaagtaactggcctctctactttcttcaataagtaattaagatcaaaagcccagagaaaaacaacagaggtttgcggcagaagtggccaatgtcgggcccagagtccatgctcaaggctggaagcccatcctggatgtgctgcactcggcagtcctagtgtaattctgcagggcctggcccctgccagggtctgagctctccagcctgtggcatctactcccctccaagcccaccccagtgtctcaattggagagacaggccctcatggtccccactctggcccagccccctctgcacacagctggccgagctctgggcctctccatgctgtggccctggtgatggcagagccttgggatgtctctgtccatgtggtcacaggacatgtgtgtggcagcagggccatggtggggtgggatgctgttccaaggcccagaaccattctgtaagaaaccagcacagcgctgcaagaaagggggtcctaggggacacaggccacacaggtgtgctttgaaaaatggcaattaaggtcaaagagcaggaagtccacaggacgggccaaggccaaggctcccgctggccatggggaagccacctccagggcagtcccagggactgaattggaagttgtcccaagtcacttcaggtccaactgggacagcagaggtaacccccctgcaccctcatggggcagcttctttgggtcctaaatgtggactcagaggtggaaacggtctgtgtccccaggtcctgcagacattcgctttgtctgggagaagaatgggcgagctctggagacctgtgtccctgtgcagacccatgcactgcccgatggcagggcccatgcactcagctggctgcaggacgccatcagggaaagcgctgagtatcgctgctctgtcctctcctcagcagggaacaagacttcgaaggtgcaggttgctgtgatgagacctggtaagtgattcccatgcccactgttacccttttatgaggtaatttttcactatttacaatggcagtgaaaaaaacagctggaaagcatgcttgcacggtggcattctgggtttgggttttattggctttccattgagaaaggtggccagtgggcatcaagggtgccataaaggcccacagagctttgacctggggaccctgcttgttttccagaagtgacccaccaggagaggtggaccagagagctctctgcctggagggctgtggctggggagcacgaccggatgatgcagagctggaggaaggcgtgggaaagctgtagcaaggacaccctgtagccaccaggaaggagtccctgacaccgacctcaaccccaacaagaccctgctgccactgaccacagccacccccggagaaggcctggtcccccacaactgtgaactgtcttgcccaagcctgctctgaacacagccattgggccaccacctgatgggcagaggcgggacagtggagaagcctggaacccaagtgggcctgtgacaggaactaagacttaaaaaattaggtgcttacctgggacagtaagttctgtctggcacaagcaggtaaccaggatggctaacaggctttgatagctgctcgtgaactaaaacagcagggtgtgtgcaggttcctcctctacggtcaggcagcaggctctgaaggctgatcctacaccgtcccagtgactccccttgacagagtgcccccaccccctaatagccaacagggttagcatggccagcacagatcgctgcttttattgatgcaaatcaagcctgctgcttctcctccctgcagacttagccaaggaactccaagatgcatgactgggacaagaaaaggtgagactccacatggaaatgccttgccctaaaccttgaatgactgtgagatgcgatctgggagtgcatctgtcaagtctttgtgttttcttcactaacctcagaatactgggctctattttatcaagcgctgcagtttatgcctctgtcccgtcaatgctcagcttctgcaacaggacaccaaacttgatgcagaaagccaaataggtcaattatgcaaatctcctggtgccatattaaatttcttgacgatgg

SEQ ID NO: 18639 - DNA, 3533 bp, Homo sapiens
  source 1..3533: mol_type = unassigned DNA
atataattttttaaccaaagtgcagtctttaccctgtcagggccctgccttcacctctgccaggactatcttccatgtcaagtttagacccgtgtcattttcaaagctaataatggttcccccatactttaggcagcatttagatatttggatttgggatggccttttatgttttaactacagtgttagaaatcagagcccttggaaccactgggatcagagggcagcagcagaaggcgcccttggtcctctttgaggggcccagggctctggagagggcccccgttcctagcagccacagtggcctgttggcacgcatgtgtgtgttccagctgctctgtgacatttccctttgtttcagactcttgaaaggccacggccgtcgtgggaattagttgaccttgtgtgttgggccacccttgctggacaggacaaggtggtgctatcaactccctgtgctctgaggtccttcgcatgttagatgaggcagcttcaccagaaactatccatgtctcttctgttatctgggataattccacgtgcctttacaacacagctgtctggttacctggggtctggaaatgccctcggtgcctcagtggtgccttcccacaggccccccatggagccaggcgatgcctacagatgcctcagtggtactttctcaggtccctttgcagagaagaggttcaggattcctgcccacattgataaggcggcttggccagtaagtggcaggcatgaacaggtgcattccagaagcgctggggctggtccagtgccctgagtggtctagagcataccagagtgaaacgttaggctgcgtcggcctggtgactgtcagggagatgaggactcagagaagggagctgtcagaattgctacctatgtggcaggggtctcactctctcctccctcctcttggggcccctggctactctgtgacttcaacagaggacagaaaggatgaccaacaaggcctcagggcatacccccagctgcactgtccttgtccccagaagggtccccagagtctgggagggaggaggggccatggccaggattagaaaagaccgtgccccaaggagagagcacagagatgggccagggaagcagtgggatcctcgggaaaagaggctgggagcaggtgtccgggtgaggcccgggcagcgggtacaggcagggacaagccaggagtcccatcatggaagacatgatggccagcggccagcactgtgtgcagagaatggcccctctggggatgtgcccgctgccccattagttgcaggaaggccacctggatgtgagtttgggagatgggctggccccgaggcagccagccctgaggtcagagtgggccacatgcatggggatgccgggaggacacagaggagtgctgcaggagatggcagtgggggcactttccaggatgggcccgagcaactcagtcactgggtggatgtctcaccacccctccaggccttcctcagggcgaggccactgcccagagggcacctggtttgtcgcagagtagaatcagctccatattttgtaatcacatccacgaagctctgaagccatggtggtcctggcaccagctggctccgttagaggcttggggtgggagtgagcaggtgggaggtgccccagtgacaggctgagtgctggagcccaggctgccaacagcctccccagactcctgagttgatgtaataaacccagccctggtgaataaacctggcccttgcttataccaaggtgatcagtcttctcacgacagtcctagctgtaggagaaagatcattacctacggcatctgccacagcagttaatttgccttcaacttaagctagttgcagtgacaggaagggccagggggaaatatctgtcctcaggacctctaccctagatccttgtaagccacaacaacttcccttctttgagggcgcgaccagtgtcacctggctcgccactgggaagagccaaggcacatccaggttggtggctgctgagccccacagcatcagaccagcctcttgtccccaccccacagaggccaagggggtgatctgggagtagcaccccagcctggccgctctcttgaggtaacagggttggatggttagggagcttggagcactggcccaagcaagaaaacagtggtgttttcaggaggccctgctgggagatggaagacagctccccactgggggcctaggattccaggagctccccagcagtcctccgtgggacatacgtgggtttgcacctgctgccctgtcccgctgagggtgcggtgctgatggggtggccctgcacactgatggtaactctcactttccctctctctcatgcattcagaaagagatggatagtttaaaaacgaatacatggaacgtcctgcagacattcgctttgtctgggagaagaatgggcgagctctggagacctgtgtccctgtgcagacccatgcactgcccgatggcagggcccatgcactcagctggctgcaggacgccatcagggaaagcgctgagtatcgctgctctgtcctctcctcagcagggaacaagacttcgaaggtgcaggttgctgtgatgagacctgaagtgacccaccaggagaggtggaccagagagctctctgcctggagggctgtggctggggagcacgaccggatgatgcagagctggaggaaggcgtgggaaagctgtagcaaggacaccctgtagccaccaggaaggagtccctgacaccgacctcaaccccaacaagaccctgctgccactgaccacagccacccccggagaaggcctggtcccccacaactgtgaactgtcttgcccaagcctgctctgaacacagccattgggccaccacctgatgggcagaggcgggacagtggagaagcctggaacccaagtgggcctgtgacaggaactaagacttaaaaaattaggtgcttacctgggacagtaagttctgtctggcacaagcaggtaaccaggatggctaacaggctttgatagctgctcgtgaactaaaacagcagggtgtgtgcaggttcctcctctacggtcaggcagcaggctctgaaggctgatcctacaccgtcccagtgactccccttgacagagtgcccccaccccctaatagccaacagggttagcatggccagcacagatcgctgcttttattgatgcaaatcaagcctgctgcttctcctccctgcagacttagccaaggaactccaagatgcatgactgggacaagaaaaggtgagactccacatggaaatgccttgccctaaaccttgaatgactgtgagatgcgatctgggagtgcatctgtcaagtctttgtgttttcttcactaacctcagaatactgggctctattttatcaagcgctgcagtttatgcctctgtcccgtcaatgctcagcttctgcaacaggacaccaaacttgatgcagaaagccaaataggtcaattatgcaaatctcctggtgccatattaaatttcttgacgatgg

SEQ ID NO: 18640 - DNA, 3594 bp, Homo sapiens
  source 1..3594: mol_type = unassigned DNA
ctgcgcgcccgccccgcgcactccgtccccgcgccggcctcagcgctctcgcgcgccgcagcatcccagccgccgctgccgccgccgggcctccccgccaccccctccccggcccggccgcctcccgccgctgccgccgccgccgccgccgccattcctggcgcccgaactcgcccggccgggagccgccgcgggcaggacgcgcgctgcagactctgctaacaccagatagtggaaagaaaccatgtgctgaaatgtttgacgacactgatggtttgcaaagatttctgaagacgtctttctagaaatgactggaaagtttcaagaggcataagatacagcatttcttctgaggccctgaagaagtatcaagtgggctttgacattgcggtggtgagagcgacccctcctcacctggagaactgggaaatgtggattctcagggaccgcgctgttcacgagctccaggctgtgctgctggccctggtcctggggcgctgagccgcatctgcaatagcacacctgcccggccacctgctgccgtgagcctttgctgctgaagcccctggggtcgcctctacctgatgaggatgtgcacccccattagggggctgctcatggcccttgcagtgatgtttgggacagcgatggcatttgcacccataccccggatcacctgggagcacagagaggtgcacctggtgcagtttcatgagccagacatctacaactactcagccttgctgctgagcgaggacaaggacaccttgtacataggtgcccgggaggcggtcttcgctgtgaacgcactcaacatctccgagaagcagcatgaggtgtattggaaggtctcagaagacaaaaaagcaaaatgtgcagaaaaggggaaatcaaaacagacagagtgcctcaactacatccgggtgctgcagccactcagcgccacttccctttacgtgtgtgggaccaacgcattccagccggcctgtgaccacctgaacttaacatcctttaagtttctggggaaaaatgaagatggcaaaggaagatgtccctttgacccagcacacagctacacatccgtcatggttgatggagaactttattcggggacgtcgtataattttttgggaagtgaacccatcatctcccgaaattcttcccacagtcctctgaggacagaatatgcaatcccttggctgaacgagcctagtttcgtgtttgctgacgtgatccgaaaaagcccagacagccccgacggcgaggatgacagggtctacttcttcttcacggaggtgtctgtggagtatgagtttgtgttcagggtgctgatcccacggatagcaagagtgtgcaagggggaccagggcggcctgaggaccttgcagaagaaatggacctccttcctgaaagcccgactcatctgctcccggccagacagcggcttggtcttcaatgtgctgcgggatgtcttcgtgctcaggtccccgggcctgaaggtgcctgtgttctatgcactcttcaccccacagctgaacaacgtggggctgtcggcagtgtgcgcctacaacctgtccacagccgaggaggtcttctcccacgggaagtacatgcagagcaccacagtggagcagtcccacaccaagtgggtgcgctataatggcccggtacccaagccgcggcctggagcgtgcatcgacagcgaggcacgggccgccaactacaccagctccttgaatttgccagacaagacgctgcagttcgttaaagaccaccctttgatggatgactcggtaaccccaatagacaacaggcccaggttaatcaagaaagatgtgaactacacccagatcgtggtggaccggacccaggccctggatgggactgtctatgatgtcatgtttgtcagcacagaccggggagctctgcacaaagccatcagcctcgagcacgctgttcacatcatcgaggagacccagctcttccaggactttgagccagtccagaccctgctgctgtcttcaaagaagggcaacaggtttgtctatgctggctctaactcgggcgtggtccaggccccgctggccttctgtgggaagcacggcacctgcgaggactgtgtgctggcgcgggacccctactgcgcctggagcccgcccacagcgacctgcgtggctctgcaccagaccgagagccccagcaggggtttgattcaggagatgagcggcgatgcttctgtgtgcccggcctcgtctcctaagcccctccctcctcctggctcctcttccctgtcctgtctgggccatgtgggggacaggaggctttcctctccctggaccccctggccagcctcgggtgcggggcccgacagcagctcgagggtctccttgctgccgcccttcctgagtgaccaggcacagcacgtgcacgccctggggaacttctacctcttctgccaggccacaggtcctgcagacattcgctttgtctgggagaagaatgggcgagctctggagacctgtgtccctgtgcagacccatgcactgcccgatggcagggcccatgcactcagctggctgcaggacgccatcagggaaagcgctgagtatcgctgctctgtcctctcctcagcagggaacaagacttcgaaggtgcaggttgctgtgatgagacctgaagtgacccaccaggagaggtggaccagagagctctctgcctggagggctgtggctggggagcacgaccggatgatgcagagctggaggaaggcgtgggaaagctgtagcaaggacaccctgtagccaccaggaaggagtccctgacaccgacctcaaccccaacaagaccctgctgccactgaccacagccacccccggagaaggcctggtcccccacaactgtgaactgtcttgcccaagcctgctctgaacacagccattgggccaccacctgatgggcagaggcgggacagtggagaagcctggaacccaagtgggcctgtgacaggaactaagacttaaaaaattaggtgcttacctgggacagtaagttctgtctggcacaagcaggtaaccaggatggctaacaggctttgatagctgctcgtgaactaaaacagcagggtgtgtgcaggttcctcctctacggtcaggcagcaggctctgaaggctgatcctacaccgtcccagtgactccccttgacagagtgcccccaccccctaatagccaacagggttagcatggccagcacagatcgctgcttttattgatgcaaatcaagcctgctgcttctcctccctgcagacttagccaaggaactccaagatgcatgactgggacaagaaaaggtgagactccacatggaaatgccttgccctaaaccttgaatgactgtgagatgcgatctgggagtgcatctgtcaagtctttgtgttttcttcactaacctcagaatactgggctctattttatcaagcgctgcagtttatgcctctgtcccgtcaatgctcagcttctgcaacaggacaccaaacttgatgcagaaagccaaataggtcaattatgcaaatctcctggtgccatattaaatttctt

SEQ ID NO: 18641 - DNA, 2895 bp, Homo sapiens
  source 1..2895: mol_type = unassigned DNA
ggcaacccgctcgggtccccttccacactgtggaagctttgttctttcgctcttgctactgctagctctttgggtccacgctgcttttatgagctgtaacactcaccgcgaagatctgcagcttcactcctgagcccagcgagaccacgagcccaccgggaggaacgaacaactccagacgcgctgccttaagagctgtaacactcaccgtgaaggtctgcagcttcactcccgagccagcgagaccacgaacccaccagaaggaagaaactctgaacacatctgaacatcagaagggacagactccagacgcgccaccactctgctaacaccagatagtggaaagaaaccatgtgctgaaatgtttgacgacactgatggtttgcaaagatttctgaagacgtctttctagaaatgactggaaagtttcaagaggcataagatacagcatttcttctgaggccctgaagaagtatcaagtgggctttgacattgcggtggtgagagcgacccctcctcacctggagaactgggaaatgtggattctcagggaccgcgctgttcacgagctccaggctgtgctgctggccctggtcctggggcgctgagccgcatctgcaatagcacacctgcccggccacctgctgccgtgagcctttgctgctgaagcccctggggtcgcctctacctgatgaggatgtgcacccccattagggggctgctcatggcccttgcagtgatgtttgggacagcgatggcatttgcacccataccccggatcacctgggagcacagagaggtgcacctggtgcagtttcatgagccagacatctacaactactcagccttgctgctgagcgaggacaaggacaccttgtacataggtgcccgggaggcggtcttcgctgtgaacgcactcaacatctccgagaagcagcatgaggtgtattggaaggtctcagaagacaaaaaagcaaaatgtgcagaaaaggggaaatcaaaacagacagagtgcctcaactacatccgggtgctgcagccactcagcgccacttccctttacgtgtgtgggaccaacgcattccagccggcctgtgaccacctgaacttaacatcctttaagtttctggggaaaaatgaagatggcaaaggaagatgtccctttgacccagcacacagctacacatccgtcatggttgatggagaactttattcggggacgtcgtataattttttgggaagtgaacccatcatctcccgaaattcttcccacagtcctctgaggacagaatatgcaatcccttggctgaacgagcctagtttcgtgtttgctgacgtgatccgaaaaagcccagacagccccgacggcgaggatgacagggtctacttcttcttcacggaggtgtctgtggagtatgagtttgtgttcagggtgctgatcccacggatagcaagagtgtgcaagggggaccagggcggcctgaggaccttgcagaagaaatggacctccttcctgaaagcccgactcatctgctcccggccagacagcggcttggtcttcaatgtgctgcgggatgtcttcgtgctcaggtccccgggcctgaaggtgcctgtgttctatgcactcttcaccccacagctgaacaacgtggggctgtcggcagtgtgcgcctacaacctgtccacagccgaggaggtcttctcccacgggaagtacatgcagagcaccacagtggagcagtcccacaccaagtgggtgcgctataatggcccggtacccaagccgcggcctggagcgtgcatcgacagcgaggcacgggccgccaactacaccagctccttgaatttgccagacaagacgctgcagttcgttaaagaccaccctttgatggatgactcggtaaccccaatagacaacaggcccaggttaatcaagaaagatgtgaactacacccagatcgtggtggaccggacccaggccctggatgggactgtctatgatgtcatgtttgtcagcacagaccggggagctctgcacaaagccatcagcctcgagcacgctgttcacatcatcgaggagacccagctcttccaggactttgagccagtccagaccctgctgctgtcttcaaagaaggtcctgcagacattcgctttgtctgggagaagaatgggcgagctctggagacctgtgtccctgtgcagacccatgcactgcccgatggcagggcccatgcactcagctggctgcaggacgccatcagggaaagcgctgagtatcgctgctctgtcctctcctcagcagggaacaagacttcgaaggtgcaggttgctgtgatgagacctgaagtgacccaccaggagaggtggaccagagagctctctgcctggagggctgtggctggggagcacgaccggatgatgcagagctggaggaaggcgtgggaaagctgtagcaaggacaccctgtagccaccaggaaggagtccctgacaccgacctcaaccccaacaagaccctgctgccactgaccacagccacccccggagaaggcctggtcccccacaactgtgaactgtcttgcccaagcctgctctgaacacagccattgggccaccacctgatgggcagaggcgggacagtggagaagcctggaacccaagtgggcctgtgacaggaactaagacttaaaaaattaggtgcttacctgggacagtaagttctgtctggcacaagcaggtaaccaggatggctaacaggctttgatagctgctcgtgaactaaaacagcagggtgtgtgcaggttcctcctctacggtcaggcagcaggctctgaaggctgatcctacaccgtcccagtgactccccttgacagagtgcccccaccccctaata

SEQ ID NO: 18642 - DNA, 2024 bp, Homo sapiens
  source 1..2024: mol_type = unassigned DNA
cctctcgcagctggtgctgtggggccgcggagccgcgcgtcgctgtctctatggccccggatccgagcgcaaagaaaacggacctcagaaaaccaggactagctctactgtcgggggcagggtgaccccatcagtaacctacaacccctctagaacttcacaactccctctcaccatggagtttgcatttgatgcagaaaggcatgtgatccctccctccttctgacctcttagctggggattccatggccacacaaccctgtgactccatgtccccccgattccaggaccccccatggccccatgattccttgactcctatgaccttatgacccctgaccttccaagtgacttccttggactttgacccctgtgactgtgcttcccattccccgcccccacaacctgtgactctggctccctttgggggtcttgttagtctgggcctccccaggaagatgtgggggaggctctggcccctcctcctcagcatcctcacagcaactgcagtcccaggaccctcactgcggagaccgtctagagaactagatgccacccctcggatgaccataccctatgaagagctctctgggacccggcacttcaagggccaagcccagaactactcaacactgctgctggaggaggcctcagcaaggctgctggtgggagcccgaggtgccctgttctctctcagtgccaacgacataggagatggggctcacaaagagatccactgggaagcctccccagagatgcaaagcaaatgtcatcaaaaagggaaaaacaaccagacggagtgctttaaccatgtgcggttcctgcagcggctcaattctacccacctctatgcatgtgggactcacgccttccagcccctctgtgcagccattgatgctgaggccttcaccttgccaaccagcttcgaggaggggaaggagaagtgtccttatgacccagcccgtggcttcacaggcctcatcattgatggaggcctctacacagccactaggtatgaattccggagcattcctgacatccgccggagccgccacccacactccctgagaactgaggagacaccaatgcattggctcaatgatgcggagtttgtgttctccgtcctcgtgcgggagagcaaggccagtgcagtgggtgatgatgacaaggtgtactacttcttcacggagcgtgccactgaggagggctctggcagcttcactcagagccgcagcagtcaccgtgtggcccgtgtggctcgtgtctgcaagggagacctgggagggaagaagatcctgcagaagaagtggacttccttcctgaaagcccgtctcatctgccacattccactgtatgagacactgcgtggggtctgcagcctggatgctgaaacctcaagccgtacacacttctatgcagccttcacgctgagcacacagtggaagaccctggaggcctcagccatctgccgctatgacctggcagagatccaggctgtctttgcaggaccctatatggaataccaggatggttcccggcgctggggtcgctatgagggtggggtgcctgagccccggcctggctcgtgtatcacagattcattgcgcagccaaggctacaattcatcccaagacttgccatccctggtcctggactttgtaaagttgcacccactgatggctcggcccgttgtgcccacacgtggacggcccctgctgctcaagcgcaacatacgctacacacaccttacagggacacctgtcaccacgcctgctggacctacctatgacctgctctttctgggcacagctgatggctggatccacaaggccgtagtcctgggctctgggatgcacattattgaagagacacaagtgttcagggagtcccagtctgtggaaaatctagtcatctctctattgcagcacagcctctatgtgggggctcctagcggagtcatccagctaccactctccagctgctcccgctaccgatcctgctatgactgcatcttggcccgagac

SEQ ID NO: 18643 - DNA, 4656 bp, Homo sapiens
  source 1..4656: mol_type = unassigned DNA
cgcagctggtgctgtggggccgcggagccgcgcgtcgctgtctctatggccccggatccgagcgcaaaggtgagcaaggcgaggagtgcgggcggcgccctggcgtgagcctggggctgcgggccgggggtcgggcaaggcctcccccacgtccattctaccctccaagctgggccaggcctttctcaccaccaagtcccccggtcctgcatgacggctctagaggggcgcgggccaggcctcgggctgcgcggggtgcaaaccggccaccacggagtcggggaccagcgcggggagggggccgcgtggcgaacagtgttccccaggatctgggtcacgtctcccggcgtccggcgggatcgaaggagagcttgtcctcgagctgcagcagtagagactgagaaaacggacctcagaaaaccaggactagctctactgtcgggggcagggtgaccccatcagtaacctacaacccctctagaacttcacaactccctctcaccatggagtttgcatttgatgcagaaaggcatgtgatccctccctccttctgacctcttagctggggattccatggccacacaaccctgtgactccatgtccccccgattccaggaccccccatggccccatgattccttgactcctatgaccttatgacccctgaccttccaagtgacttccttggactttgacccctgtgactgtgcttcccattccccgcccccacaacctgtgactctggctccctttgggggtcttgttagtctgggcctccccaggaagatgtgggggaggctctggcccctcctcctcagcatcctcacagcaactgcagtcccaggaccctcactgcggagaccgtctagagaactagatgccacccctcggatgaccataccctatgaagagctctctgggacccggcacttcaagggccaagcccagaactactcaacactgctgctggaggaggcctcagcaaggctgctggtgggagcccgaggtgccctgttctctctcagtgccaacgacataggagatggggctcacaaagagatccactgggaagcctccccagagatgcaaagcaaatgtcatcaaaaagggaaaaacaaccagacggagtgctttaaccatgtgcggttcctgcagcggctcaattctacccacctctatgcatgtgggactcacgccttccagcccctctgtgcagccattgatgctgaggccttcaccttgccaaccagcttcgaggaggggaaggagaagtgtccttatgacccagcccgtggcttcacaggcctcatcattgatggaggcctctacacagccactaggtatgaattccggagcattcctgacatccgccggagccgccacccacactccctgagaactgaggagacaccaatgcattggctcaatgatgcggagtttgtgttctccgtcctcgtgcgggagagcaaggccagtgcagtgggtgatgatgacaaggtgtactacttcttcacggagcgtgccactgaggagggctctggcagcttcactcagagccgcagcagtcaccgtgtggcccgtgtggctcgtgtctgcaagggagacctgggagggaagaagatcctgcagaagaagtggacttccttcctgaaagcccgtctcatctgccacattccactgtatgagacactgcgtggggtctgcagcctggatgctgaaacctcaagccgtacacacttctatgcagccttcacgctgagcacacagtggaagaccctggaggcctcagccatctgccgctatgacctggcagagatccaggctgtctttgcaggaccctatatggaataccaggatggttcccggcgctggggtcgctatgagggtggggtgcctgagccccggcctggctcgtgtatcacagattcattgcgcagccaaggctacaattcatcccaagacttgccatccctggtcctggactttgtaaagttgcacccactgatggctcggcccgttgtgcccacacgtggacggcccctgctgctcaagcgcaacatacgctacacacaccttacagggacacctgtcaccacgcctgctggacctacctatgacctgctctttctgggcacagctgatggctggatccacaaggccgtagtcctgggctctgggatgcacattattgaagagacacaagtgttcagggagtcccagtctgtggaaaatctagtcatctctctattgcagcacagcctctatgtgggggctcctagcggagtcatccagctaccactctccagctgctcccgctaccgatcctgctatgactgcatcttggcccgagacccctactgtggctgggaccctggcacccatgcctgcgcagcagccaccaccatagccaacaggacagcactgatacaggacatagagagaggaaatcgaggctgtgagagcagcagggatacagggccaccaccaccactgaagacccgctctgtgctccggggtgatgatgtcctcctgccctgtgaccagccatccaacctggcccgggccttgtggctactcaatgggagcatgggcctgagcgatgggcagggtggctaccgtgtgggcgtggacgggctgctggttacagatgcacagcctgagcacagtggcaactatggctgctatgccgaggaaaatggcctccgcaccctgctggcctcctatagtctcacagtccggccagccactcctgccccagctccaaaagcccctgccacacctggggcacagctggcacctgatgtgagactgctctatgtgctagccattgccgcgcttggtggcctctgcctcatcctggcctcctccctcctctatgtggcctgtctgcgggaaggcagacgagggcgccgacggaaatactcactgggtcgggccagccgggcaggaggatctgcggtgcaactgcagacagtctcaggccagtgtcctggagaggaagatgagggtgatgatgagggggctgggggcctggagggcagctgtctccagatcatccctggggagggagccccagccccaccacccccaccgcccccaccgccaccggctgagctgaccaatggcttggtggcactgcccagccggctgcggaggatgaatggcaatagctatgtgcttctgaggcagagcaacaatggagtaccagcagggccctgctccttcgccgaggaactcagccgcatcctggaaaaaaggaagcacacgcagctcgtggagcagctagatgagagctctgtctgagcccagcctcccagaacaaatgctcttccaagccagcctatctgtcccaggctgggccactgcctccctaacacagccaccctcccttcattacccccactccatacccttctcccaactttttgatgtccctgtagggctggccagtcaggcccagccaaagccccctcctcagtctccacagacccacatgtgagcagcccaggcccatcggtgctcctcagaggcagggctctgcaggtccatatgggctcaatgtcaccaccctctgcatggccctgtgtgctggatggtcctgaaaccagacaagacctctgccagccacctaagccctgcgtacattcacatgcacacatggaagaatgtttatcggctgggctgcagtgcccccaccctcaccttctcctggtgcattcttgtttcatccctgcttctggacttggggtaccctcccaattgccacatcctatctggtcctcttccccagccccatgtggtgacctctttgtcaagagcttgggaacgggccagcctggggaggtaagactgcatcactcccctcctctcccttcctgtgtggcccttgtgaatcagcctccccactctccttggtcattctcaagagtatgagagacagagctccaggcatgtcccatccccatgcacatgtggtaacacacacctgtatcacacatgtgcttacatttccactcacatgcacctctgagcctcccttgctgtcttggacctgtctgttgggtttagtccgtggacatttcagagggagatccccctcccatttaactgtcctcacaggcccttgcctaggatggatgaccaacactgcactcaatgagccagcctctcttttgggggaatcaagcatttgcttcctctagactacagcagggaaagggaggagaaatctgatgtctcaactggcacatgaagcccattcttggaactatgcaaagggcagaggctgggagtttggacgcttagctcctacccctgtcctacctcaccggggcactttcaggggccaggggcctctgaagtctctaggcctatatgggacaatcaattctgactgagctcccccattcccctcgggtgaggatgactgttatttttgtagctgagaacgtggaatcccacgggtttttactgcccttcacccaacctctcccacctccaccccacaatgaatgtatttattgtgagaatggctacacttctttaggaatgcccccacttacaaccaggtgggtggaacaggcatgtgacagagtggggagcctgggctcagctcctccccctgccgttggttaataaacaccctttttccccaca

SEQ ID NO: 18644 - DNA, 596 bp, Homo sapiens
  source 1..596: mol_type = unassigned DNA
gctggtgctgtggggccgcggagccgcgcgtcgctgtctctatggccccggatccgagcgcaaagtctgggcctccccaggaagatgtgggggaggctctggcccctcctcctcagcatcctcacagcaactgcagtcccaggaccctcactgcggagaccgtctagagaactagatgccacccctcggatgaccataccctatgaagagctctctgggacccggcacttcaagggccaagcccagaactactcaacactgctgctggaggaggcctcagcaaggctgctggtgggagcccgaggtgccctgttctctctcagtgccaacgacataggagatggggctcacaaagagatccactgggaagcctccccagagatgcaaagcaaatgtcatcaaaaagggaaaaacaaccagacggagtgctttaaccatgtgcggttcctgcagcggctcaattctacccacctctatgcatgtgggactcacgccttccagcccctctgtgcagccattgatgctgaggccttcaccttgccaaccagcttcgaggaggggaaggagaagtgtccttatgacccagcccgtggctt

SEQ ID NO: 18645 - DNA, 652 bp, Homo sapiens
  source 1..652: mol_type = unassigned DNA
ggtgctgtggggccgcggagccgcgcgtcgctgtctctatggccccggatccgagcgcaaagctgggccaggcctttctcaccaccaagtcccccggtcctgcatgacggctctagaggggcgcgggccaggcctcgggctgcgcggggtgcaaaccggccaccacggagtcggggaccagcgcggggagggggccgcgtggcgaacagtgttccccaggatctgggtcacgtctcccggcgtccggcgggatcgaaggagagcttgtcctcgagctgcagcagtagagactgagaaaacggacctcagaaaaccaggactagctctactgtcgggggcagggtgaccccatcagtaacctacaacccctctagaacttcacaactccctctcaccatggagtttgcatttgatgcagaaaggcatgtgatccctccctccttctgacctcttagctggggattccatggccacacaaccctgtgactccatgtccccccgattccaggaccccccatggccccatgattccttgactcctatgaccttatgacccctgaccttccaagtgacttccttggactttgacccctgtgactgtgcttcccattccccgcccccacaacctgtgactctggctccctttgggggt

SEQ ID NO: 18646 - DNA, 3596 bp, Homo sapiens
  source 1..3596: mol_type = unassigned DNA
cagaaaaccaggactagctctactgtcgggggcagggtgaccccatcagtaacctacaacccctctagaacttcacaactccctctcaccatggagtttgcatttgatgcagaaaggcatgtgatccctccctccttctgacctcttagctggggattccatggccacacaaccctgtgactccatgtccccccgattccaggaccccccatggccccatgattccttgactcctatgaccttatgacccctgaccttccaagtgacttccttggactttgacccctgtgactgtgcttcccattccccgcccccacaacctgtgactctggctccctttgggggtcttgttagtctgggcctccccaggaagatgtgggggaggctctggcccctcctcctcagcatcctcacagcaactgcagtcccaggaccctcactgcggagaccgtctagagaactagatgccacccctcggatgaccataccctatgaagagctctctgggacccggcacttcaagggccaagcccagaactactcaacactgctgctggaggaggcctcagcaaggctgctggtgggagcccgaggtgccctgttctctctcagtgccaacgacataggagatggggctcacaaagagatccactgggaagcctccccagagatgcaaagcaaatgtcatcaaaaagggaaaaacaaccagacggagtgctttaaccatgtgcggttcctgcagcggctcaattctacccacctctatgcatgtgggactcacgccttccagcccctctgtgcagccattgatgctgaggccttcaccttgccaaccagcttcgaggaggggaaggagaagtgtccttatgacccagcccgtggcttcacaggcctcatcattgatggaggcctctacacagccactaggtatgaattccggagcattcctgacatccgccggagccgccacccacactccctgagaactgaggagacaccaatgcattggctcaatgatgcggagtttgtgttctccgtcctcgtgcgggagagcaaggccagtgcagtgggtgatgatgacaaggtgtactacttcttcacggagcgtgccactgaggagggctctggcagcttcactcagagccgcagcagtcaccgtgtggcccgtgtggctcgtgtctgcaagggagacctgggagggaagaagatcctgcagaagaagtggacttccttcctgaaagcccgtctcatctgccacattccactgtatgagacactgcgtggggtctgcagcctggatgctgaaacctcaagccgtacacacttctatgcagccttcacgctgagcacacagtggaagaccctggaggcctcagccatctgccgctatgacctggcagagatccaggctgtctttgcaggaccctatatggaataccaggatggttcccggcgctggggtcgctatgagggtggggtgcctgagccccggcctggctcgtgtatcacagattcattgcgcagccaaggctacaattcatcccaagacttgccatccctggtcctggactttgtaaagttgcacccactgatggctcggcccgttgtgcccacacgtggacggcccctgctgctcaagcgcaacatacgctacacacaccttacagggacacctgtcaccacgcctgctggacctacctatgacctgctctttctgggcacagctgatggctggatccacaaggccgtagtcctgggctctgggatgcacattattgaagagacacaagtgttcagggagtcccagtctgtggaaaatctagtcatctctctattgcagcacagcctctatgtgggggctcctagcggagtcatccagctaccactctccagctgctcccgctaccgatcctgctatgactgcatcttggcccgagacccctactgtggctgggaccctggcacccatgcctgcgcagcagccaccaccatagccaacaggacagcactgatacaggacatagagagaggaaatcgaggctgtgagagcagcagggatacagggccaccaccaccactgaagacccgctctgtgctccggggtgatgatgtcctcctgccctgtgaccagccatccaacctggcccgggccttgtggctactcaatgggagcatgggcctgagcgatgggcagggtggctaccgtgtgggcgtggacgggctgctggttacagatgcacagcctgagcacagtggcaactatggctgctatgccgaggaaaatggcctccgcaccctgctggcctcctatagtctcacagtccggccagccactcctgccccagctccaaaagcccctgccacacctggggcacagctggcacctgatgtgagactgctctatgtgctagccattgccgcgcttggtggcctctgcctcatcctggcctcctccctcctctatgtggcctgtctgcgggaaggcagacgagggcgccgacggaaatactcactgggtcgggccagccgggcaggaggatctgcggtgcaactgcagacagtctcaggccagtgtcctggagaggaagatgagggtgatgatgagggggctgggggcctggagggcagctgtctccagatcatccctggggagggagccccagccccaccacccccaccgcccccaccgccaccggctgagctgaccaatggcttggtggcactgcccagccggctgcggaggatgaatggcaatagctatgtgcttctgaggcagagcaacaatggagtaccagcagggccctgctccttcgccgaggaactcagccgcatcctggaaaaaaggaagcacacgcagctcgtggagcagctagatgagagctctgtctgagcccagcctcccagaacaaatgctcttccaagccagcctatctgtcccaggctgggccactgcctccctaacacagccaccctcccttcattacccccactccatacccttctcccaactttttgatgtccctgtagggctggccagtcaggcccagccaaagccccctcctcagtctccacagacccacatgtgagcagcccaggcccatcggtgctcctcagaggtaggtgctccctcaggatcaggtgccctgcagacccagagccagttcctatcccctaacctaaacacttataggtgaggactccatcctcctgttccattcatctgcccaaaccctttctctttctcccaggcagggctctgcaggtccatatgggctcaatgtcaccaccctctgcatggccctgtgtgctggatggtcctgaaaccagacaagacctctgccagccacctaagccctgcgtacattcacatgcacacatggaagaatgtttatcggctgggctgcagtgcccccaccctcaccttctcctggtgcattcttgtttcatccctgcttctggacttggggtaccctcccaattgccacatcctatctggtcctcttccccagccccatgtggtgacctctttgtcaagagcttgggaacgggccagcctggggaggtaagactgcatcactcccctcctctcccttcct

SEQ ID NO: 18647 - DNA, 2675 bp, Homo sapiens
  source 1..2675: mol_type = unassigned DNA
ccctgtgactccatgtccccccgattccaggaccccccatggccccatgattccttgactcctatgaccttatgacccctgaccttccaagtgacttccttggactttgacccctgtgactgtgcttcccattccccgcccccacaacctgtgactctggctccctttgggggtcttgttagtctgggcctccccaggaagatgtgggggaggctctggcccctcctcctcagcatcctcacagcaactgcagtcccaggaccctcactgcggagaccgtctagagaactagatgccacccctcggatgaccataccctatgaagagctctctgggacccggcacttcaagggccaagcccagaactactcaacactgctgctggaggaggcctcagcaaggctgctggtgggagcccgaggtgccctgttctctctcagtgccaacgacataggagatggggctcacaaagagatccactgggaagcctccccagagatgcaaagcaaatgtcatcaaaaagggaaaaacaaccagacggagtgctttaaccatgtgcggttcctgcagcggctcaattctacccacctctatgcatgtgggactcacgccttccagcccctctgtgcagccattgatgctgaggccttcaccttgccaaccagcttcgaggaggggaaggagaagtgtccttatgacccagcccgtggcttcacaggcctcatcattgatggaggcctctacacagccactaggtatgaattccggagcattcctgacatccgccggagccgccacccacactccctgagaactgaggagacaccaatgcattggctcaatgatgcggagtttgtgttctccgtcctcgtgcgggagagcaaggccagtgcagtgggtgatgatgacaaggtgtactacttcttcacggagcgtgccactgaggagggctctggcagcttcactcagagccgcagcagtcaccgtgtggcccgtgtggctcgtgtctgcaagggagacctgggagggaagaagatcctgcagaagaagtggacttccttcctgaaagcccgtctcatctgccacattccactgtatgagacactgcgtggggtctgcagcctggatgctgaaacctcaagccgtacacacttctatgcagccttcacgctgagcacacagtggaagaccctggaggcctcagccatctgccgctatgacctggcagagatccaggctgtctttgcaggaccctatatggaataccaggatggttcccggcgctggggtcgctatgagggtggggtgcctgagccccggcctggctcgtgtatcacagattcattgcgcagccaaggctacaattcatcccaagacttgccatccctggtcctggactttgtaaagttgcacccactgatggctcggcccgttgtgcccacacgtggacggcccctgctgctcaagcgcaacatacgctacacacaccttacagggacacctgtcaccacgcctgctggacctacctatgacctgctctttctgggcacagctgatggctggatccacaaggccgtagtcctgggctctgggatgcacattattgaagagacacaagtgttcagggagtcccagtctgtggaaaatctagtcatctctctattgcagcacagcctctatgtgggggctcctagcggagtcatccagctaccactctccagctgctcccgctaccgatcctgctatgactgcatcttggcccgagacccctactgtggctgggaccctggcacccatgcctgcgcagcagccaccaccatagccaacaggtcccagggaagcaggacagcactgatacaggacatagagagaggaaatcgaggctgtgagagcagcagggatacaggcagggctctgcaggtccatatgggctcaatgtcaccaccctctgcatggccctgtgtgctggatggtcctgaaaccagacaagacctctgccagccacctaagccctgcgtacattcacatgcacacatggaagaatgtttatcggctgggctgcagtgcccccaccctcaccttctcctggtgcattcttgtttcatccctgcttctggacttggggtaccctcccaattgccacatcctatctggtcctcttccccagccccatgtggtgacctctttgtcaagagcttgggaacgggccagcctggggaggtaagactgcatcactcccctcctctcccttcctgtgtggcccttgtgaatcagcctccccactctccttggtcattctcaagagtatgagagacagagctccaggcatgtcccatccccatgcacatgtggtaacacacacctgtatcacacatgtgcttacatttccactcacatgcacctctgagcctcccttgctgtcttggacctgtctgttgggtttagtccgtggacatttcagagggagatccccctcccatttaactgtcctcacaggcccttgcctaggatggatgaccaacactgcactcaatgagccagcctctcttttgggggaatcaagcatttgcttcctctagactacagcagggaaagggaggagaaatctgatgtctcaactggcacatgaagcccattcttggaactatgcaaagggcagaggctgggagtttgga

SEQ ID NO: 18648 - DNA, 4094 bp, Homo sapiens
  source 1..4094: mol_type = unassigned DNA
gcttcccattccccgcccccacaacctgtgactctggctccctttgggggtcttgttagtctgggcctccccaggaagatgtgggggaggctctggcccctcctcctcagcatcctcacagcaactgcagtcccaggaccctcactgcggagaccgtctagagaactagatgccacccctcggatgaccataccctatgaagagctctctgggacccggcacttcaagggccaagcccagaactactcaacactgctgctggaggaggcctcagcaaggctgctggtgggagcccgaggtgccctgttctctctcagtgccaacgacataggagatggggctcacaaagagatccactgggaagcctccccagagatgcaaagcaaatgtcatcaaaaagggaaaaacaaccagacggagtgctttaaccatgtgcggttcctgcagcggctcaattctacccacctctatgcatgtgggactcacgccttccagcccctctgtgcagccattgatgctgaggccttcaccttgccaaccagcttcgaggaggggaaggagaagtgtccttatgacccagcccgtggcttcacaggcctcatcattgatggaggcctctacacagccactaggtatgaattccggagcattcctgacatccgccggagccgccacccacactccctgagaactgaggagacaccaatgcattggctcaatgatgcggagtttgtgttctccgtcctcgtgcgggagagcaaggccagtgcagtgggtgatgatgacaaggtgtactacttcttcacggagcgtgccactgaggagggctctggcagcttcactcagagccgcagcagtcaccgtgtggcccgtgtggctcgtgtctgcaagggagacctgggagggaagaagatcctgcagaagaagtggacttccttcctgaaagcccgtctcatctgccacattccactgtatgagacactgcgtggggtctgcagcctggatgctgaaacctcaagccgtacacacttctatgcagccttcacgctgagcacacagtggaagaccctggaggcctcagccatctgccgctatgacctggcagagatccaggctgtctttgcaggaccctatatggaataccaggatggttcccggcgctggggtcgctatgagggtggggtgcctgagccccggcctggctcgtgtatcacagattcattgcgcagccaaggctacaattcatcccaagacttgccatccctggtcctggactttgtaaagttgcacccactgatggctcggcccgttgtgcccacacgtggacggcccctgctgctcaagcgcaacatacgctacacacaccttacagggacacctgtcaccacgcctgctggacctacctatgacctgctctttctgggcacagctgatggctggatccacaaggccgtagtcctgggctctgggatgcacattattgaagagacacaagtgttcagggagtcccagtctgtggaaaatctagtcatctctctattgcagcacagcctctatgtgggggctcctagcggagtcatccagctaccactctccagctgctcccgctaccgatcctgctatgactgcatcttggcccgagacccctactgtggctgggaccctggcacccatgcctgcgcagcagccaccaccatagccaacaggtcccagggaagcaggacagcactgatacaggacatagagagaggaaatcgaggctgtgagagcagcagggatacagggccaccaccaccactgaagacccgctctgtgctccggggtgatgatgtcctcctgccctgtgaccagccatccaacctggcccgggccttgtggctactcaatgggagcatgggcctgagcgatgggcagggtggctaccgtgtgggcgtggacgggctgctggttacagatgcacagcctgagcacagtggcaactatggctgctatgccgaggaaaatggcctccgcaccctgctggcctcctatagtctcacagtccggccagccactcctgccccagctccaaaagcccctgccacacctggggcacagctggcacctgatgtgagactgctctatgtgctagccattgccgcgcttggtggcctctgcctcatcctggcctcctccctcctctatgtggcctgtctgcgggaaggcagacgagggcgccgacggaaatactcactgggtcgggccagccgggcaggaggatctgcggtgcaactgcagacagtctcaggccagtgtcctggagaggaagatgagggtgatgatgagggggctgggggcctggagggcagctgtctccagatcatccctggggagggagccccagccccaccacccccaccgcccccaccgccaccggctgagctgaccaatggcttggtggcactgcccagccggctgcggaggatgaatggcaatagctatgtgcttctgaggcagagcaacaatggagtaccagcagggccctgctccttcgccgaggaactcagccgcatcctggaaaaaaggaagcacacgcagctcgtggagcagctagatgagagctctgtctgagcccagcctcccagaacaaatgctcttccaagccagcctatctgtcccaggctgggccactgcctccctaacacagccaccctcccttcattacccccactccatacccttctcccaactttttgatgtccctgtagggctggccagtcaggcccagccaaagccccctcctcagtctccacagacccacatgtgagcagcccaggcccatcggtgctcctcagaggtaggtgctccctcaggatcaggtgccctgcagacccagagccagttcctatcccctaacctaaacacttataggtgaggactccatcctcctgttccattcatctgcccaaaccctttctctttctcccaggcagggctctgcaggtccatatgggctcaatgtcaccaccctctgcatggccctgtgtgctggatggtcctgaaaccagacaagacctctgccagccacctaagccctgcgtacattcacatgcacacatggaagaatgtttatcggctgggctgcagtgcccccaccctcaccttctcctggtgcattcttgtttcatccctgcttctggacttggggtaccctcccaattgccacatcctatctggtcctcttccccagccccatgtggtgacctctttgtcaagagcttgggaacgggccagcctggggaggtaagactgcatcactcccctcctctcccttcctgtgtggcccttgtgaatcagcctccccactctccttggtcattctcaagagtatgagagacagagctccaggcatgtcccatccccatgcacatgtggtaacacacacctgtatcacacatgtgcttacatttccactcacatgcacctctgagcctcccttgctgtcttggacctgtctgttgggtttagtccgtggacatttcagagggagatccccctcccatttaactgtcctcacaggcccttgcctaggatggatgaccaacactgcactcaatgagccagcctctcttttgggggaatcaagcatttgcttcctctagactacagcagggaaagggaggagaaatctgatgtctcaactggcacatgaagcccattcttggaactatgcaaagggcagaggctgggagtttggacgcttagctcctacccctgtcctacctcaccggggcactttcaggggccaggggcctctgaagtctctaggcctatatgggacaatcaattctgactgagctcccccattcccctcgggtgaggatgactgttatttttgtagctgagaacgtggaatcccacgggtttttactgcccttcacccaacctctcccacctccaccccacaatgaatgtatttattgtgagaatggctacacttctttaggaatgcccccacttacaaccaggtgggtggaacaggcatgtgacagagtggggagcctgggctcagctcctccccctgccgttggttaataaacaccctttttccccac

SEQ ID NO: 18649 - DNA, 728 bp, Homo sapiens
  source 1..728: mol_type = unassigned DNA
gagaactagatgccacccctcggatgaccataccctatgaagagctctctgggacccggcacttcaagggccaagcccagaactactcaacactgctgctggaggaggcctcagcaaggctgctggtgggagcccgaggtgccctgttctctctcagtgccaacgacataggagatggggctcacaaagagatccactgggaagcctccccagagatgcaaagcaaatgtcatcaaaaagggaaaaacaaccagacggagtgctttaaccatgtgcggttcctgcagcggctcaattctacccacctctatgcatgtgggactcacgccttccagcccctctgtgcagccattgatgctgaggccttcaccttgccaaccagcttcgaggaggggaaggagaagtgtccttatgacccagcccgtggcttcacaggcctcatcattgatggaggcctctacacagccactaggtatgaattccggagcattcctgacatccgccggagccgccacccacactccctgagaactgaggagacaccaatgcattggctcaatgggagacctgggagggaagaagatcctgcagaagaagtggacttccttcctgaaagcccgtctcatctgccacattccactgtatgagacactgcgtggggtctgcagcctggatgctgaaacctcaagccgtacacacttctatgcagccttcacgctgagcacaca

SEQ ID NO: 18650 - DNA, 376 bp, Homo sapiens
  source 1..376: mol_type = unassigned DNA
gctaccactctccagctgctcccgctaccgatcctgctatgactgcatcttggcccgagacccctactgtggctgggaccctggcacccatgcctgcgcagcagccaccaccatagccaacaggacagcactgatacaggacatagagagaggaaatcgaggctgtgagagcagcagggatacaggtaagtgactcatatgagtgtgggtctagctacgcagactgtcctctttgccatttactgccatgtgtacgtatatgtttgtatctgagtggctgtggctatgtacatttggtaaggatgactcaaacacagagcctggcacagagtaagtgctcaacaaacatttactgcccaaatgaattataaactag

SEQ ID NO: 18651 - DNA, 393 bp, Homo sapiens
  source 1..393: mol_type = unassigned DNA
gcgggaaggcagacgagggcgccgacggaaatactcactgggtcgggccagccgggcaggaggatctgcggtgcaactgcagacagtctcaggcagggctctgcaggtccatatgggctcaatgtcaccaccctctgcatggccctgtgtgctggatggtcctgaaaccagacaagacctctgccagccacctaagccctgcgtacattcacatgcacacatggaagaatgtttatcggctgggctgcagtgcccccaccctcaccttctcctggtgcattcttgtttcatccctgcttctggacttggggtaccctcccaattgccacatcctatctggtcctcttccccagccccatgtggtgacctctttgtcaagagcttgggaacggg

SEQ ID NO: 18652 - DNA, 714 bp, Homo sapiens
  source 1..714: mol_type = unassigned DNA
cctcccttcattacccccactccatacccttctcccaactttttgatgtccctgtagggctggccagtcaggcccagccaaagccccctcctcagtctccacagacccacatgtgagcagcccaggcccatcggtgctcctcagaggcagggctctgcaggtccatatgggctcaatgtcaccaccctctgcatggccctgtgtgctggatggtcctgaaaccagacaagacctctgccagccacctaagccctgcgtacattcacatgcacacatggaagaatgtttatcggctgggctgcagtgcccccaccctcaccttctcctggtgcattcttgtttcatccctgcttctggacttggggtaccctcccaattgccacatcctatctggtcctcttccccagccccatgtggtgacctctttgtcaagagcttgggaacgggccagcctggggagctatgactagtctgcttcatctagatgcgcccacccctgatcaccaggggacaggctcctgagcctatacagaaggtgatatctgcctccaggattggctctgctccccaatacaactatttgcagaggaaattgggatcctccgcttccatcctgactccttggcaggcacacaggcctctttagtaaggttcacactattcattgatcatggtgttagggcatgacaagaaaatgacaacagttcaagaatt

SEQ ID NO: 18653 - DNA, 1171 bp, Homo sapiens
  source 1..1171: mol_type = unassigned DNA
cacagacccacatgtgagcagcccaggcccatcggtgctcctcagaggcagggctctgcaggtccatatgggctcaatgtcaccaccctctgcatggccctgtgtgctggatggtcctgaaaccagacaagacctctgccagccacctaagccctgcgtacattcacatgcacacatggaagaatgtttatcggctgggctgcagtgcccccaccctcaccttctcctggtgcattcttgtttcatccctgcttctggacttggggtaccctcccaattgccacatcctatctggtcctcttccccagccccatgtggtgacctctttgtcaagagcttgggaacgggccagcctggggaggtaagactgcatcactcccctcctctcccttcctgtgtggcccttgtgaatcagcctccccactctccttggtcattctcaagagtatgagagacagagctccaggcatgtcccatccccatgcacatgtggtaacacacacctgtatcacacatgtgcttacatttccactcacatgcacctctgagcctcccttgctgtcttggacctgtctgttgggtttagtccgtggacatttcagagggagatccccctcccatttaactgtcctcacaggcccttgcctaggatggatgaccaacactgcactcaatgagccagcctctcttttgggggaatcaagcatttgcttcctctagactacagcagggaaagggaggagaaatctgatgtctcaactggcacatgaagcccattcttggaactatgcaaagggcagaggctgggagtttggacgcttagctcctacccctgtcctacctcaccggggcactttcaggggccaggggcctctgaagtctctaggcctatatgggacaatcaattctgactgagctcccccattcccctcgggtgaggatgactgttatttttgtagctgagaacgtggaatcccacgggtttttactgcccttcacccaacctctcccacctccaccccacaatgaatgtatttattgtgagaatggctacacttctttaggaatgcccccacttacaaccaggtgggtggaacaggcatgtgacagagtggggagcctgggctcagctcctccccctgccgttggttaataaacaccctttttcccc

SEQ ID NO: 18654 - DNA, 11762 bp, Homo sapiens
  source 1..11762: mol_type = unassigned DNA
acttgccgggaaggcggcgccggtggcggctgctctccctgagcccgctcccgagcgctgctttcccgccgcgggtgggcttcgcagcctcaggccagccgcggcccttggcccgctgcagccccggccctccaccttccccgtgcaggggcggcccggccagtgtcgctcatcccgggacgctcccttctcccacccaggactgccccgcggagctggcttggacacccaactttgccacctcgagggtcgtctctgctgggcgcgaacctgcccacccaccggttggccgcgcgctcggggaccgtgctcgtggcccccaagccggtgcccccattctggaactcagcgagtagggggcggctctggggaagtggcagggggcggctgcagctgctgcctccacttccctagccaggtgctgaagaggatcctcggagccgctctggcccccaggcgctggatgactggcaccagcgctcctcgcacctgtgttggtgtgtgagacttgggctggagtgcccacgtggctgtggagtcagtgtgattcatgattgaggaaacgcgtcctccatcctctctctccttggcactttccacacatgaggagaagaagagcttctgtttagaagacacgtgcccagagtcagaggccccttgcccaccatgaagggaacctgtgttatagcatggctgttctcaagcctggggctgtggagactcgcccacccagaggcccagggtacgactcagtgccagagaaccgagcatccagtcatctcctataaagaaattggcccctggttacgggagttcagagcgaagaatgctgtggatttctcgcagttaacatttgacccaggacagaaagaacttgttgtaggagcaagaaactacctcttcaggttacagcttgaggatctgtctcttatccaggctgtggaatgggagtgtgatgaagctaccaaaaaggcctgttacagcaaaggcaaatcaaaggaggaatgtcagaactacatccgggtgcttctggtgggtggcgaccggttattcacctgtgggaccaatgcattcacgcctgtctgcaccaaccgctcgttgagcaacctgactgagatccatgatcagatcagtggcatggcccgctgtccctacagtccccagcacaattccacagcgctcctcacagctggtggggagctctatgctgctacagccatggattttccaggacgtgatcctgccatttaccgaagcctaggcattttacctcctctccgcacggcgcagtacaactccaaatggctcaatgagccaaactttgtgtcatcttatgacatcggaaattttacctacttctttttccgagaaaatgcagtagagcatgactgtgggaaaacagtgttctccagagctgcccgggtgtgcaagaacgatattggtgggcgcttcctgctggaagacacctggaccacattcatgaaggctcgcctgaactgctcccgtcctggggaagtccccttttactacaacgaattgcagagtactttcttcctgcctgagctggatttgatctatggcatctttaccaccaatgtgaacagcattgcggcctcagctgtgtgcgtcttcaacctgagcgccatcgcgcaggccttctctgggcccttcaagtaccaagaaaactcgcgctcggcctggctaccgtatcccaacccaaacccccacttccagtgtggcaccgtggaccagggcctgtacgtgaacctgaccgagagaaatctgcaggatgctcagaagttcattctgatgcatgaggtggtacagccagtgaccacagtgccctccttcatggaggacaatagccgcttttcccacgtggcagtcgacgtggtgcagggcagagaagcgctcgtccacatcatctatttggccacagattacggaaccattaagaaagtgcgggtacccctgaatcagacctcaagcagctgtttgctggaagagattgagctcttccctgagaggcggagggagcccatcaggagcctgcagatcctgcacagccagagtgtcctgttcgtgggcctgcgggagcacgtggtcaagatccccctgaagaggtgccagttctaccgcacacgcagcacctgcattggggcccaggacccttactgtggctgggatgtggtaatgaagaaatgcacaagcctggaggagagcctgagcatgacgcagtgggaacagagcatctctgcgtgtccgaccaggaatctcaccgtggatgggcactttggtgtgtggtctccgtggacgccttgcacgcacacagatggcagcgccgtgggatcctgcctctgtcgaacccgctcctgcgacagcccggccccgcagtgtggtggctggcagtgcgagggccctggcatggagatcgccaactgttccaggaacggaggctggactccctggacctcgtggtctccctgcagcactacctgtgggatcggcttccaggtgcggcagcgctcctgcagcaaccccactcccaggcacgggggccgggtgtgcgtgggacagaaccgcgaggaaagatactgcaatgaacatttgctatgtcccccacacatgttctggacaggctggggtccttgggaacggtgcacagcccaatgcgggggtggcattcaagctcgccgcaggatctgtgagaatgggcctgactgtgcaggctgcaatgtggagtaccagtcttgcaacaccaacccgtgtcctgagctgaagaagaccacgccctggacaccctggacacctgtcaacatctctgacaacggcggccactatgagcaacgattccgatacacatgcaaagcccgcctggctgatccgaatttgctggaagtgggaagacagagaatcgaaatgcggtactgttctagcgacggcaccagtggctgctccacagatgggctttctggggatttcctgcgtgctgggagatactctgcccacacggtcaacggggcttggtcagcctggacgtcgtggtcacagtgcagccgtgactgcagcaggggcattcggaaccggaagcgtgtttgcaacaaccccgaacccaagtatgggggaatgccttgccttggcccatctctggaataccaggaatgcaacattttgccctgcccagtggatggcgtgtggtcttgctggtccccctggacaaaatgttcagcaacatgcggcggtggacactatatgaggacccgctcttgctccaatccagccccggcctatggaggggacatctgcctggggctgcacacagaagaggcactctgcaacacgcagccctgcccagagagctggtcggagtggtcggactggtctgagtgtgaagcctctggcgtccaagtccgcgcccgccagtgcatcctcctgttccccatgggcagccagtgctccgggaacaccacggagagccggccgtgtgtgtttgactctaatttcatcccagaagtatctgtggcaagatccagtagcgtagaagagaaaaggtgtggagagttcaacatgttccacatgatcgccgtggggctgagcagctccatcctcggctgcctcctcaccctgctcgtctatacttactgccagcggtaccagcagcaatcccacgatgcgactgtcatccaccccgtctcacctgccccccttaataccagcataaccaaccacatcaacaaactggacaagtacgactcggtggaggccatcaaggcatttaacaaaaacaacttgatcctagaggaaagaaacaaatacttcaacccacatctcactgggaagacctattctaatgcctactttacagatctcaataattatgatgagtactaacagctttcatgtttttggcttcttgtaaatccccagttcctcaaggcctgtgccccatgactgcccatgtttctgaggcttcagagtcgaagtttggatacatttcaagtgcatttcaagccaccagagtgtcccattgctgccaaaaatacacgtctttaaaagcaacaaaaattgaaataagacatcgtgaaaatcttgaccattgttgaatgagccagggtgtgaagtttttaattgtgttcatcctatttttctgacaagtccattggtttgttttttgagcattattttataaatgtgccacccacattggaaggagtctttctttagaactttggagtgtaaatcttcatgatgttgtaattcaagaaaataggcactttctctgaaagacctgctccttccacaagaagtgcataggtccataatatttcataaaatgaagaaaaagaatgtggccaaacaattattcaccatggattgcccaactttccaaatctggataaagctgtgggattcttggaagcagcttgagtgttttcatcttgcctgggaagcccaggaattccacctggtccacaccggcagaagttacagtagactgtgaggcaccccaccttgctcctgatgcagtttctgtgccattgctggtgctggtggaggcagcggagcagaggctcaggcacaatgaagcgtggatgtgttctgcaggttgctgcaaaactcaccttattctgacttttggatttcatggcattccaggaagctccttgccatgctgttggcctggaagtccacctgtctggtccatagtgacgtcctgaagagccagtctgtaaaataaccaaccacttacttagcgtttggatagactccatgccttctctctccctgcaaagaaaaatcttgaacatttatgatgtcaattagtgaaagtattgaaaatactaaattataactaaaagcaactttttatgttattgaaaatattgaaagaactgatattaatgataatcattttatttttcatctctctgatatacccaatgtgtggcaatcagcccctaccacgagcattaataccatgtaaagctggctttctggagtctgccaggtccacacgaagtgctacccccagtttctgctgttacttgctgcctccaggccaggggagcaggagatgctcagctctggtgccttttcttttatttcagtgctgccttcccacccacccagtccattcaccctcacctctccctgcatggaggcaacagcatttcaagatgtaccttgggaagtcaggatagctggaagtaagggtttttgggatccctgtggtctcttcactgatcatcgataagcatttaagagtgtgctaacaccattcacagaggtccctggaaaaaaatatataattttctcacaaacaaccaatacataacctatggcagttggttgaataattattgaaaaaaagaacacgactgaaaaagttcatctgatgcctctgagcatgtgataaagtcctgggtagacacggaaacgtgttcttacaaatgaaccttcggatctatgaaagaaaatatagtagggggactaaggaacatagaattttattagcatatgtgattttacccttatctttgtttctaatttaaagaaacaatttcagaaagtgttagaagaattctatgtttaataatgaatattgttgagttcaaaatattctcatatacccagatttacagagatgacacagtattgaaatggcaggtgggctctgtaagttattttggattaatgacattcagggtctttgcagtggggacttcatgttgcctctcactcattcctcatatgtcagagtcttctgtctatatgcacatgctcaaagtccatactcagtaggggaaatctagccggatggttctccaattgttcctcggctggattttcatcatcagatatttcaactcatctcatcagtttcttgtaagaaaaaaacattttcactttgtagcacattttagttatttttgagtcttcttccctaatagtttgtaagcttaaagggacattttattttccctggtaaagaggattctaatatttcaagaatgtttcactggaattgatgggaaatggtttctaaatggcatcgaagctggtctttaatgagtcttttgcaatgacttgggaaaaacaccctccctcactacaggatcttcatgttgttaataatataaacaaacctttgaaattagcattgcaaaagaatcccatttttgtttcgtaccacactgttcaaaggaaaattgtttatctctcttcctttctctctctctcttatttgacagaatagcaagtgtttagataatttcagatatattctaagtattttaccagctgtggaataagttgtgtttgtccatcactgtgtagctaccgttcacatgttctggctctgtactccacgcttatcgcgtgaaccctcacatgttggactttcacagtgtgatctctcacctgtcttggaaactccttcataaagccgctcttccttaggcctgggctgtttggaagtcctggtgaaactttgcggttcacattttaaattcctgaatgaccttttcattctctctttctttatctttgtttttgtccttcattccctccttttgttcttccttcctgccttcttttcttctttcctttcttctttctttaattcttcctttcttcctattttcttggtacaagtggaacaaaaaccaacacatagttttaagctacacctttctgcacctgatgtaaaatgacattaatcactatttaacttctaaaattatttctgaatacagttggagataggctggttttcatgaggaagctggcttggctttagtcttacatttaaattctttgaaagtggctcccagtgctattcagggtcctttcttgaggccagactcatcaccatctactattgattttacagtgcactgacagtttacaggaaggagaagaacagaatttctgcacactacacaacatgtgggcttcctgtagctccagggacatgtagctttggtgaaactggggttttgtaacctctgaatgatatggacttagtgaattctaaggaactcagggggcacgtggtcaggctccaccgcacagaagagccacagtctccagactcatggcgttccctccagaactccccattcccctctgagcatatttctatgctgctgcttcttgtgacttacatgaggcatctcagcttcttcatgtttgtagggatggttccctaagcctgttcaagtaggctctcactagagttaccattcatatttgagaagaaaagaacatttaataaatgtatgtgtggggctgaggttctaaaggaattgaaaagagacgataaacattgaatgagggtgagggcatccctgctggggagaaacctctgtccctaggaagagtccgttcatgtcatgtggtttgggatgaaccaggggtctggccccatcgggtcacaggtgatggcaaatagaaaagaagcaaatggaggaaatagtcggataagtaggtgacgtgaaaggcaggacctggtcaccccagcaagtgctatggacagttcccggaaacggttgcccacttcacaggtccatgggtctgacccttggactctgccaggatcaactgcccagagtgccagagttttagccaaaggtgtacttacttccttatttatctgcaaaaggatggaaactgtgggagtcaaagcctattttgctgagtgttcccactggagtctctggtagaattagcaggtcatgctgtcaaaatcatggacaaaggctgggtgcagtggctcatgcctataatcccagcactttgggaggccaaggtgggcggatcacctgagctcaggagtttgagaccagcctgggcaacatggggaaactccatctctacaaaatatacaaaatattagccagccatcgtggtgcgtgcctgtggtcccagtttcttgggaggctgaggcgggagtatcatttgagccaggaggttgaggttgcagtgagctgagatcacatcactgcactccatcctgggtgacagagagagaccctgtctcaaaaaaaaaaaaaaagaacaaagtcttagcggggggtctctatgtccccaagtggctctctaaggggatccattagcgtataattgaatatcaaagggaattttaccttaaacatatatcaagtctatactcagctaatcgttttgtctaaacacagccttgttagcatttgaatttacaaatattcatttgcttatttgcagtgttccttttgcttttagaataaatcataaatatttccccaatactgtcaagatacttcttcaactttgtccctgaaccatcagctttctttagggtccgggtatcctttacacttcaatggggttttcttgtgtgtgtcattgggggtaactccattgacctcagcatttctatctcaagagatggctctggaacacagaaccagaggcaacaggtactaatggttgataaaattaacagcgactgcataaccattttccacatggcagggctgtgcttaagccccacacctccaataatcaatttctatgacggtactaataaccttaactatatgcaaattcttcaccacttatgatatggtacaaactggagtttacagatggccttggccttgcctagcccatttgttcatcctaacttcttcatcacttcctgatgcacttggggaagcatgttgacacaacgttaccaatatttgattacctatggttatctgcaattacctacgcttatcttatcagaccctagatgccatttgagccccttacttctttgggcagtgggtgaaatgggagaacatagagaaatgttcactttgacctaagaaacgcataaaagggaatgccatgcacaatgtaagataaaatgtttggggacaggggatcatcgtgaaatttatttctgctattctgccctattgaggtcattaattataatggatttaaagatttttttttaaactctacaaacactaagccaaggaattcaggttatctgctatgttaacctaataaagcaaaggaaaataagttgctttaatccttgcttgttaacctaataaagcaaaggaaaatatgttgctttaatccttgcttcttttctcttttggtaatagaaaaggtaaataagatgtaatgttgaactgctggtgatgatttctaaaacgactctttaaatactcctttcctatggacttatattaaagatgcattgtacacattgttttagcagatagatcaaagatatactcagtggtcatctgttgcattatcagaaatttgatacatgttacagaagcatgaggaagggaatcctatccacttttgaaaatagagttcacattgcaagcgacatagggcattatcaaaaccaattcagagcctggcacaaaatgtatacttcctagtgaaagctgtctcaaaacacagcctttttgatggatcatattagctcatatctgccatagaaaggcaatcaagcttactccctgcaatcggagtcaatatcaattcttgctcaagcaaacatgttttacagtgttggcgcaatggcaggaactagtcaagggcactttcagatctggaaagaggaaagaggaggtagaaaatcactcttttgtgtttcttaaactgtcaatcaagcaagaaaatttattccaccccttcatatttgctctaaaatctggggccagtagttgaaatgtgatcttgttctttctcagccttttggcaatttaatgccaaatattccaaatgttagatgaatggcagtaataaaatgattcaaatgtttgataaatacaagctgagagcaaaatctggactctgaaaaatcggaactattttatcatgttgctaaaatgagagcatcattttcttccctctctgtaagtgcggtagtttaatttcctagaaaaagttgctagtgccttgtttaagatgatcatttatcatttcatgtggatattattggtctaattagaaggagaagattgattggatttactttaaagaaaattattctcctatgtctctttgaactcaggaatagaaaatgaccaagaagcacatcatcttcagatgtgatttttgccctcactggggatgtagaaccagaataggtacaacatatgctcagaagagaggtgacttcagtattagccttctagaaactaacatcactttaatttttacatgttccaaaaaaaatcatagtgattgttctgtaataagaatgttaacgtgatgcctatagaagttagaggtttttgtttctgtttctcttcaggcaagtccatagatagaggaaaatcagacacaggctggtgacaactggtatagatacagtgagcatggaatgagaaccacctacaacattgcctgattatttttaagtttatatcaaaactgcttcacaagttcacaaaagttgtcactcttaatttgggttaagaaaagtaatagtattatctctgctgaagttgattgtttttctcttttaccatgactgttggccaaaagcaagctgaacctctgcactttgaaacaaagcacagtatgaatctttaacccaagcacttagtttcaccactgagattctacatcatctgcaagaaaatgcacaaacttttggtccaatgttggattcttcaaaagtgcatagcaaaacttttgtgctatgccgcttgatgtaacttttaaagatgttatcaaatgttaaatgcctcattctgcgttaatttgctgttggctgttttgtgaacacaaaataaacttgagatttttttttttttttttttttgtgaaactcctccaaagccaatttcagcccttggtaagcttgcagacagttactgatcttaaatttaattttaaaagacaatgtatcttaattataatttagctttttaaaacaatgagatagctttacatttcccctttgtttgaatgagaaaatggatcttgggttgctatgctagaacacttgtagattgctgggtcctttgtaagggggccatggacacaccacactttctttcaatccttacatttgaagcattgatattcttcaaaaccttcttgttacatgtgcgcaatagaaatttctaatgttcatgacttttatctttcctgtccatcaattcactggttgtaaatgcttcctgagagctgtctaggtctgtatcccagattgttgcttaatgacatctgacagatgcattgttttctgaaatcagcttaagacaccaattgtggcaactggaaactcattacctgctgcattggatcaactatggaagttggagcaggggtgggcggaggtcacctaaccaatcaatggaaggcaactcacacctgctccaagcctcagctttgagaaacaaacacgtttataagaaaaaatatatagctattattacagaagtgaatatgttgtgctctcttactgctcttggtgcattgacagtttctgtatctcaaccctattcatctttatgaaaaagcattctgaagatctatcctcagcactgctgagtgtgcagtcacactttcctaccaacccccttcttaccatctctagctgccatttgtggggggaacaaaacaagggaatcctgattgtgtacagtataaattgtattatattttttgtacttatgttttatgtaaatagtttgtctcattcaattgtatgtgagcattgaaataaatcctaccatttaggggacaattta

SEQ ID NO: 18655 - DNA, 605 bp, Homo sapiens
  source 1..605: mol_type = unassigned DNA
acagcctggagcaggaggaccgcacacaccacacaaagccacatgggagtcccgcggcagaagagttgaacatcacagggctgtgggaggcaggccttacagtggaaggaaggctgtggaatgggagtgtgatgaagctaccaaaaaggcctgttacagcaaaggcaaatcaaaggaggaatgtcagaactacatccgggtgcttctggtgggtggcgaccggttattcacctgtgggaccaatgcattcacgcctgtctgcaccaaccgctcgttgagcaacctgactgagatccatgatcagatcagtggcatggcccgctgtccctacagtccccagcacaattccacagcgctcctcacagctggtggggagctctatgctgctacagccatggattttccaggacgtgatcctgccatttaccgaagcctaggcattttacctcctctccgcacggcgcagtacaactccaaatggctcaatgagccaaactttgtgtcatcttatgacatcggaaattttacctacttctttttccgagaaaatgcagtagagcatgactgtgggaaaacagtgttctccagagctgcccgggtgtgca

SEQ ID NO: 18656 - DNA, 935 bp, Homo sapiens
  source 1..935: mol_type = unassigned DNA
attcatacacacacacgacctgggatatgactagaaaaatatgctgctctaagccctccaagctctcctctatctccacaaagtgtaaccttaaagcactttccacacatgaggagaagaagagcttctgtttagaagacacgtgcccagagtcagaggccccttgcccaccatgaagggaacctgtgttatagcatggctgttctcaagcctggggctgtggagactcgcccacccagaggcccagggtacgactcagtgccagagaaccgagcatccagtcatctcctataaagaaattggcccctggttacgggagttcagagcgaagaatgctgtggatttctcgcagttaacatttgacccaggacagaaagaacttgttgtaggagcaagaaactacctcttcaggttacagcttgaggatctgtctcttatccaggctgtggaatgggagtgtgatgaagctaccaaaaaggcctgttacagcaaaggcaaatcaaaggaggaatgtcagaactacatccgggtgcttctggtgggtggcgaccggttattcacctgtgggaccaatgcattcacgcctgtctgcaccaaccgctcgttgagcaacctgactgagatccatgatcagatcagtggcatggcccgctgtccctacagtccccagcacaattccacagcgctcctcacagctggtggggagctctatgctgctacagccatggattttccaggacgtgatcctgccatttaccgaagcctaggcattttacctcctctccgcacggcgcagtacaactccaaatggctcaatgagccaaactttgtgtcatcttatgacatcggaaattttacctacttctttttccgagaaaatgcagtagagcatgactgtgggaaaacagtgttctccagagctgcccgggtgtgca

SEQ ID NO: 18657 - DNA, 538 bp, Homo sapiens
  source 1..538: mol_type = unassigned DNA
gcactttccacacatgaggagaagaagagcttctgtttagaagacacgtgcccagagtcagaggccccttgcccaccatgaagggaacctgtgttatagcatggctgttctcaagcctggggctgtggagactcgcccacccagaggcccagggtacgactcagtgccagagaaccgagcatccagtcatctcctataaagaaattggcccctggttacgggagttcagagcgaagaatgctgtggatttctcgcagttaacatttgacccaggacagaaagaacttgttgtaggagcaagaaactacctcttcaggttacagcttgaggatctgtctcttatccaggtctgaggaagacaattgggctgtggaatgggagtgtgatgaagctaccaaaaaggcctgttacagcaaaggcaaatcaaaggtaagaagaatgcaattatgagcagccatcaccctgtcttgaaggactctacactatataaagcatgttgatatgaagagtattcctgattacggtgccatgtaaagtg

SEQ ID NO: 18658 - DNA, 1542 bp, Homo sapiens
  source 1..1542: mol_type = unassigned DNA
cccgttcctgcaccagccccgcaccctccccagaaggctggtcgccctggtctgagtggagtaagtgcactgacgacggagcccagagccgaagccggcactgtgaggagctcctcccagggtccagcgcctgtgctggaaacagcagccagagccgcccctgcccctacagcgagattcccgtcatcctgccagcctccagcatggaggaggccaccgactgtgcagggttcaatctcatccacttggtggccacgggcatctcctgcttcttgggctctgggctcctgaccctagcagtgtacctgtcttgccagcactgccagcgtcagtcccaggagtccacactggtccatcctgccacccccaaccatttgcactacaagggcggaggcaccccgaagaatgaaaagtacacacccatggaattcaagaccctgaacaagaataacttgatccctgatgacagagccaacttctacccattgcagcagaccaatgtgtacacgactacttactacccaagccccctgaacaaacacagcttccggcccgaggcctcacctggacaacggtgcttccccaacagctgataccgccgtcctggggacttgggcttcttgccttcataaggcacagagcagatggagatgggacagtggagccagtttggttttctccctctgcactaggccaagaacttgctgccttgcctgtggggggtcccatccggcttcagagagctctggctggcattgaccatgggggaaagggctggtttcaggctgacatatggccgcaggtccagttcagcccaggtctctcatggttatcttccaacccactgtcacgctgacactatgctgccatgcctgggctgtggacctactgggcatttgaggaattggagaatggagatggcaagagggcaggcttttaagtttgggttggagacaacttcctgtggcccccacaagctgagtctggccttctccagctggccccaaaaaaggcctttgctacatcctgattatctctgaaagtaatcaatcaagtggctccagtagctctggattttctgccagggctgggccattgtggtgctgccccagtatgacatgggaccaaggccagcgcaggttatccacctctgcctggaagtctatactctacccagggcatccctctggtcagaggcagtgagtactgggaactggaggctgacctgtgcttagaagtcctttaatctgggctggtacaggcctcagccttgccctcaatgcacgaaaggtggcccaggagagaggatcaatgccataggaggcagaagtctggcctctgtgcctctatggagactatcttccagttgctgctcaacagagttgttggctgagacctgcttgggagtctctgctggcccttcatctgttcaggaacacacacacacacacactcacacacgcacacacaatcacaatttgctacagcaacaaaaaagacattgggctgtggcattattaattaaagatgatatccagtctc

SEQ ID NO: 18659 - DNA, 4792 bp, Homo sapiens
  source 1..4792: mol_type = unassigned DNA
aactcctcccccaccgccccctccctccttctgctcccgcggtctcctcctccctgctctctccgagcgccgggtcgggagctagttggagcgcgggggttggtgccagagcccagctccgccgagccgggcgggtcggcagcgcatccagcggctgctgggagcccgagcgcagcgggcgcgggcccgggtggggactgcaccggagcgctgagagctggaggccgttcctgcgcggccgccccattcccagaccggccgccagcccatctggttagctcccgccgctccgcgccgcccgggagtcgggagccgcggggaaccgggcacctgcacccgcctctgggagtgagtggttccagctggtgcctggcctgtgtctcttggatgccctgtggcttcagtccgtctcctgttgcccaccacctcgtccctgggccgcctgataccccagcccaacagctaaggtgtggatggacagtagggggctggcttctctcactggtcaggggtcttctcccctgtctgcctcccggagctaggactgcagaggggcctatcatggtgcttgcaggccccctggctgtctcgctgttgctgcccagcctcacactgctggtgtcccacctctccagctcccaggatgtctccagtgagcccagcagtgagcagcagctgtgcgcccttagcaagcaccccaccgtggcctttgaagacctgcagccgtgggtctctaacttcacctaccctggagcccgggatttctcccagctggctttggacccctccgggaaccagctcatcgtgggagccaggaactacctcttcagactcagccttgccaatgtctctcttcttcaggccacagagtgggcctccagtgaggacacgcgccgctcctgccaaagcaaagggaagactgaggaggagtgtcagaactacgtgcgagtcctgatcgtcgccggccggaaggtgttcatgtgtggaaccaatgccttttcccccatgtgcaccagcagacaggtggggaacctcagccggactattgagaagatcaatggtgtggcccgctgcccctatgacccacgccacaactccacagctgtcatctcctcccagggggagctctatgcagccacggtcatcgacttctcaggtcgggaccctgccatctaccgcagcctgggcagtgggccaccgcttcgcactgcccaatataactccaagtggcttaatgagccaaacttcgtggcagcctatgatattgggctgtttgcatacttcttcctgcgggagaacgcagtggagcacgactgtggacgcaccgtgtactctcgcgtggcccgcgtgtgcaagaatgacgtggggggccgattcctgctggaggacacatggaccacattcatgaaggcccggctcaactgctcccgcccgggcgaggtccccttctactataacgagctgcagagtgccttccacttgccggagcaggacctcatctatggagttttcacaaccaacgtaaacagcatcgcggcttctgctgtctgcgccttcaacctcagtgctatctcccaggctttcaatggcccatttcgctaccaggagaaccccagggctgcctggctccccatagccaaccccatccccaatttccagtgtggcaccctgcctgagaccggtcccaacgagaacctgacggagcgcagcctgcaggacgcgcagcgcctcttcctgatgagcgaggccgtgcagccggtgacacccgagccctgtgtcacccaggacagcgtgcgcttctcacacctcgtggtggacctggtgcaggctaaagacacgctctaccatgtactctacattggcaccgagtcgggcaccatcctgaaggcgctgtccacggcgagccgcagcctccacggctgctacctggaggagctgcacgtgctgccccccgggcgccgcgagcccctgcgcagcctgcgcatcctgcacagcgcccgcgcgctcttcgtggggctgagagacggcgtcctgcgggtcccactggagaggtgcgccgcctaccgcagccagggggcatgcctgggggcccgggacccgtactgtggctgggacgggaagcagcaacgttgcagcacactcgaggacagctccaacatgagcctctggacccagaacatcaccgcctgtcctgtgcggaatgtgacacgggatgggggcttcggcccatggtcaccatggcaaccatgtgagcacttggatggggacaactcaggctcttgcctgtgtcgagctcgatcctgtgattcccctcgaccccgctgtgggggccttgactgcctggggccagccatccacatcgccaactgctccaggaatggggcgtggaccccgtggtcatcgtgggcgctgtgcagcacgtcctgtggcatcggcttccaggtccgccagcgaagttgcagcaaccctgctccccgccacgggggccgcatctgcgtgggcaagagccgggaggaacggttctgtaatgagaacacgccttgcccggtgcccatcttctgggcttcctggggctcctggagcaagtgcagcagcaactgtggagggggcatgcagtcgcggcgtcgggcctgcgagaacggcaactcctgcctgggctgcggcgtggagttcaagacgtgcaaccccgagggctgccccgaagtgcggcgcaacaccccctggacgccgtggctgcccgtgaacgtgacgcagggcggggcacggcaggagcagcggttccgcttcacctgccgcgcgccccttgcagacccgcacggcctgcagttcggcaggagaaggaccgagacgaggacctgtcccgcggacggctccggctcctgcgacaccgacgccctggtggaggtcctcctgcgcagcgggagcacctccccgcacacggtgagcgggggctgggccgcctggggcccgtggtcgtcctgctcccgggactgcgagctgggcttccgcgtccgcaagagaacgtgcactaacccggagccccgcaacgggggcctgccctgcgtgggcgatgctgccgagtaccaggactgcaacccccaggcttgcccagttcggggtgcttggtcctgctggacctcatggtctccatgctcagcttcctgtggtgggggtcactatcaacgcacccgttcctgcaccagccccgcaccctccccaggtgaggacatctgtctcgggctgcacacggaggaggcactatgtgccacacaggcctgcccagaaggctggtcgccctggtctgagtggagtaagtgcactgacgacggagcccagagccgaagccggcactgtgaggagctcctcccagggtccagcgcctgtgctggaaacagcagccagagccgcccctgcccctacagcgagattcccgtcatcctgccagcctccagcatggaggaggccaccgactgtgcagggttcaatctcatccacttggtggccacgggcatctcctgcttcttgggctctgggctcctgaccctagcagtgtacctgtcttgccagcactgccagcgtcagtcccaggagtccacactggtccatcctgccacccccaaccatttgcactacaagggcggaggcaccccgaagaatgaaaagtacacacccatggaattcaagaccctgaacaagaataacttgatccctgatgacagagccaacttctacccattgcagcagaccaatgtgtacacgactacttactacccaagccccctgaacaaacacagcttccggcccgaggcctcacctggacaacggtgcttccccaacagctgataccgccgtcctggggacttgggcttcttgccttcataaggcacagagcagatggagatgggacagtggagccagtttggttttctccctctgcactaggccaagaacttgctgccttgcctgtggggggtcccatccggcttcagagagctctggctggcattgaccatgggggaaagggctggtttcaggctgacatatggccgcaggtccagttcagcccaggtctctcatggttatcttccaacccactgtcacgctgacactatgctgccatgcctgggctgtggacctactgggcatttgaggaattggagaatggagatggcaagagggcaggcttttaagtttgggttggagacaacttcctgtggcccccacaagctgagtctggccttctccagctggccccaaaaaaggcctttgctacatcctgattatctctgaaagtaatcaatcaagtggctccagtagctctggattttctgccagggctgggccattgtggtgctgccccagtatgacatgggaccaaggccagcgcaggttatccacctctgcctggaagtctatactctacccagggcatccctctggtcagaggcagtgagtactgggaactggaggctgacctgtgcttagaagtcctttaatctgggctggtacaggcctcagccttgccctcaatgcacgaaaggtggcccaggagagaggatcaatgccataggaggcagaagtctggcctctgtgcctctatggagactatcttccagttgctgctcaacagagttgttggctgagacctgcttgggagtctctgctggcccttcatctgttcaggaacacacacacacacacactcacacacgcacacacaatcacaatttgctacagcaacaaaaaagacattgggctgtggcattattaattaaagatgatatccagtctc

SEQ ID NO: 18660 - DNA, 4733 bp, Homo sapiens
  source 1..4733: mol_type = unassigned DNA
caattcggcctcgctccttgtgattgcgctaaaccttccgtcctcagctgagaacgctccaccacctccccggatcgctcatctcttggctgccctcccactgttcctgatgttattttactccccgtatcccctactcgttcttcacaattctgtaggtgagtggttccagctggtgcctggcctgtgtctcttggatgccctgtggcttcagtccgtctcctgttgcccaccacctcgtccctgggccgcctgataccccagcccaacagctaaggtgtggatggacagtagggggctggcttctctcactggtcaggggtcttctcccctgtctgcctcccggagctaggactgcagaggggcctatcatggtgcttgcaggccccctggctgtctcgctgttgctgcccagcctcacactgctggtgtcccacctctccagctcccaggatgtctccagtgagcccagcagtgagcagcagctgtgcgcccttagcaagcaccccaccgtggcctttgaagacctgcagccgtgggtctctaacttcacctaccctggagcccgggatttctcccagctggctttggacccctccgggaaccagctcatcgtgggagccaggaactacctcttcagactcagccttgccaatgtctctcttcttcaggccacagagtgggcctccagtgaggacacgcgccgctcctgccaaagcaaagggaagactgaggaggagtgtcagaactacgtgcgagtcctgatcgtcgccggccggaaggtgttcatgtgtggaaccaatgccttttcccccatgtgcaccagcagacaggtggggaacctcagccggactattgagaagatcaatggtgtggcccgctgcccctatgacccacgccacaactccacagctgtcatctcctcccagggggagctctatgcagccacggtcatcgacttctcaggtcgggaccctgccatctaccgcagcctgggcagtgggccaccgcttcgcactgcccaatataactccaagtggcttaatgagccaaacttcgtggcagcctatgatattgggctgtttgcatacttcttcctgcgggagaacgcagtggagcacgactgtggacgcaccgtgtactctcgcgtggcccgcgtgtgcaagaatgacgtggggggccgattcctgctggaggacacatggaccacattcatgaaggcccggctcaactgctcccgcccgggcgaggtccccttctactataacgagctgcagagtgccttccacttgccggagcaggacctcatctatggagttttcacaaccaacgtaaacagcatcgcggcttctgctgtctgcgccttcaacctcagtgctatctcccaggctttcaatggcccatttcgctaccaggagaaccccagggctgcctggctccccatagccaaccccatccccaatttccagtgtggcaccctgcctgagaccggtcccaacgagaacctgacggagcgcagcctgcaggacgcgcagcgcctcttcctgatgagcgaggccgtgcagccggtgacacccgagccctgtgtcacccaggacagcgtgcgcttctcacacctcgtggtggacctggtgcaggctaaagacacgctctaccatgtactctacattggcaccgagtcgggcaccatcctgaaggcgctgtccacggcgagccgcagcctccacggctgctacctggaggagctgcacgtgctgccccccgggcgccgcgagcccctgcgcagcctgcgcatcctgcacagcgcccgcgcgctcttcgtggggctgagagacggcgtcctgcgggtcccactggagaggtgcgccgcctaccgcagccagggggcatgcctgggggcccgggacccgtactgtggctgggacgggaagcagcaacgttgcagcacactcgaggacagctccaacatgagcctctggacccagaacatcaccgcctgtcctgtgcggaatgtgacacgggatgggggcttcggcccatggtcaccatggcaaccatgtgagcacttggatggggacaactcaggctcttgcctgtgtcgagctcgatcctgtgattcccctcgaccccgctgtgggggccttgactgcctggggccagccatccacatcgccaactgctccaggaatggggcgtggaccccgtggtcatcgtgggcgctgtgcagcacgtcctgtggcatcggcttccaggtccgccagcgaagttgcagcaaccctgctccccgccacgggggccgcatctgcgtgggcaagagccgggaggaacggttctgtaatgagaacacgccttgcccggtgcccatcttctgggcttcctggggctcctggagcaagtgcagcagcaactgtggagggggcatgcagtcgcggcgtcgggcctgcgagaacggcaactcctgcctgggctgcggcgtggagttcaagacgtgcaaccccgagggctgccccgaagtgcggcgcaacaccccctggacgccgtggctgcccgtgaacgtgacgcagggcggggcacggcaggagcagcggttccgcttcacctgccgcgcgccccttgcagacccgcacggcctgcagttcggcaggagaaggaccgagacgaggacctgtcccgcggacggctccggctcctgcgacaccgacgccctggtggaggtcctcctgcgcagcgggagcacctccccgcacacggtgagcgggggctgggccgcctggggcccgtggtcgtcctgctcccgggactgcgagctgggcttccgcgtccgcaagagaacgtgcactaacccggagccccgcaacgggggcctgccctgcgtgggcgatgctgccgagtaccaggactgcaacccccaggcttgcccagttcggggtgcttggtcctgctggacctcatggtctccatgctcagcttcctgtggtgggggtcactatcaacgcacccgttcctgcaccagccccgcaccctccccaggtgaggacatctgtctcgggctgcacacggaggaggcactatgtgccacacaggcctgcccagaaggctggtcgccctggtctgagtggagtaagtgcactgacgacggagcccagagccgaagccggcactgtgaggagctcctcccagggtccagcgcctgtgctggaaacagcagccagagccgcccctgcccctacagcgagattcccgtcatcctgccagcctccagcatggaggaggccaccgactgtgcaggtaaaagaaaccggacctacctcatgctgcggtcctcccagccctccggcaccccactccaaagtctggactctttccacatcctgctccagacagccaagctttgttggggtccccactgctttgagatgggttcaatctcatccacttggtggccacgggcatctcctgcttcttgggctctgggctcctgaccctagcagtgtacctgtcttgccagcactgccagcgtcagtcccaggagtccacactggtccatcctgccacccccaaccatttgcactacaagggcggaggcaccccgaagaatgaaaagtacacacccatggaattcaagaccctgaacaagaataacttgatccctgatgacagagccaacttctacccattgcagcagaccaatgtgtacacgactacttactacccaagccccctgaacaaacacagcttccggcccgaggcctcacctggacaacggtgcttccccaacagctgataccgccgtcctggggacttgggcttcttgccttcataaggcacagagcagatggagatgggacagtggagccagtttggttttctccctctgcactaggccaagaacttgctgccttgcctgtggggggtcccatccggcttcagagagctctggctggcattgaccatgggggaaagggctggtttcaggctgacatatggccgcaggtccagttcagcccaggtctctcatggttatcttccaacccactgtcacgctgacactatgctgccatgcctgggctgtggacctactgggcatttgaggaattggagaatggagatggcaagagggcaggcttttaagtttgggttggagacaacttcctgtggcccccacaagctgagtctggccttctccagctggccccaaaaaaggcctttgctacatcctgattatctctgaaagtaatcaatcaagtggctccagtagctctggattttctgccagggctgggccattgtggtgctgccccagtatgacatgggaccaaggccagcgcaggttatccacctctgcctggaagtctatactctacccagggcatccctctggtcagaggcagtgagtactgggaactggaggctgacctgtgcttagaagtcctttaatctgggctggtacaggcctcagccttgccctcaatgcacgaaaggtggcccaggagagaggatcaatgccataggaggcagaagtctggcctctgtgcctctatggagactatcttccagttgctgctcaacagagttgttggctgagacctgcttgggagtctctgctggcccttcatctgttcaggaacacacacacacacacactcacacacgcacacacaatcacaatttgctacagcaacaaaaaagacattgggctgtggcattattaattaaagatgatatccagtctc

SEQ ID NO: 18661 - DNA, 3791 bp, Homo sapiens
  source 1..3791: mol_type = unassigned DNA
agtgcttttgtctggtgctgggagtgaggctcagcagtgtgagggacaattggagatgctcgggggcaggctgccgcgttgtgtcctgcttttctgcggccagaccaagccgtctggagctgctggtcaggttttcttgctgacctcacctgaccacagtggcctgggtggactctacagggaaatgttgttttctccctgggagcagtagcagcagtcctggctcccctggactgagaactcctcatcagccccaggaagcccggaccccctttcagggatctggaaccggtgtgcctgtggccccaggtctgctcccaggcgtgggctgaagtcctgacttctgtcgctgggggcaaggagtgggagagcccagctgctgcctgggctttggcagacagcaggctgatggtgctggcttccccgagactgcttctcctgcctgctgtctgatttccctgcatggtgcccgcagctgagctgctacggtgagtggttccagctggtgcctggcctgtgtctcttggatgccctgtggcttcagtccgtctcctgttgcccaccacctcgtccctgggccgcctgataccccagcccaacagctaaggtgtggatggacagtagggggctggcttctctcactggtcaggggtcttctcccctgtctgcctcccggagctaggactgcagaggggcctatcatggtgcttgcaggccccctggctgtctcgctgttgctgcccagcctcacactgctggtgtcccacctctccagctcccaggatgtctccagtgagcccagcagtgagcagcagctgtgcgcccttagcaagcaccccaccgtggcctttgaagacctgcagccgtgggtctctaacttcacctaccctggagcccgggatttctcccagctggctttggacccctccgggaaccagctcatcgtgggagccaggaactacctcttcagactcagccttgccaatgtctctcttcttcaggccacagagtgggcctccagtgaggacacgcgccgctcctgccaaagcaaagggaagactgaggaggagtgtcagaactacgtgcgagtcctgatcgtcgccggccggaaggtgttcatgtgtggaaccaatgccttttcccccatgtgcaccagcagacaggtggggaacctcagccggactattgagaagatcaatggtgtggcccgctgcccctatgacccacgccacaactccacagctgtcatctcctcccagggggagctctatgcagccacggtcatcgacttctcaggtcgggaccctgccatctaccgcagcctgggcagtgggccaccgcttcgcactgcccaatataactccaagtggcttaatgagccaaacttcgtggcagcctatgatattgggctgtttgcatacttcttcctgcgggagaacgcagtggagcacgactgtggacgcaccgtgtactctcgcgtggcccgcgtgtgcaagaatgacgtggggggccgattcctgctggaggacacatggaccacattcatgaaggcccggctcaactgctcccgcccgggcgaggtccccttctactataacgagctgcagagtgccttccacttgccggagcaggacctcatctatggagttttcacaaccaacgtaaacagcatcgcggcttctgctgtctgcgccttcaacctcagtgctatctcccaggctttcaatggcccatttcgctaccaggagaaccccagggctgcctggctccccatagccaaccccatccccaatttccagtgtggcaccctgcctgagaccggtcccaacgagaacctgacggagcgcagcctgcaggacgcgcagcgcctcttcctgatgagcgaggccgtgcagccggtgacacccgagccctgtgtcacccaggacagcgtgcgcttctcacacctcgtggtggacctggtgcaggctaaagacacgctctaccatgtactctacattggcaccgagtcgggcaccatcctgaaggcgctgtccacggcgagccgcagcctccacggctgctacctggaggagctgcacgtgctgccccccgggcgccgcgagcccctgcgcagcctgcgcatcctgcacagcgcccgcgcgctcttcgtggggctgagagacggcgtcctgcgggtcccactggagaggtgcgccgcctaccgcagccagggggcatgcctgggggcccgggacccgtactgtggctgggacgggaagcagcaacgttgcagcacactcgaggacagctccaacatgagcctctggacccagaacatcaccgcctgtcctgtgcggaatgtgacacgggatgggggcttcggcccatggtcaccatggcaaccatgtgagcacttggatggggacaactcaggctcttgcctgtgtcgagctcgatcctgtgattcccctcgaccccgctgtgggggccttgactgcctggggccagccatccacatcgccaactgctccaggaatggggcgtggaccccgtggtcatcgtgggcgctgtgcagcacgtcctgtggcatcggcttccaggtccgccagcgaagttgcagcaaccctgctccccgccacgggggccgcatctgcgtgggcaagagccgggaggaacggttctgtaatgagaacacgccttgcccggtgcccatcttctgggcttcctggggctcctggagcaagtgcagcagcaactgtggagggggcatgcagtcgcggcgtcgggcctgcgagaacggcaactcctgcctgggctgcggcgtggagttcaagacgtgcaaccccgagggctgccccgaagtgcggcgcaacaccccctggacgccgtggctgcccgtgaacgtgacgcagggcggggcacggcaggagcagcggttccgcttcacctgccgcgcgccccttgcagacccgcacggcctgcagttcggcaggagaaggaccgagacgaggacctgtcccgcggacggctccggctcctgcgacaccgacgccctggtggaggtcctcctgcgcagcgggagcacctccccgcacacggtgagcgggggctgggccgcctggggcccgtggtcgtcctgctcccgggactgcgagctgggcttccgcgtccgcaagagaacgtgcactaacccggagccccgcaacgggggcctgccctgcgtgggcgatgctgccgagtaccaggactgcaacccccaggcttgcccagttcggggtgcttggtcctgctggacctcatggtctccatgctcagcttcctgtggtgggggtcactatcaacgcacccgttcctgcaccagccccgcaccctccccaggtgaggacatctgtctcgggctgcacacggaggaggcactatgtgccacacaggcctgcccagaaggctggtcgccctggtctgagtggagtaagtgcactgacgacggagcccagagccgaagccggcactgtgaggagctcctcccagggtccagcgcctgtgctggaaacagcagccagagccgcccctgcccctacagcgagattcccgtcatcctgccagcctccagcatggaggaggccaccgactgtgcagggttcaatctcatccacttggtggccacgggcatctcctgcttcttgggctctgggctcctgaccctagcagtgtacctgtcttgccagcactgccagcgtcagtcccaggagtccacactggtccatcctgccacccccaaccatttgcactacaagggcggaggcaccccg

SEQ ID NO: 18662 - DNA, 612 bp, Homo sapiens
  source 1..612: mol_type = unassigned DNA
ctcctccctgctctctccgagcgccgggtcgggagctagttggagcgcgggggttggtgccagagcccagctccgccgagccgggcgggtcggcagcgcatccagcggctgctgggagcccgagcgcagcgggcgcgggcccgggtggggactgcaccggagcgctgagagctggaggccgttcctgcgcggccgccccattcccagaccggccgccagcccatctggttagctcccgccgctccgcgccgcccgggagtcgggagccgcggggaaccgggcacctgcacccgcctctgggaggtcttctcccctgtctgcctcccggagctaggactgcagaggggcctatcatggtgcttgcaggccccctggctgtctcgctgttgctgcccagcctcacactgctggtgtcccacctctccagctcccaggatgtctccagtgagcccagcagtgagcagcagctgtgcgcccttagcaagcaccccaccgtggcctttgaagacctgcagccgtgggtctctaacttcacctaccctggagcccgggatttctcccagctggctttggacccctccgggaaccagctcatcgtgggagccaggtaac

SEQ ID NO: 18663 - DNA, 716 bp, Homo sapiens
  source 1..716: mol_type = unassigned DNA
gcggccgccccattcccagaccggccgccagcccatctggttagctcccgccgctccgcgccgcccgggagtcgggagccgcggggaaccgggcacctgcacccgcctctgggagccagcttgggtccgggttgcactgggccctgccagggctgtggtcggcgcatctgggctgcagcggcgatggggacccgggacccaggcctggagaaggagacggacgagtgaggctgagggacggagggacagagtgagtggttccagctggtgcctggcctgtgtctcttggatgccctgtggcttcagtccgtctcctgttgcccaccacctcgtccctgggccgcctgataccccagcccaacagctaaggtgtggatggacagtagggggctggcttctctcactggtcaggggtcttctcccctgtctgcctcccggagctaggactgcagaggggcctatcatggtgcttgcaggccccctggctgtctcgctgttgctgcccagcctcacactgctggtgtcccacctctccagctcccaggatgtctccagtgagcccagcagtgagcagcagctgtgcgcccttagcaagcaccccaccgtggcctttgaagacctgcagccgtgggtctctaacttcacctaccctggagcccgggatttctcccagctggctttggacccctccgggaaccagctcatcgtgggagcca

SEQ ID NO: 18664 - DNA, 543 bp, Homo sapiens
  source 1..543: mol_type = unassigned DNA
gcggccgccccattcccagaccggccgccagcccatctggttagctcccgccgctccgcgccgcccgggagtcgggagccgcggggaaccgggcacctgcacccgcctctgggagtgagtggttccagctggtgcctggcctgtgtctcttggatgccctgtggcttcagtccgtctcctgttgcccaccacctcgtccctgggccgcctgataccccagcccaacagctaaggtgtggatggacagtagggggctggcttctctcactggtcaggggcaggaagccaagtggagactttgaatggaggcaaggatggaggggacctggggaagaggactggcctgaatcaccttccccaaaggtcctcatggactgagctggaggtcttctcccctgtctgcctcccggagctaggactgcagaggggcctatcatggtgcttgcaggccccctggctgtctcgctgttgctgcccagcctcacactgctggtgtcccacctctccagctcccaggatgtctccagtgagcccagcagtgag

SEQ ID NO: 18665 - DNA, 558 bp, Homo sapiens
  source 1..558: mol_type = unassigned DNA
agacatccgtgttccctggctcaggggctcatcgtccttccttcctctgccaaggctgaggcgcagctggacaggggagcatccatcacactcctttcccgccagccagcagcggcagctctcctggcaggcaggggatcagctgtgcctctccttactccactgctcctcacccctggacccagggcccaccctccatctctccttgtctggtgctgcccacgtctgcctgcagaccacacctgtgagcacttgactaagtcttctgtgagtggttccagctggtgcctggcctgtgtctcttggatgccctgtggcttcagtccgtctcctgttgcccaccacctcgtccctgggccgcctgataccccagcccaacagctaaggtgtggatggacagtagggggctggcttctctcactggtcaggggtcttctcccctgtctgcctcccggagctaggactgcagaggggcctatcatggtgcttgcaggccccctggctgtctcgctgttgctgcccagcctcacactgctggtgtcccacctctccagctcc

SEQ ID NO: 18666 - DNA, 4579 bp, Homo sapiens
  source 1..4579: mol_type = unassigned DNA
gtataaaccacatgctgcatctgtcagcagaggaagccattggctgcgtgagggtcagaaggagcttcatagatgagctggcatttgggagagggcattctacagggacgggcaagcagaagcgaagggatcgagtgagtggttccagctggtgcctggcctgtgtctcttggatgccctgtggcttcagtccgtctcctgttgcccaccacctcgtccctgggccgcctgataccccagcccaacagctaaggtgtggatggacagtagggggctggcttctctcactggtcaggggtcttctcccctgtctgcctcccggagctaggactgcagaggggcctatcatggtgcttgcaggccccctggctgtctcgctgttgctgcccagcctcacactgctggtgtcccacctctccagctcccaggatgtctccagtgagcccagcagtgagcagcagctgtgcgcccttagcaagcaccccaccgtggcctttgaagacctgcagccgtgggtctctaacttcacctaccctggagcccgggatttctcccagctggctttggacccctccgggaaccagctcatcgtgggagccaggaactacctcttcagactcagccttgccaatgtctctcttcttcaggccacagagtgggcctccagtgaggacacgcgccgctcctgccaaagcaaagggaagactgaggaggagtgtcagaactacgtgcgagtcctgatcgtcgccggccggaaggtgttcatgtgtggaaccaatgccttttcccccatgtgcaccagcagacaggtggggaacctcagccggactattgagaagatcaatggtgtggcccgctgcccctatgacccacgccacaactccacagctgtcatctcctcccagggggagctctatgcagccacggtcatcgacttctcaggtcgggaccctgccatctaccgcagcctgggcagtgggccaccgcttcgcactgcccaatataactccaagtggcttaatgagccaaacttcgtggcagcctatgatattgggctgtttgcatacttcttcctgcgggagaacgcagtggagcacgactgtggacgcaccgtgtactctcgcgtggcccgcgtgtgcaagaatgacgtggggggccgattcctgctggaggacacatggaccacattcatgaaggcccggctcaactgctcccgcccgggcgaggtccccttctactataacgagctgcagagtgccttccacttgccggagcaggacctcatctatggagttttcacaaccaacgtaaacagcatcgcggcttctgctgtctgcgccttcaacctcagtgctatctcccaggctttcaatggcccatttcgctaccaggagaaccccagggctgcctggctccccatagccaaccccatccccaatttccagtgtggcaccctgcctgagaccggtcccaacgagaacctgacggagcgcagcctgcaggacgcgcagcgcctcttcctgatgagcgaggccgtgcagccggtgacacccgagccctgtgtcacccaggacagcgtgcgcttctcacacctcgtggtggacctggtgcaggctaaagacacgctctaccatgtactctacattggcaccgagtcgggcaccatcctgaaggcgctgtccacggcgagccgcagcctccacggctgctacctggaggagctgcacgtgctgccccccgggcgccgcgagcccctgcgcagcctgcgcatcctgcacagcgcccgcgcgctcttcgtggggctgagagacggcgtcctgcgggtcccactggagaggtgcgccgcctaccgcagccagggggcatgcctgggggcccgggacccgtactgtggctgggacgggaagcagcaacgttgcagcacactcgaggacagctccaacatgagcctctggacccagaacatcaccgcctgtcctgtgcggaatgtgacacgggatgggggcttcggcccatggtcaccatggcaaccatgtgagcacttggatggggacaactcaggctcttgcctgtgtcgagctcgatcctgtgattcccctcgaccccgctgtgggggccttgactgcctggggccagccatccacatcgccaactgctccaggaatggggcgtggaccccgtggtcatcgtgggcgctgtgcagcacgtcctgtggcatcggcttccaggtccgccagcgaagttgcagcaaccctgctccccgccacgggggccgcatctgcgtgggcaagagccgggaggaacggttctgtaatgagaacacgccttgcccggtgcccatcttctgggcttcctggggctcctggagcaagtgcagcagcaactgtggagggggcatgcagtcgcggcgtcgggcctgcgagaacggcaactcctgcctgggctgcggcgtggagttcaagacgtgcaaccccgagggctgccccgaagtgcggcgcaacaccccctggacgccgtggctgcccgtgaacgtgacgcagggcggggcacggcaggagcagcggttccgcttcacctgccgcgcgccccttgcagacccgcacggcctgcagttcggcaggagaaggaccgagacgaggacctgtcccgcggacggctccggctcctgcgacaccgacgccctggtggaggtcctcctgcgcagcgggagcacctccccgcacacggtgagcgggggctgggccgcctggggcccgtggtcgtcctgctcccgggactgcgagctgggcttccgcgtccgcaagagaacgtgcactaacccggagccccgcaacgggggcctgccctgcgtgggcgatgctgccgagtaccaggactgcaacccccaggcttgcccagttcggggtgcttggtcctgctggacctcatggtctccatgctcagcttcctgtggtgggggtcactatcaacgcacccgttcctgcaccagccccgcaccctccccaggtgaggacatctgtctcgggctgcacacggaggaggcactatgtgccacacaggcctgcccagaaggctggtcgccctggtctgagtggagtaagtgcactgacgacggagcccagagccgaagccggcactgtgaggagctcctcccagggtccagcgcctgtgctggaaacagcagccagagccgcccctgcccctacagcgagattcccgtcatcctgccagcctccagcatggaggaggccaccgactgtgcagggttcaatctcatccacttggtggccacgggcatctcctgcttcttgggctctgggctcctgaccctagcagtgtacctgtcttgccagcactgccagcgtcagtcccaggagtccacactggtccatcctgccacccccaaccatttgcactacaagggcggaggcaccccgaagaatgaaaagtacacacccatggaattcaagaccctgaacaagaataacttgatccctgatgacagagccaacttctacccattgcagcagaccaatgtgtacacgactacttactacccaagccccctgaacaaacacagcttccggcccgaggcctcacctggacaacggtgcttccccaacagctgataccgccgtcctggggacttgggcttcttgccttcataaggcacagagcagatggagatgggacagtggagccagtttggttttctccctctgcactaggccaagaacttgctgccttgcctgtggggggtcccatccggcttcagagagctctggctggcattgaccatgggggaaagggctggtttcaggctgacatatggccgcaggtccagttcagcccaggtctctcatggttatcttccaacccactgtcacgctgacactatgctgccatgcctgggctgtggacctactgggcatttgaggaattggagaatggagatggcaagagggcaggcttttaagtttgggttggagacaacttcctgtggcccccacaagctgagtctggccttctccagctggccccaaaaaaggcctttgctacatcctgattatctctgaaagtaatcaatcaagtggctccagtagctctggattttctgccagggctgggccattgtggtgctgccccagtatgacatgggaccaaggccagcgcaggttatccacctctgcctggaagtctatactctacccagggcatccctctggtcagaggcagtgagtactgggaactggaggctgacctgtgcttagaagtcctttaatctgggctggtacaggcctcagccttgccctcaatgcacgaaaggtggcccaggagagaggatcaatgccataggaggcagaagtctggcctctgtgcctctatggagactatcttccagttgctgctcaacagagttgttggctgagacctgcttgggagtctctgctggcccttcatctgttcaggaacacacacacacacacactcacacacgcacacacaatcacaatttgctacagcaacaaaaaagacattgggctgtggcattattaattaaagatgatatccagtctcc

SEQ ID NO: 18667 - DNA, 4933 bp, Homo sapiens
  source 1..4933: mol_type = unassigned DNA
agtgcttttgtctggtgctgggagtgaggctcagcagtgtgagggacaattggagatgctcgggggcaggctgccgcgttgtgtcctgcttttctgcggccagaccaagccgtctggagctgctggtcaggttttcttgctgacctcacctgaccacagtggcctgggtggactctacagggaaatgttgttttctccctgggagcagtagcagcagtcctggctcccctggactgagaactcctcatcagccccaggaagcccggaccccctttcagggatctggaaccggtgtgcctgtggccccaggtctgctcccaggcgtgggctgaagtcctgacttctgtcgctgggggcaaggagtgggagagcccagctgctgcctgggctttggcagacagcaggctgatggtgctggcttccccgagactgcttctcctgcctgctgtctgatttccctgcatggtgcccgcagctgagctgctacggtgagtggttccagctggtgcctggcctgtgtctcttggatgccctgtggcttcagtccgtctcctgttgcccaccacctcgtccctgggccgcctgataccccagcccaacagctaaggtgtggatggacagtagggggctggcttctctcactggtcaggggtcttctcccctgtctgcctcccggagctaggactgcagaggggcctatcatggtgcttgcaggccccctggctgtctcgctgttgctgcccagcctcacactgctggtgtcccacctctccagctcccaggatgtctccagtgagcccagcagtgagcagcagctgtgcgcccttagcaagcaccccaccgtggcctttgaagacctgcagccgtgggtctctaacttcacctaccctggagcccgggatttctcccagctggctttggacccctccgggaaccagctcatcgtgggagccaggaactacctcttcagactcagccttgccaatgtctctcttcttcaggccacagagtgggcctccagtgaggacacgcgccgctcctgccaaagcaaagggaagactgaggaggagtgtcagaactacgtgcgagtcctgatcgtcgccggccggaaggtgttcatgtgtggaaccaatgccttttcccccatgtgcaccagcagacaggtggggaacctcagccggactattgagaagatcaatggtgtggcccgctgcccctatgacccacgccacaactccacagctgtcatctcctcccagggggagctctatgcagccacggtcatcgacttctcaggtcgggaccctgccatctaccgcagcctgggcagtgggccaccgcttcgcactgcccaatataactccaagtggcttaatgagccaaacttcgtggcagcctatgatattgggctgtttgcatacttcttcctgcgggagaacgcagtggagcacgactgtggacgcaccgtgtactctcgcgtggcccgcgtgtgcaagaatgacgtggggggccgattcctgctggaggacacatggaccacattcatgaaggcccggctcaactgctcccgcccgggcgaggtccccttctactataacgagctgcagagtgccttccacttgccggagcaggacctcatctatggagttttcacaaccaacgtaaacagcatcgcggcttctgctgtctgcgccttcaacctcagtgctatctcccaggctttcaatggcccatttcgctaccaggagaaccccagggctgcctggctccccatagccaaccccatccccaatttccagtgtggcaccctgcctgagaccggtcccaacgagaacctgacggagcgcagcctgcaggacgcgcagcgcctcttcctgatgagcgaggccgtgcagccggtgacacccgagccctgtgtcacccaggacagcgtgcgcttctcacacctcgtggtggacctggtgcaggctaaagacacgctctaccatgtactctacattggcaccgagtcgggcaccatcctgaaggcgctgtccacggcgagccgcagcctccacggctgctacctggaggagctgcacgtgctgccccccgggcgccgcgagcccctgcgcagcctgcgcatcctgcacagcgcccgcgcgctcttcgtggggctgagagacggcgtcctgcgggtcccactggagaggtgcgccgcctaccgcagccagggggcatgcctgggggcccgggacccgtactgtggctgggacgggaagcagcaacgttgcagcacactcgaggacagctccaacatgagcctctggacccagaacatcaccgcctgtcctgtgcggaatgtgacacgggatgggggcttcggcccatggtcaccatggcaaccatgtgagcacttggatggggacaactcaggctcttgcctgtgtcgagctcgatcctgtgattcccctcgaccccgctgtgggggccttgactgcctggggccagccatccacatcgccaactgctccaggaatggggcgtggaccccgtggtcatcgtgggcgctgtgcagcacgtcctgtggcatcggcttccaggtccgccagcgaagttgcagcaaccctgctccccgccacgggggccgcatctgcgtgggcaagagccgggaggaacggttctgtaatgagaacacgccttgcccggtgcccatcttctgggcttcctggggctcctggagcaagtgcagcagcaactgtggagggggcatgcagtcgcggcgtcgggcctgcgagaacggcaactcctgcctgggctgcggcgtggagttcaagacgtgcaaccccgagggctgccccgaagtgcggcgcaacaccccctggacgccgtggctgcccgtgaacgtgacgcagggcggggcacggcaggagcagcggttccgcttcacctgccgcgcgccccttgcagacccgcacggcctgcagttcggcaggagaaggaccgagacgaggacctgtcccgcggacggctccggctcctgcgacaccgacgccctggtggaggtcctcctgcgcagcgggagcacctccccgcacacggtgagcgggggctgggccgcctggggcccgtggtcgtcctgctcccgggactgcgagctgggcttccgcgtccgcaagagaacgtgcactaacccggagccccgcaacgggggcctgccctgcgtgggcgatgctgccgagtaccaggactgcaacccccaggcttgcccagttcggggtgcttggtcctgctggacctcatggtctccatgctcagcttcctgtggtgggggtcactatcaacgcacccgttcctgcaccagccccgcaccctccccaggtgaggacatctgtctcgggctgcacacggaggaggcactatgtgccacacaggcctgcccagaaggctggtcgccctggtctgagtggagtaagtgcactgacgacggagcccagagccgaagccggcactgtgaggagctcctcccagggtccagcgcctgtgctggaaacagcagccagagccgcccctgcccctacagcgagattcccgtcatcctgccagcctccagcatggaggaggccaccgactgtgcagggttcaatctcatccacttggtggccacgggcatctcctgcttcttgggctctgggctcctgaccctagcagtgtacctgtcttgccagcactgccagcgtcagtcccaggagtccacactggtccatcctgccacccccaaccatttgcactacaagggcggaggcaccccgaagaatgaaaagtacacacccatggaattcaagaccctgaacaagaataacttgatccctgatgacagagccaacttctacccattgcagcagaccaatgtgtacacgactacttactacccaagccccctgaacaaacacagcttccggcccgaggcctcacctggacaacggtgcttccccaacagctgataccgccgtcctggggacttgggcttcttgccttcataaggcacagagcagatggagatgggacagtggagccagtttggttttctccctctgcactaggccaagaacttgctgccttgcctgtggggggtcccatccggcttcagagagctctggctggcattgaccatgggggaaagggctggtttcaggctgacatatggccgcaggtccagttcagcccaggtctctcatggttatcttccaacccactgtcacgctgacactatgctgccatgcctgggctgtggacctactgggcatttgaggaattggagaatggagatggcaagagggcaggcttttaagtttgggttggagacaacttcctgtggcccccacaagctgagtctggccttctccagctggccccaaaaaaggcctttgctacatcctgattatctctgaaagtaatcaatcaagtggctccagtagctctggattttctgccagggctgggccattgtggtgctgccccagtatgacatgggaccaaggccagcgcaggttatccacctctgcctggaagtctatactctacccagggcatccctctggtcagaggcagtgagtactgggaactggaggctgacctgtgcttagaagtcctttaatctgggctggtacaggcctcagccttgccctcaatgcacgaaaggtggcccaggagagaggatcaatgccataggaggcagaagtctggcctctgtgcctctatggagactatcttccagttgctgctcaacagagttgttggctgagacctgcttgggagtctctgctggcccttcatctgttcaggaacacacacacacacacactcacacacgcacacacaatcacaatttgctacagcaacaaaaaagacattgggctgtggcattattaattaaagatgatatccagtctcc

SEQ ID NO: 18668 - DNA, 4523 bp, Homo sapiens
  source 1..4523: mol_type = unassigned DNA
aactcctcccccaccgccccctccctccttctgctcccgcggtctcctcctccctgctctctccgagcgccgggtcgggagctagttggagcgcgggggttggtgccagagcccagctccgccgagccgggcgggtcggcagcgcatccagcggctgctgggagcccgagcgcagcgggcgcgggcccgggtggggactgcaccggagcgctgagagctggaggccgttcctgcgcggccgccccattcccagaccggccgccagcccatctggttagctcccgccgctccgcgccgcccgggagtcgggagccgcggggaaccgggcacctgcacccgcctctgggaggtcttctcccctgtctgcctcccggagctaggactgcagaggggcctatcatggtgcttgcaggccccctggctgtctcgctgttgctgcccagcctcacactgctggtgtcccacctctccagctcccaggatgtctccagtgagcccagcagtgagcagcagctgtgcgcccttagcaagcaccccaccgtggcctttgaagacctgcagccgtgggtctctaacttcacctaccctggagcccgggatttctcccagctggctttggacccctccgggaaccagctcatcgtgggagccaggaactacctcttcagactcagccttgccaatgtctctcttcttcaggccacagagtgggcctccagtgaggacacgcgccgctcctgccaaagcaaagggaagactgaggaggagtgtcagaactacgtgcgagtcctgatcgtcgccggccggaaggtgttcatgtgtggaaccaatgccttttcccccatgtgcaccagcagacaggtggggaacctcagccggactattgagaagatcaatggtgtggcccgctgcccctatgacccacgccacaactccacagctgtcatctcctcccagggggagctctatgcagccacggtcatcgacttctcaggtcgggaccctgccatctaccgcagcctgggcagtgggccaccgcttcgcactgcccaatataactccaagtggcttaatgagccaaacttcgtggcagcctatgatattgggctgtttgcatacttcttcctgcgggagaacgcagtggagcacgactgtggacgcaccgtgtactctcgcgtggcccgcgtgtgcaagaatgacgtggggggccgattcctgctggaggacacatggaccacattcatgaaggcccggctcaactgctcccgcccgggcgaggtccccttctactataacgagctgcagagtgccttccacttgccggagcaggacctcatctatggagttttcacaaccaacgtaaacagcatcgcggcttctgctgtctgcgccttcaacctcagtgctatctcccaggctttcaatggcccatttcgctaccaggagaaccccagggctgcctggctccccatagccaaccccatccccaatttccagtgtggcaccctgcctgagaccggtcccaacgagaacctgacggagcgcagcctgcaggacgcgcagcgcctcttcctgatgagcgaggccgtgcagccggtgacacccgagccctgtgtcacccaggacagcgtgcgcttctcacacctcgtggtggacctggtgcaggctaaagacacgctctaccatgtactctacattggcaccgagtcgggcaccatcctgaaggcgctgtccacggcgagccgcagcctccacggctgctacctggaggagctgcacgtgctgccccccgggcgccgcgagcccctgcgcagcctgcgcatcctgcacagcgcccgcgcgctcttcgtggggctgagagacggcgtcctgcgggtcccactggagaggtgcgccgcctaccgcagccagggggcatgcctgggggcccgggacccgtactgtggctgggacgggaagcagcaacgttgcagcacactcgaggacagctccaacatgagcctctggacccagaacatcaccgcctgtcctgtgcggaatgtgacacgggatgggggcttcggcccatggtcaccatggcaaccatgtgagcacttggatggggacaactcaggctcttgcctgtgtcgagctcgatcctgtgattcccctcgaccccgctgtgggggccttgactgcctggggccagccatccacatcgccaactgctccaggaatggggcgtggaccccgtggtcatcgtgggcgctgtgcagcacgtcctgtggcatcggcttccaggtccgccagcgaagttgcagcaaccctgctccccgccacgggggccgcatctgcgtgggcaagagccgggaggaacggttctgtaatgagaacacgccttgcccggtgcccatcttctgggcttcctggggctcctggagcaagtgcagcagcaactgtggagggggcatgcagtcgcggcgtcgggcctgcgagaacggcaactcctgcctgggctgcggcgtggagttcaagacgtgcaaccccgagggctgccccgaagtgcggcgcaacaccccctggacgccgtggctgcccgtgaacgtgacgcagggcggggcacggcaggagcagcggttccgcttcacctgccgcgcgccccttgcagacccgcacggcctgcagttcggcaggagaaggaccgagacgaggacctgtcccgcggacggctccggctcctgcgacaccgacgccctggtggaggtcctcctgcgcagcgggagcacctccccgcacacggtgagcgggggctgggccgcctggggcccgtggtcgtcctgctcccgggactgcgagctgggcttccgcgtccgcaagagaacgtgcactaacccggagccccgcaacgggggcctgccctgcgtgggcgatgctgccgagtaccaggactgcaacccccaggcttgcccaggtgaggacatctgtctcgggctgcacacggaggaggcactatgtgccacacaggcctgcccagaaggctggtcgccctggtctgagtggagtaagtgcactgacgacggagcccagagccgaagccggcactgtgaggagctcctcccagggtccagcgcctgtgctggaaacagcagccagagccgcccctgcccctacagcgagattcccgtcatcctgccagcctccagcatggaggaggccaccgactgtgcagggttcaatctcatccacttggtggccacgggcatctcctgcttcttgggctctgggctcctgaccctagcagtgtacctgtcttgccagcactgccagcgtcagtcccaggagtccacactggtccatcctgccacccccaaccatttgcactacaagggcggaggcaccccgaagaatgaaaagtacacacccatggaattcaagaccctgaacaagaataacttgatccctgatgacagagccaacttctacccattgcagcagaccaatgtgtacacgactacttactacccaagccccctgaacaaacacagcttccggcccgaggcctcacctggacaacggtgcttccccaacagctgataccgccgtcctggggacttgggcttcttgccttcataaggcacagagcagatggagatgggacagtggagccagtttggttttctccctctgcactaggccaagaacttgctgccttgcctgtggggggtcccatccggcttcagagagctctggctggcattgaccatgggggaaagggctggtttcaggctgacatatggccgcaggtccagttcagcccaggtctctcatggttatcttccaacccactgtcacgctgacactatgctgccatgcctgggctgtggacctactgggcatttgaggaattggagaatggagatggcaagagggcaggcttttaagtttgggttggagacaacttcctgtggcccccacaagctgagtctggccttctccagctggccccaaaaaaggcctttgctacatcctgattatctctgaaagtaatcaatcaagtggctccagtagctctggattttctgccagggctgggccattgtggtgctgccccagtatgacatgggaccaaggccagcgcaggttatccacctctgcctggaagtctatactctacccagggcatccctctggtcagaggcagtgagtactgggaactggaggctgacctgtgcttagaagtcctttaatctgggctggtacaggcctcagccttgccctcaatgcacgaaaggtggcccaggagagaggatcaatgccataggaggcagaagtctggcctctgtgcctctatggagactatcttccagttgctgctcaacagagttgttggctgagacctgcttgggagtctctgctggcccttcatctgttcaggaacacacacacacacacactcacacacgcacacacaatcacaatttgctacagcaacaaaaaagacattgggctgtggcattattaattaaagatgatatccagtctcc

SEQ ID NO: 18669 - DNA, 6878 bp, Homo sapiens
  source 1..6878: mol_type = unassigned DNA
gggtcggaggagacgccagccaaagtaggcggagttgcggaaggagagtccgatctgcgcaatccagtccgggacttggctccgcccgggagcggcggcctctccggtgacagaggagtagtgagcggcacggggtgaggctgcagccaactccgctccccgcgcactcggctgcccaggcgctcggaacccagcagcggcgctcctccgcggtgccggtcgcccgcgatgcccgcttagcagcgtgtagcagcggccagcatcaccacacccgcggcaccgcgctgccggccgcagagccgggccagagccttgcacccctgccccagcccccaccccgccccccgccctgaaatgacttgttaatcggcgcagacaccaccaaggggactcaccgaagtggaatccaagtggaatttggatttggagaagagtttcttgaacatttaccctcttccttgttggttttctttttctttttcttctttttttttttggcttcttttttcctctccccttctccgctcgtcattggagatgaacacatcgcgtttgcatcccagaaagtagtcgccgcgactatttcccccaaagagacaagcacacatgtaggaatgacaaaggcttgcgaaggagagagcgcagcccgcggcccggagagatcccctcgataatggattactaaatgggatacacgctgtaccagttcgctccgagccccggccgcctgtccgtcgatgcaccgaaaagggtgaagtagagaaataaagtctccccgctgaactactatgaggtcagaagccttgctgctatatttcacactgctacactttgctggggctggtttcccagaagattctgagccaatcagtatttcgcatggcaactatacaaaacagtatccggtgtttgtgggccacaagccaggacggaacaccacacagaggcacaggctggacatccagatgattatgatcatgaacggaaccctctacattgctgctagggaccatatttatactgttgatatagacacatcacacacggaagaaatttattgtagcaaaaaactgacatggaaatctagacaggccgatgtagacacatgcagaatgaagggaaaacataaggatgagtgccacaactttattaaagttcttctaaagaaaaacgatgatgcattgtttgtctgtggaactaatgccttcaacccttcctgcagaaactataagatggatacattggaaccattcggggatgaattcagcggaatggccagatgcccatatgatgccaaacatgccaacgttgcactgtttgcagatggaaaactatactcagccacagtgactgacttccttgccattgacgcagtcatttaccggagtcttggagaaagccctaccctgcggaccgtcaagcacgattcaaaatggttgaaagaaccatactttgttcaagccgtggattacggagattatatctacttcttcttcagggaaatagcagtggagtataacaccatgggaaaggtagttttcccaagagtggctcaggtttgtaagaatgatatgggaggatctcaaagagtcctggagaaacagtggacgtcgttcctgaaggcgcgcttgaactgctcagttcctggagactctcatttttatttcaacattctccaggcagttacagatgtgattcgtatcaacgggcgtgatgttgtcctggcaacgttttctacaccttataacagcatccctgggtctgcagtctgtgcctatgacatgcttgacattgccagtgtttttactgggagattcaaggaacagaagtctcctgattccacctggacaccagttcctgatgaacgagttcctaagcccaggccaggttgctgtgctggctcatcctccttagaaagatatgcaacctccaatgagttccctgatgataccctgaacttcatcaagacgcacccgctcatggatgaggcagtgccctccatcttcaacaggccatggttcctgagaacaatggtcagataccgccttaccaaaattgcagtggacacagctgctgggccatatcagaatcacactgtggtttttctgggatcagagaagggaatcatcttgaagtttttggccagaataggaaatagtggttttctaaatgacagccttttcctggaggagatgagtgtttacaactctgaaaaatgcagctatgatggagtcgaagacaaaaggatcatgggcatgcagctggacagagcaagcagctctctgtatgttgcgttctctacctgtgtgataaaggttccccttggccggtgtgaacgacatgggaagtgtaaaaaaacctgtattgcctccagagacccatattgtggatggataaaggaaggtggtgcctgcagccatttatcacccaacagcagactgacttttgagcaggacatagagcgtggcaatacagatggtctgggggactgtcacaattcctttgtggcactgaatgggcattccagttccctcttgcccagcacaaccacatcagattcgacggctcaagaggggtatgagtctaggggaggaatgctggactggaagcatctgcttgactcacctgacagcacagaccctttgggggcagtgtcttcccataatcaccaagacaagaagggagtgattcgggaaagttacctcaaaggccacgaccagctggttcccgtcaccctcttggccattgcagtcatcctggctttcgtcatgggggccgtcttctcgggcatcaccgtctactgcgtctgtgatcatcggcgcaaagacgtggctgtggtgcagcgcaaggagaaggagctcacccactcgcgccggggctccatgagcagcgtcaccaagctcagcggcctctttggggacactcaatccaaagacccaaagccggaggccatcctcacgccactcatgcacaacggcaagctcgccactcccggcaacacggccaagatgctcattaaagcagaccagcaccacctggacctgacggccctccccaccccagagtcaaccccaacgctgcagcagaagcggaagcccagccgcggcagccgcgagtgggagaggaaccagaacctcatcaatgcctgcacaaaggacatgccccccatgggctcccctgtgattcccacggacctgcccctgcgggcctcccccagccacatccccagcgtggtggtcctgcccatcacgcagcagggctaccagcatgagtacgtggaccagcccaaaatgagcgaggtggcccagatggcgctggaggaccaggccgccacactggagtataagaccatcaaggaacatctcagcagcaagagtcccaaccatggggtgaaccttgtggagaacctggacagcctgccccccaaagttccacagcgggaggcctccctgggtcccccgggagcctccctgtctcagaccggtctaagcaagcggctggaaatgcaccactcctcttcctacggggttgactataagaggagctaccccacgaactcgctcacgagaagccaccaggccaccactctcaaaagaaacaacactaactcctccaattcctctcacctctccagaaaccagagctttggcaggggagacaacccgccgcccgccccgcagagggtggactccatccaggtgcacagctcccagccatctggccaggccgtgactgtctcgaggcagcccagcctcaacgcctacaactcactgacaaggtcggggctgaagcgtacgccctcgctaaagccggacgtaccccccaaaccatcctttgctcccctttccacatccatgaagcccaatgatgcgtgtacataatcccagggggagggggtcaggtgtcgaaccagcaggcaaggcgaggtgcccgctcagctcagcaaggttctcaactgcctcgagtacccaccagaccaagaaggcctgcggcagagccgaggacgctgggtcctcctctctgggacacaggggtactcacgaaaactgggccgcgtggtttggtgaaggtttgcaacggcggggactcaccttcattctcttccttcactttcccccacaccctacaacaggtcggacccacaaaagacttcagttatcatcacaaacatgagccaaaagcacatacctaccccatcccccacccccacacacacacacacacacacatgcacacaacacatacacacacacgcacagaggtgaacagaaactgaaacattttgtccacaacttcacgggacgtggccagactgggtttgcgttccaacctgcaaaacacaaatacattttttaaaatcaagaaaatttaaaaagacaaaaaaaaaagaattcattgataattctaactcagactttaacaatggcagaagtttactatgcgcaaatactgtgaaatgcccgccagtgttacagctttctgttgcagcagataaatgccatgttgggcaactatgtcatagatttctgctcctcctctcttttaatgaaataacgtgaccgttaacgcaagtaactctttatttattgttcaccctttttttccttaaggaaaggactcttccaaatatcatcctatgaacagctcttcagaaagcccattgaaagttaaactatttaacgtgaaatccattaactggaataattgagtttctttatttttacaataaattcactgagtaaataagttggagctggaattctgagctttgtgtttggactgtctggtctgtagctaaaggaaaaagttaggaggggaatatttatttaaatctatcagttcattgcctggtcaggtctctggcctataaacatgcaaaaaaactaattcatgttaaagtccttccagatcctaatttctaaagcaatcaggagagaaagcttttagaatggcacatcatatctcattgatgccaacatggttttgtccatggttctgactttctgtgaaggcaccagcttgcaatatgccatcccatttcaccttgcatgtgagacagcaaacaaaatccacaaatggtgtgaactaatatgctggctgctaccttgcataaattaatgatttgatcacacgggttcttcgtggggttacatctgtgaatagcctgttttccacatgtaaatttgtgccttacaccttgagttgtgtacacttgtaaactctttatgatcaactgttcccccttttgaaataagtgcagatatttatttaaccctcccttccccaccctctgccccacttccagccctctgaaagattggagtcaagcagatggaagaatgcagtggtgatagttgtcatgcgacagcctgagaacgctgggcagcaccacaccctccaattcacactgccttctagttgtgccaactggaaccaccctttggctgtgctgcgaagcatggaccccagtgttgttgtgggtgtgtcaaatcccctttcatcctcaagagctccctgcttcccttagattatttcaatacggtgatatccttatttgctagcagaaaagggactaacgtcccattcctcttttctgctgcgtccactggctagagagcaggcggtgcgcggttgggcagacacctgggaggagtctccaagccatgtgcacagcacacacgtgcagtgcacacaaagaaatgacatggaaatagatgcaggcaggctggtccctgctgtgattaacgagtaactccaagtacaaggccgaccacaatggatgctgcaaaaacgttgactggggcaaaggattttttattttattttttattttgttaattatgtttttaggggatgggaggtggtgtgtgtttttctcctcttggttttcatttgctcaagcacacaaaagggacttttgtttactctatcatgaacaaaggaactgtccacatactgtaaaccatgagcagtgttgttgttgtttttttaaacagtatatttggtggtctctttgtctgcttttatttccagttcgatcttctgggtttagttttgtctttaaaaagaattcaaaaaaagactgacaatgacagttttgagttggatagtgaaaaagtggagcctccataatcagtgtggttgccttcagacctgagtacttagctgagggtgggtgagagccctttgttccaaaagtccattagttttgctgttgtttaggagtaggtggttgttgttgtttttactttttttttttttggcttttgtaatggaatccatgttcacatcctgtgaactctgtctcctgaaaccctgaagtatttcctagaacctgaaatattgttttcttccttgaattttctctagaaatgcagaaattaggaaggtgatgggtctgtatccccctgcccccttctttcccatgcttgactcccgagagtactggcagtgcagcacccatcattgacgtaagcggctgtcttgtccagtgtttgtaggcatcactgcctcagctgttaaggagacctgtgtcaaaacttacatccacattcctacacccccacaacccatcacttctggtgttaaccctaaaatacccacatgtattgagctggtcttctgcatttaagtatttctccccagtttttttccccactgtgtgtggggggagggtccataaacccgagtgtgcctttgctttccacccttgctagacactggtagatgcaacaaactcagatttatatttgttgtaaagttgtaaaaatattgtgatgtcaccaattttccttccatctccacatcccctaacatctgattcacgacttaatgtatgttgtaagaaaagaaaaaagaaaagaaaaaaagggaaaaaa

SEQ ID NO: 18670 - DNA, 4256 bp, Homo sapiens
  source 1..4256: mol_type = unassigned DNA
gaacacatcgcgtttgcatcccagaaagtagtcgccgcgactatttcccccaaagagacaagcacacatgtaggaatgacaaaggcttgcgaaggagagagcgcagcccgcggcccggagagatcccctcgataatggattactaaatgggatacacgctgtaccagttcgctccgagccccggccgcctgtccgtcgatgcaccgaaaagggtgaagtagagaaataaagtctccccgctgaactactatgaggtcagaagccttgctgctatatttcacactgctacactttgctggggctggtttcccagaagattctgagccaatcagtatttcgcatggcaactatacaaaacagtatccggtgtttgtgggccacaagccaggacggaacaccacacagaggcacaggctggacatccagatgattatgatcatgaacggaaccctctacattgctgctagggaccatatttatactgttgatatagacacatcacacacggaagaaatttattgtagcaaaaaactgacatggaaatctagacaggccgatgtagacacatgcagaatgaagggaaaacataaggatgagtgccacaactttattaaagttcttctaaagaaaaacgatgatgcattgtttgtctgtggaactaatgccttcaacccttcctgcagaaactataagatggatacattggaaccattcggggatgaattcagcggaatggccagatgcccatatgatgccaaacatgccaacgttgcactgtttgcagatggaaaactatactcagccacagtgactgacttccttgccattgacgcagtcatttaccggagtcttggagaaagccctaccctgcggaccgtcaagcacgattcaaaatggttgaaagaaccatactttgttcaagccgtggattacggagattatatctacttcttcttcagggaaatagcagtggagtataacaccatgggaaaggtagttttcccaagagtggctcaggtttgtaagaatgatatgggaggatctcaaagagtcctggagaaacagtggacgtcgttcctgaaggcgcgcttgaactgctcagttcctggagactctcatttttatttcaacattctccaggcagttacagatgtgattcgtatcaacgggcgtgatgttgtcctggcaacgttttctacaccttataacagcatccctgggtctgcagtctgtgcctatgacatgcttgacattgccagtgtttttactgggagattcaaggaacagaagtctcctgattccacctggacaccagttcctgatgaacgagttcctaagcccaggccaggttgctgtgctggctcatcctccttagaaagatatgcaacctccaatgagttccctgatgataccctgaacttcatcaagacgcacccgctcatggatgaggcagtgccctccatcttcaacaggccatggttcctgagaacaatggtcagataccgccttaccaaaattgcagtggacacagctgctgggccatatcagaatcacactgtggtttttctgggatcagagaagggaatcatcttgaagtttttggccagaataggaaatagtggttttctaaatgacagccttttcctggaggagatgagtgtttacaactctgaaaaatgcagctatgatggagtcgaagacaaaaggatcatgggcatgcagctggacagagcaagcagctctctgtatgttgcgttctctacctgtgtgataaaggttccccttggccggtgtgaacgacatgggaagtgtaaaaaaacctgtattgcctccagagacccatattgtggatggataaaggaaggtggtgcctgcagccatttatcacccaacagcagactgacttttgagcaggacatagagcgtggcaatacagatggtctgggggactgtcacaattcctttgtggcactgaatgacatttcaactcctctaccagataatgaaatgtcttacaacacagtgtatgggcattccagttccctcttgcccagcacaaccacatcagattcgacggctcaagaggggtatgagtctaggggaggaatgctggactggaagcatctgcttgactcacctgacagcacagaccctttgggggcagtgtcttcccataatcaccaagacaagaagggagtgattcgggaaagttacctcaaaggccacgaccagctggttcccgtcaccctcttggccattgcagtcatcctggctttcgtcatgggggccgtcttctcgggcatcaccgtctactgcgtctgtgatcatcggcgcaaagacgtggctgtggtgcagcgcaaggagaaggagctcacccactcgcgccggggctccatgagcagcgtcaccaagctcagcggcctctttggggacactcaatccaaagacccaaagccggaggccatcctcacgccactcatgcacaacggcaagctcgccactcccggcaacacggccaagatgctcattaaagcagaccagcaccacctggacctgacggccctccccaccccagagtcaaccccaacgctgcagcagaagcggaagcccagccgcggcagccgcgagtgggagaggaaccagaacctcatcaatgcctgcacaaaggacatgccccccatgggctcccctgtgattcccacggacctgcccctgcgggcctcccccagccacatccccagcgtggtggtcctgcccatcacgcagcagggctaccagcatgagtacgtggaccagcccaaaatgagcgaggtggcccagatggcgctggaggaccaggccgccacactggagtataagaccatcaaggaacatctcagcagcaagagtcccaaccatggggtgaaccttgtggagaacctggacagcctgccccccaaagttccacagcgggaggcctccctgggtcccccgggagcctccctgtctcagaccggtctaagcaagcggctggaaatgcaccactcctcttcctacggggttgactataagaggagctaccccacgaactcgctcacgagaagccaccaggccaccactctcaaaagaaacaacactaactcctccaattcctctcacctctccagaaaccagagctttggcaggggagacaacccgccgcccgccccgcagagggtggactccatccaggtgcacagctcccagccatctggccaggccgtgactgtctcgaggcagcccagcctcaacgcctacaactcactgacaaggtcggggctgaagcgtacgccctcgctaaagccggacgtaccccccaaaccatcctttgctcccctttccacatccatgaagcccaatgatgcgtgtacataatcccagggggagggggtcaggtgtcgaaccagcaggcaaggcgaggtgcccgctcagctcagcaaggttctcaactgcctcgagtacccaccagaccaagaaggcctgcggcagagccgaggacgctgggtcctcctctctgggacacaggggtactcacgaaaactgggccgcgtggtttggtgaaggtttgcaacggcggggactcaccttcattctcttccttcactttcccccacaccctacaacaggtcggacccacaaaagacttcagttatcatcacaaacatgagccaaaagcacatacctaccccatcccccacccccacacacacacacacacacacatgcacacaacacatacacacacacgcacagaggtgaacagaaactgaaacattttgtccacaacttcacgggacgtggccagactgggtttgcgttccaacctgcaaaacacaaatacattttttaaaatcaagaaaatttaaaaagacaaaaaaaaaagaattcattgataattctaactcagactttaacaatggcagaagtttactatgcgcaaatactgtgaaatgcccgccagtgttacagctttctgttgcagcagataaatgccatgttgggcaactatgtcatagatttctgctcctcctctcttttaatgaaataacgtgaccgttaacgcaagtaactctttatttattgttcaccctttttttccttaaggaaaggactcttccaaatatcatcctatgaacagctcttcagaaagcccattgaaagttaaactatttaacgtgaaatccattaactggaataattgagtttctttatttttacaataaattcactgagtaaat

SEQ ID NO: 18671 - DNA, 3640 bp, Homo sapiens
  source 1..3640: mol_type = unassigned DNA
tatttctaattatttgcttatgctgggcactgaattttctcttaggctgaccatatattttattaaagtagtcttgaattcaggagtggaaaaaaaaaagttatgttttagacctcaatgtaagctgaaaggaaataaaggaacttctatatttccatttctcaggctgattttccttcccctgttctcttatctgtatcatgacatgagatgtgaacctcagaaatgtaaaaacaaaaagtctagaataaagcattccttgaattttaaatgaacatgcttttagcagctggatacgaagcagactattttcaacaaattgaatgtttcccacttgtgtgagagccaaacaagtgccatacagaaagggacctcttcaatgttaccaaagctttgtggcagcatttaagtgtggtggctccatagaagtcactatagcatggacgagccacttggcttgctttttcctgctaatcaaagttttaagaagataaaaagctatctttgttatatatgttttgtctaatttgcaatattacagtctcctggggggaaatccaacttccaataataattgtaaaaaaaaaaaaagaatgcactgtacttattcttttaatctgtctttctagaggccaatattttatttatcatgtgcatggtgatcatacttcaaggctggagcttttggagttgttgtgagtctgccctactttccaccaaaggcaccaattatacatgcacagtagttgcccttgtatcttttaaaaattgttcaagaggttgttctgtgtaagccaataactccacttgaaaatcacgaggaggtcatattttatttctgccagagagaacaggtatcattgtgccagcttggatcaaagcacctgatacaatctgtatttaaccttgtggaatgatggagggagagcttacaaacgaattcacaggaaatggctagagtttctgctgtaactctcaacctagccattcttctcatattatcctatggtagcttatctgaacctcagaaatctatccttttctaatttgaatcattttagtcaacgcagcctcagaaacggaaaccatctattgaaataatacacaaaagggacagccgtaatagcgtgtagccgttgaagcctccattccaatgaaaagacagtgggaatagatccctttggaaaccactaactaatcccagaaagaggaatgcctgtgaagttgagttgaacctgaagactagacacactgtagaacctccataggaagggtgcagagtaactgagttacttgtgatagggacaagacttacccactaccagaaacctgccccatcggtcacaaatgggattcccagagtggacactttctgtgtttagtgctgccatgggaatatcaaagaaggacactggcctttcttgagcacctatgtgtcagacactgtgcaagatgctttcaccattatgtcactatcctcccaacaccgagaggtatctttatccccactgggtgcacaggaagaggttaagtgattccctgaggcccacccagcaagtatgagagataggatctggcccttcattttctaactacaagttcaatgggctttctgctgaacacaccccacaccaccaccaccaccaccaccaccaccaccactaagccgtgtcatttctagggccatctcctctcagtcttacagccagcttgggtgtcccacctccaggcctctgcgcaaagggaatgtgggtctctctggtgatgttttcctaactgtatttgtgatgaaaacagggcattccagttccctcttgcccagcacaaccacatcagattcgacggctcaagaggggtatgagtctaggggaggaatgctggactggaagcatctgcttgactcacctgacagcacagaccctttgggggcagtgtcttcccataatcaccaagacaagaagggagtgattcgggaaagttacctcaaaggccacgaccagctggttcccgtcaccctcttggccattgcagtcatcctggctttcgtcatgggggccgtcttctcgggcatcaccgtctactgcgtctgtgatcatcggcgcaaagacgtggctgtggtgcagcgcaaggagaaggagctcacccactcgcgccggggctccatgagcagcgtcaccaagctcagcggcctctttggggacactcaatccaaagacccaaagccggaggccatcctcacgccactcatgcacaacggcaagctcgccactcccggcaacacggccaagatgctcattaaagcagaccagcaccacctggacctgacggccctccccaccccagagtcaaccccaacgctgcagcagaagcggaagcccagccgcggcagccgcgagtgggagaggaaccagaacctcatcaatgcctgcacaaaggacatgccccccatgggctcccctgtgattcccacggacctgcccctgcgggcctcccccagccacatccccagcgtggtggtcctgcccatcacgcagcagggctaccagcatgagtacgtggaccagcccaaaatgagcgaggtggcccagatggcgctggaggaccaggccgccacactggagtataagaccatcaaggaacatctcagcagcaagagtcccaaccatggggtgaaccttgtggagaacctggacagcctgccccccaaagttccacagcgggaggcctccctgggtcccccgggagcctccctgtctcagaccggtctaagcaagcggctggaaatgcaccactcctcttcctacggggttgactataagaggagctaccccacgaactcgctcacgagaagccaccaggccaccactctcaaaagaaacaacactaactcctccaattcctctcacctctccagaaaccagagctttggcaggggagacaacccgccgcccgccccgcagagggtggactccatccaggtgcacagctcccagccatctggccaggccgtgactgtctcgaggcagcccagcctcaacgcctacaactcactgacaaggtcggggctgaagcgtacgccctcgctaaagccggacgtaccccccaaaccatcctttgctcccctttccacatccatgaagcccaatgatgcgtgtacataatcccagggggagggggtcaggtgtcgaaccagcaggcaaggcgaggtgcccgctcagctcagcaaggttctcaactgcctcgagtacccaccagaccaagaaggcctgcggcagagccgaggacgctgggtcctcctctctgggacacaggggtactcacgaaaactgggccgcgtggtttggtgaaggtttgcaacggcggggactcaccttcattctcttccttcactttcccccacaccctacaacaggtcggacccacaaaagacttcagttatcatcacaaacatgagccaaaagcacatacctaccccatcccccacccccacacacacacacacacacacatgcacacaacacatacacacacacgcacagaggtgaacagaaactgaaacattttgtccacaacttcacgggacgtggccagactgggtttgcgttccaacctgcaaaacacaaatacattttttaaaatc

SEQ ID NO: 18672 - DNA, 2116 bp, Homo sapiens
  source 1..2116: mol_type = unassigned DNA
catatcagaatcacactgtggtttttctgggatcagagaagggaatcatcttgaagtttttggccagaataggaaatagtggttttctaaatgacagccttttcctggaggagatgagtgtttacaactctgaaaaatgcagctatgatggagtcgaagacaaaaggatcatgggcatgcagctggacagagcaagcagctctctgtatgttgcgttctctacctgtgtgataaaggttccccttggccggtgtgaacgacatgggaagtgtaaaaaaacctgtattgcctccagagacccatattgtggatggataaaggaaggtggtgcctgcagccatttatcacccaacagcagactgacttttgagcaggacatagagcgtggcaatacagatggtctgggggactgtcacaattcctttgtggcactgaatggagtgattcgggaaagttacctcaaaggccacgaccagctggttcccgtcaccctcttggccattgcagtcatcctggctttcgtcatgggggccgtcttctcgggcatcaccgtctactgcgtctgtgatcatcggcgcaaagacgtggctgtggtgcagcgcaaggagaaggagctcacccactcgcgccggggctccatgagcagcgtcaccaagctcagcggcctctttggggacactcaatccaaagacccaaagccggaggccatcctcacgccactcatgcacaacggcaagctcgccactcccggcaacacggccaagatgctcattaaagcagaccagcaccacctggacctgacggccctccccaccccagagtcaaccccaacgctgcagcagaagcggaagcccagccgcggcagccgcgagtgggagaggaaccagaacctcatcaatgcctgcacaaaggacatgccccccatgggctcccctgtgattcccacggacctgcccctgcgggcctcccccagccacatccccagcgtggtggtcctgcccatcacgcagcagggctaccagcatgagtacgtggaccagcccaaaatgagcgaggtggcccagatggcgctggaggaccaggccgccacactggagtataagaccatcaaggaacatctcagcagcaagagtcccaaccatggggtgaaccttgtggagaacctggacagcctgccccccaaagttccacagcgggaggcctccctgggtcccccgggagcctccctgtctcagaccggtctaagcaagcggctggaaatgcaccactcctcttcctacggggttgactataagaggagctaccccacgaactcgctcacgagaagccaccaggccaccactctcaaaagaaacaacactaactcctccaattcctctcacctctccagaaaccagagctttggcaggggagacaacccgccgcccgccccgcagagggtggactccatccaggtgcacagctcccagccatctggccaggccgtgactgtctcgaggcagcccagcctcaacgcctacaactcactgacaaggtcggggctgaagcgtacgccctcgctaaagccggacgtaccccccaaaccatcctttgctcccctttccacatccatgaagcccaatgatgcgtgtacataatcccagggggagggggtcaggtgtcgaaccagcaggcaaggcgaggtgcccgctcagctcagcaaggttctcaactgcctcgagtacccaccagaccaagaaggcctgcggcagagccgaggacgctgggtcctcctctctgggacacaggggtactcacgaaaactgggccgcgtggtttggtgaaggtttgcaacggcggggactcaccttcattctcttccttcactttcccccacaccctacaacaggtcggacccacaaaagacttcagttatcatcacaaacatgagccaaaagcacatacctaccccatcccccacccccacacacacacacacacacacatgcacacaacacatacacacacacgcacagaggtgaacagaaactgaaacattttgtccacaacttcacgggacgtggccagactgggtttgcgttccaacctgcaaaacacaaatacattttttaaaatc

SEQ ID NO: 18673 - DNA, 1678 bp, Homo sapiens
  source 1..1678: mol_type = unassigned DNA
aattgaagggaggaggacccttaggaaggaaagaaaaagagaatgtacttttcaggctaaggtttctgggttttaaaaccatcacttcagaaatcaaaatattttagcagaaaaacccccatgagaaagcttcaaggtctcggctgtgacaaagacaacatttcagtagaagtttaaggttgcgtgttgtgggcttgggaaggggtagagatctttatttcctttcattctaattctgtgccactgatacctgccagtaaaatacatgaaacatattccagaaagagttgatttagtagatgaaaaatgcgtctcccgagaccagagaaggagtgattcgggaaagttacctcaaaggccacgaccagctggttcccgtcaccctcttggccattgcagtcatcctggctttcgtcatgggggccgtcttctcgggcatcaccgtctactgcgtctgtgatcatcggcgcaaagacgtggctgtggtgcagcgcaaggagaaggagctcacccactcgcgccggggctccatgagcagcgtcaccaagctcagcggcctctttggggacactcaatccaaagacccaaagccggaggccatcctcacgccactcatgcacaacggcaagctcgccactcccggcaacacggccaagatgctcattaaagcagaccagcaccacctggacctgacggccctccccaccccagagtcaaccccaacgctgcagcagaagcggaagcccagccgcggcagccgcgagtgggagaggaaccagaacctcatcaatgcctgcacaaaggacatgccccccatgggctcccctgtgattcccacggacctgcccctgcgggcctcccccagccacatccccagcgtggtggtcctgcccatcacgcagcagggctaccagcatgagtacgtggaccagcccaaaatgagcgaggtggcccagatggcgctggaggaccaggccgccacactggagtataagaccatcaaggaacatctcagcagcaagagtcccaaccatggggtgaaccttgtggagaacctggacagcctgccccccaaagttccacagcgggaggcctccctgggtcccccgggagcctccctgtctcagaccggtctaagcaagcggctggaaatgcaccactcctcttcctacggggttgactataagaggagctaccccacgaactcgctcacgagaagccaccaggccaccactctcaaaagaaacaacactaactcctccaattcctctcacctctccagaaaccagagctttggcaggggagacaacccgccgcccgccccgcagagggtggactccatccaggtgcacagctcccagccatctggccaggccgtgactgtctcgaggcagcccagcctcaacgcctacaactcactgacaaggtcggggctgaagcgtacgccctcgctaaagccggacgtaccccccaaaccatcctttgctcccctttccacatccatgaagcccaatgatgcgtgtacataatcccagggggagggggtcaggtgtcgaaccagcaggcaaggcgaggtgcccgctcagctcagcaaggttctcaactgcctcgagtacccaccagaccaagaaggcctgcggcagagccgaggacgctgggtcctcctctctgggacaca

SEQ ID NO: 18674 - DNA, 3292 bp, Homo sapiens
  source 1..3292: mol_type = unassigned DNA
aatgcgttactgtgtggactgagttcccatgactcgggctccccaggacaatgtctctttcttcaccaagctgatggtaaatatctggttagcttcatctatttaaaaccagccaagcaggaatcctagtgctggagagaggattctttttttttttgtttggtgaagtagagaaataaagtctccccgctgaactactatgaggtcagaagccttgctgctatatttcacactgctacactttgctggggctggtttcccagaagattctgagccaatcagtatttcgcatggcaactatacaaaacagtatccggtgtttgtgggccacaagccaggacggaacaccacacagaggcacaggctggacatccagatgattatgatcatgaacggaaccctctacattgctgctagggaccatatttatactgttgatatagacacatcacacacggaagaaatttattgtagcaaaaaactgacatggaaatctagacaggccgatgtagacacatgcagaatgaagggaaaacataaggatgagtgccacaactttattaaagttcttctaaagaaaaacgatgatgcattgtttgtctgtggaactaatgccttcaacccttcctgcagaaactataagatggatacattggaaccattcggggatgaattcagcggaatggccagatgcccatatgatgccaaacatgccaacgttgcactgtttgcagatggaaaactatactcagccacagtgactgacttccttgccattgacgcagtcatttaccggagtcttggagaaagccctaccctgcggaccgtcaagcacgattcaaaatggttgaaagaaccatactttgttcaagccgtggattacggagattatatctacttcttcttcagggaaatagcagtggagtataacaccatgggaaaggtagttttcccaagagtggctcaggtttgtaagaatgatatgggaggatctcaaagagtcctggagaaacagtggacgtcgttcctgaaggcgcgcttgaactgctcagttcctggagactctcatttttatttcaacattctccaggcagttacagatgtgattcgtatcaacgggcgtgatgttgtcctggcaacgttttctacaccttataacagcatccctgggtctgcagtctgtgcctatgacatgcttgacattgccagtgtttttactgggagattcaaggaacagaagtctcctgattccacctggacaccagttcctgatgaacgagttcctaagcccaggccaggttgctgtgctggctcatcctccttagaaagatatgcaacctccaatgagttccctgatgataccctgaacttcatcaagacgcacccgctcatggatgaggcagtgccctccatcttcaacaggccatggttcctgagaacaatggtcagataccgccttaccaaaattgcagtggacacagctgctgggccatatcagaatcacactgtggtttttctgggatcagagaagggaatcatcttgaagtttttggccagaataggaaatagtggttttctaaatgacagccttttcctggaggagatgagtgtttacaactctgaaaaatgcagctatgatggagtcgaagacaaaaggatcatgggcatgcagctggacagagcaagcagctctctgtatgttgcgttctctacctgtgtgataaaggttccccttggccggtgtgaacgacatgggaagtgtaaaaaaacctgtattgcctccagagacccatattgtggatggataaaggaaggtggtgcctgcagccatttatcacccaacagcagactgacttttgagcaggacatagagcgtggcaatacagatggtctgggggactgtcacaattcctttgtggcactgaatgggcattccagttccctcttgcccagcacaaccacatcagattcgacggctcaagaggggtatgagtctaggggaggaatgctggactggaagcatctgcttgactcacctgacagcacagaccctttgggggcagtgtcttcccataatcaccaagacaagaagggagtgattcgggaaagttacctcaaaggccacgaccagctggttcccgtcaccctcttggccattgcagtcatcctggctttcgtcatgggggccgtcttctcgggcatcaccgtctactgcgtctgtgatcatcggcgcaaagacgtggctgtggtgcagcgcaaggagaaggagctcacccactcgcgccggggctccatgagcagcgtcaccaagctcagcggcctctttggggacactcaatccaaagacccaaagccggaggccatcctcacgccactcatgcacaacggcaagctcgccactcccggcaacacggccaagatgctcattaaagcagaccagcaccacctggacctgacggccctccccaccccagagtcaaccccaacgctgcagcagaagcggaagcccagccgcggcagccgcgagtgggagaggaaccagaacctcatcaatgcctgcacaaaggacatgccccccatgggctcccctgtgattcccacggacctgcccctgcgggcctcccccagccacatccccagcgtggtggtcctgcccatcacgcagcagggctaccagcatgagtacgtggaccagcccaaaatgagcgaggtggcccagatggcgctggaggaccaggccgccacactggagtataagaccatcaaggaacatctcagcagcaagagtcccaaccatggggtgaaccttgtggagaacctggacagcctgccccccaaagttccacagcgggaggcctccctgggtcccccgggagcctccctgtctcagaccggtctaagcaagcggctggaaatgcaccactcctcttcctacggggttgactataagaggagctaccccacgaactcgctcacgagaagccaccaggccaccactctcaaaagaaacaacactaactcctccaattcctctcacctctccagaaaccagagctttggcaggggagacaacccgccgcccgccccgcagagggtggactccatccaggtgcacagctcccagccatctggccaggccgtgactgtctcgaggcagcccagcctcaacgcctacaactcactgacaaggtcggggctgaagcgtacgccctcgctaaagccggacgtaccccccaaaccatcctttgctcccctttccacatccatgaagcccaatgatgcgtgtacataa

SEQ ID NO: 18675 - DNA, 749 bp, Homo sapiens
  source 1..749: mol_type = unassigned DNA
aggccaggttgctgtgctggctcatcctccttagaaagatatgcaacctccaatgagttccctgatgataccctgaacttcatcaagacgcacccgctcatggatgaggcagtgccctccatcttcaacaggccatggttcctgagaacaatggtcagatgcagctatgatggagtcgaagacaaaaggatcatgggcatgcagctggacagagcaagcagctctctgtatgttgcgttctctacctgtgtgataaaggttccccttggccggtgtgaacgacatgggaagtgtaaaaaaacctgtattgcctccagagacccatattgtggatggataaaggaaggtggtgcctgcagccatttatcacccaacagcagactgacttttgagcaggacatagagcgtggcaatacagatggtctgggggactgtcacaattcctttgtggcactgaatgggcattccagttccctcttgcccagcacaaccacatcagattcgacggctcaagaggggtatgagtctaggggaggaatgctggactggaagcatctgcttgactcacctgacagcacagaccctttgggggcagtgtcttcccataatcaccaagacaagaagggagtgattcgggaaagttacctcaaaggccacgaccagctggttcccgtcaccctcttggccattgcagtcatcctggctttcgtcatgggggccgtcttctcgggcatcaccgtctactgcgt

SEQ ID NO: 18676 - DNA, 572 bp, Homo sapiens
  source 1..572: mol_type = unassigned DNA
tatgcaacctccaatgagttccctgatgataccctgaacttcatcaagacgcacccgctcatggatgaggcagtgccctccatcttcaacaggccatggttcctgagaacaatggtcagataccgccttaccaaaattgcagtggacacagctgctgggccatatcagaatcacactgtggtttttctgggatcagagaagggaatcatcttgaagtttttggccagaataggaaatagtggttttctaaatgacagccttttcctggaggagatgagtgtttacaactctgaaaagtaagtggaatatttggttctttcttagtaattatttgttatgctattatggcccctttcattcagagaaaatcatgaccgactgaggttttatgcatttttagatgactttttagtgctgtttgtaaaaatttaacacctaaaaagcattattttctccttgccaatgtgtgtgtgtgtgtttatatagatacatatatgtgtgtgtgtttatatagatacatatacatgtgtgtgtttacgtgtgtgcaagagcagaagggtttgtttgtttca

SEQ ID NO: 18677 - DNA, 598 bp, Homo sapiens
  source 1..598: mol_type = unassigned DNA
gactttatgtggctcggagctgattccctgaaggatttatgactctgtattaaatgccacagccttatcttttaaaacatgctactctaatgctgagttttcctctttttttcttttctttcttttttttttttgttactgattttagaaacagtattaagcaccttgttgttttgtttctgttttcaaggaatgcagattctactaagatctccttgcaaaatgaatgcatttaattttccctatgtgtttttcctctgcaggtagttttcccaagagtggctcaggtttgtaagaatgatatgggaggatctcaaagagtcctggagaaacagtggacgtcgttcctgaaggcgcgcttgaactgctcagttcctggagactctcatttttatttcaacattctccaggcagttacagatgtgattcgtatcaacgggcgtgatgttgtcctggcaacgttttctacaccttataacagcatccctgggtctgcagtctgtgcctatgacatgcttgacattgccagtgtttttactgggagattcaaggaacagaagtctcctgattccacctggacaccagttcctgatgaacg

SEQ ID NO: 18678 - DNA, 537 bp, Homo sapiens
  source 1..537: mol_type = unassigned DNA
agatggaaaactatactcagccacagtgactgacttccttgccattgacgcagtcatttaccggagtcttggagaaagccctaccctgcggaccgtcaagcacgattcaaaatggttgaaagaaccatactttgttcaagccgtggattacggagattatatctacttcttcttcagggaaatagcagtggagtataacaccatgggaaaggtagttttcccaagagtggctcaggtttgtaagaatgatatgggaggatctcaaagagtcctggagaaacagtggacgtcgttcctgaaggcgcgcttgaactgctcagttcctggagactctcatttttatttcaacattctccaggcagttacagatgtgattcgtatcaacgggcgtgatgttgtcctggcaacgttttctacaccttataacaggtaatcatgccctagctgtgttgacctcatcaattcttcctggcttccttctcccagggggttctcttctaataaaccatatttgcaactgactgaaaattgcattca

SEQ ID NO: 18679 - DNA, 710 bp, Homo sapiens
  source 1..710: mol_type = unassigned DNA
aatgccttcaacccttcctgcagaaactataaggagctgctgctgtgaagtctaagatttgatgactgcttcaagggttagttttcacttcttggaaagaggaagtcaccatggcttttgcctctggacctttccaacctcacaaaccgaaacatttgtacttcactacttcttgcctttgaccagctatagatggatacattggaaccattcggggatgaattcagcggaatggccagatgcccatatgatgccaaacatgccaacgttgcactgtttgcagatggaaaactatactcagccacagtgactgacttccttgccattgacgcagtcatttaccggagtcttggagaaagccctaccctgcggaccgtcaagcacgattcaaaatggttgaaagaaccatactttgttcaagccgtggattacggagattatatctacttcttcttcagggaaatagcagtggagtataacaccatgggaaaggtagttttcccaagagtggctcaggtttgtaagaatgatatgggaggatctcaaagagtcctggagaaacagtggacgtcgttcctgaaggcgcgcttgaactgctcagttcctggagactctcatttttatttcaacattctccaggcagttacagatgtgattcgtatcaacgggcgtgatgttgtcctggcaacgttttctacaccttataacag

SEQ ID NO: 18680 - DNA, 767 bp, Homo sapiens
  source 1..767: mol_type = unassigned DNA
agctctacagaagatgaaaagaaaactgtggaagaaaagagcaccttcatgcaaagggttcactagcgagttgagccctgagaaagagagacaaatcaaaaattgtgacacttagaaatataaatccaggcttataattatctagaaatgaaagtgtaacttgatgaaccttaaggagcactcttctatcatatttcctaaaataacagactcatatggaaatggaaaatggtggcatgatacaaaacagtatccggtgtttgtgggccacaagccaggacggaacaccacacagaggcacaggctggacatccagatgattatgatcatgaacggaaccctctacattgctgctagggaccatatttatactgttgatatagacacatcacacacggaagaaatttattgtagcaaaaaactgacatggaaatctagacaggccgatgtagacacatgcagaatgaagggaaaacataaggatgagtgccacaactttattaaagttcttctaaagaaaaacgatgatgcattgtttgtctgtggaactaatgccttcaacccttcctgcagaaactataagatggatacattggaaccattcggggatgaattcagcggaatggccagatgcccatatgatgccaaacatgccaacgttgcactgtttgcagatggaaaactatactcagccacagtgactgacttccttgccattgacgcagtcatttaccggagtcttggagaaagccctaccctgcggaccg

SEQ ID NO: 18681 - DNA, 563 bp, Homo sapiens
  source 1..563: mol_type = unassigned DNA
gactcgggctccccaggacaatgtctctttcttcaccaagctgatgggtgaagtagagaaataaagtctccccgctgaactactatgaggtcagaagccttgctgctatatttcacactgctacactttgctggggctggtttcccagaagattctgagccaatcagtatttcgcatggcaactatacaaaacagtatccggtgtttgtgggccacaagccaggacggaacaccacacagaggcacaggctggacatccagatgattatgatcatgaacggaaccctctacattgctgctagggaccatatttatactgttgatatagacacatcacacacggaagaaatttattgtagcaaaaaactgacatggaaatctagacaggccgatgtagacacatgcagaatgaagggaaaacataaggatgagtgccacaactttattaaagttcttctaaagaaaaacgatgatgcattgtttgtctgtggaactaatgccttcaacccttcctgcagaaactataagatggatacattggaaccattcggggatgaattcag

SEQ ID NO: 18682 - DNA, 538 bp, Homo sapiens
  source 1..538: mol_type = unassigned DNA
aacaaataaggcaggaatgggctgtatctgctgttgaccatctcaacgcccaagcctgcctttcctggcttagggaggaggccctgttggggaactgagctttctccatagccagagatttttggttccagggcttcttgacatgaaactcccaaaagggtgaagtagagaaataaagtctccccgctgaactactatgaggtcagaagccttgctgctatatttcacactgctacactttgctggggctggtttcccagaagattctgagccaatcagtatttcgcatggcaactatacaaaacagtatccggtgtttgtgggccacaagccaggacggaacaccacacagaggcacaggctggacatccagatgattatgatcatgaacggaaccctctacattgctgctagggaccatatttatactgttgatatagacacatcacacacggaagaaatttattgtagcaaaaaactgacatggaaatctagacaggccgatgtagacacatgcagaatgaagggaaaacataag

SEQ ID NO: 18683 - DNA, 582 bp, Homo sapiens
  source 1..582: mol_type = unassigned DNA
taccagttcgctccgagccccggccgcctgtccgtcgatgcaccgaaaagagaacctgtgtgctgtggaaggtccccaggctacagggtgcagagatgtccactgggcacatgctgacagatccttcaaaaaatggtacttaaagaagattagatcaacatttctgagaaaagcatctcttttgccttctcattggttcagtaaacccagttaaaggcaaagtttccagccctcagagcctgccatgggattcctgtatcattagatattgttaacattagcacttttggagtattatttcacagacatggtttcaatgttcagaaccaaaaggtggagaaatggtgtcagataaccttagagaggatcattttcttggtaatctctcctttcttaaaataaactagatattgctgacaatgtgaaatttgtgactaaccttcagtagatatgttgattttgcttttaaaataaaaaccaaggatgcttagaagtagccataagaggaaatattttgaaaatgaatgacctaaagtaatcaatggatatgtataacatttatattttaaaatgacaatgact

SEQ ID NO: 18684 - DNA, 6028 bp, Homo sapiens
  source 1..6028: mol_type = unassigned DNA
gtaaccggtggaagtgtcaaagaggaaggagtggagggctgctgaggtgacagggtgtggtctgtgagggagcggacgaacccggagaagagagcagagagacccaccaggactaggaggcagcggggagcgtgcctgcgtcgctcggagcggtgacagcaaggagcgcagcgcggaggccgggcggcaaggggagtttccagtcctcgataagtggagtccctgctctgcgctgcgccagcgccttccgcctgggcccgcggtgctagacacctgccgagtccgaagcgggagtcaggctgagccttcggcccccaagatctccaacctgagcatatgccagttgacatgggaacactgaggccagcaatttaaggatttcacatttgcttgcagtgaatgcgtaatcctggatctcttgttcgcaaatcgacagcctgaagccctctggaagcccaagactgctggaggtttttgaccagacaagccaacctttttcaaggtagctcagtggcatttctgagcaggggccaccctgacttcaccttggcccaccatgagggtcttcctgctttgtgcctacatactgctgctgatggtttcccagttgagggcagtcagctttcctgaagatgatgaaccccttaatactgtcgactatcactattcaaggcaatatccggtttttagaggacgcccttcaggcaatgaatcgcagcacaggctggactttcagctgatgttgaaaattcgagacacactttatattgctggcagggatcaagtttatacagtaaacttaaatgaaatgcccaaaacagaagtaatacccaacaagaaactgacatggcgatcaagacaacaggatcgagaaaactgtgctatgaaaggcaagcataaagatgaatgccacaactttatcaaagtatttgttccaagaaacgatgagatggtttttgtttgtggtaccaatgcattcaatcccatgtgtagatactacaggttgagtaccttagaatatgatggggaagaaattagtggcctggcaagatgcccatttgatgccagacaaaccaatgttgccctctttgctgatgggaagctgtattctgccacagtggctgacttcttggccagcgatgccgttatttatcgaagcatgggtgatggatctgcccttcgcacaataaaatatgattccaaatggataaaagagccacactttcttcatgccatagaatatggaaactatgtctatttcttctttcgagaaatcgctgtcgaacataataatttaggcaaggctgtgtattcccgcgtggcccgcatatgtaaaaacgacatgggtggttcccagcgggtcctggagaaacactggacttcatttctaaaggctcggctgaactgttctgtccctggagattcgtttttctactttgatgttctgcagtctattacagacataatacaaatcaatggcatccccactgtggtcggggtgtttaccacgcagctcaatagcatccctggttctgctgtctgtgcatttagcatggatgacattgaaaaagtattcaaaggacggtttaaggaacagaaaactccagattctgtttggacagcagttcccgaagacaaagtgccaaagccaaggcctggctgttgtgcaaaacacggccttgccgaagcttataaaacctccatcgatttcccggatgaaactctgtcattcatcaaatctcatcccctgatggactctgccgttccacccattgccgatgagccctggttcacaaagactcgggtcaggtacagactgacggccatctcagtggaccattcagccggaccctaccagaactacacagtcatctttgttggctctgaagctggcatggtacttaaagttctggcaaagaccagtcctttctctttgaacgacagcgtattactggaagagattgaagcctacaaccatgcaaagtgcagtgctgagaatgaggaagacaaaaaggtcatctcattacagttggataaagatcaccacgctttatatgtggcgttctctagctgcattatccgcatccccctcagtcgctgtgagcgttatggatcatgtaaaaagtcttgtattgcatctcgtgacccgtattgtggctggttaagccagggatcctgtggtagagtgaccccagggatgctgctgttaaccgaagacttctttgctttccataaccacagtgctgaaggatatgaacaagacacagaattcggcaacacagctcatctaggggactgccatggtgtacgatgggaagtccagtctggagagtccaaccagatggtccacatgaatgtcctcatcacctgtgtctttgctgcttttgttttgggggcattcattgcaggtgtggcagtatactgctatcgagacatgtttgttcggaaaaacagaaagatccataaagatgcagagtccgcccagtcatgcacagactccagtggaagttttgccaaactgaatggtctctttgacagccctgtcaaggaataccaacagaatattgattctcctaaactgtatagtaacctgctaaccagtcggaaagagctaccacccaatggagatactaaatccatggtaatggaccatcgagggcaacctccagagttggctgctcttcctactcctgagtctacacccgtgcttcaccagaagaccctgcaggccatgaagagccactcagaaaaggcccatggccatggagcttcaaggaaagaaacccctcagttttttccgtctagtccgccacctcattccccattaagtcatgggcatatccccagtgccattgttcttccaaatgctacccatgactacaacacgtctttctcaaactccaatgctcacaaagctgaaaagaagcttcaaaacattgatcaccctctcacaaagtcatccagtaagagagatcaccggcgttctgttgattccagaaataccctcaatgatctcctgaagcatctgaatgacccaaatagtaaccccaaagccatcatgggagacatccagatggcacaccagaacttaatgctggatcccatgggatcgatgtctgaggtcccacctaaagtccctaaccgggaggcatcgctatactcccctccttcaactctccccagaaatagcccaaccaagcgagtggatgtccccaccactcctggagtcccaatgacttctctggaaagacaaagaggttatcacaaaaattcctcccagaggcactctatatctgctatgcctaaaaacttaaactcaccaaatggtgttttgttatccagacagcctagtatgaaccgtggaggatatatgcccacccccactggggcgaaggtggactatattcagggaacaccagtgagtgttcatctgcagccttccctctccagacagagcagctacaccagtaatggcactcttcctaggacgggactaaagaggacgccgtccttaaaacctgacgtgccaccaaagccttcctttgttcctcaaaccccatctgtcagaccactgaacaaatacacatactaggcctcaagtgtgctattcccatgtggctttatcctgtccgtgttgttgagaggatgatgttgtaagggtaccttaaaacaagagactcgcttgtattttaagagaaccaagtggccaaagaaactctttctaactttggcaacatcagaacttgccacatgtagctactgcagcaaggcttctgtgtacttgcctgaaaacaaaggaaggtgctggtcattccatttcttttgtttgaagctaaagagatgtgtagctcacaggggctaccttaccagtataaagagctgataacagtactcagaagaatctgtgaacaaatacttgaaaatgggttcaatgtagactgccattatgtgtggtcttcccattaaatgtgaacattttaatatgtatgcattcaccttgcctcttgcacaaatgtcaaaaaaaagatggtaatatctcaaagaaatgaacttgtagattaccaagcagtttgctaaaaattcaatctttgacccaagctgtagcatttttttttcatgtgtggcatctttttcatgccaccaacaaacttgttgtgtgtgtgcgtgtgtgtgtgtgtgtgtgtgtgtgtgtgtgtgttctgtacccactaggatttgtttaggtgcccattgcatctttttgtgctatggagttgtttacattaagcatgaccgaacgagagacaatactatttcccacaggagtccattgggttcagctttgaaagaggaatagaatcgaggctcctttgaccatcaaaatgatgaactttacttatgtggtacccaatgccagaatgtaagagttgcaagtgattttgtgctgctattcattaaaacttgtattccagtcttgccagcttaaggagatcaagatattaagaggtatccttgatttattttccagtattcagtagtaaaattttcctgtccactgtgaatcaaagcctgagtcactctatttaaccttggacacactaataaggttttattttgattgtgttcgtttccccccccccaatagtaaaatttctcctcctttaactcctcctaccccccaaggtaagaaacaaaaaacaaacaaacaaacaaaaatagaagacaaaagaaagacatatgaaaggaattgtaattggcttaacagaaacagtctgtaaaaacctaacagtggtgcaatcatgttgtctgtgttgtgttatgtgagaattttctcctaagtcatgcaggtaatgacaatatactgtaaataccacatgtgagtttacctgaatctgtgcattttgtgccttattcatgagaatgatagaagtactaaaatctgtcaagtgttttcagtatagcacattatttactgagtgccagttgtaaatgtttttcaaccagcacctaaaaagactcttttcaaaaaatcacagaaacaacctaggacaattatttgttacataatccgacctcatagcagcattacattctttgccgtgataaacattccactcctgctttcctaaggatgaaacagtgataatgtgaactcaaatgaggtttcctgggtaatgtgacacctgcagaaactatagagcgtcatttatacgtagtttggcagaaaccacttacggctgatgatgcgcaaccctgctgactgtttcagttaatatgctgcacaccacacacttgtttagtgaaccaaatctagaaagtaccaaggcagaggtatgctcctgctgtaatcaggcaaatgagttcaactggatttcttttgacaatactgttggtacctattacttgggggaggacatgttgcagaagaccagatcatttttatacagaatgtgaaatactgatacagttattcttttttttaaagaacattgttttataaagaacgtgatttccagtgatctctggaagcgctaaagctaaaatttctgttcttgaaacacttcagctttgcaactaaaatattacagattaataataaattaaaccaaccaatgataaacactactcagtccaccaacaacaaacgtgtttgaattcaccttaccaatattaatcccagcgtgtgtaaaacagaacagtaactctatgtgaccccagataacattttgtaacattgtgcttccttgtagtttgtaatgtgagttcaatcagtatttatgttgaaatttctaacattaaatctagtctctatcctgttaatttaatttttaaatgctttatccatttgtgcaaaggtaaacgcagattgtatcttttttaatggtacggcataaaaagtaaccctcaagtgaagtgtctctatactgttttatagagtactttaacatgaatagataccttgtaaacttgtattgtggatgtgtaaataatatgtactttgggtttttaacaccgcatgtaaagtcaaaataaaatatacaaatcatta

SEQ ID NO: 18685 - DNA, 545 bp, Homo sapiens
  source 1..545: mol_type = unassigned DNA
gcatgctaacattcatggaggcagacatgtgtacccagaatcagagggagccggttatcctcagttggagatcccaaaagacttctgcatacagttcctttcgttggatggagacactgtaagaaccacggagtgttaaacttggggcttgggaatcagagtccatccttgaatttcacaaaagaaacgaccgaaatcaaaagaaggcaagatacagctgttcgcatttgcagacctgtatgatctccaacctgagcatatgccagttgacatgggaacactgaggccagcaatttaaggatttcacatttgcttgcagtgaatgcgtaatcctggatctcttgttcgcaaatcgacagcctgaagccctctggaagcccaagactgctggaggtttttgaccagacaagccaacctttttcaaggtagctcagtggcatttctgagcaggggccaccctgacttcaccttggcccaccatgagggtcttcctgctttgtgcctacatactgctgctgatggtttcccagttgagggcagtcagc

SEQ ID NO: 18686 - DNA, 479 bp, Homo sapiens
  source 1..479: mol_type = unassigned DNA
aggactgggtttggagagctgctggatagctgaacacgtggaggttcctggaaggcggcacacccagagagagcatggtagctccatgctgcttcccccatacctcaccctacacatctcttcatctgtatcctttataataatccactaaatgatctccaacctgagcatatgccagttgacatgggaacactgaggccagcaatttaaggatttcacatttgcttgcagtgaatgcgtaatcctggatctcttgttcgcaaatcgacagcctgaagccctctggaagcccaagactgctggaggtttttgaccagacaagccaacctttttcaaggaacttccaatcctgctttagaacttactccttcaggaaagcaactctcactgaagtgtgggagcggagcagagaaaagactaggtagctcagtggcatttctgagcaggggccaccctgacttcaccttggcccaccatga

SEQ ID NO: 18687 - DNA, 588 bp, Homo sapiens
  source 1..588: mol_type = unassigned DNA
aaggcagaacttcacggaacaactgcgcccgcagctctcctgggctgcagtgatttgtcctctgggttctggaggaaagctctgaaagaagtagctcagtggcatttctgagcaggggccaccctgacttcaccttggcccaccatgagggtcttcctgctttgtgcctacatactgctgctgatggtttcccagttgagggcagtcagctttcctgaagatgatgaaccccttaatactgtcgactatcactattcaaggcaatatccggtttttagaggacgcccttcaggcaatgaatcgcagcacaggctggactttcagctgatgttgaaaattcgagacacactttatattgctggcagggatcaagtttatacagtaaacttaaatgaaatgcccaaaacagaagtaatacccaacaagaaactgacatggcgatcaagacaacaggatcgagaaaactgtgctatgaaaggcaagcataaagatgaatgccacaactttatcaaagtatttgttccaagaaacgatgagatggtttttgtttgtggtaccaatgcattcaatcccatgtgtagatactac

SEQ ID NO: 18688 - DNA, 3754 bp, Homo sapiens
  source 1..3754: mol_type = unassigned DNA
cgtccgtgcccgggggtgggacccgcgccgggagctgccgagtgcgtggagggagccaggctccggctcgcctgatggattgacttggagatggatcgaattacaccatttgccgtgcatcggtttgttttgctcctgctctgtcccgctgctgctgctgctgctgcaaggggtggtggcgagtttcaggattctatcaaggaagccaagacctaaggagacagagggatatctatttttacaatatttttctttattttctttcttccttgcgcgtggcaagcttttttttttctttttcttttttcttaccagcctccccccaatgaggtagctcagtggcatttctgagcaggggccaccctgacttcaccttggcccaccatgagggtcttcctgctttgtgcctacatactgctgctgatggtttcccagttgagggcagtcagctttcctgaagatgatgaaccccttaatactgtcgactatcactattcaaggcaatatccggtttttagaggacgcccttcaggcaatgaatcgcagcacaggctggactttcagctgatgttgaaaattcgagacacactttatattgctggcagggatcaagtttatacagtaaacttaaatgaaatgcccaaaacagaagtaatacccaacaagaaactgacatggcgatcaagacaacaggatcgagaaaactgtgctatgaaaggcaagcataaagatgaatgccacaactttatcaaagtatttgttccaagaaacgatgagatggtttttgtttgtggtaccaatgcattcaatcccatgtgtagatactacaggttgagtaccttagaatatgatggggaagaaattagtggcctggcaagatgcccatttgatgccagacaaaccaatgttgccctctttgctgatgggaagctgtattctgccacagtggctgacttcttggccagcgatgccgttatttatcgaagcatgggtgatggatctgcccttcgcacaataaaatatgattccaaatggataaaagagccacactttcttcatgccatagaatatggaaactatgtctatttcttctttcgagaaatcgctgtcgaacataataatttaggcaaggctgtgtattcccgcgtggcccgcatatgtaaaaacgacatgggtggttcccagcgggtcctggagaaacactggacttcatttctaaaggctcggctgaactgttctgtccctggagattcgtttttctactttgatgttctgcagtctattacagacataatacaaatcaatggcatccccactgtggtcggggtgtttaccacgcagctcaatagcatccctggttctgctgtctgtgcatttagcatggatgacattgaaaaagtattcaaaggacggtttaaggaacagaaaactccagattctgtttggacagcagttcccgaagacaaagtgccaaagccaaggcctggctgttgtgcaaaacacggccttgccgaagcttataaaacctccatcgatttcccggatgaaactctgtcattcatcaaatctcatcccctgatggactctgccgttccacccattgccgatgagccctggttcacaaagactcgggtcaggtacagactgacggccatctcagtggaccattcagccggaccctaccagaactacacagtcatctttgttggctctgaagctggcatggtacttaaagttctggcaaagaccagtcctttctctttgaacgacagcgtattactggaagagattgaagcctacaaccatgcaaagtgcagtgctgagaatgaggaagacaaaaaggtcatctcattacagttggataaagatcaccacgctttatatgtggcgttctctagctgcattatccgcatccccctcagtcgctgtgagcgttatggatcatgtaaaaagtcttgtattgcatctcgtgacccgtattgtggctggttaagccagggatcctgtggtagagtgaccccagggatgcttgctgaaggatatgaacaagacacagaattcggcaacacagctcatctaggggactgccatgaaattttgcctacttcaactacaccagattacaaaatatttggcggtccaacatctgacatggaggtatcttcatcttctgttaccacaatggcaagtatcccagaaatcacacctaaagtgattgatacctggagacctaaactgacaagctctcggaaatttgtagttcaagatgatccaaacacttctgattttactgatcctttatcgggtatcccaaagggtgtacgatgggaagtccagtctggagagtccaaccagatggtccacatgaatgtcctcatcacctgtgtctttgctgcttttgttttgggggcattcattgcaggtgtggcagtatactgctatcgagacatgtttgttcggaaaaacagaaagatccataaagatgcagagtccgcccagtcatgcacagactccagtggaagttttgccaaactgaatggtctctttgacagccctgtcaaggaataccaacagaatattgattctcctaaactgtatagtaacctgctaaccagtcggaaagagctaccacccaatggagatactaaatccatggtaatggaccatcgagggcaacctccagagttggctgctcttcctactcctgagtctacacccgtgcttcaccagaagaccctgcaggccatgaagagccactcagaaaaggcccatggccatggagcttcaaggaaagaaacccctcagttttttccgtctagtccgccacctcattccccattaagtcatgggcatatccccagtgccattgttcttccaaatgctacccatgactacaacacgtctttctcaaactccaatgctcacaaagctgaaaagaagcttcaaaacattgatcaccctctcacaaagtcatccagtaagagagatcaccggcgttctgttgattccagaaataccctcaatgatctcctgaagcatctgaatgacccaaatagtaaccccaaagccatcatgggagacatccagatggcacaccagaacttaatgctggatcccatgggatcgatgtctgaggtcccacctaaagtccctaaccgggaggcatcgctatactcccctccttcaactctccccagaaatagcccaaccaagcgagtggatgtccccaccactcctggagtcccaatgacttctctggaaagacaaagaggttatcacaaaaattcctcccagaggcactctatatctgctatgcctaaaaacttaaactcaccaaatggtgttttgttatccagacagcctagtatgaaccgtggaggatatatgcccacccccactggggcgaaggtggactatattcagggaacaccagtgagtgttcatctgcagccttccctctccagacagagcagctacaccagtaatggcactcttcctaggacgggactaaagaggacgccgtccttaaaacctgacgtgccaccaaagccttcctttgttcctcaaaccccatctgtcagaccactgaacaaatacacatactaggcctcaagtgtgctattcccatgtggctttatcctgtccgtgttgttgagaggatgatgttgtaagggtaccttaaaacaagagactcgcttgtattttaagagaaccaagtggccaaagaaactctttctaactttggcaacatcag

SEQ ID NO: 18689 - DNA, 530 bp, Homo sapiens
  source 1..530: mol_type = unassigned DNA
gagtgcgtggagggagccaggctccggctcgcctgatggattgacttggagatggatcgaattacaccatttgccgtgcatcggtttgttttgctcctgctctgtcccgctgctgctgctgctgctgcaaggggtggtggcgagtttcaggattctatcaaggaagccaagacctaaggagacagagggatatctatttttacaatatttttctttattttctttcttccttgcgcgtggcaagcttttttttttctttttcttttttcttaccagcctccccccaatgaggtagctcagtggcatttctgagcaggggccaccctgacttcaccttggcccaccatgagggtcttcctgctttgtgcctacatactgctgctgatggtttcccagttgagggcagtcagctttcctgaagatgatgaaccccttaatactgtcgactatcactgtaagtcgtctcaagaacagtcttctattctgagaaggaagcttttctgtttttcattctgtaagcatgttcattt

SEQ ID NO: 18690 - DNA, 4419 bp, Homo sapiens
  source 1..4419: mol_type = unassigned DNA
atcgaattacaccatttgccgtgcatcggtttgttttgctcctgctctgtcccgctgctgctgctgctgctgcaaggggtggtggcgagtttcaggattctatcaaggaagccaagacctaaggagacagagggatatctatttttacaatatttttctttattttctttcttccttgcgcgtggcaagcttttttttttctttttcttttttcttaccagcctccccccaatgaggtagctcagtggcatttctgagcaggggccaccctgacttcaccttggcccaccatgagggtcttcctgctttgtgcctacatactgctgctgatggtttcccagttgagggcagtcagctttcctgaagatgatgaaccccttaatactgtcgactatcactattcaaggcaatatccggtttttagaggacgcccttcaggcaatgaatcgcagcacaggctggactttcagctgatgttgaaaattcgagacacactttatattgctggcagggatcaagtttatacagtaaacttaaatgaaatgcccaaaacagaagtaatacccaacaagaaactgacatggcgatcaagacaacaggatcgagaaaactgtgctatgaaaggcaagcataaagatgaatgccacaactttatcaaagtatttgttccaagaaacgatgagatggtttttgtttgtggtaccaatgcattcaatcccatgtgtagatactacaggttgagtaccttagaatatgatggggaagaaattagtggcctggcaagatgcccatttgatgccagacaaaccaatgttgccctctttgctgatgggaagctgtattctgccacagtggctgacttcttggccagcgatgccgttatttatcgaagcatgggtgatggatctgcccttcgcacaataaaatatgattccaaatggataaaagagccacactttcttcatgccatagaatatggaaactatgtctatttcttctttcgagaaatcgctgtcgaacataataatttaggcaaggctgtgtattcccgcgtggcccgcatatgtaaaaacgacatgggtggttcccagcgggtcctggagaaacactggacttcatttctaaaggctcggctgaactgttctgtccctggagattcgtttttctactttgatgttctgcagtctattacagacataatacaaatcaatggcatccccactgtggtcggggtgtttaccacgcagctcaatagcatccctggttctgctgtctgtgcatttagcatggatgacattgaaaaagtattcaaaggacggtttaaggaacagaaaactccagattctgtttggacagcagttcccgaagacaaagtgccaaagccaaggcctggctgttgtgcaaaacacggccttgccgaagcttataaaacctccatcgatttcccggatgaaactctgtcattcatcaaatctcatcccctgatggactctgccgttccacccattgccgatgagccctggttcacaaagactcgggtcaggtacagactgacggccatctcagtggaccattcagccggaccctaccagaactacacagtcatctttgttggctctgaagctggcatggtacttaaagttctggcaaagaccagtcctttctctttgaacgacagcgtattactggaagagattgaagcctacaaccatgcaaagtgcagtgctgagaatgaggaagacaaaaaggtcatctcattacagttggataaagatcaccacgctttatatgtggcgttctctagctgcattatccgcatccccctcagtcgctgtgagcgttatggatcatgtaaaaagtcttgtattgcatctcgtgacccgtattgtggctggttaagccagggatcctgtggtagagtgaccccagggatgcttgctgaaggatatgaacaagacacagaattcggcaacacagctcatctaggggactgccatgacatggaggtatcttcatcttctgttaccacaatggtgtacgatgggaagtccagtctggagagtccaaccagatggtccacatgaatgtcctcatcacctgtgtctttgctgcttttgttttgggggcattcattgcaggtgtggcagtatactgctatcgagacatgtttgttcggaaaaacagaaagatccataaagatgcagagtccgcccagtcatgcacagactccagtggaagttttgccaaactgaatggtctctttgacagccctgtcaaggaataccaacagaatattgattctcctaaactgtatagtaacctgctaaccagtcggaaagagctaccacccaatggagatactaaatccatggtaatggaccatcgagggcaacctccagagttggctgctcttcctactcctgagtctacacccgtgcttcaccagaagaccctgcaggccatgaagagccactcagaaaaggcccatggccatggagcttcaaggaaagaaacccctcagttttttccgtctagtccgccacctcattccccattaagtcatgggcatatccccagtgccattgttcttccaaatgctacccatgactacaacacgtctttctcaaactccaatgctcacaaagctgaaaagaagcttcaaaacattgatcaccctctcacaaagtcatccagtaagagagatcaccggcgttctgttgattccagaaataccctcaatgatctcctgaagcatctgaatgacccaaatagtaaccccaaagccatcatgggagacatccagatggcacaccagaacttaatgctggatcccatgggatcgatgtctgaggtcccacctaaagtccctaaccgggaggcatcgctatactcccctccttcaactctccccagaaatagcccaaccaagcgagtggatgtccccaccactcctggagtcccaatgacttctctggaaagacaaagaggttatcacaaaaattcctcccagaggcactctatatctgctatgcctaaaaacttaaactcaccaaatggtgttttgttatccagacagcctagtatgaaccgtggaggatatatgcccacccccactggggcgaaggtggactatattcagggaacaccagtgagtgttcatctgcagccttccctctccagacagagcagctacaccagtaatggcactcttcctaggacgggactaaagaggacgccgtccttaaaacctgacgtgccaccaaagccttcctttgttcctcaaaccccatctgtcagaccactgaacaaatacacatactaggcctcaagtgtgctattcccatgtggctttatcctgtccgtgttgttgagaggatgatgttgtaagggtaccttaaaacaagagactcgcttgtattttaagagaaccaagtggccaaagaaactctttctaactttggcaacatcagaacttgccacatgtagctactgcagcaaggcttctgtgtacttgcctgaaaacaaaggaaggtgctggtcattccatttcttttgtttgaagctaaagagatgtgtagctcacaggggctaccttaccagtataaagagctgataacagtactcagaagaatctgtgaacaaatacttgaaaatgggttcaatgtagactgccattatgtgtggtcttcccattaaatgtgaacattttaatatgtatgcattcaccttgcctcttgcacaaatgtcaaaaaaaagatggtaatatctcaaagaaatgaacttgtagattaccaagcagtttgctaaaaattcaatctttgacccaagctgtagcatttttttttcatgtgtggcatctttttcatgccaccaacaaacttgttgtgtgtgtgcgtgtgtgtgtgtgtgtgtgtgtgtgtgtgtgtgttctgtacccactaggatttgtttaggtgcccattgcatctttttgtgctatggagttgtttacattaagcatgaccgaacgagagacaatactatttcccacaggagtccattgggttcagctttgaaagaggaatagaatcgaggctcctttgaccatcaaaatgatgaactttacttatgtggtacccaatgccagaatgtaagagttgcaagtgattttgtgctgctattcattaaaacttgtattccagtcttgccagcttaaggagatcaagatattaagaggtatccttgatttattttccagtattcagtagtaaaattttcctgtccactgtgaatcaaagcctgagtcactctatttaaccttggacacactaataaggttttattttgattgtgttcgtttccccccccccaatagtaaaatttctcctcctttaactcctcctaccccccaaggtaagaaacaaaaaacaaacaaacaaa

SEQ ID NO: 18691 - DNA, 2318 bp, Homo sapiens
  source 1..2318: mol_type = unassigned DNA
atccccatccccggcccaggcccggagggcggccgcttcccaccgtccctctccccttactggcagagcgcgctgcgggcggactcccgggcccggagcagcccaccggccaccccaccgcccacccggctcccggtgtctcctcccggccgctctacccagcaactttccgtgctttgttccccgactggaaatgctttacggaagcgtcttggacagggtctccgccaggcgacaagagctcggtgctgagatgtgttacgttctcatctccccatcaattatggatggaaacaaataaggaagagtcaattttgctgagccccttctccggcaacgagaggcgttctgcagccgggagggagccgccgctcgcgccggcagccgctggcaggggcatggtgaggaggaaggtagctcagtggcatttctgagcaggggccaccctgacttcaccttggcccaccatgagggtcttcctgctttgtgcctacatactgctgctgatggtttcccagttgagggcagtcagctttcctgaagatgatgaaccccttaatactgtcgactatcactattcaaggcaatatccggtttttagaggacgcccttcaggcaatgaatcgcagcacaggctggactttcagctgatgttgaaaattcgagacacactttatattgctggcagggatcaagtttatacagtaaacttaaatgaaatgcccaaaacagaagtaatacccaacaagaaactgacatggcgatcaagacaacaggatcgagaaaactgtgctatgaaaggcaagcataaagatgaatgccacaactttatcaaagtatttgttccaagaaacgatgagatggtttttgtttgtggtaccaatgcattcaatcccatgtgtagatactacaggttgagtaccttagaatatgatggggaagaaattagtggcctggcaagatgcccatttgatgccagacaaaccaatgttgccctctttgctgatgggaagctgtattctgccacagtggctgacttcttggccagcgatgccgttatttatcgaagcatgggtgatggatctgcccttcgcacaataaaatatgattccaaatggataaaagagccacactttcttcatgccatagaatatggaaactatgtctatttcttctttcgagaaatcgctgtcgaacataataatttaggcaaggctgtgtattcccgcgtggcccgcatatgtaaaaacgacatgggtggttcccagcgggtcctggagaaacactggacttcatttctaaaggctcggctgaactgttctgtccctggagattcgtttttctactttgatgttctgcagtctattacagacataatacaaatcaatggcatccccactgtggtcggggtgtttaccacgcagctcaatagcatccctggttctgctgtctgtgcatttagcatggatgacattgaaaaagtattcaaaggacggtttaaggaacagaaaactccagattctgtttggacagcagttcccgaagacaaagtgccaaagccaaggcctggctgttgtgcaaaacacggccttgccgaagcttataaaacctccatcgatttcccggatgaaactctgtcattcatcaaatctcatcccctgatggactctgccgttccacccattgccgatgagccctggttcacaaagactcgggtcaggtacagactgacggccatctcagtggaccattcagccggaccctaccagaactacacagtcatctttgttggctctgaagctggcatggtacttaaagttctggcaaagaccagtcctttctctttgaacgacagcgtattactggaagagattgaagcctacaaccatgcaaagtaggtatatgttacgagaacgcccttcagcactgctcaaaaattttcggcatgtatttcatctagtcatgtccttttggtcctctaaattagcagtggtttggcataatagtgttttgtgttttttttctcattgaaataaatcttgggtttgtttttttcccgagcctgctagggcgaggggggtgaatggttgatgagtttaaaaataatgcagcccttgtttttcacctgtagaatatgagaacattttaacagcacctctcttatcttgcagatatattccaagatgctacatgcagcagacagctgtgagcttgcatacacacacacacaaatatacatgcacatacatacacagaatgcagtactagttaagtatttccttcctatctttaataagtaagagaatatttagaccatt

SEQ ID NO: 18692 - DNA, 6099 bp, Homo sapiens
  source 1..6099: mol_type = unassigned DNA
gcggccgcttcccaccgtccctctccccttactggcagagcgcgctgcgggcggactcccgggcccggagcagcccaccggccaccccaccgcccacccggctcccggtgtctcctcccggccgctctacccagcaactttccgtgctttgttccccgactggaaatgctttacggaagcgtcttggacagggtctccgccaggcgacaagagctcggtgctgagatgtgttacgttctcatctccccatcaattatggatggaaacaaataaggaagagtcaattttgctgagccccttctccggcaacgagaggcgttctgcagccgggagggagccgccgctcgcgccggcagccgctggcaggggcatggtgaggaggaaggtagctcagtggcatttctgagcaggggccaccctgacttcaccttggcccaccatgagggtcttcctgctttgtgcctacatactgctgctgatggtttcccagttgagggcagtcagctttcctgaagatgatgaaccccttaatactgtcgactatcactattcaaggcaatatccggtttttagaggacgcccttcaggcaatgaatcgcagcacaggctggactttcagctgatgttgaaaattcgagacacactttatattgctggcagggatcaagtttatacagtaaacttaaatgaaatgcccaaaacagaagtaatacccaacaagaaactgacatggcgatcaagacaacaggatcgagaaaactgtgctatgaaaggcaagcataaagatgaatgccacaactttatcaaagtatttgttccaagaaacgatgagatggtttttgtttgtggtaccaatgcattcaatcccatgtgtagatactacaggttgagtaccttagaatatgatggggaagaaattagtggcctggcaagatgcccatttgatgccagacaaaccaatgttgccctctttgctgatgggaagctgtattctgccacagtggctgacttcttggccagcgatgccgttatttatcgaagcatgggtgatggatctgcccttcgcacaataaaatatgattccaaatggataaaagagccacactttcttcatgccatagaatatggaaactatgtctatttcttctttcgagaaatcgctgtcgaacataataatttaggcaaggctgtgtattcccgcgtggcccgcatatgtaaaaacgacatgggtggttcccagcgggtcctggagaaacactggacttcatttctaaaggctcggctgaactgttctgtccctggagattcgtttttctactttgatgttctgcagtctattacagacataatacaaatcaatggcatccccactgtggtcggggtgtttaccacgcagctcaatagcatccctggttctgctgtctgtgcatttagcatggatgacattgaaaaagtattcaaaggacggtttaaggaacagaaaactccagattctgtttggacagcagttcccgaagacaaagtgccaaagccaaggcctggctgttgtgcaaaacacggccttgccgaagcttataaaacctccatcgatttcccggatgaaactctgtcattcatcaaatctcatcccctgatggactctgccgttccacccattgccgatgagccctggttcacaaagactcgggtcaggtacagactgacggccatctcagtggaccattcagccggaccctaccagaactacacagtcatctttgttggctctgaagctggcatggtacttaaagttctggcaaagaccagtcctttctctttgaacgacagcgtattactggaagagattgaagcctacaaccatgcaaagtgcagtgctgagaatgaggaagacaaaaaggtcatctcattacagttggataaagatcaccacgctttatatgtggcgttctctagctgcattatccgcatccccctcagtcgctgtgagcgttatggatcatgtaaaaagtcttgtattgcatctcgtgacccgtattgtggctggttaagccagggatcctgtggtagagtgaccccagggatgcttgctgaaggatatgaacaagacacagaattcggcaacacagctcatctaggggactgccatgaaattttgcctacttcaactacaccagattacaaaatatttggcggtccaacatctgacatggaggtatcttcatcttctgttaccacaatggcaagtatcccagaaatcacacctaaagtgattgatacctggagacctaaactgacaagctctcggaaatttgtagttcaagatgatccaaacacttctgattttactgatcctttatcgggtatcccaaagggtgtacgatgggaagtccagtctggagagtccaaccagatggtccacatgaatgtcctcatcacctgtgtctttgctgcttttgttttgggggcattcattgcaggtgtggcagtatactgctatcgagacatgtttgttcggaaaaacagaaagatccataaagatgcagagtccgcccagtcatgcacagactccagtggaagttttgccaaactgaatggtctctttgacagccctgtcaaggaataccaacagaatattgattctcctaaactgtatagtaacctgctaaccagtcggaaagagctaccacccaatggagatactaaatccatggtaatggaccatcgagggcaacctccagagttggctgctcttcctactcctgagtctacacccgtgcttcaccagaagaccctgcaggccatgaagagccactcagaaaaggcccatggccatggagcttcaaggaaagaaacccctcagttttttccgtctagtccgccacctcattccccattaagtcatgggcatatccccagtgccattgttcttccaaatgctacccatgactacaacacgtctttctcaaactccaatgctcacaaagctgaaaagaagcttcaaaacattgatcaccctctcacaaagtcatccagtaagagagatcaccggcgttctgttgattccagaaataccctcaatgatctcctgaagcatctgaatgacccaaatagtaaccccaaagccatcatgggagacatccagatggcacaccagaacttaatgctggatcccatgggatcgatgtctgaggtcccacctaaagtccctaaccgggaggcatcgctatactcccctccttcaactctccccagaaatagcccaaccaagcgagtggatgtccccaccactcctggagtcccaatgacttctctggaaagacaaagaggttatcacaaaaattcctcccagaggcactctatatctgctatgcctaaaaacttaaactcaccaaatggtgttttgttatccagacagcctagtatgaaccgtggaggatatatgcccacccccactggggcgaaggtggactatattcagggaacaccagtgagtgttcatctgcagccttccctctccagacagagcagctacaccagtaatggcactcttcctaggacgggactaaagaggacgccgtccttaaaacctgacgtgccaccaaagccttcctttgttcctcaaaccccatctgtcagaccactgaacaaatacacatactaggcctcaagtgtgctattcccatgtggctttatcctgtccgtgttgttgagaggatgatgttgtaagggtaccttaaaacaagagactcgcttgtattttaagagaaccaagtggccaaagaaactctttctaactttggcaacatcagaacttgccacatgtagctactgcagcaaggcttctgtgtacttgcctgaaaacaaaggaaggtgctggtcattccatttcttttgtttgaagctaaagagatgtgtagctcacaggggctaccttaccagtataaagagctgataacagtactcagaagaatctgtgaacaaatacttgaaaatgggttcaatgtagactgccattatgtgtggtcttcccattaaatgtgaacattttaatatgtatgcattcaccttgcctcttgcacaaatgtcaaaaaaaagatggtaatatctcaaagaaatgaacttgtagattaccaagcagtttgctaaaaattcaatctttgacccaagctgtagcatttttttttcatgtgtggcatctttttcatgccaccaacaaacttgttgtgtgtgtgcgtgtgtgtgtgtgtgtgtgtgtgtgtgtgtgtgttctgtacccactaggatttgtttaggtgcccattgcatctttttgtgctatggagttgtttacattaagcatgaccgaacgagagacaatactatttcccacaggagtccattgggttcagctttgaaagaggaatagaatcgaggctcctttgaccatcaaaatgatgaactttacttatgtggtacccaatgccagaatgtaagagttgcaagtgattttgtgctgctattcattaaaacttgtattccagtcttgccagcttaaggagatcaagatattaagaggtatccttgatttattttccagtattcagtagtaaaattttcctgtccactgtgaatcaaagcctgagtcactctatttaaccttggacacactaataaggttttattttgattgtgttcgtttccccccccccaatagtaaaatttctcctcctttaactcctcctaccccccaaggtaagaaacaaaaaacaaacaaacaaacaaaaatagaagacaaaagaaagacatatgaaaggaattgtaattggcttaacagaaacagtctgtaaaaacctaacagtggtgcaatcatgttgtctgtgttgtgttatgtgagaattttctcctaagtcatgcaggtaatgacaatatactgtaaataccacatgtgagtttacctgaatctgtgcattttgtgccttattcatgagaatgatagaagtactaaaatctgtcaagtgttttcagtatagcacattatttactgagtgccagttgtaaatgtttttcaaccagcacctaaaaagactcttttcaaaaaatcacagaaacaacctaggacaattatttgttacataatccgacctcatagcagcattacattctttgccgtgataaacattccactcctgctttcctaaggatgaaacagtgataatgtgaactcaaatgaggtttcctgggtaatgtgacacctgcagaaactatagagcgtcatttatacgtagtttggcagaaaccacttacggctgatgatgcgcaaccctgctgactgtttcagttaatatgctgcacaccacacacttgtttagtgaaccaaatctagaaagtaccaaggcagaggtatgctcctgctgtaatcaggcaaatgagttcaactggatttcttttgacaatactgttggtacctattacttgggggaggacatgttgcagaagaccagatcatttttatacagaatgtgaaatactgatacagttattcttttttttaaagaacattgttttataaagaacgtgatttccagtgatctctggaagcgctaaagctaaaatttctgttcttgaaacacttcagctttgcaactaaaatattacagattaataataaattaaaccaaccaatgataaacactactcagtccaccaacaacaaacgtgtttgaattcaccttaccaatattaatcccagcgtgtgtaaaacagaacagtaactctatgtgaccccagataacattttgtaacattgtgcttccttgtagtttgtaatgtgagttcaatcagtatttatgttgaaatttctaacattaaatctagtctctatcctgttaatttaatttttaaatgctttatccatttgtgcaaaggtaaacgcagattgtatcttttttaatggtacggcataaaaagtaaccctcaagtgaagtgtctctatactgttttatagagtactttaacatgaatagataccttgtaaacttgtattgtggatgtgtaaataatatgtactttgggtttttaacaccgcatgtaaagtcaaaataaaatatacaaatcattata

SEQ ID NO: 18693 - DNA, 5931 bp, Homo sapiens
  source 1..5931: mol_type = unassigned DNA
gcggccgcttcccaccgtccctctccccttactggcagagcgcgctgcgggcggactcccgggcccggagcagcccaccggccaccccaccgcccacccggctcccggtgtctcctcccggccgctctacccagcaactttccgtgctttgttccccgactggaaatgctttacggaagcgtcttggacagggtctccgccaggcgacaagagctcggtgctgagatgtgttacgttctcatctccccatcaattatggatggaaacaaataaggaagagtcaattttgctgagccccttctccggcaacgagaggcgttctgcagccgggagggagccgccgctcgcgccggcagccgctggcaggggcatggtgaggaggaaggtagctcagtggcatttctgagcaggggccaccctgacttcaccttggcccaccatgagggtcttcctgctttgtgcctacatactgctgctgatggtttcccagttgagggcagtcagctttcctgaagatgatgaaccccttaatactgtcgactatcactattcaaggcaatatccggtttttagaggacgcccttcaggcaatgaatcgcagcacaggctggactttcagctgatgttgaaaattcgagacacactttatattgctggcagggatcaagtttatacagtaaacttaaatgaaatgcccaaaacagaagtaatacccaacaagaaactgacatggcgatcaagacaacaggatcgagaaaactgtgctatgaaaggcaagcataaagatgaatgccacaactttatcaaagtatttgttccaagaaacgatgagatggtttttgtttgtggtaccaatgcattcaatcccatgtgtagatactacaggttgagtaccttagaatatgatggggaagaaattagtggcctggcaagatgcccatttgatgccagacaaaccaatgttgccctctttgctgatgggaagctgtattctgccacagtggctgacttcttggccagcgatgccgttatttatcgaagcatgggtgatggatctgcccttcgcacaataaaatatgattccaaatggataaaagagccacactttcttcatgccatagaatatggaaactatgtctatttcttctttcgagaaatcgctgtcgaacataataatttaggcaaggctgtgtattcccgcgtggcccgcatatgtaaaaacgacatgggtggttcccagcgggtcctggagaaacactggacttcatttctaaaggctcggctgaactgttctgtccctggagattcgtttttctactttgatgttctgcagtctattacagacataatacaaatcaatggcatccccactgtggtcggggtgtttaccacgcagctcaatagcatccctggttctgctgtctgtgcatttagcatggatgacattgaaaaagtattcaaaggacggtttaaggaacagaaaactccagattctgtttggacagcagttcccgaagacaaagtgccaaagccaaggcctggctgttgtgcaaaacacggccttgccgaagcttataaaacctccatcgatttcccggatgaaactctgtcattcatcaaatctcatcccctgatggactctgccgttccacccattgccgatgagccctggttcacaaagactcgggtcaggtacagactgacggccatctcagtggaccattcagccggaccctaccagaactacacagtcatctttgttggctctgaagctggcatggtacttaaagttctggcaaagaccagtcctttctctttgaacgacagcgtattactggaagagattgaagcctacaaccatgcaaagtgcagtgctgagaatgaggaagacaaaaaggtcatctcattacagttggataaagatcaccacgctttatatgtggcgttctctagctgcattatccgcatccccctcagtcgctgtgagcgttatggatcatgtaaaaagtcttgtattgcatctcgtgacccgtattgtggctggttaagccagggatcctgtggtagagtgaccccagggatgcttgctgaaggatatgaacaagacacagaattcggcaacacagctcatctaggggactgccatgaaattttgcctacttcaactacaccagattacaaaatatttggcggtccaacatctggtgtacgatgggaagtccagtctggagagtccaaccagatggtccacatgaatgtcctcatcacctgtgtctttgctgcttttgttttgggggcattcattgcaggtgtggcagtatactgctatcgagacatgtttgttcggaaaaacagaaagatccataaagatgcagagtccgcccagtcatgcacagactccagtggaagttttgccaaactgaatggtctctttgacagccctgtcaaggaataccaacagaatattgattctcctaaactgtatagtaacctgctaaccagtcggaaagagctaccacccaatggagatactaaatccatggtaatggaccatcgagggcaacctccagagttggctgctcttcctactcctgagtctacacccgtgcttcaccagaagaccctgcaggccatgaagagccactcagaaaaggcccatggccatggagcttcaaggaaagaaacccctcagttttttccgtctagtccgccacctcattccccattaagtcatgggcatatccccagtgccattgttcttccaaatgctacccatgactacaacacgtctttctcaaactccaatgctcacaaagctgaaaagaagcttcaaaacattgatcaccctctcacaaagtcatccagtaagagagatcaccggcgttctgttgattccagaaataccctcaatgatctcctgaagcatctgaatgacccaaatagtaaccccaaagccatcatgggagacatccagatggcacaccagaacttaatgctggatcccatgggatcgatgtctgaggtcccacctaaagtccctaaccgggaggcatcgctatactcccctccttcaactctccccagaaatagcccaaccaagcgagtggatgtccccaccactcctggagtcccaatgacttctctggaaagacaaagaggttatcacaaaaattcctcccagaggcactctatatctgctatgcctaaaaacttaaactcaccaaatggtgttttgttatccagacagcctagtatgaaccgtggaggatatatgcccacccccactggggcgaaggtggactatattcagggaacaccagtgagtgttcatctgcagccttccctctccagacagagcagctacaccagtaatggcactcttcctaggacgggactaaagaggacgccgtccttaaaacctgacgtgccaccaaagccttcctttgttcctcaaaccccatctgtcagaccactgaacaaatacacatactaggcctcaagtgtgctattcccatgtggctttatcctgtccgtgttgttgagaggatgatgttgtaagggtaccttaaaacaagagactcgcttgtattttaagagaaccaagtggccaaagaaactctttctaactttggcaacatcagaacttgccacatgtagctactgcagcaaggcttctgtgtacttgcctgaaaacaaaggaaggtgctggtcattccatttcttttgtttgaagctaaagagatgtgtagctcacaggggctaccttaccagtataaagagctgataacagtactcagaagaatctgtgaacaaatacttgaaaatgggttcaatgtagactgccattatgtgtggtcttcccattaaatgtgaacattttaatatgtatgcattcaccttgcctcttgcacaaatgtcaaaaaaaagatggtaatatctcaaagaaatgaacttgtagattaccaagcagtttgctaaaaattcaatctttgacccaagctgtagcatttttttttcatgtgtggcatctttttcatgccaccaacaaacttgttgtgtgtgtgcgtgtgtgtgtgtgtgtgtgtgtgtgtgtgtgtgttctgtacccactaggatttgtttaggtgcccattgcatctttttgtgctatggagttgtttacattaagcatgaccgaacgagagacaatactatttcccacaggagtccattgggttcagctttgaaagaggaatagaatcgaggctcctttgaccatcaaaatgatgaactttacttatgtggtacccaatgccagaatgtaagagttgcaagtgattttgtgctgctattcattaaaacttgtattccagtcttgccagcttaaggagatcaagatattaagaggtatccttgatttattttccagtattcagtagtaaaattttcctgtccactgtgaatcaaagcctgagtcactctatttaaccttggacacactaataaggttttattttgattgtgttcgtttccccccccccaatagtaaaatttctcctcctttaactcctcctaccccccaaggtaagaaacaaaaaacaaacaaacaaacaaaaatagaagacaaaagaaagacatatgaaaggaattgtaattggcttaacagaaacagtctgtaaaaacctaacagtggtgcaatcatgttgtctgtgttgtgttatgtgagaattttctcctaagtcatgcaggtaatgacaatatactgtaaataccacatgtgagtttacctgaatctgtgcattttgtgccttattcatgagaatgatagaagtactaaaatctgtcaagtgttttcagtatagcacattatttactgagtgccagttgtaaatgtttttcaaccagcacctaaaaagactcttttcaaaaaatcacagaaacaacctaggacaattatttgttacataatccgacctcatagcagcattacattctttgccgtgataaacattccactcctgctttcctaaggatgaaacagtgataatgtgaactcaaatgaggtttcctgggtaatgtgacacctgcagaaactatagagcgtcatttatacgtagtttggcagaaaccacttacggctgatgatgcgcaaccctgctgactgtttcagttaatatgctgcacaccacacacttgtttagtgaaccaaatctagaaagtaccaaggcagaggtatgctcctgctgtaatcaggcaaatgagttcaactggatttcttttgacaatactgttggtacctattacttgggggaggacatgttgcagaagaccagatcatttttatacagaatgtgaaatactgatacagttattcttttttttaaagaacattgttttataaagaacgtgatttccagtgatctctggaagcgctaaagctaaaatttctgttcttgaaacacttcagctttgcaactaaaatattacagattaataataaattaaaccaaccaatgataaacactactcagtccaccaacaacaaacgtgtttgaattcaccttaccaatattaatcccagcgtgtgtaaaacagaacagtaactctatgtgaccccagataacattttgtaacattgtgcttccttgtagtttgtaatgtgagttcaatcagtatttatgttgaaatttctaacattaaatctagtctctatcctgttaatttaatttttaaatgctttatccatttgtgcaaaggtaaacgcagattgtatcttttttaatggtacggcataaaaagtaaccctcaagtgaagtgtctctatactgttttatagagtactttaacatgaatagataccttgtaaacttgtattgtggatgtgtaaataatatgtactttgggtttttaacaccgcatgtaaagtcaaaataaaatatacaaatcattata

SEQ ID NO: 18694 - DNA, 5913 bp, Homo sapiens
  source 1..5913: mol_type = unassigned DNA
gcggccgcttcccaccgtccctctccccttactggcagagcgcgctgcgggcggactcccgggcccggagcagcccaccggccaccccaccgcccacccggctcccggtgtctcctcccggccgctctacccagcaactttccgtgctttgttccccgactggaaatgctttacggaagcgtcttggacagggtctccgccaggcgacaagagctcggtgctgagatgtgttacgttctcatctccccatcaattatggatggaaacaaataaggaagagtcaattttgctgagccccttctccggcaacgagaggcgttctgcagccgggagggagccgccgctcgcgccggcagccgctggcaggggcatggtgaggaggaaggtagctcagtggcatttctgagcaggggccaccctgacttcaccttggcccaccatgagggtcttcctgctttgtgcctacatactgctgctgatggtttcccagttgagggcagtcagctttcctgaagatgatgaaccccttaatactgtcgactatcactattcaaggcaatatccggtttttagaggacgcccttcaggcaatgaatcgcagcacaggctggactttcagctgatgttgaaaattcgagacacactttatattgctggcagggatcaagtttatacagtaaacttaaatgaaatgcccaaaacagaagtaatacccaacaagaaactgacatggcgatcaagacaacaggatcgagaaaactgtgctatgaaaggcaagcataaagatgaatgccacaactttatcaaagtatttgttccaagaaacgatgagatggtttttgtttgtggtaccaatgcattcaatcccatgtgtagatactacaggttgagtaccttagaatatgatggggaagaaattagtggcctggcaagatgcccatttgatgccagacaaaccaatgttgccctctttgctgatgggaagctgtattctgccacagtggctgacttcttggccagcgatgccgttatttatcgaagcatgggtgatggatctgcccttcgcacaataaaatatgattccaaatggataaaagagccacactttcttcatgccatagaatatggaaactatgtctatttcttctttcgagaaatcgctgtcgaacataataatttaggcaaggctgtgtattcccgcgtggcccgcatatgtaaaaacgacatgggtggttcccagcgggtcctggagaaacactggacttcatttctaaaggctcggctgaactgttctgtccctggagattcgtttttctactttgatgttctgcagtctattacagacataatacaaatcaatggcatccccactgtggtcggggtgtttaccacgcagctcaatagcatccctggttctgctgtctgtgcatttagcatggatgacattgaaaaagtattcaaaggacggtttaaggaacagaaaactccagattctgtttggacagcagttcccgaagacaaagtgccaaagccaaggcctggctgttgtgcaaaacacggccttgccgaagcttataaaacctccatcgatttcccggatgaaactctgtcattcatcaaatctcatcccctgatggactctgccgttccacccattgccgatgagccctggttcacaaagactcgggtcaggtacagactgacggccatctcagtggaccattcagccggaccctaccagaactacacagtcatctttgttggctctgaagctggcatggtacttaaagttctggcaaagaccagtcctttctctttgaacgacagcgtattactggaagagattgaagcctacaaccatgcaaagtgcagtgctgagaatgaggaagacaaaaaggtcatctcattacagttggataaagatcaccacgctttatatgtggcgttctctagctgcattatccgcatccccctcagtcgctgtgagcgttatggatcatgtaaaaagtcttgtattgcatctcgtgacccgtattgtggctggttaagccagggatcctgtggtagagtgaccccagggatgctgctgttaaccgaagacttctttgctttccataaccacagtgctgaaggatatgaacaagacacagaattcggcaacacagctcatctaggggactgccatggtgtacgatgggaagtccagtctggagagtccaaccagatggtccacatgaatgtcctcatcacctgtgtctttgctgcttttgttttgggggcattcattgcaggtgtggcagtatactgctatcgagacatgtttgttcggaaaaacagaaagatccataaagatgcagagtccgcccagtcatgcacagactccagtggaagttttgccaaactgaatggtctctttgacagccctgtcaaggaataccaacagaatattgattctcctaaactgtatagtaacctgctaaccagtcggaaagagctaccacccaatggagatactaaatccatggtaatggaccatcgagggcaacctccagagttggctgctcttcctactcctgagtctacacccgtgcttcaccagaagaccctgcaggccatgaagagccactcagaaaaggcccatggccatggagcttcaaggaaagaaacccctcagttttttccgtctagtccgccacctcattccccattaagtcatgggcatatccccagtgccattgttcttccaaatgctacccatgactacaacacgtctttctcaaactccaatgctcacaaagctgaaaagaagcttcaaaacattgatcaccctctcacaaagtcatccagtaagagagatcaccggcgttctgttgattccagaaataccctcaatgatctcctgaagcatctgaatgacccaaatagtaaccccaaagccatcatgggagacatccagatggcacaccagaacttaatgctggatcccatgggatcgatgtctgaggtcccacctaaagtccctaaccgggaggcatcgctatactcccctccttcaactctccccagaaatagcccaaccaagcgagtggatgtccccaccactcctggagtcccaatgacttctctggaaagacaaagaggttatcacaaaaattcctcccagaggcactctatatctgctatgcctaaaaacttaaactcaccaaatggtgttttgttatccagacagcctagtatgaaccgtggaggatatatgcccacccccactggggcgaaggtggactatattcagggaacaccagtgagtgttcatctgcagccttccctctccagacagagcagctacaccagtaatggcactcttcctaggacgggactaaagaggacgccgtccttaaaacctgacgtgccaccaaagccttcctttgttcctcaaaccccatctgtcagaccactgaacaaatacacatactaggcctcaagtgtgctattcccatgtggctttatcctgtccgtgttgttgagaggatgatgttgtaagggtaccttaaaacaagagactcgcttgtattttaagagaaccaagtggccaaagaaactctttctaactttggcaacatcagaacttgccacatgtagctactgcagcaaggcttctgtgtacttgcctgaaaacaaaggaaggtgctggtcattccatttcttttgtttgaagctaaagagatgtgtagctcacaggggctaccttaccagtataaagagctgataacagtactcagaagaatctgtgaacaaatacttgaaaatgggttcaatgtagactgccattatgtgtggtcttcccattaaatgtgaacattttaatatgtatgcattcaccttgcctcttgcacaaatgtcaaaaaaaagatggtaatatctcaaagaaatgaacttgtagattaccaagcagtttgctaaaaattcaatctttgacccaagctgtagcatttttttttcatgtgtggcatctttttcatgccaccaacaaacttgttgtgtgtgtgcgtgtgtgtgtgtgtgtgtgtgtgtgtgtgtgtgttctgtacccactaggatttgtttaggtgcccattgcatctttttgtgctatggagttgtttacattaagcatgaccgaacgagagacaatactatttcccacaggagtccattgggttcagctttgaaagaggaatagaatcgaggctcctttgaccatcaaaatgatgaactttacttatgtggtacccaatgccagaatgtaagagttgcaagtgattttgtgctgctattcattaaaacttgtattccagtcttgccagcttaaggagatcaagatattaagaggtatccttgatttattttccagtattcagtagtaaaattttcctgtccactgtgaatcaaagcctgagtcactctatttaaccttggacacactaataaggttttattttgattgtgttcgtttccccccccccaatagtaaaatttctcctcctttaactcctcctaccccccaaggtaagaaacaaaaaacaaacaaacaaacaaaaatagaagacaaaagaaagacatatgaaaggaattgtaattggcttaacagaaacagtctgtaaaaacctaacagtggtgcaatcatgttgtctgtgttgtgttatgtgagaattttctcctaagtcatgcaggtaatgacaatatactgtaaataccacatgtgagtttacctgaatctgtgcattttgtgccttattcatgagaatgatagaagtactaaaatctgtcaagtgttttcagtatagcacattatttactgagtgccagttgtaaatgtttttcaaccagcacctaaaaagactcttttcaaaaaatcacagaaacaacctaggacaattatttgttacataatccgacctcatagcagcattacattctttgccgtgataaacattccactcctgctttcctaaggatgaaacagtgataatgtgaactcaaatgaggtttcctgggtaatgtgacacctgcagaaactatagagcgtcatttatacgtagtttggcagaaaccacttacggctgatgatgcgcaaccctgctgactgtttcagttaatatgctgcacaccacacacttgtttagtgaaccaaatctagaaagtaccaaggcagaggtatgctcctgctgtaatcaggcaaatgagttcaactggatttcttttgacaatactgttggtacctattacttgggggaggacatgttgcagaagaccagatcatttttatacagaatgtgaaatactgatacagttattcttttttttaaagaacattgttttataaagaacgtgatttccagtgatctctggaagcgctaaagctaaaatttctgttcttgaaacacttcagctttgcaactaaaatattacagattaataataaattaaaccaaccaatgataaacactactcagtccaccaacaacaaacgtgtttgaattcaccttaccaatattaatcccagcgtgtgtaaaacagaacagtaactctatgtgaccccagataacattttgtaacattgtgcttccttgtagtttgtaatgtgagttcaatcagtatttatgttgaaatttctaacattaaatctagtctctatcctgttaatttaatttttaaatgctttatccatttgtgcaaaggtaaacgcagattgtatcttttttaatggtacggcataaaaagtaaccctcaagtgaagtgtctctatactgttttatagagtactttaacatgaatagataccttgtaaacttgtattgtggatgtgtaaataatatgtactttgggtttttaacaccgcatgtaaagtcaaaataaaatatacaaatcattata

SEQ ID NO: 18695 - DNA, 5874 bp, Homo sapiens
  source 1..5874: mol_type = unassigned DNA
gcggccgcttcccaccgtccctctccccttactggcagagcgcgctgcgggcggactcccgggcccggagcagcccaccggccaccccaccgcccacccggctcccggtgtctcctcccggccgctctacccagcaactttccgtgctttgttccccgactggaaatgctttacggaagcgtcttggacagggtctccgccaggcgacaagagctcggtgctgagatgtgttacgttctcatctccccatcaattatggatggaaacaaataaggaagagtcaattttgctgagccccttctccggcaacgagaggcgttctgcagccgggagggagccgccgctcgcgccggcagccgctggcaggggcatggtgaggaggaaggtagctcagtggcatttctgagcaggggccaccctgacttcaccttggcccaccatgagggtcttcctgctttgtgcctacatactgctgctgatggtttcccagttgagggcagtcagctttcctgaagatgatgaaccccttaatactgtcgactatcactattcaaggcaatatccggtttttagaggacgcccttcaggcaatgaatcgcagcacaggctggactttcagctgatgttgaaaattcgagacacactttatattgctggcagggatcaagtttatacagtaaacttaaatgaaatgcccaaaacagaagtaatacccaacaagaaactgacatggcgatcaagacaacaggatcgagaaaactgtgctatgaaaggcaagcataaagatgaatgccacaactttatcaaagtatttgttccaagaaacgatgagatggtttttgtttgtggtaccaatgcattcaatcccatgtgtagatactacaggttgagtaccttagaatatgatggggaagaaattagtggcctggcaagatgcccatttgatgccagacaaaccaatgttgccctctttgctgatgggaagctgtattctgccacagtggctgacttcttggccagcgatgccgttatttatcgaagcatgggtgatggatctgcccttcgcacaataaaatatgattccaaatggataaaagagccacactttcttcatgccatagaatatggaaactatgtctatttcttctttcgagaaatcgctgtcgaacataataatttaggcaaggctgtgtattcccgcgtggcccgcatatgtaaaaacgacatgggtggttcccagcgggtcctggagaaacactggacttcatttctaaaggctcggctgaactgttctgtccctggagattcgtttttctactttgatgttctgcagtctattacagacataatacaaatcaatggcatccccactgtggtcggggtgtttaccacgcagctcaatagcatccctggttctgctgtctgtgcatttagcatggatgacattgaaaaagtattcaaaggacggtttaaggaacagaaaactccagattctgtttggacagcagttcccgaagacaaagtgccaaagccaaggcctggctgttgtgcaaaacacggccttgccgaagcttataaaacctccatcgatttcccggatgaaactctgtcattcatcaaatctcatcccctgatggactctgccgttccacccattgccgatgagccctggttcacaaagactcgggtcaggtacagactgacggccatctcagtggaccattcagccggaccctaccagaactacacagtcatctttgttggctctgaagctggcatggtacttaaagttctggcaaagaccagtcctttctctttgaacgacagcgtattactggaagagattgaagcctacaaccatgcaaagtgcagtgctgagaatgaggaagacaaaaaggtcatctcattacagttggataaagatcaccacgctttatatgtggcgttctctagctgcattatccgcatccccctcagtcgctgtgagcgttatggatcatgtaaaaagtcttgtattgcatctcgtgacccgtattgtggctggttaagccagggatcctgtggtagagtgaccccagggatgcttgctgaaggatatgaacaagacacagaattcggcaacacagctcatctaggggactgccatggtgtacgatgggaagtccagtctggagagtccaaccagatggtccacatgaatgtcctcatcacctgtgtctttgctgcttttgttttgggggcattcattgcaggtgtggcagtatactgctatcgagacatgtttgttcggaaaaacagaaagatccataaagatgcagagtccgcccagtcatgcacagactccagtggaagttttgccaaactgaatggtctctttgacagccctgtcaaggaataccaacagaatattgattctcctaaactgtatagtaacctgctaaccagtcggaaagagctaccacccaatggagatactaaatccatggtaatggaccatcgagggcaacctccagagttggctgctcttcctactcctgagtctacacccgtgcttcaccagaagaccctgcaggccatgaagagccactcagaaaaggcccatggccatggagcttcaaggaaagaaacccctcagttttttccgtctagtccgccacctcattccccattaagtcatgggcatatccccagtgccattgttcttccaaatgctacccatgactacaacacgtctttctcaaactccaatgctcacaaagctgaaaagaagcttcaaaacattgatcaccctctcacaaagtcatccagtaagagagatcaccggcgttctgttgattccagaaataccctcaatgatctcctgaagcatctgaatgacccaaatagtaaccccaaagccatcatgggagacatccagatggcacaccagaacttaatgctggatcccatgggatcgatgtctgaggtcccacctaaagtccctaaccgggaggcatcgctatactcccctccttcaactctccccagaaatagcccaaccaagcgagtggatgtccccaccactcctggagtcccaatgacttctctggaaagacaaagaggttatcacaaaaattcctcccagaggcactctatatctgctatgcctaaaaacttaaactcaccaaatggtgttttgttatccagacagcctagtatgaaccgtggaggatatatgcccacccccactggggcgaaggtggactatattcagggaacaccagtgagtgttcatctgcagccttccctctccagacagagcagctacaccagtaatggcactcttcctaggacgggactaaagaggacgccgtccttaaaacctgacgtgccaccaaagccttcctttgttcctcaaaccccatctgtcagaccactgaacaaatacacatactaggcctcaagtgtgctattcccatgtggctttatcctgtccgtgttgttgagaggatgatgttgtaagggtaccttaaaacaagagactcgcttgtattttaagagaaccaagtggccaaagaaactctttctaactttggcaacatcagaacttgccacatgtagctactgcagcaaggcttctgtgtacttgcctgaaaacaaaggaaggtgctggtcattccatttcttttgtttgaagctaaagagatgtgtagctcacaggggctaccttaccagtataaagagctgataacagtactcagaagaatctgtgaacaaatacttgaaaatgggttcaatgtagactgccattatgtgtggtcttcccattaaatgtgaacattttaatatgtatgcattcaccttgcctcttgcacaaatgtcaaaaaaaagatggtaatatctcaaagaaatgaacttgtagattaccaagcagtttgctaaaaattcaatctttgacccaagctgtagcatttttttttcatgtgtggcatctttttcatgccaccaacaaacttgttgtgtgtgtgcgtgtgtgtgtgtgtgtgtgtgtgtgtgtgtgtgttctgtacccactaggatttgtttaggtgcccattgcatctttttgtgctatggagttgtttacattaagcatgaccgaacgagagacaatactatttcccacaggagtccattgggttcagctttgaaagaggaatagaatcgaggctcctttgaccatcaaaatgatgaactttacttatgtggtacccaatgccagaatgtaagagttgcaagtgattttgtgctgctattcattaaaacttgtattccagtcttgccagcttaaggagatcaagatattaagaggtatccttgatttattttccagtattcagtagtaaaattttcctgtccactgtgaatcaaagcctgagtcactctatttaaccttggacacactaataaggttttattttgattgtgttcgtttccccccccccaatagtaaaatttctcctcctttaactcctcctaccccccaaggtaagaaacaaaaaacaaacaaacaaacaaaaatagaagacaaaagaaagacatatgaaaggaattgtaattggcttaacagaaacagtctgtaaaaacctaacagtggtgcaatcatgttgtctgtgttgtgttatgtgagaattttctcctaagtcatgcaggtaatgacaatatactgtaaataccacatgtgagtttacctgaatctgtgcattttgtgccttattcatgagaatgatagaagtactaaaatctgtcaagtgttttcagtatagcacattatttactgagtgccagttgtaaatgtttttcaaccagcacctaaaaagactcttttcaaaaaatcacagaaacaacctaggacaattatttgttacataatccgacctcatagcagcattacattctttgccgtgataaacattccactcctgctttcctaaggatgaaacagtgataatgtgaactcaaatgaggtttcctgggtaatgtgacacctgcagaaactatagagcgtcatttatacgtagtttggcagaaaccacttacggctgatgatgcgcaaccctgctgactgtttcagttaatatgctgcacaccacacacttgtttagtgaaccaaatctagaaagtaccaaggcagaggtatgctcctgctgtaatcaggcaaatgagttcaactggatttcttttgacaatactgttggtacctattacttgggggaggacatgttgcagaagaccagatcatttttatacagaatgtgaaatactgatacagttattcttttttttaaagaacattgttttataaagaacgtgatttccagtgatctctggaagcgctaaagctaaaatttctgttcttgaaacacttcagctttgcaactaaaatattacagattaataataaattaaaccaaccaatgataaacactactcagtccaccaacaacaaacgtgtttgaattcaccttaccaatattaatcccagcgtgtgtaaaacagaacagtaactctatgtgaccccagataacattttgtaacattgtgcttccttgtagtttgtaatgtgagttcaatcagtatttatgttgaaatttctaacattaaatctagtctctatcctgttaatttaatttttaaatgctttatccatttgtgcaaaggtaaacgcagattgtatcttttttaatggtacggcataaaaagtaaccctcaagtgaagtgtctctatactgttttatagagtactttaacatgaatagataccttgtaaacttgtattgtggatgtgtaaataatatgtactttgggtttttaacaccgcatgtaaagtcaaaataaaatatacaaatcattata

SEQ ID NO: 18696 - DNA, 734 bp, Homo sapiens
  source 1..734: mol_type = unassigned DNA
ccaaactgcttctgttttccaggtagctcagtggcatttctgagcaggggccaccctgacttcaccttggcccaccatgagggtcttcctgctttgtgcctacatactgctgctgatggtttcccagttgagggcagtcagctttcctgaagatgatgaaccccttaatactgtcgactatcactattcaaggcaatatccggtttttagaggacgcccttcaggcaatgaatcgcagcacaggctggactttcagctgatgttgaaaattcgagacacactttatattgctggcagggatcaagtttatacagtaaacttaaatgaaatgcccaaaacagaagtaatacccaacaagaaactgacatggcgatcaagacaacaggatcgagaaaactgtgctatgaaaggcaagcataaagatgaatgccacaactttatcaaagtatttgttccaagaaacgatgagatggtttttgtttgtggtaccaatgcattcaatcccatgtgtagatactacaggttgagtaccttagaatatgatggggaagaaattagtggcctggcaagatgcccatttgatgccagacaaaccaatgttgccctctttgctgatgggaagctgtattctgccacagtggctgacttcttggccagcgatgccgttatttatcgaagcatgggtgatggatctgcccttcgcacaataaaatatgattccaaatggataaaag

SEQ ID NO: 18697 - DNA, 595 bp, Homo sapiens
  source 1..595: mol_type = unassigned DNA
acttgactgactaaacatatggcttcaaaatgtatcccacaaaataggtgcagtgctgagaatgaggaagacaaaaaggtcatctcattacagttggataaagatcaccacgctttatatgtggcgttctctagctgcattatccgcatccccctcagtcgctgtgagcgttatggatcatgtaaaaagtcttgtattgcatctcgtgacccgtattgtggctggttaagccagggatcctgtggtagagtgaccccagggatgcttgctgaaggatatgaacaagacacagaattcggcaacacagctcatctaggggactgccatgaaattttgcctacttcaactacaccagattacaaaatatttggcggtccaacatctggttagttttttttaatttttttgaattaacaaccttttctttccttcagttcagcattttcagccccttctcccctccttttgcgcagtttggcagcccttcatttttccgctttgactcatattcccactgatggtaccaaaagacttttcttactgagcacttcacccttgtttatagcatgttaacacttcatcattgaccaagcca

SEQ ID NO: 18698 - DNA, 580 bp, Homo sapiens
  source 1..580: mol_type = unassigned DNA
gctgttaaccgaagacttctttgctttccataaccacagtgctgaaggatatgaacaagacacagaattcggcaacacagctcatctaggggactgccatgaaattttgcctacttcaactacaccagattacaaaatatttggcggtccaacatctggttagttttttttaatttttttgaattaacaaccttttctttccttcagttcagcattttcagccccttctcccctccttttgcgcagtttggcagcccttcatttttccgctttgactcatattcccactgatggtaccaaaagacttttcttactgagcacttcacccttgtttatagcatgttaacacttcatcattgaccaagccacatcctttaagaaaattcaaatgggctaacatagactgcattccagctgcacgcacgcccacccaagctttcttctttctcacctctttgcattgtgaatgtttcttctggtcatctgtatttaatggatggcggaatttcattattttccccatctctcctcacctttcctatgacctagtaaacaaatacacatttcccataaatgtgta

SEQ ID NO: 18699 - DNA, 592 bp, Homo sapiens
  source 1..592: mol_type = unassigned DNA
gttaaccgaagacttctttgctttccataaccacagtgctgaaggatatgaacaagacacagaattcggcaacacagctcatctaggggactgccatgaaattttgcctacttcaactacaccagattacaaaatatttggcggtccaacatctgacatggaggtatcttcatcttctgttaccacaatggcaagtatcccagaaatcacacctaaagtgattgatacctggagacctaaactgacaagctctcggaaatttgtagttcaagatgatccaaacacttctgattttactgatcctttatcgggtatcccaaagggtgtacgatgggaagtccagtctggagagtccaaccagatggtccacatgaatgtcctcatcacctgtgtctttgctgcttttgttttgggggcattcattgcaggtgtggcagtatactgctatcgagacatgtttgttcggaaaaacagaaagatccataaagatgcagagtccgcccagtcatgcacagactccagtggaagttttgccaaactgaatggtctctttgacagccctgtcaaggaataccaacagaatattgattct

SEQ ID NO: 18700 - DNA, 5908 bp, Homo sapiens
  source 1..5908: mol_type = unassigned DNA
gcggccgcttcccaccgtccctctccccttactggcagagcgcgctgcgggcggactcccgggcccggagcagcccaccggccaccccaccgcccacccggctcccggtgtctcctcccggccgctctacccagcaactttccgtgctttgttccccgactggaaatgctttacggaagcgtcttggacagggtctccgccaggcgacaagagctcggtgctgagatgtgttacgttctcatctccccatcaattatggatggaaacaaataaggaagagtcaattttgctgagccccttctccggcaacgagaggcgttctgcagccgggagggagccgccgctcgcgccggcagccgctggcaggggcatggtgaggaggaaggtagctcagtggcatttctgagcaggggccaccctgacttcaccttggcccaccatgagggtcttcctgctttgtgcctacatactgctgctgatggtttcccagttgagggcagtcagctttcctgaagatgatgaaccccttaatactgtcgactatcactattcaaggcaatatccggtttttagaggacgcccttcaggcaatgaatcgcagcacaggctggactttcagctgatgttgaaaattcgagacacactttatattgctggcagggatcaagtttatacagtaaacttaaatgaaatgcccaaaacagaagtaatacccaacaagaaactgacatggcgatcaagacaacaggatcgagaaaactgtgctatgaaaggcaagcataaagatgaatgccacaactttatcaaagtatttgttccaagaaacgatgagatggtttttgtttgtggtaccaatgcattcaatcccatgtgtagatactacaggttgagtaccttagaatatgatggggaagaaattagtggcctggcaagatgcccatttgatgccagacaaaccaatgttgccctctttgctgatgggaagctgtattctgccacagtggctgacttcttggccagcgatgccgttatttatcgaagcatgggtgatggatctgcccttcgcacaataaaatatgattccaaatggataaaagagccacactttcttcatgccatagaatatggaaactatgtctatttcttctttcgagaaatcgctgtcgaacataataatttaggcaaggctgtgtattcccgcgtggcccgcatatgtaaaaacgacatgggtggttcccagcgggtcctggagaaacactggacttcatttctaaaggctcggctgaactgttctgtccctggagattcgtttttctactttgatgttctgcagtctattacagacataatacaaatcaatggcatccccactgtggtcggggtgtttaccacgcagctcaatagcatccctggttctgctgtctgtgcatttagcatggatgacattgaaaaagtattcaaaggacggtttaaggaacagaaaactccagattctgtttggacagcagttcccgaagacaaagtgccaaagccaaggcctggctgttgtgcaaaacacggccttgccgaagcttataaaacctccatcgatttcccggatgaaactctgtcattcatcaaatctcatcccctgatggactctgccgttccacccattgccgatgagccctggttcacaaagactcgggtcaggtacagactgacggccatctcagtggaccattcagccggaccctaccagaactacacagtcatctttgttggctctgaagctggcatggtacttaaagttctggcaaagaccagtcctttctctttgaacgacagcgtattactggaagagattgaagcctacaaccatgcaaagtgcagtgctgagaatgaggaagacaaaaaggtcatctcattacagttggataaagatcaccacgctttatatgtggcgttctctagctgcattatccgcatccccctcagtcgctgtgagcgttatggatcatgtaaaaagtcttgtattgcatctcgtgacccgtattgtggctggttaagccagggatcctgtggtagagtgaccccagggatgcttgctgaaggatatgaacaagacacagaattcggcaacacagctcatctaggggactgccatgacatggaggtatcttcatcttctgttaccacaatggtgtacgatgggaagtccagtctggagagtccaaccagatggtccacatgaatgtcctcatcacctgtgtctttgctgcttttgttttgggggcattcattgcaggtgtggcagtatactgctatcgagacatgtttgttcggaaaaacagaaagatccataaagatgcagagtccgcccagtcatgcacagactccagtggaagttttgccaaactgaatggtctctttgacagccctgtcaaggaataccaacagaatattgattctcctaaactgtatagtaacctgctaaccagtcggaaagagctaccacccaatggagatactaaatccatggtaatggaccatcgagggcaacctccagagttggctgctcttcctactcctgagtctacacccgtgcttcaccagaagaccctgcaggccatgaagagccactcagaaaaggcccatggccatggagcttcaaggaaagaaacccctcagttttttccgtctagtccgccacctcattccccattaagtcatgggcatatccccagtgccattgttcttccaaatgctacccatgactacaacacgtctttctcaaactccaatgctcacaaagctgaaaagaagcttcaaaacattgatcaccctctcacaaagtcatccagtaagagagatcaccggcgttctgttgattccagaaataccctcaatgatctcctgaagcatctgaatgacccaaatagtaaccccaaagccatcatgggagacatccagatggcacaccagaacttaatgctggatcccatgggatcgatgtctgaggtcccacctaaagtccctaaccgggaggcatcgctatactcccctccttcaactctccccagaaatagcccaaccaagcgagtggatgtccccaccactcctggagtcccaatgacttctctggaaagacaaagaggttatcacaaaaattcctcccagaggcactctatatctgctatgcctaaaaacttaaactcaccaaatggtgttttgttatccagacagcctagtatgaaccgtggaggatatatgcccacccccactggggcgaaggtggactatattcagggaacaccagtgagtgttcatctgcagccttccctctccagacagagcagctacaccagtaatggcactcttcctaggacgggactaaagaggacgccgtccttaaaacctgacgtgccaccaaagccttcctttgttcctcaaaccccatctgtcagaccactgaacaaatacacatactaggcctcaagtgtgctattcccatgtggctttatcctgtccgtgttgttgagaggatgatgttgtaagggtaccttaaaacaagagactcgcttgtattttaagagaaccaagtggccaaagaaactctttctaactttggcaacatcagaacttgccacatgtagctactgcagcaaggcttctgtgtacttgcctgaaaacaaaggaaggtgctggtcattccatttcttttgtttgaagctaaagagatgtgtagctcacaggggctaccttaccagtataaagagctgataacagtactcagaagaatctgtgaacaaatacttgaaaatgggttcaatgtagactgccattatgtgtggtcttcccattaaatgtgaacattttaatatgtatgcattcaccttgcctcttgcacaaatgtcaaaaaaaagatggtaatatctcaaagaaatgaacttgtagattaccaagcagtttgctaaaaattcaatctttgacccaagctgtagcatttttttttcatgtgtggcatctttttcatgccaccaacaaacttgttgtgtgtgtgcgtgtgtgtgtgtgtgtgtgtgtgtgtgtgtgtgttctgtacccactaggatttgtttaggtgcccattgcatctttttgtgctatggagttgtttacattaagcatgaccgaacgagagacaatactatttcccacaggagtccattgggttcagctttgaaagaggaatagaatcgaggctcctttgaccatcaaaatgatgaactttacttatgtggtacccaatgccagaatgtaagagttgcaagtgattttgtgctgctattcattaaaacttgtattccagtcttgccagcttaaggagatcaagatattaagaggtatccttgatttattttccagtattcagtagtaaaattttcctgtccactgtgaatcaaagcctgagtcactctatttaaccttggacacactaataaggttttattttgattgtgttcgtttccccccccccaatagtaaaatttctcctcctttaactcctcctaccccccaaggtaagaaacaaaaaacaaacaaacaaacaaaaatagaagacaaaagaaagacatatgaaaggaattgtaattggcttaacagaaacagtctgtaaaaacctaacagtggtgcaatcatgttgtctgtgttgtgttatgtgagaattttctcctaagtcatgcaggtaatgacaatatactgtaaataccacatgtgagtttacctgaatctgtgcattttgtgccttattcatgagaatgatagaagtactaaaatctgtcaagtgttttcagtatagcacattatttactgagtgccagttgtaaatgtttttcaaccagcacctaaaaagactcttttcaaaaaatcacagaaacaacctaggacaattatttgttacataatccgacctcatagcagcattacattctttgccgtgataaacattccactcctgctttcctaaggatgaaacagtgataatgtgaactcaaatgaggtttcctgggtaatgtgacacctgcagaaactatagagcgtcatttatacgtagtttggcagaaaccacttacggctgatgatgcgcaaccctgctgactgtttcagttaatatgctgcacaccacacacttgtttagtgaaccaaatctagaaagtaccaaggcagaggtatgctcctgctgtaatcaggcaaatgagttcaactggatttcttttgacaatactgttggtacctattacttgggggaggacatgttgcagaagaccagatcatttttatacagaatgtgaaatactgatacagttattcttttttttaaagaacattgttttataaagaacgtgatttccagtgatctctggaagcgctaaagctaaaatttctgttcttgaaacacttcagctttgcaactaaaatattacagattaataataaattaaaccaaccaatgataaacactactcagtccaccaacaacaaacgtgtttgaattcaccttaccaatattaatcccagcgtgtgtaaaacagaacagtaactctatgtgaccccagataacattttgtaacattgtgcttccttgtagtttgtaatgtgagttcaatcagtatttatgttgaaatttctaacattaaatctagtctctatcctgttaatttaatttttaaatgctttatccatttgtgcaaaggtaaacgcagattgtatcttttttaatggtacggcataaaaagtaaccctcaagtgaagtgtctctatactgttttatagagtactttaacatgaatagataccttgtaaacttgtattgtggatgtgtaaataatatgtactttgggtttttaacaccgcatgtaaagtcaaaataaaatatacaaatcattat

SEQ ID NO: 18701 - DNA, 5496 bp, Homo sapiens
  source 1..5496: mol_type = unassigned DNA
attctggttccgtcgtgtgtctggcgtgtggagctagtgctcccgcttattcgccactgtcgccaccgctgtcatgaaccgcgagagcttcgcggcgggagagcggctggtgtcgccggcttacgtgcggcagggctgtgaggcccgccgctcgcatgagcacctcatacggctgcttctggagaagggcaagtgtccagagaatggctgggatgaaagtacacttgaactctttttacatgaacttgcaatcatggacagcaacaatttcttaggcaattgtggtgtgggagaaagggaagggagagtggcatccgcactggttgctcgtcgtcattacaggttcattcatggcattggacgatccggtgatatttctgctgtgcaaccaaaagctgcaggctctagccttttgaacaaaattaccaattctttggtcctggacattataaagctggctggtgtccatacagtagccaactgctttgtagttcctatggcaactggtatgagtctaactctgtgtttcttaacattacgacacaaaagaccaaaggcaaagtatattatatggccacgaatagaccagaagtcctgctttaaatccatgatcactgcaggttttgagcctgtggtgatagaaaatgttttggaaggtgacgagctgcgtacagacctgaaagcagtggaggctaaagtccaggaacttgggcctgattgcattctgtgtattcattctactacatcctgttttgctccaagggtgcctgatagattagaagaactggctgtgatttgtgctaattatgacattccacatatagttaataatgcttatggagtgcagtcttcaaagtgtatgcatctcattcagcagggggctcgagttggtagaatagatgcttttgttcagagcttggacaaaaattttatggttccagtaggtggtgctataattgctggctttaatgattcattcattcaggaaatcagcaagatgtatccaggaagagcttcagcttcaccttctttagatgtccttattactttattgtcacttggatcaaatggctataagaagctactaaaagaaagaaaggaaatgttttcatatttgtccaaccaaataaagaagttgtcagaagcctacaatgaaagactgttgcatacacctcacaatcccatatctttagctatgacacttaaaacactagatgaacaccgtgacaaagctgtcactcagcttggctcgatgctttttaccagacaggtttctggagccagggttgtgcctcttgggtccatgcaaactgtgagtggctatactttcagaggctttatgtcacatacaaataattacccttgtgcttacctcaatgctgcatcagccatcggaatgaagatgcaggatgtggacctgttcataaagagacttgacaggtgtttaaaggcagtaagaaaagaacgaagtaaagagagtgatgacaattatgacaaaactgaagatgtggatattgaagaaatggctttaaaactagataatgtacttcttgacacataccaggatgcttcttcatgacatgcgaagggtttcttcttgatcatttgaaagaaatgataaggctgtagtacaagcaagcagtttaaagataagacttgagatttttgaattgagaatttcatgggaatattcagtcaaggagcagactttggtctgaactagccattgatgattgttaagtttcccattcttagactgcatcaatccttgtgatccttaacaggttataatatacaattagcatttttctaattgttagaatatctgtcaattaagcatcatgactcagataatttttactagtgtaatgacagtaaaattacttcaattctctttgaaatgtagagtgcttcctcctaaccattctttaccgtttctgatcacacagaattgagaaagatctcttaggccactagttactagttgtttgttgagatgtgtaagtcacagtgtgcctgtaaaatgggcattccccaaggaagcagagtcaaggtataaactttcgttttgactcaaaagcagtgggtctcaactggggatgattcgcttatctgaacagcatctgcagacatttttggttgtcacaactggtgggatgctgttaacatctagaggatagaggccagggtgctactcaacatcctacaatgcatgggacaactcccacaacaaagaattatccagcccaaaatgtcattagtgctgaggttgagaaatactcctctaaagtagataaactccttgagtaaagagaagtttaccatagcaactttcagtagtacttcaaagaagatagctgtataaatgtcatcaaactatactatatagagaatcttaagtgataaccagggtcacggattccaaacatgtcattataaattgttttatatggtgctcactggtgcatttttccttttggataagggaaaacattattccacttactgtttttgctttaagcagcctgcatatattggttagtttgttcagatgttgtgcacagacatcatcaaaattagctaacatgggtatttttgaacatatttttgccaggaagatgaaaatcacatagtatgataaacaggtgtattcccctctacttgcccatgtgctcatttttctgagtctgaaattccagacttactggctttaacaataatttttgttgttaatttaagaaatagacttacttaagactattttaagaaatagagatgtcatagcctgaagatttactgaagcttctgaacatgccaccatgccaaagctatgtttctcaaacccagctctgtggatcatgttcctaaaagatgctcatggggagaaaatgtttacagacaaataattttgggagctgcctttgcaaacctgcctgttggcatattgaaggctctaagaattccttcactaaataacccagttttaatatatccttatccaaagagaaactcatttttttaaagtgaaatatttgttaacagcccattgaacatacttttaaaaacactatggtagagaatgctgtgttgccttctgggctgcatttttcttattgatttggaattgtaacctatgtatgagaaagggattttctggtattttggtgacgttgtacattgtcccagactgtttgtaaacatgaggtcagacatgtgtaaggtagacgcctatggccactggcttgaccaccttggaagtcaatgactattttgagatgaagtatttaactatgaatatcatgaaggttatttaaaaatgtatttattttatctttggggttcaaacattaaaaaaatttacataggtgtagtaactcatttcaagggaataaatgctggattaaaaagtgtaaatttttcatgagaatttgggactaaattgctgaaccaataaagctgaagagttgcaacctctagagtcaaaaaagggattgaaatgttgttgcaaatgtaaatgctggcagtgcagcttgctatacatgtaagccaaaattgttttatagaacaagtgatctatattgttgtgatcatcatttagcttaagaaaggccagagctgggagagtagcaaatgttttctcatctgcagtgtatcagcagttcttgggcttcagctgctgaatagataataattctaattgaacataaattacatgaactcacatgtgaatgatagatatgttacaatatttcattcctgatgcagaaaatcagctgtggtttttattattaaccctttctttttcagtggttttggaattctagctctattcctcctggcttaaaatttgagggcatagaattcacaagagtttttgaagagttctgtctattcaggctttcctttgtccccaccctagtgtcattttcactcactcccatttctacacataagtattaaaaaggatgtatttattataattcgctagtactgattggtaagcctcataattggcctttgttatctttgtactgtgacgaaggcagtggatgatacattaccaatcattgccgaagataacctcttctatctttttgacccaactacccttattaaaactatcaggtaaaatattggagttaggtttttaaagtcattgggctgtggcagtgtgcttagaaaagaaaatggtggaacatagaatattcttttggtcactacacaatgtgttacttatacatggcagggaagggaattttaaatcaaactcgcagtttggttcttaggtcctctgctgatgaattctcgctctatcagggaatgatatgtgacgccagccttaggaacctggtgttcaactgtaaatctttctatttagctttttgtattagttgaatgaagttatagaatatgaattattgaatacagttctgttcagccaataggcacttgatatacagaatggtaaatttaaatataaattaaatttttctaatattatgatcagcacttcactgtggttctgtgtctttaaccacctcataataagaactgttattgaggactgggctacagaatgtgcttagactacatctatggcttccatagattttagtaaaatttaaacagataatttgtgtttactgctgatgttactttaatattgaattagtagttcatcctgagagttatatttcacagaggaaaataaccaacagctgaaaacaacaataataaagctctggtgagtctgactcatactcggagaaagtttttggaatacatacacatttggtgcatataagagttgggtttccttttcccactttctgagatgtactaacctctgccagacccttaaatgattttgttatgttttgcatttttgaggccaaccttattttgtaactgaaaaaagtccagttttgcatacacagaaatttggtcattttagaagtctcacaacctgaataatttgataataattgaatatgctattaacagctttttaagaaaaggttctattagtcagttttttccttgtctgtcatattatgttggttaatgtctcttatggccaatcttagtaaacagacctaacactcactgcatccttttgtgccttactttttactttccttttgcccttttggtatgtgcgcatgtaagatggtaagtttaaggctaatgaatatatgtttgtaatttcctactcactactctgcagttaaagctaaggccttaggcaaaatctagaaatgtttatattgttttgttttttatcaagtggtgtcaacttgagaaatacaaagaaaggctatgcttaactgtataaccgtgggggattttagccatgagaatatgaagctgatgtcagcctgctaacctgttttaccaaaaggaaaagatgtttccaaaaatgttttcggtgtagactgtttaaagatgaaaataaattatataatttattatatgaaataaatttttgataagtca

SEQ ID NO: 18702 - DNA, 3344 bp, Homo sapiens
  source 1..3344: mol_type = unassigned DNA
attcgccactgtcgccaccgctgtcatgaaccgcgagagcttcgcggcgggagagcggctggtgtcgccggcttacgtgcggcagggctgtgaggcccgccgctcgcatgagcacctcatacggctgcttctggagaagagtctcgctctttcgcccaggctggaatgcagtgtgacgatctcggctcactgcagcctccgcctcccgggttcacgccattcgcctgcctcagcctcccgagtagctgggactacaggcgcccgccaccacacccgggcaagtgtccagagaatggctgggatgaaagtacacttgaactctttttacatgaacttgcaatcatggacagcaacaatttcttaggcaattgtggtgtgggagaaagggaagggagagtggcatccgcactggttgctcgtcgtcattacaggttcattcatggcattggacgatccggtgatatttctgctgtgcaaccaaaagctgcaggctctagccttttgaacaaaattaccaattctttggtcctggacattataaagctggctggtgtccatacagtagccaactgctttgtagttcctatggcaactggtatgagtctaactctgtgtttcttaacattacgacacaaaagaccaaaggcaaagtatattatatggccacgaatagaccagaagtcctgctttaaatccatgatcactgcaggttttgagcctgtggtgatagaaaatgttttggaaggtgacgagctgcgtacagacctgaaagcagtggaggctaaagtccaggaacttgggcctgattgcattctgtgtattcattctactacatcctgttttgctccaagggtgcctgatagattagaagaactggctgtgatttgtgctaattatgacattccacatatagttaataatgcttatggagtgcagtcttcaaagtgtatgcatctcattcagcagggggctcgagttggtagaatagatgcttttgttcagagcttggacaaaaattttatggttccagtaggtggtgctataattgctggctttaatgattcattcattcaggaaatcagcaagatgtatccaggaagagcttcagcttcaccttctttagatgtccttattactttattgtcacttggatcaaatggctataagaagctactaaaagaaagaaaggaaatgttttcatatttgtccaaccaaataaagaagttgtcagaagcctacaatgaaagactgttgcatacacctcacaatcccatatctttagctatgacacttaaaacactagatgaacaccgtgacaaagctgtcactcagcttggctcgatgctttttaccagacaggtttctggagccagggttgtgcctcttgggtccatgcaaactgtgagtggctatactttcagaggctttatgtcacatacaaataattacccttgtgcttacctcaatgctgcatcagccatcggaatgaagatgcaggatgtggacctgttcataaagagacttgacaggtgtttaaaggcagtaagaaaagaacgaagtaaagagagtgatgacaattatgacaaaactgaagatgtggatattgaagaaatggctttaaaactagataatgtacttcttgacacataccaggatgcttcttcatgacatgcgaagggtttcttcttgatcatttgaaagaaatgataaggctgtagtacaagcaagcagtttaaagataagacttgagatttttgaattgagaatttcatgggaatattcagtcaaggagcagactttggtctgaactagccattgatgattgttaagtttcccattcttagactgcatcaatccttgtgatccttaacaggttataatatacaattagcatttttctaattgttagaatatctgtcaattaagcatcatgactcagataatttttactagtgtaatgacagtaaaattacttcaattctctttgaaatgtagagtgcttcctcctaaccattctttaccgtttctgatcacacagaattgagaaagatctcttaggccactagttactagttgtttgttgagatgtgtaagtcacagtgtgcctgtaaaatgggcattccccaaggaagcagagtcaaggtataaactttcgttttgactcaaaagcagtgggtctcaactggggatgattcgcttatctgaacagcatctgcagacatttttggttgtcacaactggtgggatgctgttaacatctagaggatagaggccagggtgctactcaacatcctacaatgcatgggacaactcccacaacaaagaattatccagcccaaaatgtcattagtgctgaggttgagaaatactcctctaaagtagataaactccttgagtaaagagaagtttaccatagcaactttcagtagtacttcaaagaagatagctgtataaatgtcatcaaactatactatatagagaatcttaagtgataaccagggtcacggattccaaacatgtcattataaattgttttatatggtgctcactggtgcatttttccttttggataagggaaaacattattccacttactgtttttgctttaagcagcctgcatatattggttagtttgttcagatgttgtgcacagacatcatcaaaattagctaacatgggtatttttgaacatatttttgccaggaagatgaaaatcacatagtatgataaacaggtgtattcccctctacttgcccatgtgctcatttttctgagtctgaaattccagacttactggctttaacaataatttttgttgttaatttaagaaatagacttacttaagactattttaagaaatagagatgtcatagcctgaagatttactgaagcttctgaacatgccaccatgccaaagctatgtttctcaaacccagctctgtggatcatgttcctaaaagatgctcatggggagaaaatgtttacagacaaataattttgggagctgcctttgcaaacctgcctgttggcatattgaaggctctaagaattccttcactaaataacccagttttaatatatccttatccaaagagaaactcatttttttaaagtgaaatatttgttaacagcccattgaacatacttttaaaaacactatggtagagaatgctgtgttgccttctgggctgcatttttcttattgatttggaattgtaacctatgtatgagaaagggattttctggtattttggtgacgttgtacattgtcccagactgtttgtaaacatgaggtcagacatgtgtaaggtagacgcctatggccactggcttgaccaccttgg

SEQ ID NO: 18703 - DNA, 1494 bp, Homo sapiens
  source 1..1494: mol_type = unassigned DNA
gtcgtgtgtctggcgtgtggagctagtgctcccgcttattcgccactgtcgccaccgctgtcatgaaccgcgagagcttcgcggcgggagagcggctggtgtcgccggcttacgtgcggcagggctgtgaggcccgccgctcgcatgagcacctcatacggctgcttctggagaaggttcattcatggcattggacgatccggtgatatttctgctgtgcaaccaaaagctgcaggctctagccttttgaacaaaattaccaattctttggtcctggacattataaagctggctggtgtccatacagtagccaactgctttgtagttcctatggcaactggtatgagtctaactctgtgtttcttaacattacgacacaaaagaccaaaggcaaagtatattatatggccacgaatagaccagaagtcctgctttaaatccatgatcactgcaggttttgagcctgtggtgatagaaaatgttttggaaggtgacgagctgcgtacagacctgaaagcagtggaggctaaagtccaggaacttgggcctgattgcattctgtgtattcattctactacatcctgttttgctccaagggtgcctgatagattagaagaactggctgtgatttgtgctaattatgacattccacatatagttaataatgcttatggagtgcagtcttcaaagtgtatgcatctcattcagcagggggctcgagttggtagaatagatgcttttgttcagagcttggacaaaaattttatggttccagtaggtggtgctataattgctggctttaatgattcattcattcaggaaatcagcaagatgtatccaggaagagcttcagcttcaccttctttagatgtccttattactttattgtcacttggatcaaatggctataagaagctactaaaagaaagaaaggaaatgttttcatatttgtccaaccaaataaagaagttgtcagaagcctacaatgaaagactgttgcatacacctcacaatcccatatctttagctatgacacttaaaacactagatgaacaccgtgacaaagctgtcactcagcttggctcgatgctttttaccagacaggtttctggagccagggttgtgcctcttgggtccatgcaaactgtgagtggctatactttcagaggctttatgtcacatacaaataattacccttgtgcttacctcaatgctgcatcagccatcggaatgaagatgcaggatgtggacctgttcataaagagacttgacaggtgtttaaaggcagtaagaaaagaacgaagtaaagagagtgatgacaattatgacaaaactgaagatgtggatattgaagaaatggctttaaaactagataatgtacttcttgacacataccaggatgcttcttcatgacatgcgaagggtttcttcttgatcatttgaaagaaatgataaggctgtagtacaagcaagcagtttaaagataagacttga

SEQ ID NO: 18704 - DNA, 544 bp, Homo sapiens
  source 1..544: mol_type = unassigned DNA
aaagtatattatatggccacgaatagaccagaagtcctgctttaaatccatgatcactgcaggttttgagcctgtggtgatagaaaatgttttggaaggtgacgagctgcgtacagacctgaaagcagtggaggctaaagtccaggaacttgggcctgattgcattctgtgtattcattctactacatcctgttttgctccaagggtgcctgataggaagagcttcagcttcaccttctttagatgtccttattactttattgtcacttggatcaaatggctataagaagctactaaaagaaagaaagctatgacacttaaaacactagatgaacaccgtgacaaagctgtcactcagcttggctcgatgctttttaccagacaggtttctggagccagggttgtgcctcttgggtccatgcaaactgtgagtggctatactttcagaggctttatgtcacatacaaataattacccttgtgcttacctcaatgctgcatcagccatcggaatgaagatgcaggatgtggacctgttcataaag

SEQ ID NO: 18705 - DNA, 529 bp, Homo sapiens
  source 1..529: mol_type = unassigned DNA
acaatgaaagactgttgcatacacctcacaatcccatatctttagctatgacacttaaaacactagatgaacaccgtgacaaagctgtcactcagcttggctcgatgctttttaccagacaggtttctggagccaggtaagtatgtttaagatagatatgggtttatttgtcttttcaaacttaactccagtaaaatacctttcctcaacaatagtcccccaagtatatcctgaactatacctgcgaattcatcatggagtaaagaatgatgagttagagaatctgtaaggctactgtatgcccacctgtggactgcttatgcctgaaatagtcacaaaaagacatgaatcttgtttgttttcatagatgtacagaaccaaagttttattacctctctacatagatttttttctttatttcctttgttagatgatcttcagcaagtcacattatggtattagagataagccatcttcatcactaaattgaagtgaaagtgttcttaaggaaaagccttcttcctaaact

SEQ ID NO: 18706 - DNA, 420 bp, Homo sapiens
  source 1..420: mol_type = unassigned DNA
atagcatgcttcctagagtttcaggatcttcccttattttagttcacactaacattttgttttctggttggtttggttaggttttgagcctgtggtgatagaaaatgttttggaaggtgacgagctgcgtacagacctgaaagcagtggaggctaaagtccaggaacttgggcctgattgcattctgtgtattcattctactacatcctgttttgctccaagggtgcctgataggaagagcttcagcttcaccttctttagatgtccttattactttattgtcacttggatcaaatggctataagaagctactaaaagaaagaaaggaaatgttttcatatttgtccaaccaaataaagaagttgtcagaagcctacaatgaaagactgttgcatacacctcacaatcccatatctttag

SEQ ID NO: 18707 - DNA, 561 bp, Homo sapiens
  source 1..561: mol_type = unassigned DNA
gcttattcgccactgtcgccaccgctgtcatgaaccgcgagagcttcgcggcgggagagcggctggtgtcgccggcttacgtgcggcagggctgtgaggcccgccgctcgcatgagcacctcatacggctgcttctggagaagagtctcgctctttcgcccaggctggaatgcagtgtgacgatctcggctcactgcagcctccgcctcccgggttcacgccattcgcctgcctcagcctcccgagtagctgggactacaggcgcccgccaccacacccggttaatgtttgtatttttagtagagatggggtttcaccatgttggccaggctgatctcaaactcctgacttcaagtgatcggccattcttggccttccaaagtgctcggattacaggcggcaagtgtccagagaatggctgggatgaaagtacacttgaactctttttacatgaacttgcaatcatggacagcaacaatttcttaggcaattgtggtgtgggagaaagggaagggagagtggcatccgcactggttgctcgtcgtcattacaggtatcttt

SEQ ID NO: 18708 - DNA, 383 bp, Homo sapiens
  source 1..383: mol_type = unassigned DNA
ttagccccgccccgctgcggctgattcgtctagttaaaccctggtgttcctgacacaaacttcaggaaaggattttgcacttgtgcagaccgggcgagcagagtaagaagcaggtcccgcataccaacaaaactaaggacgccaacttgtctggaaggcccaataaaaagctgattcatggaggaatgcaattgtcacatcctaatgatttcatctcccttaccccaacgaatcgataaccccaaattttccagcccctcaccctccacaaatccccttaaaaaactttgcctagaaccccttgatgaaatggattgaagcttgagaactcttcctgtttcctggcttgtaacttgtgattattaaaactttctctgctgcaa

SEQ ID NO: 18709 - DNA, 4055 bp, Homo sapiens
  source 1..4055: mol_type = unassigned DNA
agttaaaccctggtgttcctgacacaaacttcaggaaaggattttgcacttgtgcagaccgggcgagcagagtaagaagcagtctcactgtgtcgcccaggctggagtgcaagtggcatgatcttggctcacaactgcaacctccgtctcccgggttcaaacgattctcctacctcagcctcccgaatatctgggattacaggtgcccaccaccatgcctggataatttttaaaaatatttttagtagagacagggtttcaccaactaggccaggctgctcttgaactcctgacctcaggtaatccacccgccttggcctcccaaaatgctgggattacaggtgtgagccaccgcgcctgaccaactttagcttttcaaaatctgtcttcgtagacgataatggaaatatctaccaaagctaaatattcacctaccccatgacccagcaattttactcctaggtatatataccaaaaaaaatgagtgttctgtgtccactagagatatgtgccaaagtgttcataatagatccaaactggaaacagctcaaatgtccatcaatagcagaaagataaacaaatgttgggatgttcagagcttgaaatatgacacaatataaaaggacaaactattaaaactcacaacagcatggataaatcttacagacataattattgagcaaaagataccagaaacacaaaagtatatactgtctgattcctttaaataaaggttaagatgattctccctcctgcagccttgtgaagaaggtgcctttcttccccttcgccttctgccatgattgtaagtttcctgaggcctccccagccatgttgaattctcattgtccctgataaaatagcaccctctcttcctctgctcttccacccttttcctcttccgctgtgcaactgaagactgggaaagaatgacatgcaaaataagaggttttggattcagcgtaggactaactactggatgctacttacagaaaactttatatttgtgctgaaaaatcttgttatctaggtgaaagccaatgctatcctaatgacaaaattgttggggaaataaatttataagagactttatttaaagaaataaaagaaaaaataataaagcttaagacaaaaaactaatccattttggtagacatcagcacttacctctgagaaggaaaatggttactgatggggaagtgggaggcataagggaatcttctgggtgatgaaaatgttctatttcttgatctgaattgtagttacttgggtttagacatatgcttaaaaatcgtcaagttatgtgtttaaaacatgtgcaccttacagtatataagccacacttcaatttttttaaaggtccccacaacattgttgttttcaaggaagtacaggaaatatcttttactctgtgttaattcagggaagttatctccataagtgctttacaaaataatcttcataatatagtagcaccattaagtaggcattattatctctgtatcacaaatgcacaatatgagagtcagagaggttaagttattttccaaagtcacacagctaatcaatggcaaagttaggattttttttttcttttttgagacagagtcttgctctgtcacccaggctggagtgcagtggtgtgatttcagctcactgcaaccttcgcctcccagcttcaagcgattctcatgcctcagcctcccaggtagctgggatttcaggtgtgcaaccaccacacccagttaatttttgtatttttggtagagatagggtttcacatgttggccaagctggtcttgaactcttgacctcaagtgatccacctgtctcagccttcccaagtgctgggattacaggtgtgagccatcacactcggccaaagctaggatttgaatataagtttgtctgaccctcaaaacccatgctccttcctctgtgttagccaacttcctgcatagccaacttcccagggtcatggaaagaatcattaacgcaacccaggaatgctctcccggagtgtggctatatctagagaaattgtggaaagaggccaggcacggtggctcactcctgtaattccagcactttgggaggccaaggtgggagaatcatctgaggccaagagttcaagaccaacttggacaacatagtgagaaccctttctctattcaaaaaaaagaaagaaagaaagaatttgcctaaatagaacagaaaaggctgtatgtgcaagacagttactgcaggttttataatagtaaaaagctagaaaaaaactaattattcaacagtacataattaagcaaattaaaatacatatattcaataggatattaagcagccattaaaagtcatacttaagaaagcttatgatataattttcactgaggtaaaactgaataaaagttgcatgtactttaagaatacaaccacgaaaaacaaagctttttaaacttatgcacagagaaaggaaaggccagaaagtgtttgtatgtaaagaccattagtatgtgttgtctgtgatttttttcagctgtgttttgtagcttttccttgtagaggtctttcacctccttggttaggtatattcctaagtatctttttttttgcagctatcgtaaaaggggttgcattattgatttgattctcagtttggtcgctgttggtgtatagaagagctactgatttgtgtatattaattttgtatccagaaaactttcctgaattcttttatcagttataggagctttctggaggagtccttagggttttctaggtaaacaatcatatcatcagcaaacagcgacagtttgacttcttctttaccaatttggatgccctgtatttcattctcttgtctgattgctcaggccaggacttccaatactatgttgaggaggagctcatggataggtagaatcaatattgtgaaaatgaccatactgctaaaagcaatctacaaattcaacacaattcccatcaaaataccaccatcattcttcacagaattagagaaaacaattctaaaattcatatggaaccaaaaaagagcccacatatccaaagcaatactaagcaaaaagaacaaatctggaggcatcacattacctgatttcaaactatgctataaggccatagtcaccaaaacagcatggtactggtataaaaacaggcacatagaccaatggaacagaaaagagaactcagaaataaacccaaatacttacagccaattgatctttgacaaagcaaacaaaaacataaagtggggaaaggacatccttttcaacaaatggtgctgggataattggctagccacatacaggagaatgaaactggatcctcatctctcaccttatacaaaaatcaactcaagatggattaaggacttaatctaagacctgaaactacaaaaattctagaagatatcattggcaaaacccttctagacattggcttaggcaaggatttcataaccaagaacctaaaagcaaatgcaataaaaccaaagataattgctgggacttaattaaactaaggagctttctcatggcaaaaagaacagtcagcagagtaaagagacaacccacagagtgggaaaaaaccttcacaatctatatgtctgacaaaggactaatatccagaatctataaggagctcaaacaaattagcaagaaaaaaaaaatgatcccatcaaaaagtgggctaaggacatgaatagacaattcccaaaagaagatatacaaatggccaacaaacataaaaaaatgcccaacatcactaatgatcagggaaatgcaaatcaaaaccacaatgtgataccactttactcctgcaagaatggccataatctaaaaatcgaaaaatagtagatgttggcatggatgtggtgatcagggaacacttctacatggctggtgggaatgtaaactagtatagccactatggaaaacactgtggagattccttaaagaactaaaagtaaaactaccatttgatccagcaatcccactactgggtatctatcagaggaaaagaagtcattatacgaaaaa

SEQ ID NO: 18710 - DNA, 1709 bp, Homo sapiens
  source 1..1709: mol_type = unassigned DNA
gacaatgagagttgggggaaacagttcctcttctgagctgaggatggggtagaacaggcttctacagaggagtcagtccattctctgccttccactccctgtgggtcatggttcaggccaggccctctcgtgcactgccggctctgggcagaggggatcaagcgtttcctggaggacaccacggatgatggagaactgagcaagttcgtgaaggatttctcaggaaatgcgagctgccacccaccagaggctaagacctgggcatccaggccccaagtcccggagccaaggccccaggccccggacctctatgatgatgacctggagttcagacccccctcgcggccccagtcctctgacaaccagcagtacttctgtgccccagcccctctcagcccatctgccaggccccgcagcccatggggcaagcttgatccctatgattcctctgaggatgacaaggagtatgtgggctttgcaaccctccccaaccaagtccaccgaaagtccgtgaagaaaggctttgactttaccctcatggtggcaggagagtctggcctgggcaaatccacacttgtcaatagcctcttcctcactgatctgtaccgggaccggaaacttcttggtgctgaagagaggatcatgcaaactgtggagatcactaagcatgcagtggacatagaagagaagggtgtgaggctgcggctcaccattgtggacacaccaggttttggggatgcagtcaacaacacagagtgctggaagcctgtggcagaatacattgatcagcagtttgagcagtatttccgagacgagagtggcctgaaccgaaagaacatccaagacaacagggtgcactgctgcctgtacttcatctcacccttcggccatgggctccggccattggatgttgaattcatgaaggccctgcatcagcgggtcaacatcgtgcctatcctggctaaggcagacacactgacacctcccgaagtggaccacaagaaacgcaaaatccgggaggagattgagcattttggaatcaagatctatcaattcccagactgtgactctgatgaggatgaggacttcaaattgcaggaccaagccctaaaggaaagcatcccatttgcagtaattggcagcaacactgtagtagaggccagagggcggcgagttcggggtcgactctacccctggggcatcgtggaagtggaaaacccagggcactgcgactttgtgaagctgaggacaatgctggtacgtacccacatgcaggacctgaaggatgtgacacgggagacacattatgagaactaccgggcacagtgcatccagagcatgacccgcctggtggtgaaggaacggaatcgcaacaaactgactcgggaaagtggtaccgacttccccatccctgctgtcccaccagggacagatccagaaactgagaagcttatccgagagaaagatgaggagctgcggcggatgcaggagatgctacacaaaatacaaaaacagatgaaggagaactattaactggctttcagccctggatatttaaatctcctcctcttcttcctgtccatgccggcccctcccagcaccagctctgctcaggccccttcagctactgccacttcgccttacatccctgctgactgcccagagactcagaggaaataaagtttaataaatctgtaggtggcttctgg

SEQ ID NO: 18711 - DNA, 1906 bp, Homo sapiens
  source 1..1906: mol_type = unassigned DNA
cggcggtgctgcgaggtcggcgcgcagctccgccgcgggtcgctcgggcgctgtccaggcggagccggccccgcccgggctgcagccatgatcaagcgtttcctggaggacaccacggatgatggagaactgagcaagttcgtgaaggatttctcaggaaatgcgagctgccacccaccagaggctaagacctgggcatccaggccccaagtcccggagccaaggccccaggccccggacctctatgatgatgacctggagttcagacccccctcgcggccccagtcctctgacaaccagcagtacttctgtgccccagcccctctcagcccatctgccaggccccgcagcccatggggcaagcttgatccctatgattcctctgaggatgacaaggagtatgtgggctttgcaaccctccccaaccaagtccaccgaaagtccgtgaagaaaggctttgactttaccctcatggtggcaggagagtctggcctgggcaaatccacacttgtcaatagcctcttcctcactgatctgtaccgggaccggaaacttcttggtgctgaagagaggatcatgcaaactgtggagatcactaagcatgcagtggacatagaagagaagggtgtgaggctgcggctcaccattgtggacacaccaggttttggggatgcagtcaacaacacagagtgctggaagcctgtggcagaatacattgatcagcagtttgagcagtatttccgagacgagagtggcctgaaccgaaagaacatccaagacaacagggtgcactgctgcctgtacttcatctcacccttcggccatgggtatggtccaagcctgaggctcctggcaccaccgggtgctgtcaagggaacaggccaagagcaccaggggcagggctgccactagcaggtggtcacaggttcctgttccccaggctccggccattggatgttgaattcatgaaggccctgcatcagcgggtcaacatcgtgcctatcctggctaaggcagacacactgacacctcccgaagtggaccacaagaaacgcaaaatccgggaggagattgagcattttggaatcaagatctatcaattcccagactgtgactctgatgaggatgaggacttcaaattgcaggaccaagccctaaaggaaagcatcccatttgcagtaattggcagcaacactgtagtagaggccagagggcggcgagttcggggtcgactctacccctggggcatcgtggaagtggaaaacccagggcactgcgactttgtgaagctgaggacaatgctggtacgtacccacatgcaggacctgaaggatgtgacacgggagacacattatgagaactaccgggcacagtgcatccagagcatgacccgcctggtggtgaaggaacggaatcgcaagtatgaccagaagccaggacaaagctggcagggggagatcccaagcctagccttgggtgagaccaagccctacttttgttcttctataggccctgggctcaatctaagcgggtgctggggtcctcctcgccttatcaacccttttctccctttagcaaactgactcgggaaagtggtaccgacttccccatccctgctgtcccaccagggacagatccagaaactgagaagcttatccgagagaaagatgaggagctgcggcggatgcaggagatgctacacaaaatacaaaaacagatgaaggagaactattaactggctttcagccctggatatttaaatctcctcctcttcttcctgtccatgccggcccctcccagcaccagctctgctcaggccccttcagctactgccacttcgccttacatccctgctgactgcccagagactcagaggaaataaagtttaataaatctgtaggtggct

SEQ ID NO: 18712 - DNA, 2790 bp, Homo sapiens
  source 1..2790: mol_type = unassigned DNA
gaaggaggctgacccccaaaggagaggagaatctttagggtctagagctgacaatgagagttgggggaaacagttcctcttctgagctgaggatggggtagaacaggcttctacagaggagtcagtccattctctgccttccactccctgtgggtcatggttcaggccaggccctctcgtgcactgccggctctgggcagagggggtaaggagacaactcagggtgcttccccttatatgtccctcacagttgggggctgtcagaagctctggaggcccagcctttcccaggctcttccatcctccctcacctggtctctcccagctgcctcccacccacagtcagcatccactggcgggtttactcttctctcccagggcccagggtcagatttgggtgtggctcagtgtctggagtaaggggtaggatcaactatactgagcgctgggcagtgaaccctgggaattgagcaccagcagtagaatctgtaccccagtcccccagctcaccagtagtgacaggaggtacagaaccccctgctggttgacctgcctgatgcagtcagctttcttctcccctgcctacttccctcatgtccctgccccattctgatgcactgtactctccttttgggtttaatgcctctgtctgctctatcttaatcagtctggccttacttcctggcctgagacagtccctggctaggccagaaccccaggaaaggcagcctcaaaaaacatgctgctgagaaggagaccagaactggagttccttagttcccaagagcagttgccagggctctgggggtgcccagggctcttcctggaccctgggacccttcctggcatattggattggggaggcttgtgagcagatcaagcgtttcctggaggacaccacggatgatggagaactgagcaagttcgtgaaggatttctcaggaaatgcgagctgccacccaccagaggctaagacctgggcatccaggccccaagtcccggagccaaggccccaggccccggacctctatgatgatgacctggagttcagacccccctcgcggccccagtcctctgacaaccagcagtacttctgtgccccagcccctctcagcccatctgccaggccccgcagcccatggggcaagcttgatccctatgattcctctgaggtagagcctccagccctgcctttgcctttcagtgggctgctgcaggaagaccgggggcagggagcagagtgtgtgtgtgtgtgtgtgtgtgtgtgtgtgtgtgtgtgtttgtgtgtgtgtgtatctgggacctatttcagtcctgtgtcagccctagctccaagatatctgcccccaagggcactggaaatttgcagtttcagcaagggcaggaggcccagctggtggcctcagatgggaactcacagaagtctggcactgcttttttaaggctggggcaaaggcctgaaagggagagaagattggcgctgggtgccggggcccctttggctcctcaccgtgatgcattctgccttcctgtctactaggatgacaaggagtatgtgggctttgcaaccctccccaaccaagtccaccgaaagtccgtgaagaaaggctttgactttaccctcatggtggcaggagagtctggcctgggcaaatccacacttgtcaatagcctcttcctcactgatctgtaccgggaccggaaacttcttggtgctgaagagaggatcatgcaaactgtggagatcactaagcatgcagtggacatagaagagaagggtgtgaggctgcggctcaccattgtggacacaccaggttttggggatgcagtcaacaacacagagtgctggaagcctgtggcagaatacattgatcagcagtttgagcagtatttccgagacgagagtggcctgaaccgaaagaacatccaagacaacagggtgcactgctgcctgtacttcatctcacccttcggccatgggctccggccattggatgttgaattcatgaaggccctgcatcagcgggtcaacatcgtgcctatcctggctaaggcagacacactgacacctcccgaagtggaccacaagaaacgcaaaatccgggaggagattgagcattttggaatcaagatctatcaattcccagactgtgactctgatgaggatgaggacttcaaattgcaggaccaagccctaaaggaaagcatcccatttgcagtaattggcagcaacactgtagtagaggccagagggcggcgagttcggggtcgactctacccctggggcatcgtggaagtggaaaacccagggcactgcgactttgtgaagctgaggacaatgctggtacgtacccacatgcaggacctgaaggatgtgacacgggagacacattatgagaactaccgggcacagtgcatccagagcatgacccgcctggtggtgaaggaacggaatcgcaacaaactgactcgggaaagtggtaccgacttccccatccctgctgtcccaccagggacagatccagaaactgagaagcttatccgagagaaagatgaggagctgcggcggatgcaggagatgctacacaaaatacaaaaacagatgaaggagaactattaactggctttcagccctggatatttaaatctcctcctcttcttcctgtccatgccggcccctcccagcaccagctctgctcaggccccttcagctactgccacttcgccttacatccctgctgactgcccagagactcagaggaaataaagtttaataaatctgtaggtggc

SEQ ID NO: 18713 - DNA, 2195 bp, Homo sapiens
  source 1..2195: mol_type = unassigned DNA
tttctgacagggagtctgaagcgtgggacatggaccgttcactgggatggcaagggaattctgtccctgaggacaggactgaagctgggatcaagcgtttcctggaggacaccacggatgatggagaactgagcaagttcgtgaaggatttctcaggaaatgcgagctgccacccaccagaggctaagacctgggcatccaggccccaagtcccggagccaaggccccaggccccggacctctatgatgatgacctggagttcagacccccctcgcggccccagtcctctgacaaccagcagatgacaaggagtatgtgggctttgcaaccctccccaaccaagtccaccgaaagtccgtgaagaaaggctttgactttaccctcatggtggcaggagagtctggcctgggcaaatccacacttgtcaatagcctcttcctcactgatctgtaccgggaccggaaacttcttggtgctgaagagaggatcatgcaaactgtggagatcactaagcatgcagtggacatagaagagaagggtgtgaggctgcggctcaccattgtggacacaccaggttttggggatgcagtcaacaacacagagtgctggaagcctgtggcagaatacattgatcagcagtttgagcagtatttccgagacgagagtggcctgaaccgaaagaacatccaagacaacagggtgcactgctgcctgtacttcatctcacccttcggccatgggtatggtccaagcctgaggctcctggcaccaccgggtgctgtcaagggaacaggccaagagcaccaggggcagggctgccactagcaggtggtcacaggttcctgttccccaggctccggccattggatgttgaattcatgaaggccctgcatcagcgggtcaacatcgtgcctatcctggctaaggcagacacactgacacctcccgaagtggaccacaagaaacgcaaagtgagggaagctggtggtgggaggggatcaggtgggcttctagaaaggatgtggtccccagaactgtgggcccctcatctgtttgtcagatccgggaggagattgagcattttggaatcaagatctatcaattcccagactgtgactctgatgaggatgaggacttcaaattgcaggaccaagccctaaaggtggggccactctagggcatcccattcctatcttatttcttccgggtagaaaaagggagtagaattctatattcaggctatcagggtgggaaaggaccctggcttcctagaatgaagcagagaagatgacgatacaggtggaaagaaagaggtgagaacagagggtgctgacaggcacccctaacctcttccaggaaagcatcccatttgcagtaattggcagcaacactgtagtagaggccagagggcggcgagttcggggtcgactctacccctggggcatcgtggaaggtaaagcactgagcctgtgaccagggtatctccttgccctcagtggctctcccctacctatgcctctggctgacccctagccttgctatgcagtggaaaacccagggcactgcgactttgtgaagctgaggacaatgctggtacgtacccacatgcaggacctgaaggatgtgacacgggagacacattatgagaactaccgggcacagtgcatccagagcatgacccgcctggtggtgaaggaacggaatcgcaagtatgaccagaagccaggacaaagctggcagggggagatcccaagcctagccttgggtgagaccaagccctacttttgttcttctataggccctgggctcaatctaagcgggtgctggggtcctcctcgccttatcaacccttttctccctttagcaaactgactcgggaaagtggtaccgacttccccatccctgctgtcccaccagggacagatccagaaactgagaagcttatccgagagaaagatgaggagctgcggcggatgcaggagatgctacacaaaatacaaaaacagatgaaggagaactattaactggctttcagccctggatatttaaatctcctcctcttcttcctgtccatgccggcccctcccagcaccagctctgctcaggccccttcagctactgccacttcgccttacatccctgctgactgcccagagactcagaggaaataaagtttaataaatctgtaggtggc

SEQ ID NO: 18714 - DNA, 1362 bp, Homo sapiens
  source 1..1362: mol_type = unassigned DNA
gacaacaacagcatcaaaacaaggctgtttctgtgtgtgaggaactttgcctgggagataaaattagacctagagctttctgacagggagtctgaagcgtgggacatggaccgttcactgggatggcaagggaattctgtccctgaggacaggactgaagctggggatgacaaggagtatgtgggctttgcaaccctccccaaccaagtccaccgaaagtccgtgaagaaaggctttgactttaccctcatggtggcaggagagtctggcctgggcaaatccacacttgtcaatagcctcttcctcactgatctgtaccgggaccggaaacttcttggtgctgaagagaggatcatgcaaactgtggagatcactaagcatgcagtggacatagaagagaagggtgtgaggctgcggctcaccattgtggacacaccaggttttggggatgcagtcaacaacacagagtgctggaagcctgtggcagaatacattgatcagcagtttgagcagtatttccgagacgagagtggcctgaaccgaaagaacatccaagacaacagggtgcactgctgcctgtacttcatctcacccttcggccatgggctccggccattggatgttgaattcatgaaggccctgcatcagcgggtcaacatcgtgcctatcctggctaaggcagacacactgacacctcccgaagtggaccacaagaaacgcaaaatccgggaggagattgagcattttggaatcaagatctatcaattcccagactgtgactctgatgaggatgaggacttcaaattgcaggaccaagccctaaaggaaagcatcccatttgcagtaattggcagcaacactgtagtagaggccagagggcggcgagttcggggtcgactctacccctggggcatcgtggaagtggaaaacccagggcactgcgactttgtgaagctgaggacaatgctggtacgtacccacatgcaggacctgaaggatgtgacacgggagacacattatgagaactaccgggcacagtgcatccagagcatgacccgcctggtggtgaaggaacggaatcgcaaggacagatccagaaactgagaagcttatccgagagaaagatgaggagctgcggcggatgcaggagatgctacacaaaatacaaaaacagatgaaggagaactattaactggctttcagccctggatatttaaatctcctcctcttcttcctgtccatgccggcccctcccagcaccagctctgctcaggccccttcagctactgccacttcgccttacatccctgctgactgcccagagactcagaggaaataaagtttaataaatctgtaggtggc

SEQ ID NO: 18715 - DNA, 2151 bp, Homo sapiens
  source 1..2151: mol_type = unassigned DNA
aggcttttttggcccctgccagagacagaagggggtcaaagagaaagggaaaggagcaagccaggaagccagacaacaacagcatcaaaacaaggctgtttctgtgtgtgaggaactttgcctgggagataaaattagacctagagctttctgacagggagtctgaagcgtgggacatggaccgttcactgggatggcaagggaattctgtccctgaggacaggactgaagctgggatcaagcgtttcctggaggacaccacggatgatggagaactgagcaagttcgtgaaggatttctcaggaaatgcgagctgccacccaccagaggctaagacctgggcatccaggccccaagtcccggagccaaggccccaggccccggacctctatgatgatgacctggagttcagacccccctcgcggccccagtcctctgacaaccagcagtacttctgtgccccagcccctctcagcccatctgccaggccccgcagcccatggggcaagcttgatccctatgattcctctgaggtagagcctccagccctgcctttgcctttcagtgggctgctgcaggaagaccgggggcagggagcagagtgtgtgtgtgtgtgtgtgtgtgtgtgtgtgtgtgtgtgtttgtgtgtgtgtgtatctgggacctatttcagtcctgtgtcagccctagctccaagatatctgcccccaagggcactggaaatttgcagtttcagcaagggcaggaggcccagctggtggcctcagatgggaactcacagaagtctggcactgcttttttaaggctggggcaaaggcctgaaagggagagaagattggcgctgggtgccggggcccctttggctcctcaccgtgatgcattctgccttcctgtctactaggatgacaaggagtatgtgggctttgcaaccctccccaaccaagtccaccgaaagtccgtgaagaaaggctttgactttaccctcatggtggcaggagagtctggcctgggcaaatccacacttgtcaatagcctcttcctcactgatctgtaccgggaccggaaacttcttggtgctgaagagaggatcatgcaaactgtggagatcactaagcatgcagtggacatagaagagaagggtgtgaggctgcggctcaccattgtggacacaccaggttttggggatgcagtcaacaacacagagtgctggaagcctgtggcagaatacattgatcagcagtttgagcagtatttccgagacgagagtggcctgaaccgaaagaacatccaagacaacagggtgcactgctgcctgtacttcatctcacccttcggccatgggctccggccattggatgttgaattcatgaaggccctgcatcagcgggtcaacatcgtgcctatcctggctaaggcagacacactgacacctcccgaagtggaccacaagaaacgcaaaatccgggaggagattgagcattttggaatcaagatctatcaattcccagactgtgactctgatgaggatgaggacttcaaattgcaggaccaagccctaaaggaaagcatcccatttgcagtaattggcagcaacactgtagtagaggccagagggcggcgagttcggggtcgactctacccctggggcatcgtggaagtggaaaacccagggcactgcgactttgtgaagctgaggacaatgctggtacgtacccacatgcaggacctgaaggatgtgacacgggagacacattatgagaactaccgggcacagtgcatccagagcatgacccgcctggtggtgaaggaacggaatcgcaacaaactgactcgggaaagtggtaccgacttccccatccctgctgtcccaccagggacagatccagaaactgagaagcttatccgagagaaagatgaggagctgcggcggatgcaggagatgctacacaaaatacaaaaacagatgaaggagaactattaactggctttcagccctggatatttaaatctcctcctcttcttcctgtccatgccggcccctcccagcaccagctctgctcaggccccttcagctactgccacttcgccttacatccctgctgactgcccagagactcagaggaaataaagtttaataaatctgtaggtggc

SEQ ID NO: 18716 - DNA, 1784 bp, Homo sapiens
  source 1..1784: mol_type = unassigned DNA
caggcttttttggcccctgccagagacagaagggggtcaaagagaaagggaaaggagcaagccaggaagccagacaacaacagcatcaaaacaaggctgtttctgtgtgtgaggaactttgcctgggagataaaattagacctagagctttctgacagggagtctgaagcgtgggacatggaccgttcactgggatggcaagggaattctgtccctgaggacaggactgaagctgggatcaagcgtttcctggaggacaccacggatgatggagaactgagcaagttcgtgaaggatttctcaggaaatgcgagctgccacccaccagaggctaagacctgggcatccaggccccaagtcccggagccaaggccccaggccccggacctctatgatgatgacctggagttcagacccccctcgcggccccagtcctctgacaaccagcagtacttctgtgccccagcccctctcagcccatctgccaggccccgcagcccatggggcaagcttgatccctatgattcctctgaggatgacaaggagtatgtgggctttgcaaccctccccaaccaagtccaccgaaagtccgtgaagaaaggctttgactttaccctcatggtggcaggagagtctggcctgggcaaatccacacttgtcaatagcctcttcctcactgatctgtaccgggaccggaaacttcttggtgctgaagagaggatcatgcaaactgtggagatcactaagcatgcagtggacatagaagagaagggtgtgaggctgcggctcaccattgtggacacaccaggttttggggatgcagtcaacaacacagagtgctggaagcctgtggcagaatacattgatcagcagtttgagcagtatttccgagacgagagtggcctgaaccgaaagaacatccaagacaacagggtgcactgctgcctgtacttcatctcacccttcggccatgggctccggccattggatgttgaattcatgaaggccctgcatcagcgggtcaacatcgtgcctatcctggctaaggcagacacactgacacctcccgaagtggaccacaagaaacgcaaaatccgggaggagattgagcattttggaatcaagatctatcaattcccagactgtgactctgatgaggatgaggacttcaaattgcaggaccaagccctaaaggaaagcatcccatttgcagtaattggcagcaacactgtagtagaggccagagggcggcgagttcggggtcgactctacccctggggcatcgtggaagtggaaaacccagggcactgcgactttgtgaagctgaggacaatgctggtacgtacccacatgcaggacctgaaggatgtgacacgggagacacattatgagaactaccgggcacagtgcatccagagcatgacccgcctggtggtgaaggaacggaatcgcaacaaactgactcgggaaagtggtaccgacttccccatccctgctgtcccaccagggacagatccagaaactgagaagcttatccgagagaaagatgaggagctgcggcggatgcaggagatgctacacaaaatacaaaaacagatgaaggagaactattaactggctttcagccctggatatttaaatctcctcctcttcttcctgtccatgccggcccctcccagcaccagctctgctcaggccccttcagctactgccacttcgccttacatccctgctgactgcccagagactcagaggaaataaagtttaataaatctgtaggtggc

SEQ ID NO: 18717 - DNA, 1792 bp, Homo sapiens
  source 1..1792: mol_type = unassigned DNA
cggcggtgctgcgaggtcggcgcgcagctccgccgcgggtcgctcgggcgctgtccaggcggagccggccccgcccgggctgcagccatgatcaagcgtttcctggaggacaccacggatgatggagaactgagcaagttcgtgaaggatttctcaggaaatgcgagctgccacccaccagaggctaagacctgggcatccaggccccaagtcccggagccaaggccccaggccccggacctctatgatgatgacctggagttcagacccccctcgcggccccagtcctctgacaaccagcagtacttctgtgccccagcccctctcagcccatctgccaggccccgcagcccatggggcaagcttgatccctatgattcctctgaggatgacaaggagtatgtgggctttgcaaccctccccaaccaagtccaccgaaagtccgtgaagaaaggctttgactttaccctcatggtggcaggagagtctggcctgggcaaatccacacttgtcaatagcctcttcctcactgatctgtaccgggaccggaaacttcttggtgctgaagagaggatcatgcaaactgtggagatcactaagcatgcagtggacatagaagagaagggtgtgaggctgcggctcaccattgtggacacaccaggttttggggatgcagtcaacaacacagagtgctggaagcctgtggcagaatacattgatcagcagtttgagcagtatttccgagacgagagtggcctgaaccgaaagaacatccaagacaacagggtgcactgctgcctgtacttcatctcacccttcggccatgggctccggccattggatgttgaattcatgaaggccctgcatcagcgggtcaacatcgtgcctatcctggctaaggcagacacactgacacctcccgaagtggaccacaagaaacgcaaaatccgggaggagattgagcattttggaatcaagatctatcaattcccagactgtgactctgatgaggatgaggacttcaaattgcaggaccaagccctaaaggaaagcatcccatttgcagtaattggcagcaacactgtagtagaggccagagggcggcgagttcggggtcgactctacccctggggcatcgtggaagtggaaaacccagggcactgcgactttgtgaagctgaggacaatgctggtacgtacccacatgcaggacctgaaggatgtgacacgggagacacattatgagaactaccgggcacagtgcatccagagcatgacccgcctggtggtgaaggaacggaatcgcaagtatgaccagaagccaggacaaagctggcagggggagatcccaagcctagccttgggtgagaccaagccctacttttgttcttctataggccctgggctcaatctaagcgggtgctggggtcctcctcgccttatcaacccttttctccctttagcaaactgactcgggaaagtggtaccgacttccccatccctgctgtcccaccagggacagatccagaaactgagaagcttatccgagagaaagatgaggagctgcggcggatgcaggagatgctacacaaaatacaaaaacagatgaaggagaactattaactggctttcagccctggatatttaaatctcctcctcttcttcctgtccatgccggcccctcccagcaccagctctgctcaggccccttcagctactgccacttcgccttacatccctgctgactgcccagagactcagaggaaataaagtttaataaatctgtaggtggc

SEQ ID NO: 18718 - DNA, 1795 bp, Homo sapiens
  source 1..1795: mol_type = unassigned DNA
acttgcactaggaagggattgggccaggtttgcccaagtccactgggcatctttagtaaatttctctttttctcctcctattggcactctctgaattccatttgctgccccctgggaatgcctggcttctactctgttatgacagatgaggagctctccagccctgttcagcagcagagctgctccccagaagccaagaaaagaaggctcccaagcagctgggctgctggtcttctctgactctctggagatcaagcgtttcctggaggacaccacggatgatggagaactgagcaagttcgtgaaggatttctcaggaaatgcgagctgccacccaccagaggctaagacctgggcatccaggccccaagtcccggagccaaggccccaggccccggacctctatgatgatgacctggagttcagacccccctcgcggccccagtcctctgacaaccagcagtacttctgtgccccagcccctctcagcccatctgccaggccccgcagcccatggggcaagcttgatccctatgattcctctgaggatgacaaggagtatgtgggctttgcaaccctccccaaccaagtccaccgaaagtccgtgaagaaaggctttgactttaccctcatggtggcaggagagtctggcctgggcaaatccacacttgtcaatagcctcttcctcactgatctgtaccgggaccggaaacttcttggtgctgaagagaggatcatgcaaactgtggagatcactaagcatgcagtggacatagaagagaagggtgtgaggctgcggctcaccattgtggacacaccaggttttggggatgcagtcaacaacacagagtgctggaagcctgtggcagaatacattgatcagcagtttgagcagtatttccgagacgagagtggcctgaaccgaaagaacatccaagacaacagggtgcactgctgcctgtacttcatctcacccttcggccatgggctccggccattggatgttgaattcatgaaggccctgcatcagcgggtcaacatcgtgcctatcctggctaaggcagacacactgacacctcccgaagtggaccacaagaaacgcaaaatccgggaggagattgagcattttggaatcaagatctatcaattcccagactgtgactctgatgaggatgaggacttcaaattgcaggaccaagccctaaaggaaagcatcccatttgcagtaattggcagcaacactgtagtagaggccagagggcggcgagttcggggtcgactctacccctggggcatcgtggaagtggaaaacccagggcactgcgactttgtgaagctgaggacaatgctggtacgtacccacatgcaggacctgaaggatgtgacacgggagacacattatgagaactaccgggcacagtgcatccagagcatgacccgcctggtggtgaaggaacggaatcgcaacaaactgactcgggaaagtggtaccgacttccccatccctgctgtcccaccagggacagatccagaaactgagaagcttatccgagagaaagatgaggagctgcggcggatgcaggagatgctacacaaaatacaaaaacagatgaaggagaactattaactggctttcagccctggatatttaaatctcctcctcttcttcctgtccatgccggcccctcccagcaccagctctgctcaggccccttcagctactgccacttcgccttacatccctgctgactgcccagagactcagaggaaataaagtttaataaatctgtaggtg

SEQ ID NO: 18719 - DNA, 1396 bp, Homo sapiens
  source 1..1396: mol_type = unassigned DNA
ggaaaggagcaagccaggaagccagacaacaacagcatcaaaacaaggctgtttctgtgtgtgaggaactttgcctgggagataaaattagacctagagctttctgacagggagtctgaagcgtgggacatggaccgttcactgggatggcaagggaattctgtccctgaggacaggactgaagctggggatgacaaggagtatgtgggctttgcaaccctccccaaccaagtccaccgaaagtccgtgaagaaaggctttgactttaccctcatggtggcaggagagtctggcctgggcaaatccacacttgtcaatagcctcttcctcactgatctgtaccgggaccggaaacttcttggtgctgaagagaggatcatgcaaactgtggagatcactaagcatgcagtggacatagaagagaagggtgtgaggctgcggctcaccattgtggacacaccaggttttggggatgcagtcaacaacacagagtgctggaagcctgtggcagaatacattgatcagcagtttgagcagtatttccgagacgagagtggcctgaaccgaaagaacatccaagacaacagggtgcactgctgcctgtacttcatctcacccttcggccatgggctccggccattggatgttgaattcatgaaggccctgcatcagcgggtcaacatcgtgcctatcctggctaaggcagacacactgacacctcccgaagtggaccacaagaaacgcaaaatccgggaggagattgagcattttggaatcaagatctatcaattcccagactgtgactctgatgaggatgaggacttcaaattgcaggaccaagccctaaaggaaagcatcccatttgcagtaattggcagcaacactgtagtagaggccagagggcggcgagttcggggtcgactctacccctggggcatcgtggaagtggaaaacccagggcactgcgactttgtgaagctgaggacaatgctggtacgtacccacatgcaggacctgaaggatgtgacacgggagacacattatgagaactaccgggcacagtgcatccagagcatgacccgcctggtggtgaaggaacggaatcgcaacaaactgactcgggaaagtggtaccgacttccccatccctgctgtcccaccagggacagatccagaaactgagaagcttatccgagagaaagatgaggagctgcggcggatgcaggagatgctacacaaaatacaaaaacagatgaaggagaactattaactggctttcagccctggatatttaaatctcctcctcttcttcctgtccatgccggcccctcccagcaccagctctgctcaggccccttcagctactgccacttcgccttacatccctgctgactgcc

SEQ ID NO: 18720 - DNA, 1530 bp, Homo sapiens
  source 1..1530: mol_type = unassigned DNA
ggtgctgcgaggtcggcgcgcagctccgccgcgggtcgctcgggcgctgtccaggcggagccggccccgcccgggctgcagccatgatcaagcgtttcctggaggacaccacggatgatggagaactgagcaagttcgtgaaggatttctcaggaaatgcgagctgccacccaccagaggctaagacctgggcatccaggccccaagtcccggagccaaggccccaggccccggacctctatgatgatgacctggagttcagacccccctcgcggccccagtcctctgacaaccagcagtacttctgtgccccagcccctctcagcccatctgccaggccccgcagcccatggggcaagcttgatccctatgattcctctgaggatgacaaggagtatgtgggctttgcaaccctccccaaccaagtccaccgaaagtccgtgaagaaaggctttgactttaccctcatggtggcaggagagtctggcctgggcaaatccacacttgtcaatagcctcttcctcactgatctgtaccgggaccggaaacttcttggtgctgaagagaggatcatgcaaactgtggagatcactaagcatgcagtggacatagaagagaagggtgtgaggctgcggctcaccattgtggacacaccaggttttggggatgcagtcaacaacacagagtgctggaagcctgtggcagaatacattgatcagcagtttgagcagtatttccgagacgagagtggcctgaaccgaaagaacatccaagacaacagggtgcactgctgcctgtacttcatctcacccttcggccatgggctccggccattggatgttgaattcatgaaggccctgcatcagcgggtcaacatcgtgcctatcctggctaaggcagacacactgacacctcccgaagtggaccacaagaaacgcaaaatccgggaggagattgagcattttggaatcaagatctatcaattcccagactgtgactctgatgaggatgaggacttcaaattgcaggaccaagccctaaaggaaagcatcccatttgcagtaattggcagcaacactgtagtagaggccagagggcggcgagttcggggtcgactctacccctggggcatcgtggaagtggaaaacccagggcactgcgactttgtgaagctgaggacaatgctggtacgtacccacatgcaggacctgaaggatgtgacacgggagacacattatgagaactaccgggcacagtgcatccagagcatgacccgcctggtggtgaaggaacggaatcgcaacaaactgactcgggaaagtggtaccgacttccccatccctgctgtcccaccagggacagatccagaaactgagaagcttatccgagagaaagatgaggagctgcggcggatgcaggagatgctacacaaaatacaaaaacagatgaaggagaactattaactggctttcagccctggatatttaaatctcctcctcttcttcctgtccatgccggcccctcccagca

SEQ ID NO: 18721 - DNA, 1597 bp, Homo sapiens
  source 1..1597: mol_type = unassigned DNA
acttgcactaggaagggattgggccaggtttgcccaagtccactgggcatctttagtaaatttctctttttctcctcctattggcactctctgaattccatttgctgccccctgggaatgcctggcttctactctgttatgacagatgaggagatcaagcgtttcctggaggacaccacggatgatggagaactgagcaagttcgtgaaggatttctcaggaaatgcgagctgccacccaccagaggctaagacctgggcatccaggccccaagtcccggagccaaggccccaggccccggacctctatgatgatgacctggagttcagacccccctcgcggccccagtcctctgacaaccagcagtacttctgtgccccagcccctctcagcccatctgccaggccccgcagcccatggggcaagcttgatccctatgattcctctgaggatgacaaggagtatgtgggctttgcaaccctccccaaccaagtccaccgaaagtccgtgaagaaaggctttgactttaccctcatggtggcaggagagtctggcctgggcaaatccacacttgtcaatagcctcttcctcactgatctgtaccgggaccggaaacttcttggtgctgaagagaggatcatgcaaactgtggagatcactaagcatgcagtggacatagaagagaagggtgtgaggctgcggctcaccattgtggacacaccaggttttggggatgcagtcaacaacacagagtgctggaagcctgtggcagaatacattgatcagcagtttgagcagtatttccgagacgagagtggcctgaaccgaaagaacatccaagacaacagggtgcactgctgcctgtacttcatctcacccttcggccatgggctccggccattggatgttgaattcatgaaggccctgcatcagcgggtcaacatcgtgcctatcctggctaaggcagacacactgacacctcccgaagtggaccacaagaaacgcaaaatccgggaggagattgagcattttggaatcaagatctatcaattcccagactgtgactctgatgaggatgaggacttcaaattgcaggaccaagccctaaaggaaagcatcccatttgcagtaattggcagcaacactgtagtagaggccagagggcggcgagttcggggtcgactctacccctggggcatcgtggaagtggaaaacccagggcactgcgactttgtgaagctgaggacaatgctggtacgtacccacatgcaggacctgaaggatgtgacacgggagacacattatgagaactaccgggcacagtgcatccagagcatgacccgcctggtggtgaaggaacggaatcgcaacaaactgactcgggaaagtggtaccgacttccccatccctgctgtcccaccagggacagatccagaaactgagaagcttatccgagagaaagatgaggagctgcggcggatgcaggagatgctacacaaaatacaaaaacagatgaaggagaactattaactggctttcagccctggatatttaaatctcctcctcttcttcctgtccatgccggcccctcccagca

SEQ ID NO: 18722 - DNA, 1731 bp, Homo sapiens
  source 1..1731: mol_type = unassigned DNA
aaagagaaagggaaaggagcaagccaggaagccagacaacaacagcatcaaaacaaggctgtttctgtgtgtgaggaactttgcctgggagataaaattagacctagagctttctgacagggagtctgaagcgtgggacatggaccgttcactgggatggcaagggaattctgtccctgaggacaggactgaagctgggatcaagcgtttcctggaggacaccacggatgatggagaactgagcaagttcgtgaaggatttctcaggaaatgcgagctgccacccaccagaggctaagacctgggcatccaggccccaagtcccggagccaaggccccaggccccggacctctatgatgatgacctggagttcagacccccctcgcggccccagtcctctgacaaccagcagtacttctgtgccccagcccctctcagcccatctgccaggccccgcagcccatggggcaagcttgatccctatgattcctctgaggatgacaaggagtatgtgggctttgcaaccctccccaaccaagtccaccgaaagtccgtgaagaaaggctttgactttaccctcatggtggcaggagagtctggcctgggcaaatccacacttgtcaatagcctcttcctcactgatctgtaccgggaccggaaacttcttggtgctgaagagaggatcatgcaaactgtggagatcactaagcatgcagtggacatagaagagaagggtgtgaggctgcggctcaccattgtggacacaccaggttttggggatgcagtcaacaacacagagtgctggaagcctgtggcagaatacattgatcagcagtttgagcagtatttccgagacgagagtggcctgaaccgaaagaacatccaagacaacagggtgcactgctgcctgtacttcatctcacccttcggccatgggctccggccattggatgttgaattcatgaaggccctgcatcagcgggtcaacatcgtgcctatcctggctaaggcagacacactgacacctcccgaagtggaccacaagaaacgcaaaatccgggaggagattgagcattttggaatcaagatctatcaattcccagactgtgactctgatgaggatgaggacttcaaattgcaggaccaagccctaaaggaaagcatcccatttgcagtaattggcagcaacactgtagtagaggccagagggcggcgagttcggggtcgactctacccctggggcatcgtggaagtggaaaacccagggcactgcgactttgtgaagctgaggacaatgctggtacgtacccacatgcaggacctgaaggatgtgacacgggagacacattatgagaactaccgggcacagtgcatccagagcatgacccgcctggtggtgaaggaacggaatcgcaagtatgaccagaagccaggacaaagctggcagggggagatcccaagcctagccttgggtgagaccaagccctacttttgttcttctataggccctgggctcaatctaagcgggtgctggggtcctcctcgccttatcaacccttttctccctttagcaaactgactcgggaaagtggtaccgacttccccatccctgctgtcccaccagggacagatccagaaactgagaagcttatccgagagaaagatgaggagctgcggcggatgcaggagatgctacacaaaatacaaaaacagatgaaggagaactattaa

SEQ ID NO: 18723 - DNA, 952 bp, Homo sapiens
  source 1..952: mol_type = unassigned DNA
gtgacggcggtgctgcgaggtcggcgcgcagctccgccgcgggtcgctcgggcgctgtccaggcggagccggccccgcccgggctgcagccatggatgacaaggagtatgtgggctttgcaaccctccccaaccaagtccaccgaaagtccgtgaagaaaggctttgactttaccctcatggtggcaggagagtctggcctgggcaaatccacacttgtcaatagcctcttcctcactgatctgtaccgggaccggaaacttcttggtgctgaagagaggatcatgcaaactgtggagatcactaagcatgcagtggacatagaagagaagggtgtgaggctgcggctcaccattgtggacacaccaggttttggggatgcagtcaacaacacagagtgctggaagcctgtggcagaatacattgatcagcagtttgagcagtatttccgagacgagagtggcctgaaccgaaagaacatccaagacaacagggtgcactgctgcctgtacttcatctcacccttcggccatgggtatggtccaagcctgaggctcctggcaccaccgggtgctgtcaagggaacaggccaagagcaccaggggcagggctgccactagcaggtggtcacaggttcctgttccccaggctccggccattggatgttgaattcatgaaggccctgcatcagcgggtcaacatcgtgcctatcctggctaaggcagacacactgacacctcccgaagtggaccacaagaaacgcaaagtgagggaagctggtggtgggaggggatcaggtgggcttctagaaaggatgtggtccccagaactgtgggcccctcatctgtttgtcagatccgggaggagattgagcattttggaatcaagatctatcaattcccagactgtgactctgatgaggatgaggacttcaaattgcaggaccaagccct

SEQ ID NO: 18724 - DNA, 724 bp, Homo sapiens
  source 1..724: mol_type = unassigned DNA
ggaggcgggagggtgacggcggtgctgcgaggtcggcgcgcagctccgccgcgggtcgctcgggcgctgtccaggcggagccggccccgcccgggctgcagccatggggccagtaccaacttcatttggaaaacgcagaggaggcccacaaacactgcctgcctcaccaggagggatggatgacaaggagtatgtgggctttgcaaccctccccaaccaagtccaccgaaagtccgtgaagaaaggctttgactttaccctcatggtggcaggagagtctggcctgggcaaatccacacttgtcaatagcctcttcctcactgatctgtaccgggaccggaaacttcttggtgctgaagagaggatcatgcaaactgtggagatcactaagcatgcagtggacatagaagagaagggtgtgaggctgcggctcaccattgtggacacaccaggttttggggatgcagtcaacaacacagagtgctggaagcctgtggcagaatacattgatcagcagtttgagcagtatttccgagacgagagtggcctgaaccgaaagaacatccaagacaacagggtgcactgctgcctgtacttcatctcacccttcggccatgggctccggccattggatgttgaattcatgaaggccctgcatcagcgggtcaacatcgtgcctatcctggctaaggcagacacactgacacctcccgaagtggaccac

SEQ ID NO: 18725 - DNA, 632 bp, Homo sapiens
  source 1..632: mol_type = unassigned DNA
aaagagaaagggaaaggagcaagccaggaagccagacaacaacagcatcaaaacaaggctgtttctgtgtgtgaggaactttgcctgggagataaaattagacctagagctttctgacagggagtctgaagcgtgggacatggaccgttcactgggatggcaagggaattctgtccctgaggacaggactgaagctgggatcaagcgtttcctggaggacaccacggatgatggagaactgagcaagatgacaaggagtatgtgggctttgcaaccctccccaaccaagtccaccgaaagtccgtgaagaaaggctttgactttaccctcatggtggcaggagagtctggcctgggcaaatccacacttgtcaatagcctcttcctcactgatctgtaccgggaccggaaacttcttggtgctgaagagaggatcatgcaaactgtggagatcactaagcatgcagtggacatagaagagaagggtgtgaggctgcggctcaccattgtggacacaccaggttttggggatgcagtcaacaacacagagtgctggaagcctgtggcagaatacattgatcagcagtttgagcagtatttccgagacgagagtggcctgaaccgaaagaacat

SEQ ID NO: 18726 - DNA, 508 bp, Homo sapiens
  source 1..508: mol_type = unassigned DNA
gaggcgggagggtgacggcggtgctgcgaggtcggcgcgcagctccgccgcgggtcgctcgggcgctgtccaggcggagccggccccgcccgggctgcagccatgatcaagcgtttcctggaggacaccacggatgatggagaactgagcaagatgacaaggagtatgtgggctttgcaaccctccccaaccaagtccaccgaaagtccgtgaagaaaggctttgactttaccctcatggtggcaggagagtctggcctgggcaaatccacacttgtcaatagcctcttcctcactgatctgtaccgggaccggaaacttcttggtgctgaagagaggatcatgcaaactgtggagatcactaagcatgcagtggacatagaagagaagggtgtgaggctgcggctcaccattgtggacacaccaggttttggggatgcagtcaacaacacagagtgctggaagcctgtggcagaatacattgatcagcagtttgagcagtatttccg

SEQ ID NO: 18727 - DNA, 3544 bp, Homo sapiens
  source 1..3544: mol_type = unassigned DNA
aatcatgatgccaggacagcaggcatagactgggatgtatggtcaccactggacctcacaaatgtcataggtgagaaaagccttgggttaggcttgcctcaggatagcctcttctggtcacccagcctccatctgctggttctagttttgggctaaggggcctcttttcctcccctctgtccaggcgagcactggagactatggctataagcaggtgtgaagacttcagaggcaacagcctggcagtagctcctagcagacttttccctctaacctccctatctcaacctcttccctctggcatacacctggcagtatgcatatctgcctccctcaattcttccctttgcaggaagactgtggctatcttatcttcctcactctagctgggactccacagtggtctggggtagtccccactggcttggctaaccctcagagagtgagtcagcctctgcagccggcccttgtccattgtctgggggtggcacgtgggtattgtgaggcagagctgagcccagcactgccaggcaccccacgaaggaggctgacccccaaaggagaggagaatctttagggtctagagctgacaatgagagttgggggaaacagttcctcttctgagctgaggatggggtagaacaggcttctacagaggagtcagtccattctctgccttccactccctgtgggtcatggttcaggccaggccctctcgtgcactgccggctctgggcagagggggtaaggagacaactcagggtgcttccccttatatgtccctcacagttgggggctgtcagaagctctggaggcccagcctttcccaggctcttccatcctccctcacctggtctctcccagctgcctcccacccacagtcagcatccactggcgggtttactcttctctcccagggcccagggtcagatttgggtgtggctcagtgtctggagtaaggggtaggatcaactatactgagcgctgggcagtgaaccctgggaattgagcaccagcagtagaatctgtaccccagtcccccagctcaccagtagtgacaggaggtacagaaccccctgctggttgacctgcctgatgcagtcagctttcttctcccctgcctacttccctcatgtccctgccccattctgatgcactgtactctccttttgggtttaatgcctctgtctgctctatcttaatcagtctggccttacttcctggcctgagacagtccctggctaggccagaaccccaggaaaggcagcctcaaaaaacatgctgctgagaaggagaccagaactggagttccttagttcccaagagcagttgccagggctctgggggtgcccagggctcttcctggaccctgggacccttcctggcatattggattggggaggcttgtgagcaggtgagggagggatggtgagcacttcctctgtcttggctgcagtttctttttcttctaaccacaagtgctttccctttccctcttgccttctcctgtcttctgtctccttcctcattcttcccttccggctcccttcccggcaccacccatctattctacccaccccgcttcccccagatcaagcgtttcctggaggacaccacggatgatggagaactgagcaagttcgtgaaggatttctcaggaaatgcgagctgccacccaccagaggctaagacctgggcatccaggccccaagtcccggagccaaggccccaggccccggacctctatgatgatgacctggagttcagacccccctcgcggccccagtcctctgacaaccagcagtacttctgtgccccagcccctctcagcccatctgccaggccccgcagcccatggggcaagcttgatccctatgattcctctgaggtagagcctccagccctgcctttgcctttcagtgggctgctgcaggaagaccgggggcagggagcagagtgtgtgtgtgtgtgtgtgtgtgtgtgtgtgtgtgtgtgtttgtgtgtgtgtgtatctgggacctatttcagtcctgtgtcagccctagctccaagatatctgcccccaagggcactggaaatttgcagtttcagcaagggcaggaggcccagctggtggcctcagatgggaactcacagaagtctggcactgcttttttaaggctggggcaaaggcctgaaagggagagaagattggcgctgggtgccggggcccctttggctcctcaccgtgatgcattctgccttcctgtctactaggatgacaaggagtatgtgggctttgcaaccctccccaaccaagtccaccgaaagtccgtgaagaaaggctttgactttaccctcatggtggcaggagagtctggcctgggcaaatccacacttgtcaatagcctcttcctcactgatctgtaccgggaccggaaacttcttggtgctgaaggtaaggaaaggagaggacaatcaggcagacttgccttgggaaattaaactcactccagagtctgggggatggggctctcccccacatgcaggaaaccatggcctcctagagagactgacagcagctctccataggcctaactgcctggcagcccaccagccagctccctaaagatttgggtgctgaagcagggcagagaccagagtcttgctctctgaatgagtctctgacccccaaggattccaggaatccaagaaaaaaaccgggagcagagaagaggctggggccagagccaacagccaccggcatttcctgtgttgggaaatgtactccttgctggttcccagagaacagtcccccagacagcttgggagtggagaagggggcagtgtggattaggcagtctgagcaacaaggctggttggggtgggcggttcatcctgactgggcaggtccctgcccttgccctggcctcagtttcccctttctccagagaggatcatgcaaactgtggagatcactaagcatgcagtggacatagaagagaagggtgtgaggctgcggctcaccattgtggacacaccaggttttggggatgcagtcaacaacacagagtggtatgtctgagtaagcacaatcccagctgcccctgagccacccttctccatacacaggtacacacgtaggcccagatatatccatacttatcaggaggaagcggtctatgaccttgagcatgtgacttcccttactggacagccatctcctcctttataaagtaagagggaaaggattggaatagatgatttttaatgttccttccaattctgccctatgattctataatggggtagggacataagaaagaagaggctgaggcggaagtatcacttgaggccaggagttcaaggccagcctgggcaacatagtaagatcccatctctacaaaaagttttaaaaattagctgggcatggtggcataggcctgtagtctcagctactggggagggtgaggcaggagaatcacttgagctcaggaggttgaggctgcagtgagccatgattgcactactgcactatagcctagaagacaaagcgaaaccttcc

SEQ ID NO: 18728 - DNA, 789 bp, Homo sapiens
  source 1..789: mol_type = unassigned DNA
cgcactcggggaggcgggagggtgacggcggtgctgcgaggtcggcgcgcagctccgccgcgggtcgctcgggcgctgtccaggcggagccggccccgcccgggctgcagccatggggccagtaccaacttcatttggaaaacgcagaggaggcccacaaacactgcctgcctcaccaggagggatgatcaagcgtttcctggaggacaccacggatgatggagaactgagcaagttcgtgaaggatttctcaggaaatgcgagctgccacccaccagaggctaagacctgggcatccaggccccaagtcccggagccaaggccccaggccccggacctctatgatgatgacctggagttcagacccccctcgcggccccagtcctctgacaaccagcagtacttctgtgccccagcccctctcagcccatctgccaggccccgcagcccatggggcaagcttgatccctatgattcctctgaggatgacaaggagtatgtgggctttgcaaccctccccaaccaagtccaccgaaagtccgtgaagaaaggctttgactttaccctcatggtggcaggagagtctggcctgggcaaatccacacttgtcaatagcctcttcctcactgatctgtaccgggaccggaaacttcttggtgctgaagagaggatcatgcaaactgtggagatcactaagcatgcagtggacatagaagagaagggtgtgaggctgcggctcaccattgtggacacaccaggttttggggatgcagtcaacaacacagagtg

SEQ ID NO: 18729 - DNA, 963 bp, Homo sapiens
  source 1..963: mol_type = unassigned DNA
aggtcggcgcgcagctccgccgcgggtcgctcgggcgctgtccaggcggagccggccccgcccgggctgcagccatgatcaagcgtttcctggaggacaccacggatgatggagaactgagcaagttcgtgaaggatttctcaggaaatgcgagctgccacccaccagaggctaagacctgggcatccaggccccaagtcccggagccaaggccccaggccccggacctctatgatgatgacctggagttcagacccccctcgcggccccagtcctctgacaaccagcagtacttctgtgccccagcccctctcagcccatctgccaggccccgcagcccatggggcaagcttgatccctatgattcctctgaggtagagcctccagccctgcctttgcctttcagtgggctgctgcaggaagaccgggggcagggagcagagtgtgtgtgtgtgtgtgtgtgtgtgtgtgtgtgtgtgtgtttgtgtgtgtgtgtatctgggacctatttcagtcctgtgtcagccctagctccaagatatctgcccccaagggcactggaaatttgcagtttcagcaagggcaggaggcccagctggtggcctcagatgggaactcacagaagtctggcactgcttttttaaggctggggcaaaggcctgaaagggagagaagattggcgctgggtgccggggcccctttggctcctcaccgtgatgcattctgccttcctgtctactaggatgacaaggagtatgtgggctttgcaaccctccccaaccaagtccaccgaaagtccgtgaagaaaggctttgactttaccctcatggtggcaggagagtctggcctgggcaaatccacacttgtcaatagcctcttcctcactgatctgtaccgggaccggaaacttcttggtgctgaagagaggatcatgcaaactgtggagatcactaagcatgcagt

SEQ ID NO: 18730 - DNA, 235 bp, Homo sapiens
  source 1..235: mol_type = unassigned DNA
aaggctcccaagcagctgggctgctggtcttctctgactctctggaggctggggcaaaggcctgaaagggagagaagattggcgctgggtgccggggcccctttggctcctcaccgtgatgcattctgccttcctgtctactaggatgacaaggagtatgtgggctttgcaaccctccccaaccaagtccaccgaaagtccgtgaagaaaggctttgactttaccctcatggtgg

SEQ ID NO: 18731 - DNA, 559 bp, Homo sapiens
  source 1..559: mol_type = unassigned DNA
gaggcgggagggtgacggcggtgctgcgaggtcggcgcgcagctccgccgcgggtcgctcgggcgctgtccaggcggagccggccccgcccgggctgcagccatgatcaagcgtttcctggaggacaccacggatgatggagaactgagcaagttcgtgaaggatttctcaggaaatgcgagctgccacccaccagaggctaagacctgggcatccaggccccaagtcccggagccaaggccccaggccccggacctctatgatgatgacctggagttcagacccccctcgcggccccagtcctctgacaaccagcagtacttctgtgccccagcccctctcagcccatctgccaggccccgcagcccatggggcaagcttgatccctatgattcctctgaggctggggcaaaggcctgaaagggagagaagattggcgctgggtgccggggcccctttggctcctcaccgtgatgcattctgccttcctgtctactaggatgacaaggagtatgtgggctttgcaaccctccccaaccaagtccaccgaaagtccgtg

SEQ ID NO: 18732 - DNA, 566 bp, Homo sapiens
  source 1..566: mol_type = unassigned DNA
ctttagggtctagagctgacaatgagagttgggggaaacagttcctcttctgagctgaggatggggtagaacaggcttctacagaggagtcagtccattctctgccttccactccctgtgggtcatggttcaggccaggccctctcgtgcactgccggctctgggcagaggggatcaagcgtttcctggaggacaccacggatgatggagaactgagcaagttcgtgaaggatttctcaggaaatgcgagctgccacccaccagaggctaagacctgggcatccaggccccaagtcccggagccaaggccccaggccccggacctctatgatgatgacctggagttcagacccccctcgcggccccagtcctctgacaaccagcagtacttctgtgccccagcccctctcagcccatctgccaggccccgcagcccatggggcaagcttgatccctatgattcctctgaggctggggcaaaggcctgaaagggagagaagattggcgctgggtgccggggcccctttggctcctcaccgtgatgcattctgccttcctgtctacta

SEQ ID NO: 18733 - DNA, 604 bp, Homo sapiens
  source 1..604: mol_type = unassigned DNA
aaaggagaggagaatctttagggtctagagctgacaatgagagttgggggaaacagttcctcttctgagctgaggatggggtagaacaggcttctacagaggagtcagtccattctctgccttccactccctgtgggtcatggttcaggccaggccctctcgtgcactgccggctctgggcagaggggatcaagcgtttcctggaggacaccacggatgatggagaactgagcaagttcgtgaaggatttctcaggaaatgcgagctgccacccaccagaggctaagacctgggcatccaggccccaagtcccggagccaaggccccaggccccggacctctatgatgatgacctggagttcagacccccctcgcggccccagtcctctgacaaccagcagtacttctgtgccccagcccctctcagcccatctgccaggccccgcagcccatggggcaagcttgatccctatgattcctctgaggtagagcctccagccctgcctttgcctttcagtgggctgctgcaggaagaccgggggcagggagcagagtgtgtgtgtgtgtgtgtgtgtgtgtgtgtgtgtgtgtgtttgtgtgtgtg

SEQ ID NO: 18734 - DNA, 549 bp, Homo sapiens
  source 1..549: mol_type = unassigned DNA
agtgcagcccggggacgaggagctgaggctccccgctctgtcctgggtgactctgcatactctgcgcatccgggggtcgcgggctgcgaggccggcccccagctgggcaccccgacccacttcgcgccggcaccgctagcagctgagatcaagcgtttcctggaggacaccacggatgatggagaactgagcaagttcgtgaaggatttctcaggaaatgcgagctgccacccaccagaggctaagacctgggcatccaggccccaagtcccggagccaaggccccaggccccggacctctatgatgatgacctggagttcagacccccctcgcggccccagtcctctgacaaccagcagtacttctgtgccccagcccctctcagcccatctgccaggccccgcagcccatggggcaagcttgatccctatgattcctctgaggtagagcctccagccctgcctttgcctttcagtgggctgctgcaggaagaccgggggcagggagcagagtgtgtgtgtgtgtgtgtgtgtgtgtgtgtgtgtgtg

SEQ ID NO: 18735 - DNA, 564 bp, Homo sapiens
  source 1..564: mol_type = unassigned DNA
atcagtaataagcggaggtgagggtccccatcctcgcctgggtcagcttttacctgagtaacccctcctcacccacctaccctgggcacaggggccagtaccaacttcatttggaaaacgcagaggaggcccacaaacactgcctgcctcaccaggagggatgatcaagcgtttcctggaggacaccacggatgatggagaactgagcaagttcgtgaaggatttctcaggaaatgcgagctgccacccaccagaggctaagacctgggcatccaggccccaagtcccggagccaaggccccaggccccggacctctatgatgatgacctggagttcagacccccctcgcggccccagtcctctgacaaccagcagtacttctgtgccccagcccctctcagcccatctgccaggccccgcagcccatggggcaagcttgatccctatgattcctctgaggtagagcctccagccctgcctttgcctttcagtgggctgctgcaggaagaccgggggcagggagcagagtgtgtgtgtgtgtgtgtgtgtgtgtgtgtgtgtgt

SEQ ID NO: 18736 - DNA, 676 bp, Homo sapiens
  source 1..676: mol_type = unassigned DNA
gggcgggcgcggggcagggctggggtgcgcagggccggtcgctcccgggcggctgcaaggggacccgcggcaccgcagccgcggctgtgcagggtgggaggcgccgtcgccggccccgggcacaggctggcactgctgccgggcggcggtgcgtcgctgctcccaagtttttccctctgagcagccacggagtgggcgccaacccctgggtgatgcctgcgctctaggacgaaggggtgggtccgtgctgagggaggtgcccgctggtggagacgcgcttgttgggctggggaaggcgcatcagtaataagcggaggtgagggtccccatcctcgcctgggtcagcttttacctgagtaacccctcctcacccacctaccctgggcacaggggccagtaccaacttcatttggaaaacgcagaggaggcccacaaacactgcctgcctcaccaggagggatgatcaagcgtttcctggaggacaccacggatgatggagaactgagcaagttcgtgaaggatttctcaggaaatgcgagctgccacccaccagaggctaagacctgggcatccaggccccaagtcccggagccaaggccccaggccccggacctctatgatgatgacctggagttcagacccccctcgcggccccagtcctctgacaaccagcagt

SEQ ID NO: 18737 - DNA, 1707 bp, Homo sapiens
  source 1..1707: mol_type = unassigned DNA
cgcagaggaggcccacaaacactgcctgcctcaccaggagggatggtaagacgcttggcccctccttccctcagcctgacaaggggcagtccctggccctttcccaaagggaccccagagagggggaggcccagcccaccatcctgcccggtgggattagctatatccttctgcccctgggacaggaaccatgggaaagcttcctcctgctgcatctacccgctccctccccaccagccaggtccctctgcagtgtgtgggggtgggggcacccatccctgccacctgcctgtagtgggaagagaaacagtaaccccagccagcctccctggaggtgcccaggtaggaagtttttgatgcttggctctgaagatgtaatctcttctcctgacattgttgccagagcctgccacaaataacgtaagggtgtcaggacctctaggccacacaccgtcctctcctctcagtctggaagccccacagcctttgccctctgcattgggggacacaaactgtttacagcagggggggatcactgaccagcctgtggggcgggatgttggctgtgggcagcctccagaagggagctccctgggccccctgggatcagaagctttcaggtttggtagggccaaccttttgggctcttgtctctcaagctgtgtccaggcagaggcccaagccttggccaggaagtcttggtgaccctgtgaccttcccccaacgggggttcctgagagaggcctgtccttattcctttcccccacttctccccacatggtggatggatggactgattgttctagggatggaagcctagggaagcactgattgtccccagtgccaagcccagcaggggctagaggggctttttctgccacacactaacttcagttcagctgaggtcttggtgctttcggcttgtccgaggccacactgttcttctctaattaaagacacacccccctccaccccaaccaccatcaccaaagtccccatcctcaggcccctgccctcaagccagccaagttcttaggctgactggttcagatcagactcctctatgagggtctctttgtcaaaggaggtcagtgtcctagctgctttgggaatcagtgggggagacccccccaacccagctatgccagggggtttaaatttacatgtgaaaagaatgacaggccaacattaatgaccatcctgtgacttgggatgcaccttctcttctcaggttcaaagcagcttaaggtatctatcatctgggagtgctttctctccccagcctcgctgggaggcaaggaagggccattcacaactgaacattaaggtcctcaaattaagacactatccagactcacaaaagatgtttccacccaaccagaaacagtggacccctgacccctagttgagtgcacacttccaaccaggccccttaatttatctcccacctaaatggcagctctgaagcttctgggctgccagcctcccattgccttgaacccgtgctcctcagagaccaagtgctaacagctcccctgttgacactatggaagccatggagtgatctaattgatacaggttgctataagtcagaggtcaggtgtcctagggtaaggggagtccctggagcaaagtcttctctgtggctgatgctccctgcagggaaatttaggagcagatttctgaaacagtgacgttcctcacagg

SEQ ID NO: 18738 - DNA, 1556 bp, Homo sapiens
  source 1..1556: mol_type = unassigned DNA
atgatcaagcgtttcctggaggacaccacggatgatggagaactgagcaagttcgtgaaggatttctcaggaaatgcgagctgccacccaccagaggctaagacctgggcatccaggccccaagtcccggagccaaggccccaggccccggacctctatgatgatgacctggagttcagacccccctcgcggccccagtcctctgacaaccagcagtacttctgtgccccagcccctctcagcccatctgccaggccccgcagcccatggggcaagcttgatccctatgattcctctgaggatgacaaggagtatgtgggctttgcaaccctccccaaccaagtccaccgaaagtccgtgaagaaaggctttgactttaccctcatggtggcaggagagtctggcctgggcaaatccacacttgtcaatagcctcttcctcactgatctgtaccgggaccggaaacttcttggtgctgaagagaggatcatgcaaactgtggagatcactaagcatgcagtggacatagaagagaagggtgtgaggctgcggctcaccattgtggacacaccaggttttggggatgcagtcaacaacacagagtgctggaagcctgtggcagaatacattgatcagcagtttgagcagtatttccgagacgagagtggcctgaaccgaaagaacatccaagacaacagggtgcactgctgcctgtacttcatctcacccttcggccatgggctccggccattggatgttgaattcatgaaggccctgcatcagcgggtcaacatcgtgcctatcctggctaaggcagacacactgacacctcccgaagtggaccacaagaaacgcaaaatccgggaggagattgagcattttggaatcaagatctatcaattcccagactgtgactctgatgaggatgaggacttcaaattgcaggaccaagccctaaaggaaagcatcccatttgcagtaattggcagcaacactgtagtagaggccagagggcggcgagttcggggtcgactctacccctggggcatcgtggaagtggaaaacccagggcactgcgactttgtgaagctgaggacaatgctggtacgtacccacatgcaggacctgaaggatgtgacacgggagacacattatgagaactaccgggcacagtgcatccagagcatgacccgcctggtggtgaaggaacggaatcgcaacaaactgactcgggaaagtggtaccgacttccccatccctgctgtcccaccagggacagatccagaaactgagaagcttatccgagagaaagatgaggagctgcggcggatgcaggagatgctacacaaaatacaaaaacagatgaaggagaactattaactggctttcagccctggatatttaaatctcctcctcttcttcctgtccatgccggcccctcccagcaccagctctgctcaggccccttcagctactgccacttcgccttacatccctgctgactgcccagagactcagaggaaataaagtttaataaatctgtaggtggcttctgg

SEQ ID NO: 18739 - DNA, 509 bp, Homo sapiens
  source 1..509: mol_type = unassigned DNA
aagtcatgctcgaaatggagcgaggcggcggagctggggaggcggtaatctcgcgagatggaagccagcctccgctaggcccggaagcctcgtctgagggggcgggggacggaggagggagcgggagtcgagcgagagcctgtggaggagtccgcctgctgtagcgtgcgtaagcaaggcagctacgccgggcggctacgctgcggaatcggcgtaggcgcctttggagaatcggcgggctgcgctccgctggggctggtcgcggagggggggaggggatgtcggtcagtgcgagatccgctgctgctgaggagaggagcgtcaacagcagcaccatggtagctcaacagaagaaccttgaaggctatgtgggatttgccaatctcccaaatcaagtatacagaaaatcggtgaagagaggttttgaattcacgcttatggtagtgggtgaatctggattgggaaagtcgacattaatcaactcattattcctcacagatttgtattct

SEQ ID NO: 18740 - DNA, 506 bp, Homo sapiens
  source 1..506: mol_type = unassigned DNA
aagtcatgctcgaaatggagcgaggcggcggagctggggaggcggtaatctcgcgagatggaagccagcctccgctaggcccggaagcctcgtctgagggggcgggggacggaggagggagcgggagtcgagcgagagcctgtggaggagtccgcctgctgtagcgtgcgtaagcaaggcagctacgccgggcggctacgctgcggaatcggcgtaggcgcctttggagaatcggcgggctgcgctccgctggggctggtcgcggagggggggaggggatgtcggtcagtgcgagatccgctgctgctgaggagaggagcgtcaacagcagcaccatggctcaacagaagaaccttgaaggctatgtgggatttgccaatctcccaaatcaagtatacagaaaatcggtgaagagaggttttgaattcacgcttatggtagtgggtgaatctggattgggaaagtcgacattaatcaactcattattcctcacagatttgtattct

SEQ ID NO: 18741 - DNA, 4399 bp, Homo sapiens
  source 1..4399: mol_type = unassigned DNA
aagtcatgctcgaaatggagcgaggcggcggagctggggaggcggtaatctcgcgagatggaagccagcctccgctaggcccggaagcctcgtctgagggggcgggggacggaggagggagcgggagtcgagcgagagcctgtggaggagtccgcctgctgtagcgtgcgtaagcaaggcagctacgccgggcggctacgctgcggaatcggcgtaggcgcctttggagaatcggcgggctgcgctccgctggggctggtcgcggagggggggaggggatgtcggtcagtgcgagatccgctgctgctgaggagaggagcgtcaacagcagcaccatggcaacagaagaaccttgaaggctatgtgggatttgccaatctcccaaatcaagtatacagaaaatcggtgaagagaggttttgaattcacgcttatggtagtgggtgaatctggattgggaaagtcgacattaatcaactcattattcctcacagatttgtattctccagagtatccaggtccttctcatagaattaaaaagactgtacaggtggaacaatccaaagttttaatcaaagaaggtggtgttcagttgctgctcacaatagttgataccccaggatttggagatgcagtggataatagtaattgctggcagcctgttatcgactacattgatagtaaatttgaggactacctaaatgcagaatcacgagtgaacagacgtcagatgcctgataacagggtgcagtgttgtttatacttcattgctccttcaggacatggacttaaaccattggatattgagtttatgaagcgtttgcatgaaaaagtgaatatcatcccacttattgccaaagcagacacactcacaccagaggaatgccaacagtttaaaaaacagataatgaaagaaatccaagaacataaaattaaaatatacgaatttccagaaacagatgatgaagaagaaaataaacttgttaaaaagataaaggaccgtttacctcttgctgtggtaggtagtaatactatcattgaagttaatggcaaaagggtcagaggaaggcagtatccttggggtgttgctgaagttgaaaatggtgaacattgtgattttacaatcctaagaaatatgttgataagaacacacatgcaggacttgaaagatgttactaataatgtccactatgagaactacagaagcagaaaacttgcagctgtgacttataatggagttgataacaacaagaataaagggcagctgactaagagccctctggcacaaatggaagaagaaagaagggagcatgtagctaaaatgaagaagatggagatggagatggagcaggtgtttgagatgaaggtcaaagaaaaagttcaaaaactgaaggactctgaagctgagctccagcggcgccatgagcaaatgaaaaagaatttggaagcacagcacaaagaattggaggaaaaacgtcgtcagttcgaggatgagaaagcaaactgggaagctcaacaacgtattttagaacaacagaactcttcaagaaccttggaaaagaacaagaagaaagggaagatcttttaaactctctattgaccaccagttaacgtattagttgccaatatgccagcttggacatcagtgtttgttggatccgtttgaccaatttgcaccagttttatccataatgatggatttaacagcatgacaaaaattatttttttttttgttcttgatggagattaagatgccttgaattgtctagggtgttctgtacttagaaagtaagagctctaagtacctttcctacattttctttttttattaaacagatatcttcagtttaatgcaagagaacattttactgttgtacaatcatgttctggtggtttgattgtttacaggatattccaaaataaaaggactctggaagattttcattgaggataaattgccataatatgatgcaaactgtgcttctctatgataattacaatacaaaggttccattcagtgcagcatatacaataatgtaatttagtctaacacagttgaccctattttttgacacttccattgtttaaaaatacacatggaaaaaaaaaaaaccctatatgcttactgtgcacctagagcttttttataacaacgtctttttgtttgtttgttttggattctttaaatatatattattctcatttagtgccctctttagccagaatctcattactgcttcatttttgtaataacatttaatttagatattttccatatattggcactgctaaaatagaatatagcatctttcatatggtaggaaccaacaaggaaactttcctttaactccctttttacactttatggtaagtagcagggggggaaatgcatttatagatcatttctaggcaaaattgtgaagctaatgaccaacctgtttctacctatatgcagtctctttattttactagaaatgggaatcatggcctcttgaagagaaaaaagtcaccattctgcatttagctgtattcatatattgcatttctgtattttttgtttgtattgtaaaaaattcacataataaacgatgttgtgatgtaatattgtgtgaggtcttaaatatcctacagtcgatgtacaagagtagagtatgtttgggaagaaacttttcagcttaagtttgcctcctctacaatgacatcttttatatgcttgtctcatttagaatgcatatgtgctgattttctaatttaagagataccatatctctctattcatttctatctctcatttgtatgcttatttttctgagaacattttttttttcccccagacagggtcttgcttcattgcccaggctggagtgcggtggcacaaacacgacttgactgcagcctcaaccctctgggctcaagcagtcctcctgcctcagccccctgagtatctgggattgcaggcgtgcaccaccacgcctggctaatttttgtattttttgcagcctcccaaagttctgggattacaggcatgagccgtcatgcctggcctctgagaacagtttctgactcattcagattaggtatactctcaagtccctggaaactgaaattttttttaactgtaaagagggtagtgtcatttcttttcttaaggtcaagtgacatagattttaatgtaatgcataatttaggtaagaaattaattaatgtagcctagtttattatcttgaaatgttttaccctatttactttttaaaattaatgacctaagcggagggaataattataagtcaatagcagagagattgttgtttgggtgtttatttttttcagtttttgttttgagagattgggttaacacctctagccaaaattgtttggttttagggaggctaacaataacctactgaatttggaaaatgcaaaggtaaaaaatgtatatagactgcctgctgaactggttaagtactactgcttctgggaaatactatttcaaaattctatgtattataataataaatttgtaagacattcattattctaccatcctaatgaaaactttcagaagtctttctttatccatggcatgcccagggttttacctgaatctgatacaggatctatataactttactaggacttttgattgttgactccaggcttaggtatatcagaaggttctttttgccatttggcctgtggatgtctgagaagatcattcacaatacatgtaaaattcaggtaggcctaaggaaaggccagcctgtagaaagcaaaatggcagtgtctgttctccactgttggaggcattatgtaatttaagtatcctgttagccactgtctttctgctaattaagtggggctgaacaagtaagcactaataataccagtgaaccacttgggcaccttgtgggtagagttttgctgccacctagtggaatgggatatcattgcttccatatcaggttcacaagcaagttaagtgggcacagtttatttctgtgtagctcaggctgtaatcttgaaagctgaggagatacccatgcctctcagactcattagctgggtgtcacattaccacctgcacattctgacccaccgcatcttaatatgttttgtcctcttggagaaactaggagtagaagtcaggatatggtaggtaagggggaaaaaggaaagacggcttgatagctatgaatgcatgaggagcgaaatgttgactcagttatctagatcatggtctccaaacctgatgctatttccttacaaaaatatttgttgagcatgtgtccataattatatgtattgaacaatgaaaatatgtgtcaacaaatgtactgctacactaatgtgaacattatggaacaaaatttgaaagagtgaaataaaaggtttacactttc

SEQ ID NO: 18742 - DNA, 1584 bp, Homo sapiens
  source 1..1584: mol_type = unassigned DNA
gacggaggagggagcgggagtcgagcgagagcctgtggaggagtccgcctgctgtagcgtgcgtaagcaaggcagctacgccgggcggctacgctgcggaatcggcgtaggcgcctttggagaatcggcgggctgcgctccgctggggctggtcgcggagggggggaggggatgtcggtcagtgcgagatccgctgctgctgaggagaggagcgtcaacagcagcaccatgggtgaatctggattgggaaagtcgacattaatcaactcattattcctcacagatttgtattctccagagtatccaggtccttctcatagaattaaaaagactgtacaggtggaacaatccaaagttttaatcaaagaaggtggtgttcagttgctgctcacaatagttgataccccaggatttggagatgcagtggataatagtaattgctggcagcctgttatcgactacattgatagtaaatttgaggactacctaaatgcagaatcacgagtgaacagacgtcagatgcctgataacagggtgcagtgttgtttatacttcattgctccttcaggacatggacttaaaccattggatattgagtttatgaagcgtttgcatgaaaaagtgaatatcatcccacttattgccaaagcagacacactcacaccagaggaatgccaacagtttaaaaaacagataatgaaagaaatccaagaacataaaattaaaatatacgaatttccagaaacagatgatgaagaagaaaataaacttgttaaaaagataaaggaccgtttacctcttgctgtggtaggtagtaatactatcattgaagttaatggcaaaagggtcagaggaaggcagtatccttggggtgttgctgaagttgaaaatggtgaacattgtgattttacaatcctaagaaatatgttgataagaacacacatgcaggacttgaaagatgttactaataatgtccactatgagaactacagaagcagaaaacttgcagctgtgacttataatggagttgataacaacaagaataaagggcagctgactaagagccctctggcacaaatggaagaagaaagaagggagcatgtagctaaaatgaagaagatggagatggagatggagcaggtgtttgagatgaaggtcaaagaaaaagttcaaaaactgaaggactctgaagctgagctccagcggcgccatgagcaaatgaaaaagaatttggaagcacagcacaaagaattggaggaaaaacgtcgtcagttcgaggatgagaaagcaaactgggaagctcaacaacgtattttagaacaacagaactcttcaagaaccttggaaaagaacaagaagaaagggaagatcttttaaactctctattgaccaccagttaacgtattagttgccaatatgccagcttggacatcagtgtttgttggatccgtttgaccaatttgcaccagttttatccataatgatggatttaacagcatgacaaaaattatttttttttttgttcttgatggagattaagatgccttgaattgtctagggtgttctgtacttagaaagtaagag

SEQ ID NO: 18743 - DNA, 583 bp, Homo sapiens
  source 1..583: mol_type = unassigned DNA
gtcagtgcgagatccgctgctgctgaggagaggagcgtcaacagcagcaccatggaagaaccttgaaggctatgtgggatttgccaatctcccaaatcaagtatacagaaaatcggtgaagagaggttttgaattcacgcttatggtagtgggtgaatctggattgggaaagtcgacattaatcaactcattattcctcacagatttgtattctccagagtatccaggtccttctcatagaattaaaaagactgtacaggtggaacaatccaaagttttaatcaaagaaggtggtgttcagttgctgctcacaatagttgataccccaggatttggagatgcagtggataatagtaattgctggcagcctgttatcgactacattgatagtaaatttgaggactacctaaatgcagaatcacgagtgaacagacgtcagatgcctgataacagggtgcagtgttgtttatacttcattgctccttcaggacatggacttaaaccattggatattgagtttatgaagcgtttgcatgaaaaagtgaatatcatcccacttattgccaaagcagacacactcaca

SEQ ID NO: 18744 - DNA, 569 bp, Homo sapiens
  source 1..569: mol_type = unassigned DNA
cagtgcgagatccgctgctgctgaggagaggagcgtcaacagcagcaccatggtgtttcaatggatttgcctctcctgtttggactgaatatgtcattacaattcttggaattctttgtttactgttcctctgtggatttcttctgttggaatctggaacactggaatgatggaaatgtgttctttacaaagtagctcaacagaagaaccttgaaggctatgtgggatttgccaatctcccaaatcaagtatacagaaaatcggtgaagagaggttttgaattcacgcttatggtagtggaggtgatgtttcaccatgttgcccgtggctaatcttgaactcctgggctcaagcgatccatccgccttggcctcccaaagtgctaggattacaggtgaatctggattgggaaagtcgacattaatcaactcattattcctcacagatttgtattctccagagtatccaggtccttctcatagaattaaaaagactgtacaggtggaacaatccaaagttttaatcaaagaaggtggtgttcagttgctgctcacaatagttgatacccc

SEQ ID NO: 18745 - DNA, 643 bp, Homo sapiens
  source 1..643: mol_type = unassigned DNA
agtgcgagatccgctgctgctgaggagaggagcgtcaacagcagcaccatggtagctgtgagtatactacataatttatagagtttttttcagtctcagttaacttaaatttaatttatagttggatgaaatatgagccaaggaaaccttaggtttaatgcatatttctaactccactcatagcagactttcaaatatttgacttaaaaatgttagattctgattagtctcctaattattatgtttatagttagcttttcattttaatgggcttcgtttttaaaatttggcttaagaattagttttatgaaatgaacaaaagagccaaagattatggatggaatatttagctacatgactagtaaacattgtagacttctgttctttgttaaatccaaatgtattgaattgatgttttgatcccatgattgctttttaaatgagaatttaaatgtggcagaaacttttaagagaatgtgtgcctctttttgctattttttaatgttgagataagactgcctccaaagtaaaattaaccaatgagactctgcttattcaaatagtcttaactacggacagcatttctcacccatggcaacagaagaaccttgaaggctatgtgggatttgccaatctcccaaat

SEQ ID NO: 18746 - DNA, 760 bp, Homo sapiens
  source 1..760: mol_type = unassigned DNA
agtgcgagatccgctgctgctgaggagaggagcgtcaacagcagcaccatggtgtttcaatggatttgcctctcctgtttggactgaatatgtcattacaattcttggaattctttgtttactgttcctctgtggatttcttctgttggaatctggaacactggaatgatggaaatgtgttctttacaaagtagctcaacagaagaaccttgaaggctatgtgggatttgccaatctcccaaatcaagtatacagaaaatcggtgaagagaggttttgaattcacgcttatggtagtgggtgaatctggattgggaaagtcgacattaatcaactcattattcctcacagatttgtattctccagagtatccaggtccttctcatagaattaaaaagactgtacaggtggaacaatccaaagttttaatcaaagaaggtggtgttcagttgctgctcacaatagttgataccccaggatttggagatgcagtggataatagtaattgctggcagcctgttatcgactacattgatagtaaatttgaggactacctaaatgcagaatcacgagtgaacagacgtcagatgcctgataacagggtgcagtgttgtttatacttcattgctccttcaggacatggacttaaaccattggatattgagtttatgaagcgtttgcatgaaaaagtgaatatcatcccacttattgccaaagcagacacactcacaccagaggaatgccaacagtttaaaaaacag

SEQ ID NO: 18747 - DNA, 733 bp, Homo sapiens
  source 1..733: mol_type = unassigned DNA
agtgcgagatccgctgctgctgaggagaggagcgtcaacagcagcaccatggcaacagaagaaccttgaaggctatgtgggatttgccaatctcccaaatcaagtatacagaaaatcggtgaagagaggttttgaattcacgcttatggtgaatctggattgggaaagtcgacattaatcaactcattattcctcacagatttgtattctccagagtatccaggtccttctcatagaattaaaaagactgtacaggtggaacaatccaaagttttaatcaaagaaggtggtgttcagttgctgctcacaatagttgataccccaggatttggagatgcagtggataatagtaattgctggcagcctgttatcgactacattgatagtaaatttgaggactacctaaatgcagaatcacgagtgaacagacgtcagatgcctgataacagggtgcagtgttgtttatacttcattgctccttcaggacatggggccaaaaccctgtgaccagggttcaagggcaggagtcaaagccttagccactccaatgcttcttgaagtcctgttctacctaacttttgctggcctaatacatcttcagagtgtttctgataaacttaaaccattggatattgagtttatgaagcgtttgcatgaaaaagtgaatatcatcccacttattgccaaagcagacacactcacaccagaggaatgccaacagtttaaaaaacag

SEQ ID NO: 18748 - DNA, 1464 bp, Homo sapiens
  source 1..1464: mol_type = unassigned DNA
agtgcgagatccgctgctgctgaggagaggagcgtcaacagcagcaccatggttcctctgtggatttcttctgttggaatctggaacactggaatgatggaaatgtgttctttacaaagtagctcaacagaagaaccttgaaggctatgtgggatttgccaatctcccaaatcaagtatacagaaaatcggtgaagagaggttttgaattcacgcttatggtagtgggtgaatctggattgggaaagtcgacattaatcaactcattattcctcacagatttgtattctccagagtatccaggtccttctcatagaattaaaaagactgtacaggtggaacaatccaaagttttaatcaaagaaggtggtgttcagttgctgctcacaatagttgataccccaggatttggagatgcagtggataatagtaattgctggcagcctgttatcgactacattgatagtaaatttgaggactacctaaatgcagaatcacgagtgaacagacgtcagatgcctgataacagggtgcagtgttgtttatacttcattgctccttcaggacatggacttaaaccattggatattgagtttatgaagcgtttgcatgaaaaagtgaatatcatcccacttattgccaaagcagacacactcacaccagaggaatgccaacagtttaaaaaacagataatgaaagaaatccaagaacataaaattaaaatatacgaatttccagaaacagatgatgaagaagaaaataaacttgttaaaaagataaaggaccgtttacctcttgctgtggtaggtagtaatactatcattgaagttaatggcaaaagggtcagaggaaggcagtatccttggggtgttgctgaagttgaaaatggtgaacattgtgattttacaatcctaagaaatatgttgataagaacacacatgcaggacttgaaagatgttactaataatgtccactatgagaactacagaagcagaaaacttgcagctgtgacttataatggagttgataacaacaagaataaagggcagctgactaagagccctctggcacaaatggaagaagaaagaagggagcatgtagctaaaatgaagaagatggagatggagatggagcaggtgtttgagatgaaggtcaaagaaaaagttcaaaaactgaaggactctgaagctgagctccagcggcgccatgagcaaatgaaaaagaatttggaagcacagcacaaagaattggaggaaaaacgtcgtcagttcgaggatgagaaagcaaactgggaagctcaacaacgtattttagaacaacagaactcttcaagaaccttggaaaagaacaagaagaaagggaagatcttttaaactctctattgaccaccagttaacgtattagttgccaatatgccagcttggacatcagtgtttgttggatccgtttgaccaatttgcaccag

SEQ ID NO: 18749 - DNA, 6952 bp, Homo sapiens
  source 1..6952: mol_type = unassigned DNA
caacagaagaaccttgaaggctatgtgggatttgccaatctcccaaatcaagtatacagaaaatcggtgaagagaggttttgaattcacgcttatggtagtgggtgaatctggattgggaaagtcgacattaatcaactcattattcctcacagatttgtattctccagagtatccaggtccttctcatagaattaaaaagactgtacaggtggaacaatccaaagttttaatcaaagaaggtggtgttcagttgctgctcacaatagttgataccccaggatttggagatgcagtggataatagtaattgctggcagcctgttatcgactacattgatagtaaatttgaggactacctaaatgcagaatcacgagtgaacagacgtcagatgcctgataacagggtgcagtgttgtttatacttcattgctccttcaggacatggacttaaaccattggatattgagtttatgaagcgtttgcatgaaaaagtgaatatcatcccacttattgccaaagcagacacactcacaccagaggaatgccaacagtttaaaaaacagataatgaaagaaatccaagaacataaaattaaaatatacgaatttccagaaacagatgatgaagaagaaaataaacttgttaaaaagataaaggaccgtttacctcttgctgtggtaggtagtaatactatcattgaagttaatggcaaaagggtcagaggaaggcagtatccttggggtgttgctgaagttgaaaatggtgaacattgtgattttacaatcctaagaaatatgttgataagaacacacatgcaggacttgaaagatgttactaataatgtccactatgagaactacagaagcagaaaacttgcagctgtgacttataatggagttgataacaacaagaataaagggcagctgactaagagccctctggcacaaatggaagaagaaagaagggagcatgtagctaaaatgaagaagatggagatggagatggagcaggtgtttgagatgaaggtcaaagaaaaagttcaaaaactgaaggactctgaagctgaggtaatcagtctaatatcccatctcttagcagacattgtgttcctttttaagtagtatcttcagtaaaatttatagataatataacctttttatacatattttttcaaaattaataccctagtgtaacaaaacggataaatttctagaagcaagcaccgtgtttataataaaataatacatacttcaatatgcaagtgcttggacgtagtatattaggtaggacagtgtaatagaatacttataatgaattattagttataatgaacaagtttgagttgtgaaaaataaaattacaaaccattccatacaggtggcataagaacactaaagatgagagtttgggggtggatttatgcacacaaactgtgttaggataataataattgaccatatttatttgtgtatgagtgaaaaagagggaaataacctttattgaactaaagacatgcctggataaattccacacaattaaagaagagaaaattagggaatgtgatatttttgttaacaggttaggccttctttatttataatgtagtgtcaaggtagttcctggtgttacaacattgggcagggtaatgacaaaacatcccagaagacatacctactatcttgaaacccttctagatgttgagttatacatttagtttctattaatcaaaaagaccttggagacatttccttcaataggtggcaagaaagaaaagttggagaaaaagataaactgaacattaaaaatccatagagcagttagtttgatagatgtctgagaatagtagaaaaaaaactatgggtaatcccaaaataacagtggtttcagtatgaagttttcttcacataaatttgttataattaaaaattataaaatagcctgggcatggtggctcatgcctgtaacgccagcactttgggaggctgaggcacacagatcacttgagttcagaagttcgagactagcctggccaacatggtgaaacctcatctctattaaaaatacaaaaattagctggatgtggtggtgagtgcctgtaatcccagctacttgggaggctgaggctggagaatcgcttgaacctgggaggcggaggttgcactgaactgagatcacgtcactgcactcccgcctgggcgacagatcaagactttgcctcaaaaaacaaacagacaaacaaaaagccctataaaataataaattattttaaaatatgtgagatgaggtccaggtgtggtggctcacatctgtaatcccagcagtttgggaggccaaagaagaaggattgcttgagtccaggagtttgagaccagcctgggcaacatggcaagacccaatccctataaaaaatttttaaaaatagttgggcatgatggcctgcacctatggtcccaactactcaggaggctgagacaggaagattacttgagcctgggagatagaggctgtagtgagccatgattgtgccactgcatcccagcctgggtgacagagctagaccttgtctcaaaattatatacatatatatatatggatgacagtaatataaaatagttttaaaacaatctttaatgataaaatttagtaagatccctgttttatgtggcttcactaatatttgtatctaagtgtatgaagaagagattcagatctctcgttatattcttacagttgatctcattgcttttgtaattaccgcataaaatatggaaaccttttttgactaaaggcataacaaaagtatgctaatccattgagtaaatagaatgcacggaatgagaaagtattaaataatttcgaggaaatgtttttattccacatcatttctcttacattattgggcttttcttgtaatttcttattaaaatctttcactgttgttatatttgttgtgagtttaatttagcaggggtatggaataattcctcctggtttcagacgctgagcactacaggattagcatccctggcactgccactaaatgctaatagcagtgccctcctatcatagggcaaaccaaaatgtgcatacacacacacccctaatcaaaagtcactgtcttagctattgctgttgtattataaatgaataattaaagttcttaacatgacattttggagattaatttatcagcatgttgtaaatatatgcattgagtctctacctcttcagtaattcacatataatctggaaaatctatatccaaaagggggaaaaaaacaggaataatcaagagtctactacattatctccacacttagattccattgagaatctaaaagtagtttaacttatatttgaggcagatgtattttaggacatgttgctaaaagtaaatattacgaacaagtaattgtgaacctgtagccaaggaaccctttgggaattttaatgattactgtgaatggtgaagacagttttgaagaactattctttgaaggatggaatgttaacatttcaaggacctgtgaagagctctgggccaaggttcccaccagatactctaagccattagagaattaggcatgctcattctagattctttgtcttttatgaaaccacatctagagtgtatttaccaacatccctgtgataatgagtttgcaaatcatcatgtatatgatacatgatatatattgtgtaaatatacgtgtgaatacataaataggtaaagaaacccttttagccttgtttaatacagtctctccttaaatccattatgctggaaatacttgtttggggcacagctagcagcacagtacatcagccacagcaccaagcaactttcatttattgtgttgtctagtgcacaccacagccctacaaggtagatattattgcccatctctcctttatagataagaaggataaattaacttagtatgccagcatttgaacccagttaatttttaagttaagctagataggtccacagtcctgtttttcacaatttcagaatggaaaaaactctgaaaactgcaaaacctaacatgaactaagttttaatcctacatattgtgaatatttatatattttactgaaacaaataaaaagtaatgtgtttgattatacttgttgccccagatagcccaggaggtattttataaatatagtgtatactcctttctaagcggtgttgtcgttttaataactgaaaaatgttgaacttcaaaaggcatctgaccccatgggtttcttaagagtgagattgtgacctgtacctttatctacatgcagttaacacaaaagataattacttatatgtaacaagttaaagaatgatgaacactgtaagcctactacctggcttaaaaaaatagaatgttatcaactcatttgaagatgctgtgtgcctgtcccctattgtatccctctctctcattcccagaggtaactactattccgaattgtgtatatgtgactcttttcatttaaaaaaaataactagagacattttcttatgttcctactttctgacatttcttagtaacttgtttgctgtcatcaggaagatatcacctcagatttgattcatgtttgcttaagtgtgtcttaggtgattttgttttgtaggaattgcatgaaataattgaaataggaataaatctgaagtcacttcgggcttgcaaaaaaaaattgtatgcaaaattatagtaacatatataatatgtatataatatataatacatataatagttatatattaacattatgttaatgttaactcaccagtgtagtaaaatctgtaacagaacataattcctggataactgaaggttttgaatagtccttgggtatttggcatagaaggatttaatctgatttttaaaatttgttgacttttttttttttcagaaatggattgacttgcacctaaatgaaattacttatctaatgatctcttggacttaaagcactttgtttctgcagttacttcgcatgagtgtttactgcctctcagtcagcattctttacagtattaatacacagagaaggaaggaccagctgcattagaatcactgtaacttgttgaaaatccacatttccagacttaacacccagatattctaattcagtacgtctgagtgaggtccaggattctatatttttaacaaacatcccaggtgatttgcatgaagaccaatgtctgagaaccactgcttacaggaatcagagtactttgctggcatctttgagctcttagggtcctaaactacctgctttcttttcacttgtcttagctttctaaacttggaattaggaggcttattcaagtcctggttcttccactttctggctagcaatcttgggcaagtcacttaaattctgcaactgtttcctcatctgtacaatgagaacagtgatgtgttcactgcccagcctccaacatatttgtgattaaagaaaaacgagataagatagtaattttccattataaagtactccacactgttaagtttgttgctttttttttttttcctgtttcccaagattattgtcttgggtcactggccttttgggtggcaggtcctaaaggaggaggagtccttgaccagagtacttccaggtagtactctgaatttacaacagggctattcaaatagtgctcatactccttatcattagggtgtctggatgaaacatacctctgcttctgatttcttaaatagttttgttttatatattgtgctatgatttagctccagcggcgccatgagcaaatgaaaaagaatttggaagcacagcacaaagaattggaggaaaaacgtcgtcagttcgaggatgagaaagcaaactgggaagctcaacaacgtattttagaacaacagaactcttcaagaaccttggaaaagaacaagaagaaagggaagatcttttaaactctctattgaccaccagttaacgtattagttgccaatatgccagcttggacatcagtgtttgttggatccgtttgaccaatttgcaccagttttatccataatgatggatttaacagcatgacaaaaattatttttttttttgttcttgatggagattaagatgccttgaattgtctagggtgttctgtacttagaaagtaagagctctaagtacctttcctacattttctttttttattaaacagatatcttcagtttaatgcaagagaacattttactgttgtacaatcatgttctggtggtttgattgtttacaggatattccaaaataaaaggactctggaagattttcattgaggataaattgccataatatgatgcaaactgtgcttctctatgataattacaatacaaaggttccattcagtgcagcatatacaataatgtaatttagtctaacacagttgaccctattttttgacacttccattgtttaaaaatacacatggaaaaaaaaaaaaccctatatgcttactgtgcacctagagcttttttataacaacgtctttttgtttgtttgttttggattctttaaatatatattattctcatttagtgccctctttagccagaatctcattactgcttcatttttgtaataacatttaatttagatattttccatatattggcactgctaaaatagaatatagcatctttcatatggtaggaaccaacaaggaaactttcctttaactccctttttacactttatggtaagtagcagggggggaaatgcatttatagatcatttctaggcaaaattgtgaagctaatgaccaacctgtttctacctatatgcagtctctttattttactagaaatgggaatcatggcctcttgaagagaaaaaagtcaccattctgcatttagctgtattcatatattgcatttctgtattttttgtttgtattgtaaaaaattcacataataaacgatgttgtgatgt

SEQ ID NO: 18750 - DNA, 582 bp, Homo sapiens
  source 1..582: mol_type = unassigned DNA
tactgattagacccaggaggtctcaggagtccagagttgcttggagcttggctcagaattccaagggggcccataactccatgaggcccagagttcctggcttgggaacactgggaggcctgggatactgtggcttagactcaagcagaaaggtgaacacagatctttattagcagataccaaatttgacatttaaaggagatttctgagcagctgcagacctcgccaagaccatgcagattccactgactattcccatgccagtgctccagctgctcaggcttgaagctacttcttagaaccactgtatagaacatgctacctgatgaagaataaatcaacaccttgcttcccgtcttctatccattagatatccaggtgaatctggattgggaaagtcgacattaatcaactcattattcctcacagatttgtattctccagagtatccaggtccttctcatagaattaaaaagactgtacaggtggaacaatccaaagttttaatcaaagaaggtggtgttcagttgctgctcacaatagttgataccccaggatttggagatgcagtggataatagta

SEQ ID NO: 18751 - DNA, 581 bp, Homo sapiens
  source 1..581: mol_type = unassigned DNA
agaattccaagggggcccataactccatgaggcccagagttcctggcttgggaacactgggaggcctgggatactgtggcttagactcaagcagaaagctacttcttagaaccactgtatagaacatgctacctgatgaagaataaatcaacaccttgcttcccgtcttctatccattagatatccaggtgaatctggattgggaaagtcgacattaatcaactcattattcctcacagatttgtattctccagagtatccaggtccttctcatagaattaaaaagactgtacaggtggaacaatccaaagttttaatcaaagaaggtggtgttcagttgctgctcacaatagttgataccccaggatttggagatgcagtggataatagtaattgctggcagcctgttatcgactacattgatagtaaatttgaggactacctaaatgcagaatcacgagtgaacagacgtcagatgcctgataacagggtgcagtgttgtttatacttcattgctccttcaggacatggacttaaaccattggatattgagtttatgaagcgtttgcatgaaaaagtga

SEQ ID NO: 18752 - DNA, 740 bp, Homo sapiens
  source 1..740: mol_type = unassigned DNA
gcccagagttcctggcttgggaacactgggaggcctgggatactgtggcttagactcaagcagaaaggtgaacacagatctttattagcagataccaaatttgacatttaaaggagatttctgagcagctgcagacctcgccaagaccatgcagattccactgactattcccatgccagtgctccagctgctcaggcttgaaggtgaatctggattgggaaagtcgacattaatcaactcattattcctcacagatttgtattctccagagtatccaggtccttctcatagaattaaaaagactgtacaggtggaacaatccaaagttttaatcaaagaaggtggtgttcagttgctgctcacaatagttgataccccaggatttggagatgcagtggataatagtaattgctggcagcctgttatcgactacattgatagtaaatttgaggactacctaaatgcagaatcacgagtgaacagacgtcagatgcctgataacagggtgcagtgttgtttatacttcattgctccttcaggacatggacttaaaccattggatattgagtttatgaagcgtttgcatgaaaaagtgaatatcatcccacttattgccaaagcagacacactcacaccagaggaatgccaacagtttaaaaaacagataatgaaagaaatccaagaacataaaattaaaatatacgaatttccagaaacagatgatgaagaagaaaataaac

SEQ ID NO: 18753 - DNA, 686 bp, Homo sapiens
  source 1..686: mol_type = unassigned DNA
gtgaatctggattgggaaagtcgacattaatcaactcattattcctcacagatttgtattctccagagtatccaggtccttctcatagaattaaaaagactgtacaggtggaacaatccaaagttttaatcaaagaaggtggtgttcagttgctgctcacaatagttgataccccaggatttggagatgcagtggataatagtaattgctggcagcctgttatcgactacattgatagtaaatttgaggactacctaaatgcagaatcacgagtgaacagacgtcagatgcctgataacagggtgcagtgttgtttatacttcattgctccttcaggacatgggtcagtaccttgatacttctgattccttttttgttgttgttgcttactgttacctttatgtgcatactttagtaatctttaagtttgtgaagtacacacaactatagccattatgaagtactaaatttcatgtagaaatgtcttagttgaaaagccattttaagtcctatataagctaacagtgattttactccttagttcttcattcataaggattttccctgcttcatgaaataaacagtgttgccaccatggtttgaggtctcaatgtggcaaatttagctttcatgttgaccactctgctactaatagaaataccaaataaagagaagcagccatacca

SEQ ID NO: 18754 - DNA, 556 bp, Homo sapiens
  source 1..556: mol_type = unassigned DNA
tgaatgccaccttccttaacaatagtcttttgttcattttaaatctgaaatttttgttttggtaaaattttgaattcatattaaaactttttaagcttttttccccctagctattaatagaagcaaactcttgctgtttgtttatgacagaacacacatgcaggacttgaaagatgttactaataatgtccactatgagaactacagaagcagaaaacttgcagctgtgacttataatggagttgataacaacaagaataaagggcagctgactaagagccctctggcacaaatggaagaagaaagaagggagcatgtagctaaaatgaagaagatggagatggagatggagcaggtgtttgagatgaaggtcaaagaaaaagttcaaaaactgaaggactctgaagctgaggtaatcagtctaatatcccatctcttagcagacattgtgttcctttttaagtagtatcttcagtaaaatttatagataatataacctttttatacatattttttcaaaattaataccctagtgtaacaaaacggataaatttct

SEQ ID NO: 18755 - DNA, 333 bp, Homo sapiens
  source 1..333: mol_type = unassigned DNA
gtgacttataatggagttgataacaacaagaataaagggcagctgactaaacatttaatgattacccttaatattcgtgacaggagccctctggcacaaatggaagaagaaagaagggagcatgtagctaaaatgaagaagatggagatggagatggagcaggtgtttgagatgaaggtcaaagaaaaagttcaaaaactgaaggactctgaagctgagctccagcggcgccatgagcaaatgaaaaagaatttggaagcacagcacaaagaattggaggaaaaacgtcgtcagttcgaggatgagaaagcaaactgggaagctcaacaacgt

SEQ ID NO: 18756 - DNA, 4350 bp, Homo sapiens
  source 1..4350: mol_type = unassigned DNA
gagatggaagccagcctccgctaggcccggaagcctcgtctgagggggcgggggacggaggagggagcgggagtcgagcgagagcctgtggaggagtccgcctgctgtagcgtgcgtaagcaaggcagctacgccgggcggctacgctgcggaatcggcgtaggcgcctttggagaatcggcgggctgcgctccgctggggctggtcgcggagggggggaggggatgtcggtcagtgcgagatccgctgctgctgaggagaggagcgtcaacagcagcaccatgggtcagcaacagaagaaccttgaaggctatgtgggatttgccaatctcccaaatcaagtatacagaaaatcggtgaagagaggttttgaattcacgcttatggtagtgggtgaatctggattgggaaagtcgacattaatcaactcattattcctcacagatttgtattctccagagtatccaggtccttctcatagaattaaaaagactgtacaggtggaacaatccaaagttttaatcaaagaaggtggtgttcagttgctgctcacaatagttgataccccaggatttggagatgcagtggataatagtaattgctggcagcctgttatcgactacattgatagtaaatttgaggactacctaaatgcagaatcacgagtgaacagacgtcagatgcctgataacagggtgcagtgttgtttatacttcattgctccttcaggacatggacttaaaccattggatattgagtttatgaagcgtttgcatgaaaaagtgaatatcatcccacttattgccaaagcagacacactcacaccagaggaatgccaacagtttaaaaaacagataatgaaagaaatccaagaacataaaattaaaatatacgaatttccagaaacagatgatgaagaagaaaataaacttgttaaaaagataaaggaccgtttacctcttgctgtggtaggtagtaatactatcattgaagttaatggcaaaagggtcagaggaaggcagtatccttggggtgttgctgaagttgaaaatggtgaacattgtgattttacaatcctaagaaatatgttgataagaacacacatgcaggacttgaaagatgttactaataatgtccactatgagaactacagaagcagaaaacttgcagctgtgacttataatggagttgataacaacaagaataaagggcagctgactaagagccctctggcacaaatggaagaagaaagaagggagcatgtagctaaaatgaagaagatggagatggagatggagcaggtgtttgagatgaaggtcaaagaaaaagttcaaaaactgaaggactctgaagctgagctccagcggcgccatgagcaaatgaaaaagaatttggaagcacagcacaaagaattggaggaaaaacgtcgtcagttcgaggatgagaaagcaaactgggaagctcaacaacgtattttagaacaacagaactcttcaagaaccttggaaaagaacaagaagaaagggaagatcttttaaactctctattgaccaccagttaacgtattagttgccaatatgccagcttggacatcagtgtttgttggatccgtttgaccaatttgcaccagttttatccataatgatggatttaacagcatgacaaaaattatttttttttttgttcttgatggagattaagatgccttgaattgtctagggtgttctgtacttagaaagtaagagctctaagtacctttcctacattttctttttttattaaacagatatcttcagtttaatgcaagagaacattttactgttgtacaatcatgttctggtggtttgattgtttacaggatattccaaaataaaaggactctggaagattttcattgaggataaattgccataatatgatgcaaactgtgcttctctatgataattacaatacaaaggttccattcagtgcagcatatacaataatgtaatttagtctaacacagttgaccctattttttgacacttccattgtttaaaaatacacatggaaaaaaaaaaaaccctatatgcttactgtgcacctagagcttttttataacaacgtctttttgtttgtttgttttggattctttaaatatatattattctcatttagtgccctctttagccagaatctcattactgcttcatttttgtaataacatttaatttagatattttccatatattggcactgctaaaatagaatatagcatctttcatatggtaggaaccaacaaggaaactttcctttaactccctttttacactttatggtaagtagcagggggggaaatgcatttatagatcatttctaggcaaaattgtgaagctaatgaccaacctgtttctacctatatgcagtctctttattttactagaaatgggaatcatggcctcttgaagagaaaaaagtcaccattctgcatttagctgtattcatatattgcatttctgtattttttgtttgtattgtaaaaaattcacataataaacgatgttgtgatgtaatattgtgtgaggtcttaaatatcctacagtcgatgtacaagagtagagtatgtttgggaagaaacttttcagcttaagtttgcctcctctacaatgacatcttttatatgcttgtctcatttagaatgcatatgtgctgattttctaatttaagagataccatatctctctattcatttctatctctcatttgtatgcttatttttctgagaacattttttttttcccccagacagggtcttgcttcattgcccaggctggagtgcggtggcacaaacacgacttgactgcagcctcaaccctctgggctcaagcagtcctcctgcctcagccccctgagtatctgggattgcaggcgtgcaccaccacgcctggctaatttttgtattttttgcagcctcccaaagttctgggattacaggcatgagccgtcatgcctggcctctgagaacagtttctgactcattcagattaggtatactctcaagtccctggaaactgaaattttttttaactgtaaagagggtagtgtcatttcttttcttaaggtcaagtgacatagattttaatgtaatgcataatttaggtaagaaattaattaatgtagcctagtttattatcttgaaatgttttaccctatttactttttaaaattaatgacctaagcggagggaataattataagtcaatagcagagagattgttgtttgggtgtttatttttttcagtttttgttttgagagattgggttaacacctctagccaaaattgtttggttttagggaggctaacaataacctactgaatttggaaaatgcaaaggtaaaaaatgtatatagactgcctgctgaactggttaagtactactgcttctgggaaatactatttcaaaattctatgtattataataataaatttgtaagacattcattattctaccatcctaatgaaaactttcagaagtctttctttatccatggcatgcccagggttttacctgaatctgatacaggatctatataactttactaggacttttgattgttgactccaggcttaggtatatcagaaggttctttttgccatttggcctgtggatgtctgagaagatcattcacaatacatgtaaaattcaggtaggcctaaggaaaggccagcctgtagaaagcaaaatggcagtgtctgttctccactgttggaggcattatgtaatttaagtatcctgttagccactgtctttctgctaattaagtggggctgaacaagtaagcactaataataccagtgaaccacttgggcaccttgtgggtagagttttgctgccacctagtggaatgggatatcattgcttccatatcaggttcacaagcaagttaagtgggcacagtttatttctgtgtagctcaggctgtaatcttgaaagctgaggagatacccatgcctctcagactcattagctgggtgtcacattaccacctgcacattctgacccaccgcatcttaatatgttttgtcctcttggagaaactaggagtagaagtcaggatatggtaggtaagggggaaaaaggaaagacggcttgatagctatgaatgcatgaggagcgaaatgttgactcagttatctagatcatggtctccaaacctgatgctatttccttacaaaaatatttgttgagcatgtgtccataattatatgtattgaacaatgaaaatatgtgtcaacaaatgtactgctacactaatgtgaacattatggaacaaaatttgaaagagtgaaataaaaggtttacactttc

SEQ ID NO: 18757 - DNA, 1362 bp, Homo sapiens
  source 1..1362: mol_type = unassigned DNA
ggaatgccaacagtttaaaaaacagataatgaaagaaatccaagaacataaaattaaaatatacgaatttccagaaacagatgatgaagaagatggagatggagatggagcaggtgtttgagatgaaggtcaaagaaaaagttcaaaaactgaaggactctgaagctgagctccagcggcgccatgagcaaatgaaaaagaatttggaagcacagcacaaagaattggaggaaaaacgtcgtcagttcgaggatgagaaagcaaactgggaagctcaacaacgtattttagaacaacagaactcttcaagaaccttggaaaagaacaagaagaaagggaagatcttttaaactctctattgaccaccagttaacgtattagttgccaatatgccagcttggacatcagtgtttgttggatccgtttgaccaatttgcaccagttttatccataatgatggatttaacagcatgacaaaaattatttttttttttgttcttgatggagattaagatgccttgaattgtctagggtgttctgtacttagaaagtaagagctctaagtacctttcctacattttctttttttattaaacagatatcttcagtttaatgcaagagaacattttactgttgtacaatcatgttctggtggtttgattgtttacaggatattccaaaataaaaggactctggaagattttcattgaggataaattgccataatatgatgcaaactgtgcttctctatgataattacaatacaaaggttccattcagtgcagcatatacaataatgtaatttagtctaacacagttgaccctattttttgacacttccattgtttaaaaatacacatggaaaaaaaaaaaaccctatatgcttactgtgcacctagagcttttttataacaacgtctttttgtttgtttgttttggattctttaaatatatattattctcatttagtgccctctttagccagaatctcattactgcttcatttttgtaataacatttaatttagatattttccatatattggcactgctaaaatagaatatagcatctttcatatggtaggaaccaacaaggaaactttcctttaactccctttttacactttatggtaagtagcagggggggaaatgcatttatagatcatttctaggcaaaattgtgaagctaatgaccaacctgtttctacctatatgcagtctctttattttactagaaatgggaatcatggcctcttgaagagaaaaaagtcaccattctgcatttagctgtattcatatattgcatttctgtattttttgtttgtattgtaaaaaattcacataataaacgatgttgtgatgt

SEQ ID NO: 18758 - DNA, 4066 bp, Homo sapiens
  source 1..4066: mol_type = unassigned DNA
atgaaacaacagaagaaccttgaaggctatgtgggatttgccaatctcccaaatcaagtatacagaaaatcggtgaagagaggttttgaattcacgcttatggtagtgggtgaatctggattgggaaagtcgacattaatcaactcattattcctcacagatttgtattctccagagtatccaggtccttctcatagaattaaaaagactgtacaggtggaacaatccaaagttttaatcaaagaaggtggtgttcagttgctgctcacaatagttgataccccaggatttggagatgcagtggataatagtaattgctggcagcctgttatcgactacattgatagtaaatttgaggactacctaaatgcagaatcacgagtgaacagacgtcagatgcctgataacagggtgcagtgttgtttatacttcattgctccttcaggacatggacttaaaccattggatattgagtttatgaagcgtttgcatgaaaaagtgaatatcatcccacttattgccaaagcagacacactcacaccagaggaatgccaacagtttaaaaaacagataatgaaagaaatccaagaacataaaattaaaatatacgaatttccagaaacagatgatgaagaagaaaataaacttgttaaaaagataaaggaccgtttacctcttgctgtggtaggtagtaatactatcattgaagttaatggcaaaagggtcagaggaaggcagtatccttggggtgttgctgaagttgaaaatggtgaacattgtgattttacaatcctaagaaatatgttgataagaacacacatgcaggacttgaaagatgttactaataatgtccactatgagaactacagaagcagaaaacttgcagctgtgacttataatggagttgataacaacaagaataaagggcagctgactaagagccctctggcacaaatggaagaagaaagaagggagcatgtagctaaaatgaagaagatggagatggagatggagcaggtgtttgagatgaaggtcaaagaaaaagttcaaaaactgaaggactctgaagctgagctccagcggcgccatgagcaaatgaaaaagaatttggaagcacagcacaaagaattggaggaaaaacgtcgtcagttcgaggatgagaaagcaaactgggaagctcaacaacgtattttagaacaacagaactcttcaagaaccttggaaaagaacaagaagaaagggaagatcttttaaactctctattgaccaccagttaacgtattagttgccaatatgccagcttggacatcagtgtttgttggatccgtttgaccaatttgcaccagttttatccataatgatggatttaacagcatgacaaaaattatttttttttttgttcttgatggagattaagatgccttgaattgtctagggtgttctgtacttagaaagtaagagctctaagtacctttcctacattttctttttttattaaacagatatcttcagtttaatgcaagagaacattttactgttgtacaatcatgttctggtggtttgattgtttacaggatattccaaaataaaaggactctggaagattttcattgaggataaattgccataatatgatgcaaactgtgcttctctatgataattacaatacaaaggttccattcagtgcagcatatacaataatgtaatttagtctaacacagttgaccctattttttgacacttccattgtttaaaaatacacatggaaaaaaaaaaaaccctatatgcttactgtgcacctagagcttttttataacaacgtctttttgtttgtttgttttggattctttaaatatatattattctcatttagtgccctctttagccagaatctcattactgcttcatttttgtaataacatttaatttagatattttccatatattggcactgctaaaatagaatatagcatctttcatatggtaggaaccaacaaggaaactttcctttaactccctttttacactttatggtaagtagcagggggggaaatgcatttatagatcatttctaggcaaaattgtgaagctaatgaccaacctgtttctacctatatgcagtctctttattttactagaaatgggaatcatggcctcttgaagagaaaaaagtcaccattctgcatttagctgtattcatatattgcatttctgtattttttgtttgtattgtaaaaaattcacataataaacgatgttgtgatgtaatattgtgtgaggtcttaaatatcctacagtcgatgtacaagagtagagtatgtttgggaagaaacttttcagcttaagtttgcctcctctacaatgacatcttttatatgcttgtctcatttagaatgcatatgtgctgattttctaatttaagagataccatatctctctattcatttctatctctcatttgtatgcttatttttctgagaacattttttttttcccccagacagggtcttgcttcattgcccaggctggagtgcggtggcacaaacacgacttgactgcagcctcaaccctctgggctcaagcagtcctcctgcctcagccccctgagtatctgggattgcaggcgtgcaccaccacgcctggctaatttttgtattttttgcagcctcccaaagttctgggattacaggcatgagccgtcatgcctggcctctgagaacagtttctgactcattcagattaggtatactctcaagtccctggaaactgaaattttttttaactgtaaagagggtagtgtcatttcttttcttaaggtcaagtgacatagattttaatgtaatgcataatttaggtaagaaattaattaatgtagcctagtttattatcttgaaatgttttaccctatttactttttaaaattaatgacctaagcggagggaataattataagtcaatagcagagagattgttgtttgggtgtttatttttttcagtttttgttttgagagattgggttaacacctctagccaaaattgtttggttttagggaggctaacaataacctactgaatttggaaaatgcaaaggtaaaaaatgtatatagactgcctgctgaactggttaagtactactgcttctgggaaatactatttcaaaattctatgtattataataataaatttgtaagacattcattattctaccatcctaatgaaaactttcagaagtctttctttatccatggcatgcccagggttttacctgaatctgatacaggatctatataactttactaggacttttgattgttgactccaggcttaggtatatcagaaggttctttttgccatttggcctgtggatgtctgagaagatcattcacaatacatgtaaaattcaggtaggcctaaggaaaggccagcctgtagaaagcaaaatggcagtgtctgttctccactgttggaggcattatgtaatttaagtatcctgttagccactgtctttctgctaattaagtggggctgaacaagtaagcactaataataccagtgaaccacttgggcaccttgtgggtagagttttgctgccacctagtggaatgggatatcattgcttccatatcaggttcacaagcaagttaagtgggcacagtttatttctgtgtagctcaggctgtaatcttgaaagctgaggagatacccatgcctctcagactcattagctgggtgtcacattaccacctgcacattctgacccaccgcatcttaatatgttttgtcctcttggagaaactaggagtagaagtcaggatatggtaggtaagggggaaaaaggaaagacggcttgatagctatgaatgcatgaggagcgaaatgttgactcagttatctagatcatggtctccaaacctgatgctatttccttacaaaaatatttgttgagcatgtgtccataattatatgtattgaacaatgaaaatatgtgtcaacaaatgtactgctacactaatgtgaacattatggaacaaaatttgaaagagtgaaataaaaggtttacactttc

SEQ ID NO: 18759 - DNA, 2146 bp, Homo sapiens
  source 1..2146: mol_type = unassigned DNA
tactttagcctttgctctgaaatcccatgcacgctttgtgaggaaggacagccttggttggggggtgtttatggggagagcagagtggatggtgcgtatgtgaatacctctccccagatgctcccccaatcccaagctctcattatcttatatgcatattcataagggatggccctgctctgtaaatgggtcagaagcaggaaatagaggccagtacagacagcgaagcccaagggataggagggctcaaagccggcacacatctgagtcctcatggacgggaggatgatgagaagcatgaggctgagagaggaggagtcacccggacccagccacacagcgtcctgcctctgcggctctgccccctgcatcctgtgcagctgctgccccgccagccgcaactccaccgtgagccgcctcatcttcacgttcttcctcttcctgggggtgctggtgtccatcattatgctgagcccgggcgtggagagtcagctctacaagctgccctgggtgtgtgaggagggggccgggatccccaccgtcctgcagggccacatcgactgtggctccctgcttggctaccgcgctgtctaccgcatgtgcttcgccacggcggccttcttcttctttttcaccctgctcatgctctgcgtgagcagcagccgggacccccgggctgccatccagaatgggttttggttctttaagttcctgatcctggtgggcctcaccgtgggtgccttctacattcctgacggctccttcaccaacatctggttctacttcggcgtcgtgggctccttcctcttcatcctcatccagctggtgctgctcatcgactttgcgcactcctggaaccagcggtggctgggcaaggccgaggagtgcgattcccgtgcctggtacgcaggcctcttcttcttcactctcctcttctacttgctgtcgatcgcggccgtggcgctgatgttcatgtactacactgagcccagcggctgccacgagggcaaggtcttcatcagcctcaacctcaccttctgtgtctgcgtgtccatcgctgctgtcctgcccaaggtccaggacgcccagcccaactcgggtctgctgcaggcctcggtcatcaccctctacaccatgtttgtcacctggtcagccctatccagtatccctgaacagaaatgcaacccccatttgccaacccagctgggcaacgagacagttgtggcaggccccgagggctatgagacccagtggtgggatgccccgagcattgtgggcctcatcatcttcctcctgtgcaccctcttcatcagtctgcgctcctcagaccaccggcaggtgaacagcctgatgcagaccgaggagtgcccacctatgctagacgccacacagcagcagcagcaggtggcagcctgtgagggccgggcctttgacaacgagcaggacggcgtcacctacagctactccttcttccacttctgcctggtgctggcctcactgcacgtcatgatgacgctcaccaactggtacaagcccggtgagacccggaagatgatcagcacgtggaccgccgtgtgggtgaagatctgtgccagctgggcagggctgctcctctacctgtggaccctggtagccccactcctcctgcgcaaccgcgacttcagctgaggcagcctcacagcctgccatctggtgcctcctgccacctggtgcctctcggctcagtgacagccaacctgccccctccccacaccaatcagccaggctgagcccccacccctgccccagctccaggacctgcccctgagccgggccttctagtcgtagtgccttcagggtccgaggagcatcaggctcctgcagagccccatccccccgccacacccacacggtggagctgcctcttccttcccctcctccctgttgcccatactcagcatctcggatgaaagggctcccttgtcctcaggctccacgggagcggggctgctggagagagcggggaactcccaccacagtggggcatccggcactgaagccctggtgttcctggtcacgtcccccaggggaccctgcccacttcctggacttcgtgccttactgagtctctaagactttttctaataaacaagccagtgcgtgtacc

SEQ ID NO: 18760 - DNA, 735 bp, Homo sapiens
  source 1..735: mol_type = unassigned DNA
aagagacagagctactctggccccatgcaggaggttcaaatctgggagtaaaggctgatgggctggccaggacaccaagaaatgaagctctttatccatgtcctcacttcatctcctcagtagtcccctcagatagctggggtaaaaaaacttatctttattttacagatgagaagcatgaggctgagagaggaggagtcacccggacccagccacacagcgtcctgcctctgcggctctgccccctgcatcctgtgcagctgctgccccgccagccgcaactccaccgtgagccgcctcatcttcacgttcttcctcttcctgggggtgctggtgtccatcattatgctgagcccgggcgtggagagtcagctctacaagctgccctgggtgtgtgaggagggggccgggatccccaccgtcctgcagggccacatcgactgtggctccctgcttggctaccgcgctgtctaccgcatgtgcttcgccacggcggccttcttcttctttttcaccctgctcatgctctgcgtgagcagcagccgggacccccgggctgccatccagaatgggttttggttctttaagttcctgatcctggtgggcctcaccgtgggtgccttctacattcctgacggctccttcaccaacatctggttctacttcggcgtcgtgggctccttcctcttcatcctcatccagctggtgctgctcatcgactttgcgcactcctgg

SEQ ID NO: 18761 - DNA, 1997 bp, Homo sapiens
  source 1..1997: mol_type = unassigned DNA
cgagcgccgccggaaagcgtcgagcggcttcggtaggtggggcggggccggggcggggccggggccggggaggggccaggcccggcacccggatcccgaggtccgcgccccgcgcccggcgccgggcgcccgaagccgggagccgccgccatgggggcctgcctgggagcctgctccctgctcagctgcgcgtcctgcctctgcggctctgccccctgcatcctgtgcagctgctgccccgccagccgcaactccaccgtgagccgcctcatcttcacgttcttcctcttcctgggggtgctggtgtccatcattatgctgagcccgggcgtggagagtcagctctacaagctgccctgggtgtgtgaggagggggccgggatccccaccgtcctgcagggccacatcgactgtggctccctgcttggctaccgcgctgtctaccgcatgtgcttcgccacggcggccttcttcttctttttcaccctgctcatgctctgcgtgagcagcagccgggacccccgggctgccatccagaatgggttttggttctttaagttcctgatcctggtgggcctcaccgtgggtgccttctacattcctgacggctccttcaccaacatctggttctacttcggcgtcgtgggctccttcctcttcatcctcatccagctggtgctgctcatcgactttgcgcactcctggaaccagcggtggctgggcaaggccgaggagtgcgattcccgtgcctggtacgcaggcctcttcttcttcactctcctcttctacttgctgtcgatcgcggccgtggcgctgatgttcatgtactacactgagcccagcggctgccacgagggcaaggtcttcatcagcctcaacctcaccttctgtgtctgcgtgtccatcgctgctgtcctgcccaaggtccaggacgcccagcccaactcgggtctgctgcaggcctcggtcatcaccctctacaccatgtttgtcacctggtcagccctatccagtatccctgaacagaaatgcaacccccatttgccaacccagctgggcaacgagacagttgtggcaggccccgagggctatgagacccagtggtgggatgccccgagcattgtgggcctcatcatcttcctcctgtgcaccctcttcatcagtctgcgctcctcagaccaccggcaggtgaacagcctgatgcagaccgaggagtgcccacctatgctagacgccacacagcagcagcagcaggtggcagcctgtgagggccgggcctttgacaacgagcaggacggcgtcacctacagctactccttcttccacttctgcctggtgctggcctcactgcacgtcatgatgacgctcaccaactggtacaagcccggtgagacccggaagatgatcagcacgtggaccgccgtgtgggtgaagatctgtgccagctgggcagggctgctcctctacctgtggaccctggtagccccactcctcctgcgcaaccgcgacttcagctgaggcagcctcacagcctgccatctggtgcctcctgccacctggtgcctctcggctcagtgacagccaacctgccccctccccacaccaatcagccaggctgagcccccacccctgccccagctccaggacctgcccctgagccgggccttctagtcgtagtgccttcagggtccgaggagcatcaggctcctgcagagccccatccccccgccacacccacacggtggagctgcctcttccttcccctcctccctgttgcccatactcagcatctcggatgaaagggctcccttgtcctcaggctccacgggagcggggctgctggagagagcggggaactcccaccacagtggggcatccggcactgaagccctggtgttcctggtcacgtcccccaggggaccctgcccacttcctggacttcgtgccttactgagtctctaagactttttctaataaacaagccagtgcgtgtacca

SEQ ID NO: 18762 - DNA, 2807 bp, Homo sapiens
  source 1..2807: mol_type = unassigned DNA
gtatttgtctggttcctgtctgtgtccgtcgttcgtccgactgtctttgtccgtctgctgtcttctgtccgtctgcccgtccgcccgtccgtccctcagtctctctgcggtccctttaccgtcctcagtctggctcgcgctgcctctcaggcacttccccagctcgccccggatcatctgggccccagcgcggagactgggatgggagcggagggagccccggactttcttagctgccctcgagtgaggcgggtgcgggtcgtcacggaccaccgggcggaactctgggttgggagagcaggaatcgagggaggttcgggtgtgcgcggggagtgcccggtcgcgggttcgggacctgtggggaggccaacctctgttctgtagctgcagccgcagaggggaggggctccagcaagaccccggctgggaggcccgttctcccttccctttccccagcccccctctcctttcctcttcccctcattaaatctgaggttcattcaggcagccccctccccctctggccccacacaaagaggccctgagagggagaaggggctgcagcggctgctgaatctcgggactcgctttcctttgtccctgacgggttgtgtgtgtgtgtgtgtgtgtgtgtgtgtgtgtgagagagagagagagagagaggagggggtgtaggggagagctgagggtctagagatttactttacagcctttttctgagaatgagatcagcatagacagcacagagaggcaagagagcctctcgcctcattaggcctccatttttcgtgtgtgtgtgtgcgtgtgcatgtgcgtgtgcaggaggaggaatcaagctggtgcctgaaatccctcccagcccaaagaattcaaggtttgggccaggtctctgccaacaagggtttgcttcctggtgagggaggcagagcttccacagtggacctgatttccatcggttgcacctgcattggaactgggctgaaggtgaactgggctgaaggcgtcctgcctctgcggctctgccccctgcatcctgtgcagctgctgccccgccagccgcaactccaccgtgagccgcctcatcttcacgttcttcctcttcctgggggtgctggtgtccatcattatgctgagcccgggcgtggagagtcagctctacaagctgccctgggtgtgtgaggagggggccgggatccccaccgtcctgcagggccacatcgactgtggctccctgcttggctaccgcgctgtctaccgcatgtgcttcgccacggcggccttcttcttctttttcaccctgctcatgctctgcgtgagcagcagccgggacccccgggctgccatccagaatgggttttggttctttaagttcctgatcctggtgggcctcaccgtgggtgccttctacattcctgacggctccttcaccaacatctggttctacttcggcgtcgtgggctccttcctcttcatcctcatccagctggtgctgctcatcgactttgcgcactcctggaaccagcggtggctgggcaaggccgaggagtgcgattcccgtgcctggtacgcaggcctcttcttcttcactctcctcttctacttgctgtcgatcgcggccgtggcgctgatgttcatgtactacactgagcccagcggctgccacgagggcaaggtcttcatcagcctcaacctcaccttctgtgtctgcgtgtccatcgctgctgtcctgcccaaggtccaggacgcccagcccaactcgggtctgctgcaggcctcggtcatcaccctctacaccatgtttgtcacctggtcagccctatccagtatccctgaacagaaatgcaacccccatttgccaacccagctgggcaacgagacagttgtggcaggccccgagggctatgagacccagtggtgggatgccccgagcattgtgggcctcatcatcttcctcctgtgcaccctcttcatcagtctgcgctcctcagaccaccggcaggtgaacagcctgatgcagaccgaggagtgcccacctatgctagacgccacacagcagcagcagcaggtggcagcctgtgagggccgggcctttgacaacgagcaggacggcgtcacctacagctactccttcttccacttctgcctggtgctggcctcactgcacgtcatgatgacgctcaccaactggtacaagcccggtgagacccggaagatgatcagcacgtggaccgccgtgtgggtgaagatctgtgccagctgggcagggctgctcctctacctgtggaccctggtagccccactcctcctgcgcaaccgcgacttcagctgaggcagcctcacagcctgccatctggtgcctcctgccacctggtgcctctcggctcagtgacagccaacctgccccctccccacaccaatcagccaggctgagcccccacccctgccccagctccaggacctgcccctgagccgggccttctagtcgtagtgccttcagggtccgaggagcatcaggctcctgcagagccccatccccccgccacacccacacggtggagctgcctcttccttcccctcctccctgttgcccatactcagcatctcggatgaaagggctcccttgtcctcaggctccacgggagcggggctgctggagagagcggggaactcccaccacagtggggcatccggcactgaagccctggtgttcctggtcacgtcccccaggggaccctgcccacttcctggacttcgtgccttactgagtctctaagactttttctaataaacaagccagtgcgtgtacc

SEQ ID NO: 18763 - DNA, 2062 bp, Homo sapiens
  source 1..2062: mol_type = unassigned DNA
gtatttgtctggttcctgtctgtgtccgtcgttcgtccgactgtctttgtccgtctgctgtcttctgtccgtctgcccgtccgcccgtccgtccctcagtctctctgcggtccctttaccgtcctcagtctggctcgcgctgcctctcaggcacttccccagctcgccccggatcatctgggccccagcgcggagactgggatgggagcggagggagccccggactttcttagctgccctcgagtgaggcgggcgtcctgcctctgcggctctgccccctgcatcctgtgcagctgctgccccgccagccgcaactccaccgtgagccgcctcatcttcacgttcttcctcttcctgggggtgctggtgtccatcattatgctgagcccgggcgtggagagtcagctctacaagctgccctgggtgtgtgaggagggggccgggatccccaccgtcctgcagggccacatcgactgtggctccctgcttggctaccgcgctgtctaccgcatgtgcttcgccacggcggccttcttcttctttttcaccctgctcatgctctgcgtgagcagcagccgggacccccgggctgccatccagaatgggttttggttctttaagttcctgatcctggtgggcctcaccgtgggtgccttctacattcctgacggctccttcaccaacatctggttctacttcggcgtcgtgggctccttcctcttcatcctcatccagctggtgctgctcatcgactttgcgcactcctggaaccagcggtggctgggcaaggccgaggagtgcgattcccgtgcctggtacgcaggcctcttcttcttcactctcctcttctacttgctgtcgatcgcggccgtggcgctgatgttcatgtactacactgagcccagcggctgccacgagggcaaggtcttcatcagcctcaacctcaccttctgtgtctgcgtgtccatcgctgctgtcctgcccaaggtccaggacgcccagcccaactcgggtctgctgcaggcctcggtcatcaccctctacaccatgtttgtcacctggtcagccctatccagtatccctgaacagaaatgcaacccccatttgccaacccagctgggcaacgagacagttgtggcaggccccgagggctatgagacccagtggtgggatgccccgagcattgtgggcctcatcatcttcctcctgtgcaccctcttcatcagtctgcgctcctcagaccaccggcaggtgaacagcctgatgcagaccgaggagtgcccacctatgctagacgccacacagcagcagcagcaggtggcagcctgtgagggccgggcctttgacaacgagcaggacggcgtcacctacagctactccttcttccacttctgcctggtgctggcctcactgcacgtcatgatgacgctcaccaactggtacaagcccggtgagacccggaagatgatcagcacgtggaccgccgtgtgggtgaagatctgtgccagctgggcagggctgctcctctacctgtggaccctggtagccccactcctcctgcgcaaccgcgacttcagctgaggcagcctcacagcctgccatctggtgcctcctgccacctggtgcctctcggctcagtgacagccaacctgccccctccccacaccaatcagccaggctgagcccccacccctgccccagctccaggacctgcccctgagccgggccttctagtcgtagtgccttcagggtccgaggagcatcaggctcctgcagagccccatccccccgccacacccacacggtggagctgcctcttccttcccctcctccctgttgcccatactcagcatctcggatgaaagggctcccttgtcctcaggctccacgggagcggggctgctggagagagcggggaactcccaccacagtggggcatccggcactgaagccctggtgttcctggtcacgtcccccaggggaccctgcccacttcctggacttcgtgccttactgagtctctaagactttttctaataaacaagccagtgcgtgtaccatg

SEQ ID NO: 18764 - DNA, 2072 bp, Homo sapiens
  source 1..2072: mol_type = unassigned DNA
agtatcacatagctgctgactgtgactgtgcttttgggggtgcaagagacagagctactctggccccatgcaggaggttcaaatctgggagtaaaggctgatgggctggccaggacaccaagaaatgaagctctttatccatgtcctcacttcatctcctcagtagtcccctcagatagctggggtaaaaaaacttatctttattttacagatgagaagcatgaggctgagagaggaggagtcacccggacccagccacacagcgtcctgcctctgcggctctgccccctgcatcctgtgcagctgctgccccgccagccgcaactccaccgtgagccgcctcatcttcacgttcttcctcttcctgggggtgctggtgtccatcattatgctgagcccgggcgtggagagtcagctctacaagctgccctgggtgtgtgaggagggggccgggatccccaccgtcctgcagggccacatcgactgtggctccctgcttggctaccgcgctgtctaccgcatgtgcttcgccacggcggccttcttcttctttttcaccctgctcatgctctgcgtgagcagcagccgggacccccgggctgccatccagaatgggttttggttctttaagttcctgatcctggtgggcctcaccgtgggtgccttctacattcctgacggctccttcaccaacatctggttctacttcggcgtcgtgggctccttcctcttcatcctcatccagctggtgctgctcatcgactttgcgcactcctggaaccagcggtggctgggcaaggccgaggagtgcgattcccgtgcctggtacgcaggcctcttcttcttcactctcctcttctacttgctgtcgatcgcggccgtggcgctgatgttcatgtactacactgagcccagcggctgccacgagggcaaggtcttcatcagcctcaacctcaccttctgtgtctgcgtgtccatcgctgctgtcctgcccaaggtccaggacgcccagcccaactcgggtctgctgcaggcctcggtcatcaccctctacaccatgtttgtcacctggtcagccctatccagtatccctgaacagaaatgcaacccccatttgccaacccagctgggcaacgagacagttgtggcaggccccgagggctatgagacccagtggtgggatgccccgagcattgtgggcctcatcatcttcctcctgtgcaccctcttcatcagtctgcgctcctcagaccaccggcaggtgaacagcctgatgcagaccgaggagtgcccacctatgctagacgccacacagcagcagcagcaggtggcagcctgtgagggccgggcctttgacaacgagcaggacggcgtcacctacagctactccttcttccacttctgcctggtgctggcctcactgcacgtcatgatgacgctcaccaactggtacaagcccggtgagacccggaagatgatcagcacgtggaccgccgtgtgggtgaagatctgtgccagctgggcagggctgctcctctacctgtggaccctggtagccccactcctcctgcgcaaccgcgacttcagctgaggcagcctcacagcctgccatctggtgcctcctgccacctggtgcctctcggctcagtgacagccaacctgccccctccccacaccaatcagccaggctgagcccccacccctgccccagctccaggacctgcccctgagccgggccttctagtcgtagtgccttcagggtccgaggagcatcaggctcctgcagagccccatccccccgccacacccacacggtggagctgcctcttccttcccctcctccctgttgcccatactcagcatctcggatgaaagggctcccttgtcctcaggctccacgggagcggggctgctggagagagcggggaactcccaccacagtggggcatccggcactgaagccctggtgttcctggtcacgtcccccaggggaccctgcccacttcctggacttcgtgccttactgagtctctaagactttttctaataaacaagccagtgcgtgtaccatg

SEQ ID NO: 18765 - DNA, 3934 bp, Homo sapiens
  source 1..3934: mol_type = unassigned DNA
actcaccaccatcttggtagtgtgcaagactctgggacggcatgagaaaggcagaaagggagcaaaggagctggtggggtgtcacagggcctatgtatgaggcagatgtgagttctgcatccagttttgcaatttatccatttacctgcctgagacttggaaacacctactttatagtcctgattcaagtgttggcggatggaagggaggagactcctgaccctcagaatgacctaaatgacttcacaagggcccgtgtaacaccagtattgcagacccatgtgtcacaaattcaactagcacattgtttttctcccccttcttctatttctgtagaagatgaatccgcaggcaagaatgatggatgggtgaaagggagggggaatacgaaagcccagaggcggagacttcacttccgattgccacgctatatcaagaaagccaacagtctggcctttccgcaagccacaagaaaaggcagatcagactccccggctcctcgggtagttctcaaaggcaaagacaaaaataagaaactagtctgaagaaagagagtccctcgcttcttcagaactcacctgtcaagagcggcgtggacggcgccatgttgtcccggaaagagaaaccgctcgggtgagagttcaccagggccgaacccggcccctacacgtctcctcatgcgtggagacagcgaattggtgtttccggagccatcagcctcggggccaattcacttccggttacggagtgacgcggaaaaggcgcccaaacgcgcacgcgcaaatctagggcgacgcttgacagagcttgggagggtgcgcctgctttcgccctccttctccagcgggaggggcgcgcacttccgcggggcggagtccgtctagtgctgacgttggcagccgaacccaaagtagatcgaggcggcgggctgcacattcccgttgttgcgttgcgtttccttcctctttcactccgcgctcacggcggcggccaaagcggcggcgacggcggcgcgagaacgacccggcggccagttctcttcctcctgcgcacctgccccgctcggtcagtcagtcggcggccggcgcccggcttgtgctcagacctcgcgcttgcggcgcccaggcccagcggccgtagctagcgtctggcctgagaacctcggcgctccggcggcgcgggcaccacgagccgagcctcgcagcggctccagaggaggcaggcgagtgagcgagtccgaggggtggccggggcaggtggtggcgccgcgaagatggtcgccaagcaaaggatccgtatggccaacgagaagcacagcaagaacatcacccagcgcggcaacgtcgccaagacctcgagaaatgcccccgaagagaaggcgtctgtaggaccctggttattggctctcttcatttttgttgtctgtggttctgcaattttccagattattcaaagtatcaggatgggcatgtgaagtgactgaccttaagatgtttccattctcctgtgaattttaacttgaactcattcctgatgtttgataccctggttgaaaacaattcagtaaagcatcctgcctcagaatgactttcctatcatgcttcatgtgtcattccaaggtttcttcatgagtcattccaagttttctagtccataccacagtgccttgcaaaaaacaccacatgaataaagcaataaaatttgattgttaagatacagtagtggaccctacttattcagtcaattaagagtaagtttttttatgtggttattaaaacagtatgaacaattagtctaactctgcatagacagggtctagattttgttaacccaaatgtataactgcagttagcttaaattacaatttgaagtcttgtggtttttatatagctaggcactttattactcttttgaactgaaagcacactcccttataggttcatgtaactgtcctgtaataaggtgcttataaatggaacaactacacagcctagttttgccacaacctttagcatctaaaaagttttaaaagcttctaaatgtctaatataaagggagatgcttatagccacaacatctattttaccaatattgtttccattacactaccttggattttgcatgagtgagtatagtaacccaagatgccataaaaaaaaaacttgatcgttttctgacttaatcagttactgtggtttcactaaaagctaccgtggtggagtgaagtcagtcagggaaggtttgtttatgttacatttatttcaccagaactattttaatatatcaaaggggtttactatgccaaacaaaattctagggaaaaatactgctaaaaatggatgcctcatcagaacatgctgttgagtccaatgtgccataagacattttagcatgttaaatagcacttttaatagcaaaaaaaggcacatcaactgcgaagttatccttagtttgcaaatgctttttctagattaatgatttttcaatcattagggtactagacacatcagcctaaagtggcatctggaattgaatggatttactgataatgatcagtctttagtcttccctttgttatatgactttataggttatgattgatcaaatttacgttttactaatggtaagggtgagggtcatagggcaggttttgggttttctagtactgttgaaaactgcaagtattggctatttgtatacttagccataacttggtgaaaaaaaacctgagcagtgtctatgtattaatgcgttggaaagaaagctgcttgtgtttgctttgttaattgcctcaggatatttcttttaaaataagctgttttaagaggaacagaagggaaatctgctacctagtctatacacagcgtgaacctcacagggggcttctgataccctcaaacatggagaacagtaagggagcagagtggttaaggactttcaggaacttaactattctggaataaggaatgaatcaactgaccttgggccagcaggtttttaactaaattgttacttgcctttctcacccagttaatcagtctctgtacttgtttccctttttgaaacaagtgtcttggttaactaattctgttttatggttgtgctaaattcatagcaggtgccttattctttgcttttagtcaaaccattccatatcagaattttccttggtttactatagatatttggctttaagttgttgtttgtgttttttaatgtacaatgttctgataaatttgactgttaaattgctatagctagcaatcattttacatatgtaaaattgcattccctttgtatttcatgtgtaattcaccaattaagtgcagtttatattcaggttggattatgcatgtttaggtaaacgaaagctgtgtcttacttgatttattctttaaaaataaagttccctgaatatttgatgcttttcttctaaacggaaatgattttacagttatctgagtgtaccttttatagttagtagaaaatgattttaaagaatgtttagtattgtacttaaatggtatgcagaggcacagatgtaaggtttataactggaaataggtggtaagaaaaatatatagaaagcacaatgatttgaatatttttccacttaggatttcctaatctccttgtcatccaattcaagctcaagatgaagcacaattctttgatctccctttgccagttgaattttatagatcatctaatgttgagcacagtatgagaataaatattggggttgtcaacattactcagttactctttgtggtttaactctaacatttcaacaagttgtcaattaattgtatctgttgggttgtatataatgttgctcaaaataattaagtggacttccaaaaataagatttccattgtaacaggatgcattgtgatgggctttgacttacattaaagaaatgtggatagtcaa

SEQ ID NO: 18766 - DNA, 657 bp, Homo sapiens
  source 1..657: mol_type = unassigned DNA
aaagtagatcgaggcggcgggctgcacattcccgttgttgcgttgcgtttccttcctctttcactccgcgctcacggcggcggccaaagcggcggcgacggcggcgcgagaacgacccggcggccagttctcttcctcctgcgcacctgccccgctcggtcagtcagtcggcggccggcgcccggcttgtgctcagacctcgcgcttgcggcgcccaggcccagcggccgtagctagcgtctggcctgagaacctcggcgctccggcggcgcgggcaccacgagccgagcctcgcagcggctccagaggaggcaggcgagtgagcgagtccgaggggtggccggggcaggtggtggcgccgcgaagatggtcgccaagcaaaggatccgtatggccaacgagaagcacagcaagaacatcacccagcgcggcaacgtcgccaagacctcgcaattttccagattattcaaagtatcaggatgggcatgtgaagtgactgaccttaagatgtttccattctcctgtgaattttaacttgaactcattcctgatgtttgataccctggttgaaaacaattcagtaaagcatcctgcctcagaatgactttcctatcatgcttcatgtgtcattccaaggtttcttcatgagtcattcca

SEQ ID NO: 18767 - DNA, 830 bp, Homo sapiens
  source 1..830: mol_type = unassigned DNA
agtagatcgaggcggcgggctgcacattcccgttgttgcgttgcgtttccttcctctttcactccgcgctcacggcggcggccaaagcggcggcgacggcggcgcgagaacgacccggcggccagttctcttcctcctgcgcacctgccccgctcggtcagtcagtcggcggccggcgcccggcttgtgctcagacctcgcgcttgcggcgcccaggcccagcggccgtagctagcgtctggcctgagaacctcggcgctccggcggcgcgggcaccacgagccgagcctcgcagcggctccagaggaggcaggcgagtgagcgagtccgaggggtggccggggcaggtggtggcgccgcgaagatggtcgccaagcaaaggatccgtatggccaacgagaagcacagcaagaacatcacccagcgcggcaacgtcgccaagacctcgagaaatgcccccgaagagaaggcgtctgtaggaccctggttattggctctcttcatttttgttgtctgtggttctggtaagtggcttgggggctcccatcaggtagagtcttgggttgaaaggatttgggatgacgtggtgaccggtcagtagtgagtcctacctgcgtagttctcaacccacctgccgaggactccacataattctgtttcgtctgaaccaaattacttgttccacatatgcacagagggtggtgctccagaaacttctcccagcttaatttgtactcacaggagatcaaaaaggaggtcaggtcttggtaatgatccagttggaataaatgttaagaccggacaaaacctaacgaaatgagaatttagaa

SEQ ID NO: 18768 - DNA, 716 bp, Homo sapiens
  source 1..716: mol_type = unassigned DNA
accaccatcttggtagtgtgcaagactctgggacggcatgagaaaggcagaaagggagcaaaggagctggtggggtgtcacagggcctatgtatgaggcagatgtgagttctgcatccagttttgcaatttatccatttacctgcctgagacttggaaacacctactttatagtcctgattcaagtgttggcggatggaagggaggagactcctgaccctcagaatgagatcaatggcttttcaaaagcagcacaccaaactgtcaaagtggtgatccctcttcatttgacatgctcacaaagaggagaataagacaagaaagcaagctaacccagaaacagtgaggtgacagtgcgcctcaaacacaggaaaataaaatgcataactatactgattggatgctgctcaaaatcagcctacatgccatctttgaagatgaatccgcaggcaagaatgatggatgggtgaaagggagggggaatacgaaagcccagaggcggagacttcacttccgattgccacgctatatcaagaaagccaacagtctggcctttccgcaagccacaagaaaaggcagatcagactccccggctcctcgggtagttctcaaaggcaaagacaaaaataagaaactagtctgaagaaagagagtccctcgcttcttcagaactcacctgtcaagagcggcgtggacggcgccatgttgtcccggaaa

SEQ ID NO: 18769 - DNA, 1596 bp, Homo sapiens
  source 1..1596: mol_type = unassigned DNA
cccggcgcccgcgcacactcctggagtgaagagccgacctgtttcactgtcctgactcaccaccatcttggtagtgtgcaagactctgggacggcatgagaaaggcagaaagggagcaaaggagctggtggggtgtcacagggcctatgtatgaggcagatgtgagttctgcatccagttttgcaatttatccatttacctgcctgagacttggaaacacctactttatagtcctgattcaagtgttggcggatggaagggaggagactcctgaccctcagaatgagatcaatggcttttcaaaagcagcacaccaaactgtcaaagtggtgatccctcttcatttgacatgctcacaaagaggagaataagacaagaaagcaagctaacccagaaacagtgaggtgacagtgcgcctcaaacacaggaaaataaaatgcataactatactgattggatgctgctcaaaatcagcctacatgccatctttggtacgtgtgaacaaagttaccaattcctattctaactatgatatactcaaaactgtacaatcagtaatgggatgctctaaagacaaaagaactgcaaaccctttttaaaaaattattttcagtaacagtgttactttttggtattaagattgtaagaataccttgtggataatgtggaacaaaccaaatgaatacttatgtgaatgtgatattctcaaattatcatccctggtattccagagtaacaagattcttggtggtgacagaaggcaatacaaataagatagaagttaaataaaaaccttgtagtcttcaatttaaataaaactatacgtataaaactttaatttaaataaaattatgattgttacatcttttaaatagaaaaaaaaggcctagaaacaatgatcaatgcaacagcaaataagaatctctagaacctaaatacctttttttttgctagactcagccaatttttcaagaaaccctattaccttttaatgtttccttcaatgagatcaagagctaatactttttctttgttcaatttcagagatcaatagctattcaaaagtagcacaccaaaaaggcgacagggtttcctgaaaaattagccagttctaggtgtaatggttagaaatgtacaaattaatcctagaatgacttgtcttaccatatagcaaagaagtcactaaggattaattgatcaaagatgagacaatttgagcatcaataagaaaaataactacaatggactgaaacacataccttttaaatccacagctcattaagaatgggactaaaaaggccaggcgtggtggctcacgcctgtaatgccagcactttgggagggtgaggcaggtggatcacctgaggtcgggagctcgagaccagcctgaccaacatggcgaaaccccatctctactaaaaatacaaaattggccgggcatgttggcacatgcctgtaatctcagctactcaggaggctgaggcaggagaatcgcttgaacctgggaggcagaggttgcggtaagccgagatcgcaccattgcactccagcccgggcaacaacagcgaaactccatctcaaaaaaaaaaaaaaaaa

SEQ ID NO: 18770 - DNA, 761 bp, Homo sapiens
  source 1..761: mol_type = unassigned DNA
ttcaaatgcaaatttccttattaagaatgtgaaactcaaagatcaatggcttttcaaaagcagcacaccaaactgtcaaagtggtgatccctcttcatttgacatgctcacaaagaggagaataagacaagaaagcaagctaacccagaaacagtgaggtgacagtgcgcctcaaacacaggaaaataaaatgcataactatactgattggatgctgctcaaaatcagcctacatgccatctttggtacgtgtgaacaaagttaccaattcctattctaactatgatatactcaaaactgtacaatcagtaatgggatgctctaaagacaaaagaactgcaaaccctttttaaaaaattattttcagtaacagtgttactttttggtattaagattgtaagaataccttgtggataatgtggaacaaaccaaatgaatacttatgtgaatgtgatattctcaaattatcatccctggtattccagagtaacaagattcttggtggtgacagaaggcaatacaaataagatagaagttaaataaaaaccttgtagtcttcaatttaaataaaactatacgtataaaactttaatttaaataaaattatgattgttacatcttttaaatagaaaaaaaaggcctagaaacaatgatcaatgcaacagcaaataagaatctctagaacctaaatacctttttttttgctagactcagccaatttttcaagaaaccctattaccttttaatgtttccttcaatga

SEQ ID NO: 18771 - DNA, 632 bp, Homo sapiens
  source 1..632: mol_type = unassigned DNA
caccatcttggtagtgtgcaagactctgggacggcatgagaaaggcagaaagggagcaaaggagctggtggggtgtcacagggcctatgtatgaggcagatgtgagttctgcatccagttttgcaatttatccatttacctgcctgagacttggaaacacctactttatagtcctgattcaagtgttggcggatggaagggaggagactcctgaccctcagaatggcttggagtgcaatggcacgatgtcggctcactgcaacctctgtctgccgggttcaaacaattttcctacctcagcctcccaagtagctgggattacagagatcaatggcttttcaaaagcagcacaccaaactgtcaaagtggtgatccctcttcatttgacatgctcacaaagaggagaataagacaagaaagcaagctaacccagaaacagtgaggtgacagtgcgcctcaaacacaggaaaataaaatgcataactatactgattggatgctgctcaaaatcagcctacatgccatctttggtacgtgtgaacaaagttaccaattcctattctaactatgatatactcaaaactgtacaatcagtaatgggatgctctaaagacaaaagaactgcaaaccct

SEQ ID NO: 18772 - DNA, 3171 bp, Homo sapiens
  source 1..3171: mol_type = unassigned DNA
aaacgcgcacgcgcaaatctagggcgacgcttgacagagcttgggagggtgcgcctgctttcgccctccttctccagcgggaggggcgcgcacttccgcggggcggagtccgtctagtgctgacgttggcagccgaacccaaagtagatcgaggcggcgggctgcacattcccgttgttgcgttgcgtttccttcctctttcactccgcgctcacggcggcggccaaagcggcggcgacggcggcgcgagaacgacccggcggccagttctcttcctcctgcgcacctgccccgctcggtcagtcagtcggcggccggcgcccggcttgtgctcagacctcgcgcttgcggcgcccaggcccagcggccgtagctagcgtctggcctgagaacctcggcgctccggcggcgcgggcaccacgagccgagcctcgcagcggctccagaggaggcaggcgagtgagcgagtccgaggggtggccggggcaggtggtggcgccgcgaagatggtcgccaagcaaaggatccgtatggccaacgagaagcacagcaagaacatcacccagcgcggcaacgtcgccaagacctcgagaaatgcccccgaagagaaggcgtctgtaggaccctggttattggctctcttcatttttgttgtctgtggttctgcaattttccagattattcaaagtatcaggatgggcatgtgaagtgactgaccttaagatgtttccattctcctgtgaattttaacttgaactcattcctgatgtttgataccctggttgaaaacaattcagtaaagcatcctgcctcagaatgactttcctatcatgcttcatgtgtcattccaaggtttcttcatgagtcattccaagttttctagtccataccacagtgccttgcaaaaaacaccacatgaataaagcaataaaatttgattgttaagatacagtagtggaccctacttattcagtcaattaagagtaagtttttttatgtggttattaaaacagtatgaacaattagtctaactctgcatagacagggtctagattttgttaacccaaatgtataactgcagttagcttaaattacaatttgaagtcttgtggtttttatatagctaggcactttattactcttttgaactgaaagcacactcccttataggttcatgtaactgtcctgtaataaggtgcttataaatggaacaactacacagcctagttttgccacaacctttagcatctaaaaagttttaaaagcttctaaatgtctaatataaagggagatgcttatagccacaacatctattttaccaatattgtttccattacactaccttggattttgcatgagtgagtatagtaacccaagatgccataaaaaaaaaacttgatcgttttctgacttaatcagttactgtggtttcactaaaagctaccgtggtggagtgaagtcagtcagggaaggtttgtttatgttacatttatttcaccagaactattttaatatatcaaaggggtttactatgccaaacaaaattctagggaaaaatactgctaaaaatggatgcctcatcagaacatgctgttgagtccaatgtgccataagacattttagcatgttaaatagcacttttaatagcaaaaaaaggcacatcaactgcgaagttatccttagtttgcaaatgctttttctagattaatgatttttcaatcattagggtactagacacatcagcctaaagtggcatctggaattgaatggatttactgataatgatcagtctttagtcttccctttgttatatgactttataggttatgattgatcaaatttacgttttactaatggtaagggtgagggtcatagggcaggttttgggttttctagtactgttgaaaactgcaagtattggctatttgtatacttagccataacttggtgaaaaaaaacctgagcagtgtctatgtattaatgcgttggaaagaaagctgcttgtgtttgctttgttaattgcctcaggatatttcttttaaaataagctgttttaagaggaacagaagggaaatctgctacctagtctatacacagcgtgaacctcacagggggcttctgataccctcaaacatggagaacagtaagggagcagagtggttaaggactttcaggaacttaactattctggaataaggaatgaatcaactgaccttgggccagcaggtttttaactaaattgttacttgcctttctcacccagttaatcagtctctgtacttgtttccctttttgaaacaagtgtcttggttaactaattctgttttatggttgtgctaaattcatagcaggtgccttattctttgcttttagtcaaaccattccatatcagaattttccttggtttactatagatatttggctttaagttgttgtttgtgttttttaatgtacaatgttctgataaatttgactgttaaattgctatagctagcaatcattttacatatgtaaaattgcattccctttgtatttcatgtgtaattcaccaattaagtgcagtttatattcaggttggattatgcatgtttaggtaaacgaaagctgtgtcttacttgatttattctttaaaaataaagttccctgaatatttgatgcttttcttctaaacggaaatgattttacagttatctgagtgtaccttttatagttagtagaaaatgattttaaagaatgtttagtattgtacttaaatggtatgcagaggcacagatgtaaggtttataactggaaataggtggtaagaaaaatatatagaaagcacaatgatttgaatatttttccacttaggatttcctaatctccttgtcatccaattcaagctcaagatgaagcacaattctttgatctccctttgccagttgaattttatagatcatctaatgttgagcacagtatgagaataaatattggggttgtcaacattactcagttactctttgtggtttaactctaacatttcaacaagttgtcaattaattgtatctgttgggttgtatataatgttgctcaaaataattaagtggacttccaaaaataagatttccattgtaacaggatgcattgtgatgggctttgacttacattaaagaaatgtggatagtcaactgc

SEQ ID NO: 18773 - DNA, 2619 bp, Homo sapiens
  source 1..2619: mol_type = unassigned DNA
cgctcacttctgcttgcacttaggcgacctcgggagctcggactcctacgcagtcaccgggaagggccgccgccccgcccgcggctgctggcccgggtgacgcttccgcctgctataagagcagcggccctcggtgcctccttcctgacctcgcacccagctcggagcccggagcgtgcctcggcggcctgtcggttttcaccatggagcagctgagctcagcaaacacccgcttcgccttggacctgttcctggcgttgagtgagaacaatccggctggaaacatcttcatctctcccttcagcatttcatctgctatggccatggtttttctggggaccagaggtaacacggcagcacagctgtccaagactttccatttcaacacggttgaagaggttcattcaagattccagagtctgaatgctgatatcaacaaacgtggagcgtcttatattctgaaacttgctaatagattatatggagagaaaacttacaatttccttcctgagttcttggtttcgactcagaaaacatatggtgctgacctggccagtgtggattttcagcatgcctctgaagatgcaaggaagaccataaaccagtgggtcaaaggacagacagaaggaaaaattccggaactgttggcttcgggcatggttgataacatgaccaaacttgtgctagtaaatgccatctatttcaagggaaactggaaggataaattcatgaaagaagccacgacgaatgcaccattcagattgaataagaaagacagaaaaactgtgaaaatgatgtatcagaagaaaaaatttgcatatggctacatcgaggaccttaagtgccgtgtgctggaactgccttaccaaggcgaggagctcagcatggtcatcctgctgccggatgacattgaggacgagtccacgggcctgaagaagattgaggaacagttgactttggaaaagttgcatgagtggactaaacctgagaatctcgatttcattgaagttaatgtcagcttgcccaggttcaaactggaagagagttacactctcaactccgacctcgcccgcctaggtgtgcaggatctctttaacagtagcaaggctgatctgtctggcatgtcaggagccagagatatttttatatcaaaaattgtccacaagtcatttgtggaagtgaatgaagagggaacagaggcggcagctgccacagcaggcatcgcaactttctgcatgttgatgcccgaagaaaatttcactgccgaccatccattccttttctttattcggcataattcctcaggtagcatcctattcttggggagattttcttccccttagaagaaagagactgtagcaatacaaaaatcaagcttagtgctttattacctgagtttttaatagagccaatatgtcttatatctttaccaataaaaccactgttcagaaacaagtctttcattttctttgtaagtttggctctgttggctgtttacacccatgaattttggcatgggtatctatttttcttttttacattgaaaaaaatccagtggttgcttttgaatgcatcaagtaaagaagaagaaaagaatacatccgatgcgtagattcttgaccatgtagtaatctataaaattgctatatcctcctgatagccatgggaaaacatgataagatggtcatttattttgcagttagaattttggaagccacaaaatagacagacaccctgactgttgaagggaggtttaaaaacagatattcaattgaaatgtaagagagcaccccaattgagagcccaggttacgaagacaagcttgcctcgcctgacttttctgtcccttgttctgcaggattagtattctgttacagacctctagtttttagactcttcaattaaagggccaatggttataacctgcattcccttttttgttcttctttatgtataatatatagttcatgtggcgctgcatgaaatcaagaagtgggtgtcttaggataaaagataccaagagtctacaaaaataaccatgtagtaagataaactgctgaacaaaggttttactgttagccaccttctcatgtgttttcttttctctttttctttttctttctttctttcttttttttttttttgagacagagtcttgctctgttacccaggctggagtgcagtggcacgatctcagctcaccgcaacctctgcctcctgggttcaagtgattctcttgcttcagcctcctgagtagctgggattataggcatgcaccactaggcctggctaatttttgtatttttagtagagatggggtttttccatgttggccaggctggtcccgaactcctgacctcaggtgatccgcgcacctcagcctcccaaagtgctgggattacaggcatgagctaccatgcctggccttctcatgtgttttctgattaaggctcttgacttccaaggctgtgtggggagatggggtgggggctcttggactgatataaaactttgtcaaatgtagttctttgaatggagcttgaaacgccgcatattcttgctcccacaaggatagtgggcatcatgaattaataaaacgtcctaggattctgcaagcta

SEQ ID NO: 18774 - DNA, 449 bp, Homo sapiens
  source 1..449: mol_type = unassigned DNA
gagttcttggtttcgactcagaaaacatatggtgctgacctggccagtgtggattttcagcatgcctctgaagatgcaaggaagaccataaaccagtgggtcaaaggacagacagaaggaaaaattccggaactgttggcttcgggcatggttgataacatgaccaaacttgtgctagtaaatgccatctatttcaagggaaactggaaggataaattcatgaaagaagccacgacgaatgcaccattcagattgaataagaaaatttcactgccgaccatccattccttttctttattcggcataattcctcaggtagcatcctattcttggggagattttcttccccttagaagaaagagactgtagcaatacaaaaatcaagcttagtgctttattacctgagtttttaatagagccaatatgtcttatatctttaccaataaaac

SEQ ID NO: 18775 - DNA, 782 bp, Homo sapiens
  source 1..782: mol_type = unassigned DNA
acgcagtcaccgggaagggccgccgccccgcccgcggctgctggcccgggtgacgcttccgcctgctataagagcagcggccctcggtgcctccttcctgacctcgcacccagctcggagcccggagcgtgcctcggcggcctgtcggcatttcatctgctatggccatggtttttctggggaccagaggtaacacggcagcacagctgtccaagactttccatttcaacacggttgaagaggttcattcaagattccagagtctgaatgctgatatcaacaaacgtggagcgtcttatattctgaaacttgctaatagattatatggagagaaaacttacaatttccttcctgagttcttggtttcgactcagaaaacatatggtgctgacctggccagtgtggattttcagcatgcctctgaagatgcaaggaagaccataaaccagtgggtcaaaggacagacagaaggaaaaattccggaactgttggcttcgggcatggttgataacatgaccaaacttgtgctagtaaatgccatctatttcaagggaaactggaaggataaattcatgaaagaagccacgacgaatgcaccattcagattgaataagaaagacagaaaaactgtgaaaatgatgtatcagaagaaaaaatttgcatatggctacatcgaggaccttaagtgccgtgtgctggaactgccttaccaaggcgaggagctcagcatggtcatcctgctgccggatgacattgaggacgagtccacgggcctgaagaag

SEQ ID NO: 18776 - DNA, 872 bp, Homo sapiens
  source 1..872: mol_type = unassigned DNA
agctcggagcccggagcgtgcctcggcggcctgtcggagctgtttgtgacggtttccaggcagcccagggccaggccgcggctcctatctgcagctgcagggagagagaggaggaaccccgtgcgattctagagacgatttcacaacaaggagaaatcagctttgtgcttacatgccgagcagccagcacggttcttctttgcctgtcctcgggggaaatcagggctctgagagtggagatcgagatgggctagtgggtggcggatgggacgctgcacggccagaccctggactgtgttttcaccatggagcagctgagctcagcaaacacccgcttcgccttggacctgttcctggcgttgagtgagaacaatccggctggaaacatcttcatctctcccttcagcatttcatctgctatggccatggtttttctggggaccagaggtaacacggcagcacagctgtccaagactttccatttcaacacggttgaagaggttcattcaagattccagagtctgaatgctgatatcaacaaacgtggagcgtcttatattctgaaacttgctaatagattatatggagagaaaacttacaatttccttcctgagttcttggtttcgactcagaaaacatatggtgctgacctggccagtgtggattttcagcatgcctctgaagatgcaaggaagaccataaaccagtgggtcaaaggacagacagaaggaaaaattccggaactgttggcttcgggcatggttgataacatgaccaaacttgtgctagtaaatgccatctatttcaagggaaactggaaggataaattcatgaaagaagccacgacgaatgcaccattcagattgaataag

SEQ ID NO: 18777 - DNA, 580 bp, Homo sapiens
  source 1..580: mol_type = unassigned DNA
ctgacctcgcacccagctcggagcccggagcgtgcctcggcggcctgtcgggtaaggccgggcctcggagcggtggcgcgggggcgggcgcggggagaggccaggctccctcgctcagcttccagcccggcaccccccaccccccaggctcaggcccctcagacccgcagctccctgcgctcgccctccccgccagcttcgcgcccccatcccttccgggcgccccgacggagacagacgacctctgatcccccgcccccgcctggttttcaccatggagcagctgagctcagcaaacacccgcttcgccttggacctgttcctggcgttgagtgagaacaatccggctggaaacatcttcatctctcccttcagcatttcatctgctatggccatggtttttctggggaccagaggtaacacggcagcacagctgtccaagactttccatttcaacacggttgaagaggttcattcaagattccagagtctgaatgctgatatcaacaaacgtggagcgtcttatattctgaaacttgctaatagattatatggagagaaaacttacaatttccttcct

SEQ ID NO: 18778 - DNA, 2161 bp, Homo sapiens
  source 1..2161: mol_type = unassigned DNA
ttgcgctgtggggctgcccgggctgcgcggcgtctgcaggcgccaccgctgcctctttccggctgtgaccctcctcgccgccgccgcttggctgcgtcctccgactccccgcgccgccgagaccaggctcccgctccggttgcggccgcaccgccctccgcggccgccccctggggatccagcgagcgcggtcgtccttggtggaaggaaccatgaactggcatctccccctcttcctcttggcctctgtgacgctgccttccatctgctcccacttcaatcctctgtctctcgaggaactaggctccaacacggggatccaggttttcaatcagattgtgaagtcgaggcctcatgacaacatcgtgatctctccccatgggattgcgtcggtcctggggatgcttcagctgggggcggacggcaggaccaagaagcagctcgccatggtgatgagatacggcgtaaatggagttggtaaaatattaaagaagatcaacaaggccatcgtctccaagaagaataaagacattgtgacagtggctaacgccgtgtttgttaagaatgcctctgaaattgaagtgccttttgttacaaggaacaaagatgtgttccagtgtgaggtccggaatgtgaactttgaggatccagcctctgcctgtgattccatcaatgcatgggttaaaaatgaaaccagggatatgattgacaatctgctgtccccagatcttattgatggtgtgctcaccagactggtcctcgtcaacgcagtgtatttcaagggtctgtggaaatcacggttccaacccgagaacacaaagaaacgcactttcgtggcagccgacgggaaatcctatcaagtgccaatgctggcccagctctccgtgttccggtgtgggtcgacaagtgcccccaatgatttatggtacaacttcattgaactgccctaccacggggaaagcatcagcatgctgattgcactgccgactgagagctccactccgctgtctgccatcatcccacacatcagcaccaagaccatagacagctggatgagcatcatggtgcccaagagggtgcaggtgatcctgcccaagttcacagctgtagcacaaacagatttgaaggagccgctgaaagttcttggcattactgacatgtttgattcatcaaaggcaaattttgcaaaaataacaaggtcagaaaacctccatgtttctcatatcttgcaaaaagcaaaaattgaagtcagtgaagatggaaccaaagcttcagcagcaacaactgcaattctcattgcaagatcatcgcctccctggtttatagtagacagaccttttctgtttttcatccgacataatcctacaggtgctgtgttattcatggggcagataaacaaaccctgaagagtatacaaaagaaaccatgcaaagcaacgactactttgctacgaagaaagactcctttcctgcatctttcatagttctgttaaatatttttgtacatcgcttctttttcaaaactagttcttaggaacagactcgatgcaagtgtttctgttctgggaggtattggagggaaaaaacaagcaggatggctggaacactgtactgaggaatgaatagaaaggcttccagatgtctaaaagattctttaaactactgaactgttacctaggttaacaaccctgttgagtatttgctgtttgtccagttcaggaatttttgttttgttttgtctatatgtgcggcttttcagaagaaatttaatcagtgtgacagaaaaaaaaatgttttatggtagcttttactttttatgaaaaaaaaattatttgccttttaaattcttttcccccatccccctccaaagtcttgatagcaagcgttattttggtggtagaaacggtgaaatctctagcctctttgtgtttttgttgttgttgttgttgttgttttatataatgcatgtattcactaaaataaaatttaaaaaactcctgtcttgctagacaaggttgctgttgtgcagtgtgcctgtcactactggtctgtactccttggatttgcatttttgtattttgtacaaagtaaaaataaactgttatgagtagtaaaaataaagctatttctctgctatttgaaaatacaatagaagaaactga

SEQ ID NO: 18779 - DNA, 2195 bp, Homo sapiens
  source 1..2195: mol_type = unassigned DNA
cgataaagcccccgccgccgcggcagccagcttgcgctgtggggctgcccgggctgcgcggcgtctgcaggcgccaccgctgcctctttccggctgtgaccctcctcgccgccgccgcttggctgcgtcctccgactccccgcgccgccgagaccaggctcccgctccggttgcggccgcaccgccctccgcggccgccccctggggatccagcgagcgcggtcgtccttggtggaaggaaccatgaactggcatctccccctcttcctcttggcctctgtgacgctgccttccatctgctcccacttcaatcctctgtctctcgaggaactaggctccaacacggggatccaggttttcaatcagattgtgaagtcgaggcctcatgacaacatcgtgatctctccccatgggattgcgtcggtcctggggatgcttcagctgggggcggacggcaggaccaagaagcagctcgccatggtgatgagatacggcgtaaatggagttggtaaaatattaaagaagatcaacaaggccatcgtctccaagaagaataaagacattgtgacagtggctaacgccgtgtttgttaagaatgcctctgaaattgaagtgccttttgttacaaggaacaaagatgtgttccagtgtgaggtccggaatgtgaactttgaggatccagcctctgcctgtgattccatcaatgcatgggttaaaaatgaaaccagggatatgattgacaatctgctgtccccagatcttattgatggtgtgctcaccagactggtcctcgtcaacgcagtgtatttcaagggtctgtggaaatcacggttccaacccgagaacacaaagaaacgcactttcgtggcagccgacgggaaatcctatcaagtgccaatgctggcccagctctccgtgttccggtgtgggtcgacaagtgcccccaatgatttatggtacaacttcattgaactgccctaccacggggaaagcatcagcatgctgattgcactgccgactgagagctccactccgctgtctgccatcatcccacacatcagcaccaagaccatagacagctggatgagcatcatggtgcccaagagggtgcaggtgatcctgcccaagttcacagctgtagcacaaacagatttgaaggagccgctgaaagttcttggcattactgacatgtttgattcatcaaaggcaaattttgcaaaaataacaacagggtcagaaaacctccatgtttctcatatcttgcaaaaagcaaaaattgaagtcagtgaagatggaaccaaagcttcagcagcaacaactgcaattctcattgcaagatcatcgcctccctggtttatagtagacagaccttttctgtttttcatccgacataatcctacaggtgctgtgttattcatggggcagataaacaaaccctgaagagtatacaaaagaaaccatgcaaagcaacgactactttgctacgaagaaagactcctttcctgcatctttcatagttctgttaaatatttttgtacatcgcttctttttcaaaactagttcttaggaacagactcgatgcaagtgtttctgttctgggaggtattggagggaaaaaacaagcaggatggctggaacactgtactgaggaatgaatagaaaggcttccagatgtctaaaagattctttaaactactgaactgttacctaggttaacaaccctgttgagtatttgctgtttgtccagttcaggaatttttgttttgttttgtctatatgtgcggcttttcagaagaaatttaatcagtgtgacagaaaaaaaaatgttttatggtagcttttactttttatgaaaaaaaaattatttgccttttaaattcttttcccccatccccctccaaagtcttgatagcaagcgttattttggtggtagaaacggtgaaatctctagcctctttgtgtttttgttgttgttgttgttgttgttttatataatgcatgtattcactaaaataaaatttaaaaaactcctgtcttgctagacaaggttgctgttgtgcagtgtgcctgtcactactggtctgtactccttggatttgcatttttgtattttgtacaaagtaaaaataaactgttatgagtagtaaaaataaagctatttctctgctatttgaaaatacaatagaagaaactga

SEQ ID NO: 18780 - DNA, 5989 bp, Homo sapiens
  source 1..5989: mol_type = unassigned DNA
ttcacagctgtagcacaaacagatttgaaggagccgctgaaagttcttggcattactgacatgtttgattcatcaaaggcaaattttgcaaaaataacaagtatgttcaatttaaaatgtatttgtatacttgaagaaagtgttacaaactgagactgatttgtgcagagaaaaaggatcagaattaggaatgtgttgccctgaaactgtacaaggtttcatttgatacattgccaaattatgctattggccttcgtttatttattgaccttcatttatttattttttccttttatctttttatttcaatagtttttgggatacaagtggtttttggttacatggatcagtttatatagcgatgaagtctgagattttagtacacccctcccccgagtagtatacgttgtactcaatatgtattaatagatttttagctcctcaccaacccaccctcctccttctgagtctccataatccattataccactccgtatgcctttgcatacccgtagcttatctcccacttacaagcgagaacatacagtatttggttttccattcttgagttacttcatttagaataatggcctccagctccattcaagttgctgcaaaagatattatttcattctttttatgactgagtagtattccatgatgtgtacatacctcattttctttatctagtcattgctcttgaccttcatttaaatcagcgtccccacattttgcacgtacatttcatgggaagccccagtgactacctaaaggagtatttcatgtattgcttttatgaatattggctctgacttaggtgttgtcgctctgttttcaaatgccaactttttccttttgcttgaaaaaaagtcaagactgcagtcattcactgtacccagatatgtattttggcatttcatgctcattaatatgaaacgatataaattcaaatgaatctgattaaaactttcctttgccaaagcaattaaggcatgcttttcatttgccagcagtatatgtacctttttctagagttatgtttgaatggtcagtcctttgttctttaaatttagaacatagcaatctttccaaggaaaagccatggcttgaacattatttgcactccagtttgcaaataactttgagtggtaagaaattagctcattaccagcttcagttgcatgctagtaaacacctagtacctgttctggggacaaacatgactcccctggtgaacctgcagctccatggatattctgatagccgttcatccctcatgactcaaactcaggcctccagcccagcagcattagcatcacccaggagcttgtttgaaatgcacaatcttgggtgtaacccagacccactgaaccagaatccattttaacacagtccctcagcccagcaaagactgagaagcaccattttcatctgcacttttcccttcaaggttgttcatggtagctgaaatactaaatggggggtgttcacaggaagaaccaggtgccccagattctcctggaaagtcctctttaacactgcatgtgacttgggccctataaatgtgcatctcagtcacaatttggtcatattagagctgggcattggtgcagatagttcacaagcagatgacacaaaaagcacattttccctttgcatccagacctatgtcccatccagactaatatcaacttaagtttttcattctctgtgaaagctacacccagtgggtgttgctggaatggtcagaatttgctgagaagtaaagtgagttcaccagaatgtccctgaggcacaactgcatttacacatcggcccttccaggaaaatctaaactcttctcttgttcgacactcttctcttactagcatgcccatgagatgagtggctgttgtgaagagccaggacttactctgccactaactagccgtatgattgcagggaacattacttaacgttctaggcctcagtttccccatctgtaaatgctgtctgaaatcccttctgcatctgcattctgtaactgaaaaataatcttgttgccttgctgcttccagaaaaccgggcttcctttttaaagctctgctcttttcatttttaaaaaacaattctagtgatcagaattgaattgatagaggcactaaatcatttgagggcctgggcccttctccagaagtgagtatcacagttcacttagcagggactgaaattcacaagtaacagctgtctgcagccttcaacaccaggactgtcagaggtcatgtcttctgacactttaaaaattggaatttgccatggctttgagctttgaggttacttccccaaccaaccaatggcctgcctatcaaacaaatgctgatactgttttattttctggaagcagggtcagaaaacctccatgtttctcatatcttgcaaaaagcaaaaattgaagtcagtgaagatggaaccaaagcttcagcagcaacaagtaagcactgggtcacgtggcagggcttcctctagcaggggagcaaacacattcctgtatactcattggttgagcaaatatgtaatgcaccctctttccagccaggcagtgtgtgtgggttaaccctcaggagacagcagtgagtacagacagactgaagacctgtaaccacaaagctcagaatctgtttcattaaagaaaagcatttcagtgagagaaattcctctaggacaggagtcagcaaacttctataaagagccaggtagtatgtatttcagatttgtgtgtcataccatctccattacagcttcttagctctttcactgtagcatgaaaacagcaatcaacaatacaagtaaacagatgtggctgtgttccaataaaactttatttataaaaacaggatttgtcctggtagacttgccttgaggaaaatagtttgctgacccctgctctcaggaggataaaacatgttctggcttcttactggcaaaaaagaccaatcttcagatttgaacataaaataaacaacaagtacttaaaggaaaataggcaatcaggtctatccaggataaaccgaagaattcgccagcatctgttgaattgcggcaggattgctgtacagccttccttgataattagaacatccacatctgcttcctcctcagtggtttacataatgaaggagaaaacagaacaatcgtaagtcagttttttcacccctcattatccgtaggaaaatagatgaatagatttggccaactctgtgagcccataaagtgaaaatcttagctacacttgcagctgggtcaaatatctctggtcattgaaacataccagttatactcacaatagatgtgttattgcctttctcgaataaacgttttaaaaattcctttaaagaagcatttaaaacaaagaccctgaaataagagggttggaaattttaagatgctttttgtcttttctaggtaattttaagtaacatctaaaagttattgaccagttttgctgagtgtaactatcaggaccagctacatagtttgtggggtcctgtgccaaatgaaaatatggagccccttgttcaaaatgtataagaatttcaagatagcaacagcagagtattaaacccagtgcagggccccatgtaaccgcccaggtcctcctgtcttagtccgcctgggctgccatgacaaaataccgttgactgagtggtttaaacaacagaactcacacttctggaggctgcgagttcaagatcaaggtgttggtgttggcaggtttgtttctcctgagatctctggatctccggaggtcgccccctccctgtgtcctcacatggtcttttctccatgtgacacatccctggtgtctctcccacttcaaataagggcaacggtcctattagaatagaaccctacttaaccttcattacctcctcaaaggcattatctccaaatacagttacgttaggggtttggggcttcagcatatgaatttggggggagacacatttcagtccataacacctgctatttaatatttgtttttaataaccctgggtaaaagggcttgccccagcataactgcagctgtttcctttataacatcaagcccaagtgttcaatacttcatggggtttgagcaagaggactgagctattgcaacaggcatgtggtagtaatgccacacacctaccctcccgtgaggccctggttcaggcttattaaatggaaacaagcctggcagacgaggaatggccaagacccatgaggctaaagaagtttgctttccaagtcagatgcctacacctggtgagtggaacagcagtataaggtagtaggtcccggatgagtggtctacattccagtgcagaggaaacctaaataatgtgccaaaggagaaggcacagacacaaaagctaagaattggactgggcctttatatacagaaaagatttagagaagctaaacaggaccaggggtcgggcgcggtggctcatgcctgtaatgcccgcactttgggaggctgaggcaggtggatcacttgaggtcaggagttcaaaaccagcgtgaccaacatagtgaaaccctgtctctaaaaatacaaaaattagccaggcgtggtggtgcatgcctgtaatcccagctactcaggaggctgaggcaggagaatcgcttgaacccgggaggcaaaggttgcagtgagccaagatcgcgccactgcactccagcctgggtgacagagtgagactccatccccaaaaaaaaggactgggggctttatcagcaaagcagatggtgtgaataaaaaatagctaataacaataaatatgcattagatgtgtttagtggcaaacactgttctaagagctataatatatcttatgtcatttaattatgtcatttaattctcatcaaaactctatgaggagtaagtatgtttatcagagatggtgcttgtgtagaagacatgagagagtaatgtaaagggcctggcccaaggtaggcttagtaaatggtgaccattgagcctgttgtaacatggccagcctatggaacaagcatgaagtgtgtcttcagacaccagcctctgagggtccatgaagctagctaacttgctggccttatgcttacatggtctcatgtaatgtgcacaacacattttccttttcttcccgtagctgcaattctcattgcaagatcatcgcctccctggtttatagtagacagaccttttctgtttttcatccgacataatcctacaggtgctgtgttattcatggggcagataaacaaaccctgaagagtatacaaaagaaaccatgcaaagcaacgactactttgctacgaagaaagactcctttcctgcatctttcatagttctgttaaatatttttgtacatcgcttctttttcaaaactagttcttaggaacagactcgatgcaagtgtttctgttctgggaggtattggagggaaaaaacaagcaggatggctggaacactgtactgaggaatgaatagaaaggcttccagatgtctaaaagattctttaaactactgaactgttacctaggttaacaaccctgttgagtatttgctgtttgtccagttcaggaatttttgttttgttttgtctatatgtgcggcttttcagaagaaatttaatcagtgtgacagaaaaaaaaatgttttatggtagcttttactttttatgaaaaaaaaattatttgccttttaaattcttttcccccatccccctccaaagtcttgatagcaagcgttattttggtggtagaaacggtgaaatctctagcctctttgtgtttttgttgttgttgttgttgttgttttatataatgcatgtattcactaaaataaaatttaaaaaactcctgtcttgctagacaaggttgctgttgtgcagtgtgcctgtcactactggtctgtactccttggatttgcatttttgtattttgtacaaagtaaaaataaactgttatgagtagtaaaaataaa

SEQ ID NO: 18781 - DNA, 2569 bp, Homo sapiens
  source 1..2569: mol_type = unassigned DNA
aatccttggttaggaggaaagggagtggagaggaccgtgctgcctggcgttccccagctgcctttctttctgttttccccccaacggaatctctatgtggtctcctagagcctcgtgcctgcctctcagctagatgctgatatcattcccactcatgtagttgggaaggaagggtgtggcagagataaagggtccacggtcacgcagtatgtggggggtcacacagcctgtatgccaaagtggcacaccctgtgaatatgtagggtcgcacagcctttatgtgtcagtgccagagcctggacccgggtctgtagatgtgtgaaccgtgagctgataccatggatattcaaagatttacatcccatcaatgtttataccttcttgagaagaaatttgtgtcaaagcacactcctcctttcaagactacctcctcgccgtgctgcgtgatagccctagtatcacaaccaaaacacatgatacagaaagaggccagtatctgtgtggcttcaggctcttgtgcgttggccatgaagcaaaggaaggctgttgcatgaaataacctccttctgactccacccttgcatttgtgagatgtaaacagcagtgttaccaagaggtcttccagggaacacgttgcaggtcgtccttggtggaaggaaccatgaactggcatctccccctcttcctcttggcctctgtgacgctgccttccatctgctcccacttcaatcctctgtctctcgaggaactaggctccaacacggggatccaggttttcaatcagattgtgaagtcgaggcctcatgacaacatcgtgatctctccccatgggattgcgtcggtcctggggatgcttcagctgggggcggacggcaggaccaagaagcagctcgccatggtgatgagatacggcgtaaatggagttggtaaaatattaaagaagatcaacaaggccatcgtctccaagaagaataaagacattgtgacagtggctaacgccgtgtttgttaagaatgcctctgaaattgaagtgccttttgttacaaggaacaaagatgtgttccagtgtgaggtccggaatgtgaactttgaggatccagcctctgcctgtgattccatcaatgcatgggttaaaaatgaaaccagggatatgattgacaatctgctgtccccagatcttattgatggtgtgctcaccagactggtcctcgtcaacgcagtgtatttcaagggtctgtggaaatcacggttccaacccgagaacacaaagaaacgcactttcgtggcagccgacgggaaatcctatcaagtgccaatgctggcccagctctccgtgttccggtgtgggtcgacaagtgcccccaatgatttatggtacaacttcattgaactgccctaccacggggaaagcatcagcatgctgattgcactgccgactgagagctccactccgctgtctgccatcatcccacacatcagcaccaagaccatagacagctggatgagcatcatggtgcccaagagggtgcaggtgatcctgcccaagttcacagctgtagcacaaacagatttgaaggagccgctgaaagttcttggcattactgacatgtttgattcatcaaaggcaaattttgcaaaaataacaaggtcagaaaacctccatgtttctcatatcttgcaaaaagcaaaaattgaagtcagtgaagatggaaccaaagcttcagcagcaacaactgcaattctcattgcaagatcatcgcctccctggtttatagtagacagaccttttctgtttttcatccgacataatcctacaggtgctgtgttattcatggggcagataaacaaaccctgaagagtatacaaaagaaaccatgcaaagcaacgactactttgctacgaagaaagactcctttcctgcatctttcatagttctgttaaatatttttgtacatcgcttctttttcaaaactagttcttaggaacagactcgatgcaagtgtttctgttctgggaggtattggagggaaaaaacaagcaggatggctggaacactgtactgaggaatgaatagaaaggcttccagatgtctaaaagattctttaaactactgaactgttacctaggttaacaaccctgttgagtatttgctgtttgtccagttcaggaatttttgttttgttttgtctatatgtgcggcttttcagaagaaatttaatcagtgtgacagaaaaaaaaatgttttatggtagcttttactttttatgaaaaaaaaattatttgccttttaaattcttttcccccatccccctccaaagtcttgatagcaagcgttattttggtggtagaaacggtgaaatctctagcctctttgtgtttttgttgttgttgttgttgttgttttatataatgcatgtattcactaaaataaaatttaaaaaactcctgtcttgctagacaaggttgctgttgtgcagtgtgcctgtcactactggtctgtactccttggatttgcatttttgtattttgtacaaagtaaaaataaactgttatgagtagtaaaaataaa

SEQ ID NO: 18782 - DNA, 1716 bp, Homo sapiens
  source 1..1716: mol_type = unassigned DNA
agtgatacccgcagctgggagcaccggggccggcgtggctcctgcccggccatccgagccggccctgaccctgaacctgaggtttccagctgctcgccggcaacccctaccccggacttaggctgcgcgccgccggatggggagagactggcgcactcttacttgttacctctgcctgggcagagggaggtgacgcgcggtgtggggaaagcctttaacttggcctctggcagccgatttaacccgagcgagcaggtctttgctattttcatcatctgtagaaacgggagttgcgaggcggatgagtgactgcaggtcgtccttggtggaaggaaccatgaactggcatctccccctcttcctcttggcctctgtgacgctgccttccatctgctcccacttcaatcctctgtctctcgaggaactaggctccaacacggggatccaggttttcaatcagattgtgaagtcgaggcctcatgacaacatcgtgatctctccccatgggattgcgtcggtcctggggatgcttcagctgggggcggacggcaggaccaagaagcagctcgccatggtgatgagatacggcgtaaatggagttggtaaaatattaaagaagatcaacaaggccatcgtctccaagaagaataaagacattgtgacagtggctaacgccgtgtttgttaagaatgcctctgaaattgaagtgccttttgttacaaggaacaaagatgtgttccagtgtgaggtccggaatgtgaactttgaggatccagcctctgcctgtgattccatcaatgcatgggttaaaaatgaaaccagggatatgattgacaatctgctgtccccagatcttattgatggtgtgctcaccagactggtcctcgtcaacgcagtgtatttcaagggtctgtggaaatcacggttccaacccgagaacacaaagaaacgcactttcgtggcagccgacgggaaatcctatcaagtgccaatgctggcccagctctccgtgttccggtgtgggtcgacaagtgcccccaatgatttatggtacaacttcattgaactgccctaccacggggaaagcatcagcatgctgattgcactgccgactgagagctccactccgctgtctgccatcatcccacacatcagcaccaagaccatagacagctggatgagcatcatggtgcccaagagggtgcaggtgatcctgcccaagttcacagctgtagcacaaacagatttgaaggagccgctgaaagttcttggcattactgacatgtttgattcatcaaaggcaaattttgcaaaaataacaaggtcagaaaacctccatgtttctcatatcttgcaaaaagcaaaaattgaagtcagtgaagatggaaccaaagcttcagcagcaacaactgcaattctcattgcaagatcatcgcctccctggtttatagtagacagaccttttctgtttttcatccgacataatcctacaggtgctgtgttattcatggggcagataaacaaaccctgaagagtatacaaaagaaaccatgcaaagcaacgactactttgctacgaagaaagactcctttcctgcatctttcatagttctgttaaatatttttgtacatcgcttctttttcaaaactagttcttaggaacagactcgatgcaagtgtttctgttctgggaggtattggagggaaaaaacaagca

SEQ ID NO: 18783 - DNA, 680 bp, Homo sapiens
  source 1..680: mol_type = unassigned DNA
ggaaaagggaagttctccaactgagttgctctctgaagctatcccggtgaccagcaagcactcatcctgcttctagaagtcaacaaggatacactgaacctgcttctgatttctttagggtcgacaagtgcccccaatgatttatggtacaacttcattgaactgccctaccacggggaaagcatcagcatgctgattgcactgccgactgagagctccactccgctgtctgccatcatcccacacatcagcaccaagaccatagacagctggatgagcatcatggtgcccaagagggtgcaggtgatcctgcccaagttcacagctgtagcacaaacagatttgaaggagccgctgaaagttcttggcattactgacatgtttgattcatcaaaggcaaattttgcaaaaataacaaggtcagaaaacctccatgtttctcatatcttgcaaaaagcaaaaattgaagtcagtgaagatggaaccaaagcttcagcagcaacaactgcaattctcattgcaagatcatcgcctccctggtttatagtagacagaccttttctgtttttcatccgacataatcctacaggtgctgtgttattcatggggcagataaacaaaccctgaagagtatacaaaagaaaccatgcaaagcaacgactactttgctacgaagaaag

SEQ ID NO: 18784 - DNA, 988 bp, Homo sapiens
  source 1..988: mol_type = unassigned DNA
agcccaggttcatctacatcctgttgagaagtttggcagctggaggtggacatgcacacactacactgaacctcctgcaacaagcactgcggaagggaccatttggatgttgctgccatacttttcagcggctgaaaaggtcgtccttggtggaaggaaccatgaactggcatctccccctcttcctcttggcctctgtgacgctgccttccatctgctcccacttcaatcctctgtctctcgaggaactaggctccaacacggggatccaggttttcaatcagattgtgaagtcgaggcctcatgacaacatcgtgatctctccccatgggattgcgtcggtcctggggatgcttcagctgggggcggacggcaggaccaagaagcagctcgccatggtgatgagatacggcgtaaatggagttggtaaaatattaaagaagatcaacaaggccatcgtctccaagaagaataaagacattgtgacagtggctaacgccgtgtttgttaagaatgcctctgaaattgaagtgccttttgttacaaggaacaaagatgtgttccagtgtgaggtccggaatgtgaactttgaggatccagcctctgcctgtgattccatcaatgcatgggttaaaaatgaaaccagggatatgattgacaatctgctgtccccagatcttattgatggtgtgctcaccagactggtcctcgtcaacgcagtgtatttcaagggtctgtggaaatcacggttccaacccgagaacacaaagaaacgcactttcgtggcagccgacgggaaatcctatcaagtgccaatgctggcccagctctccgtgttccggtgtgggtcgacaagtgcccccaatgatttatggtacaacttcattgaactgccctaccacggggaaagcatcagcatgctgattgcactgccgactgagagctccactccgctgtctgccatcatcccacacatcagcaccaagac

SEQ ID NO: 18785 - DNA, 563 bp, Homo sapiens
  source 1..563: mol_type = unassigned DNA
gcttgcgctgtggggctgcccgggctgcgcggcgtctgcaggcgccaccgctgcctctttccggctgtgaccctcctcgccgccgccgcttggctgcgtcctccgactccccgcgccgccgagaccaggctcccgctccggttgcggccgcaccgccctccgcggccgccccctggggatccagcgagcgcggtcgtccttggtggaaggaaccatgaactggcatctccccctcttcctcttggcctctgtgacgctgccttccatctgctcccacttcaatcctctgtctctcgaggaactaggctccaacacggggatccaggttttcaatcagattgtgaagtcgaggcctcatgacaacatcgtgatctctccccatgggattgcgtcggtcctggggatgcttcagctgggggcggacggcaggaccaagaagcagctcgccatggtgatgagatacggcgtaaatggtgcgtgtgcacaattgctcactggcggagcctttgcctgagagtcttgtgacaggagggtttatggcttggtttttgctgacaacccca

SEQ ID NO: 18786 - DNA, 546 bp, Homo sapiens
  source 1..546: mol_type = unassigned DNA
gataaagcccccgccgccgcggcagccagcttgcgctgtggggctgcccgggctgcgcggcgtctgcaggcgccaccgctgcctctttccggctgtgaccctcctcgccgccgccgcttggctgcgtcctccgactccccgcgccgccgagaccaggctcccgctccggttgcggccgcaccgccctccgcggccgccccctggggatccagcgagcgcgggaccatttggatgttgctgccatacttttcagcggctgaaaaggtcgtccttggtggaaggaaccatgaactggcatctccccctcttcctcttggcctctgtgacgctgccttccatctgctcccacttcaatcctctgtctctcgaggaactaggctccaacacggggatccaggttttcaatcagattgtgaagtcgaggcctcatgacaacatcgtgatctctccccatgggattgcgtcggtcctggggatgcttcagctgggggcggacggcaggaccaagaagcagctcgccatggtgatgagatacggcgtaaatgg

SEQ ID NO: 18787 - DNA, 581 bp, Homo sapiens
  source 1..581: mol_type = unassigned DNA
atcacagaacaagtgtgccatgacttttcaaacatgcctaattgaactctgtttgcgatttaacttctttttcaaaggtttatagttacctttatttcaaaatttgtcattttaaaatatgtgtttcctccttttcctccactgtatagtaattaagagtgtggaggatttggaggccagcgggctttggtttgaatctagaggctacatattggagggtatgagccaaagccaaatttctaaacatctccaagcccatccgtgagttgggcctaaaggtgtttaggcttaagggccacccctgaagtgttgtgaggatgaagcgaagagtatatcttaggcgctaagcacagtggcaggaatggagctgactttcgggacacgaggtggctgtggttgtggcattgggtaatatttgtcacagaagtacaggtcgtccttggtggaaggaaccatgaactggcatctccccctcttcctcttggcctctgtgacgctgccttccatctgctcccacttcaatcctctgtctctcgaggaactaggctccaacacggggatccaggttttcaatcagattg

SEQ ID NO: 18788 - DNA, 2299 bp, Homo sapiens
  source 1..2299: mol_type = unassigned DNA
agtaggacccaggggccgggaggcgccggcagagggaggggccgggggccggggaggttttgagggaggtctttggctttttttggcggagctggggcgccctccggaagcgtttccaactttccagaagtttctcgggacgggcaggagggggtggggactgccatatatagatcccgggagcaggggagcgggctaagagtagaatcgtgtcgcggctcgagagcgagagtcacgtcccggcgctagcccagcccgacccagaatgaaaaaggcaggcattgacctccctctgaggcagtttccaggcccaccgtggtgcacgcaaaccacttcctggccatgcgctccctcctgcttctcagcgccttctgcctcctggaggcggccctggccgccgaggtgaagaaacctgcagccgcagcagctcctggcactgcggagaagttgagccccaaggcggccacgcttgccgagcgcagcgccggcctggccttcagcttgtaccaggccatggccaaggaccaggcagtggagaacatcctggtgtcacccgtggtggtggcctcgtcgctagggctcgtgtcgctgggcggcaaggcgaccacggcgtcgcaggccaaggcagtgctgagcgccgagcagctgcgcgacgaggaggtgcacgccggcctgggcgagctgctgcgctcactcagcaactccacggcgcgcaacgtgacctggaagctgggcagccgactgtacggacccagctcagtgagcttcgctgatgacttcgtgcgcagcagcaagcagcactacaactgcgagcactccaagatcaacttccgcgacaagcgcagcgcgctgcagtccatcaacgagtgggccgcgcagaccaccgacggcaagctgcccgaggtcaccaaggacgtggagcgcacggacggcgccctgctagtcaacgccatgttcttcaagccacactgggatgagaaattccaccacaagatggtggacaaccgtggcttcatggtgactcggtcctataccgtgggtgtcatgatgatgcaccggacaggcctctacaactactacgacgacgagaaggaaaagctgcaaatcgtggagatgcccctggcccacaagctctccagcctcatcatcctcatgccccatcacgtggagcctctcgagcgccttgaaaagctgctaaccaaagagcagctgaagatctggatggggaagatgcagaagaaggctgttgccatctccttgcccaagggtgtggtggaggtgacccatgacctgcagaaacacctggctgggctgggcctgactgaggccattgacaagaacaaggccgacttgtcacgcatgtcaggcaagaaggacctgtacctggccagcgtgttccacgccaccgcctttgagttggacacagatggcaacccctttgaccaggacatctacgggcgcgaggagctgcgcagccccaagctgttctacgccgaccaccccttcatcttcctagtgcgggacacccaaagcggctccctgctattcattgggcgcctggtccggcctaagggtgacaagatgcgagacgagttatagggcctcagggtgcacacaggatggcaggaggcatccaaaggctcctgagacacatgggtgctattggggttgggggggaggtgaggtaccagccttggatactccatggggtgggggtggaaaaacagaccggggttcccgtgtgcctgagcggaccttcccagctagaattcactccacttggacatgggccccagataccatgatgctgagcccggaaactccacatcctgtgggacctgggccatagtcattctgcctgccctgaaagtcccagatcaagcctgcctcaatcagtattcatatttatagccaggtaccttctcacctgtgagaccaaattgagctaggggggtcagccagccctcttctgacactaaaacacctcagctgcctccccagctctatcccaacctctcccaactataaaactaggtgctgcagcccctgggaccaggcacccccagaatgacctggccgcagtgaggcggattgagaaggagctcccaggaggggcttctgggcagactctggtcaagaagcatcgtgtctggcgttgtggggatgaactttttgttttgtttcttccttttttagttcttcaaagatagggagggaagggggaacatgagcctttgttgctatcaatccaagaacttatttgtacattttttttttcaataaaacttttccaatgaca

SEQ ID NO: 18789 - DNA, 2225 bp, Homo sapiens
  source 1..2225: mol_type = unassigned DNA
agagggaggggccgggggccggggaggttttgagggaggtctttggctttttttggcggagctggggcgccctccggaagcgtttccaactttccagaagtttctcgggacgggcaggagggggtggggactgccatatatagatcccgggagcaggggagcgggctaagagtagaatcgtgtcgcggctcgagagcgagagtcacgtcccggcgctagcccagcccgacccaggcccaccgtggtgcacgcaaaccacttcctggccatgcgctccctcctgcttctcagcgccttctgcctcctggaggcggccctggccgccgaggtgaagaaacctgcagccgcagcagctcctggcactgcggagaagttgagccccaaggcggccacgcttgccgagcgcagcgccggcctggccttcagcttgtaccaggccatggccaaggaccaggcagtggagaacatcctggtgtcacccgtggtggtggcctcgtcgctagggctcgtgtcgctgggcggcaaggcgaccacggcgtcgcaggccaaggcagtgctgagcgccgagcagctgcgcgacgaggaggtgcacgccggcctgggcgagctgctgcgctcactcagcaactccacggcgcgcaacgtgacctggaagctgggcagccgactgtacggacccagctcagtgagcttcgctgatgacttcgtgcgcagcagcaagcagcactacaactgcgagcactccaagatcaacttccgcgacaagcgcagcgcgctgcagtccatcaacgagtgggccgcgcagaccaccgacggcaagctgcccgaggtcaccaaggacgtggagcgcacggacggcgccctgctagtcaacgccatgttcttcaagccacactgggatgagaaattccaccacaagatggtggacaaccgtggcttcatggtgactcggtcctataccgtgggtgtcatgatgatgcaccggacaggcctctacaactactacgacgacgagaaggaaaagctgcaaatcgtggagatgcccctggcccacaagctctccagcctcatcatcctcatgccccatcacgtggagcctctcgagcgccttgaaaagctgctaaccaaagagcagctgaagatctggatggggaagatgcagaagaaggctgttgccatctccttgcccaagggtgtggtggaggtgacccatgacctgcagaaacacctggctgggctgggcctgactgaggccattgacaagaacaaggccgacttgtcacgcatgtcaggcaagaaggacctgtacctggccagcgtgttccacgccaccgcctttgagttggacacagatggcaacccctttgaccaggacatctacgggcgcgaggagctgcgcagccccaagctgttctacgccgaccaccccttcatcttcctagtgcgggacacccaaagcggctccctgctattcattgggcgcctggtccggcctaagggtgacaagatgcgagacgagttatagggcctcagggtgcacacaggatggcaggaggcatccaaaggctcctgagacacatgggtgctattggggttgggggggaggtgaggtaccagccttggatactccatggggtgggggtggaaaaacagaccggggttcccgtgtgcctgagcggaccttcccagctagaattcactccacttggacatgggccccagataccatgatgctgagcccggaaactccacatcctgtgggacctgggccatagtcattctgcctgccctgaaagtcccagatcaagcctgcctcaatcagtattcatatttatagccaggtaccttctcacctgtgagaccaaattgagctaggggggtcagccagccctcttctgacactaaaacacctcagctgcctccccagctctatcccaacctctcccaactataaaactaggtgctgcagcccctgggaccaggcacccccagaatgacctggccgcagtgaggcggattgagaaggagctcccaggaggggcttctgggcagactctggtcaagaagcatcgtgtctggcgttgtggggatgaactttttgttttgtttcttccttttttagttcttcaaagatagggagggaagggggaacatgagcctttgttgctatcaatccaagaacttatttgtacattttttttttcaataaaacttttccaatgaca

SEQ ID NO: 18790 - DNA, 474 bp, Homo sapiens
  source 1..474: mol_type = unassigned DNA
tttggcggagctggggcgccctccggaagcgtttccaactttccagaagtttctcgggacgggcaggagggggtggggactgccatatatagatcccgggagcaggggagcgggctaagagtagaatcgtgtcgcggctcgagagcgagagtcacgtcccggcgctagcccagcccgacccaggcccaccgtggtgcacgcaaaccacttcctggccatgcgctccctcctgcttctcagcgccttctgcctcctggaggcggccacgcttgccgagcgcagcgccggcctggccttcagcttgtaccaggccatggccaaggaccaggcagtggagaacatcctggtgtcacccgtggtggtggcctcgtcgctagggctcgtgtcgctgggcggcaaggcgaccacggcgtcgcaggccaaggcagtgctgagcgccgagcagctgcgcgacgaggaggtgcacgccggcct

SEQ ID NO: 18791 - DNA, 882 bp, Homo sapiens
  source 1..882: mol_type = unassigned DNA
ggagcgggctaagagtagaatcgtgtcgcggctcgagagcgagagtcacgtcccggcgctagcccagcccgacccaggtgaggggcgggagacgcctgcgcccaccgtggtgcacgcaaaccacttcctggccatgcgctccctcctgcttctcagcgccttctgcctcctggaggcggccctggccgccgaggtgaagaaacctgcagccgcagcagctcctggcactgcggagaagttgagccccaaggcggccacgcttgccgagcgcagcgccggcctggccttcagcttgtaccaggccatggccaaggaccaggcagtggagaacatcctggtgtcacccgtggtggtggcctcgtcgctagggctcgtgtcgctgggcggcaaggcgaccacggcgtcgcaggccaaggcagtgctgagcgccgagcagctgcgcgacgaggaggtgcacgccggcctgggcgagctgctgcgctcactcagcaactccacggcgcgcaacgtgacctggaagctgggcagccgactgtacggacccagctcagtgagcttcgctgatgacttcgtgcgcagcagcaagcagcactacaactgcgagcactccaagatcaacttccgcgacaagcgcagcgcgctgcagtccatcaacgagtgggccgcgcagaccaccgacggcaagctgcccgaggtcaccaaggacgtggagcgcacggacggcgccctgctagtcaacgccatgttcttcaagccacactgggatgagaaattccaccacaagatggtggacaaccgtggcttcatggtgactcggtcctataccgtgggtgtcatgatgatgcaccggacaggcctctacaactactacgacgacgagaa

SEQ ID NO: 18792 - DNA, 660 bp, Homo sapiens
  source 1..660: mol_type = unassigned DNA
aagagtagaatcgtgtcgcggctcgagagcgagagtcacgtcccggcgctagcccagcccgacccaggtgaggggcgggagacgcctgcgtgcgtgcggcccgggggagcgccgagcaatctgggggcccaccgtggtgcacgcaaaccacttcctggccatgcgctccctcctgcttctcagcgccttctgcctcctggaggcggccctggccgccgaggtgaagaaacctgcagccgcagcagctcctggcactgcggagaagttgagccccaaggcggccacgcttgccgagcgcagcgccggcctggccttcagcttgtaccaggccatggccaaggaccaggcagtggagaacatcctggtgtcacccgtggtggtggcctcgtcgctagggctcgtgtcgctgggcggcaaggcgaccacggcgtcgcaggccaaggcagtgctgagcgccgagcagctgcgcgacgaggaggtgcacgccggcctgggcgagctgctgcgctcactcagcaactccacggcgcgcaacgtgacctggaagctgggcagccgactgtacggacccagctcagtgagcttcgctgatgacttcgtgcgcagcagcaagcagcactacaactgcgagcactccaagatcaacttccgcgacaagcg

SEQ ID NO: 18793 - DNA, 529 bp, Homo sapiens
  source 1..529: mol_type = unassigned DNA
aagagtagaatcgtgtcgcggctcgagagcgagagtcacgtcccggcgctagcccagcccgacccaggcccaccgtggtgcacgcaaaccacttcctggccatgcgctccctcctgcttctcagcgccttctgcctcctggaggcggccctggccgccgaggtgaagaaacctgcagccgcagcagctcctggcactgcggagaagttgagccccaaggcgaccacggcgtcgcaggccaaggcagtgctgagcgccgagcagctgcgcgacgaggaggtgcacgccggcctgggcgagctgctgcgctcactcagcaactccacggcgcgcaacgtgacctggaagctgggcagccgactgtacggacccagctcagtgagcttcgctgatgacttcgtgcgcagcagcaagcagcactacaactgcgagcactccaagatcaacttccgcgacaagcgcagcgcgctgcagtccatcaacgagtgggccgcgcagaccaccgacggcaagctgcccgaggtcaccaa

SEQ ID NO: 18794 - DNA, 1358 bp, Homo sapiens
  source 1..1358: mol_type = unassigned DNA
aagagtagaatcgtgtcgcggctcgagagcgagagtcacgtcccggcgctagcccagcccgacccagaatgaaaaaggcaggcattgacctccctctgaggcagtttccaggcccaccgtggtgcacgcaaaccacttcctggccatgcgctccctcctgcttctcagcgccttctgcctcctggaggcggccctggccgccgaggtgaagaaacctgcagccgcagcagctcctggcactgcggagaagttgagccccaaggcggccacgcttgccgagcgcagcgccggcctggccttcagcttgtaccaggccatggccaaggaccaggcagtggagaacatcctggtgtcacccgtggtggtggcctcgtcgctagggctcgtgtcgctgggcggcaaggcgaccacggcgtcgcaggccaaggcagtgctgagcgccgagcagctgcgcgacgaggaggtgcacgccggcctgggcgagctgctgcgctcactcagcaactccacggcgcgcaacgtgacctggaagctgggcagccgactgtacggacccagctcagtgagcttcgctgatgacttcgtgcgcagcagcaagcagcactacaactgcgagcactccaagatcaacttccgcgacaagcgcagcgcgctgcagtccatcaacgagtgggccgcgcagaccaccgacggcaagctgcccgaggtcaccaaggacgtggagcgcacggacggcgccctgctagtcaacgccatgttcttcaagccacactgggatgagaaattccaccacaagatggtggacaaccgtggcttcatggtgactcggtcctataccgtgggtgtcatgatgatgcaccggacaggcctctacaactactacgacgacgagaaggaaaagctgcaaatcgtggagatgcccctggcccacaagctctccagcctcatcatcctcatgccccatcacgtggagcctctcgagcgccttgaaaagctgctaaccaaagagcagctgaagatctggatggggaagatgcagaagaaggctgttgccatctccttgcccaagggtgtggtggaggtgacccatgacctgcaggtaaggggtggcccagcctaggggcctgcaggccttggagccagggggaggtgcttgggggacccactcaccaattcagcaggtctgtcccaagaccccctggatgtccaggcagtgctgggctctgtgatgggggaagctggggcaggaggtgtgggccatgcccttgggaagatgatgataataccagcagctaaatataacggaacattcctgtatgctaggcgttcttctaagcactttatatgtattattatta

SEQ ID NO: 18795 - DNA, 998 bp, Homo sapiens
  source 1..998: mol_type = unassigned DNA
gtgcggcccgggggagcgccgagcaatctggggaatgaaaaaggcaggcattgacctccctctgaggcagtttccaggcccaccgtggtgcacgcaaaccacttcctggccatgcgctccctcctgcttctcagcgccttctgcctcctggaggcggccctggccgccgaggtgaagaaacctgcagccgcagcagctcctggcactgcggagaagttgagccccaaggcggccacgcttgccgagcgcagcgccggcctggccttcagcttgtaccaggccatggccaaggaccaggcagtggagaacatcctggtgtcacccgtggtggtggcctcgtcgctagggctcgtgtcgctgggcggcaaggcgaccacggcgtcgcaggccaaggcagtgctgagcgccgagcagctgcgcgacgaggaggtgcacgccggcctgggcgagctgctgcgctcactcagcaactccacggcgcgcaacgtgacctggaagctgggcagccgactgtacggacccagctcagtgagcttcgctgatgacttcgtgcgcagcagcaagcagcactacaactgcgagcactccaagatcaacttccgcgacaagcgcagcgcgctgcagtccatcaacgagtgggccgcgcagaccaccgacggcaagctgcccgaggtcaccaaggacgtggagcgcacggacggcgccctgctagtcaacgccatgttcttcaagccacactgggatgagaaattccaccacaagatggtggacaaccgtggcttcatggtgactcggtcctataccgtgggtgtcatgatgatgcaccggacaggcctctacaactactacgacgacgagaaggaaaagctgcaaatcgtggagatgcccctggcccacaagctctccagcctcatcatcctcatgccccatcacgtggagcctctcgagcgccttgaaaagctgctaaccaaagagcagctgaagatctggatggggaa

SEQ ID NO: 18796 - DNA, 3391 bp, Homo sapiens
  source 1..3391: mol_type = unassigned DNA
aatctgggggtgcgcgagggagtaagaggggcgaggggaccctgcgaagcgttgggtgccgagccagagcctacaaattggagtcctcggcactttgggggccgctggagggtttggaatcgagagcccagggctagccagtgatggtgccagctgagggctagggcggagatcggagccgggttgggagtccgtgcactcggaggactgggaaaaagtgcagggacccctaaaaggtggtggtggcagatacgagactaggtgctgtgtaaagggggctgggggcagagagcagagcctctgcggaaagaaacagaggaggaaggagatgggtctggtgcctcttcccgcaagggtagggaggataggccggcctcgcagttccaggtcacttccgttctggggttgaggctcaggggcagcggtgattggtggcccagcctcctcacaggcttgctgagggaatttgagcttccggtggtgggaaaggaggtgaaatcgtctcgactcctggggtccgtgtgctctggtagaagtgggcgacagtggctcaatttctgatcagcagcttgcagcctagatgatggcagccaaaggaaagacttggccagcgaggctccctaccactccgaaaaaagagagtgggggtcagcagggtctgctctgctctggggattaaggggctgactagaaggatttgagtctttccttctgtccactgccacagggttcttggagtaactgcagggtttaaactgcagggtctaacttccagaggctggggttccctgccccccagcttagagacattcctgaggtggctgaagagcaggaaggagaatgaatgcacttccagactggcccagagtctcagcccctcctcttccttgtttcccgctggtccctctgggctgtacggcccggatggaggcctgaggaaaatgagggggctttggttctccggaattccggccggggccacaccctcctgtcttcagatggttcatgtacccatccccccttcccgtcctctcctttgtctcctctgtcaccgggactcccagcagagattttttttttgtactggctgtgtaacaggacaccgcatgcagccctcaggaggggctctgtgcttctgtgaggaaggacccctgtgctgggaaggcagacccctgtttatcccgagggacctggggtgaccccctgccctggccttgtttctcccattttacagtgaggtggtcgatctccaaggtccctgtagattggggactggttgtgccctctgcgccaggggcctcctcaccatctctcctttgccggctcccgccctcttcactcttctgttttctttcagaatgaaaaaggcaggcattgacctccctctgaggcagtttccaggcccaccgtggtgcacgcaaaccacttcctggccatgcgctccctcctgcttctcagcgccttctgcctcctggaggcggccctggccgccgaggtgaagaaacctgcagccgcagcagctcctggcactgcggagaagttgagccccaaggcggccacgcttgccgagcgcagcgccggcctggccttcagcttgtaccaggccatggccaaggaccaggcagtggagaacatcctggtgtcacccgtggtggtggcctcgtcgctagggctcgtgtcgctgggcggcaaggcgaccacggcgtcgcaggccaaggcagtgctgagcgccgagcagctgcgcgacgaggaggtgcacgccggcctgggcgagctgctgcgctcactcagcaactccacggcgcgcaacgtgacctggaagctgggcagccgactgtacggacccagctcagtgagcttcgctgatgacttcgtgcgcagcagcaagcagcactacaactgcgagcactccaagatcaacttccgcgacaagcgcagcgcgctgcagtccatcaacgagtgggccgcgcagaccaccgacggcaagctgcccgaggtcaccaaggacgtggagcgcacggacggcgccctgctagtcaacgccatgttcttcaagccacactgggatgagaaattccaccacaagatggtggacaaccgtggcttcatggtgactcggtcctataccgtgggtgtcatgatgatgcaccggacaggcctctacaactactacgacgacgagaaggaaaagctgcaaatcgtggagatgcccctggcccacaagctctccagcctcatcatcctcatgccccatcacgtggagcctctcgagcgccttgaaaagctgctaaccaaagagcagctgaagatctggatggggaagatgcagaagaaggctgttgccatctccttgcccaagggtgtggtggaggtgacccatgacctgcagaaacacctggctgggctgggcctgactgaggccattgacaagaacaaggccgacttgtcacgcatgtcaggcaagaaggacctgtacctggccagcgtgttccacgccaccgcctttgagttggacacagatggcaacccctttgaccaggacatctacgggcgcgaggagctgcgcagccccaagctgttctacgccgaccaccccttcatcttcctagtgcgggacacccaaagcggctccctgctattcattgggcgcctggtccggcctaagggtgacaagatgcgagacgagttatagggcctcagggtgcacacaggatggcaggaggcatccaaaggctcctgagacacatgggtgctattggggttgggggggaggtgaggtaccagccttggatactccatggggtgggggtggaaaaacagaccggggttcccgtgtgcctgagcggaccttcccagctagaattcactccacttggacatgggccccagataccatgatgctgagcccggaaactccacatcctgtgggacctgggccatagtcattctgcctgccctgaaagtcccagatcaagcctgcctcaatcagtattcatatttatagccaggtaccttctcacctgtgagaccaaattgagctaggggggtcagccagccctcttctgacactaaaacacctcagctgcctccccagctctatcccaacctctcccaactataaaactaggtgctgcagcccctgggaccaggcacccccagaatgacctggccgcagtgaggcggattgagaaggagctcccaggaggggcttctgggcagactctggtcaagaagcatcgtgtctggcgttgtggggatgaactttttgttttgtttcttccttttttagttcttcaaagatagggagggaagggggaacatgagcctttgttgctatcaatccaagaacttatttgtacattttttttttcaataaaacttttccaatgac

SEQ ID NO: 18797 - DNA, 587 bp, Homo sapiens
  source 1..587: mol_type = unassigned DNA
tgagggaatttgagcttccggtggtgggaaaggaggtgaaatcgtctcgactcctggggcccaccgtggtgcacgcaaaccacttcctggccatgcgctccctcctgcttctcagcgccttctgcctcctggaggcggccctggccgccgaggtgaagaaacctgcagccgcagcagctcctggcactgcggagaagttgagccccaaggcggccacgcttgccgagcgcagcgccggcctggccttcagcttgtaccaggccatggccaaggaccaggcagtggagaacatcctggtgtcacccgtggtggtggcctcgtcgctagggctcgtgtcgctgggcggcaaggcgaccacggcgtcgcaggccaaggcagtgctgagcgccgagcagctgcgcgacgaggaggtgcacgccggcctgggcgagctgctgcgctcactcagcaactccacggcgcgcaacgtgacctggaagctgggcagccgactgtacggacccagctcagtgagcttcgctgatgacttcgtgcgcagcagcaagcagcactacaactgcgagcactccaagatcaacttccgcgac

SEQ ID NO: 18798 - DNA, 582 bp, Homo sapiens
  source 1..582: mol_type = unassigned DNA
aatttgagcttccggtggtgggaaaggaggtgaaatcgtctcgactcctgggaatgaaaaaggcaggcattgacctccctctgaggcagtttccaggcccaccgtggtgcacgcaaaccacttcctggccatgcgctccctcctgcttctcagcgccttctgcctcctggaggcggccctggccgccgaggtgaagaaacctgcagccgcagcagctcctggcactgcggagaagttgagccccaaggcggccacgcttgccgagcgcagcgccggcctggccttcagcttgtaccaggccatggccaaggaccaggcagtggagaacatcctggtgtcacccgtggtggtggcctcgtcgctagggctcgtgtcgctgggcggcaaggcgaccacggcgtcgcaggccaaggcagtgctgagcgccgagcagctgcgcgacgaggaggtgcacgccggcctgggcgagctgctgcgctcactcagcaactccacggcgcgcaacgtgacctggaagctgggcagccgactgtacggacccagctcagtgagcttcgctgatgacttcgtgcgcagcagcaa

SEQ ID NO: 18799 - DNA, 974 bp, Homo sapiens
  source 1..974: mol_type = unassigned DNA
gaaatcgtctcgactcctggggtccgtgtgctctggtagaagtgggcgacagtggctcaatttctgatcagcagcttgcagcctagatgatggcagccaaaggaaagacttggccagcgaggctccctaccactccgaaaaaagagagtggggaatgaaaaaggcaggcattgacctccctctgaggcagtttccaggcccaccgtggtgcacgcaaaccacttcctggccatgcgctccctcctgcttctcagcgccttctgcctcctggaggcggccctggccgccgaggtgaagaaacctgcagccgcagcagctcctggcactgcggagaagttgagccccaaggcggccacgcttgccgagcgcagcgccggcctggccttcagcttgtaccaggccatggccaaggaccaggcagtggagaacatcctggtgtcacccgtggtggtggcctcgtcgctagggctcgtgtcgctgggcggcaaggcgaccacggcgtcgcaggccaaggcagtgctgagcgccgagcagctgcgcgacgaggaggtgcacgccggcctgggcgagctgctgcgctcactcagcaactccacggcgcgcaacgtgacctggaagctgggcagccgactgtacggacccagctcagtgagcttcgctgatgacttcgtgcgcagcagcaagcagcactacaactgcgagcactccaagatcaacttccgcgacaagcgcagcgcgctgcagtccatcaacgagtgggccgcgcagaccaccgacggcaagctgcccgaggtcaccaaggacgtggagcgcacggacggcgccctgctagtcaacgccatgttcttcaagccacactgggatgagaaattccaccacaagatggtggacaaccgtggcttcatggtgactcggtcctataccgtgggtgtcatgatgatgcaccggacaggcctctacaactactacgacga

SEQ ID NO: 18800 - DNA, 773 bp, Homo sapiens
  source 1..773: mol_type = unassigned DNA
cgggactcccagcagagattttttttttgtactggctgtgtaacaggacaccgcatgcagccctcaggaggggctctgtgcttctaatgaaaaaggcaggcattgacctccctctgaggcagtttccaggcccaccgtggtgcacgcaaaccacttcctggccatgcgctccctcctgcttctcagcgccttctgcctcctggaggcggccctggccgccgaggtgaagaaacctgcagccgcagcagctcctggcactgcggagaagttgagccccaaggcggccacgcttgccgagcgcagcgccggcctggccttcagcttgtaccaggccatggccaaggaccaggcagtggagaacatcctggtgtcacccgtggtggtggcctcgtcgctagggctcgtgtcgctgggcggcaaggcgaccacggcgtcgcaggccaaggcagtgctgagcgccgagcagctgcgcgacgaggaggtgcacgccggcctgggcgagctgctgcgctcactcagcaactccacggcgcgcaacgtgacctggaagctgggcagccgactgtacggacccagctcagtgagcttcgctgatgacttcgtgcgcagcagcaagcagcactacaactgcgagcactccaagatcaacttccgcgacaagcgcagcgcgctgcagtccatcaacgagtgggccgcgcagaccaccgacggcaagctgcccgaggtcaccaaggacgtggagcgcacggacggcgccctgctagtcaacgcca

SEQ ID NO: 18801 - DNA, 2283 bp, Homo sapiens
  source 1..2283: mol_type = unassigned DNA
gagtacctccatagacaacactattctcacagtttgctgtgagaatgaagtaaccctcgttttacaaatgaggccaagctaggagagctgaggtctccccgagtcagtggctgagcttggattggaacacaggtctggctgtgagcaagggcagggttcaggccactctcagacattttttgttgttattttctggtcatggagacagaacttgcagaggaaaacgaagggtgggctgagcacagtagctcatgcctgtaatcctagcactttgggaggccaaggtgggtggatcacatgagcccaggaatttgagaccagcctgggtaagatggcgaaaccccatgtctacaaaaaattagccaggcgtggtggcgcatgctggtagtcccagctactctggaggctgaggtgggaggatcgctggagcctgggaattcaagactgcagtgtgtcatgattgtaccactgcactccagctgtaggatggagtgggacggaccttgtctcaaaaagaaaaagataaaaaaaaaattaagggtggtcatggggcactccctgcccagggcacagctgtcccccaggtaccagggagggtagaaagcccacctcagagcatgtttccaaaatatctgacaagtgctagagccgggggtggccatagaggtggctgacctgagggcggaattaattctctatcatatgggagcagcaggcactgactgtagggaaccgcatcctcagatggcatgtcctggggccaagaccccttcccaaagctgggaacatagactctgtgggctgggtgctctatagctgggccctgaagaatggagcaaagacctgtggcaaggataaatcaaggtctgcagccgggggtggctgtgggctgtgattgtgtttgggggcggccatgtgtctctgaccctgtgttttgccccaactacagcacactgggatgagaaattccaccacaagatggtggacaaccgtggcttcatggtgactcggtcctataccgtgggtgtcatgatgatgcaccggacaggcctctacaactactacgacgacgagaaggaaaagctgcaaatcgtggagatgcccctggcccacaagctctccagcctcatcatcctcatgccccatcacgtggagcctctcgagcgccttgaaaagctgctaaccaaagagcagctgaagatctggatggggaagatgcagaagaaggctgttgccatctccttgcccaagggtgtggtggaggtgacccatgacctgcagaaacacctggctgggctgggcctgactgaggccattgacaagaacaaggccgacttgtcacgcatgtcaggcaagaaggacctgtacctggccagcgtgttccacgccaccgcctttgagttggacacagatggcaacccctttgaccaggacatctacgggcgcgaggagctgcgcagccccaagctgttctacgccgaccaccccttcatcttcctagtgcgggacacccaaagcggctccctgctattcattgggcgcctggtccggcctaagggtgacaagatgcgagacgagttatagggcctcagggtgcacacaggatggcaggaggcatccaaaggctcctgagacacatgggtgctattggggttgggggggaggtgaggtaccagccttggatactccatggggtgggggtggaaaaacagaccggggttcccgtgtgcctgagcggaccttcccagctagaattcactccacttggacatgggccccagataccatgatgctgagcccggaaactccacatcctgtgggacctgggccatagtcattctgcctgccctgaaagtcccagatcaagcctgcctcaatcagtattcatatttatagccaggtaccttctcacctgtgagaccaaattgagctaggggggtcagccagccctcttctgacactaaaacacctcagctgcctccccagctctatcccaacctctcccaactataaaactaggtgctgcagcccctgggaccaggcacccccagaatgacctggccgcagtgaggcggattgagaaggagctcccaggaggggcttctgggcagactctggtcaagaagcatcgtgtctggcgttgtggggatgaactttttgttttgtttcttccttttttagttcttcaaagatagggagggaagggggaacatgagcctttgttgctatcaatccaagaacttatttgtacattttttttttcaataaaacttttccaatgac

SEQ ID NO: 18802 - DNA, 719 bp, Homo sapiens
  source 1..719: mol_type = unassigned DNA
gcaacccctttgaccaggacatctacgggcgcgaggagctgcgcagccccaagctgttctacgccgaccaccccttcatcttcctagtgcgggacacccaaagcggctccctgctattcattgggcgcctggtccggcctaagggtgacaagatgcgagacgagttatagggcctcagggtgcacacaggatggcaggaggcatccaaaggctcctgagacacatgggtgctattggggttgggggggaggtgaggtaccagccttggatactccatggggtgggggtggaaaaacagaccggggttcccgtgtgcctgagcggaccttcccagctagaattcactccacttggacatgggccccagataccatgatgctgagcccggaaactccacatcctgtgggacctgggccatagtcattctgcctgccctgaaagtcccagatcaagcctgcctcaatcagtattcatatttatagccagaatgacctggccgcagtgaggcggattgagaaggagctcccaggaggggcttctgggcagactctggtcaagaagcatcgtgtctggcgttgtggggatgaactttttgttttgtttcttccttttttagttcttcaaagatagggagggaagggggaacatgagcctttgttgctatcaatccaagaacttatttgtacattttttttttcaataaaacttttccaatgaca

SEQ ID NO: 18803 - DNA, 582 bp, Homo sapiens
  source 1..582: mol_type = unassigned DNA
gaggggcctgtggtggggatcctggggctgtcgggctgagtatgccgtgtgggtggagaggaagcctcggggaaatcgcccaggcttgaaactgttacaatatggctttccttggactcttctctttgctggttctgcaaagtatggctacaggggccactttccctgaggaagccattgctgacttgtcagtgaatatgtataatcgtcttagagccactggtgaagatgaaaatattctcttctctccattgagtattgctcttgcaatgggaatgatggaacttggggcccaaggatctacccagaaagaaatccgccactcaatgggatatgacagcctaaaaaatggtgaagaattttctttcttgaaggagttttcaaacatggtaactgctaaagagagccaatatgtgatgaaaattgccaattccttgtttgtgcaaaatggatttcatgtcaatgaggagtttttgcaaatgatgaaaaaatattttaatgcagcagtaaatcatgtggacttcagtcaaaatgtagccgtggccaactacatcaataagtgggtggagaataacacaaaca

SEQ ID NO: 18804 - DNA, 1890 bp, Homo sapiens
  source 1..1890: mol_type = unassigned DNA
gaaggataggctgagccggggctcccagcagagacgcctgggtggggcaggaggccgctccaggtgtgagccacagaggaggggagagggacccccacgggagtggaagtggcagagcagctgcagaagtgcagggagcggaaaggtaccagggcagctgctttccgctgcctccggtccgggcagctgcagaaacagcagggggaggagcaacagctgccaaattcgccaactagaggagggagaggcggagcttgggtccctgtagaagccagaggcgcagtctggactgtagtttcccgggagagacgaaagcaggaacgagagcggagcggagcacagtccgccgagcacaagctccagcatcccgtcaggggttgcaggtgtgtgggaggcttgaaactgttacaatatggctttccttggactcttctctttgctggttctgcaaagtatggctacaggggccactttccctgaggaagccattgctgacttgtcagtgaatatgtataatcgtcttagagccactggtgaagatgaaaatattctcttctctccattgagtattgctcttgcaatgggaatgatggaacttggggcccaaggatctacccagaaagaaatccgccactcaatgggatatgacagcctaaaaaatggtgaagaattttctttcttgaaggagttttcaaacatggtaactgctaaagagagccaatatgtgatgaaaattgccaattccttgtttgtgcaaaatggatttcatgtcaatgaggagtttttgcaaatgatgaaaaaatattttaatgcagcagtaaatcatgtggacttcagtcaaaatgtagccgtggccaactacatcaataagtgggtggagaataacacaaacaatctggtgaaagatttggtatccccaagggattttgatgctgccacttatctggccctcattaatgctgtctatttcaaggggaactggaagtcgcagtttaggcctgaaaatactagaaccttttctttcactaaagatgatgaaagtgaagtccaaattccaatgatgtatcagcaaggagaattttattatggggaatttagtgatggctccaatgaagctggtggtatctaccaagtcctagaaataccatatgaaggagatgaaataagcatgatgctggtgctgtccagacaggaagttcctcttgctactctggagccattagtcaaagcacagctggttgaagaatgggcaaactctgtgaagaagcaaaaagtagaagtatacctgcccaggttcacagtggaacaggaaattgatttaaaagatgttttgaaggctcttggaataactgaaattttcatcaaagatgcaaatttgacaggcctctctgataataaggagatttttctttccaaagcaattcacaagtccttcctagaggttaatgaagaaggctcagaagctgctgctgtctcaggaatgattgcaattagtaggatggctgtgctgtatcctcaagttattgtcgaccatccatttttctttcttatcagaaacaggagaactggtacaattctattcatgggacgagtcatgcatcctgaaacaatgaacacaagtggacatgatttcgaagaactttaagttactttatttgaataacaaggaaaacagtaactaagcacattatgtttgcaactggtatatatttaggatttgtgttttacagtatatcttaagataatatttaaaatagttccagataaaaacaatatatgtaaattataagtaacttgtcaaggaatgttatcagtattaagctaatggtcctgttatgtcattgtgtttgtgtgctgttgtttaaaataaaagtacctattgaacatgtg

SEQ ID NO: 18805 - DNA, 1907 bp, Homo sapiens
  source 1..1907: mol_type = unassigned DNA
agtttcccgggagagacgaaagcaggaacgagagcggagcggagcacagtccgccgagcacaagctccagcatcccgtcaggggttgcaggtgtgtgggaggtaagcgtgggtccttcttcggggcgtctgcactgccctggagaaaacgtcttccaataggaattacatcaagacacagctaaaagagtccgcgttgggttaggaaaccggtgcaaaacctctcgggtgaaagatttacatttttcgactttaagggcaaaaaagcaaaaggaagcttgactctgggtataaagggcgtggttagtgtttttggtttgagttgcaccagtaaaactgttctgggagatctgaagattgagaaaaatcctgctaattgaggacgaggtggatgttatctggtggatgttataggcttgaaactgttacaatatggctttccttggactcttctctttgctggttctgcaaagtatggctacaggggccactttccctgaggaagccattgctgacttgtcagtgaatatgtataatcgtcttagagccactggtgaagatgaaaatattctcttctctccattgagtattgctcttgcaatgggaatgatggaacttggggcccaaggatctacccagaaagaaatccgccactcaatgggatatgacagcctaaaaaatggtgaagaattttctttcttgaaggagttttcaaacatggtaactgctaaagagagccaatatgtgatgaaaattgccaattccttgtttgtgcaaaatggatttcatgtcaatgaggagtttttgcaaatgatgaaaaaatattttaatgcagcagtaaatcatgtggacttcagtcaaaatgtagccgtggccaactacatcaataagtgggtggagaataacacaaacaatctggtgaaagatttggtatccccaagggattttgatgctgccacttatctggccctcattaatgctgtctatttcaaggggaactggaagtcgcagtttaggcctgaaaatactagaaccttttctttcactaaagatgatgaaagtgaagtccaaattccaatgatgtatcagcaaggagaattttattatggggaatttagtgatggctccaatgaagctggtggtatctaccaagtcctagaaataccatatgaaggagatgaaataagcatgatgctggtgctgtccagacaggaagttcctcttgctactctggagccattagtcaaagcacagctggttgaagaatgggcaaactctgtgaagaagcaaaaagtagaagtatacctgcccaggttcacagtggaacaggaaattgatttaaaagatgttttgaaggctcttggaataactgaaattttcatcaaagatgcaaatttgacaggcctctctgataataaggagatttttctttccaaagcaattcacaagtccttcctagaggttaatgaagaaggctcagaagctgctgctgtctcaggaatgattgcaattagtaggatggctgtgctgtatcctcaagttattgtcgaccatccatttttctttcttatcagaaacaggagaactggtacaattctattcatgggacgagtcatgcatcctgaaacaatgaacacaagtggacatgatttcgaagaactttaagttactttatttgaataacaaggaaaacagtaactaagcacattatgtttgcaactggtatatatttaggatttgtgttttacagtatatcttaagataatatttaaaatagttccagataaaaacaatatatgtaaattataagtaacttgtcaaggaatgttatcagtattaagctaatggtcctgttatgtcattgtgtttgtgtgctgttgtttaaaataaaagtacctattgaacatg

SEQ ID NO: 18806 - DNA, 842 bp, Homo sapiens
  source 1..842: mol_type = unassigned DNA
tttcccgggagagacgaaagcaggaacgagagcggagcggagcacagtccgccgagcacaagctccagcatcccgtcaggggttgcaggcttgaaactgttacaatatggctttccttggactcttctctttgctggttctgcaaagtatggctacaggggccactttccctgaggaagccattgctgacttgtcagtgaatatgtataatcgtcttagagccactggtgaagatgaaaatattctcttctctccattgagtattgctcttgcaatgggaatgatggaacttggggcccaaggatctacccagaaagaaatccgccactcaatgggatatgacagcctaaaaaatggtgaagaattttctttcttgaaggagttttcaaacatggtaactgctaaagagagccaatatgtgatgaaaattgccaattccttgtttgtgcaaaatggatttcatgtcaatgaggagtttttgcaaatgatgaaaaaatattttaatgcagcagtaaatcatgtggacttcagtcaaaatgtagccgtggccaactacatcaataagtgggtggagaataacacaaacaatctggtgaaagatttggtatccccaagggattttgatgctgccacttatctggccctcattaatgctgtctatttcaaggggaactggaagtcgcagtttaggcctgaaaatactagaaccttttctttcactaaagatgatgaaagtgaagtccaaattccaatgatgtatcagcaaggagaattttattatggggaatttagtgatggctccaatgaagctggtggtatctaccaagtcctagaaataccat

SEQ ID NO: 18807 - DNA, 668 bp, Homo sapiens
  source 1..668: mol_type = unassigned DNA
cagtaagttctacagaaattatatgctgaattgaaattgtatttttatccaaaatataagaatctattcaagaaaaggttcacagtggaacaggaaattgatttaaaagatgttttgaaggctcttggaataactgaaattttcatcaaagatgcaaatttgacaggcctctctgataataaggagatttttctttccaaagcaattcacaagtccttcctagaggttaatgaagaaggctcagaagctgctgctgtctcaggaatgattgcaattagtaggatggctgtgctgtatcctcaagttattgtcgaccatccatttttctttcttatcagaaacaggagaactggtacaattctattcatgggacgagtcatgcatcctgaaacaatgaacacaagtggacatgatttcgaagaactttaagttactttatttgaataacaaggaaaacagtaactaagcacattatgtttgcaactggtatatatttaggatttgtgttttacagtatatcttaagataatatttaaaatagttccagataaaaacaatatatgtaaattataagtaacttgtcaaggaatgttatcagtattaagctaatggtcctgttatgtcattgtgtttgtgtgctgttgtttaaaataaaagtacctattgaa

SEQ ID NO: 18808 - DNA, 595 bp, Homo sapiens
  source 1..595: mol_type = unassigned DNA
ctccaggttcacagtggaacaggaaattgatttaaaagatgttttgaaggctcttggaataactgaaattttcatcaaagatgcaaatttgacaggcctctctgataataaggagatttttctttccaaagcaattcacaagtccttcctagaggttaatgaagaaggctcagaagctgctgctgtctcaggaatgattgcaattagtaggatggctgtgctgtatcctcaagttattgtcgaccatccatttttctttcttatcagaaacaggagaactggtacaattctattcatgggacgagtcatgcatcctgaaacaatgaacacaagtggacatgatttcgaagaactttaagttactttatttgaataacaaggaaaacagtaactaagcacattatgtttgcaactggtatatatttaggatttgtgttttacagtatatcttaagataatatttaaaatagttccagataaaaacaatatatgtaaattataagtaacttgtcaaggaatgttatcagtattaagctaatggtcctgttatgtcattgtgtttgtgtgctgttgtttaaaataaaagtacctattg

SEQ ID NO: 18809 - DNA, 541 bp, Homo sapiens
  source 1..541: mol_type = unassigned DNA
ttttcctatctctgaatgaaaaaaaaaaatttctgattctctttttgcagataataaggagatttttctttccaaagcaattcacaagtccttcctagaggttaatgaagaaggctcagaagctgctgctgtctcaggaatgattgcaattagtaggatggctgtgctgtatcctcaagttattgtcgaccatccatttttctttcttatcagaaacaggagaactggtacaattctattcatgggacgagtcatgcatcctgaaacaatgaacacaagtggacatgatttcgaagaactttaagttactttatttgaataacaaggaaaacagtaactaagcacattatgtttgcaactggtatatatttaggatttgtgttttacagtatatcttaagataatatttaaaatagttccagataaaaacaatatatgtaaattataagtaacttgtcaaggaatgttatcagtattaagctaatggtcctgttatgtcattgtgtttgtgtgctgttgtttaaaataaaagtacctattg

SEQ ID NO: 18810 - DNA, 1837 bp, Homo sapiens
  source 1..1837: mol_type = unassigned DNA
ttttgtagctttgaaagctgtatttgatgagaaaaacctgtttcccaaggaaattctgcatcatgaacgaaaagccaagcaattatgccaagaaaaaagttgtgaagtgaagaaaaataagaagtaattacaacagaaaaaccttcactgttacataagaggaattaatcaagcaatggtcaagataaatggagttggccttgatcgctcaggtgtttatgtacaagagttttccagcaagcgtattttagttgtaacattccagtgaataatcagaagtcagtttgggagaagtcaaaatggacacaatcttcttgtggagtcttctattgctgttttttggaagtcaagcctcaagatgctcagctcaaaaaaataccgaatttgcagtggatctttatcaagaggtttccttatctcataaggacaacattatattttcaccccttggaataactttggttcttgagatggtacaactgggagccaaaggaaaagcacagcagcagataagacaaactttaaaacaacaggaaacctcagctggggaagaattttttgtactgaagtcatttttctctgccatctcagagaaaaaacaagaatttacatttaatcttgccaatgccctctaccttcaagaaggattcactgtgaaagaacagtatctccatggcaacaaggaattttttcagagtgctataaaactggtggattttcaagatgcaaaggcttgtgcagagatgataagtacctgggtagaaagaaaaacagatggaaaaattaaagacatgttttcaggggaagaatttggccctctgactcggcttgtcctggtgaatgctatttatttcaaaggagattggaaacagaaattcagaaaagaggacacacagctgataaattttactaagaaaaatggttcaactgtcaaaattccaatgatgaaggctcttctgagaacaaaatatggttatttttctgaatcttccctgaactaccaagttttagaattgtcttacaaaggtgatgaatttagcttaattatcatacttcctgcagaaggtatggatatagaagaagtggaaaaactaattactgctcaacaaatcctaaaatggctctctgagatgcaagaagaggaagtagaaataagcctccctagatttaaagtagaacaaaaagtagacttcaaagacgttttgtattctttgaacataaccgagatatttagtggtggctgcgacctttctggaataacagattcatctgaagtgtatgtttcccaagtgacgcaaaaagttttctttgagataaatgaagatggtagtgaagctgcaacatcaactggcatacacatccctgtgatcatgagtctggctcaaagccaatttatagcaaatcatccatttctgtttattatgaagcataatccaacagaatcaattctgtttatgggaagagtgacaaatcctgacacccaggagataaaaggaagagatttagattcactgtgaatgaaaagcacagcctcagaataaaagatgatttctcaaaaatagctgattggcaaaatatcgtcatcttgacaatatttgctctatatcttatgtcttttctgttttaaactgtgcctgtagtaatagatatctgtcttgatgaataagtaaaattaggtatgcatttgtttccattccttctgtatgttttagaaaatctatatgcatctaaaaccttgagcgtacgtaaaatattaccattcatatgttagaacaatcctgtctataatatcttaaataccaaattcttgtcttagatagcaaatttattattccct

SEQ ID NO: 18811 - DNA, 1514 bp, Homo sapiens
  source 1..1514: mol_type = unassigned DNA
aagatccagttcttataggactattcatcaggttgtttagttcagcattactttgtgctttctgataagatatgatccaaaacctgatgagagaagtcaaaatggacacaatcttcttgtggagtcttctattgctgttttttggaagtcaagcctcaagatgctcagctcaaaaaaataccgaatttgcagtggatctttatcaagaggtttccttatctcataaggacaacattatattttcaccccttggaataactttggttcttgagatggtacaactgggagccaaaggaaaagcacagcagcagataagacaaactttaaaacaacaggaaacctcagctggggaagaattttttgtactgaagtcatttttctctgccatctcagagaaaaaacaagaatttacatttaatcttgccaatgccctctaccttcaagaaggattcactgtgaaagaacagtatctccatggcaacaaggaattttttcagagtgctataaaactggtggattttcaagatgcaaaggcttgtgcagagatgataagtacctgggtagaaagaaaaacagatggaaaaattaaagacatgttttcaggggaagaatttggccctctgactcggcttgtcctggtgaatgctatttatttcaaaggagattggaaacagaaattcagaaaagaggacacacagctgataaattttactaagaaaaatggttcaactgtcaaaattccaatgatgaaggctcttctgagaacaaaatatggttatttttctgaatcttccctgaactaccaagttttagaattgtcttacaaaggtgatgaatttagcttaattatcatacttcctgcagaaggtatggatatagaagaagtggaaaaactaattactgctcaacaaatcctaaaatggctctctgagatgcaagaagaggaagtagaaataagcctccctagatttaaagtagaacaaaaagtagacttcaaagacgttttgtattctttgaacataaccgagatatttagtggtggctgcgacctttctggaataacagattcatctgaagtgtatgtttcccaagtgacgcaaaaagttttctttgagataaatgaagatggtagtgaagctgcaacatcaactggcatacacatccctgtgatcatgagtctggctcaaagccaatttatagcaaatcatccatttctgtttattatgaagcataatccaacagaatcaattctgtttatgggaagagtgacaaatcctgacacccaggagataaaaggaagagatttagattcactgtgaatgaaaagcacagcctcagaataaaagatgatttctcaaaaatagctgattggcaaaatatcgtcatcttgacaatatttgctctatatcttatgtcttttctgttttaaactgtgcctgtagtaatagatatctgtcttgatgaataagtaaaattaggtatgcatttgtttccattccttctgtatgttttag

SEQ ID NO: 18812 - DNA, 1331 bp, Homo sapiens
  source 1..1331: mol_type = unassigned DNA
gagctctctgtggaaaactctattttgaaaatgaatatattttgatttaaacaatacagagaagtcaaaatggacacaatcttcttgtggagtcttctattgctgttttttggaagtcaagcctcaagatgctcagctcaaaaaaataccgaatttgcagtggatctttatcaagaggtttccttatctcataaggacaacattatattttcaccccttggaataactttggttcttgagatggtacaactgggagccaaaggaaaagcacagcagcagataagacaaactttaaaacaacaggaaacctcagctggggaagaattttttgtactgaagtcatttttctctgccatctcagagaaaaaacaagaatttacatttaatcttgccaatgccctctaccttcaagaaggattcactgtgaaagaacagtatctccatggcaacaaggaattttttcagagtgctataaaactggtggattttcaagatgcaaaggcttgtgcagagatgataagtacctgggtagaaagaaaaacagatggaaaaattaaagacatgttttcaggggaagaatttggccctctgactcggcttgtcctggtgaatgctatttatttcaaaggagattggaaacagaaattcagaaaagaggacacacagctgataaattttactaagaaaaatggttcaactgtcaaaattccaatgatgaaggctcttctgagaacaaaatatggttatttttctgaatcttccctgaactaccaagttttagaattgtcttacaaaggtgatgaatttagcttaattatcatacttcctgcagaaggtatggatatagaagaagtggaaaaactaattactgctcaacaaatcctaaaatggctctctgagatgcaagaagaggaagtagaaataagcctccctagatttaaagtagaacaaaaagtagacttcaaagacgttttgtattctttgaacataaccgagatatttagtggtggctgcgacctttctggaataacagattcatctgaagtgtatgtttcccaagtgacgcaaaaagttttctttgagataaatgaagatggtagtgaagctgcaacatcaactggcatacacatccctgtgatcatgagtctggctcaaagccaatttatagcaaatcatccatttctgtttattatgaagcataatccaacagaatcaattctgtttatgggaagagtgacaaatcctgacacccaggagataaaaggaagagatttagattcactgtgaatgaaaagcacagcctcagaataaaagatgatttctcaaaaata

SEQ ID NO: 18813 - DNA, 733 bp, Homo sapiens
  source 1..733: mol_type = unassigned DNA
tcaaatctcataataaaaatctcacacacattcactgcacaaatcctaaaagctctgagctcacagaataattttgaaagagtaagtaaaaaaaaaaattaatttgagctcagatgtgattaccacaaacccgaagtgcaaatatacctaaataggaattaggaattacaaacattgtagaaataaatcatataatgcaaataaaaagtgaacagaaaattactgtttaaaagataaattttttcaactgctttcactaaattgaatctggtatctggcttgcttcttcattgagcatacatataaagttagaattattctgtgagtgacctaatatttattcttcagtactttggtttttaaatttattgcaaattcctctgtatttagaaaatggttatttttccacatgttaactccttacacaaaatgacttttcctgtctacaaaatgtattatgaatatactttctttactgatcttttaatgcaagtatctaaataactgttgtctctattttataggcatacacatccctgtgatcatgagtctggctcaaagccaatttatagcaaatcatccatttctgtttattatgaagcataatccaacagaatcaattctgtttatgggaagagtgacaaatcctgacacccaggagataaaaggaagagatttagattcactgtgaatgaaaagcacagcctcagaataaaagatgatttctcaaaaa

SEQ ID NO: 18814 - DNA, 743 bp, Homo sapiens
  source 1..743: mol_type = unassigned DNA
tgaataatcagaagtcagtttgggaagatccagttcttataggactattcatcaggttgtttagttcagcattactttgtgctttctgataagatatgatccaaaacctgatgagagaagtcaaaatggacacaatcttcttgtggagtcttctattgctgttttttggaagtcaagcctcaagatgctcagctcaaaaaaataccgaatttgcagtggatctttatcaagaggtttccttatctcataaggacaacattatattttcaccccttggaataactttggttcttgagatggtacaactgggagccaaaggaaaagcacagcagcagataagacaaactttaaaacaacaggaaacctcagctggggaagaattttttgtactgaagtcatttttctctgccatctcagagaaaaaacaagaatttacatttaatcttgccaatgccctctaccttcaagaaggattcactgtgaaagaacagtatctccatggcaacaaggaattttttcagagtgctataaaactggtggattttcaagatgcaaaggcttgtgcagagatgataagtacctgggtagaaagaaaaacagatggaaaaattaaagacatgttttcaggggaagaatttggccctctgactcggcttgtcctggtgaatgctatttatttcaaaggagattggaaacagaaattcagaaaagaggacacacagctgataaattttactaagaaa

SEQ ID NO: 18815 - DNA, 477 bp, Homo sapiens
  source 1..477: mol_type = unassigned DNA
tcaaaatggacacaatcttcttgtggagtcttctattgctgttttttggaagtcaagcctcaagatgctcagctcaaaaaaataccgaatttgcagtggatctttatcaagaggtttccttatctcataaggacaacattatattttcaccccttggaataactttggttcttgagatggtacaactgggagccaaaggaaaagcacagcagcagataagacaaactttaaaacaacaggaaacctcagctgagaaaaaacaagaatttacatttaatcttgccaatgccctctaccttcaagaaggattcactgtgaaagaacagtatctccatggcaacaaggaattttttcagagtgctataaaactggtggattttcaagatgcaaaggcttgtgcagagatgataagtacctgggtagaaagaaaaacagatggaaaaattaaagacatgttttcaggggaagaatttggcc

SEQ ID NO: 18816 - DNA, 581 bp, Homo sapiens
  source 1..581: mol_type = unassigned DNA
agaagtcaaaatggacacaatcttcttgtggagtcttctattgctgttttttggaagtcaagcctcaagatgctcagctcaaaaaaataccgaatttgcagtggatctttatcaagaggtttccttatctcataaggacaacattatattttcaccccttggaataactttggttcttgagatggtacaactgggagccaaaggaaaagcacagcagcagataagacaaactttaaaacaacaggaaacctcagctgggttttgaaaagagaactgggcatgaattcctgtcccagttctgcaactaaatgaccttgtgatttggcacaagtcatgtcacttgtgaagcttcttaatctctctgggcctcagattcctcactgtaaaaagaaaagttgaggttaggtaatttatttggaccttttggctgaaataatctataattctacgactacgtttgttttcatctttggatctcccatatgcacacaaaattggcttttagacttttactagcagaagagaacatgcactgaattttagaacattttctggaggtctggtacaatcaaatcaagagc

SEQ ID NO: 18817 - DNA, 1678 bp, Homo sapiens
  source 1..1678: mol_type = unassigned DNA
aggaattaatcaagcaatggtcaagataaatggagttggccttgatcgctcaggtgtttatgtacaagagttttccagcaagcgtattttagttgtaacattccagtgaataatcagaagtcagtttgggagaagtcaaaatggacacaatcttcttgtggagtcttctattgctgttttttggaagtcaagcctcaagatgctcagctcaaaaaaataccgaatttgcagtggatctttatcaagaggtttccttatctcataaggacaacattatattttcaccccttggaataactttggttcttgagatggtacaactgggagccaaaggaaaagcacagcagcagataagacaaactttaaaacaacaggaaacctcagctggggaagaattttttgtactgaagtcatttttctctgccatctcagagaaaaaacaagaatttacatttaatcttgccaatgccctctaccttcaagaaggattcactgtgaaagaacagtatctccatggcaacaaggaattttttcagagtgctataaaactggtggattttcaagatgcaaaggcttgtgcagagatgataagtacctgggtagaaagaaaaacagatggaaaaattaaagacatgttttcaggggaagaatttggccctctgactcggcttgtcctggtgaatgctatttatttcaaaggagattggaaacagaaattcagaaaagaggacacacagctgataaattttactaagaaaaatggttcaactgtcaaaattccaatgatgaaggctcttctgagaacaaaatatggttatttttctgaatcttccctgaactaccaagttttagaattgtcttacaaaggtgatgaatttagcttaattatcatacttcctgcagaaggtatggatatagaagaagtggaaaaactaattactgctcaacaaatcctaaaatggctctctgagatgcaagaagaggaagtagaaataagcctccctagatttaaagtagaacaaaaagtagacttcaaagacgttttgtattctttgaacataaccgagatatttagtggtggctgcgacctttctggaataacagattcatctgaagtgtatgtttcccaagtgacgcaaaaagttttctttgagataaatgaagatggtagtgaagctgcaacatcaactggcatacacatccctgtgatcatgagtctggctcaaagccaatttatagcaaatcatccatttctgtttattatgaagcataatccaacagaatcaattctgtttatgggaagagtgacaaatcctgacacccaggagataaaaggaagagatttagattcactgtgaatgaaaagcacagcctcagaataaaagatgatttctcaaaaatagctgattggcaaaatatcgtcatcttgacaatatttgctctatatcttatgtcttttctgttttaaactgtgcctgtagtaatagatatctgtcttgatgaataagtaaaattaggtatgcatttgtttccattccttctgtatgttttagaaaatctatatgcatctaaaaccttgagcgtacgtaaaatattaccattcatatgttagaacaatcctgtctataatatcttaaataccaaattcttgtcttagatagcaaatttattattccct

SEQ ID NO: 18818 - DNA, 1769 bp, Homo sapiens
  source 1..1769: mol_type = unassigned DNA
aggaattaatcaagcaatggtcaagataaatggagttggccttgatcgctcaggtgtttatgtacaagagttttccagcaagcgtattttagttgtaacattccagtgaataatcagaagtcagtttgggaagatccagttcttataggactattcatcaggttgtttagttcagcattactttgtgctttctgataagatatgatccaaaacctgatgagagaagtcaaaatggacacaatcttcttgtggagtcttctattgctgttttttggaagtcaagcctcaagatgctcagctcaaaaaaataccgaatttgcagtggatctttatcaagaggtttccttatctcataaggacaacattatattttcaccccttggaataactttggttcttgagatggtacaactgggagccaaaggaaaagcacagcagcagataagacaaactttaaaacaacaggaaacctcagctggggaagaattttttgtactgaagtcatttttctctgccatctcagagaaaaaacaagaatttacatttaatcttgccaatgccctctaccttcaagaaggattcactgtgaaagaacagtatctccatggcaacaaggaattttttcagagtgctataaaactggtggattttcaagatgcaaaggcttgtgcagagatgataagtacctgggtagaaagaaaaacagatggaaaaattaaagacatgttttcaggggaagaatttggccctctgactcggcttgtcctggtgaatgctatttatttcaaaggagattggaaacagaaattcagaaaagaggacacacagctgataaattttactaagaaaaatggttcaactgtcaaaattccaatgatgaaggctcttctgagaacaaaatatggttatttttctgaatcttccctgaactaccaagttttagaattgtcttacaaaggtgatgaatttagcttaattatcatacttcctgcagaaggtatggatatagaagaagtggaaaaactaattactgctcaacaaatcctaaaatggctctctgagatgcaagaagaggaagtagaaataagcctccctagatttaaagtagaacaaaaagtagacttcaaagacgttttgtattctttgaacataaccgagatatttagtggtggctgcgacctttctggaataacagattcatctgaagtgtatgtttcccaagtgacgcaaaaagttttctttgagataaatgaagatggtagtgaagctgcaacatcaactggcatacacatccctgtgatcatgagtctggctcaaagccaatttatagcaaatcatccatttctgtttattatgaagcataatccaacagaatcaattctgtttatgggaagagtgacaaatcctgacacccaggagataaaaggaagagatttagattcactgtgaatgaaaagcacagcctcagaataaaagatgatttctcaaaaatagctgattggcaaaatatcgtcatcttgacaatatttgctctatatcttatgtcttttctgttttaaactgtgcctgtagtaatagatatctgtcttgatgaataagtaaaattaggtatgcatttgtttccattccttctgtatgttttagaaaatctatatgcatctaaaaccttgagcgtacgtaaaatattaccattcatatgttagaacaatcctgtctataatatcttaaataccaaattcttgtcttagatagcaaatttattattccct

SEQ ID NO: 18819 - DNA, 3207 bp, Homo sapiens
  source 1..3207: mol_type = unassigned DNA
gagactagggggcggtgaggagtgggacccgctcgcggccattggttgtgcggccaggaggggcggagggacgacgcgcgggctgtgcggggccggcagcccggatccactcccgctgcgcctgctgtccgccgtgcgcccagactgcgcgccgcgccgctgcgcccaacattcccgaggacggcttcgcgggcgcgtatcgtccagaccggagcaccgccccaccgctagcgcaggagacctgccggggaagtcgcgtgtcctgacctgcagtctcaatgcacatctgatacctgctgcctttgagaaacaagttttgttgtgctgatttaacagcctgtgaattctgcaaacacgatcgtgaaaaaatgccaatctgtcctgtgtaagccctgtgtgaagttttgactttaatctaccagatcactccttcaccctccataaagatgtctgaacctgacacttcctcaggattttcgggaagtgtggagaatggaacttttcttgagctgtttcccacatccctgtccacgtcagtggacccatcctcaggccacctgtcaaacgtctacatctatgtgtccatattcctcagccttttagcgtttctgcttctgcttttaatcattgccctccagaggctcaaaaatatcatctcctccagttcctcctacccagagtatccaagcgacgctggaagttctttcaccaatttggaagtctgcagcatttcctctcagaggtccactttttcaaacctttcatcctgaggaaaatggaagagtccttgagtgtggcagcagttttgacatccccttacggaagtgtcccgtgaggcattgcctcatgaaagaaatgatccttttggtgtagacctgcttctccttctcctttttctctgatttcttttctgttcatgatgcttttcatttggggatggagacaccgatgttggtggaaatgtgtgcaaaccccaaggtgcagaatttcacacaaatggcttgatgaatctagactgggcttcttcaggtaagtcagttcattctactttgttggacgccgtaggctcatctgaggtggcctctccgtggatgctggacatggactcgcacttcatttcttttacaaagccgtgaaatcaactgagcctgcagaaactggcaaaatcaagtctgacctatgtagaagttattttccatatttaaaagataaagtggagacaccaaacttaaaaaggaagagagtcaatttagatttaatgtatgacatttctaaaactgagggtaaatatatgctaaatattttctttaacttcactttaacaagtaaaaatcacacttattgatgaatgtaagtcatttgggaaagttttggaagagtttacattttaatagcaagacaaacatgtattatgatggagcttgtgatgtatttctgcctcctggagttttattttgtttttctgcttatgttttagtcataatgccacaaagttgtggaatttttgtgattaattgctgttactagtactaagagaagcaccagaagagatgccaagaagtttttatatgaataatttctatcagtgagaattaagcatatggaaaatattcatttagttgtattttatacagtaataactcttagctgtcgtgtaagttcctttattcggtttcatagtctttataattttagtgcagaattatattaagcctccaagatgtctgatatttgttcactcacattaggttgtaaaacttagaaactaaattgcaaatatatgtgttattatatactccacgaatgttgcgtctctgataattagttgttgtatgttaacataatactctacattaggatttcaggatgtgagtttgtattaaaaattgtaggcactcaagttgtgtagctgctgggagctttagggatcctaggagctgccgtgctgcaggcagcagagtatgtctgaactcggcgggcgggtggcaggggctgtctgtgaaattaggcacacatgtgagctcagacatggaatgtggaggaactcaagctgcccctaaaaacaaaacaatcaaactgcagctccttaagagtaagaattttaatttaattttgaaaataaatggcccacagggtaaacactgaacttattcaacctacaggaggccactgcatcaacacgccacggtcttcccatggcaactgaatcattccttgttcaaaacatttaatcatcttaagcagtggggcttcaacacaccgtttggttagattgtgcagtcagcactctccagtgattagaatgggggaaagaatccactatttgtacagggtttatctttatcatactaaaatgctgagtgagtggaggtctgggaatgaaaatcagaagtcttcttcttcttttaattcataagcctcacttaaatcagaacacatttaactatttatatatcaaaaacgtccccaaacaccataagaccagcacagagttgctgccctaaaatgtataattagtgaaaaatttacctctgcttccatttaaagcatggcagtgggttgggtgtcattatgtagtataaaaactggactagataaactgctattttagagcattattagcattctctgaatatatgtatatatacatatatatacgcacacacacacacacacataaatatatatatatatatatatatataaactcacatactcccaattaaaagtcgtgtgaaagctacacaggattacagaggcatctatattatcacttttgctctttgactaatcctatgctgtttttgttatagagagaaacaaggacatggatgaagtgatttttttttaaataaaaggacaaatttgccacacaacagaacaatctgagtatgatctgtcctcagggtatctttatatcctttccatgtgaaagagatataaagaattctgacagcaaaactactttaaaaatcaaatcaaatcaaatccacaagcacactcccattcctcccctgccgcaatggttcttgctctcaatgtttagtagagaaattaagagccacattcaaagatggaaaataagatttgtcattagaagcttgccaaggtaacagattgtacaacttgagatgaattcatgttgtttaagaagttcagaaaggttggaagatgggtttataaataaagaagtggagtccattgaaa

SEQ ID NO: 18820 - DNA, 10615 bp, Homo sapiens
  source 1..10615: mol_type = unassigned DNA
cccgggcgcgcgcggggtcgcgcggacgcggctcgggccgcgggtgccgagaggtcgccgggccacccgcacccccgctccccgcctgacgcacggaggggccgggacgcgatttgccgcgagtgactggagccgcagccgtcgccgctgctgccgccgccgcccgggcccgctccgcccccagcccgccttcctcccgccgcgccctccgcctccgcccgcacctcgctagcgttcccctgtcttccccaacgccccggagccgccggccgctagcgtcagcgccagccagaattaaggaagttcactggagtaaaatggaggcctcagtaatattacccattctgaagaaaaaactagccttcctttcaggaggaaaagacagacggagtggcctcattttgacaattccattatgcctcgaacagacaaatatggatgagctgagtgtcaccttagactacctactcagcattccaagtgagaagtgtaaggctagaggatttaccgtgattgtggatggcagaaaatcacagtggaatgtggtgaaaacagtagtcgtaatgctacagaatgttgttccagctgaggtgtcccttgtttgtgtggtaaagccagatgaattctgggataagaaagtaacgcatttttgtttttggaaggagaaggatagacttggctttgaggttattttagtgtccgccaacaaattgactcgttatatagaaccatgccaattaacagaagattttggtgggagtctcacctatgatcacatggactggttaaataagaggctggtttttgagaagtttacaaaggaatctacatcattattagatgaacttgctttgattaacaatggaagtgataaaggaaatcagcaagagaaagaaaggtctgtggatttaaactttcttccatcggttgatcctgaaacagttcttcagacagggcatgaattgttgtccgaattacagcagcgtcgatttaatggctcagacggaggggtttcatggtctcctatggatgatgaacttcttgcacagccacaggttatgaaattattagattcactccgagagcaatatacccgctaccaggaagtttgtaggcaacgtagcaagcgcacacagttagaagagattcaacagaaggtaatgcaggtggtgaactggctagaagggcctggatcagaacaactaagagcccagtggggcattggagactccattagggcctcccaggccctacagcagaaacacgaagagattgagagccagcacagtgaatggtttgcagtgtatgtggaacttaatcagcaaattgcagcactcttgaatgctggcgatgaggaagatcttgtggaactaaagtcactgcagcaacaacttagtgatgtttgttatcgacaggccagtcagctggaatttaggcaaaatctcttacaagcagctcttgaatttcatggtgttgcccaagatttgtctcagcagttggatggcttattagggatgttgtgcgtagatgtagcaccagctgatggagcatcgattcagcaaactttaaaactgcttgaagagaagctgaaaagtgttgatgtgggattgcaaggtttgcgtgaaaaaggtcaaggtctcctggatcagatctccaatcaggcatcctgggcctatggaaaggatgtaaccattgaaaataaagaaaatgtggaccacatacaaggagtgatggaagatatgcagcttagaaaacaaagatgtgaagacatggtagatgtgcgaaggttaaagatgcttcagatggtgcagttgtttaaatgtgaagaagatgctgcccaggcagtagaatggctaagtgaacttctggatgctctgcttaagactcacatcagattgggcgatgatgctcaagaaacgaaagttttgctggaaaagcatagaaaatttgttgatgttgcacagagcacttatgactatggcaggcagttgctacaggccacagttgtgttatgccaatctttgcgctgcacttctcggtcatctggggatacacttcctcgactgaacagagtatggaaacaatttacaatagcatctgaagagagagtacatagattggaaatggctattgcatttcactcaaatgctgaaaagattttgcaggactgtccagaagagcctgaagctattaatgatgaggagcaatttgatgaaattgaagcagttgggaaatcacttttggatagattaactgttccagtagtttatcctgatggaaccgaacaatattttgggagtccaagtgacatggcttctactgcagaaaacatcagagacaggatgaaactagttaatctcaaaaggcagcagctgagacatcctgaaatggtgaccacagagagctaatagctaccagctacctacagatttgcagttcataatcccgcatgttgtcaacatactacagcattagccaccacaccttaagatgcatttcacagccaaaataagtctcatttcttttcatgacacatttctctttacatgttaacaccttgctactaccaaggcataattacttaacatgcttcgaggctgtagattccaagtatcttaaaagaaggaactataaacattgcactgaaaacttgctttaaagctttacctgacctgtcagtttgtagacaaacaactgataataagctttgaatggtgctaataagagtaggaattctctctattaaaaagaaaaaaaaaagttgcccttcctccacaggtgatttagtaaatttagacagtagttaaactcttgttagtagacagtggtgtcctcaaaattttactttgtaattcttcagaattgattatttttattgtgtcaatacagagaaagcctttcagatctttgatatatcatagtcattaaaagaccttttcctatttgtattgataatgtattaaaagttgtttgtgcttaataaaagacttctttaaacatcttatttaatttagtagttacatcctatttccaaacatgagtgccttatttaaaagggcattcttaggactgtgaggatggtttaatatttgttttttcatggtggttgcatgtattttagacaggaaatacatatgtaagcatgtgtatataataaataagcatgttttatcatgaaaaattattgtgaacaatttagatctttaagaacttattaataatggaatactatttctaatttttctctttttcaacttgaaaaatattctcaaaattattaactaccctgaagatactttgtctttaggggaggagggctgaggaagaaggcatacataattacttcagtgtaatcctttatatcagagtaatctttcaggaactaaaatagcaattgttaataaaatttagtttctcattatagtctaaaagcaaaataaattctgaagtagtccaataacagaactgtatgacccctttagaaataaaatttatcatgaaatgctagttcttttaagtttgtattaagtttaaatggtaaaatgcatataatttaaattttatgtatttttatttcagaacattttttaaaatattaaaaattattttttagtcttgtagtcattacaaaattataaacgagttgtatactggttcctttttgaggtctacaaacatgctcgtgtatcttccaatgcaaaaaaaaaacccctcccttttaacctgctagtttttccagccttcttcactgactgacagacttcttggagaaatccacatccagtgcccctacatcctcatcactcactactcagcaccttgcagtctggttttacacagcactctactgaaactgttcttttgaaagtcagcaatggcctcccagttaccaaactgaatggtttttttctccgtctgaatcccttacccttttctctgcaacatttacaccattgagcaacctttcctagacagtgtctccttccttgaagatgctatcctctgaaataactgtgagtacagtcgcataaccctaatttaagatgtgcctgctgaacatgtgctctctcagatcctgtcctcagaatgcttttggctcttttctcggtatctcatccttagagtttttattttataccaatgttctggattacatacctggtccagaaatctagacttgtacttctttttaattgcctagttgacatttcaaccttgattaaagattgacaatatttatcaccttttcctcctggaacaatttaggttaatggtgcagccttttttcctagtcaaacatgccaggaagttcagggcaaagttcaactgctccctcttgtcttatgtggtcactgcttctgagaacatccaggaagttctttctatacttgaatcatcttctcagtcctttggggctttactgctatgagtatgaacttttgtgattatttatttcagtcttcatgatggtgctatcacattctacagttgtttatgtctgtacccagtaagctcttttgagggaaggaatcttgtcttctcctattcccagtcttgctcatgcataacagatgcccattcctcctaaatatgaatgctgtattataggcattagtaataatccctgttacattgcagtctgaagtatgttttaaacatacttttttaaagttagaactgacttacaagtgaatctattcttagattcttagatactaactactttagatatttagttatactcaataactaaatatcaatactcaatatctgtttcttctgaatttcagagtagttagaatgtttttcttaagactttgctagaaaggaactggtttgttagtaattctgccatcaactcatggagttataattgccaaatgagttaatttttatataccttaagctatcttgcctacaaaaagtaaaataaggcaggattcataaatgttacttgtaaattgagtgtttcacatgaggccaagtatgattttaacataatgaatatcattgctcctcatctgtaaatttgctgctgctttcatatgtgtatctgtacatagagttatgaatgaaaatccagtaatgccctaaagcaactttcttccatagggtcaaagctcacttaaggtaaacgtgtgaaaaaagtgactgcagtgtgtttgaaaccacaagctgtttctatgtcataaattaacatcagcttgcaagtctctgaaagaaccactcatttgtaattggtatatatgtcacaacctcccacattcctttagcccatctcagggaattattgaaacgctggcagggttagtttcattttgttttggtttttttgggtttttttgtttgtttgaggattttttttttcttttatcatttgtttgctcctgtgtaagcttaatatataatggcagtttggcatctgttcttcgcacatgtctaacccagcagagttatgcaaaaatgatgacttcattttaggtcaaattggctttgttcccagtcctcattgttggtcactttgttcagttctggtgactcattggtgatgttgatgaaactgctcagcctgccagctgggatattgatggcaggtctaggcttcattgttaggtagaagattgaatacttctcactttatacaaatttacattggctattgctcccatgtgttagctagtcttaacatgtttgttatttcgttatcttattagctgacatacggagtggtattattagtgtcgtactccttagcgtgagcatgacaattaagttaccttactaacagtgatgagtaaaccatactctgatctaaacccattgttaccaatgatgtgattatgaagttagctgaatctatggtctacatttgaagaaatagttcagaattctctactacattgtaagttacttgctaatagagattgggcattattatgtactactccccttctcacatcctacccaaagtacacaaggccgtagtaaaatactgttgctactaaaaactaaacatactgtggttgctaatgtcctttacatcttcagcctatagggaatggtacaggcagaaacaagcaccattaagtatattatcatcagtagtgagatctgtatgattaggatatctttgcttaagcccccaaaggaaaaattctctagcattaaaaacatggctggaacatagctaagcagttaacctaattagtagacttattgttaacgttcagtcctaaaaatgaaaagcttcagttgggagtagaaaatatactatgctggtatatagagcaacaaataccctgatgagataaaatgaagtagaaacttaccatttgacattatttgactttcatacatgctactgaaaagtctaggtttagctaagaagcataaataatggcagtacttgtagaggaaagaacataccagctaaaacaagaactgtaatgaatataatggaaagtgtttggagcttgaatacttggcttcaaaaatctggctttgccatttactgttaaaaaaatatctgagaatttatctcaggctgtaaaacagagaagtcataccaatttcaagaataaaatatgatataaagaattgttgaagccaaaatatccagaaataaacagaatggaaggtatcattgctataattatcttttcagaataaaaaatagagtattctttatcctttctgttgtctcacatgacaagcatgggatggtgaggaaatggcatattgcctatgttcgccgccccacccccttagttccaccaccccttcaccgtcacccccagttcactagtgtatcagaatgcatcttcagaattacacactgaagatacaaaaggtccagttggtaagctcatcagtaaataacaaggctttgaaatctgacaaattagctatttttgtaggaagataatagaacagcaagatggaagacaagtgatgagtatcatctgttttgaggttgacaaggtgtgacataaccctgttaatagacacaagtaaaagaaaatcatactaggattggatattagtgagcgagcaccgaccagtagaaacaacaacagcataaatctgttatttaagtatcccaataatgaggttaaaaaaaaaaaaaaaacagaacaaagcatgaaaagaccacaattagtgctggctatgcttagagaggagcagtctcttggtaaactcaggcagtgatgatgaacagaaaatggccgactgatactgtaatagaggcatagaactaaggacactccgtgagctggcataaatacaggggagtctttaagactgaaaaaagttcatgggtatgacacttaatatgactcaacattactgcagaattttaaagcaaacatgaaagcttgagaataaacactagtccctctacttcaagaaaaagcagaacctgtactagaacatgaagaacttagagatcaaaagacagccagaactatgatgaaatattttgaaagcagtgggcacatttttaaagattttttttggagaactttatgaggctgtatgtataattcctatatgtaattttataggaattcttaactgaaagtagttatcaactgctacttatcaggagcagtgttattagggattttaagttaggcatgtagaaaactttctgacaaaagggctattgaactccagccagttcccagtgaatctccaggaggcaccttagaagtcttcacaagctgaataccatgtctttagggtgtccaaatgcttctgtcttgggggagagatgagagatgactgggtgcctttccactcagaacacagtagaccactcactatttatgaccaagcctcacttcttttctattacagttacagattcttttttagtctggaagttagggtaaataaaatttgtatgtttgatttttctcttaggaatgttttctcatcttaactcttatgttatctttatggccaacagatttgctcagaatatatcatcaaaatatatgtattgtattttgtaaaggtgaaaggatcgaaataccactttgacagttataaaccagagtagatttgagaactgattgctcacatcacacttacgaatagtctcagaagcctttaagagaaacttacttctcaatggacacttagaagaatttgatgatcttactgtcataaaatcagtaatgaaattctcagcaaaactatttggtaaacattgcaccctgtatttttacccaacatcttgttatgaaaattatcaaatacattaaaaagttaaaataattttatagtgtactcactacctagatgctaattagcattacctatgcttgctttgtcacatatccattcatcatttcatattattatttgatgcattttaaattgcatatcattaactagagttcattgttggcttttttacataaaattagcatgcaatgaagtgcatagaaatatgtgttcactgaggtttggcaaatgcatatagtgctatggaaataggaaacgttatcaccaccctagaaagtttccacactgccctttccagtcaattcctgtccctacttgaccctcaaaggcaaccactgttcctttttctaccataagatttttctgttctaaaactttatataaatagagtcacgcaacatgtacgcttttctacaaggcttcatttttttattgctgttcttttttattgctgagtagtattccactgtatgacaatattacagtttgttttcttaatttcctattattgatagatacctgggctgtttccaggattggccattataaataaagctgctatgaccattcttacgtaagtctttgtgaacataggttttcatttctttgcagtaaattccttggattagaattgctgggtcacagggtagttttaaaagaaactgccatacctttttccagttcagttttattgtgccctgtattttgtattttgatgtgcataaaggtgtaaactatttttatgatccatattgaagtattagaagaagtgagtttggaataacaatggcattgttcatggtcaaggatgacaattggaactatctgaggaaagcaaagacctgtctgccccagacagctcctcaaggggttcctatgcctgaaactttagcaatatttcactccttgaaaggttaaagcccaaccatggtgatatgttagctagaagaaacagcactggtttgtttatgttactaactttcaccacccgttttcagtaggtaaagtaagactgatcattgaacagaaaaggttatttctgtgatgaggttgagggggtagtggaaagcatgtattgctagtaagccccaggtacagctatgtgagagagagtcacctggacagggaagtcccccaaatggtggccagaagagcagaaaacggggtgggaaaaattctacctcacagttttgcataggggatagctatgcttttacgggacattttagcgtttaaaaatattttcaatattgtctctttattcaataccacccagctgtagttttttcacactctgatgactctcttatccactcttttacctctcccagctgttctattacatacagcattcacctgtattagtctatagaattataatcatctgtgtgtttctaatgctcattttcaaaaatatgtatggtttattcgatttttcctattaaaattttaagggctgggaaatttggcttctactgtaaatccttataatgttccacacattgtaaatatgcaataaaaatgttaacaactataatggcagcaggttttggtatgtatttctttgatatattgtcactttggacaataagtttgatttctgttaataaaagttgttcataaaatctagggagaattaagtcacactggtctctataagataatctgatgaattctgcatctttgaatcaatttgagttattttttgtaaaggtttaaattgtttctaacagtgttacctaaaacctttcattaaatcaaaaatgtaacttgtatattctgaaataacctggagtcttagaagacagaggcttctgcttccctctcccgtgaccccaacaatcccttcccacaggcttggcacagaagttcagtgctttctctacgtctcatgttgtcagaaataggttctcaccataatagacagtggtgaaatttccattgttcctactgagaagtccatttttaaggcatcaaaggtgaatgtgtatttagggatggaggaggcatattacaacaaagctgtatttaaaataacacaatcatatcatgctataaacaatagcagttccagaatggctactaaggattttggactgccagactttggaaattggcaagccttataccttgtccaatgaagttaagtacatttgagtgacagttcaacatacaagcaaaaaaatatatagaagacattgtacatttgttattaatggacatgtttactttacatgttagagtatccatccatctctaggttttccattagatgcttcattgtatccacaaacctgtttcaaaccattgaagtgatcttaccattgtgtttgttcaaaataaaattgggagaaaatgtgaa

SEQ ID NO: 18821 - DNA, 1699 bp, Homo sapiens
  source 1..1699: mol_type = unassigned DNA
tgcagcaacaacttagtgatgtttgttatcgacaggccagtcagctggaatttaggcaaaatctcttacaagcagctcttgaatttcatggtgttgcccaagatttgtctcagcagttggatggcttattagggatgttgtgcgtagatgtagcaccagctgatggagcatcgattcagcaaactttaaaactgcttgaagagaagctgaaaagtgttgatgtgggattgcaaggtttgcgtgaaaaaggtcaaggtctcctggatcagatctccaatcaggcatcctgggcctatggaaaggatgtaaccattgaaaataaagaaaatgtggaccacatacaaggagtgatggaagatatgcagcttagaaaacaaagatgtgaagacatggtagatgtgcgaaggttaaagatgcttcagatggtgcagttgtttaaatgtgaagaagatgctgcccaggcagtagaatggctaagtgaacttctggatgctctgcttaagactcacatcagattgggcgatgatgctcaagaaacgaaagttttgctggaaaagcatagaaaatttgttgatgttgcacaggtgcaaaactggttatcttccttttccacaagctcagtgtttgaatagctttctgcatgattataatgtaactttaccttccaagtacaagaagagcacttatgactatggcaggcagttgctacaggccacagttgtgttatgccaatctttgcgctgcacttctcggtcatctggggatacacttcctcgactgaacagagtatggaaacaatttacaatagcatctgaagagagagtacatagattggaaatggctattgcatttcactcaaatgctgaaaagattttgcaggactgtccagaagagcctgaagctattaatgatgaggagcaatttgatgaaattgaagcagttgggaaatcacttttggatagattaactgttccagtagtttatcctgatggaaccgaacaatattttgggagtccaagtgacatggcttctactgcagaaaacatcagagacaggatgaaactagttaatctcaaaaggcagcagctgagacatcctgaaatggtgaccacagagagctaatagctaccagctacctacagatttgcagttcataatcccgcatgttgtcaacatactacagcattagccaccacaccttaagatgcatttcacagccaaaataagtctcatttcttttcatgacacatttctctttacatgttaacaccttgctactaccaaggcataattacttaacatgcttcgaggctgtagattccaagtatcttaaaagaaggaactataaacattgcactgaaaacttgctttaaagctttacctgacctgtcagtttgtagacaaacaactgataataagctttgaatggtgctaataagagtaggaattctctctattaaaaagaaaaaaaaaagttgcccttcctccacaggtgatttagtaaatttagacagtagttaaactcttgttagtagacagtggtgtcctcaaaattttactttgtaattcttcagaattgattatttttattgtgtcaatacagagaaagcctttcagatctttgatatatcatagtcattaaaagaccttttcctatttgtattgataatgtattaaaagttgtttgtgcttaataaaa

SEQ ID NO: 18822 - DNA, 1675 bp, Homo sapiens
  source 1..1675: mol_type = unassigned DNA
ttacaaaggaatctacatcattattagatgaacttgctttgattaacaatggaagtgataaaggaaatcagcaagagaaagaaaggtctgtggatttaaactttcttccatcggttgatcctgaaacagttcttcagacagggcatgaattgttgtccgaattacagcagcgtcgatttaatggctcagacggaggggtttcatggtctcctatggatgatgaacttcttgcacagccacaggttatgaaattattagattcactccgagagcaatatacccgctaccaggaagtttgtagagaagctgaaaagtgttgatgtgggattgcaaggtttgcgtgaaaaaggtcaaggtctcctggatcagatctccaatcaggcatcctgggcctatggaaaggatgtaaccattgaaaataaagaaaatgtggaccacatacaaggagtgatggaagatatgcagcttagaaaacaaagatgtgaagacatggtagatgtgcgaaggttaaagatgcttcagatggtgcagttgtttaaatgtgaagaagatgctgcccaggcagtagaatggctaagtgaacttctggatgctctgcttaagactcacatcagattgggcgatgatgctcaagaaacgaaagttttgctggaaaagcatagaaaatttgttgatgttgcacagagcacttatgactatggcaggcagttgctacaggccacagttgtgttatgccaatctttgcgctgcacttctcggtcatctggggatacacttcctcgactgaacagagtatggaaacaatttacaatagcatctgaagagagagtacatagattggaaatggctattgcatttcactcaaatgctgaaaagattttgcaggactgtccagaagagcctgaagctattaatgatgaggagcaatttgatgaaattgaagcagttgggaaatcacttttggatagattaactgttccagtagtttatcctgatggaaccgaacaatattttgggagtccaagtgacatggcttctactgcagaaaacatcagagacaggatgaaactagttaatctcaaaaggcagcagctgagacatcctgaaatggtgaccacagagagctaatagctaccagctacctacagatttgcagttcataatcccgcatgttgtcaacatactacagcattagccaccacaccttaagatgcatttcacagccaaaataagtctcatttcttttcatgacacatttctctttacatgttaacaccttgctactaccaaggcataattacttaacatgcttcgaggctgtagattccaagtatcttaaaagaaggaactataaacattgcactgaaaacttgctttaaagctttacctgacctgtcagtttgtagacaaacaactgataataagctttgaatggtgctaataagagtaggaattctctctattaaaaagaaaaaaaaaagttgcccttcctccacaggtgatttagtaaatttagacagtagttaaactcttgttagtagacagtggtgtcctcaaaattttactttgtaattcttcagaattgattatttttattgtgtcaatacagagaaagcctttcagatctttgatatatcatagtcattaaaagaccttttcctatttgtattgataa

SEQ ID NO: 18823 - DNA, 724 bp, Homo sapiens
  source 1..724: mol_type = unassigned DNA
aggtctgtggatttaaactttcttccatcggttgatcctgaaacagttcttcagacagggcatgaattgttgtccgaattacagcagcgtcgatttaatggctcagacggaggggtttcatggtctcctatggatgatgaacttcttgcacagccacaggttatgaaattattagattcactccgagagcaatatacccgctaccaggaagtttgtaggcaacgtagcaagcgcacacagttagaagagattcaacagaaggtaatgcaggtggtgaactggctagaagggcctggatcagaacaactaagagcccagtggggcattggagactccattagggcctcccaggccctacagcagaaacacgaagagattgagagccagcacagtgaatggtttgcagtgtatgtggaacttaatcagcaaattgcagcactcttgaatgctggcgatgaggaagatcttgtggaactaaagtcactgcagcaacaacttagtgatgtttgttatcgacaggccagtcagctggaatttaggcaaaatctcttacaagcagctcttgaatttcatggtgttgcccaagatatgtgggattgcaaggtttgcgtgaaaaaggtcaaggtctcctggatcagatctccaatcaggcatcctgggcctatggaaaggatgtaaccattgaaaataaagaaaatgtggaccacatacaaggagtgatgga

SEQ ID NO: 18824 - DNA, 652 bp, Homo sapiens
  source 1..652: mol_type = unassigned DNA
aggtctgtggatttaaactttcttccatcggttgatcctgaaacagttcttcagacagggcatgaattgttgtccgaattacagcagcgtcgatttaatggctcagacggaggggtttcatggtctcctatggatgatgaacttcttgcacagccacaggttatgaaattattagattcactccgagagcaatatacccgctaccaggaagtttgtaggcaacgtagcaagcgcacacagttagaagagattcaacagaaggtaatgcaggtggtgaactggctagaagggcctggatcagaacaactaagagcccagtggggcattggagactccattagggcctcccaggccctacagcagaaacacgaagagattgagagccagcacagtgtgagaggctttttcctctgcaagttacaatgatattatgaacgtgggtaattagtagcatatgtggtactgagtgataagttgctgcaaactttggtatggggcatgaagtacagtttgttaagtgcctagaggtcataaagtacattttgattacttagtacatgttaattagaaggttgtttttggttttgtctctaatgcagtttaattatatttttatagaagcacaatttgcatgaaattttaaaagctacag

SEQ ID NO: 18825 - DNA, 619 bp, Homo sapiens
  source 1..619: mol_type = unassigned DNA
agacaaagcgccggaggtgggagccctgcgggccgcctttgcctccgcgccgtctgccgggtgcggccgcggcccgcagagaccgggccgcgcgcttttccgttcctgagcgcccttgttcatttctgggtgaaagggacccgaattgtgcaacagaattaaggaagttcactggagtaaaatggaggcctcagtaatattacccattctgaagaaaaaactagccttcctttcaggaggaaaagacagacggagtggcctcattttgacaattccattatgcctcgaacagacaaatatggatgagctgagtgtcaccttagactacctactcagcattccaagtgagaagtgtaaggctagaggatttaccgtgattgtggatggcagaaaatcacagtggaatgtggtgaaaacagtagtcgtaatgctacagaatgttgttccagctgaggtgtcccttgtttgtgtggtaaagccagatgaattctgggataagaaagtaacgcatttttgtttttggaaggagaaggatagacttggctttgaggttattttagtgtccgccaacaaattgactcgttatatagaaccatgccaattaacagaagattttggt

SEQ ID NO: 18826 - DNA, 681 bp, Homo sapiens
  source 1..681: mol_type = unassigned DNA
ggcccgcagagaccgggccgcgcgcttttccgttcctgagcgcccttgttcatttctgggtgaaagggacccgaattgtgcaacaggtttgggcgttagtccttattttccagcgggtctcttttgccagcgtgcaggaaccagatgtggctccctgctctcgggcgagtcccgcgtccagcgcccgcgactggctcctttgtgtgaccggtgaccggccctgtcggaattaaggaagttcactggagtaaaatggaggcctcagtaatattacccattctgaagaaaaaactagccttcctttcaggaggaaaagacagacggagtggcctcattttgacaattccattatgcctcgaacagacaaatatggatgagctgagtgtcaccttagactacctactcagcattccaagtgagaagtgtaaggctagaggatttaccgtgattgtggatggcagaaaatcacagtggaatgtggtgaaaacagtagtcgtaatgctacagaatgttgttccagctgaggtgtcccttgtttgtgtggtaaagccagatgaattctgggataagaaagtaacgcatttttgtttttggaaggagaaggatagacttggctttgaggttattttagtgtccgccaacaaattgactcgttatatagaaccatgccaattaacagaa

SEQ ID NO: 18827 - DNA, 423 bp, Homo sapiens
  source 1..423: mol_type = unassigned DNA
aattaaggaagttcactggagtaaaatggaggcctcagtaatattacccattctgaagaaaaaactagccttcctttcaggaggaaaagacagacggagtggcctcattttgacaattccattatgcctcgaacagacaaatatggatgagctgagtgtcaccttagactacctactcagcattccaagtgagaagtgtaaggctagaggatttaccgtgattgtggatggcagaaaatcacagtggaatgtggtgaaaacagtagtcgtaatgctacagaatgttgttccagctgaggtgtcccttgtttgtgtggtaaagccagatgaattctgggataagaaagtaacgcatttttgtttttggaaggagaaggatagacttggctttgaggaggatattttgtaaaacttgattttgga

SEQ ID NO: 18828 - DNA, 460 bp, Homo sapiens
  source 1..460: mol_type = unassigned DNA
gggcccgctccgcccccagcccgccttcctcccgccgcgccctccgcctccgcccgcacctcgctagcgttcccctgtcttccccaacgccccggagccgccggccgctagcgtcagcgccagccagaattaaggaagttcactggagtaaaatggaggcctcagtaatattacccattctgaagaaaaaactagccttcctttcaggaggaaaagacagacggagtggcctcattttgacaattccattatgcctcgaacagacaaatatggatgagctgagtgtcaccttagactacctactcagcattccaagtgagaagtgtaaggctagaggatttaccgtgattgtggatggcagaaaatcacagtggaatgtggtgaaaacagtagtcgtaatgctacagatgagctgtttgggacttgctgtttgaactggactttgatcagtggcagtttt

SEQ ID NO: 18829 - DNA, 1785 bp, Homo sapiens
  source 1..1785: mol_type = unassigned DNA
aagcgcggggccggccggggcgcccgccgctcgccgccgcctccgcgcgcccgggggccccggcgccccccgagctagggcggccagctcgcggctcgccgtttgacagatgctcatcgccatggagttgccgcagcagcacctttgggggctcgggcgagcgacgggagccgggatctgagcgagcgccggggccagcggagccggagccgccgggacatggttgcagatctgatctcttctgaacacctcatcgtgtctccatccctgggaatctgaccctagcaactggaccactttgttcttggaattttgggtgtcctcttttctcacctttcccttttcccttttccccttccccctcctgagaactccggaagactgtagagattgtcatggagtccagggaaaccttaagcagctcccggcaaagagggggcgagtcagacttcctgccggtctcctcagccaagcccccagctgctcctggctgtgcaggagaacctttgctctccactccaggacctgggaaggggatcccggtgggcggagagcgcatggagccagaggaggaggatgaactaggctcagggcgggatgtggattccaactccaacgcggacagtgagaaatgggtggcaggagatggtttggaagagcaggaattttctatcaaggaggcaaacttcacagagggaagtctgaagctaaagattcagaccacaaagcgggctaagaaacccccaaagaatttggagaactatatatgtccacctgagatcaagatcaccatcaagcagtctggggaccagaaggtgtcccgtgctggaaaaaatagcaaagccacgaaggaggaagaaagaagccactccaaaaagaagctcctcacagccagtgaccttgcagccagtgacctcaaaggatttcagccacagattaaagactccagtaaggaggaagtctggaagagaagaggaggccaaggcatcccattcaaaaagcaattcctgtcccaggaacgtgccatgtgcttctcatgcccccggaacccattccccgcaaaacccggttctctcactcttccttttcacagtgaacctgcagtctgggcacaagaagtataacttcgcatggattctgcaaagcccacacctgtggtcattccctgttctttccattcaacaatggagacttgcccaagattgtaaactagtgagtgacagcatttgggcttatgatcttctctgcctgctagctagacattctctctgggtctaaaagataatccaaaaagatccagcttcacaatgctgccctgaagagataatgcattaggcggccctgatgcagcattcactgtcttccagggcaggcttgatcccatgagtttgcttgctcagacgatcacttaggaaacacatgcctttactctctaggccttttttctagcttgccttgtatcagctatgccatggatctttgctctcttaccccatgctatacagagtatgggctccaagccacagctggcctgtcaagtgtgtgtcgctggtccaccatgggatacatttagaaacttttatagcaatttgacatttttgtgatatccaagcatgtgattgttttcctacggatttgtcttatagtattttaccaaagtttccacacaaaaagtatggattaaggacaaagtatctggtccttcatcaaagatcgtttgataagctctgttctagttaaccaacactgagctttcctagttttaataaaagagtaggatttgga

SEQ ID NO: 18830 - DNA, 9899 bp, Homo sapiens
  source 1..9899: mol_type = unassigned DNA
ggttaagtggagctagagagctacattgtaacctagttggatttttttggggggggaatgtatcagaatctaacgtgtcgttaatagaaagaagaacaggcaagaagtggtccagccggcgaagttgcagatctgatctcttctgaacacctcatcgtgtctccatccctgggaatctgaccctagcaactggaccactttgttcttggaattttgggtgtcctcttttctcacctttcccttttcccttttccccttccccctcctgagaactccggaagactgtagagattgtcatggagtccagggaaaccttaagcagctcccggcaaagagggggcgagtcagacttcctgccggtctcctcagccaagcccccagctgctcctggctgtgcaggagaacctttgctctccactccaggacctgggaaggggatcccggtgggcggagagcgcatggagccagaggaggaggatgaactaggctcagggcgggatgtggattccaactccaacgcggacagtgagaaatgggtggcaggagatggtttggaagagcaggaattttctatcaaggaggcaaacttcacagagggaagtctgaagctaaagattcagaccacaaagcgggctaagaaacccccaaagaatttggagaactatatatgtccacctgagatcaagatcaccatcaagcagtctggggaccagaaggtgtcccgtgctggaaaaaatagcaaagccacgaaggaggaagaaagaagccactccaaaaagaagctcctcacagccagtgaccttgcagccagtgacctcaaaggatttcagccacaggcttacgagaggccccagaaacattcaactctccattatgacacgggcctcccacaggacttcaccggtgacaccttaaaaccaaagcaccagcaaaaaagcagcagccagaaccacatggactggtccaccaactctgacagcggacccgtcactcagaattgcttcatcagtccagagtctggcagagaaactgcaagcaccagcaagatccccgctcttgagcccgtggcttcctttgcaaaggcccagggtaagaaaggcagtgcagggaacacgtggagtcagttgtctaacaataacaaagatctgctcttgggaggtgtggctccatccccaagcagccacagctcaccagccccacccagcagctctgctgagtgcaacgggcttcagcccttggtggatcaagatggaggaggtacaaaggagcccccagaaccacctacggtgggcagcaagaaaaagtccagtaaaaaagatgtgataagtcagaccataccaaacccagacctggattgggtcaagaatgcccagaaagcatttgacaatacagaagggaaaagggaaggttattccgcagatagtgcccaagaggcatcaccagccaggcagaacgtgagttctgccagtaatcctgaaaatgactcaagtcatgtccggattactatccccatcaaggcaccctctctggatccaaccaaccataagaggaaaaaaagacagtccattaaagcggtggtggaaaagatcatgccagagaaagccttggcttctggaatcaccatgagcagtgaagtagttaacaggatactttccaactctgaggggaataagaaggatccccgtgtccctaagttgagtaaaatgatagagaatgagtccccctcagttggccttgaaactggtggaaatgctgagaaagttatcccaggaggtgtgtctaagccgcggaagccacccatggtcatgacacctccaacgtgcacagatcactctccatccagaaagctgccagaaatccagcatccaaaatttgctgcaaaacgaaggtggacttgcagcaaaccaaaacctagcaccatgcttcgagaggcagttatggccacctctgataaactgatgctggagcccccgtctgcatatcccatcaccccatccagccctctctacaccaacacagacagtcttactgtgatcactccagtcaaaaagaagcggggacgaccaaagaagcagcctttgctcacagtcgagacgattcatgagggaacttccaccagccccgtcagtcccatcagccgagagtttcctggcactaagaaaagaaagcgacgacgcaatttagcgaagttggcccagctagtgccgggagaggacaaacccatgagcgagatgaaatttcacaagaaagttggaaagctcggcgtgttggataagaagaccatcaaaactatcaataagatgaagacactcaagaggaaaaacatcttgaatcagatcttgtcctgttccagcagcgttgctctgaaggcaaaagctcccccagagaccagccctggggcagcagccattgaaagcaaactgggcaagcagattaatgtcagcaagaggggaaccatctacattggcaagaagcggggcaggaagccaagagcagagctgccacccccatccgaagaacccaaaacagccatcaagcaccccaggcctgtttctagccagccggatgttccagccgtgccttccaactttcagtcacttgtggcgtcttcaccagcagctatgcacccactttcaacacagttaggtgggtccaatggcaacctgagccctgccagcactgaaaccaatttttcagagttgaaaactatgccaaatctccagcccatcagtgctcttccaaccaaaacccaaaagggaatacacagtggaacctggaagctgtctccacccagactgatggccaactccccttcacacctgtgcgagattggctccctaaaggaaatcacgctgtcccctgtgagcgagtcccacagtgaggagacgatccccagcgacagcggcattgggacagacaacaacagcacttctgaccaagcggagaagagctcagaatcccgaaggaggtactcttttgatttctgctccctggacaacccggaggccattccgtccgacaccagcacaaagaaccggcatggccaccggcaaaagcatctcattgtggacaactttctggcccacgaaagcctcaagaagccaaagcacaagaggaaacggaaaagcctgcaaaaccgcgatgacctccagtttctggcagacctggaggagctaatcaccaagttccaagtgttcagaatctcccaccggagttacaccttctaccacgagaatccatatcccagcatttttcggattaattttgatcactattacccggtgccatatatccagtatgacccgttgctctatcttcgtaggacttcagacttgaagtcaaagaagaagcgtggtaggcctgcaaaaaccaatgacaccatgacaaaggtgccttttttacaagggttcagctaccctattcccagtggaagttactatgcaccctatggaatgccttacacatcaatgcctatgatgaaccttggttattacggtcagtacccagctcctttgtacctatcgcacacgcttggagcagcttccccattcatgaggccaacagtgccaccacctcagttccacacaaactcccacgtaaagatgtccggtgcagctaagcataaagccaagcatggagtacacctgcagggacctgttagcatgggccttggtgacatgcagccttctctgaaccctcccaaggtaggcagtgccagtctgtccagtggtcggctccataagaggaaacacaaacacaagcataagcacaaggaagaccggatcctagggacccatgacaacctgagtggtctttttgcaggcaaagccacaggcttctccagccacatcctgagcgagcggctgagtagcgcagacaaagagctcccgctggtgagtgagaagaacaagcataaggagaaacagaagcaccagcacagcgaagccggccacaaagcttctaagaacaactttgaggtggacaccctgtctacactgtcactttccgacgcccagcattggacacaggccaaggaaaaaggagacttgagcagtgagcctgtggactcatgcacgaaaagatactctggcagtggcggggatggtggcagcacgagatcagagaacctggacgtgttcagtgaaatgaacccttcgaatgacaagtgggacagtgacgtgagtgggagtaaaaggaggagctatgaaggctttggaacgtacagggaaaaggacatccaagccttcaagatgaaccgcaaggagagaagttcttatgactcctccatgtctccagggatgccaagtccccacttaaaagtggaccagacagcagtgcatagtaagaacgaaggctcagtgcccaccatgatgaccaggaagaagccagccgcagttgacagtgttacaattccaccagccccagtgttatctctccttgctgcatctgcagcaacgtcggatgcagtcggctcctccctgaagaagaggttcaagcggcgggagatcgaagccatccagtgcgaagtgcggaagatgtgcaactacaccaagatcctgtccaccaagaagaacctggaccacgtgaacaagatcctgaaggccaagcggctgcagagacaatcaaaaacaggcaacaacttcgtgaagaagaggcgcgggcgtcccaggaagcagcccacccagttcgatgaggactccagagaccaaatgccggtgctggaaaaatgcatcgacctgcccagcaaaagaggccagaagcccagcctgagcccgctggtgctggagcccgccgccagccaagacaccatcatggccaccatcgaggcggtcatccacatggcccgggaggcgccgcccctgcccccgccaccgccgccgcccctgccgccaccgccgccaccacccctgcccccgccaccccctctacccaagaccccccgaggcggaaagaggaaacacaaaccgcaggcccccgctcagcccccacagcagtcgcccccgcagcagccccttccccaggaagaggaggtgaaagccaaaaggcagaggaagtcccgagggagtgagagcgaggtccttccctagggcgggtctgggcgtctgcacctggggcctagggaactgacacgtgggaagcgcagtgagccggggcgggggcggaatcccccgctgcagggacacccacgcccttctctccagaagccgggcaggcagaatccggccagacgacggggctgagccatcaggagctcttgggaaagcaaagcagggagacaccttcagaagaagcttgtctgagcttcaccgcagctcccaccacgcggcgcttcagtacggctggatcctccgcaggcgagcggaaggcccccaggaggagcaggctggtggcactctcctgacctcacgctgccaaggtgcgccctcgactcccgatttcatttgctggccaggaaaatcgaaagggaaacaccctcaattaggaaacattccaaggggagaaaagctgcaaattgctcaactggcattgctgtaacccgttccatttaattggtttttatttcttttgattttcaagctctgctaagctttggggtaccaacgtcatcttcaggtgacctgaatctttcccttaaccgtacagtttctcgatggaattgtgtgatcagaaggtggaattctagtgataggcgacctcagacccgcattcatgttctgtgtgcctcttctattgcacatacactgatttttagcattgtctattcctatttttcctttgcccattgtacttccatatatcttttcattaacttacttgctgccttttttttttcttggtacacatttaaataaagtaatccttaacctgtgctgtaaagttcacccttggcatgctgttccaagaacctgggtttgaatcccaatcgttgtgaaacatactcagtattgataaaacctttttaataagtgatgcagagcagccaaggatatgttgacccagatgtcaaccaggctatttttatacttaaaacatgtcagcagagcataggcagaataaaatggtttaaataccccacagcaaatagagtaactgacaaaccaccaaaaactgaaaccccagacccaccagaaagacaagtgtctagcaatgccttggtacctgatctttttcattcaaataattgtcataggttgttcaaaaaaaaaaaaaaaaaggaaacaaaaacacaatagaagtccattatcccttgataattatttcttaaaagcaaatgggagtaagtgttcttatctggaaaaataaataaataaaatgctcaaagggtatcaccacttcaattttatcaagccaccttggacaaagtatccaaattgtggttgccttaataaactaaaacattattgtacataatgtaattataaatctatcagtctgcatggatgcaaactgtgtgtgacaaatcgtcttttaaatggtcaatttcagctgtacatttctcatccaagttgtactctagccattggtttagcgtggacagatactccatctctattatccatttccacagcccaaataaaatatgttaagcaggctcagaatgaatatgaagaattccatttccgtagatgttttctaaaagtcagattgtggaaatttcaaataagtattttcaatttcctccctcactccctcttaccttccccaagacatcaaacacctggcatggtagattatagaaagagacactgagagagagaattaaattttctaatgggaattagaatatctggtttacctccaaattaagtttctttacaggaagttgggaccagctggaaattgtattatcatttcggaacacaatattacttccttagagagagatggatttttgttggcaacataaaagaataagtgatggggtatctatgtgagtaaatttttaaattccaagttaatatgcttgcaaacattactgctgcgttatggcaccaagagttggttgaaattacccacgtagtcatactcctgtgctctgtcaccatggacttcacatcatttgctgcccactagttcaatcgcatttaatcctagcaatatgtaagtttaaaggactgcattcccctctactttaaagcttatatcctagatactcagtttgtgaccttggttgacctttggcatttcacgcaagttgaacagcaaaatcaaagcagccatttttaattcgtcattcccaagccctatctgagtggttccaaagtcacctgagaggaaggtttaaattagtccctctcaccccaccattgctataaaacagcaacgttttcattccaattcagccataaagaggtttctcttcttactgggttttgaaatcatttccttttttctttcgtttgcccttcttccttcctgtgttgtactatctctccaaccacgtctataagcagactcaatcttcttgcagaggaagatgagctggcactctgcaaacttctttaataaggacccaaagtttacttgacattaacctctagtaggtgagaaattccaaaaaagctttggggtacattagaatttccaaagctctgaaagatatttcaggagatttaacagcagagttgcaacttacacgtgaattctggtctatagtggtcatgtgagttaaattcgaatcctctacttgtatgaccctaggaatagattggaatactgcagaggaccaaagctgaggcatgctaaacagctgcttggaggtggaagcaagttcagtcacctactcagcttcctctctccaccacccagttcctccctcagtatcacattatttttttcttctgcttttcattaacctaactcatctcatcagtacaaccattttcttattctctaactacccccaattcctttagcctctccccacctgtccaaactcagctcagccgtgggccaatgcagcttacagacggttgcagagctaggaagaaaacccagctctcccaaccctgatcgtggaggtctctggccccccaacactgccttctgggggctgcattttttttttttttttgagaagaggtcttttgggatgcatggtgctccacatacagcttcacaaaatatttcattataagagaaaccccttgatttttatttctttttcttttgttttctggattacctgccttcagtaagcagatgcagacccacttgtaaggagtctggttagtgatgagaaaaggatgaaatctagatacaaaagtcaccttgaaggtgatgatggatctttaatccacttgactaagtgtctggaagagctacttgctcttccacccctcatctcaaatgagaggagcagaagtttaacttcctcaaatagcccagctctggctaaaacccaaagaagaaaggtcaaaggaagggaaagcatgtcaggggctggtttgtgacttggcaggaccaggaaacagcagccactgacagcccagagaaggtgactaagggctggcagaagattagaatgttaatttggctgctgtccggactaggaggccatgttcaatggcagtcagaatttgtgttctgcgcattgctgggtctataaatatgataagcaagtggtgacagaattatagtataaggtgatgtactacatgcagatcataaaggctttggttttaagacttaagtagaaaatccctctcctagcttattacccaacaatattcagataatgagcttttggagaatatctttttcctatcactagaaagatttacctgggaactgtctaaagtctacacacatatttccaaagcctttaaataccaactgcagcatggagagagaggggtggcagaagctgaaatgcctcaaaagccatttaagtgttacgttgcaggattttcagtccttctcgttatgtaaaagtagataaatatagacgttattctcaacactaccctatagtatcacagtggtccaaatgccagagcttacagataatgtcatcacagtgcctagaaactcgaactgtaatatatcgtagcattttcttggtgtttcttaaagtttctttccacaatacaaggtcctctctgcctcttgtttcttggagagttcaccccactgatgagtcttccttccctgttggactcagtcatttggggaacagtcttagaagcacatatcaaccaaggaagaaacttcctggatatctattgcccacttgcccaggtctaataaacactaaaggggggaaattgaaaggagctgccaactggtcaacgtggaagggcggttccaccctagattggtgtctttctttttcttcctttttttaaaaaaaatctatttcttaaataataataaatgcacatgatgtgttaaatatgtacatatatatttcaaaagaaaaaatggggcacaagattgtcttacaagtcgtgctggctaatttttagtttgtattcataagtggtttttaaaagccttttttaaagtgtaatttgcatgttctactttgattgtatgtaaacatattttagaacaaaaaatgtatttgtattttattgaatatagaggcaagaaaattgtacattgtttgaaatgttctttttgtaacagtttttattcataaagcatttttgtacatttaaaatgaacatggacttgctgttatttgaggcgtagatacatctagcatgcttactgtcatgctcctccatggtcttagatgttgggttttaaacatttttttctaaaagaaagctcagtcttttccgctaccagatcaggttagcacagtatagagcacttaactattaaaaaaaaaaagttaatcctattcatatgttattcattgtgtgaaattaaagacattcaattcagtctaa

SEQ ID NO: 18831 - DNA, 762 bp, Homo sapiens
  source 1..762: mol_type = unassigned DNA
gcgtgagcctgtgcgtgtgctcacacgcgcattttggcagggctgaatcacaagaggactcgcagttgatacccagactcaccaaaaaattgagctgtgaatttggggaggcaggtacgtgctgggaaggaagctaaaggagaacaacagctttgtgtgctgatgaagtaaacagacagttgcagatctgatctcttctgaacacctcatcgtgtctccatccctgggaatctgaccctagcaactggaccactttgttcttggaattttgggtgtcctcttttctcacctttcccttttcccttttccccttccccctcctgagaactccggaagactgtagagattgtcatggagtccagggaaaccttaagcagctcccggcaaagagggggcgagtcagacttcctgccggtctcctcagccaagcccccagctgctcctggctgtgcaggagaacctttgctctccactccaggacctgggaaggggatcccggtgggcggagagcgcatggagccagaggaggaggatgaactaggctcagggcgggatgtggattccaactccaacgcggacagtgagaaatgggtggcaggagatggtttggaagagcaggaattttctatcaaggaggcaaacttcacagagggaagtctgaagctaaagattcagaccacaaagcgggctaagaaacccccaaagaatttggagaactatatatgtccacctgagatcaagatcaccatcaagcagtctggg

SEQ ID NO: 18832 - DNA, 3015 bp, Homo sapiens
  source 1..3015: mol_type = unassigned DNA
gattacttagagaggcacagaggagagagatcggggtgagtcgccatggggactcccagggcccagcacccgccgcctccccagctgctgttcctaattctgctgagctgtccctggatccagggtctgcccctgaaggaggaggagatattgccagagcctggaagtgagacccccacggtggcctctgaggccctggctgaactgcttcatggggccctgctgaggaggggcccagagatgggctacctgccaggatctgatcgggaccccacgctagccacccctccggccggccagactctcgcagtgccctccctgccacgggccactgagccggggacagggcctctgacaacagccgtcacccctaacggggtcaggggggcaggccccactgcgccagaactgctgaccccgcccccaggaaccacagccccacccccacccagccctgcctccccagggcctccccttgggcctgagggaggagaggaggagacgacgaccaccatcatcaccacgacaactgttaccactacggtgaccagcccagcctacctcctgagctgtggcttccctccccggccggcccatggggacgtgagtgtgacggacctgcaccctgggggcactgccacctttcactgtgattcgggctaccagctgcagggagaggagaccctcatctgcctcaatggcacccggccatcctggaacggtgaaacccccagctgcatggcatcctgtggtggcaccatccacaatgccaccctgggccgcatcgtgtccccagagcctgggggagccgtagggcccaacctcacctgccgttgggtcattgaagcagctgaggggcgccggctgcacctgcactttgaaagggtctcgctggatgaggacaatgaccggctgatggtgcgctcagggggcagccccctatcccccgtgatctatgattcggacatggacgatgtccccgagcggggtctcatcagtgacgcccagtccctctacgtggagctgctgtcagagacacctgccaatcccctgctgttaagccttcgatttgaagcctttgaggaggatcgctgcttcgcccccttcctggcacatggaaatgtcactaccacggaccctgagtatcgcccaggggcactggcaaccttctcgtgcctcccaggatatgccctggagccccctgggccccccaatgccatcgaatgtgtggatcccacagaaccccactggaacgacacagagccggcctgcaaagccatgtgtggaggggagctgtcggaaccagctggcgtggtcctctctcccgactggccccagagctatagcccgggccaagactgcgtgtggggcgtgcacgtccaggaagagaagcgcatcttgctccaagttgagatattgaatgtgcgggaaggggacatgctgacgctgttcgacggggacggtcccagcgcccgagtcttggcccagctgcggggacctcagccgcgccgccgccttctctcctctgggcccgacctcacactgcagtttcaggcaccgcccgggcccccaaatccaggcctgggccagggcttcgtattgcacttcaaagaggtcccgaggaacgacacgtgccccgagctgccacctccggagtggggctggagaacggcatcccacggggacctgatccggggcacggtgctcacctaccagtgcgagcctggctacgagctgctaggctccgacattctcacttgccagtgggacctgtcttggagcgccgcgccgcccgcctgccaaaagatcatgacttgtgctgaccctggcgagattgccaacgggcaccgcaccgcctcggacgccggcttccccgttggctcccacgtccagtaccgctgcctgccagggtacagcctcgagggggcagccatgctcacctgctacagccgggacacaggcacacccaagtggagcgatagggtccccaaatgcgccttgaagtacgagccgtgcctgaacccgggggttcccgagaatggctaccagacgctgtacaagcaccactaccaggcgggcgagtctctgcgcttcttctgctatgagggctttgagcttatcggcgaggtcaccatcacctgtgtgcccggccacccctcccagtggaccagccagcccccactctgcaaagttgcctatgaggagctcctggacaaccgaaaactggaagtgacccagaccacagatccatcacggcagctggaaggggggaacctggccctggccatcctgctgcctctaggcttggtcattgtcctcggcagtggcgtttacatctactacaccaagcttcagggaaagtcccttttcggcttctcgggctcccactcctacagccccatcaccgtggagtcggacttcagcaacccgctgtatgaagctggggatacgcgggagtatgaagtttccatctgaaccccaagactacagctgcaggacccaggacgcccctcccctcctcattcgggcagagggaaatacgggacccggtctctgcctcctggctgccctcctccctggctgtgtaaatagtctccctatcccacgagggggctttgatggccctggagatcctacagtaaataaaccagcatcctgccgcccaaagccgcctcttctcagttgccaaacgaggggcctgccccccgccctaccggcttttggattctgggaggggaactctgcctccctgcaaatcttgcagcccctcctgcccagggcacccctcaaggactgcccccgatagctctactgttcccttggccacgaaggtgcccccctcccagatgccctggccctaggcctgactccggccaggagggtcagaagaaggacaaaggggagagctgggacaaggccttgcccccttcctgccatctccccaacccacagtctctccacctttgcttctgaattcttgtttttgagcaataaacagaaaatcgccacttgtaa

SEQ ID NO: 18833 - DNA, 3173 bp, Homo sapiens
  source 1..3173: mol_type = unassigned DNA
cggagacggaggaaaggtggcagccagattacttagagaggcacagaggagagagatcggggtgagtcgccatggggactcccagggcccagcacccgccgcctccccagctgctgttcctaattctgctgagctgtccctggatccagggtctgcccctgaaggaggaggagatattgccagagcctggaagtgagacccccacggtggcctctgaggccctggctgaactgcttcatggggccctgctgaggaggggcccagagatgggctacctgccagggcctccccttgggcctgagggaggagaggaggagacgacgaccaccatcatcaccacgacaactgttaccactacggtgaccagcccagttctgtgtaataacaacatctccgagggcgaagggtatgtggagtctccagatctggggagccccgtcagccgcaccctggggctcctggactgcacttacagcatccatgtctaccctggctacggcattgagatccaggtgcagacgctgaacctgtcacaggaagaggagctcctggtgctggctggtgggggatccccaggcctggccccccgactcctggccaactcatccatgcttggagaaggacaagtccttcggagcccaaccaaccggctgcttctgcacttccagagcccacgggtcccaaggggcggtggcttcaggatccactatcaggcctacctcctgagctgtggcttccctccccggccggcccatggggacgtgagtgtgacggacctgcaccctgggggcactgccacctttcactgtgattcgggctaccagctgcagggagaggagaccctcatctgcctcaatggcacccggccatcctggaacggtgaaacccccagctgcatggcatcctgtggtggcaccatccacaatgccaccctgggccgcatcgtgtccccagagcctgggggagccgtagggcccaacctcacctgccgttgggtcattgaagcagctgaggggcgccggctgcacctgcactttgaaagggtctcgctggatgaggacaatgaccggctgatggtgcgctcagggggcagccccctatcccccgtgatctatgattcggacatggacgatgtccccgagcggggtctcatcagtgacgcccagtccctctacgtggagctgctgtcagagacacctgccaatcccctgctgttaagccttcgatttgaagcctttgaggaggatcgctgcttcgcccccttcctggcacatggaaatgtcactaccacggaccctgagtatcgcccaggggcactggcaaccttctcgtgcctcccaggatatgccctggagccccctgggccccccaatgccatcgaatgtgtggatcccacagaaccccactggaacgacacagagccggcctgcaaagccatgtgtggaggggagctgtcggaaccagctggcgtggtcctctctcccgactggccccagagctatagcccgggccaagactgcgtgtggggcgtgcacgtccaggaagagaagcgcatcttgctccaagttgagatattgaatgtgcgggaaggggacatgctgacgctgttcgacggggacggtcccagcgcccgagtcttggcccagctgcggggacctcagccgcgccgccgccttctctcctctgggcccgacctcacactgcagtttcaggcaccgcccgggcccccaaatccaggcctgggccagggcttcgtattgcacttcaaagaggtcccgaggaacgacacgtgccccgagctgccacctccggagtggggctggagaacggcatcccacggggacctgatccggggcacggtgctcacctaccagtgcgagcctggctacgagctgctaggctccgacattctcacttgccagtgggacctgtcttggagcgccgcgccgcccgcctgccaaaagatcatgacttgtgctgaccctggcgagattgccaacgggcaccgcaccgcctcggacgccggcttccccgttggctcccacgtccagtaccgctgcctgccagggtacagcctcgagggggcagccatgctcacctgctacagccgggacacaggcacacccaagtggagcgatagggtccccaaatgcgccttgaagtacgagccgtgcctgaacccgggggttcccgagaatggctaccagacgctgtacaagcaccactaccaggcgggcgagtctctgcgcttcttctgctatgagggctttgagcttatcggcgaggtcaccatcacctgtgtgcccggccacccctcccagtggaccagccagcccccactctgcaaagttgcctatgaggagctcctggacaaccgaaaactggaagtgacccagaccacagatccatcacggcagctggaaggggggaacctggccctggccatcctgctgcctctaggcttggtcattgtcctcggcagtggcgtttacatctactacaccaagcttcagggaaagtcccttttcggcttctcgggctcccactcctacagccccatcaccgtggagtcggacttcagcaacccgctgtatgaagctggggatacgcgggagtatgaagtttccatctgaaccccaagactacagctgcaggacccaggacgcccctcccctcctcattcgggcagagggaaatacgggacccggtctctgcctcctggctgccctcctccctggctgtgtaaatagtctccctatcccacgagggggctttgatggccctggagatcctacagtaaataaaccagcatcctgccgcccaaagccgcctcttctcagttgccaaacgaggggcctgccccccgccctaccggcttttggattctgggaggggaactctgcctccctgcaaatcttgcagcccctcctgcccagggcacccctcaaggactgcccccgatagctctactgttcccttggccacgaaggtgcccccctcccagatgccctggccctaggcctgactccggccaggagggtcagaagaaggacaaaggggagagctgggacaaggccttgcccccttcctgccatctccccaacccacagtctctccacctttgcttctgaattcttgtttttgagcaataaacagaaaatcgccacttgtaa

SEQ ID NO: 18834 - DNA, 3801 bp, Homo sapiens
  source 1..3801: mol_type = unassigned DNA
agcttctccctcccgcagctccagtgcccgagcttcggctctcccagttccccaacccaccccttcccctccccgacaagccccgctagagcccagtggagaccccctcgatcctcgaccccaccctaaacccccagaagctgtctttctcctccccagtcccctagcttggggtccagacagcccagtggacccaggcgcctgagcaggagggtaacccaggccacccggccccttcggccctctcggccccaccccctgcagccggagccgcgccccctccaccacagagccgcgagaagaggacagaggagactgagcaaaggggggtgggctccaggcgacccctagcccaattctgcccctccatcccaaggggcagagaaattgtctttctttgctgactcctacgaggaaaaaaaaaaaaaaaaaaaaaacaattaaagggaaagataaacggagacggaggaaaggtggcagccagattacttagagaggcacagaggagagagatcggggtgagtcgccatggggactcccagggcccagcacccgccgcctccccagctgctgttcctaattctgctgagctgtccctggatccagggtctgcccctgaaggaggaggagatattgccagagcctggaagtgagacccccacggtggcctctgaggccctggctgaactgcttcatggggccctgctgaggaggggcccagagatgggctacctgccaggatctgatcgggaccccacgctagccacccctccggccggccagactctcgcagtgccctccctgccacgggccactgagccggggacagggcctctgacaacagccgtcacccctaacggggtcaggggggcaggccccactgcgccagaactgctgaccccgcccccaggaaccacagccccacccccacccagccctgcctccccagggcctccccttgggcctgagggaggagaggaggagacgacgaccaccatcatcaccacgacaactgttaccactacggtgaccagcccagttctgtgtaataacaacatctccgagggcgaagggtatgtggagtctccagatctggggagccccgtcagccgcaccctggggctcctggactgcacttacagcatccatgtctaccctggctacggcattgagatccaggtgcagacgctgaacctgtcacaggaagaggagctcctggtgctggctggtgggggatccccaggcctggccccccgactcctggccaactcatccatgcttggagaaggacaagtccttcggagcccaaccaaccggctgcttctgcacttccagagcccacgggtcccaaggggcggtggcttcaggatccactatcaggcctacctcctgagctgtggcttccctccccggccggcccatggggacgtgagtgtgacggacctgcaccctgggggcactgccacctttcactgtgattcgggctaccagctgcagggagaggagaccctcatctgcctcaatggcacccggccatcctggaacggtgaaacccccagctgcatggcatcctgtggtggcaccatccacaatgccaccctgggccgcatcgtgtccccagagcctgggggagccgtagggcccaacctcacctgccgttgggtcattgaagcagctgaggggcgccggctgcacctgcactttgaaagggtctcgctggatgaggacaatgaccggctgatggtgcgctcagggggcagccccctatcccccgtgatctatgattcggacatggacgatgtccccgagcggggtctcatcagtgacgcccagtccctctacgtggagctgctgtcagagacacctgccaatcccctgctgttaagccttcgatttgaagcctttgaggaggatcgctgcttcgcccccttcctggcacatggaaatgtcactaccacggaccctgagtatcgcccaggggcactggcaaccttctcgtgcctcccaggatatgccctggagccccctgggccccccaatgccatcgaatgtgtggatcccacagaaccccactggaacgacacagagccggcctgcaaagccatgtgtggaggggagctgtcggaaccagctggcgtggtcctctctcccgactggccccagagctatagcccgggccaagactgcgtgtggggcgtgcacgtccaggaagagaagcgcatcttgctccaagttgagatattgaatgtgcgggaaggggacatgctgacgctgttcgacggggacggtcccagcgcccgagtcttggcccagctgcggggacctcagccgcgccgccgccttctctcctctgggcccgacctcacactgcagtttcaggcaccgcccgggcccccaaatccaggcctgggccagggcttcgtattgcacttcaaagaggtcccgaggaacgacacgtgccccgagctgccacctccggagtggggctggagaacggcatcccacggggacctgatccggggcacggtgctcacctaccagtgcgagcctggctacgagctgctaggctccgacattctcacttgccagtgggacctgtcttggagcgccgcgccgcccgcctgccaaaagatcatgacttgtgctgaccctggcgagattgccaacgggcaccgcaccgcctcggacgccggcttccccgttggctcccacgtccagtaccgctgcctgccagggtacagcctcgagggggcagccatgctcacctgctacagccgggacacaggcacacccaagtggagcgatagggtccccaaatgcgccttgaagtacgagccgtgcctgaacccgggggttcccgagaatggctaccagacgctgtacaagcaccactaccaggcgggcgagtctctgcgcttcttctgctatgagggctttgagcttatcggcgaggtcaccatcacctgtgtgcccggccacccctcccagtggaccagccagcccccactctgcaaagtgacccagaccacagatccatcacggcagctggaaggggggaacctggccctggccatcctgctgcctctaggcttggtcattgtcctcggcagtggcgtttacatctactacaccaagcttcagggaaagtcccttttcggcttctcgggctcccactcctacagccccatcaccgtggagtcggacttcagcaacccgctgtatgaagctggggatacgcgggagtatgaagtttccatctgaaccccaagactacagctgcaggacccaggacgcccctcccctcctcattcgggcagagggaaatacgggacccggtctctgcctcctggctgccctcctccctggctgtgtaaatagtctccctatcccacgagggggctttgatggccctggagatcctacagtaaataaaccagcatcctgccgcccaaagccgcctcttctcagttgccaaacgaggggcctgccccccgccctaccggcttttggattctgggaggggaactctgcctccctgcaaatcttgcagcccctcctgcccagggcacccctcaaggactgcccccgatagctctactgttcccttggccacgaaggtgcccccctcccagatgccctggccctaggcctgactccggccaggagggtcagaagaaggacaaaggggagagctgggacaaggccttgcccccttcctgccatctccccaacccacagtctctccacctttgcttctgaattcttgtttttgagcaataaacagaaaatcgccacttgtaa

SEQ ID NO: 18835 - DNA, 909 bp, Homo sapiens
  source 1..909: mol_type = unassigned DNA
tctgcctcaatggcacccggccatcctggaacggtgaaacccccagctgcatggcatcctgtggtggcaccatccacaatgccaccctgggccgcatcgtgtccccagagcctgggggagccgtagggcccaacctcacctgccgttgggtcattgaagcagctgaggggcgccggctgcacctgcactttgaaagggtctcgctggatgaggacaatgaccggctgatggtgcgctcagggggcagccccctatcccccgtgatctatgattcggacatggacgatgtccccgagcggggtctcatcagtgacgcccagtccctctacgtggagctgctgtcagagacacctgccaatcccctgctgttaagccttcgatttgaagccatgtgtggaggggagctgtcggaaccagctggcgtggtcctctctcccgactggccccagagctatagcccgggccaagactgcgtgtggggcgtgcacgtccaggaagagaagcgcatcttgctccaagttgagatattgaatgtgcgggaaggggacatgctgacgctgttcgacggggacggtcccagcgcccgagtcttggcccagctgcggggacctcagccgcgccgccgccttctctcctctgggcccgacctcacactgcagtttcaggcaccgcccgggcccccaaatccaggcctgggccagggcttcgtattgcacttcaaagaggtcccgaggaacgacacgtgccccgagctgccacctccggagtggggctggagaacggcatcccacggggacctgatccggggcacggtgctcacctaccagtgcgagcctggctacgagctgctaggctccgacattctcacttgccagtgggacctgtcttggagcgccgcgccgcccgcct

SEQ ID NO: 18836 - DNA, 1068 bp, Homo sapiens
  source 1..1068: mol_type = unassigned DNA
tgccactacttgctctgtgaccttggacaggttacttgatctttctatgccctaatatcctcatctataaaataaaggataataatagtgtctgactcaagagttcttgtgaaaattaaatgagatagaatgtgtaagggcttagaagagtgcgtggcatatagttatgtgtgatgataacagctataaaaataagttaggaaagcaggcaaggggtgaggcagcttgtgagggagattgagctcctggtcacgtttctgtccatcccaggctgatggtgcgctcagggggcagccccctatcccccgtgatctatgattcggacatggacgatgtccccgagcggggtctcatcagtgacgcccagtccctctacgtggagctgctgtcagagacacctgccaatcccctgctgttaagccttcgatttgaagcctttgaggaggatcgctgcttcgcccccttcctggcacatggaaatgtcactaccacggaccctgagtatcgcccaggggcactggcaaccttctcgtgcctcccaggatatgccctggagccccctgggccccccaatgccatcgaatgtgtggatcccacagaaccccactggaacgacacagagccggcctgcaaagccatgtgtggaggggagctgtcggaaccagctggcgtggtcctctctcccgactggccccagagctatagcccgggccaagactgcgtgtggggcgtgcacgtccaggaagagaagcgcatcttgctccaagttgagatattgaatgtgcgggaaggggacatgctgacgctgttcgacggggacggtcccagcgcccgagtcttggcccagctgcggggacctcagccgcgccgccgccttctctcctctgggcccgacctcacactgcagtttcaggcaccgcccgggcccccaaatccaggcctgggccagggcttcgtattgcacttcaaagaggtcccgaggaacgacacgtgccccgagctgccacctccggagtggggctggagaacggcatcccacggggacctgatccggggcacggtgctcac

SEQ ID NO: 18837 - DNA, 764 bp, Homo sapiens
  source 1..764: mol_type = unassigned DNA
gtggcctctgaggccctggctgaactgcttcatggggccctgctgaggaggggcccagagatgggctacctgccaggatctgatcgggaccccacgctagccacccctccggccggccagactctcgcagtgccctccctgccacgggccactgagccggggacagggcctctgacaacagccgtcacccctaacggggtcaggggggcaggccccactgcgccagaactgctgaccccgcccccaggaaccacagccccacccccacccagccctgcctccccagggcctccccttgggcctgagggaggagaggaggagacgacgaccaccatcatcaccacgacaactgttaccactacggtgaccagcccaggtgcagacgctgaacctgtcacaggaagaggagctcctggtgctggctggtgggggatccccaggcctggccccccgactcctggccaactcatccatgcttggagaaggacaagtccttcggagcccaaccaaccggctgcttctgcacttccagagcccacgggtcccaaggggcggtggcttcaggatccactatcaggcctacctcctgagctgtggcttccctccccggccggcccatggggacgtgagtgtgacggacctgcaccctgggggcactgccacctttcactgtgattcgggctaccagctgcagggagaggagaccctcatctgcctcaatggcacccggccatcctggaacggtgaaacccccagctgcatgg

SEQ ID NO: 18838 - DNA, 332 bp, Homo sapiens
  source 1..332: mol_type = unassigned DNA
aattaaagggaaagataaacggagacggaggaaaggtggcagccagattacttagagaggcacagaggagagagatcggggtgagtcgccatggggactcccagggcccagcacccgccgcctccccagctgctgttcctaattctgctgagctgtccctggatccagggatctgatcgggaccccacgctagccacccctccggccggccagactctcgcagtgccctccctgccacgggccactgagccggggacagggcctctgacaacagccgtcacccctaacggggtcaggggggcaggccccactgcgccagaactgctgacccc

SEQ ID NO: 18839 - DNA, 3423 bp, Homo sapiens
  source 1..3423: mol_type = unassigned DNA
accacagagccgcgagaagaggacagaggagactgagcaaaggggggtgggctccaggcgacccctagcccaattctgcccctccatcccaaggggcagagaaattgtctttctttgctgactcctacgaggaaaaaaaaaaaaaaaaaaaaaacaattaaagggaaagataaacggagacggaggaaaggtggcagccagattacttagagaggcacagaggagagagatcggggtgagtcgccatggggactcccagggcccagcacccgccgcctccccagctgctgttcctaattctgctgagctgtccctggatccagggatctgatcgggaccccacgctagccacccctccggccggccagactctcgcagtgccctccctgccacgggccactgagccggggacagggcctctgacaacagccgtcacccctaacggggtcaggggggcaggccccactgcgccagaactgctgaccccgcccccaggaaccacagccccacccccacccagccctgcctccccagggcctccccttgggcctgagggaggagaggaggagacgacgaccaccatcatcaccacgacaactgttaccactacggtgaccagcccagttctgtgtaataacaacatctccgagggcgaagggtatgtggagtctccagatctggggagccccgtcagccgcaccctggggctcctggactgcacttacagcatccatgtctaccctggctacggcattgagatccaggtgcagacgctgaacctgtcacaggaagaggagctcctggtgctggctggtgggggatccccaggcctggccccccgactcctggccaactcatccatgcttggagaaggacaagtccttcggagcccaaccaaccggctgcttctgcacttccagagcccacgggtcccaaggggcggtggcttcaggatccactatcaggcctacctcctgagctgtggcttccctccccggccggcccatggggacgtgagtgtgacggacctgcaccctgggggcactgccacctttcactgtgattcgggctaccagctgcagggagaggagaccctcatctgcctcaatggcacccggccatcctggaacggtgaaacccccagctgcatggcatcctgtggtggcaccatccacaatgccaccctgggccgcatcgtgtccccagagcctgggggagccgtagggcccaacctcacctgccgttgggtcattgaagcagctgaggggcgccggctgcacctgcactttgaaagggtctcgctggatgaggacaatgaccggctgatggtgcgctcagggggcagccccctatcccccgtgatctatgattcggacatggacgatgtccccgagcggggtctcatcagtgacgcccagtccctctacgtggagctgctgtcagagacacctgccaatcccctgctgttaagccttcgatttgaagcctttgaggaggatcgctgcttcgcccccttcctggcacatggaaatgtcactaccacggaccctgagtatcgcccaggggcactggcaaccttctcgtgcctcccaggatatgccctggagccccctgggccccccaatgccatcgaatgtgtggatcccacagaaccccactggaacgacacagagccggcctgcaaagccatgtgtggaggggagctgtcggaaccagctggcgtggtcctctctcccgactggccccagagctatagcccgggccaagactgcgtgtggggcgtgcacgtccaggaagagaagcgcatcttgctccaagttgagatattgaatgtgcgggaaggggacatgctgacgctgttcgacggggacggtcccagcgcccgagtcttggcccagctgcggggacctcagccgcgccgccgccttctctcctctgggcccgacctcacactgcagtttcaggcaccgcccgggcccccaaatccaggcctgggccagggcttcgtattgcacttcaaagaggtcccgaggaacgacacgtgccccgagctgccacctccggagtggggctggagaacggcatcccacggggacctgatccggggcacggtgctcacctaccagtgcgagcctggctacgagctgctaggctccgacattctcacttgccagtgggacctgtcttggagcgccgcgccgcccgcctgccaaaagatcatgacttgtgctgaccctggcgagattgccaacgggcaccgcaccgcctcggacgccggcttccccgttggctcccacgtccagtaccgctgcctgccagggtacagcctcgagggggcagccatgctcacctgctacagccgggacacaggcacacccaagtggagcgatagggtccccaaatgcgccttgaagtacgagccgtgcctgaacccgggggttcccgagaatggctaccagacgctgtacaagcaccactaccaggcgggcgagtctctgcgcttcttctgctatgagggctttgagcttatcggcgaggtcaccatcacctgtgtgcccggccacccctcccagtggaccagccagcccccactctgcaaagttgcctatgaggagctcctggacaaccgaaaactggaagtgacccagaccacagatccatcacggcagctggaaggggggaacctggccctggccatcctgctgcctctaggcttggtcattgtcctcggcagtggcgtttacatctactacaccaagcttcagggaaagtcccttttcggcttctcgggctcccactcctacagccccatcaccgtggagtcggacttcagcaacccgctgtatgaagctggggatacgcgggagtatgaagtttccatctgaaccccaagactacagctgcaggacccaggacgcccctcccctcctcattcgggcagagggaaatacgggacccggtctctgcctcctggctgccctcctccctggctgtgtaaatagtctccctatcccacgagggggctttgatggccctggagatcctacagtaaataaaccagcatcctgccgcccaaagccgcctcttctcagttgccaaacgaggggcctgccccccgccctaccggcttttggattctgggaggggaactctgcctccctgcaaatcttgcagcccctcctgcccagggcacccctcaaggactgcccccgatagctctactgttcccttggccacgaaggtgcccccctcccagatgccctggccctaggcctgactccggccaggagggtcagaagaaggacaaaggggagagctgggacaaggccttgcccccttcctgccatctccccaacccacagtctctccacctttgcttctgaattcttgtttttgagcaataaacagaaaatcgccacttgt

SEQ ID NO: 18840 - DNA, 3555 bp, Homo sapiens
  source 1..3555: mol_type = unassigned DNA
accacagagccgcgagaagaggacagaggagactgagcaaaggggggtgggctccaggcgacccctagcccaattctgcccctccatcccaaggggcagagaaattgtctttctttgctgactcctacgaggaaaaaaaaaaaaaaaaaaaaaacaattaaagggaaagataaacggagacggaggaaaggtggcagccagattacttagagaggcacagaggagagagatcggggtgagtcgccatggggactcccagggcccagcacccgccgcctccccagctgctgttcctaattctgctgagctgtccctggatccagggtctgcccctgaaggaggaggagatattgccagagcctggaagtgagacccccacggtggcctctgaggccctggctgaactgcttcatggggccctgctgaggaggggcccagagatgggctacctgccaggatctgatcgggaccccacgctagccacccctccggccggccagactctcgcagtgccctccctgccacgggccactgagccggggacagggcctctgacaacagccgtcacccctaacggggtcaggggggcaggccccactgcgccagaactgctgaccccgcccccaggaaccacagccccacccccacccagccctgcctccccagggcctccccttgggcctgagggaggagaggaggagacgacgaccaccatcatcaccacgacaactgttaccactacggtgaccagcccagttctgtgtaataacaacatctccgagggcgaagggtatgtggagtctccagatctggggagccccgtcagccgcaccctggggctcctggactgcacttacagcatccatgtctaccctggctacggcattgagatccaggtgcagacgctgaacctgtcacaggaagaggagctcctggtgctggctggtgggggatccccaggcctggccccccgactcctggccaactcatccatgcttggagaaggacaagtccttcggagcccaaccaaccggctgcttctgcacttccagagcccacgggtcccaaggggcggtggcttcaggatccactatcaggcctacctcctgagctgtggcttccctccccggccggcccatggggacgtgagtgtgacggacctgcaccctgggggcactgccacctttcactgtgattcgggctaccagctgcagggagaggagaccctcatctgcctcaatggcacccggccatcctggaacggtgaaacccccagctgcatggcatcctgtggtggcaccatccacaatgccaccctgggccgcatcgtgtccccagagcctgggggagccgtagggcccaacctcacctgccgttgggtcattgaagcagctgaggggcgccggctgcacctgcactttgaaagggtctcgctggatgaggacaatgaccggctgatggtgcgctcagggggcagccccctatcccccgtgatctatgattcggacatggacgatgtccccgagcggggtctcatcagtgacgcccagtccctctacgtggagctgctgtcagagacacctgccaatcccctgctgttaagccttcgatttgaagcctttgaggaggatcgctgcttcgcccccttcctggcacatggaaatgtcactaccacggaccctgagtatcgcccaggggcactggcaaccttctcgtgcctcccaggatatgccctggagccccctgggccccccaatgccatcgaatgtgtggatcccacagaaccccactggaacgacacagagccggcctgcaaagccatgtgtggaggggagctgtcggaaccagctggcgtggtcctctctcccgactggccccagagctatagcccgggccaagactgcgtgtggggcgtgcacgtccaggaagagaagcgcatcttgctccaagttgagatattgaatgtgcgggaaggggacatgctgacgctgttcgacggggacggtcccagcgcccgagtcttggcccagctgcggggacctcagccgcgccgccgccttctctcctctgggcccgacctcacactgcagtttcaggcaccgcccgggcccccaaatccaggcctgggccagggcttcgtattgcacttcaaagaggtcccgaggaacgacacgtgccccgagctgccacctccggagtggggctggagaacggcatcccacggggacctgatccggggcacggtgctcacctaccagtgcgagcctggctacgagctgctaggctccgacattctcacttgccagtgggacctgtcttggagcgccgcgccgcccgcctgccaaaagatcatgacttgtgctgaccctggcgagattgccaacgggcaccgcaccgcctcggacgccggcttccccgttggctcccacgtccagtaccgctgcctgccagggtacagcctcgagggggcagccatgctcacctgctacagccgggacacaggcacacccaagtggagcgatagggtccccaaatgcgccttgaagtacgagccgtgcctgaacccgggggttcccgagaatggctaccagacgctgtacaagcaccactaccaggcgggcgagtctctgcgcttcttctgctatgagggctttgagcttatcggcgaggtcaccatcacctgtgtgcccggccacccctcccagtggaccagccagcccccactctgcaaagttgcctatgaggagctcctggacaaccgaaaactggaagtgacccagaccacagatccatcacggcagctggaaggggggaacctggccctggccatcctgctgcctctaggcttggtcattgtcctcggcagtggcgtttacatctactacaccaagcttcagggaaagtcccttttcggcttctcgggctcccactcctacagccccatcaccgtggagtcggacttcagcaacccgctgtatgaagctggggatacgcgggagtatgaagtttccatctgaaccccaagactacagctgcaggacccaggacgcccctcccctcctcattcgggcagagggaaatacgggacccggtctctgcctcctggctgccctcctccctggctgtgtaaatagtctccctatcccacgagggggctttgatggccctggagatcctacagtaaataaaccagcatcctgccgcccaaagccgcctcttctcagttgccaaacgaggggcctgccccccgccctaccggcttttggattctgggaggggaactctgcctccctgcaaatcttgcagcccctcctgcccagggcacccctcaaggactgcccccgatagctctactgttcccttggccacgaaggtgcccccctcccagatgccctggccctaggcctgactccggccaggagggtcagaagaaggacaaaggggagagctgggacaaggccttgcccccttcctgccatctccccaacccacagtctctccacctttgcttctgaattcttgtttttgagcaataaacagaaaatcgccacttgt

SEQ ID NO: 18841 - DNA, 2085 bp, Homo sapiens
  source 1..2085: mol_type = unassigned DNA
atgcaattaggacgaggtgagcgcagacgtcactctaagctcagacatttcgcagtctcctcccctgagggaaaaccaaatacctccagcccaaatcagggttgtgaggccaaatctgcaagaaggctgcaggcgagagggaaggctccctctgcgcctgaaagcccccaagtcctcgggttggggggaactcttcagcacatccttctctggacaacagaagaagaatcactgtccacaaaatatattaaaactgaaatttttgttcttttagctttcgaatttacacttttgagagcagtgtgattctttcaagtctagcagtgcattaagagggcctgagcgtttccgttccgccctcctcgctaagacaactagcagcggcacctcaggacgcgagccgaggactctaccgcccgacccaggttaagtttcggaggctcctaagatggctgcagccgcttccaggcacctcctcttccgcggccccgcccaccgctacgtccgtcttcgccccggaagtggaagtcgtgctgaggtcagaaggcggaaccgctgctgggagacggcgggatctctttcgccatggctgccgggccgatctccgagcggaatcaggatgccactgtgtacgtggggggcctggatgagaaggttagtgaaccgctgctgtgggaactgtttctccaggctggaccagtagtcaacacccacatgccaaaggatagagtcactggccagcaccaaggctatggctttgtggaattcttgagtgaggaagatgctgactatgccattaagatcatgaacatgatcaaactctatgggaagccaatacgggtgaacaaagcatcagctcacaacaaaaacctggatgtaggggccaacattttcattgggaacctggaccctgagattgatgagaagttgctttatgatactttcagcgcctttggggtcatcttacaaacccccaaaattatgcgggaccctgacacaggcaactccaaaggttatgcctttattaattttgcttcatttgatgcttcggatgcagcaattgaagccatgaatgggcagtacctctgtaaccgtcctatcaccgtatcttatgccttcaagaaggactccaagggtgagcgccatggctcagcagccgaacgacttctggcagctcagaacccgctctcccaggctgatcgccctcatcagctgtttgcagatgcacctcctccaccctctgctcccaatcctgtggtatcatcattggggtctgggcttcctccaccaggcatgcctcctcctggctccttcccacccccagtgccacctcctggagccctcccacctgggatacccccagccatgcccccaccacctatgcctcctggggctgcaggacatggccccccatcggcaggaaccccaggggcaggacatcctggtcatggacactcacatcctcacccattcccaccgggtgggatgccccatccagggatgtctcagatgcagcttgcacaccatggccctcatggcttaggacatccccacgctggacccccaggctctgggggccagccaccgccccgaccaccacctggaatgcctcatcctggacctcctccaatgggcatgcccccccgagggcctccattcggatctcccatgggtcacccaggtcctatgcctccgcatggtatgcgtggacctcctccactgatgcccccccatggatacactggccctccacgacccccaccctatggctaccagcgggggcctctccctccacccagacccactccccggccaccagttccccctcgaggcccacttcgaggccctctccctcagtaaattcacattttccttcctcctgttacattttcccaatatcttttctattccttggaccaatcagagatgctgtagctccttggggcaaaggtactaatccctttcagcacccccactccattcccctttttaatgtaactttttccacaggaggtatttcttttttatgttggtcctgagtattttgcaaatgcacagagaaaataaaactaaactccttgttta

SEQ ID NO: 18842 - DNA, 826 bp, Homo sapiens
  source 1..826: mol_type = unassigned DNA
ttgggggcggggtggccgggtgctggctgaggcctctgggtgtgatacttaagtccggtcccctgctgacttctcactcaaaaaatcaaaaaaacccactcacaatactaaattagacttcagaggattcccgaagtcctgggaagagagaagtttaaggatgccactgtgtacgtggggggcctggatgagaaggttagtgaaccgctgctgtgggaactgtttctccaggctggaccagtagtcaacacccacatgccaaaggatagagtcactggccagcaccaaggctatggctttgtggaattcttgagtgaggaagatgctgactatgccattaagatcatgaacatgatcaaactctatgggaagccaatacgggtgaacaaagcatcagctcacaacaaaaacctggatgtaggggccaacattttcattgggaacctggaccctgagattgatgagaagttgctttatgatactttcagcgcctttggggtcatcttacaaacccccaaaattatgcgggaccctgacacaggcaactccaaaggttatgcctttattaattttgcttcatttgatgcttcggatgcagcaattgaagccatgaatgggcagtacctctgtaaccgtcctatcaccgtatcttatgccttcaagaaggactccaagggtgagcgccatggctcagcagccgaacgacttctggcagctcagaacccgctctcccaggctgatcgccctcatcagctgtttgcagatgcacctcctccaccctctgctcccaatcctgtggtatcatcattggggtctgggcttcctc

SEQ ID NO: 18843 - DNA, 4072 bp, Homo sapiens
  source 1..4072: mol_type = unassigned DNA
ggggcaaggttgggggagctgccccttgtcctgcacttcagcagctacagggctgtgggtgaaggagggcctgaggattgtgagctcagtgcttttaggcttgagctgcccttggggatcccccctggaggcagagctggaccttggggagggaccctgtggcggacgtccttctatggccgcttcaggcacttcttggatatcatcgaccctcgcacactctttgtcactgagagacgtctcagagaggctgtgcagctgctggaggactataagcatgggaccctgcgcccgggggtcaccaatgaacagctctggagtgcacagaaaatcaagcaggctattctacatccggacaccaatgagaagatcttcatgccatttagaatgtcaggttatattccttttgggacgccaattgtagtcggtcttctcttgcccaaccagacactggcatccactgtcttctggcagtggctgaaccagagccacaatgcctgtgtcaactatgcaaaccgcaatgcgaccaagccttcacctgcatccaagttcatccagggatacctgggagctgtcatcagcgccgtctccattgctgtgggccttaatgtcctggttcagaaagccaacaagttcaccccagccacccgccttctcatccagaggtttgtgccgttccctgctgtagccagtgccaatatctgcaatgtggtcctgatgcggtacggggagctggaggaagggattgatgtcctggacagcgatggcaacctcgtgggctcctccaagatcgcagcccgacacgccctgctggagacggcgctgacgcgagtggtcctgcccatgcccatcctggtgctacccccgatcgtcatgtccatgctggagaagacggctctcctgcaggcacgcccccggctgctcctccctgtgcaaagcctcgtgtgcctggcagccttcggcctggccctgccgctggccatcagcctcttcccgcaaatgtcagagattgaaacatcccaattagagccggagatagcccaggccacgagcagccggacagtggtgtacaacaaggggttgtgagtgtggtcagcggcctggggacggagcactgtgcagccggggagctgaggggcagggccgtagactcacggctgcacctgcagggagcagcacgccaaccccagcagtcctgggccccctgggagagtgctcaacctacagtggagggagactgacccattcacattttaacataggcaagaggagttctaacacatttcgtacaaaaaaataatcaagtgcatttctgggccttatgtggggttgtcaaaactccactcagcacaattatgtgtgaagctgaaaaattgtagagtgcccatggggtagaagtagaatccttttatactttggttccttttttatttttattttttatcagaatcaaatctgagccttagtttcagctgaccagaagtggcaggaggacaggtggaggcgagccagattaggcctggagttgggctggtttggtggccaggctggtaaatttaggatattacaatggccagcccagatggctccctgggctggcatggggaggggagagaaggtggtctgcaccccacaggatgaactagccatgactagggtcctcaggcagtggcccagggaatcagggagcactggaggcctctgcaagattctgtgggcagctggctctgaatgtagccagcccacatccattccagagctgcagaaccagtccctctgagtgaagtccagtgaccctggagctagggtcccccttcgtggagctctaactgattcagggcccctgaagtgaccccagctccaggcaggaaaccccgagaaggaatggtgcttggcaggaaccatggacctgcacttggcctcttcgggaagatcctccttccaggccccaggctggatgctgggttctggggctgagagtggggctagactgggctggctgccttctgcggagcttctccagccaccaaggctgcctgccccatcccatccctttctaagcaggaaggtctcatgcctgagaatgcctaggccagctccttagacacctatcagagaagcagcatcaacctaggagcagtgggccctggctctgtcactaaatggcagtgagatgtcagacaaattcattcccttctctcagcctccactccctgtctgaaaccagaagactggatcaaggggttcccactggctcctccagcaagacctcgtctttgcttgtcctgctcagatgctggtcatcctgggcatgtccccagtgtggactctggactgggaagggggcaggcccctttggacctgcagttggcctcagcagaaggccttgccttgtgtatgtgactccatatcccgggagcagttgacctttgccaaacactttacagttctggaggaggaggtaacatagatgcctgggcctgatggtggggccatacccatgtgtcgcctctcactctggcagcctcagaggccccttgctgctggctcccatctccctcccatttgcagaccaggaaggaagagcaagctgtacaaagggaagcagagcctggggtgggtgtgagcagggtgacccctcatctgaaaggcccaaaccagggggaagcaccagcctcagtgcagccccctcctgaccccacctagaatggaagcctccacctgcagccccaggcctccctcccccggggtctccacctcaggggagacttaggccagaggtgaacattcatgtgtaggaagaggccgctgcagggtggcatcttagggtaggggaagtgtgctgaggtgggccttccatgggcatggccgttgcctctctgccagccgctggtgcccaccagctggctctgcagcacattgccctgaggggcctgccactctcctgaggagcagcccacctgctgcccgtgaggagggggagaagggttagacaagcctggaggacaaaacagcgggagtgtgggggtgccatggtgttggaggggcaggcctttttgagccaatcccaccataatgtgaatatgccagtgactgctgcgctgtgctggtctctaggcctgaactaggtgctggcatgtctgggtcgtcttttgaaaagctcacttcaagctcaccctgctcctacctatcataaggtcttattcttgtgcactttatcttgggaccaaaactgcctacccaccccttcccgccctccccctgccagaggcctggtgccctggcccagcctgtggcctcagcatctcataactcatttgctttgtctcccggatgatttccgtcatgctcccaaatgcagcttcaggtgagccaaggggtctgctcctgtggcggtgcagtggcaaaggatccagatagcctagggtgagggtgacagagggacagtgggctatgccactaggccctggtctggctttggaaagacctgtgaggggaaaccttcacccagcacccatgccccactctgctgaggccagaggaagggaggcctgaggggcagattggttcatgcctggggtggaggctaagcctggacacagtcagggcggggctggccagctgtgcgagaacacaagccacgcctgcgatggtgctgcacccctggtgtccctgcctggccctcctctggtcacttcaaacatgccctcaggcttggggatgcccttcttccattcccagacagcagtgtgagggtgcagggaccaagatgtcaagctggccgtggagtcgagctggccgacggacccctttcacctggttatgagccgacttctttggtgttctggcctctggcctgggaaaagggcaggagcctagaggaggaaaaaggctggtggacagacccagggtggtcttcaagcctggcccagtgagagtgaggcccccgcacgcaagcctcagccactcccaggggcctttgcagcgtctttttaacctcagaaaatttctcaatctatgtgatttgtgtaatactaatgagctttgggcaataaatacgggatttaaagca

SEQ ID NO: 18844 - DNA, 3578 bp, Homo sapiens
  source 1..3578: mol_type = unassigned DNA
cctgctctggggcaaggttgggggagctgccccttgtcctgcacttcagcagctacagggctgtgggtgaaggagggcctgaggattgtgagctcagtgcttttaggcttgagctgcccttggggatcccccctggaggcagagctggaccttggggagggaccctgtggcggacgtccttctatggccgcttcaggcacttcttggatatcatcgaccctcgcacactctttgtcactgagagacgtctcagagaggctgtgcagctgctggaggactataagcatgggaccctgcgcccgggggtcaccaatgaacagctctggagtgcacagaaaatcaagcaggctattctacatccggacaccaatgagaagatcttcatgccatttagaatgtcaggttatattccttttgggacgccaattgccctgctggagacggcgctgacgcgagtggtcctgcccatgcccatcctggtgctacccccgatcgtcatgtccatgctggagaaattgaaacatcccaattagagccggagatagcccaggccacgagcagccggacagtggtgtacaacaaggggttgtgagtgtggtcagcggcctggggacggagcactgtgcagccggggagctgaggggcagggccgtagactcacggctgcacctgcagggagcagcacgccaaccccagcagtcctgggccccctgggagagtgctcaacctacagtggagggagactgacccattcacattttaacataggcaagaggagttctaacacatttcgtacaaaaaaataatcaagtgcatttctgggccttatgtggggttgtcaaaactccactcagcacaattatgtgtgaagctgaaaaattgtagagtgcccatggggtagaagtagaatccttttatactttggttccttttttatttttattttttatcagaatcaaatctgagccttagtttcagctgaccagaagtggcaggaggacaggtggaggcgagccagattaggcctggagttgggctggtttggtggccaggctggtaaatttaggatattacaatggccagcccagatggctccctgggctggcatggggaggggagagaaggtggtctgcaccccacaggatgaactagccatgactagggtcctcaggcagtggcccagggaatcagggagcactggaggcctctgcaagattctgtgggcagctggctctgaatgtagccagcccacatccattccagagctgcagaaccagtccctctgagtgaagtccagtgaccctggagctagggtcccccttcgtggagctctaactgattcagggcccctgaagtgaccccagctccaggcaggaaaccccgagaaggaatggtgcttggcaggaaccatggacctgcacttggcctcttcgggaagatcctccttccaggccccaggctggatgctgggttctggggctgagagtggggctagactgggctggctgccttctgcggagcttctccagccaccaaggctgcctgccccatcccatccctttctaagcaggaaggtctcatgcctgagaatgcctaggccagctccttagacacctatcagagaagcagcatcaacctaggagcagtgggccctggctctgtcactaaatggcagtgagatgtcagacaaattcattcccttctctcagcctccactccctgtctgaaaccagaagactggatcaaggggttcccactggctcctccagcaagacctcgtctttgcttgtcctgctcagatgctggtcatcctgggcatgtccccagtgtggactctggactgggaagggggcaggcccctttggacctgcagttggcctcagcagaaggccttgccttgtgtatgtgactccatatcccgggagcagttgacctttgccaaacactttacagttctggaggaggaggtaacatagatgcctgggcctgatggtggggccatacccatgtgtcgcctctcactctggcagcctcagaggccccttgctgctggctcccatctccctcccatttgcagaccaggaaggaagagcaagctgtacaaagggaagcagagcctggggtgggtgtgagcagggtgacccctcatctgaaaggcccaaaccagggggaagcaccagcctcagtgcagccccctcctgaccccacctagaatggaagcctccacctgcagccccaggcctccctcccccggggtctccacctcaggggagacttaggccagaggtgaacattcatgtgtaggaagaggccgctgcagggtggcatcttagggtaggggaagtgtgctgaggtgggccttccatgggcatggccgttgcctctctgccagccgctggtgcccaccagctggctctgcagcacattgccctgaggggcctgccactctcctgaggagcagcccacctgctgcccgtgaggagggggagaagggttagacaagcctggaggacaaaacagcgggagtgtgggggtgccatggtgttggaggggcaggcctttttgagccaatcccaccataatgtgaatatgccagtgactgctgcgctgtgctggtctctaggcctgaactaggtgctggcatgtctgggtcgtcttttgaaaagctcacttcaagctcaccctgctcctacctatcataaggtcttattcttgtgcactttatcttgggaccaaaactgcctacccaccccttcccgccctccccctgccagaggcctggtgccctggcccagcctgtggcctcagcatctcataactcatttgctttgtctcccggatgatttccgtcatgctcccaaatgcagcttcaggtgagccaaggggtctgctcctgtggcggtgcagtggcaaaggatccagatagcctagggtgagggtgacagagggacagtgggctatgccactaggccctggtctggctttggaaagacctgtgaggggaaaccttcacccagcacccatgccccactctgctgaggccagaggaagggaggcctgaggggcagattggttcatgcctggggtggaggctaagcctggacacagtcagggcggggctggccagctgtgcgagaacacaagccacgcctgcgatggtgctgcacccctggtgtccctgcctggccctcctctggtcacttcaaacatgccctcaggcttggggatgcccttcttccattcccagacagcagtgtgagggtgcagggaccaagatgtcaagctggccgtggagtcgagctggccgacggacccctttcacctggttatgagccgacttctttggtgttctggcctctggcctgggaaaagggcaggagcctagaggaggaaaaaggctggtggacagacccagggtggtcttcaagcctggcccagtgagagtgaggcccccgcacgcaagcctcagccactcccaggggcctttgcagcgtctttttaacctcagaaaatttctcaatctatgtgatttgtgtaatactaatgagctttgggcaataaatacgggatttaaagca

SEQ ID NO: 18845 - DNA, 4140 bp, Homo sapiens
  source 1..4140: mol_type = unassigned DNA
aactacactccccacaacgccttgcgcctcccgctcgctgcggttgattagggccaatcgggagaggcagctgtggcgggggccgaggagggacattttaaaagggccggagattgcgggcgtcagtggccatggcggatacagcgactacagcatcggcggcggcggctagtgccgctagcgcctcgagcgatgcacctcctttccaactgggcaaaccccgcttccagcagacgtccttctatggccgcttcaggcacttcttggatatcatcgaccctcgcacactctttgtcactgagagacgtctcagagaggctgtgcagctgctggaggactataagcatgggaccctgcgcccgggggtcaccaatgaacagctctggagtgcacagaaaatcaagcaggctattctacatccggacaccaatgagaagatcttcatgccatttagaatgtcaggttatattccttttgggacgccaattgtagtcggtcttctcttgcccaaccagacactggcatccactgtcttctggcagtggctgaaccagagccacaatgcctgtgtcaactatgcaaaccgcaatgcgaccaagccttcacctgcatccaagttcatccagggatacctgggagctgtcatcagcgccgtctccattgctgtgggccttaatgtcctggttcagaaagccaacaagttcaccccagccacccgccttctcatccagaggtttgtgccgttccctgctgtagccagtgccaatatctgcaatgtggtcctgatgcggtacggggagctggaggaagggattgatgtcctggacagcgatggcaacctcgtgggctcctccaagatcgcagcccgacacgccctgctggagacggcgctgacgcgagtggtcctgcccatgcccatcctggtgctacccccgatcgtcatgtccatgctggagaagacggctctcctgcaggcacgcccccggctgctcctccctgtgcaaagcctcgtgtgcctggcagccttcggcctggccctgccgctggccatcagcctcttcccgcaaatgtcagagattgaaacatcccaattagagccggagatagcccaggccacgagcagccggacagtggtgtacaacaaggggttgtgagtgtggtcagcggcctggggacggagcactgtgcagccggggagctgaggggcagggccgtagactcacggctgcacctgcagggagcagcacgccaaccccagcagtcctgggccccctgggagagtgctcaacctacagtggagggagactgacccattcacattttaacataggcaagaggagttctaacacatttcgtacaaaaaaataatcaagtgcatttctgggccttatgtggggttgtcaaaactccactcagcacaattatgtgtgaagctgaaaaattgtagagtgcccatggggtagaagtagaatccttttatactttggttccttttttatttttattttttatcagaatcaaatctgagccttagtttcagctgaccagaagtggcaggaggacaggtggaggcgagccagattaggcctggagttgggctggtttggtggccaggctggtaaatttaggatattacaatggccagcccagatggctccctgggctggcatggggaggggagagaaggtggtctgcaccccacaggatgaactagccatgactagggtcctcaggcagtggcccagggaatcagggagcactggaggcctctgcaagattctgtgggcagctggctctgaatgtagccagcccacatccattccagagctgcagaaccagtccctctgagtgaagtccagtgaccctggagctagggtcccccttcgtggagctctaactgattcagggcccctgaagtgaccccagctccaggcaggaaaccccgagaaggaatggtgcttggcaggaaccatggacctgcacttggcctcttcgggaagatcctccttccaggccccaggctggatgctgggttctggggctgagagtggggctagactgggctggctgccttctgcggagcttctccagccaccaaggctgcctgccccatcccatccctttctaagcaggaaggtctcatgcctgagaatgcctaggccagctccttagacacctatcagagaagcagcatcaacctaggagcagtgggccctggctctgtcactaaatggcagtgagatgtcagacaaattcattcccttctctcagcctccactccctgtctgaaaccagaagactggatcaaggggttcccactggctcctccagcaagacctcgtctttgcttgtcctgctcagatgctggtcatcctgggcatgtccccagtgtggactctggactgggaagggggcaggcccctttggacctgcagttggcctcagcagaaggccttgccttgtgtatgtgactccatatcccgggagcagttgacctttgccaaacactttacagttctggaggaggaggtaacatagatgcctgggcctgatggtggggccatacccatgtgtcgcctctcactctggcagcctcagaggccccttgctgctggctcccatctccctcccatttgcagaccaggaaggaagagcaagctgtacaaagggaagcagagcctggggtgggtgtgagcagggtgacccctcatctgaaaggcccaaaccagggggaagcaccagcctcagtgcagccccctcctgaccccacctagaatggaagcctccacctgcagccccaggcctccctcccccggggtctccacctcaggggagacttaggccagaggtgaacattcatgtgtaggaagaggccgctgcagggtggcatcttagggtaggggaagtgtgctgaggtgggccttccatgggcatggccgttgcctctctgccagccgctggtgcccaccagctggctctgcagcacattgccctgaggggcctgccactctcctgaggagcagcccacctgctgcccgtgaggagggggagaagggttagacaagcctggaggacaaaacagcgggagtgtgggggtgccatggtgttggaggggcaggcctttttgagccaatcccaccataatgtgaatatgccagtgactgctgcgctgtgctggtctctaggcctgaactaggtgctggcatgtctgggtcgtcttttgaaaagctcacttcaagctcaccctgctcctacctatcataaggtcttattcttgtgcactttatcttgggaccaaaactgcctacccaccccttcccgccctccccctgccagaggcctggtgccctggcccagcctgtggcctcagcatctcataactcatttgctttgtctcccggatgatttccgtcatgctcccaaatgcagcttcaggtgagccaaggggtctgctcctgtggcggtgcagtggcaaaggatccagatagcctagggtgagggtgacagagggacagtgggctatgccactaggccctggtctggctttggaaagacctgtgaggggaaaccttcacccagcacccatgccccactctgctgaggccagaggaagggaggcctgaggggcagattggttcatgcctggggtggaggctaagcctggacacagtcagggcggggctggccagctgtgcgagaacacaagccacgcctgcgatggtgctgcacccctggtgtccctgcctggccctcctctggtcacttcaaacatgccctcaggcttggggatgcccttcttccattcccagacagcagtgtgagggtgcagggaccaagatgtcaagctggccgtggagtcgagctggccgacggacccctttcacctggttatgagccgacttctttggtgttctggcctctggcctgggaaaagggcaggagcctagaggaggaaaaaggctggtggacagacccagggtggtcttcaagcctggcccagtgagagtgaggcccccgcacgcaagcctcagccactcccaggggcctttgcagcgtctttttaacctcagaaaatttctcaatctatgtgatttgtgtaatactaatgagctttgggcaataaatacgggatttaaagca

SEQ ID NO: 18846 - DNA, 808 bp, Homo sapiens
  source 1..808: mol_type = unassigned DNA
gatttgagggaaatgtctgattagtagacaggccccagaagctgtgaggggcactcgcacgcgaccaaggcacctgtttccaagcagcttgctcaggatctggcataccccagtgccaatatctgcaatgtggtcctgatgcggtacggggagctggaggaagggattgatgtcctggacagcgatggcaacctcgtgggctcctccaagatcgcagcccgacacgccctgctggagacggcgctgacgcgagtggtcctgcccatgcccatcctggtgctacccccgatcgtcatgtccatgctggagaaattgaaacatcccaattagagccggagatagcccaggccacgagcagccggacagtggtgtacaacaaggggttgtgagtgtggtcagcggcctggggacggagcactgtgcagccggggagctgaggggcagggccgtagactcacggctgcacctgcagggagcagcacgccaaccccagcagtcctgggccccctgggagagtgctcaacctacagtggagggagactgacccattcacattttaacataggcaagaggagttctaacacatttcgtacaaaaaaataatcaagtgcatttctgggccttatgtggggttgtcaaaactccactcagcacaattatgtgtgaagctgaaaaattgtagagtgcccatggggtagaagtagaatccttttatactttggttccttttttatttttattttttatcagaatcaaatctgagccttagtttcagctgaccagaagtggcaggaggacaggtggaggc

SEQ ID NO: 18847 - DNA, 906 bp, Homo sapiens
  source 1..906: mol_type = unassigned DNA
gtttaattctggctgtacacgtcaagagtagctctgataagtggtaacgccataagagtgacaggatcttctgaaaaaaatgagagcctgttattggaatgagctgcctgactcctggatttgagggaaatgtctgattagtagacaggccccagaagctgtgaggggcactcgcacgcgaccaaggcacctgtttccaagcagcttgctcaggatctggcataccccagtgccaatatctgcaatgtggtcctgatgcggtacggggagctggaggaagggattgatgtcctggacagcgatggcaacctcgtgggctcctccaagatcgcagcccgacacgccctgctggagacggcgctgacgcgagtggtcctgcccatgcccatcctggtgctacccccgatcgtcatgtccatgctggagaagacggctctcctgcaggcacgcccccggctgctcctccctgtgcaaagcctcgtgtgcctggcagccttcggcctggccctgccgctggccatcagcctcttcccgcaaatgtcagagattgaaacatcccaattagagccggagatagcccaggccacgagcagccggacagtggtgtacaacaaggggttgtgagtgtggtcagcggcctggggacggagcactgtgcagccggggagctgaggggcagggccgtagactcacggctgcacctgcagggagcagcacgccaaccccagcagtcctgggccccctgggagagtgctcaacctacagtggagggagactgacccattcacattttaacataggcaagaggagttctaacacatttcgtacaaaaaaataatcaagtgcatttctgggccttatgtggggttgtcaaaactccactcagcacaattatgtgtgaagctg

SEQ ID NO: 18848 - DNA, 895 bp, Homo sapiens
  source 1..895: mol_type = unassigned DNA
gtgggccttaatgtcctggttcagaaagccaacaagttcaccccagccacccgccttctcatccagaggtttgtgccgttccctgctgtagccagtgccaatatctgcaatgtggtcctgatgcggtacggggagctggaggaagggattgatgtcctggacagcgatggcaacctcgtgggctcctccaagatcgcagcccgacacgccctgctggagacggcgctgacgcgagtggtcctgcccatgcccatcctggtgctacccccgatcgtcatgtccatgctggagaagacggctctcctgcaggcacgcccccggctgctcctccctgtgcaaagcctcgtgtgcctggcagccttcggcctggccctgccgctggccatcagcctcttcccgcaaatgtcagaggaggaagaaaaaccatcaagaaggggaagaagcagccaagggcacagggagaacccagatggagtaacttcatggaagctgaggacttgggcgattcaaagaggaggggctgtctccagagtggattgaaacatcccaattagagccggagatagcccaggccacgagcagccggacagtggtgtacaacaaggggttgtgagtgtggtcagcggcctggggacggagcactgtgcagccggggagctgaggggcagggccgtagactcacggctgcacctgcagggagcagcacgccaaccccagcagtcctgggccccctgggagagtgctcaacctacagtggagggagactgacccattcacattttaacataggcaagaggagttctaacacatttcgtacaaaaaaataatcaagtgcatttctgggccttatgtggggttgtcaaaactccactcagcacaattatgtgtgaagctg

SEQ ID NO: 18849 - DNA, 915 bp, Homo sapiens
  source 1..915: mol_type = unassigned DNA
ggcggctagtgccgctagcgcctcgagcgatgcacctcctttccaactgggcaaaccccgcttccagcagacgtccttctatggccgcttcaggcacttcttggatatcatcgaccctcgcacactctttgtcactgagagacgtctcagagaggctgtgcagctgctggaggactataagcatgggaccctgcgcccgggggtcaccaatgaacagctctggagtgcacagaaaatcaagcaggctattctacatccggacaccaatgagaagatcttcatgccatttagaatgtcaggttatattccttttgggacgccaattgtagtcggtcttctcttgcccaaccagacactggcatccactgtcttctggcagtggctgaaccagagccacaatgcctgtgtcaactatgcaaaccgcaatgcgaccaagccttcacctgcatccaagttcatccagggatacctgggagctgtcatcagcgccgtctccattgctgtgggccttaatgtcctggttcagaaagccaacaagttcaccccagccacccgccttctcatccagaggtttgtgccgttccctgctgtaggccctgctggagacggcgctgacgcgagtggtcctgcccatgcccatcctggtgctacccccgatcgtcatgtccatgctggagaaattgaaacatcccaattagagccggagatagcccaggccacgagcagccggacagtggtgtacaacaaggggttgtgagtgtggtcagcggcctggggacggagcactgtgcagccggggagctgaggggcagggccgtagactcacggctgcacctgcagggagcagcacgccaaccccagcagtcctgggccccctgggagagtgctcaacctacagtggagggagactgaccc

SEQ ID NO: 18850 - DNA, 840 bp, Homo sapiens
  source 1..840: mol_type = unassigned DNA
attgcgggcgtcagtggccatggcggatacagcgactacagcatcggcggcggcggctagtgccgctagcgcctcgagcgatgcacctcctttccaactgggcaaaccccgcttccagcagacgtccttctatggccgcttcaggcacttcttggatatcatcgaccctcgcacactctttgtcactgagagacgtctcagagaggctgtgcagctgctggaggactataagcatgggaccctgcgcccgggggtcaccaatgaacagctctggagtgcacagaaaatcaagcaggctattctacatccggacaccaatgagaagatcttcatgccatttagaatgtcaggttatattccttttgggacgccaattgtagtcggtcttctcttgcccaaccagacactggcatccactgtcttctggcagtggctgaaccagagccacaatgcctgtgtcaactatgcaaaccgcaatgcgaccaagccttcacctgcatccaagttcatccagggatacctgggagctgtcatcagcgccgtctccattgctgtgggccttaatgtcctggttcagaaagccaacaagttcaccccagccacccgccttctcatccagaggtttgtgccgttccctgctgtaggacggctctcctgcaggcacgcccccggctgctcctccctgtgcaaagcctcgtgtgcctggcagccttcggcctggccctgccgctggccatcagcctcttcccgcaaatgtcagagattgaaacatcccaattagagccggagatagcccaggccacgagcagccggacagtggtgtacaacaaggggttgtga

SEQ ID NO: 18851 - DNA, 546 bp, Homo sapiens
  source 1..546: mol_type = unassigned DNA
agaatggagagagccaggggcaggcagggtgggtgttccagagagagggcaccgtacaagcagaggtgcacaggagagcatgaccaactccgggctcagaacaggagggcggccaccgggtgggccttaatgtcctggttcagaaagccaacaagttcaccccagccacccgccttctcatccagaggtttgtgccgttccctgctgtagccagtgccaatatctgcaatgtggtcctgatgcggtacggggagctggaggaagggattgatgtcctggacagcgatggcaacctcgtgggctcctccaagatcgcagcccgacacgccctgctggagacggcgctgacgcgagtggtcctgcccatgcccatcctggtgctacccccgatcgtcatgtccatgctggagaaaatgtcatctccatgaggcacgtccatccttttgttcactgccctgcccagcatctagcacagttcctgccacacaatagatgctcagacggctctcctgcaggcacgcccccggctgctcctccctgtgcaaa

SEQ ID NO: 18852 - DNA, 575 bp, Homo sapiens
  source 1..575: mol_type = unassigned DNA
agcctggctgcgcttcaccccagctccctactgcgccactggggatgccacggatttaagaagctctggcacttagaggttatattccttttgggacgccaattgtagtcggtcttctcttgcccaaccagacactggcatccactgtcttctggcagtggctgaaccagagccacaatgcctgtgtcaactatgcaaaccgcaatgcgaccaagccttcacctgcatccaagttcatccagggatacctgggagctgtcatcagcgccgtctccattgctgtgggccttaatgtcctggttcagaaagccaacaagttcaccccagccacccgccttctcatccagaggtttgtgccgttccctgctgtagccagtgccaatatctgcaatgtggtcctgatgcggtacggggagctggaggaagggattgatgtcctggacagcgatggcaacctcgtgggctcctccaagatcgcagcccgacacgccctgctggagacggcgctgacgcgagtggtcctgcccatgcccatcctggtgctacccccgatcgtcatgtccatgctggagaag

SEQ ID NO: 18853 - DNA, 895 bp, Homo sapiens
  source 1..895: mol_type = unassigned DNA
ggagattgcgggcgtcagtggccatggcggatacagcgactacagcatcggcggcggcggctagtgccgctagcgcctcgagcgatgcacctcctttccaactgggcaaaccccgcttccagcagacgtccttctatggccgcttcaggcacttcttggatatcatcgaccctcgcacactctttgtcactgagagacgtctcagagaggctgtgcagctgctggaggactataagcatgggaccctgcgcccgggggtcaccaatgaacagctctggagtgcacagaaaatcaagcaggctattctacatccggacaccaatgagaagatcttcatgccatttagaatgtcaggttatattccttttgggacgccaattgtagtcggtcttctcttgcccaaccagacactggcatccactgtcttctggcagtggctgaaccagagccacaatgcctgtgtcaactatgcaaaccgcaatgcgaccaagccttcacctgcatccaagttcatccagggatacctgggagctgtcatcagcgccgtctccattgctgtgggccttaatgtcctggttcagaaagccaacaagttcaccccagccacccgccttctcatccagaggtttgtgccgttccctgctgtagatgcctgcagcaacccctgacccctagatcacaatcactgaaaatgccctcaaacatggccaaatgccccacagaaccgcccctggcagagagcggctgtttagggcaggtgagcatgcctgttgtggggcaggagagcccgggacacagagggactgcccatggtttccactgcactgagcgtcggtggaagcaggagagatgctcgaagatggtgtgtgtgctctaaatacattttagaactgta

SEQ ID NO: 18854 - DNA, 532 bp, Homo sapiens
  source 1..532: mol_type = unassigned DNA
accaacctcccagctttcaccacctctcaagtacccgggcccttctgctgagcctcacggtccaggggcgtgtgaagagtttaaacagggagactctcctcccatttcccagagacgtctcagagaggctgtgcagctgctggaggactataagcatgggaccctgcgcccgggggtcaccaatgaacagctctggagtgcacagaaaatcaagcaggctattctacatccggacaccaatgagaagatcttcatgccatttagaatgtcaggttatattccttttgggacgccaattgtagtcggtcttctcttgcccaaccagacactggcatccactgtcttctggcagtggctgaaccagagccacaatgcctgtgtcaactatgcaaaccgcaatgcgaccaagccttcacctgcatccaagttcatccagggatacctgggagctgtcatcagcgccgtctccattgctgtgggccttaatgtcctggttcagaaagccaacaagttcaccccagccacccgcctt

SEQ ID NO: 18855 - DNA, 2975 bp, Homo sapiens
  source 1..2975: mol_type = unassigned DNA
ggccatggcggatacagcgactacagcatcggcggcggcggctagtgccgctagcgcctcgagcgatgcacctcctttccaactgggcaaaccccgcttccagcagacgtccttctatggccgcttcaggcacttcttggatatcatcgaccctcgcacactctttgtcactgagatggagtcttgcactgtcccccaggctcactgcaacccctgcctcctgggttcagagacgtctcagagaggctgtgcagctgctggaggactataagcatgggaccctgcgcccgggggtcaccaatgaacagctctggagtgcacagaaaatcaagcaggttatattccttttgggacgccaattgtagtcggtcttctcttgcccaaccagacactggcatccactgtcttctggcagtggctgaaccagagccacaatgcctgtgtcaactatgcaaaccgcaatgcgaccaagccttcacctgcatccaagttcatccagggatacctgggagctgtcatcagcgccgtctccattgctgtgagtactccctcccctgctccttcttggctctgctgctctggggccaccccgctcagcattgcaggtggatgcttgtctgagggccaggccaggcaaggatttgggagacaggtttctgtgggtggaggagtcaggacaggctttccaagccgagaagaggctccagtagacagagcacaacctggtgctccctgtaatggagagcaggtggggaggtgaggttgtgcctgggggcactgaggcaggacatctgtcttgagtggggctgcggttgcccagcactctgctcggaagagctgctcctcatgctcggtaacgtggctggagcgagcggggtggggggatgcctctgaatgactctgcaaggcctgcccatgtgcctgctcccctgagctcttgctcagctgccggggcactgcttttccctctctatggccttactggtgtcacacgtccagctcttcctgaagacctgtcagtgcccgaagccaggggcgttaggctcactctgagtctccacagtactttgaggccagagcagctactcagtaggggaggttcagagactgagcgtgagggtacggcaggtgtggctccctgcttcccagaggaggccaggggcaagtgacacagtcagggccctgggccagagccagagtggacgctcaagctgccaggaccttctgcatgcttgtcccacccctgagcccgcccctgtacctacgtctggctgtctctggatccccactaggatggccttctatagccgactccagagggcgaagggccccttcacaactctgtcatttcatccattacacaatacattaatgtaactggtaagaaaaaaaaaattagaaaatgaaaaccaaacaacattcacatagctgagcacagtggggcacacctgtagtcccagctactcaggaggctgaggtaggaggatcattgagcccaggtgttggagtctgtagtgtgctatgattgcagctgtgaacagccactgcactccaacctgggcaacatagcaagaccccatttaaaaaaacaaaaggccgggtgcagtggctcacgcctgtaatcccaacactttggaaggccaaggcgggaagatcacctgagatcaggagttcaagaccagcctggccaacatggtgaaacccctgtctctactaaaaaaaatacaaaaattagtctgcatggtggtgggcacctgtaatcctagctccttgggaggctgaggcaggagaatcgcttgaacctgggaggcagaagttgcagtgagccgagatcacgccactgcactccagcctgggcgacagagtgagactccatctccagaaaaaaaaaaaataaataaataataaaaaatttaagaaattaaaaaaccccaaaaccattcagctgggcaagctggtgtgcccctgtaatcccagctactcaggaggctgagttgggaggattgcttatggccatgttgggcagcatagcaagatcttatctctaatgaaaaagaaaacattcacatataatgaagaattcacatacaataaccttttggtaaaaccccctttgctcatctttccagtgccattaagtaaatactgtataataactgttcacggctgtataattacccattgtaccatacgccacaatttaattcaccattcttctaaaggagggacttggggttgtcctgaaatggcctcatttatttcactcccacatagaccaagtcatctccaaatagctgtgaagtgggatgtcccatttcatgcccaagatctctttcccaaatccttatgtcttcacaaaagcaagaagtgagacattcaggtggctcaccaagagactgctgacctgccacccagcttgtcctgcagcccagcaggagacttcatttgggagtcagacaaattgggggtccctgatactggggacttggtgggtgaaggccaaaggctcccctgagtgggagaaagaactcttgtcacctcctccttgttccttgtgatgagaggagctgatggtctgcttagcttagcagctcaaaaatccccttcctttttttgagactcaggggcaaggtgagaggaggaggctacatagggaaggatgctgagtggccttgaatggaaaggcctgagtgaaggggatcattgtcctggtggacttccttcacctgcaggcctggggctcagagaacaagaatcagcttctcagcctgagtaacatagcaaaaccccatctctacaaaaaatacaaaaaaaattaggtgtggtggtgcacacctgtagtcccagctacctgggaggctgaggtgggagaatcatttgagcctggaaggtcgaggctgcagtgagccacgattgtgcccctgcactccagactgggcgacagagcaaaaccctgtctcaaaaaaaaaaaaaaa

SEQ ID NO: 18856 - DNA, 489 bp, Homo sapiens
  source 1..489: mol_type = unassigned DNA
gattgcgggcgtcagtggccatggcggatacagcgactacagcatcggcggcggcggctagtgccgctagcgcctcgagcgatgcacctcctttccaactgggcaaaccccgcttccagcagacgtccttctatggccgcttcaggcacttcttggatatcatcgaccctcgcacactctttgtcactgagagacgtctcagagaggctgtgcagctgctggaggactataagcatgggaccctgcgcccgggggtcaccaatgaacagctctggagtgcacagaaaatcaagcaggttatattccttttgggacgccaatttcggtcttctcttgcccaaccagacactggcatccactgtcttctgtggctgaaccagagccacaatgcctgtgtcaactatgcaaaccgcaatgcgaccaagccttcacctgcatccaagttcatccagggatacctgggagctgtcatcagcgccgtctccattg

SEQ ID NO: 18857 - DNA, 507 bp, Homo sapiens
  source 1..507: mol_type = unassigned DNA
ctctggggcaaggttgggggagctgccccttgtcctgcacttcagcagctacagggctgtgggtgaaggagggcctgaggattacgtccttctatggccgcttcaggcacttcttggatatcatcgaccctcgcacactctttgtcactgagagacgtctcagagaggctgtgcagctgctggaggactataagcatgggaccctgcgcccgggggtcaccaatgaacagctctggagtgcacagaaaatcaagcaggctattctacatccggacaccaatgagaagatcttcatgccatttagaatgtcaggttatattccttttgggacgccaattgtagtcggtcttctcttgcccaaccagacactggcatccactgtcttctggcagtggctgaaccagagccacaatgcctgtgtcaactatgcaaaccgcaatgcgaccaagccttcacctgcatccaagttcatccagggatacctgggagctgtcatcagcgccgtct

SEQ ID NO: 18858 - DNA, 598 bp, Homo sapiens
  source 1..598: mol_type = unassigned DNA
ttggccaccggcggctgcggtcaaggtcccgagcgcccggcttcgagcggctgctcagggtcgctccgggttgtgcagctgcccgcccgggacgcaaagttctagtctggccctggatgggaagttggcgtggccgggatgccttctaactttttcccccggtggggactgacgttcctttcgagctgctggcggtgccgccgggcagcgtcgcgccccgcggtcactccccagccctggcccccaagccgggctcggcgcgcgcagcaggttgagggggcgagtgccgagacgtccttctatggccgcttcaggcacttcttggatatcatcgaccctcgcacactctttgtcactgagagacgtctcagagaggctgtgcagctgctggaggactataagcatgggaccctgcgcccgggggtcaccaatgaacagctctggagtgcacagaaaatcaagcaggctattctacatccggacaccaatgagaagatcttcatgccatttagaatgtcaggttatattccttttgggacgccaattgtagtcggtcttctcttgcccaaccagacactggcatccactgtcttctggc

SEQ ID NO: 18859 - DNA, 1808 bp, Homo sapiens
  source 1..1808: mol_type = unassigned DNA
ttcgagcggctgctcagggtcgctccgggttgtgcagctgcccgcccgggacgcaaagttctagtctggccctggatgggaagttggcgtggccgggatgccttctaactttttcccccggtggggactgacgttcctttcgagctgctggcggtgccgccgggcagcgtcgcgccccgcggtcactccccagccctggcccccaagccgggctcggcgcgcgcagcaggttgagggggcgagtgccgaggcgagcggcggtccggcgtcccccgtccctgctctccatctcgggctgaggattcgctgacgcagcaagccggccgatgccctgaggggacgcagccagggcgtgcgggggaaacgctgtgtcatcccctggggccgtcgtccctccgaggggctgccgcctgggaacccccccccagcctcttcctcgctgtgttctccgcggagggtctcccgcgcccgggcccccgcgccgccggggactggctctgggcacacccgctcaggctcttcggggcacggcgacaggggtcctttccctccgggacctcctctggggcgtcgccgactcggccctagactgcggaggcgggggtggaacgcggagcccgggcgcctggttgggcccggagaccggagccggggaggggccgctcccgcgccgcagaccctcgggctcccgcgcctcccgcaccaatgagacggaatttattaggaaacaggcagagagaccgctgaagtgaaccggggcttgccaggggtgggcggcagccgaggcggccagaaaagaactttgaaggaagaaaggaaattgtgctaagagacgtctcagagaggctgtgcagctgctggaggactataagcatgggaccctgcgcccgggggtcaccaatgaacagctctggagtgcacagaaaatcaagcaggctattctacatccggacaccaatgagaagatcttcatgccatttagaatgtcaggttatattccttttgggacgccaattgtaagtgttaccttcaaaggatttccttttctaaaaaattattttaaatgtctaactttatgttattgctcacgggtatttgactgaattgttgatttaggataagtcaattcctggagggaaattaccaaataaaatgatatgtatttcttaccacatctcttgatgctgattggcaaacctcttttcataaaaagcctgatgacttaaatccagcgttgagttgaaaattgccttcttccctgcacgttttctgtccccactgttgtcattagcacctgctagtcatagggaagttttctcaaagaacttgggaagtaggagtagaagcatgccttctgaaaaatcaaagtttaaaattaattcagaaagaattttcagcattctttttgttcagttttagaatcaggattatgtttactccttatttttattggaataaaacatacagaaaggtgcattcatcataaatgtacagcttggtaaattttcaaaaagcaagcatatccagggctgggcgcggtggctcacgcctgtaatcccagcactttgggaggccaaggcaggcagatcatgaggtcagaagatcgagaccatcctggccaacacagtgaaaccccgtctctactaaaaatacaaaaaattagctgagagtggtggcgggcacctgtagtcccagctactcggaaggctgaggcaggagaatgacatgaacccgggaggcggagctttcagtgagccgagatcgcgccagtgcactccaggctgggcaacagagcgagactcggtctc

SEQ ID NO: 18860 - DNA, 447 bp, Homo sapiens
  source 1..447: mol_type = unassigned DNA
catgtgcaggagctggagagctacatcgaccggctgctgacgtccttctatggccgcttcaggcacttcttggatatcatcgaccctcgcacactctttgtcactgagagacgtctcagagaggctgtgcagctgctggaggactataagcatgggaccctgcgcccgggggtcaccaatgaacagctctggagtgcacagaaaatcaagcaggctattctacatccggacaccaatgagaagatcttcatgccatttagaatgtcaggttatattccttttgggacgccaattgtaagtgttaccttcaaaggatttccttttctaaaaaattattttaaatgtctaactttatgttattgctcacgggtatttgactgaattgttgatttaggataagtcaattcctggagggaaattaccaaataaaatgatatgtatttctta

SEQ ID NO: 18861 - DNA, 422 bp, Homo sapiens
  source 1..422: mol_type = unassigned DNA
aggaaacaggcagagagaccgctgaagtgaaccggggcttgccaggggtgggcggcagccgaggcggccagaaaagaactttgaaggaagaaaggaaattgtgctaagacgtccttctatggccgcttcaggcacttcttggatatcatcgaccctcgcacactctttgtcactgaggctggagtgcagtggcgtgatctcagctcactgcaacctctacctcccaggttcaagcgattttcctgcctcagcctcctgagtagctgggattacagagacgtctcagagaggctgtgcagctgctggaggactataagcatgggaccctgcgcccgggggtcaccaatgaacagctctggagtgcacagaaaatcaagcaggctattctacatccggacaccaatgagaagatcttcatgcca

SEQ ID NO: 18862 - DNA, 1690 bp, Homo sapiens
  source 1..1690: mol_type = unassigned DNA
tccgggttgtgcagctgcccgcccgggacgcaaagttctagtctggccctggatgggaagttggcgtggccgggatgccttctaactttttcccccggtggggactgacgttcctttcgagctgctggcggtgccgccgggcagcgtcgcgccccgcggtcactccccagccctggcccccaagccgggctcggcgcgcgcagcaggttgagggggcgagtgccgaggcgagcggcggtccggcgtcccccgtccctgctctccatctcgggctgaggattcgctgacgcagcaagccggccgatgccctgaggggacgcagccagggcgtgcgggggaaacgctgtgtcatcccctggggccgtcgtccctccgaggggctgccgcctgggaacccccccccagcctcttcctcgctgtgttctccgcggagggtctcccgcgcccgggcccccgcgccgccggggactggctctgggcacacccgctcaggctcttcggggcacggcgacaggggtcctttccctccgggacctcctctggggcgtcgccgactcggccctagactgcggaggcgggggtggaacgcggagcccgggcgcctggttgggcccggagaccggagccggggaggggccgctcccgcgccgcagaccctcgggctcccgcgcctcccgcaccaatgagacggaatttattaggaaacaggcagagagaccgctgaagtgaaccggggcttgccaggggtgggcggcagccgaggcggccagaaaagaactttgaaggaagaaaggaaattgtgctaagacgtccttctatggccgcttcaggcacttcttggatatcatcgaccctcgcacactctttgtcactgaggctcacagctggaggaaaatttgcctcaggatgaatcacacctttgggtctcatccatacctaatttagaggattctggatgagactctgacttcagacttttgagttgctgctggaatgactgacttttggggctactgagatggaatgaatatttgtgagaaggacataaattttggggggccagggtgagatgctatggctgaaatgtgtcccatacaaaattcaggtgttgaaacttaatggcaaatgtgatagtattaagaggtgggatctttaagaggcaattaggccatgagggtccctccctcatgaatggaattaaggcccttgtaaaagaggcctggccgggtatggtggctcacggctgtaatcccagcactttgggaggctaaggctcaagaatcacttgagcccaggagtttgagaccagcctgggcaacatggccagaccccaactcttaaaaaaatttttcaaaaattagctgggtgtcgtggcatgcacctatagtcccagctactcgaatcggttgagcctgggaggtcgaggttgcagtgaactgtgatcacgccactgcactccagtctgggtgacagagcaagacactatctcaaaaaataaaagaggtttcacacagggtttggccctcttgccgttctgttctgttgagtacacagccttccttccctcagaaagatgccctcaccagataccaaatgctggttcttgatcttggacttccagcttccagaactgtgagaaataaatttctgttctttataaattatctagtctgtggcattctgttatagc

SEQ ID NO: 18863 - DNA, 351 bp, Homo sapiens
  source 1..351: mol_type = unassigned DNA
ccgctagcgcctcgagcgatgcacctcctttccaactgggcaaaccccgcttccagcagacgtccttctatggccgcttcaggcacttcttggatatcatcgaccctcgcacactctttgtcactgaggaagaaggctgtctttgttctaagaatgccttgaacaaagcttcagaggaggaggttgccctgcttgacagaggagaagaatggtgcattttgatcctaaatggagaaaggagagggaaggaagaggaggaaaaaaacagcgggaaggagagcatgatactgagatgagctgaaagaccaataaagaaatgccacaatgaggtgtggctgggggctcttttga

SEQ ID NO: 18864 - DNA, 671 bp, Homo sapiens
  source 1..671: mol_type = unassigned DNA
ggagctgccccttgtcctgcacttcagcagctacagggctgtgggtgaaggagggcctgaggattgtgagctcagtgcttttaggcttgagctgcccttggggatcccccctggaggcagagctggaccttggggagggaccctgtggcggacgtccttctatggccgcttcaggcacttcttggatatcatcgaccctcgcacactctttgtcactgaggtaagtcatggctgtcacctcagtggcccttgggcctttgtaccttgtcatttcagaatatgtgggtcattaagggagggtgaggatgggggagtgaagagaataggggaggtgagaggtgagaggaaggtaacaaattctctctacctgtagctgtctgtttatgtatctgtgtgtctgtctgtatctgagttgatacattgtgctgtatgctttttacattatatcatttggatctcacaacaaccctttaagatagatattattgttattctttaaaactttcaagaaattattatcaagtacataagttatttgctcattagaaaagttcaaacagtacaaatatgtttaagtagaaaaaagtatcctttaatcgtcctccctacttagttccctcctcttataggtaacagctgttaatggcttttaacatcaggttattaaggta

SEQ ID NO: 18865 - DNA, 734 bp, Homo sapiens
  source 1..734: mol_type = unassigned DNA
tctctgagaagacagagagatggccaggtgatgctgggacaaatactgccttgcctgaggggacgctgactctggaatttggtggctctccagggatgagcgggtcacagcctacaatcgggacagctttgataccactcggcagaggctggtgctggagattggggacccagaaggccccctgctgccataccaagccgagttcctggtgcgcagccacgatgcggaggaggtgctgccctcaacacctgccagccgcttcctctcagccttggggggactctgggagcccggagagcttcagctgctcaacgtcacctctgccttggaccgtgggggccgtgtcccccttcccattgagggccgaaaagaagggctgaagagagacctggctacctccgacatccagatggtccaccactgcaccatccacgggaacacagaggagctgcggcagatggcggccagccgcgaggtgccccggccactctccaccctgcccatgttcaatgtgcacacaggtgagcggctgcctccccgcgtggacagcgcccaggtgcccctcattctggaccagcactgacagcctagccagtggttccaggtccagccctgacttcatcctcccttctctgtccacaccacgagtggcacatcccacctgctgattccagctcctggccctcctggaacccaggctctaaacaagcagggagagggggtggggtggggtg

SEQ ID NO: 18866 - DNA, 542 bp, Homo sapiens
  source 1..542: mol_type = unassigned DNA
ctctcctccctgccccctgtctctgtcactcaccgggcgggccaggccgggcagccatggctgagacactcttctggactcctctcctcgtgggcaagttggggccttgttcagcggggaggcccaggatgagggggcaggatttaggggtgttctcctggcagggctgggggacaccgaggcccagcagaccacgctacacccacttgtgggccgtgtctttgtgcacaccttggaccatgagacgtttctgagccttcctgagcatgtcggtcacagcctacaatcgggacagctttgataccactcggcagaggctggtgctggagattggggacccagaaggccccctgctgccataccaagccgagttcctggtgcgcagccacgatgcggaggaggtgctgccctcaacacctgccagccgcttcctctcagccttggggggactctgggagcccggagagcttcagctgctcaacgtcacctctgccttggaccgtgggggccgtgtcccccttcccattgagggccgaaaagaa

SEQ ID NO: 18867 - DNA, 1090 bp, Homo sapiens
  source 1..1090: mol_type = unassigned DNA
tctctgtcactcaccgggcgggccaggccgggcagccatggctgagacactcttctggactcctctcctcgtggttctcctggcagggctgggggacaccgaggcccagcagaccacgctacacccacttgtgggccgtgtctttgtgcacaccttggaccatgagacgtttctgagccttcctgagcatgtcgctgtcccacccgctgtccacatcacctaccacgcccacctccagggacacccagacctgccccggtggctccgctacacccagcgcagcccccaccaccctggcttcctctacggctctgccaccccagaagatcgtgggctccaggtcattgaggtcacagcctacaatcgggacagctttgataccactcggcagaggctggtgctggagattggggacccagaaggccccctgctgccataccaagccgagttcctggtgcgcagccacgatgcggaggaggtgctgccctcaacacctgccagccgcttcctctcagccttggggggactctgggagcccggagagcttcagctgctcaacgtcacctctgccttggaccgtgggggccgtgtcccccttcccattgagggccgaaaagaaggggtatacattaaggtgggttctgcctcacctttttctacttgcctgaagatggtggcatcccccgatagccacgcccgctgtgcccagggccagcctccacttctgtcttgctacgacaccttggcaccccacttccgcgttgactggtgcaatgtgaccctggctgaagagagacctggctacctccgacatccagatggtccaccactgcaccatccacgggaacacagaggagctgcggcagatggcggccagccgcgaggtgccccggccactctccaccctgcccatgttcaatgtgcacacaggtgagcggctgcctccccgcgtggacagcgcccaggtgcccctcattctggaccagcactgacagcctagccagtggttccaggtccagccctgacttcatcctcccttctctgtccacaccacgagtggcacatcccacctgctgattccagctcctgg

SEQ ID NO: 18868 - DNA, 1057 bp, Homo sapiens
  source 1..1057: mol_type = unassigned DNA
ctctgtcactcaccgggcgggccaggccgggcagccatggctgagacactcttctggactcctctcctcgtggttctcctggcagggctgggggacaccgaggcccagcagaccacgctacacccacttgtgggccgtgtctttgtgcacaccttggaccatgagacgtttctgagccttcctgagcatgtcgctgtcccacccgctgtccacatcacctaccacgcccacctccagggacacccagacctgccccggtggctccgctacacccagcgcagcccccaccaccctggcttcctctacggctctgccaccccagaagatcgtgggctccaggtcattgaggtcacagcctacaatcgggacagctttgataccactcggcagaggctggtgctggagattggggacccagaaggccccctgctgccataccaagccgagttcctggtgcgcagccacgatgcggaggaggtgctgccctcaacacctgccagccgcttcctctcagccttggggggactctgggagcccggagagcttcagctgctcaacgtcacctctgccttggaccgtgggggccgtgtcccccttcccattgagggccgaaaagaagggctgaagagagacctggctacctccgacatccagatggtccaccactgcaccatccacgggaacacagaggagctgcggcagatggcggccagccgcgaggtgccccggccactctccaccctgcccatgttcaatgtgcacacaggtgagcggctgcctccccgcgtggacagcgcccaggtgcccctcattctggaccagcactgacagcctagccagtggttccaggtccagccctgacttcatcctcccttctctgtccacaccacgagtggcacatcccacctgctgattccagctcctggccctcctggaacccaggctctaaacaagcagggagagggggtggggtggggtgagagtgtgtggagtaaggacattcagaataaatatctgctgctctgctcaccaattgctgctggcagcctctcccgtc

SEQ ID NO: 18869 - DNA, 1432 bp, Homo sapiens
  source 1..1432: mol_type = unassigned DNA
ctctgtcactcaccgggcgggccaggccgggcagccatggctgagacactcttctggactcctctcctcgtggttctcctggcagggctgggggacaccgaggcccagcagaccacgctacacccacttgtgggccgtgtctttgtgcacaccttggaccatgagacgtttctgagccttcctgagcatgtcgctgtcccacccgctgtccacatcacctaccacgcccacctccagggacacccagacctgccccggtggctccgctacacccagcgcagcccccaccaccctggcttcctctacggctctgccaccccagaagatcgtgggctccaggtcattgaggtcacagcctacaatcgggacagctttgataccactcggcagaggctggtgctggagattggggacccagaaggccccctgctgccataccaagccgagttcctggtgcgcagccacgatgcggaggaggtgctgccctcaacacctgccagccgcttcctctcagccttggggggactctgggagcccggagagcttcagctgctcaacgtcacctctgccttggaccgtgggggccgtgtcccccttcccattgagggccgaaaagaaggggtatacattaaggtgggttctgcctcacctttttctacttgcctgaagatggtggcatcccccgatagccacgcccgctgtgcccagggccagcctccacttctgtcttgctacgacaccttggcaccccacttccgcgttgactggtgcaatgtgaccctggtggataagtcagtgccggagcctgcagatgaggtgcccaccccaggtgatgggatcctggagcatgacccgttcttctgcccacccactgaggccccagaccgtgacttcttggtggatgctctggtcaccctcctggtgcccctgctggtggccctgcttctcaccttgctgctggcctatgtcatgtgctgccggcgggagggaaggctgaagagagacctggctacctccgacatccagatggtccaccactgcaccatccacgggaacacagaggagctgcggcagatggcggccagccgcgaggtgccccggccactctccaccctgcccatgttcaatgtgcacacaggtgagcggctgcctccccgcgtggacagcgcccaggtgcccctcattctggaccagcactgacagcctagccagtggttccaggtccagccctgacttcatcctcccttctctgtccacaccacgagtggcacatcccacctgctgattccagctcctggccctcctggaacccaggctctaaacaagcagggagagggggtggggtggggtgagagtgtgtggagtaaggacattcagaataaatatctgctgctctgctcaccaattgctgctggcagcctctcccgtcctc

SEQ ID NO: 18870 - DNA, 1349 bp, Homo sapiens
  source 1..1349: mol_type = unassigned DNA
gtcactcaccgggcgggccaggccgggcagccatggctgagacactcttctggactcctctcctcgtggttctcctggcagggctgggggacaccgaggcccagcagaccacgctacacccacttgtgggccgtgtctttgtgcacaccttggaccatgagacgtttctgagccttcctgagcatgtcggtcacagcctacaatcgggacagctttgataccactcggcagaggctggtgctggagattggggacccagaaggccccctgctgccataccaagccgagttcctggtgcgcagccacgatgcggaggaggtgctgccctcaacacctgccagccgcttcctctcagccttggggggactctgggagcccggagagcttcagctgctcaacgtcacctctgccttggaccgtgggggccgtgtcccccttcccattgagggccgaaaagaaggggtatacattaaggtgggttctgcctcacctttttctacttgcctgaagatggtggcatcccccgatagccacgcccgctgtgcccagggccagcctccacttctgtcttgctacgacaccttggcaccccacttccgcgttgactggtgcaatgtgaccctggtgaggagggaccctgggtccgggggtggggtggggcatggcccccatcccagtcccccttccctcccatgctgcttcctatctccgtctctctgattgctccagtcaccatttctttccctgatgctctcagtattgcccacaggcttagtctgaggatacacacacacacacacacacacacacacacacccctgaagttctacctttcccccacaagagggcaacagagtccgcaatccgcatgtggggtctccaactcccgcgccccagatctgcccaggtcaacagctatatcacagtccagttcccaaaccctttccctaccaagggcctctgcgtgacagctctgtctgcttttctgtaaggtgccacctagcaaacccacttacaacaaggatctgatagctcttcacactataaaccaaagatgctcacaacagctctttggatactgagctgaggttcacaggatcccacggctggtgtacactgttcctgtgaattgaccaacagagcagggactcattcagggtccacagccagcgactggtaattgacaacattcttgagcacttgctatgtgcttggcactgtcccatcaacatattttatgctcaccaccactccaggagacaggtgctactattatccttctgacattacaggtgatgaaacagaggcacataatcatcctagctaagcacttgtctgagtctggattc

SEQ ID NO: 18871 - DNA, 668 bp, Homo sapiens
  source 1..668: mol_type = unassigned DNA
ctgagacactcttctggactcctctcctcgtgggtcacagcctacaatcgggacagctttgataccactcggcagaggctggtgctggagattggggacccagaaggccccctgctgccataccaagccgagttcctggtgcgcagccacgatgcggaggaggtgctgccctcaacacctgccagccgcttcctctcagccttggggggactctgggagcccggagagcttcagctgctcaacgtcacctctgccttggaccgtgggggccgtgtcccccttcccattgagggccgaaaagaagggctgaagagagacctggctacctccgacatccagatggtccaccactgcaccatccacgggaacacagaggagctgcggcagatggcggccagccgcgaggtgccccggccactctccaccctgcccatgttcaatgtgcacacagtggttccaggtccagccctgacttcatcctcccttctctgtccacaccacgagtggcacatcccacctgctgattccagctcctggccctcctggaacccaggctctaaacaagcagggagagggggtggggtggggtgagagtgtgtggagtaaggacattcagaataaatatctgctgctctgctcaccaattgctgctggcagcctctcccgtc

SEQ ID NO: 18872 - DNA, 577 bp, Homo sapiens
  source 1..577: mol_type = unassigned DNA
gctgtcccacccgctgtccacatcacctaccacgcccacctccagggacacccagacctgccccggtggctccgctacacccagcgcagcccccaccaccctggcttcctctacggctctgccaccccagaagatcgtgggctccaggtcacagcctacaatcgggacagctttgataccactcggcagaggctggtgctggagattggggacccagaaggccccctgctgccataccaagccgagttcctggtgcgcagccacgatgcggaggaggtgctgccctcaacacctgccagccgcttcctctcagccttggggggactctgggagcccggagagcttcagctgctcaacgtcacctctgccttggaccgtgggggccgtgtcccccttcccattgagggccgaaaagaagggctgaagagagacctggctacctccgacatccagatggtccaccactgcaccatccacgggaacacagaggagctgcggcagatggcggccagccgcgaggtgccccggccactctccaccctgcccatgttcaatgtgcacacaggtgagcggctgc

SEQ ID NO: 18873 - DNA, 696 bp, Homo sapiens
  source 1..696: mol_type = unassigned DNA
cttggaccgtgggggccgtgtcccccttcccattgagggccgaaaagaaggggtatacattaaggtggataagtcagtgccggagcctgcagatgaggtgcccaccccaggtgatgggatcctggagcatgacccgttcttctgcccacccactgaggccccagaccgtgacttcttggtggatgctctggtcaccctcctggtgcccctgctggtggccctgcttctcaccttgctgctggcctatgtcatgtgctgccggcgggagggaaggctgaagagagacctggctacctccgacatccagatggtccaccactgcaccatccacgggaacacagaggagctgcggcagatggcggccagccgcgaggtgccccggccactctccaccctgcccatgttcaatgtgcacacaggtgagcggctgcctccccgcgtggacagcgcccaggtgcccctcattctggaccagcactgacagcctagccagtggttccaggtccagccctgacttcatcctcccttctctgtccacaccacgagtggcacatcccacctgctgattccagctcctggccctcctggaacccaggctctaaacaagcagggagagggggtggggtggggtgagagtgtgtggagtaaggacattcagaataaatatctgctgctctgctcaccaattgctgctgg

SEQ ID NO: 18874 - DNA, 410 bp, Homo sapiens
  source 1..410: mol_type = unassigned DNA
cttgtgggccagacagcgggcctgcacgcatccagatggtccaccactgcaccatccacgggaacacagaggagctgcggcagatggcggccagccgcgaggtgccccggccactctccaccctgcccatgttcaatgtgcacacaggtgagcggctgcctccccgcgtggacagcgcccaggtgcccctcattctggaccagcactgacagcctagccagtggttccaggtccagccctgacttcatcctcccttctctgtccacaccacgagtggcacatcccacctgctgattccagctcctggccctcctggaacccaggctctaaacaagcagggagagggggtggggtggggtgagagtgtgtggagtaaggacattcagaataaatatctgctgctctgctca

SEQ ID NO: 18875 - DNA, 494 bp, Homo sapiens
  source 1..494: mol_type = unassigned DNA
cgcagggtggctcagaggcagttccaggctgtactccagggcagctgactcccagagctgatgactccccacctgtgcctccagcatccagatggtccaccactgcaccatccacgggaacacagaggagctgcggcagatggcggccagccgcgaggtgccccggccactctccaccctgcccatgttcaatgtgcacacaggtgagcggctgcctccccgcgtggacagcgcccaggtgcccctcattctggaccagcactgacagcctagccagtggttccaggtccagccctgacttcatcctcccttctctgtccacaccacgagtggcacatcccacctgctgattccagctcctggccctcctggaacccaggctctaaacaagcagggagagggggtggggtggggtgagagtgtgtggagtaaggacattcagaataaatatctgctgctctgctcaccaattgctgctggcagcctctcccgtc

SEQ ID NO: 18876 - DNA, 1412 bp, Homo sapiens
  source 1..1412: mol_type = unassigned DNA
gtgatatctattgaagctgggagggtcacagtatcagtgagtggtcccccaatttcttcttgagcatcgatgaattagcagtggtgtaatattgtggatctgacttcatgtgtcactaagaacaggagatccaagactgctcttctggggatgagacttggaagaaacctccatcctcagggatttgaagaaggttatactggaacctgtgtgaaggctgagacaaccgtcccttttgtggtggcctgaggggattttcttaatcccaatgttgccctgaaatttatgtccaggattcaaaaagtttaggactgctaagagacattactgccgggagtgttgagtgaagggaccaggtggagatgatgcctcaggagcagtacactcaccaccggagcaccatgcctggctctgtggggccacaggtatacaaggtggggatttatggctggcggaaacgatgcctgtatttctttgtcctgctcctcatgattttaatactggtgaacttggccatgaccatctggattctcaaagtcatgaacttcacaattgatggaatgggaaacctgaggatcacagaaaaaggtctaaagctagaaggagactctgaattcttacaacctctctacgccaaagaaatccagtcccgaccaggtaatgccctgtacttcaagtctgccagaaatgttacagtgaacattctcaatgaccagactaaagtgctaactcagcttataacaggtccaaaagccgtagaagcttatggtaaaaaatttgaggtaaaaactgtttctggaaaattgctcttctctgcagacaataatgaagtggtagtaggagctgaaagattacgagttttaggagcggagggcacagtgttccctaaatctatagaaacacctaatgtcagggcagaccccttcaaagaactaaggttggagtccccaacccggtctctagtgatggaggccccaaaaggagtggaaatcaatgcagaagctggcaatatggaagccacctgcaggacagagctgagactggaatccaaagatggagaggtgagggatgagaaggacagaagttcaaagagctacagcttcaacaggccaacccttcccataactggttgacctcggagttggatcctacagtgtatcaacaaaaggagccaagcaggttttatttctgaaacaattaattgagcagcatgattataagccaaacccacaatccatcaaagtgatgatttcttatttgtaaaatgcagagataatggcatgtattccaagtacagaattatatgaccatgaaaatgaatgctattttcaaattctctcttgtcaccttaaaataagattttgttagccaacataattaagctgtatatattatacacatctggctcaaga

SEQ ID NO: 18877 - DNA, 9755 bp, Homo sapiens
  source 1..9755: mol_type = unassigned DNA
gagcagaagaaagagaggacttatctccagcatctagcactacagagcagaggctgtgtggagaatggctgaaaaatcagaattggttgtagaagcagttttctttctggttgtgagtatgagcccggcagacaccatgagcgctgttgcaggggagtcggcctgtgcttgacacatgtgtttcccattgatagctggagacagcccagtagctgtgagtcggtctgacaaagccatattgaagtacggagtacggtttcaaagcagtcagaaaaagaacgggaatgctgttcaggaaattcttcaggcatgggcagggacttggctgcagttctgcagttggaaaatctgactggggcagcttctgagcgcaggctgggcctgcacacactcagcgggccgagtggccacctccttcagagctgctcagcacgccctgggatcgcgggcggttttcatcggccggtttgtgaaacggacaagagagatgcctcaggagcagtacactcaccaccggagcaccatgcctggctctgtggggccacaggtatacaaggtggggatttatggctggcggaaacgatgcctgtatttctttgtcctgctcctcatgattttaatactggtgaacttggccatgaccatctggattctcaaagtcatgaacttcacaattgatggaatgggaaacctgaggatcacagaaaaaggtctaaagctagaaggagactctgaattcttacaacctctctacgccaaagaaatccagtcccgaccaggtaatgccctgtacttcaagtctgccagaaatgttacagtgaacattctcaatgaccagactaaagtgctaactcagcttataacaggtccaaaagccgtagaagcttatggtaaaaaatttgaggtaaaaactgtttctggaaaattgctcttctctgcagacaataatgaagtggtagtaggagctgaaagattacgagttttaggagcggagggcacagtgttccctaaatctatagaaacacctaatgtcagggcagaccccttcaaagaactaaggttggagtccccaacccggtctctagtgatggaggccccaaaaggagtggaaatcaatgcagaagctggcaatatggaagccacctgcaggacagagctgagactggaatccaaagatggagagattaagttagatgctgcgaaaatcaggctacctagactgcctcatggatcctacacgcctacaggaacgaggcagaaggtcttcgagatctgcgtctgcgccaatgggagattattcctgtctcaggcaggagctgggtccacttgtcagataaacacaagtgtctgcctctgaaagactatccatagtggacattgttggcagcataaaggccttttttggctttagacactggctgccagctatttttactagaacacagaaagcctatcaaagaccttgtgtgtatgtgtacgtgtgtgtgcgtgcttgagtgtgttcgcgtgtgtgggtggatataaatatatataaatatatataaataaatatatatatcctctgtataaaatgaggtttcagtacaaaaggaaccatgggtgaccctgcgatatccactgtcattttccatcccatccccaccacctgagtgacagaaatctaaacacacatccgtcccaacattccccagaccattcagaatcacacagcgtattaaacactgacagaatcttcatctagatattcgagtagcagcatatcttctcttttagtgtcattacgagggagtgatggcgggaatctcagtcgcactcaagctctgagacctttgtatcaaaaataggcatttgatttcctgttttagctttagtaaggctggctaacttccccctcttcaagctaggaactggcaatgctgtagaagtcagccgtaggaattcaaaatggctggcctaccttggctaccagacatattggggtttttgtagttgaatgaatgaggaggatgaatttcagcaaattttgaactgctcacccaacttctgctatcttgctccctccaaactcacagattctcctacagtcaaattaggagctgtaaatcagcacaaaataagataacagctgttcctcagtgagctggaagctacttaatggcctgatgggcaatgaacaaacgggtgatatgtctctgtttaagggaaaaatggcttaaaagctgttctgttctcacttctgactttaaccaaaagatttcaacccacaatgatcaggtcaatcaaaatccctaagagcagaactcctaccccaaaagaagcctggaagtctaattaagagtagcataaggaacctaattatgtttaccatgtttcttgggattggtgggaaatgtcaaaacatgccctttatttttaaaggcattcacaaactctctgactttgttcttcttatatattttttcagtgccgggatattcatattcctaaagccactattgtgttttctctaagaagcactacatgccaccagaattgtgcactgaaagataatacaaactgagtgtctttatgagaatcactgtgtcccctgaggcccagcagtacctgcttccctgtatgtggaagcagcacctcattcccgccatcagctacctctcatcaccccaccttcatcatcatgctccagggtcaccctggccagctcttgtgctgggacaggggattacaccatctctgttcaaagagggggaaatgtgcctatgccttaagtcaatgcactcagcaaggagaagcacatcttatttatcttgttacctatagtttactttgggtgattggaggggaatgacttagttatgactggacatcttaaaagctgatagacaagccaaatggctggcagatgatgtggatttcaaagagcccagaatgaactcatcactggcttagacagtcctggatgccatttggaaagtagtggccctgcaagcctaaatgaagtagtatttgtaggcctgggtggcatttggatttttcttttccctcaacaaggttttactttttcttactttacaagcaagggaagttttgtgataggagagaaataaaagatttgatattttttgagatgacactcaagcatcaggctgagatttgcacacatgggatgtaaaagcaagctgtgtgttgcttagtcacttacttagaagtagatggtgggggacagcggcgtgggtcctagcctggccagtgatgctgctggcgtccagaccccagactcactccaagcactcttgttcaatatctcatgcagaagagttgggctggtcactcttaggggtgagaccccgtgattggttggtttgtagcactaaggtctaaaaaggaaaaccataaaagacatcagattacgctggatcagtataattaatattccatagggccatgttgccagaatctgtatgtatcaatacagggtttttccaagccaggaaacgccctccttggctactaggagcacctatcccatatcattcagataaacaatgatagctacaaagtcatttgtggctagataggttaagacaggtgattttttaaagtagactgtctttgcattttgccatctgaagttcattaatctttagatgacaaaaaagcaaaaagttcccagaacgtttttgcttagattttgttctaatcaccacgtgaaggaatgagattagcaccacaagtttcatgccaataaaagagactggtgtgatcccacatgcaaaatttaatcctaagggtagtgagatcacaaacagaataaaaataagagcaatcaaccatataaatcaagtacctattgggaacagacataacattcaatttttcatttatgctaagtgaccacagtatacaaagtaataagcaggaaatttgatatgggttaaattatgcattttgttcagattttggaaattggtatgcattataagtttctcaatgtacatctttttatcccaacaccctcaaactagaatatttgtcagtggtcaagagaaaaaattttacctgaattcttgggggccggcggggagcttttacattaaaaatctactaacgcctactttttaaaaaatgagattctttctaatctttatatatgacattttctagacaatcgcacctttgggtatattaaacagctggtatcataacaaagaatccaaatgaaccttcaatatactagaagttctagtaggttaatattgttcagaagatttttacaaattaaaaactgatttccaaatatgttcaacatttacttctatttgatatctgctcaagaagtcatagaagtcttgggaaactattcgagtatcacagaggttttcaaaagcccttatggtgacatctacctaggtaaaagcctgacatgtggctttataattgttatgttacccaagggataaacttgaactggctttgaacatcctttaggtcattttctctttggataattttcatcgcatatccagcaactatagaccaaagtttgcttaaggtttgaccctagagcagaggtgggcaaactatgacctggaaaccaaatctgacttaccaccttttcctgtagttaaagttttattgtcacatagccacatacattcatttacatgttttctgattttacactacagcagcaggatggagtagttgtgtcagagactatgtatcccacaaagcatagattacttactatttagtcctttacaggcaaagtttcctcacccctgacctagaggtttttgtggtatgcattggatatagcaggaaagaaagcacatttccaaacagcagggagtaagcttacatttctgtgtaggtttgggaatatagttacttggcaaagtctttcaggaaggaagcccttccttatgttacatgtggaaagcctgccttccaagacatgtggaagtaattgatccacctgccagagaaacacaggctcagaggatgcctgggaacagggaggatgggattagtggaagcttaatggaaaaggaaagttatgatcctccaagacccttaattgatagaccataccaggttctgcaggtcagcatcattgtgtaatgagagtgaagtaggggaccctgtggttcaaccttagaatctgtttcctgtaggctctttctgctgtctatattcattaaagttttccacttcaccctcccatagtctagagggatgcccattccatggtcctccagagaatagttttgacttaacatgtctgtttagcccacatcacgtcagttatcaacaccgccactgtgcttactgttcctacagccacaccaggcttgaagagttagtgagaccaacaaataattggaagtattggaaaaagcaaaatacatggggacaaaaaaaatacagtgaaattctttttatcaaactgatgctgtgagaaaccagatgaatgccagtttggctttatttctaagaatctgggtcttcattctctggtgtagaaggaatgcaaaaaactataacaacaacaacaaaaacatattttgaaaagacatattctgacatctctgcttgtgtgtggtaaggcaggttcctatcagacatttatccctttggtcaagatcccttttgctcatccagggtttcatactcaatatcgcttaaaaaaaaaaaagtatcagctagggatgactctggaagtatgagtatcatggtggggaggaaggaattttttttaaatgtaaatgacccccatttaccagaccctaatcaaagtcacttaagggaatccctcagccttttatttggaaacagttgaaataaactggcagcagctagatcagagtatcttgctttattttataaaggccaaaggtagtatgaagtttggaccaaaaaggtaaatagatccattccagcacctgatactgatttttcaaggctctatgaaaggtcaaaaatttcattaaacaagaccagttctccctcttccccctgtcccaagaaatcttaggcatgaaaaggataaggaaacagctcctggaatgatacatttgcatagtgccctagtagcaggttgggaaaaagttataatataagaaacaaccttcgaaaacaggccttttatctcaaagataaaatgtctttcttgtggtctttcatcactatctccgtggtggaaggttcccctagttccaacatatttccattaaaatagtcaaagccacggcattgggatgtcagatgcctctctttctttgtggtaatcggaatttaaaattatacagttgcctctgaatttctcatgcacaaagccaaaccactgataagagataaagcagtctgaagcctgctgcttcagccagcacagcacaccacacacgctcgcactttcaaaagcaatgtgatttctatggttcttaaaagctttcttcataagggagtccctgaaatttctcaaggcaggtttgaatggcaaagggaaaataattacttgtgggaggtcctccttttgagtattgttagagcatacatgtaaaagaaaataacctttttggggcaactcatgctcacacatgctgttttctttggttctccccctaccttccttttgtagatattgacagaataggaggaaatgagcatccttatttgagaaagagcaagaatgtcatgagcccttgatgcaatagtaagtgtgatgtcatcatacagtgttaatgatgctatcaaatccatcaataaacagtctcaaaccttccaacaacagtgctcactgctgctcctcaacttcagcccagcaagcagtaatatcatcacccattttgagatatgcaggtggaatagaacaaagaaacagccactgtaatcgagaagcatgtttactgtctaaatccacctgttgcagtaggaagccagagtggggttccaaatgcctcattaagtatgtggacagcctcactagtaagtgagtgaatttggcttcatcactgaacattagctaaggtcagcttaataacacaaatatgaggccgacttctttgcgagaagagaaaagaaaacatctgcttgatttaaaatccaccccacatgcctagagttgtctaatagtccctcactttccaatggcttcacatcctacttctacatttggggttttttggtgaaatcagagatagctcaggatttcataaaacgagaaactccaaactggtctattaggttccatgggaacacttgtagccaaaggattgtctgagggcaggaagacgacacttgtcaacaaggaagacagtgtttctttagttcccatattcatctaattcatggggttctaacattttggggggccatagattcttttgacaatctgagccaatctatgaaacttctccccaaaaagaaccaccccacaaaatcttgcaaaacgtaagagattttcctggatctgaagctacccgaagacatgggaagagttgtattctattattcaattttaagaatatttattaatattcactgagctattgctagccactgtgctaaacattttacatacattctcctatttcatcctcaaaacaatcctttgagttgggttttaatatagttccaatattcggatgtgaaaactgaggcttatagtggctaagaaacttgcccaaagccactacctagaaaatggcagagctggaatgtaggtttaactcctgaccactatgctataaagtcaccacatgtcaaactaattttcaagttgttgggacatgtcccctactaggttttaaactagatcttccttggtagatgaagctatagaacttctattttccctgctttctgtagtctctcacagtgacagcatctatactaaagtatagatacctaaggggaaaatatagaaagcctgcctgaataatagaatctagaacaacaacaaaaatattaattttttctgtgtatgcttaggtcaagcttaaaaaaaaaaaaaaaagaccggaaaatacctgggttgttagcctcacatttaggaaaaaattgtaatactcagttatctgtgtgtgtggctaaacaagtcagcatttctgcacacatacatctctttcctttatacttcccttcaaaagacaaatatcttacttttgatctttgacactatttggtcagtattcttctttacctttacttgtggcaaaactcaaggaagcgatcaaatagagggaagctcatttctatcattgtctctgtttccctataagaaagaactaccagggactcactgactgcattaggcatacaatgtcagagctgagctgaccactctggtcctgtaatgtctttggcctcacaccttggcagccatcattaatgggccatacccttccccaggtgcagaattctcctccccagagcactcaggccgttactaccaatttatctgagttggaaataagactcatttgccagttcttatttttaaagtggcaccctttaactttgaacctgtgtattttacactggcatcctagattcagcaatgaggtttggtggtgtttcaactaggaagggagaaaatgagtgcatctgaagttccttacagcttggtttctttggaatgctttcatcttctaagcaaagggatcagggtttgatctgtaagagttaaaaagacaaagtcattttgaagaattaactcagccagggatcatgcaaaaagattagaaaccataatgcccttgttaaagccctgctgtcaacctgccttcacccagagcttagagggccacagcagcaaagaggttggggtccatccctctctgatgtgctttttccacaacacatatctggtcctctggcaggattgtggatagagctcctcaccatacccaaaagactcagccccagtgccagtgctttcctggttcaacaacccaccacaaaaccttagtaaaaggatgagccaaaaatgaaaaagactcgactctacagtaagtcagtcagggatttcctttttaatggtttaagacatccaaatggcaagccaggaatagataccattaaagggtctcataggactaaccttaccagagccagaaatctagctctctggaagagatgcaagattctagaaaagtaaagggaagtgtcggcacatctaaatttagtgaacacaaaattaatttttatctagtctgtgacggagggaataaagtttttcatgtatcaaccacctcccccagtcaggtttctccctttttgagattatgaagaagctgagacatacttcttaaggaggtcgtgttttagaaggaaaaggcagaggctatccatcattatgctggctagatgcgcttctgaagaagccggattctgatgttcttaaccaaaatggtgaggtcatggaagtcccatttgcttggagattttgaaaaaaaaaaaaaaaaaaaacccattcccataaagtaattgagttcagcctttggattatttttggtttggtttttctctggttttgggtgtgatgtaagaagagctttttagttttgttttgaataacatcaatccttgcacactctatgcaaaaattttgtaagcatttcaataatgctatgaattacaaggaactattttaactttattacactttctgtataaaaaatttgtatttaatattatttcgaccacagtcttgtaaaatatattaataaaaataatgattggtaagaaggaaa

SEQ ID NO: 18878 - DNA, 1606 bp, Homo sapiens
  source 1..1606: mol_type = unassigned DNA
agagaggacttatctccagcatctagcactacagagcagaggctgtgtggagaatggctgaaaaatcagaattggttgtagaagcagttttctttctggttgtgagtatgagcccggcagacaccatgagcgctgttgcaggggagtcggcctgtgcttgacacatgtgtttcccattgatagctggagacagcccagtagctgtgagtcggtctgacaaagccatattgaagtacggagtacggtttcaaagcagtcagaaaaagaacgggaatgctgttcaggaaattcttcaggcatgggcagggacttggctgcagttctgcagttggaaaatctgactggggcagcttctgagcgcaggctgggcctgcacacactcagcgggccgagtggccacctccttcagagctgctcagcacgccctgggatcgcgggcggttttcatcggccggtttgtgaaacggacaagagagagacattactgccgggagtgttgagtgaagggaccaggtggagatgatgcctcaggagcagtacactcaccaccggagcaccatgcctggctctgtggggccacaggtatacaaggtggggatttatggctggcggaaacgatgcctgtatttctttgtcctgctcctcatgattttaatactggtgaacttggccatgaccatctggattctcaaagtcatgaacttcacaattgatggaatgggaaacctgaggatcacagaaaaaggtctaaagctagaaggagactctgaattcttacaacctctctacgccaaagaaatccagtcccgaccaggtaatgccctgtacttcaagtctgccagaaatgttacagtgaacattctcaatgaccagactaaagtgctaactcagcttataacaggtccaaaagccgtagaagcttatggtaaaaaatttgaggtaaaaactgtttctggaaaattgctcttctctgcagacaataatgaagtggtagtaggagctgaaagattacgagttttaggagcggagggcacagtgttccctaaatctatagaaacacctaatgtcagggcagaccccttcaaagaactaaggttggagtccccaacccggtctctagtgatggaggccccaaaaggagtggaaatcaatgcagaagctggcaatatggaagccacctgcaggacagagctgagactggaatccaaagatggagagattaagttagatgctgcgaaaatcaggctacctagactgcctcatggatcctacacgcctacaggaacgaggcagaaggtcttcgagatctgcgtctgcgccaatgggagattattcctgtctcaggcaggagctgggtccacttgtcagataaacacaagtgtctgcctctgaaagactatccatagtggacattgttggcagcataaaggccttttttggctttagacactggctgccagctatttttactagaacacagaaagcctatcaaagaccttgtgtgtatgtgtacgtgtgtgtgcgtgcttgagtgtgttcgcgtgtgtgggtggatataaatatatataaatatatataaataaatatatatatcctctgtataaaa

SEQ ID NO: 18879 - DNA, 739 bp, Homo sapiens
  source 1..739: mol_type = unassigned DNA
agcccagtagctgtgagtcggtctgacaaagccatattgaagtacggagtacggtttcaaagcagtcagaaaaagaacgggaatgctgttcaggaaattcttcaggcatgggcagggacttggctgcagttctgcagttggaaaatctgactggggcagcttctgagcgcaggctgggcctgcacacactcagcgggccgagtggccacctccttcagagctgctcagcacgccctgggatcgcgggcggttttcatcggccggtttgtgaaacggacaagagagagacattactgccgggagtgttgagtgaagggaccaggtggagatgatgcctcaggagcagtacactcaccaccggagcaccatgcctggctctgtggggccacaggtatacaaggtggggatttatggctggcggaaacgatgcctgtatttctttgtcctgctcctcatgattttaatactggtgaacttggccatgaccatctggattctcaaagtcatgaacttcacaattagcatccatctgcttctgagatttaactggctattcagatgttgtggaatgagctgagaggagccagaaccaggagccaggtgactcagattccagtacccactttgctgctggatggaatgggaaacctgaggatcacagaaaaaggtctaaagctagaaggagactctgaattcttacaacctctctacgccaaagaaatccagtcccgaccaggta

SEQ ID NO: 18880 - DNA, 2225 bp, Homo sapiens
  source 1..2225: mol_type = unassigned DNA
agggctgggaggttgaacttgagccggtttgggagccaggagcgagtgggtgacaggtcattcctgactgggaaggttgcttgacaagtcaggattgtgcctccagtcagaaggaccatgaagagagagaagagggcagagccgtgcatggggctgctccccaggacctgagcaggaacctggagttttcagggtgagatggtgttccccagggaacagaagtctccagtcccatcttaagctctgccggatcccgcgtgacatcagctagccccctcgcggctgccgggagctgtgagctctgtgctggggccaggccggcaccaggcacagacacttaggcccttgttgggagaacagagagaggctctcttgtccactgcctgtcttcggttccaactgctggttctcctagaggcctctcctcagactcgcagagctgcctgatcattgctacagaatgaactctagcccagctgggaccccaagtccacagccctccagggccaatgggaacatcaacctggggccttcagccaacccaaatgcccagcccacggacttcgacttcctcaaagtcatcggcaaagggaactacgggaaggtcctactggccaagcgcaagtctgatggggcgttctatgcagtgaaggtactacagaaaaagtccatcttaaagaagaaagagcagagccacatcatggcagagcgcagtgtgcttctgaagaacgtgcggcaccccttcctcgtgggcctgcgctactccttccagacacctgagaagctctacttcgtgctcgactatgtcaacgggggagagctcttcttccacctgcagcgggagcgccggttcctggagccccgggccaggttctacgctgctgaggtggccagcgccattggctacctgcactccctcaacatcatttacagggatctgaaaccagagaacattctcttggactgccagggacacgtggtgctgacggattttggcctctgcaaggaaggtgtagagcctgaagacaccacatccacattctgtggtacccctgagtacttggcacctgaagtgcttcggaaagagccttatgatcgagcagtggactggtggtgcttgggggcagtcctctacgagatgctccatggcctgccgcccttctacagccaagatgtatcccagatgtatgagaacattctgcaccagccgctacagatccccggaggccggacagtggccgcctgtgacctcctgcaaagccttctccacaaggaccagaggcagcggctgggctccaaagcagactttcttgagattaagaaccatgtattcttcagccccataaactgggatgacctgtaccacaagaggctaactccacccttcaacccaaatgtgacaggacctgctgacttgaagcattttgacccagagttcacccaggaagctgtgtccaagtccattggctgtacccctgacactgtggccagcagctctggggcctcaagtgcattcctgggattttcttatgcgccagaggatgatgacatcttggattgctagaagagaaggacctgtgaaactactgaggccagctggtattagtaaggaattaccttcagctgctaggaagagcgactcaaactaacaatggcttcaacgagaagcaggtttattttttccagcacataaaagaaaaataatgtttcggagtccaggactggcaggacaggtcatcagatactcagaggctgtatctctgccctgccaaccttgacaaatggcttccaatgttaggtttgctacaagatggttactggagctctagctgcctattttgtgtttagggaagggaaaatggaggaaaggggagaagagcaaagggcgcttttaaagagctttcccaaaagctccacccaatgacttctgcttccatctcactaaccacccacccctacctggaatggaggctgggagatgtggcttatttgctgggtacgtgactatccctaataacaaaggggttctgacactaagacattaggggagaatgttgggtaggcagccagcactcttttaccagagggcctcctggtgtttggattttgatctcaatgtgtaaaatgacagagatgtaacaagctcatagggtatcaatatctcttattgttctatgttgatgatatttgtctttgttgtgggtaatactggacatttgttattg

SEQ ID NO: 18881 - DNA, 1736 bp, Homo sapiens
  source 1..1736: mol_type = unassigned DNA
attcctgactgggaaggttgcttgacaagtcaggattgtgcctccagtcagaaggaccatgaagagagagaagagggcagagccgtgcatggggctgctccccaggacctgagcaggaacctggagttttcagagctgcctgatcattgctacagaatgaactctagcccagctgggaccccaagtccacagccctccagggccaatgggaacatcaacctggggccttcagccaacccaaatgcccagcccacggacttcgacttcctcaaagtcatcggcaaagggaactacgggaaggtcctactggccaagcgcaagtctgatggggcgttctatgcagtgaaggtactacagaaaaagtccatcttaaagaagaaagagcagagccacatcatggcagagcgcagtgtgcttctgaagaacgtgcggcaccccttcctcgtgggcctgcgctactccttccagacacctgagaagctctacttcgtgctcgactatgtcaacgggggagagctcttcttccacctgcagcgggagcgccggttcctggagccccgggccaggttctacgctgctgaggtggccagcgccattggctacctgcactccctcaacatcatttacagggatctgaaaccagagaacattctcttggactgccagggacacgtggtgctgacggattttggcctctgcaaggaaggtgtagagcctgaagacaccacatccacattctgtggtacccctgagtacttggcacctgaagtgcttcggaaagagccttatgatcgagcagtggactggtggtgcttgggggcagtcctctacgagatgctccatggcctgccgcccttctacagccaagatgtatcccagatgtatgagaacattctgcaccagccgctacagatccccggaggccggacagtggccgcctgtgacctcctgcaaagccttctccacaaggaccagaggcagcggctgggctccaaagcagactttcttgagattaagaaccatgtattcttcagccccataaactgggatgacctgtaccacaagaggctaactccacccttcaacccaaatgtggatacactcgggccaggcaccagaaaagcttcttttcgttgggattttaaaaagacagtgaagataatgtcgaacttataccctggagagagaaccatacatggaatactaggcagagatgaatggactttagaatgagacactccggagctggattcctggttttgtcacctaccatttgtgaggtcttcaacaggacctgctgacttgaagcattttgacccagagttcacccaggaagctgtgtccaagtccattggctgtacccctgacactgtggccagcagctctggggcctcaagtgcattcctgggattttcttatgcgccagaggatgatgacatcttggattgctagaagagaaggacctgtgaaactactgaggccagctggtattagtaaggaattaccttcagctgctaggaagagcgactcaaactaacaatggcttcaacgagaagcaggtttattttttccagcacataaaagaaaaataatgtttcggagtccaggactggcaggacaggtcatcagatactcagaggctgtatctctgccctgccaaccttgacaaatggcttccaatgttaggtttgctacaagatggttactggagctctagctgcctattttgtgtttag

SEQ ID NO: 18882 - DNA, 1906 bp, Homo sapiens
  source 1..1906: mol_type = unassigned DNA
ggttgcttgacaagtcaggattgtgcctccagtcagaaggaccatgaagagagagaagagggcagagccgtgcatggggctgctccccaggacctgagcaggaacctggagttttcagagctgcctgatcattgctacagaatgaactctagcccagctgggaccccaagtccacagccctccagggccaatgggaacatcaacctggggccttcagccaacccaaatgcccagcccacggacttcgacttcctcaaagtcatcggcaaagggaactacgggaaggtcctactggccaagcgcaagtctgatggggcgttctatgcagtgaaggtactacagaaaaagtccatcttaaagaagaaagagcagagccacatcatggcagagcgcagtgtgcttctgaagaacgtgcggcaccccttcctcgtgggcctgcgctactccttccagacacctgagaagctctacttcgtgctcgactatgtcaacgggggagagctcttcttccacctgcagcgggagcgccggttcctggagccccgggccaggttctacgctgctgaggtggccagcgccattggctacctgcactccctcaacatcatttacagggatctgaaaccagagaacattctcttggactgccagggacacgtggtgctgacggattttggcctctgcaaggaaggtgtagagcctgaagacaccacatccacattctgtggtacccctgagtacttggcacctgaagtgcttcggaaagagccttatgatcgagcagtggactggtggtgcttgggggcagtcctctacgagatgctccatggcctgccgcccttctacagccaagatgtatcccagatgtatgagaacattctgcaccagccgctacagatccccggaggccggacagtggccgcctgtgacctcctgcaaagccttctccacaaggaccagaggcagcggctgggctccaaagcagactttcttgagattaagaaccatgtattcttcagccccataaactgggatgacctgtaccacaagaggctaactccacccttcaacccaaatgtgacaggacctgctgacttgaagcattttgacccagagttcacccaggaagctgtgtccaagtccattggctgtacccctgacactgtggccagcagctctggggcctcaagtgcattcctgggattttcttatgcgccagaggatgatgacatcttggattgctagaagagaaggacctgtgaaactactgaggccagctggtattagtaaggaattaccttcagctgctaggaagagcgactcaaactaacaatggcttcaacgagaagcaggtttattttttccagcacataaaagaaaaataatgtttcggagtccaggactggcaggacaggtcatcagatactcagaggctgtatctctgccctgccaaccttgacaaatggcttccaatgttaggtttgctacaagatggttactggagctctagctgcctattttgtgtttagggaagggaaaatggaggaaaggggagaagagcaaagggcgcttttaaagagctttcccaaaagctccacccaatgacttctgcttccatctcactaaccacccacccctacctggaatggaggctgggagatgtggcttatttgctgggtacgtgactatccctaataacaaaggggttctgacactaagacattaggggagaatgttgggtaggcagccagcactcttttaccagagggcctcctggtgtttggattttgatctcaatgtgtaaaatgacagagatgtaacaagctcatagggtatcaatatctcttattgttctatgttgatgatatttgtctttgttgtgggtaatactggacatttgttattg

SEQ ID NO: 18883 - DNA, 2395 bp, Homo sapiens
  source 1..2395: mol_type = unassigned DNA
ggttgcttgacaagtcaggattgtgcctccagtcagaaggaccatgaagagagagaagagggcagagccgtgcatggggctgctccccaggacctgagcaggaacctggagttttcagagctgcctgatcattgctacagaatgaactctagcccagctgggaccccaagtccacagccctccagggccaatgggaacatcaacctggggccttcagccaacccaaatgcccagcccacggacttcgacttcctcaaagtcatcggcaaagggaactacgggaaggtcctactggccaagcgcaagtctgatggggcgttctatgcagtgaaggtactacagaaaaagtccatcttaaagaagaaagagcagagccacatcatggcagagcgcagtgtgcttctgaagaacgtgcggcaccccttcctcgtgggcctgcgctactccttccagacacctgagaagctctacttcgtgctcgactatgtcaacgggggagagctcttcttccacctgcagcgggagcgccggttcctggagccccgggccaggttctacgctgctgaggtggccagcgccattggctacctgcactccctcaacatcatttacagggatctgaaaccagagaacattctcttggactgccagggacacgtggtgctgacggattttggcctctgcaaggaaggtgtagagcctgaagacaccacatccacattctgtggtacccctgagtacttggcacctgaagtgcttcggaaagagccttatgatcgagcagtggactggtggtgcttgggggcagtcctctacgagatgctccatggcctgccgcccttctacagccaagatgtatcccagatgtatgagaacattctgcaccagccgctacagatccccggaggccggacagtggccgcctgtgacctcctgcaaagccttctccacaaggaccagaggcagcggctgggctccaaagcagactttgtagcttgagattaagaaccatgtattcttcagccccataaactgggatgacctgtaccacaagaggctaactccacccttcaacccaaatgtgacaggacctgctgacttgaagcattttgacccagagttcacccaggaagctgtgtccaagtccattggctgtacccctgacactgtggccagcagctctggggcctcaagtgcattcctgggattttcttatgcgccagaggatgatgacatcttggattgctagaagagaaggacctgtgaaactactgaggccagctggtattagtaaggaattaccttcagctgctaggaagagcgactcaaactaacaatggcttcaacgagaagcaggtttattttttccagcacataaaagaaaaataatgtttcggagtccaggactggcaggacaggtcatcagatactcagaggctgtatctctgccctgccaaccttgacaaatggcttccaatgttaggtttgctacaagatggttactggagctctagctgcctattttgtgtttagggaagggaaaatggaggaaaggggagaagagcaaagggcgcttttaaagagctttcccaaaagctccacccaatgacttctgcttccatctcactaaccacccacccctacctggaatggaggctgggagatgtggcttatttgctgggtacgtgactatccctaataacaaaggggttctgacactaagacattaggggagaatgttgggtaggcagccagcactcttttaccagagggcctcctggtgtttggattttgatctcaataataaataaataaatacgaaaagtggtttgtttttttacaaatgtgtggttcatactcctgggtggccttattagcttttttggttgggagacaagggaaggaactttcttggatcagtgtgtgctggtgattttattgccttttcctcttaattcaatcccactctttcccttcctcaagtcttgttcacccagcctcctgccccaggaatcacggggaagaagtctgggagaccacagaaaaaacaccaatgacactgagctattagagatcaaaactgggtcaggaagagttcatgttaagctttcacatgtgctaagaacgctgaaagatacacactgatttccatcttaatagtgccagataattgacaaatttgggacaagatgagggagaggtcaaaatccccctaacttcccaaagcaaaaaaacaggagtataatgatcagaaacgtaatagtagtgtcagaagcacacaatcagctgtggacggtgaaacatataatggttctatctgttctgagattgtaaaagcacaattattttcatcaggataaaaaataaaaatgaaaaactatgctgttgaatggaa

SEQ ID NO: 18884 - DNA, 554 bp, Homo sapiens
  source 1..554: mol_type = unassigned DNA
acatatgctgatgtaaatgtacaaatgtggtcacactgacacatacatgcaatcatctacgcagactcatagaaaccgacacaaatacctgaaatacacagccacagacagacacacacggaagcactctatgcacaaaacactcacacagtacacaccatgctgcacataccctgacccaaacagtctaacaagccctgagggtctccagggctgccctggggctattgcccacccctcccaccgtccccgctagggtgagatggtgttccccagggaacagaagtctccagtcccatcttaagctctgccggatcccgcgtgacatcagctagccccctcgcggctgccgggagctgtgagctctgtgctggggccaggccggcaccaggcacagacacttaggcccttgttgggagaacagagagaggctctcttgtccactgcctgtcttcggttccaactgctggttctcctagaggcctctcctcagactcgcagagctgcctgatcattgctacagaatgaactctagcccagctgggaccccaagt

SEQ ID NO: 18885 - DNA, 612 bp, Homo sapiens
  source 1..612: mol_type = unassigned DNA
acttaggcccttgttgggagaacagagagaggctctcttgtccactgcctgtcttcggttccaactgctggttctcctagaggcctctcctcagactcgcagagctgcctgatcattgctacagaatgaactctagcccagctgggaccccaagtccacagccctccagggccaatgggaacatcaacctggggccttcagccaacccaaatgcccagcccacggacttcgacttcctcaaagtcatcggcaaagggaactacgggaaggtcctactggccaagcgcaagtctgatggggcgttctatgcagtgaaggtactacagaaaaagtccatcttaaagaagaaagagcagagccacatcatggcagagcgcagtgtgcttctgaagaacgtgcggcaccccttcctcgtgggcctgcgctactccttccagacacctgagaagctctacttcgtgctcgactatgtcaacgggggagaggtgggtgggcccacagggaggcttccctgggctggctctcggctgggagctgtccatcccacatgcccactgcatgccaagttctggaatgatctcacttcatcttacaatagacccattttgtagc

SEQ ID NO: 18886 - DNA, 676 bp, Homo sapiens
  source 1..676: mol_type = unassigned DNA
actgcctgtcttcggttccaactgctggttctcctagaggcctctcctcagactcgcagagctgcctgatcattgctacagaatgaactctagcccagctgggaccccaagtccacagccctccagggccaatgggaacatcaacctggggccttcagccaacccaaatgcccagcccacggacttcgacttcctcaaagtcatcggcaaagggaactacgggaaggtcctactggccaagcgcaagtctgatggggcgttctatgcagtgaaggtactacagaaaaagtccatcttaaagaagaaagagagccacatcatggcagagcgcagtgtgcttctgaagaacgtgcggcaccccttcctcgtgggcctgcgctactccttccagacacctgagaagctctacttcgtgctcgactatgtcaacgggggagagctcttcttccacctgcagcgggagcgccggttcctggagccccgggccaggttctacgctgctgaggtggccagcgccattggctacctgcactccctcaacatcatttacagggatctgaaaccagagaacattctcttggactgccagggacacgtggtgctgacggattttggcctctgcaaggaaggtgtagagcctgaagacaccacatccacattctgtggtacccctgag

SEQ ID NO: 18887 - DNA, 2498 bp, Homo sapiens
  source 1..2498: mol_type = unassigned DNA
agggtggaagcaaggaagacactattcctggccacatagatcagctggtcacaccttctgttgtttggccccgaatagatattggccagtcttgggtctctctgtggccccagcccaaggcttccagggcagctgcctttcctgaggcattgggcagaattccttgtggcaaggagatcgtagcacagagcccagctgggactgcgcacagtaattcagggttgccattgttcctctatgggagtccggagagcccagcctgtgcttcacaaggctatgtggccctaggaaggtccttttttaggccacaggccttccatctgtgaaatgggggatgggttcagactttatgccctgaaaagatccttccagccctggccatcttggacttctggagctaccctggctcacaggggtcttgttgccctgggtgtccccagttcttgaaaagaatcagcctgggaggggccacaccctgaccatccccctttatcccttctgagatgtttgttaggaagtctgggtccaggggatatcatttcttgttccatccatgcaggggttgcttacctcgggtaggaaaccctcaggcggtggcaggtgcacaggtaggggaggatggagagggcagtggtgcctgaagccctggatgggcggagctgaccccccaacaccaactctctcatgcctgctcctccctgtccccccagagctgcctgatcattgctacagaatgaactctagcccagctgggaccccaagtccacagccctccagggccaatgggaacatcaacctggggccttcagccaacccaaatgcccagcccacggacttcgacttcctcaaagtcatcggcaaagggaactacgggaaggtcctactggccaagcgcaagtctgatggggcgttctatgcagtgaaggtactacagaaaaagtccatcttaaagaagaaagagcagagccacatcatggcagagcgcagtgtgcttctgaagaacgtgcggcaccccttcctcgtgggcctgcgctactccttccagacacctgagaagctctacttcgtgctcgactatgtcaacgggggagagctcttcttccacctgcagcgggagcgccggttcctggagccccgggccaggttctacgctgctgaggtggccagcgccattggctacctgcactccctcaacatcatttacagggatctgaaaccagagaacattctcttggactgccagggacacgtggtgctgacggattttggcctctgcaaggaaggtgtagagcctgaagacaccacatccacattctgtggtacccctgagtacttggcacctgaagtgcttcggaaagagccttatgatcgagcagtggactggtggtgcttgggggcagtcctctacgagatgctccatggcctgccgcccttctacagccaagatgtatcccagatgtatgagaacattctgcaccagccgctacagatccccggaggccggacagtggccgcctgtgacctcctgcaaagccttctccacaaggaccagaggcagcggctgggctccaaagcagactttcttgagattaagaaccatgtattcttcagccccataaactgggatgacctgtaccacaagaggctaactccacccttcaacccaaatgtgacaggacctgctgacttgaagcattttgacccagagttcacccaggaagctgtgtccaagtccattggctgtacccctgacactgtggccagcagctctggggcctcaagtgcattcctgggattttcttatgcgccagaggatgatgacatcttggattgctagaagagaaggacctgtgaaactactgaggccagctggtattagtaaggaattaccttcagctgctaggaagagcgactcaaactaacaatggcttcaacgagaagcaggtttattttttccagcacataaaagaaaaataatgtttcggagtccaggactggcaggacaggtcatcagatactcagaggctgtatctctgccctgccaaccttgacaaatggcttccaatgttaggtttgctacaagatggttactggagctctagctgcctattttgtgtttagggaagggaaaatggaggaaaggggagaagagcaaagggcgcttttaaagagctttcccaaaagctccacccaatgacttctgcttccatctcactaaccacccacccctacctggaatggaggctgggagatgtggcttatttgctgggtacgtgactatccctaataacaaaggggttctgacactaagacattaggggagaatgttgggtaggcagccagcactcttttaccagagggcctcctggtgtttggattttgatctcaatgtgtaaaatgacagagatgtaacaagctcatagggtatcaatatctcttattgttctatgttgatgatatttgtctttgttgtgggtaatactggacatttgttattg

SEQ ID NO: 18888 - DNA, 1182 bp, Homo sapiens
  source 1..1182: mol_type = unassigned DNA
atgcaggggttgcttacctcgggtaggaaaccctcaggcggtggcaggtgcacagagctgcctgatcattgctacagaatgaactctagcccagctgggaccccaagtccacagccctccagggccaatgggaacatcaacctggggccttcagccaacccaaatgcccagcccacggacttcgacttcctcaaagtcatcggcaaagggaactacgggaaggtcctactggccaagcgcaagtctgatggggcgttctatgcagtgaaggtactacagaaaaagtccatcttaaagaagaaagagcagagccacatcatggcagagcgcagtgtgcttctgaagaacgtgcggcaccccttcctcgtgggcctgcgctactccttccagacacctgagaagctctacttcgtgctcgactatgtcaacgggggagagctcttcttccacctgcagcgggagcgccggttcctggagccccgggccaggttctacgctgctgaggtggccagcgccattggctacctgcactccctcaacatcatttacagggatctgaaaccagagaacattctcttggactgccagggacacgtggtgctgacggattttggcctctgcaaggaaggtgtagagcctgaagacaccacatccacattctgtggtacccctgagtacttggcacctgaagtgcttcggaaagagccttatgatcgagcagtggactggtggtgcttgggggcagtcctctacgagatgctccatggcctgccgcccttctacagccaagatgtatcccagatgtatgagaacattctgcaccagccgctacagatccccggaggccggacagtggccgcctgtgacctcctgcaaagccttctccacaaggaccagaggcagcggctgggctccaaagcagactttcttgagattaagaaccatgtattcttcagccccataaactgggatgacctgtaccacaagaggctaactccacccttcaacccaaatgtgacaggacctgctgacttgaagcattttgacccagagttcacccaggaagctgtgtccaagtccattggctgtacccctgacactgtggccagcagctctggggcctcaagtgcattcctgggattttcttatgcgccagaggatgatgacatcttggattgctag

SEQ ID NO: 18889 - DNA, 428 bp, Homo sapiens
  source 1..428: mol_type = unassigned DNA
acacctgagaagctctacttcgtgctcgactatgtcaacgggggagagctcttcttccacctgcagcgggagcgccggttcctggagccccgggccaggttctacgctgctgaggtggccagcgccattggctacctgcactccctcaacatcatttacaggtgaggcctgcctgtggctcagagccaggaccaagcccttcttgctccaacagctaggggttgtgtggacactaaatcctgatgaaatcctggtggacttggtcctttgttttgggtggggttggagtctcctcctccgaggtccaagtgcccagcctttctgggctctccttctgcatctctggcaacctccatgaatagttctcctgccaggaccaccccccgcccaggtctccaactctcctcactaaatggctgagacacctc

SEQ ID NO: 18890 - DNA, 1915 bp, Homo sapiens
  source 1..1915: mol_type = unassigned DNA
agctagccccctcgcggctgccgggagctgtgagctctgtgctggggccaggccggcaccaggcacagacacttaggcccttgttgggagaacagagagaggctctcttgtccactgcctgtcttcggttccaactgctggttctcctagaggcctctcctcagactcgcagagctgcctgatcattgctacagaatgaactctagcccagctgggaccccaagtccacagccctccagggccaatgggaacatcaacctggggccttcagccaacccaaatgcccagcccacggacttcgacttcctcaaagtcatcggcaaagggaactacgggaaggtcctactggccaagcgcaagtctgatggggcgttctatgcagtgaaggtactacagaaaaagtccatcttaaagaagaaagagcagagccacatcatggcagagcgcagtgtgcttctgaagaacgtgcggcaccccttcctcgtgggcctgcgctactccttccagacacctgagaagctctacttcgtgctcgactatgtcaacgggggagagctcttcttccacctgcagcgggagcgccggttcctggagccccgggccaggttctacgctgctgaggtggccagcgccattggctacctgcactccctcaacatcatttacagggatctgaaaccagagaacattctcttggactgccagggacacgtggtgctgacggattttggcctctgcaaggaaggtgtagagcctgaagacaccacatccacattctgtggtacccctgagtacttggcacctgaagtgcttcggaaagagccttatgatcgagcagtggactggtggtgcttgggggcagtcctctacgagatgctccatggcctgccgcccttctacagccaagatgtatcccagatgtatgagaacattctgcaccagccgctacagatccccggaggccggacagtggccgcctgtgacctcctgcaaagccttctccacaaggaccagaggcagcggctgggctccaaagcagactttcttgagattaagaaccatgtattcttcagccccataaactgggatgacctgtaccacaagaggctaactccacccttcaacccaaatgtgacaggacctgctgacttgaagcattttgacccagagttcacccaggaagctgtgtccaagtccattggctgtacccctgacactgtggccagcagctctggggcctcaagtgcattcctgggattttcttatgcgccagaggatgatgacatcttggattgctagaagagaaggacctgtgaaactactgaggccagctggtattagtaaggaattaccttcagctgctaggaagagcgactcaaactaacaatggcttcaacgagaagcaggtttattttttccagcacataaaagaaaaataatgtttcggagtccaggactggcaggacaggtcatcagatactcagaggctgtatctctgccctgccaaccttgacaaatggcttccaatgttaggtttgctacaagatggttactggagctctagctgcctattttgtgtttagggaagggaaaatggaggaaaggggagaagagcaaagggcgcttttaaagagctttcccaaaagctccacccaatgacttctgcttccatctcactaaccacccacccctacctggaatggaggctgggagatgtggcttatttgctgggtacgtgactatccctaataacaaaggggttctgacactaagacattaggggagaatgttgggtaggcagccagcactcttttaccagagggcctcctggtgtttggattttgatctcaatgtgtaaaatgacagagatgtaacaagctcatagggtatcaatatctcttattgttctatgttg

SEQ ID NO: 18891 - DNA, 582 bp, Homo sapiens
  source 1..582: mol_type = unassigned DNA
agattgatctctgttgccgctcagggaggtcagctccaggccctcagcctttcggccgggagccaaactgccctgcctgccaagcccctccttctctgcaccttaaacagccgcgaggggagagtcggctgggattttcttcttaagaagtcgcgcaggtttttcgagctccactctgcgccaggagagccacggcagcaggaacgggcactgctgccaccgggccgacggagctgcatcctgtggccctataacactcttctccaaaaggacctgccagagactgggagtgttgactgctgcaaggaccaaggtgggaattgctgtgctaccatctggaaacagtgggatagtaacatctttttgagggaagaattggcttcctttcttgaaagtggtgaaggtacagcatatagctgcatggaagaaacagtaatcggatggctaccttctacattttgtattaggaaacaaagtccattgtaagagtccatgttgatcttggaaatagaaggattgaaaaaagctaaatttccacaaagaacaagaacttgaccatctcctttttgatctgaagactag

SEQ ID NO: 18892 - DNA, 6149 bp, Homo sapiens
  source 1..6149: mol_type = unassigned DNA
agattgatctctgttgccgctcagggaggtcagctccaggccctcagcctttcggccgggagccaaactgccctgcctgccaagcccctccttctctgcaccttaaacagccgcgaggggagagtcggctgggattttcttcttaagaagtcgcgcaggtttttcgagctccactctgcgccaggagagccacggcagcaggaacgggcactgctgccaccgggccgacggagctgcatcctgtggccctataacactcttctccaaaaggacctgccagagactgggagtgttgactgctgcaaggaccaaggtgggatagtaacatctttttgagggaagaattggcttcctttcttgaaagtggtgaaggtacagcatatagctgcatggaagaaacagtaatcggatggctaccttctacattttgtattaggaaacaaagtccattgtaagagtccatgttgatcttggaaatagaaggattgaaaaaagctaaatttccacaaagaacaagaacttgaccatctcctttttgatctgaagactaggggacaatggatatcatagagacagcaaaacttgaagaacatttggaaaatcaacccagtgatcctacgaacacttatgcaagacccgctgaacctgttgaagaagaaaacaaaaatggcaatggtaaacccaagagcttatccagtgggctgcgaaaaggcaccaaaaagtacccggactatatccaaattgctatgcccactgaatcaaggaacaaatttccactagagtggtggaaaacgggcattgccttcatatatgcagttttcaacctcgtcttgacaaccgtcatgatcacagttgtacatgagagggtccctcccaaggagcttagccctccactcccagacaagttttttgattacattgatagggtgaaatgggcattttctgtatcagaaataaatgggattatattagttggattatggatcacccagtggctgtttctgagatacaagtcaatagtgggacgcagattctgttttattattggaactttatacctgtatcgctgcattacaatgtatgttactactctacctgtgcctggaatgcatttccagtgtgctccaaagctcaatggagactctcaggcaaaagttcaacggattctacgattgatttctggtggtggattgtccataactggatcacatatcttatgtggagacttcctcttcagcggtcacacggttacgctgacactgacttatttgttcatcaaagaatattcgcctcgtcacttctggtggtatcatttaatctgctggctgctgagtgctgccgggatcatctgcattcttgtagcacacgaacactacactatcgatgtgatcattgcttattatatcacaacacgactgttttggtggtaccattcaatggccaatgaaaagaacttgaaggtctcttcacagactaatttcttatctcgagcatggtggttccccatcttttatttttttgagaaaaatgtacaaggctcaattccttgctgcttctcctggccgctgtcttggcctcctggctgcttcaaatcatcatgcaaaaagtattcacgggttcagaagattggtgaagacaatgagaaatcgacctgaggagcaaaacaaaggcatcagctcttacaccaaaagagttaacgctgtaaccaaaggtatagttttgttttttattttaggagaactgactggtaaatgaagaaatggaccaaattttgtgtaaacgattagaaagatgaacaaagtattgccctttgactggttttcttcttcatcctgagaaagatacattctcttgcagctcttcattcattggtgacaagcccccaccccgggactttactaatgagcttgttaaagaggtgccaaagaacatattcctcctttctttattctttctccaccaaaaccctctacttcagaattttttcaggatatttttcagcccaaggtcagaagaatgtgttaatattttaaataaaatatctggacatctacagccactgtgtaaatagaactgcctaatgttgagagtggtttttagcattaggtttagcaagggggagatccgtgggttgtgcgtcagctttgggtgaattttgtttctaccctgtcacggggaaagttcgggttgagtccaggagtgcacactgctgctgccacccaatgcgctacatatcacttttttttgttttgttttgttttgtttttaaaagatcattttatcttaaaaaggaaagctgatccaagtaaacacgaaagtatttgacacaccccacagattttacatgtgtgtaaatgtttcactttaaaatctctatgacagatacacaggaaacatgagatggtttctgctaatgagtggcccttgagtacacacttagatgctgtctgccctgtaaatttggatctggtgccccagggcagtcaactcttctagcacaggctgaaaacacgtgtgtgtcaactgaggttcacaccacttggggaatgagcctgttttctttccaggtcaggccctggtgtgagatcaattttagggctcctaattggagcacagaaatgtatttggtcaaatttcattgaaggtgatttcttcctttttctgttgtactttatggaaaaaccaagatggaacctgaaagttaatgtatccttgcttttagcaagagactcagtttcttataactagtcctaaggacatatgccgcaattgagtaattttacttttaccctatgaaaataacatggtgctgcactataatatactctcggaatcagtgtgttagttacagctatacagtgaagggggataactgtttctaaatttctttaaggtgatgccaaaaaatggattaaaaaatctgatcagatttaatgttaccagatttagtgcattatttaatgctattggatcttttggataattcttggcttaatttcttagctacttgaaggttaatttgcaagacttttaaaaccttagaaaagttttaaggttgcaaagttatcaacactggggcagagggtggagaggccaatgcgggtagaaggaggcagttatgtttatattgaaggtgaaatttttctttcatttagaatggaaaacatccccaaatgtatcattataaactagtcagccttgactacacaaaattgacctttaagttgcttgagaaaaacacaatgcaaatcgttcagaagggtcaacatcctttggtgctaaaatcttgtgtatgttttcagaatggctttttctgtatgttatagaataatcactaaaggaaaggtagttgaatttaaagtcatgaagcaagactctttaattcagttattttaaacaagaattaaaaccccaaacatccttggcaggctttgaagcacacagaattttctagtatttcttattaaatacaccaataataaacatatacttagtttacctgatgagtttagacataattctatataatgttcgcttatattcatttattaactagcaacacttgtgcaagaacaaggtattctgcttgaaaacactgatttttaagttcctgttgcccgattgtaaagaaaatcatctgacacagaagcctggattttgctctcctaacactggtgttttccttgagcctctaattcaaataaaacaaactgatacaccttacagccttattcatctgtgtctggataactcacttttcatctattgaataagaaaaagtgtttaaacttaataaaataaaaaattgtgcaccaattactacagatccttgaaacagtaagccttggattttagtcaagtaatccagtttttttttaatttaaaaaaaaccatcaccttttaaagaactttaaaaacacctgtgatgccaatgtggacattgccgctgccatgtctttacacgcatgtgtcgtatagctctgtcatcgagttgaggaagtccatggtttgcaaataagggtgggggaatcaaaatttcaagatggaaaaataaaacaaatagtaaaacccatttacatgtaggaaagaaaagttgagcttcaacccaatgtgccactttgatataaaacaagtatgatatatatataaactgaagatataaaacaagtatgatcttgcctttgaaatcataaatgtttggggtacctgttctttgccagttaagatacatatcttattatctttgtttttttcaagtctatgctcctgtttgaagcttttcctgtaatttaggttgtctgtgaaatacctataacatataattcctatagagtatgccacattttttttctaactcatttcaaatgaaattctctcagattctagtttttgagcttgtccactagatctgaaaataaagcatcctttcctgagtccacttgaactaattgtgaatttgttacttaatttactggcatcttgggaaacaagttttgctgtggcaggaaggctgttttgagagtgagcgttgagtctactctggtttgtggatgacattgcattagggttatttcctgtattaccagtgcccccttgtggcaatatactttatgacttggaatgcaaacaccacttttaaaagcctgttttcaagtttttgaaaggcatttgttttctgttgtttgccaataatctgaaagtatcatgtgaaaggaattattttaaaagcattttaaacctttcccaaaggtaaaatgtgctcagattataggcacttgtaattctaaccttgtatccatttgatcaaagaaaatttgtagaacatttttacctctcatgatcacaatcattagtgtctccctttataacgacctatgttttgtttactttgaaacaccaaatttgttgtcttggttttttttacatgacagaactcatgcagtttcttttttagttgaaagttcacatcttgccccttgaatagtttgaacatttctttcttaattcttttttgtttttgttttgcactgtaaaactgatgaaaactttaagccaatcttaatgcactagcctctgtagtgtaaggaagtgtgagaaggagtttcttaatgagtttacacgtttaaatcaagcatattataagttatatgccatgtgttgaaggcttttctatttatatatataaagatttttagtatttgtttttagtgtccttgtgttgcaataatttaactcctttgactcagttgctgaaaatatttcttctattaagaagtgctcttgacttcaacacccaaacactgaaaatcatgtcaatgttacccaaagataagtttttatacagatacacaccttataagttctgatttattttcttactcattatgctgtgttctaaataaatcatgaatgagaagagtgctttattgtgaaattatttaaaactgtcctttaaaagaaaaagaggaaacgatgaacaaaaactaatctaattgccaagttagaattcattatttaatttacctcctatgcaatgattaatgctgcaaaatgtatggttatgttaccgtatattcacaaaagaaatattattacaaggtttcagaggtagccaattgcattcttttggaaatttactgtactgtttcaatgtgttaagtgccttgttgtaaagtaaaattttaagtctagattcattattttcctgacatatatttttcattatgatatctactgtatgctattgtgatagttttatgaaatgcttacattttaatcaaatatgtaaatttcagaagctcttttttcctacccaccagtaccttaatcattggtttatcacattggattcaaattcaggttccttttttgataaagaggaaatttgttttccatgcttgtgattttgtgtttgtaaacatttcaggaggaatttaggagtgtaactatagtttatacttctataatgttgtcttacatttacatttttaagtgcctaattgttaaaactgatttatgtttctcttctaaagaggatatgtgtacttggtttctaatctctttggttttgctttttaaaaaatgcaagagcctatactttgtatttacctaataaaccacagtgacatcaacagtcttttcaaaattaa

SEQ ID NO: 18893 - DNA, 498 bp, Homo sapiens
  source 1..498: mol_type = unassigned DNA
gcgggccgcgcgcggcgggcggggagagcgggcgcggggccgcggtcaacactgagcgccgcgccgtgggccgagtggggcggggagacccagccctcggcgcgcacggagcctggccggtgctgcagcgccgccgagtgcggcctcgggggcggcggccgcgggagggacccggagagctgcttcccctagtcaggccgcggcgtgggagggcgagaccccgagcaaactttctagcggcttcggcccgagggtggtgacgcccggggctggtcgcggcggctgcggcagcgggctccatcccctggcaaatccccttcccgggagcaagtgccttcagctgggagtgtctggagccctggccaccagcggagctgcatcctgtggccctataacactcttctccaaaaggacctgccagagactgggagtgttgactgctgcaaggaccaaggtgggatagtaacatctttttgagggaagaattggcttcctttc

SEQ ID NO: 18894 - DNA, 567 bp, Homo sapiens
  source 1..567: mol_type = unassigned DNA
gcaagtgccttcagctgggagtgtctggagccctggccaccagcggagctgcatcctgtggccctataacactcttctccaaaaggacctgccagagactgggagtgttgactgctgcaaggaccaaggtcaatagtgggacgcagattctgttttattattggaactttatacctgtatcgctgcattacaatgtatgttactactctacctgtgcctggaatgcatttccagtgtgctccaaagctcaatggagactctcaggcaaaagttcaacggattctacgattgatttctggtggtggattgtccataactggatcacatatcttatgtggagacttcctcttcagcggtcacacggttacgctgacactgacttatttgttcatcaaagaatattcgcctcgtcacttctggtggtatcatttaatctgctggctgctgagtgctgccgggatcatctgcattcttgtagcacacgaacactacactatcgatgtgatcattgcttattatatcacaacacgactgttttggtggtaccattcaatggccaatgaaaag

SEQ ID NO: 18895 - DNA, 1887 bp, Homo sapiens
  source 1..1887: mol_type = unassigned DNA
agctaccttataaagaccatctgtacatccactgtgaaatggagtttcaaaatcacaagcttctttcccacatgaacataagactaggagcacatatggaagagtaaagttgaagggaatttggatgatgatttggcaagatgctgtgggatagtaacatctttttgagggaagaattggcttcctttcttgaaagtggtgaaggtacagcatatagctgcatggaagaaacagtaatcggatggctaccttctacattttgtattaggaaacaaagtccattgtaagagtccatgttgatcttggaaatagaaggattgaaaaaagctaaatttccacaaagaacaagaacttgaccatctcctttttgatctgaagactaggggacaatggatatcatagagacagcaaaacttgaagaacatttggaaaatcaacccagtgatcctacgaacacttatgcaagacccgctgaacctgttgaagaagaaaacaaaaatggcaatggtaaacccaagagcttatccagtgggctgcgaaaaggcaccaaaaagtacccggactatatccaaattgctatgcccactgaatcaaggaacaaatttccactagagtggtggaaaacgggcattgccttcatatatgcagttttcaacctcgtcttgacaaccgtcatgatcacagttgtacatgagagggtccctcccaaggagcttagccctccactcccagacaagttttttgattacattgatagggtgaaatgggcattttctgtatcagaaataaatgggattatattagttggattatggatcacccagtggctgtttctgagatacaagtcaatagtgggacgcagattctgttttattattggaactttatacctgtatcgctgcattacaatgtatgttactactctacctgtgcctggaatgcatttccagtgtgctccaaagctcaatggagactctcaggcaaaagttcaacggattctacgattgatttctggtggtggattgtccataactggatcacatatcttatgtggagacttcctcttcagcggtcacacggttacgctgacactgacttatttgttcatcaaagaatattcgcctcgtcacttctggtggtatcatttaatctgctggctgctgagtgctgccgggatcatctgcattcttgtagcacacgaacactacactatcgatgtgatcattgcttattatatcacaacacgactgttttggtggtaccattcaatggccaatgaaaagaacttgaaggtctcttcacagactaatttcttatctcgagcatggtggttccccatcttttatttttttgagaaaaatgtacaaggctcaattccttgctgcttctcctggccgctgtcttggcctcctggctgcttcaaatcatcatgcaaaaagtattcacgggttcagaagattggtgaagacaatgagaaatcgacctgaggagcaaaacaaaggcatcagctcttacaccaaaagagttaacgctgtaaccaaaggtatagttttgttttttattttaggagaactgactggtaaatgaagaaatggaccaaattttgtgtaaacgattagaaagatgaacaaagtattgccctttgactggttttcttcttcatcctgagaaagatacattctcttgcagctcttcattcattggtgacaagcccccaccccgggactttactaatgagcttgttaaagaggtgccaaagaacatattcctcctttctttattctttctccaccaaaaccctctacttcagaattttttcaggatatttttcagcccaaggtcagaagaatgtgttaatattttaaataaaatatctggacatctaca

SEQ ID NO: 18896 - DNA, 570 bp, Homo sapiens
  source 1..570: mol_type = unassigned DNA
atctgtacatccactgtgaaatggagtttcaaaatcacaagcttctttcccacatgaacataagactaggagcacatatggaagagtaaagttgaagggaatttggatgatgatttggcaagatgctgtaagtggattaggcaaggctgctaaagagagacaggaaatggctgtgttagtgcttcggacctccgttagaagtagcagttcatggtgttgaaggtgggatagtaacatctttttgagggaagaattggcttcctttcttgaaagtggtgaaggtacagcatatagctgcatggaagaaacagtaatcggatggctaccttctacattttgtattaggaaacaaagtccattgtaagagtccatgttgatcttggaaatagaaggattgaaaaaagctaaatttccacaaagaacaagaacttgaccatctcctttttgatctgaagactaggggacaatggatatcatagagacagcaaaacttgaagaacatttggaaaatcaacccagtgatcctacgaacacttatgcaagacccgctgaacctgttgaagaagaaaa

SEQ ID NO: 18897 - DNA, 2127 bp, Homo sapiens
  source 1..2127: mol_type = unassigned DNA
aaatggagtttcaaaatcacaagcttctttcccacatgaacataagactaggagcacatatggaagagtaaagttgaagggaatttggatgatgatttggcaagatgctgtaagtggattaggcaaggctgctaaagagagacaggaaatggctgtgttagtgcttcggacctccgttagaagtagcagttcatggtgttgaaggtttgttgttgaaaataccttcctgaggcacctcttcattgtgcttattcttcccacaacattgtgccaagacactgtcaagcctgggcctgtcaaagcctgggatgtcaaaggcctgggtctttctcatcctgctgtaatgtattgatagctgggggctctgcagaaggacaagggaaaggtgggatagtaacatctttttgagggaagaattggcttcctttcttgaaagtggtgaaggtacagcatatagctgcatggaagaaacagtaatcggatggctaccttctacattttgtattaggaaacaaagtccattgtaagagtccatgttgatcttggaaatagaaggattgaaaaaagctaaatttccacaaagaacaagaacttgaccatctcctttttgatctgaagactaggggacaatggatatcatagagacagcaaaacttgaagaacatttggaaaatcaacccagtgatcctacgaacacttatgcaagacccgctgaacctgttgaagaagaaaacaaaaatggcaatggtaaacccaagagcttatccagtgggctgcgaaaaggcaccaaaaagtacccggactatatccaaattgctatgcccactgaatcaaggaacaaatttccactagagtggtggaaaacgggcattgccttcatatatgcagttttcaacctcgtcttgacaaccgtcatgatcacagttgtacatgagagggtccctcccaaggagcttagccctccactcccagacaagttttttgattacattgatagggtgaaatgggcattttctgtatcagaaataaatgggattatattagttggattatggatcacccagtggctgtttctgagatacaagtcaatagtgggacgcagattctgttttattattggaactttatacctgtatcgctgcattacaatgtatgttactactctacctgtgcctggaatgcatttccagtgtgctccaaagctcaatggagactctcaggcaaaagttcaacggattctacgattgatttctggtggtggattgtccataactggatcacatatcttatgtggagacttcctcttcagcggtcacacggttacgctgacactgacttatttgttcatcaaagaatattcgcctcgtcacttctggtggtatcatttaatctgctggctgctgagtgctgccgggatcatctgcattcttgtagcacacgaacactacactatcgatgtgatcattgcttattatatcacaacacgactgttttggtggtaccattcaatggccaatgaaaagaacttgaaggtctcttcacagactaatttcttatctcgagcatggtggttccccatcttttatttttttgagaaaaatgtacaaggctcaattccttgctgcttctcctggccgctgtcttggcctcctggctgcttcaaatcatcatgcaaaaagtattcacgggttcagaagattggtgaagacaatgagaaatcgacctgaggagcaaaacaaaggcatcagctcttacaccaaaagagttaacgctgtaaccaaaggtatagttttgttttttattttaggagaactgactggtaaatgaagaaatggaccaaattttgtgtaaacgattagaaagatgaacaaagtattgccctttgactggttttcttcttcatcctgagaaagatacattctcttgcagctcttcattcattggtgacaagcccccaccccgggactttactaatgagcttgttaaagaggtgccaaagaacatattcctcctttctttattctttctccaccaaaaccctctacttcagaattttttcaggatatttttcagcccaaggtcagaagaatgtgttaatattttaaataaaatatctggacatctaca

SEQ ID NO: 18898 - DNA, 581 bp, Homo sapiens
  source 1..581: mol_type = unassigned DNA
gagcagtgtatccagggagaggactaattacgaggtttgaaaacctcatcaggtggctggtttctgtagcaggactaaaagactgctctcctaaattgagaacagctggggctgtgtgctagcaagtataaaagaggtggcagtggtgccccgtgtccgaaagaagtgtgtgctctctggagcctgtggagctgaagccaaaggtgggatagtaacatctttttgagggaagaattggcttcctttcttgaaagtggtgaaggtacagcatatagctgcatggaagaaacagtaatcggatggctaccttctacattttgtattaggaaacaaagtccattgtaagagtccatgttgatcttggaaatagaaggattgaaaaaagctaaatttccacaaagaacaagaacttgaccatctcctttttgatctgaagactaggggacaatggatatcatagagacagcaaaacttgaagaacatttggaaaatcaacccagtgatcctacgaacacttatgcaagacccgctgaacctgttgaagaagaaaacaaaaatggcaatggtaaacccaagagctt

SEQ ID NO: 18899 - DNA, 459 bp, Homo sapiens
  source 1..459: mol_type = unassigned DNA
tttcaaatgccatacaggtttattttcttactgtgtgccatttgggaccaacagagcaacggctagttttaccaagagattatatttgaatgatacctgatttggtatttcatttaaagttctggaaatgggctgggcgcagtggcccatgcctataatcccagcactttgggaggctgagtccataagtgaatggttaggaaccctaacctttacagagggaatgttttatagtttctattggcaataacagtgtaaaattgctgagaatcaaaatattgctagccacaatgccattccttctgacccccttaccctacacatacccctggagaaataatataaatttaaaacctgaaattactcctgctttcccatttccccccttattttcatagaccaccaccttttcttttgatccctactatctttctttccagtgggaaagtggctccttta

SEQ ID NO: 18900 - DNA, 490 bp, Homo sapiens
  source 1..490: mol_type = unassigned DNA
catcagttcctccttgtgggtccgaggcgctctgccgccggcccctcctcacttcttcctccctggggatggatccaagctattgtcctgcccatggcttcccatctcaggaccctctctggccgctatcatcccagcagtggagttcagcccactactctgaaccaggcctccaggcccaaggtcagcatcccactgtcagccatcattgaggtccgcaccaccatgcccctggaaatgccagagaaggataacacattcgtcctcaaggtagagaatggagccgaatacatcttggagaccatcgactctctgcagaagcactcgtgggtagctgacatccagggctgcgtggaccccggtgacagtgaggaagacaccgagctctcctgtacccgaggaggctgtctggccagccgcgtggcctcctgcagctgtgagctcctgactgatgcagtcgacctgccccgccccccagagacgacagccg

SEQ ID NO: 18901 - DNA, 2113 bp, Homo sapiens
  source 1..2113: mol_type = unassigned DNA
ggggatggatccaagctattgtcctgcccatggcttcccatctcaggaccctctctggccgctatcatcccagcagtggagttcagcccactactctgaaccagccgcaggtggctgcgatgggacggaagccatgaatggtgccggccctggccccgccgcagccgccccggtcccagtcccggtcccggtcccggactggcggcagttctgcgagctgcatgcgcaggcggccgccgtggactttgcgcacaagttctgccgtttcctgcgggacaacccagcttacgacacgcccgacgccggcgcctccttctcccgccacttcgccgccaacttcctggacgtcttcggcgaggaggtgcgccgcgtgctggtggctgggccgacgactcggggcgcggccgtgagcgcagaggccatggagccggagctcgcggacacctctgcactcaaggcggcgccctacggccactcgcggagctcggaggacgtgtccacgcacgcggccaccaaggcccgcgttcgcaagggcttctcgctgcgcaacatgagcctgtgcgtggtggacggcgtgcgcgacatgtggcaccggcgcgcctcgcccgagcccgacgcggcagctgccccgcgcaccgccgagccccgcgacaagtggacgcggcgcctgaggctgtcgcggacgctggctgccaaggtggagctggtggacattcaacgcgagggggcgctgcgcttcatggtggccgacgacgcggccgcgggctccgggggctcggctcagtggcagaagtgccgcctgctcctgcgcagggctgtggccgaggaacgcttccgcctggagttcttcgtgccgcccaaagcctccaggcccaaggtcagcatcccactgtcagccatcattgaggtccgcaccaccatgcccctggaaatgccagagaaggataacacattcgtcctcaaggtagagaatggagccgaatacatcttggagaccatcgactctctgcagaagcactcgtgggtagctgacatccagggctgcgtggaccccggtgacagtgaggaagacaccgagctctcctgtacccgaggaggctgtctggccagccgcgtggcctcctgcagctgtgagctcctgactgatgcagtcgacctgccccgccccccagagacgacagccgtgggtgcagtggtgacagccccccacagccgaggtcgagatgccgtcagagaatccctgatccacgtcccgctagagacctttctgcagaccctggaatccccgggcggcagcggcagtgacagcaataacacaggggaacagggtgcagagacggatcccgaggctgaacccgagctggagctatccgactacccatggttccacgggacactgtcccgggtcaaggctgctcaactggttctggcaggggggccccggaaccacggcctcttcgtgatccgccaaagtgagactcggcctggggagtacgtgctgaccttcaacttccagggcaaggccaagcacctgcgcctgtccctgaacggccacggccagtgtcacgtacagcatctgtggttccagtctgtgcttgacatgctccgccacttccacacacaccccatcccactggagtcagggggctcggccgacatcacccttcgcagctatgtgcgggcccaggaccccccaccagagccgggccccacgccccctgccgcgcccgcgtccccggcctgctggagcgactcgcccggccagcactacttctccagcctcgccgcggccgcctgcccgcctgcctcgccctccgacgccgccggcgcctcctcgtcttccgcctcgtcgtcctctgccgcgtcggggcccgcccccccgcgccccgtcgagggccagctcagcgcgcggagccgcagcaacagcgccgagcgcctgctggaggccgtggccgccaccgccgccgaggagcccccggaggccgcgcccggccgcgcgcgcgccgtggagaaccagtactccttctactagcccgcggcgccgcccgggtgggacacgccaagctcttcagtgaagacacgatgttattaaaagcctgttttagggactgca

SEQ ID NO: 18902 - DNA, 965 bp, Homo sapiens
  source 1..965: mol_type = unassigned DNA
ttggagcgcgcggagctcggctgccagagagccgcgcgggggacgcgccgggaccgcgaggagcgcaggagccttcgaggcggtgaacgagggagggagcccagtccgccgcgggccatgagccaccgggcccggggagcccggccgcggtccgggcagcgctcagccggcgccccagcccgctcggccgcagctgcgcgcctgtagccgcaggtggctgcgatgggacggaagccatgaatggtgccggccctggccccgccgcagccgccccggtcccagtcccggtcccggtcccggactggcggcagttctgcgagctgcatgcgcaggcggccgccgtggactttgcgcacaagttctgccgtttcctgcgggacaacccagcttacgacacgcccgacgccggcgcctccttctcccgccacttcgccgccaacttcctggacgtcttcggcgaggaggtgcgccgcgtgctggtggctgggccgacgactcggggcgcggccgtgagcgcagaggccatggagccggagctcgcggacacctctgcactcaaggcggcgccctacggccactcgcggagctcggaggacgtgtccacgcacgcggccaccaaggcccgcgttcgcaagggcttctcgctgcgcaacatgagcctgtgcgtggtggacggcgtgcgcgacatgtggcaccggcgcgcctcgcccgagcccgacgcggcagctgccccgcgcaccgccgagccccgcgacaagtggacgcggcgcctgaggctgtcgcggacgctggctgccaaggtggagctggtggacattcaacgcgagggggcgctgcgcttcatggtggccgacgacgcggccgcgggctccgggggctcggctcagtggcagaagtgccgcctgctcctgcgcagggctgtggccgaggaacgcttccgcctggagttcttcgtgccgcccaaa

SEQ ID NO: 18903 - DNA, 2554 bp, Homo sapiens
  source 1..2554: mol_type = unassigned DNA
gagctctttcatggggtcgagttgtttagaggacttgatagtcctagcagcttctctggcctttttgtgcctcacttttcagagccgtgtcgttcttttctctggagtcaggaagcccctccataattttttttttccccactgaccaaggtccagaacagggagtgtggacacaggaatcaaggaatgttctgcagtgtgctgtcttctaacttcctgatatagatgtccagcatgccttgctgattgatgatgttcatggagatgaaaccatcctttcaggaccatggtgtgcctgaaacgacaccgcattctgacggatcagctggcgccacccagaccagaaatctgactcaactagttcaggaactgaagacagcaagaactaccccttgactccagagacggggtttcaccatgttgcccaggctggtcttgaagaactgttgagctcaagcagtccacctaccttggcctcccaaagtgctgggattacaggtatcacggttacatttatacataccgagtgtcccagacagaaacaggttcttggagtgctgagacagcacctggggtacataaaagatatttccggaaaataaaaaatctcatttcagcatttcagaagccagatcaaggcattgtaatacctctgcagtatccagttgagaagaagtcctcagctagaagtacacaaggtactacagggataagagaagatcctgatgtctgcctgaaagccccatgaagaaaaataaaacaccttgtactttattttctataatttaaatatatgctaagtcttatatattgtagataatacagttcggtgagctacaaatgcatttctaaagccattgtagtcctgtaatggaagcatctagcatgtcgtcaaagctgaaatggacttttgtacatagtgaggagctttgaaacgaggattgggaaaaagtaattccgtaggttattttcagttattatatttacaaatgggaaacaaaaggataatgaatactttataaaggattaatgtcaattcttgccaaatataaataaaaataatcctcagtttttgtgaaaagctccatttttagtgaaatattattttatagctactaattttaaaatgtcttgcttgattgtatggtgggaagttggctggtgtcccttgtctttgccaagttctccactagctatggtgtcataggctcttttgggatttttgaagctgtatactgtgtgctaaaacaagcactaaacaaagagtgaaggatttatgtttaattctgaaagcaaccttcttgcctagtgttctgatattggacagtaaaatccacagaccaacctggagttgaaaatcttataatttaaaatatgctctaaacatgtttatcgtatttgatgctacaggatttgaaattgtattacaaatccaatgaaatgagtttttcttttcatttacctctgccccagttgtttctactacatggaagacctcattttgaagggaaatttcagcagctgcagctcatgagtaactgatttgtaacaagcctccttttaaagtaaccctacaaaaccactggaaagtttatggttgtattattttttaaaaaaattccaagtgattgaaacctacacgagatacagaattttatgcggcattttcttctcacatttatatttttgtgattttgtgattgattatatgtcactttgctacagggctcacagaattcattcactcaacaaacataatagggcgctgagggcatagaagtaaaaacacctggtccctgctctcagttcactgtcttgttggacgagaaaacaataacgataaaagacagtgaaagaaaataacgataaaagacagtgaaagaaaataacaataaaagacaaggaaaaaataacaatgaaagttgataagtacatgataagcgaggttccccgtgtgtaggtagatctggtctttagaggcagatagataggtcagtgcaaatactctggtccatgggccatatgaaaaggctaagcttcactgtaaaataataactgggaattctggattgtgtatgggtgttggtgaacttggttttaattagtgaactgctgagagacagagctattctccatgtactggcaagacctgatttctgagcatttaatatggatgccgtgggagtacaaaagtggagtgtggcctgagtaatgcattatgggtggtttaccatttcttgaggtaaaagcatcacatgaacttgtaaaggaatttaaaaatcctactttcataataagttgcataggtttaataatttttaattatatggcttgagtttaaattgtaataggcgtaactaattttaactctataatgtgttcattctggaataatcctaaacatatgaattatgtttgcatgttcacttccaagagcctttttttgaaaaaaagctttttttgaatcatcaagtctttcacatttaaataaagtgtttgaaagctttatttacctaatttgtcttgaaatattccttataattccttataaaat

SEQ ID NO: 18904 - DNA, 2450 bp, Homo sapiens
  source 1..2450: mol_type = unassigned DNA
aaatccttcttccaatgttcctcccctctctgtatgaaccctgtgttggggggcagaagatggaagcccttggcaagctcgatcgaaccaagctactaaattgctgagctcgttttaactgaagtgtgagaaggaggtttaaggcaagtagacaacatcctgttgttggggtgcttctctcttttttgcacatctggctgaactgggagtcaggtggttgacttgtgcctggctgcagtagcagcggcatctcccttgcacagttctcctcctcggcctgcccaagagtccaccaggccatggacgcagtggctgtgtatcatggcaaaatcagcagggaaaccggcgagaagctcctgcttgccactgggctggatggcagctatttgctgagggacagcgagagcgtgccaggcgtgtactgcctatgtgtgctgtatcacggttacatttatacataccgagtgtcccagacagaaacaggttcttggagtgctgagacagcacctggggtacataaaagatatttccggaaaataaaaaatctcatttcagcatttcagaagccagatcaaggcattgtaatacctctgcagtatccagttgagaagaagtcctcagctagaagtacacaaggtactacagggataagagaagatcctgatgtctgcctgaaagccccatgaagaaaaataaaacaccttgtactttattttctataatttaaatatatgctaagtcttatatattgtagataatacagttcggtgagctacaaatgcatttctaaagccattgtagtcctgtaatggaagcatctagcatgtcgtcaaagctgaaatggacttttgtacatagtgaggagctttgaaacgaggattgggaaaaagtaattccgtaggttattttcagttattatatttacaaatgggaaacaaaaggataatgaatactttataaaggattaatgtcaattcttgccaaatataaataaaaataatcctcagtttttgtgaaaagctccatttttagtgaaatattattttatagctactaattttaaaatgtcttgcttgattgtatggtgggaagttggctggtgtcccttgtctttgccaagttctccactagctatggtgtcataggctcttttgggatttttgaagctgtatactgtgtgctaaaacaagcactaaacaaagagtgaaggatttatgtttaattctgaaagcaaccttcttgcctagtgttctgatattggacagtaaaatccacagaccaacctggagttgaaaatcttataatttaaaatatgctctaaacatgtttatcgtatttgatgctacaggatttgaaattgtattacaaatccaatgaaatgagtttttcttttcatttacctctgccccagttgtttctactacatggaagacctcattttgaagggaaatttcagcagctgcagctcatgagtaactgatttgtaacaagcctccttttaaagtaaccctacaaaaccactggaaagtttatggttgtattattttttaaaaaaattccaagtgattgaaacctacacgagatacagaattttatgcggcattttcttctcacatttatatttttgtgattttgtgattgattatatgtcactttgctacagggctcacagaattcattcactcaacaaacataatagggcgctgagggcatagaagtaaaaacacctggtccctgctctcagttcactgtcttgttggacgagaaaacaataacgataaaagacagtgaaagaaaataacgataaaagacagtgaaagaaaataacaataaaagacaaggaaaaaataacaatgaaagttgataagtacatgataagcgaggttccccgtgtgtaggtagatctggtctttagaggcagatagataggtcagtgcaaatactctggtccatgggccatatgaaaaggctaagcttcactgtaaaataataactgggaattctggattgtgtatgggtgttggtgaacttggttttaattagtgaactgctgagagacagagctattctccatgtactggcaagacctgatttctgagcatttaatatggatgccgtgggagtacaaaagtggagtgtggcctgagtaatgcattatgggtggtttaccatttcttgaggtaaaagcatcacatgaacttgtaaaggaatttaaaaatcctactttcataataagttgcataggtttaataatttttaattatatggcttgagtttaaattgtaataggcgtaactaattttaactctataatgtgttcattctggaataatcctaaacatatgaattatgtttgcatgttcacttccaagagcctttttttgaaaaaaagctttttttgaatcatcaagtctttcacatttaaataaagtgtttgaaagctttattta

SEQ ID NO: 18905 - DNA, 593 bp, Homo sapiens
  source 1..593: mol_type = unassigned DNA
ttttttgcacatctggctgaactgggagtcaggtggttgacttgtgcctggctgcagtagcagcggcatctcccttgcacagttctcctcctcggcctgcccaagagtccaccaggccatggacgcagtggctgtgtatcatggcaaaatcagcagggaaaccggcgagaagctcctgcttgccactgggctggatggcagctatttgctgagggacagcgagagcgtgccaggcgtgtactgcctatgtgtgctgtatcacggttacatttatacataccgagtgtcccagacagaaacaggttcttggagtgctgagacagcacctggggtacataaaagatatttccggaaaataaaaaatctcatttcagcatttcagaagccagatcaaggcattgtaatacctctgcagtatccagttgagaagaagtcctcagctagaagtacacaagggataagagaagatcctgatgtctgcctgaaagccccatgaagaaaaataaaacaccttgtactttattttctataatttaaatatatgctaagtcttatatattgtagataatacagttcggtgagctacaaatgca

SEQ ID NO: 18906 - DNA, 474 bp, Homo sapiens
  source 1..474: mol_type = unassigned DNA
ggcatctcccttgcacagttctcctcctcggcctgcccaagagtccaccaggccatggacgcagtggctgtgtatcatggcaaaatcagcagggaaaccggcgagaagctcctgcttgccactgggctggatggcagctatttgctgagggacagcgagagcgtgccaggcgtgtactgcctatgtgtgctacagcacctggggtacataaaagatatttccggaaaataaaaaatctcatttcagcatttcagaagccagatcaaggcattgtaatacctctgcagtatccagttgagaagaagtcctcagctagaagtacacaaggtactacagggataagagaagatcctgatgtctgcctgaaagccccatgaagaaaaataaaacaccttgtactttattttctataatttaaatatatgctaagtcttatatattgtagataatacagttcggtgagctacaaatgca

SEQ ID NO: 18907 - DNA, 419 bp, Homo sapiens
  source 1..419: mol_type = unassigned DNA
ggcatctcccttgcacagttctcctcctcggcctgcccaagagtccaccaggccatggacgcagtggctgtgtatcatggcaaaatcagcagggaaaccggcgagaagctcctgcttgccactgggctggatggcagctatttgctgagggacagcgagagcgtgccaggcgtgtactgcctatgtgtgctcatttcagaagccagatcaaggcattgtaatacctctgcagtatccagttgagaagaagtcctcagctagaagtacacaaggtactacagggataagagaagatcctgatgtctgcctgaaagccccatgaagaaaaataaaacaccttgtactttattttctataatttaaatatatgctaagtcttatatattgtagataatacagttcggtgagctacaaatgca

SEQ ID NO: 18908 - DNA, 461 bp, Homo sapiens
  source 1..461: mol_type = unassigned DNA
ggcatctcccttgcacagttctcctcctcggcctgcccaagagtccaccaggccatggacgcagtggctgtgtatcatggcaaaatcagcagggaaaccggcgagaagctcctgcttgccactgggctggatggcagctatttgctgagggacagcgagagcgtgccaggtatcacggttacatttatacataccgagtgtcccagacagaaacaggttcttggagtgctgagcatttcagaagccagatcaaggcattgtaatacctctgcagtatccagttgagaagaagtcctcagctagaagtacacaaggtactacagggataagagaagatcctgatgtctgcctgaaagccccatgaagaaaaataaaacaccttgtactttattttctataatttaaatatatgctaagtcttatatattgtagataatacagttcggtgagctacaaatgca

SEQ ID NO: 18909 - DNA, 3983 bp, Homo sapiens
  source 1..3983: mol_type = unassigned DNA
actaacagatcactcgacacctaccagcccaggcagggctgggactgggcatttcctggctgagctggaggcttgggcccttcccattgtctcagaaccccaggtgatgccaagacatgggctctcctgggatgccgtgcttggtgacccaggagaaggactagattgctcctggtggttgctcccccttgcagagtcccacctgcccctttgggtcctgttgcctggcctcttttgctgtcctgggtagaggagatgagttcgtcgctggctgcaagctgaggccaactgacaatgctgcacagagaaggggcaccgagagtggccccggattgagcagtccgtagtgcagagcagcccctcgggcgttctgcctggccctgcttcccctgctggctgcccttctggtgcgtgcatcccaggtggcatcatgctgcagcagatcctgcacgacatgtacatcgaccccgagctccttgccgagctcagcgatgtgcagaagcacatcctcttctacaaaatgcgggaggagcagctgaggcgctggaaggagcgggagacttgggaggccctggcccaggacgagggtctcaggcctccaaagaccaagcgagcagcgagtgacaagcacatccaatggctcctaggggcagatggcgaggtctgggtctggatcatgggagaaggccctggtgacaagccctacgaagagatctctgaggagctgattgcagagagggcgcggctgcaggcacagagggaagctgaggagctctggagacagaaggaggcagagatcaccaagaagttccgggatgctctggccaatgagaaagcccggatcttggcggagaagtggaaagtggagatggaagaccgcaaggctgccaaagtcctggaggaacgcatccacgaggaattcaagaggaaagaggaagaggagaggaagcgaggagaagagcagattcgcctccaggaagagcagagggcgaaggagctctactggaccctgaagcaggctcagctgcattgccaagccagtgagaaagaggagcgagagtgggaagaacagttgcgccggtccaaggcggctgatgaggagaggagccgccgagcccagcgcgcccgggacgagtaccgacaccactcgctccgtgctatccagaagggcacggtcgctggcctcagctccatgttccgggagcttggccagagccatgagcaggaggcaagactctaccaccacctccccgacccgggtctgccgcagccccttgccctgccggtcaggacctgggagcgcccgctgcgcccagtctccagagatgtcatcgtccgctggtttaaggaggagcagctgcctcgccgagctggcttcgagaggaacaccaagttcatcgccccctggttccatggaggaaattatcactgtttcaggaggagagttacttcaggaaccctgcggacagagggacagcccaccagactaccatctgttgtttgaataatttttttccttatcaattggattcattttggtatcctgtttttgaactcagcttaagaacttctcatctcaaatcctatggccttctggaagatccaccactatccaaaggaaaaagtagattaatatgcctcaagggatatgacatctatggcatagggctactggtctcatcccagcgatcgggacagaaattgctaatagctcatgcaactctttcatgaagagcttagctatgaccttagaagacaaagcctgtttgtcatggctgccgtaaaccgagctcttacagtgcgtggaccatgttttaataatccaaaataattccagtgccgaaccctgaatttaacatatggtagacattcagtaaatgtttgttgaatgaatgcatgtcttctaaaagttttccaacacaaattagcagtggtttcttgtaaattatttcctactcgccactctataaaatcatggcaataatagaagattatgaaggatttctatggaggacataaatgctgcatctttcataatctccattatcaccctcattgatattatcattggaattatctaaggtgagccccagtttccagggcagctgattgacaccgtcctgccttccttatttaacctcttcttttgccactcgcctctatctttgaatcatattttggccttggttttgcaatggttttatgtcatcctacagatgtcttcaagacctggggtgagttatcaatgcaagaatggttcttagaaatctgatgaggcctctgctctctgggatgtggccctctctatgcaggttactccaatgattagctctgtcctcattgtccttttaattcccttgtcaacttaatctcagtatgttgcttatattaacaagaagactcacgcaataactcctcgataactctcagtgatggtatctgttggtgcatacttgtgttccacagttatggccatatacacagaggtagtatatgatgaagagaagattacagtctttacagtcaagaagacttgggttcatatcctaaccctggaacttactagcattataatgcttgcagcattgtgtttggtgagaggaaaagaatgaatggattctaggaatgttagggaacgatttactttacccgatggctgtatcaaacatctatgccccacttcttctcttgcctcacctattccttagattcttggtcacttctctaccacaagccaccagcactataaccagttttgcgtgggttctgctcttcctccctatgttgatcagtgtcatgtgagcataagccaatggtagcttgccacatgccccatctcccattgctgcagaggcataagacagaagagatgggaagtgaatgcccgatgtggtgaatctgggatgaatgggagtcataggctggtagatcgctttttcctccttcttcctcctggaggaactattctgagagtcatctgtttgtatggtcttgtagaagacagtcctgtaagatcgagcaaccagtcatgatgaaaccaagtggtggccggatcagtatgacaccctgctgcccccgtttttaattcttctctgccttgccctgctctctcctgttgctctgggattgcacttctgaatgaagtagcagctcataagcttttgccacaggctctgtcttttggggaatccaggataagaacccattatacagaagtgttcaataatatcaattttgcaactcactcagctccatggcttcccccggtctacctgtctcactacatgcataaagtgaaatgatggaaggaatctgctttctgaactctaatgtgccttcattgattatcattaaaattatcattaaaattgccttatttctatggactcagaggaatgatgttttagttttggctctctgatttaccaactatgtgactttgtccaagtcatttaacttcagtaaacctcggtatgactgaaaagggagttttctgtatggccgtcactaggtttttttgtgggttagttaaatgataaacatgaaagctctgtccaaatgaaaaaggtatttctaacaacaaccacaataacaataacaacttagtgcttagcccatgatgtatcaggggatatgatgtgatgattttcaaggtgttggaggcaacttctgttccaagaactcccagcagctttgaaagcagactgagatgagttgagaccctgaatccctgggctgttgttcctgtcacccctaattaatatgtgagagacaacagctgggttttccatccctaacacatttatttcattttatttggggcctgcaatttctgcatgtctcatatattttaggttttacctttttacctggctttaaaataaatcccttgtaagttgtcctgcaaatgaaattactgtctggaaaactgcaatttcatcttgagagttttattatgctaataaatgtcaggattctcatat

SEQ ID NO: 18910 - DNA, 2889 bp, Homo sapiens
  source 1..2889: mol_type = unassigned DNA
aaagcagccgtgccgtgtcccagggcgggaattgtgcggggacgggctccacggaggaatcttctcttccttcccttgatgttgccagaggactcaggaggctctccagatgctgcagcgagtgacaagcacatccaatggctcctaggggcagatggcgaggtctgggtctggatcatgggagaaggccctggtgacaagccctacgaagagatctctgaggagctgattgcagagagggcgcggctgcaggcacagagggaagctgaggagctctggagacagaaggaggcagagatcaccaagaagttccgggatgctctggccaatgagaaagcccggatcttggcggagaagtggaaagtggagatggaagaccgcaaggctgccaaagtcctggaggaacgcatccacgaggaattcaagaggaaagaggaagaggagaggaagcgaggagaagagcagattcgcctccaggaagagcagagggcgaaggagctctactggaccctgaagcaggctcagctgcattgccaagccagtgagaaagaggagcgagagtgggaagaacagttgcgccggtccaaggcggctgatgaggagaggagccgccgagcccagcgcgcccgggacgagtaccgacaccactcgctccgtgctatccagaagggcacggtcgctggcctcagctccatgttccgggagcttggccagagccatgagcaggaggcaagactctaccaccacctccccgacccgggtctgccgcagccccttgccctgccggtcagcaggacctgggagcgcccgctgcgcccagtctccagagatgtcatcgtccgctggtttaaggaggagcagctgcctcgccgagctggcttcgagaggaacaccaagttcatcgccccctggttccatggaggaaattatcactgtttcaggaggagagttacttcaggaaccctgcggacagagggacagcccaccagactaccatctgttgtttgaataatttttttccttatcaattggattcattttggtatcctgtttttgaactcagcttaagaacttctcatctcaaatcctatggccttctggaagatccaccactatccaaaggaaaaagtagattaatatgcctcaagggatatgacatctatggcatagggctactggtctcatcccagcgatcgggacagaaattgctaatagctcatgcaactctttcatgaagagcttagctatgaccttagaagacaaagcctgtttgtcatggctgccgtaaaccgagctcttacagtgcgtggaccatgttttaataatccaaaataattccagtgccgaaccctgaatttaacatatggtagacattcagtaaatgtttgttgaatgaatgcatgtcttctaaaagttttccaacacaaattagcagtggtttcttgtaaattatttcctactcgccactctataaaatcatggcaataatagaagattatgaaggatttctatggaggacataaatgctgcatctttcataatctccattatcaccctcattgatattatcattggaattatctaaggtgagccccagtttccagggcagctgattgacaccgtcctgccttccttatttaacctcttcttttgccactcgcctctatctttgaatcatattttggccttggttttgcaatggttttatgtcatcctacagatgtcttcaagacctggggtgagttatcaatgcaagaatggttcttagaaatctgatgaggcctctgctctctgggatgtggccctctctatgcaggttactccaatgattagctctgtcctcattgtccttttaattcccttgtcaacttaatctcagtatgttgcttatattaacaagaagactcacgcaataactcctcgataactctcagtgatggtatctgttggtgcatacttgtgttccacagttatggccatatacacagaggtagtatatgatgaagagaagattacagtctttacagtcaagaagacttgggttcatatcctaaccctggaacttactagcattataatgcttgcagcattgtgtttggtgagaggaaaagaatgaatggattctaggaatgttagggaacgatttactttacccgatggctgtatcaaacatctatgccccacttcttctcttgcctcacctattccttagattcttggtcacttctctaccacaagccaccagcactataaccagttttgcgtgggttctgctcttcctccctatgttgatcagtgtcatgtgagcataagccaatggtagcttgccacatgccccatctcccattgctgcagaggcataagacagaagagatgggaagtgaatgcccgatgtggtgaatctgggatgaatgggagtcataggctggtagatcgctttttcctccttcttcctcctggaggaactattctgagagtcatctgtttgtatggtcttgtagaagacagtcctgtaagatcgagcaaccagtcatgatgaaaccaagtggtggccggatcagtatgacaccctgctgcccccgtttttaattcttctctgccttgccctgctctctcctgttgctctgggattgcacttctgaatgaagtagcagctcataagcttttgccacaggctctgtcttttggggaatccaggataagaacccattatacagaagtgttcaataatatcaattttgcaactcactcagctccatggcttcccccggtctacctgtctcactacatgcataaagtgaaatgatggaaggaatctgctttctgaactctaatgtgccttcattgattatcattaaaattatcattaaaattgccttatttctatgg

SEQ ID NO: 18911 - DNA, 2896 bp, Homo sapiens
  source 1..2896: mol_type = unassigned DNA
atgtggaagaagaggctgggtgaagcaggctgccctgcactgcttaatgaagaagaaagacatctgaggttactgagaaggaagagtgtgaggactgggaacacaggctggctctctgtagggctgtagggggtaaaggaaagcccagagtggcagcgagtgggaagacaggggctggaggccaactccacagatgacagctcaggacctgggagcgcccgctgcgcccagtctccagagatgtcatcgtccgctggtttaaggaggagcagctgcctcgccgagctggcttcgagaggaacaccaagttcatcgccccctggttccatggaggaaattatcactgtttcaggaggagagttacttcaggaaccctgcggacagagggacagcccaccagactaccatctgttgtttgaataatttttttccttatcaattggattcattttggtatcctgtttttgaactcagcttaagaacttctcatctcaaatcctatggccttctggaagatccaccactatccaaaggaaaaagtagattaatatgcctcaagggatatgacatctatggcatagggctactggtctcatcccagcgatcgggacagaaattgctaatagctcatgcaactctttcatgaagagcttagctatgaccttagaagacaaagcctgtttgtcatggctgccgtaaaccgagctcttacagtgcgtggaccatgttttaataatccaaaataattccagtgccgaaccctgaatttaacatatggtagacattcagtaaatgtttgttgaatgaatgcatgtcttctaaaagttttccaacacaaattagcagtggtttcttgtaaattatttcctactcgccactctataaaatcatggcaataatagaagattatgaaggatttctatggaggacataaatgctgcatctttcataatctccattatcaccctcattgatattatcattggaattatctaaggtgagccccagtttccagggcagctgattgacaccgtcctgccttccttatttaacctcttcttttgccactcgcctctatctttgaatcatattttggccttggttttgcaatggttttatgtcatcctacagatgtcttcaagacctggggtgagttatcaatgcaagaatggttcttagaaatctgatgaggcctctgctctctgggatgtggccctctctatgcaggttactccaatgattagctctgtcctcattgtccttttaattcccttgtcaacttaatctcagtatgttgcttatattaacaagaagactcacgcaataactcctcgataactctcagtgatggtatctgttggtgcatacttgtgttccacagttatggccatatacacagaggtagtatatgatgaagagaagattacagtctttacagtcaagaagacttgggttcatatcctaaccctggaacttactagcattataatgcttgcagcattgtgtttggtgagaggaaaagaatgaatggattctaggaatgttagggaacgatttactttacccgatggctgtatcaaacatctatgccccacttcttctcttgcctcacctattccttagattcttggtcacttctctaccacaagccaccagcactataaccagttttgcgtgggttctgctcttcctccctatgttgatcagtgtcatgtgagcataagccaatggtagcttgccacatgccccatctcccattgctgcagaggcataagacagaagagatgggaagtgaatgcccgatgtggtgaatctgggatgaatgggagtcataggctggtagatcgctttttcctccttcttcctcctggaggaactattctgagagtcatctgtttgtatggtcttgtagaagacagtcctgtaagatcgagcaaccagtcatgatgaaaccaagtggtggccggatcagtatgacaccctgctgcccccgtttttaattcttctctgccttgccctgctctctcctgttgctctgggattgcacttctgaatgaagtagcagctcataagcttttgccacaggctctgtcttttggggaatccaggataagaacccattatacagaagtgttcaataatatcaattttgcaactcactcagctccatggcttcccccggtctacctgtctcactacatgcataaagtgaaatgatggaaggaatctgctttctgaactctaatgtgccttcattgattatcattaaaattatcattaaaattgccttatttctatggactcagaggaatgatgttttagttttggctctctgatttaccaactatgtgactttgtccaagtcatttaacttcagtaaacctcggtatgactgaaaagggagttttctgtatggccgtcactaggtttttttgtgggttagttaaatgataaacatgaaagctctgtccaaatgaaaaaggtatttctaacaacaaccacaataacaataacaacttagtgcttagcccatgatgtatcaggggatatgatgtgatgattttcaaggtgttggaggcaacttctgttccaagaactcccagcagctttgaaagcagactgagatgagttgagaccctgaatccctgggctgttgttcctgtcacccctaattaatatgtgagagacaacagctgggttttccatccctaacacatttatttcattttatttggggcctgcaatttctgcatgtctcatatattttaggttttacctttttacctggctttaaaataaatcccttgtaagttgtcctgcaaatgaaattactgtctggaaaactgcaatttcatcttgagagttttattatgctaataaatgtcaggattctcat

SEQ ID NO: 18912 - DNA, 2626 bp, Homo sapiens
  source 1..2626: mol_type = unassigned DNA
ctgattaccactgatgctgaggatcttttcacacgtttcacggccacttggatttcttctgaggaaattatcactgtttcaggaggagagttacttcaggaaccctgcggacagagggacagcccaccagactaccatctgttgtttgaataatttttttccttatcaattggattcattttggtatcctgtttttgaactcagcttaagaacttctcatctcaaatcctatggccttctggaagatccaccactatccaaaggaaaaagtagattaatatgcctcaagggatatgacatctatggcatagggctactggtctcatcccagcgatcgggacagaaattgctaatagctcatgcaactctttcatgaagagcttagctatgaccttagaagacaaagcctgtttgtcatggctgccgtaaaccgagctcttacagtgcgtggaccatgttttaataatccaaaataattccagtgccgaaccctgaatttaacatatggtagacattcagtaaatgtttgttgaatgaatgcatgtcttctaaaagttttccaacacaaattagcagtggtttcttgtaaattatttcctactcgccactctataaaatcatggcaataatagaagattatgaaggatttctatggaggacataaatgctgcatctttcataatctccattatcaccctcattgatattatcattggaattatctaaggtgagccccagtttccagggcagctgattgacaccgtcctgccttccttatttaacctcttcttttgccactcgcctctatctttgaatcatattttggccttggttttgcaatggttttatgtcatcctacagatgtcttcaagacctggggtgagttatcaatgcaagaatggttcttagaaatctgatgaggcctctgctctctgggatgtggccctctctatgcaggttactccaatgattagctctgtcctcattgtccttttaattcccttgtcaacttaatctcagtatgttgcttatattaacaagaagactcacgcaataactcctcgataactctcagtgatggtatctgttggtgcatacttgtgttccacagttatggccatatacacagaggtagtatatgatgaagagaagattacagtctttacagtcaagaagacttgggttcatatcctaaccctggaacttactagcattataatgcttgcagcattgtgtttggtgagaggaaaagaatgaatggattctaggaatgttagggaacgatttactttacccgatggctgtatcaaacatctatgccccacttcttctcttgcctcacctattccttagattcttggtcacttctctaccacaagccaccagcactataaccagttttgcgtgggttctgctcttcctccctatgttgatcagtgtcatgtgagcataagccaatggtagcttgccacatgccccatctcccattgctgcagaggcataagacagaagagatgggaagtgaatgcccgatgtggtgaatctgggatgaatgggagtcataggctggtagatcgctttttcctccttcttcctcctggaggaactattctgagagtcatctgtttgtatggtcttgtagaagacagtcctgtaagatcgagcaaccagtcatgatgaaaccaagtggtggccggatcagtatgacaccctgctgcccccgtttttaattcttctctgccttgccctgctctctcctgttgctctgggattgcacttctgaatgaagtagcagctcataagcttttgccacaggctctgtcttttggggaatccaggataagaacccattatacagaagtgttcaataatatcaattttgcaactcactcagctccatggcttcccccggtctacctgtctcactacatgcataaagtgaaatgatggaaggaatctgctttctgaactctaatgtgccttcattgattatcattaaaattatcattaaaattgccttatttctatggactcagaggaatgatgttttagttttggctctctgatttaccaactatgtgactttgtccaagtcatttaacttcagtaaacctcggtatgactgaaaagggagttttctgtatggccgtcactaggtttttttgtgggttagttaaatgataaacatgaaagctctgtccaaatgaaaaaggtatttctaacaacaaccacaataacaataacaacttagtgcttagcccatgatgtatcaggggatatgatgtgatgattttcaaggtgttggaggcaacttctgttccaagaactcccagcagctttgaaagcagactgagatgagttgagaccctgaatccctgggctgttgttcctgtcacccctaattaatatgtgagagacaacagctgggttttccatccctaacacatttatttcattttatttggggcctgcaatttctgcatgtctcatatattttaggttttacctttttacctggctttaaaataaatcccttgtaagttgtcctgcaaatgaaattactgtctggaaaactgcaatttcatcttgagagttttattatgctaataaatgtcaggattctcat

SEQ ID NO: 18913 - DNA, 4653 bp, Homo sapiens
  source 1..4653: mol_type = unassigned DNA
ccgggcggcgctgggcttttatctgcggacccgccgggagggagccagatcccagcgatcttccccgacggcagcgctttacccagaggctgccggcggctcgtagctgggttcagctctgcgtccacgccagcccggagcccggggggcaaggggtctgtcccgggcgcagcgagaggatggtcatccgcgtgttcatcgcctcttcctcgggcttcgtggcgataaagaagaagcagcaagatgtggttagatttctggaagccaacaagatagagtttgaggaggtggatatcacaatgtcagaagaacagaggcaatggatgtacaaaaacgtccccccggaaaagaaacccactcagggcaaccccctgccacctcagatatttaatggcgaccgatactgtggagattatgacagtttttttgaatccaaggaaagcaacacagtcttttcatttttaggcctgaaaccacggttggcatcaaaggcagaaccttagagaagaagagtggaagatgacggagatgcattttgaagcacccctggtactcagcacacacatgcttacctaatgcatcactgtgacaaaagccacacgcattatcagtaactttgcttgccacggaaaaggtgtttttgaaagatgtggctataatgagaattgcatgattgctttaaaccaaatcaggtggtggattttttttttcttattctatttgcctgcagttgcctcactcacctggaaataccgtcacctgttacaggtgtactttcttaatgactgaaagataagtgggtagcaccgtcagagagaaaatgttggatctgccctaggttatagtagatgccggaattgcgtaaacccacttctctttaagctgcctggattgcacctttgaaatatgtctgccaagttgttagaatctttgaatcagaaggaaaaaaagcagcgctggttgacaaagggtgttgaagatttttgctgcagaatcagttacaaacatcacagttcccatgctttgtaataacacctggtgaaaaagttagatattctagacttgttttagtaatggaaactcttacctccacatattatcctacagatgtttccagaaatccctgttgtaacatcaagtgatcagaactaagttactgggatgacaataattgctatttgaaatatatgcttctttatttcttgcaaggggcaagtttcacccaaatgcctgagactgcttgaaagatatattttaagtggtgcactaattagtgaatatataggaaaattatctgacgagtatctgaaggcattttcagctctagcaatttatttataatatataagttcatatattttttaatccagctcccctaacagacagctgctgcttctattttgtgaagggactatattttttgagaaaggaaaatctcagttagatatattttgtgaacccttgattagacatattaaaatataccaatgttgtagtaaaatttaatttttccttttgttacttttcatttgcctctaattttgcttgctcatatttctggccaatgtacagcctcatatttttcagagtaatacagatacttgttctcattccgtatatgagcacaagtaaggtttcagagcaacacacatgagaaagagagtaacccggaattgtacttgtcaagcaaaatctatactcctattggagtggatgctgatgaacatcgaacatatctacttcattagagcagaggctatttttctgcattcttgtccctataacagggatgcttaattttttttttaacttagagttttaaattgccaaacatgggaacagccttgaataggataaattttcagagggctgcctaaaatattttatttctagcatcctgattctggacttttcattataattctgagcaggaaatttataagaaattgaaagagcagaagaattacagccctgtcacatgtgcccagcactccgccccatgccttgctaaatgtagactaaagaacttgttgaatgctaaggctgaaatcccaacctgagatttgtagtccaggattacaaccagaaggaaagtatgacagatttctacttaactagaatggacacatgatccacaattttctcttcaagggaagctgttgtcaaattatggatattactggttagttgtcattaagtaagatccaggtcaaattccatttgacaaatcccagggactatccaggaatttttttttaactggatattgtgtttgagtatgtgagtcttctgataaaactcagaatttctttttaagcagttgtaaaaattgtcatgttgtaattcattactcagctaacatttagtctactcttgctagtgagtgccaagaaccaacttggtaaggttgaggctttgcaagttaactgctggggttataggatcaataccatacttgctagacaaagctacccagatttgtcttatattataatttttgagttaaccgtagtatacctattatgattatagtaaacagactagtgggtagtaatgctaaattaccatcacagttatgtgccatctccccaccccatttttttttttttttttttgatcagcaaagaaatacaggagaccagtctcgagtggtgctgtacttgttatgagtgaggcagcagcacagtgtgtggcatttacatggtacccaggctccacagagtaccaagatgttgccctctgggaccacacttagctcagagaatatggggtccttacttgtattcttttatcagctgattttgaaacatataataatgattttcttgttcccttctttaactagctgcctttagattttgataatcacagtcttaaaatactaggaaagaagtggatgggaattgtaggcatagatttcatatcaagggcatttcaagacagaatttttatttcctgtagtaggcttgctggagcaaaggaaatgtgctgctaaaaatcaacttatgccattttaaaattagataaaatatggagtgccatcctgctaggtgagtacagaccagaagaaaatttagttgggaaaatacttgtttttccaaattccggtgttttattacaatcaaagaagaggaaagcaaggtattttttcacctcagattctaatatattctagatttgtttctgttttatagatttaattcaatacctccacatagatgtttttatattacatgaatttaataataaactaaacttttttttgtctcccgttattgaaaagtaccaaagcttctttctgttgtgtttgattttactataggggttttgctttttctagagatacttttcatttaacagcttttgttaagtgtcaggctgcactttgctccatataattattgttttcagatttcaacttgtatgtgtttgtctcttaaagcattggtgaaatcacatattttatattcagcataaaggagaataaattccagaaaacacatattctgaaaatggagtgtttgttccctgccatttttcacacctctcttaattttagttctgtttagttgagaggctgtgattttactcttgcctgtgaacctcatgcatgaaagcagcacattaaattgtaaaaatacaaacagatcgtgtgatcattcaaggagccagacatgaggtcctgcacgagggtgttgggaggacaccacagattcatctcagacagtgatcaggactgaggatggagttaaatcactcagcccctgggtggggtggggtggttcaaatggatgactgatctcctgagtacactgaagccacaggctggtggccatgttctctgaattgggtgcagaagacaagggcagagtggctgcggcccctattacctttgtagcagccacatcagaaagcagaagaaaacagtatttctgaaggcattgtttgaggttgatctcagcactgaacgatttcaagccctacgcaccagaacagaaggagggtggaggaagtgatcagagggaacgagctgtaggtttgcagaaatgtgtgaaaccaaaatgatcactgcctacttgtgattcaaatcttcagagttttcctagttcttctagaaatacatgtcaggtttgtttgttcatcctttctgtcagcatggatcaagcccctaaaatgtggtaagtgttgtcagagcagggcaatatctctactctcaagtatgaggggaatagaaacaaagcagcagttttagccagggttcaatgatagagtggaggtaaattaagagcctccaggctgtgattcaccatttgagacattatacataatttgtttttgttataagccatttgaatttttaaaaaatttcatacatgcaatggaatatagatatgtatatacacatataatatatatgctaaagtataaagagtaataataatgacaataaacaaacccctgtgtgcctaccacccaccttattgcctttcctttgaggtaccgtgtgcggtttcctgaacctatctctatccctgtctgatagagggaacccctgtactgaactttgtgttgaccatagccttcttgtctttcatcactttatctccatgtatgtatccttaaagaataataaatggaattaaactgaatgta

SEQ ID NO: 18914 - DNA, 2265 bp, Homo sapiens
  source 1..2265: mol_type = unassigned DNA
gggcgcgggcgggacggagctgcggcggcggcgggtcccgcgggcgggagcgcctggcggccgagtcaagccgccgcctcgacccagggcccgcgggccaggagagcgctcggcggcttcatggcggctgaagagatgcattggcctgtccctatgaaggccattggtgcccagaacctgctaaccatgcctgggggcgtggccaaggctggctacctgcacaagaagggcggtacccagctgcagctgctgaaatggcccctgcgctttgtcatcatccacaaacgctgcgtctactacttcaagagtagcacctctgcctccccgcagggcgccttctccctgagtggctataaccgggtgatgcgggcggctgaggagaccacgtccaacaacgttttccccttcaagatcatccatatcagcaagaagcaccgcacgtggttcttctcggcctcctccgaggaggagcgcaagagctggatggccttgctgcgcagggagattggccacttccacgaaaagaaagacctgcccttggacaccagcgactccagctcggacacagacagcttctacggcgcagttgagcggcctgtggatatcagcctttccccgtaccccacggacaatgaagactatgagcacgacgatgaggatgactcctacctggagcctgactccccggagcccggaaggcttgaggatgccctgatgcacccaccggcttacccaccacccccagtgcccacgcccaggaagccagccttctctgacatgccccgggcccactcctttacctccaagggccccggtcccctactgccacccccgccccctaagcacggcctcccagatgttggcctggctgctgaggactccaagagggacccactgtgcccgaggcgggctgagccttgccccagggtacctgctaccccccgaaggatgagcgatccccctctgagcaccatgcccaccgcacccggcctccggaaacccccttgcttccgggagagtgccagccccagcccggagccctggacccctggccacggggcctgctccacttccagtgctgccatcatggccactgccacctccagaaactgtgacaaactcaagtccttccacctgtccccccgaggaccacccacatctgagcccccacctgtgccagccaacaagcccaagttcctgaagatagctgaagaggaccccccaagggaggcagccatgcccggactctttgtgccccccgtggctccccggcctcctgcgctgaagctgccagtgcctgaggccatggcgcggcccgcagtcctgcccaggccagagaagccgcagctcccgcacctccagcgatcaccccccgatgggcagagtttcaggagcttctcctttgaaaagccccggcaaccctcacaggctgacactggcggggacgactcggacgaggactatgagaaggtgccactgcccaactcggtcttcgtcaacaccacggagtcctgcgaagtggaaaggttgttcaaggctacaagcccccggggagagccccaggatggactctactgcatccggaactcctctaccaagtcggggaaggtcctggttgtgtgggacgaaacctctaacaaagtgaggaactatcgcatttttgagaaggactctaagttctacctggagggcgaggtcctgtttgtgagtgtgggcagcatggtggagcactaccacacccacgtgctgcccagccaccagagcctgctgctgcggcacccctacggctacactgggcctaggtgatggcagtccatgtggctgccaggccaaggcagtcacaggggccctgaccccaggccacacagacggacatgggcccacatgggagggtgagcaggagcaaggctgtgcttgcctagggcctctgtgatggacatctcgtaggacccagccagtctcatccagcaggttgggttctagggctgaaccaggcgccaggctccagaggacgaagggactctgttgccccacactaacttgccctgtcccaatcccagaaacccaggaccaagctgtgcctgggctccaaggacaggaacactggtccccccatcacactcacccctaagtgggctgggagccaggcagggccagggcagctgggtgggggccggggctggccctgggacccccaggaacgctaagacacaggctccagtaggggctgttgcctccaataaagcagcagtgagctttgccttg

SEQ ID NO: 18915 - DNA, 551 bp, Homo sapiens
  source 1..551: mol_type = unassigned DNA
agcgcctggcggccgagtcaagccgccgcctcgacccagggcccgcgggccaggagagcgctcggcgggctgacccttggccctctgcctgccctgctggctggctcccactcatcctgcttcatggcggctgaagagatgcattggcctgtccctatgaaggccattggtgcccagaacctgctaaccatgcctgggggcgtggccaaggctggctacctgcacaagaagggcggtacccagctgcagctgctgaaatggcccctgcgctttgtcatcatccacaaacgctgcgtctactacttcaagagtagcacctctgcctccccgcagggcgccttctccctgagtggctataaccgggtgatgcgggcggctgaggagaccacgtccaacaacgttttccccttcaagatcatccatatcagcaagaagcaccgcacgtggttcttctcggcctcctccgaggaggagcgcaagagctggatggccttgctgcgcagggagattggccacttccacgaaaagaaagacctgcccttggacaccag

SEQ ID NO: 18916 - DNA, 615 bp, Homo sapiens
  source 1..615: mol_type = unassigned DNA
gcgcctggcggccgagtcaagccgccgcctcgacccagggcccgcgggccaggagagcgctcggcggcttcatggcggctgaagagatgcattggcctgtccctatgaaggccattggtgcccagaacctgctaaccatgcctgggggcgtggccaaggctggctacctgcacaagaagggcggtacccagctgcagctgctgaaatggcccctgcgctttgtcatcatccacaaacgctgcgtctactacttcaagagtagcacctctgcctccccgcagggcgccttctccctgagtggctataaccgggtgatgcgggcggctgaggagaccacgtccaacaacgttttccccttcaagatcatccatatcagcaagaagcaccgcacgtggttcttctcggcctcctccgaggaggagcgcaaggtgactgggggtccgaggacgagtgcaaggtgactgggggtgtgggcctgcaggcaccaggctggacctgccttgggggctcgctggtcctggggcgctggcctctcagccccgggcaaagagaaggtgtggctgggacacaggcagctgggtgggtgctgccccagctccatccccatgcccagag

SEQ ID NO: 18917 - DNA, 407 bp, Homo sapiens
  source 1..407: mol_type = unassigned DNA
aaagccgcccactggcgctgattcacactgaagtgtgacatgggccggtgatgcaatgtgtagaattgtttccacaaccgcctgaaggcagggcccacagcctcctccttgccgaagcaagcctctgggttcaggctctgtaacttccaaggccatgagagtggtcaggccctgcttggtttcccggcccccgatcacagatcgtgctggaactgctggccccaacgccctgaggtgactggccctttcttcatggattccggtcacatctggtccatctttgtcagctggcctctgggaagaatgtgggctcggccacctggagcagttgcctggggagatcagaggagccctgaggggttggcagagcgccctcgtggtatccatacccccatccctgtagctga

SEQ ID NO: 18918 - DNA, 517 bp, Homo sapiens
  source 1..517: mol_type = unassigned DNA
gcaggtgacatgggccggtgatgcaatgtgtagaattgtttccacaaccgcctgaaggcagggcccacagcctcctccttgccgaagcaagcctctgggttcagcttcatggcggctgaagagatgcattggcctgtccctatgaaggccattggtgcccagaacctgctaaccatgcctgggggcgtggccaaggctggctacctgcacaagaagggcggtacccagctgcagctgctgaaatggcccctgcgctttgtcatcatccacaaacgctgcgtctactacttcaagagtagcacctctgcctccccgcagggcgccttctccctgagtggctataaccgggtgatgcgggcggctgaggagaccacgtccaacaacgttttccccttcaagatcatccatatcagcaagaagcaccgcacgtggttcttctcggcctcctccgaggaggagcgcaaggtgactgggggtccgaggacgagtgcaaggtgactgggggtgtgggcctgca

SEQ ID NO: 18919 - DNA, 649 bp, Homo sapiens
  source 1..649: mol_type = unassigned DNA
gcaggtgacatgggccggtgatgcaatgtgtagaattgtttccacaaccgcctgaaggcagggcccacagcctcctccttgccgaagcaagcctctgggttcagcttcatggcggctgaagagatgcattggcctgtccctatgaaggccattggtgcccagaacctgctaaccatgcctgggggcgtggccaaggctggctacctgcacaagaagggcggtacccagctgcagctgctgaaatggcccctgcgctttgtcatcatccacaaacgctgcgtctactacttcaagagtagcacctctgcctccccgcagggcgccttctccctgagtggctataaccgggtgatgcgggcggctgaggagaccacgtccaacaacgttttccccttcaagatcatccatatcagcaagaagcaccgcacgtggttcttctcggcctcctccgaggaggagcgcaaggtgactgggggtccgaggacgagtgcaaggtgactgggggtgtgggcctgcaggcaccaggctggacctgccttgggggctcgctggtcctggggcgctggcctctcagccccgggcaaagagaaggtgtggctgggacacaggcagctgggtgggtgctgccccagctccatccccatgccca

SEQ ID NO: 18920 - DNA, 557 bp, Homo sapiens
  source 1..557: mol_type = unassigned DNA
actcgaggccagaaagggaagcccctttccagtgggcttcatggcggctgaagagatgcattggcctgtccctatgaaggccattggtgcccagaacctgctaaccatgcctgggggcgtggccaaggctggctacctgcacaagaagggcggtacccagctgcagctgctgaaatggcccctgcgctttgtcatcatccacaaacgctgcgtctactacttcaagagtagcacctctgcctccccgcagggcgccttctccctgagtggctataaccgggtgatgcgggcggctgaggagaccacgtccaacaacgttttccccttcaagatcatccatatcagcaagaagcaccgcacgtggttcttctcggcctcctccgaggaggagcgcaagagctggatggccttgctgcgcagggagattggccacttccacgaaaagaaagacctgcccttggacaccagcgactccagctcggacacagacagcttctacggcgcagttgagcggcctgtggatatcagcctttccccgtaccccacggacaatgaag

SEQ ID NO: 18921 - DNA, 876 bp, Homo sapiens
  source 1..876: mol_type = unassigned DNA
acggggcctgggaaactccaaagccggcgtcaggtcatcgaggcctccgggctgattaggactaatggcgctcaggggtgcagcctcagcctccacccgccacccgtacccgccctgcctcaggacttcgttcctgctgtacccctgctggctgcctgtccccacaggtggctccttcctccccaccggaggagctgctcccaggcgggaccctgggggtggaatctctgaaatgccttcccctcgggaccctcaccgcgactggacttcgctcagcttcagaccctgggctgcagctgcctaatgagcttcatggcggctgaagagatgcattggcctgtccctatgaaggccattggtgcccagaacctgctaaccatgcctgggggcgtggccaaggctggctacctgcacaagaagggcggtacccagctgcagctgctgaaatggcccctgcgctttgtcatcatccacaaacgctgcgtctactacttcaagagtagcacctctgcctccccgcagggcgccttctccctgagtggctataaccgggtgatgcgggcggctgaggagaccacgtccaacaacgttttccccttcaagatcatccatatcagcaagaagcaccgcacgtggttcttctcggcctcctccgaggaggagcgcaagagctggatggccttgctgcgcagggagattggccacttccacgaaaagaaagacctgcccttggacaccagcgactccagctcggacacagacagcttctacggcgcagttgagcggcctgtggatatcagcctttccccgtaccccacggacaatgaagactatgagcacgacgatgaggatgactcctacctggagcctgactcc

SEQ ID NO: 18922 - DNA, 868 bp, Homo sapiens
  source 1..868: mol_type = unassigned DNA
tcaggggtgcagcctcagcctccacccgccacccgtacccgccctgcctcaggacttcgttcctgctgtacccctgctggctgcctgtccccacaggtggctccttcctccccaccggaggagctgctcccaggcgggaccctgggggtggaatctctgaaatgccttcccctcgggaccctcaccgcgactggacttcgctcagcttcagaccctgggctgcagctgcctaatgagcttcatggcggctgaagagatgcattggcctgtccctatgaaggccattggtgcccagaacctgctaaccatgcctgggggcgtggccaaggctggctacctgcacaagaagggcggtacccagctgcagctgctgaaatggcccctgcgctttgtcatcatccacaaacgctgcgtctactacttcaagagtagcacctctgcctccccgcagggcgccttctccctgagtggctataaccggcagcccagaccccagccagcccaggccctgtcccaaacagaggctgggccctaggattccctgctccagggtcctcccaggccgggatcagtttccagcttcacgcatgtcctgggctgggctctatccagtgatgggccatgagctgccctggagggccttctgcactaacagggtgatgcgggcggctgaggagaccacgtccaacaacgttttccccttcaagatcatccatatcagcaagaagcaccgcacgtggttcttctcggcctcctccgaggaggagcgcaagagctggatggccttgctgcgcagggagattggccacttccacgaaaagaaagacctgcccttggacaccaggtgagcccgggcccagggcatacc

SEQ ID NO: 18923 - DNA, 966 bp, Homo sapiens
  source 1..966: mol_type = unassigned DNA
gctgacccttggccctctgcctgccctgctggctggctcccactcatcctgcttcatggcggctgaagagatgcattggcctgtccctatgaaggccattggtgcccagaacctgctaaccatgcctgggggcgtggccaaggctggctacctgcacaagaagggcggtacccagctgcagctgctgaaatggcccctgcgctttgtcatcatccacaaacgctgcgtctactacttcaagagtagcacctctgcctccccgcagggcgccttctccctgagtggctataaccgggtgatgcgggcggctgaggagaccacgtccaacaacgttttccccttcaagatcatccatatcagcaagaagcaccgcacgtggttcttctcggcctcctccgaggaggagcgcaaggtgactgggggtccgaggacgagtgcaaggtgactgggggtgtgggcctgcaggcaccaggctggacctgccttgggggctcgctggtcctggggcgctggcctctcagccccgggcaaagagaaggtgtggctgggacacaggcagctgggtgggtgctgccccagctccatccccatgcccagagcctggtgccagcgcccacacaaggaacatgctgtcctgggaggtgcccctgtgggctgaggggagccacacagccatgttgtatccagccgggtcgcctcctctgaccttgggagtcacagcagagcaggcagggcagtgaaggtggaggggtgcggtggggcccaccctggtggcaccgtgcccaccacagccccgctgacctgcagagctggatggccttgctgcgcagggagattggccacttccacgaaaagaaagacctgcccttggacaccagcgactccagctcggacacagacagcttctacggcgcagttgagcggcctgtggatatcagcctttccccgtaccccacggacaatgaa

SEQ ID NO: 18924 - DNA, 688 bp, Homo sapiens
  source 1..688: mol_type = unassigned DNA
cttgaaattcatagaaccgggtgcaagacataacagccctctgtgtggcctcagatggcagagcagggtggcagcagctgccctggcaggaagagcatgctgcttcatggcggctgaagagatgcattggcctgtccctatgaaggccattggtgcccagaacctgctaaccatgcctgggggcgtggccaaggctggctacctgcacaagaagggcggtacccagctgcagctgctgaaatggcccctgcgctttgtcatcatccacaaacgctgcgtctactacttcaagagtagcacctctgcctccccgcagggcgccttctccctgagtggctataaccgggtgatgcgggcggctgaggagaccacgtccaacaacgttttccccttcaagatcatccatatcagcaagaagcaccgcacgtggttcttctcggcctcctccgaggaggagcgcaagagctggatggccttgctgcgcagggagattggccacttccacgaaaagaaagacctgcccttggacaccagcgactccagctcggacacagacagcttctacggcgcagttgagcggcctgtggatatcagcctttccccgtaccccacggacaatgaagactatgagcacgacgatgaggatgactcctacctggagcctgactccccggagcccggaaggctt

SEQ ID NO: 18925 - DNA, 609 bp, Homo sapiens
  source 1..609: mol_type = unassigned DNA
aaatgctgctctgtgctgggcctgacacccagggtgcaggttgtttcatggtttgctagggagaagccgagtattcagaggtggccctgcggggaggcagcagggagcttcctcccagggatgcagctgaccttgcgctggagccagagagccctggcctctgaccacaggatgggagggcaggagcagtggaagcttcatggcggctgaagagatgcattggcctgtccctatgaaggccattggtgcccagaacctgctaaccatgcctgggggcgtggccaaggctggctacctgcacaagaagggcggtacccagctgcagctgctgaaatggcccctgcgctttgtcatcatccacaaacgctgcgtctactacttcaagagtagcacctctgcctccccgcagggcgccttctccctgagtggctataaccgggtgatgcgggcggctgaggagaccacgtccaacaacgttttccccttcaagatcatccatatcagcaagaagcaccgcacgtggttcttctcggcctcctccgaggaggagcgcaagagctggatggccttgctgcgcagggagattggccacttccacgaaaagaaaga

SEQ ID NO: 18926 - DNA, 727 bp, Homo sapiens
  source 1..727: mol_type = unassigned DNA
cagaagcagcaggagtgagctgtgggcacagctgtggggcagccaggcgcgtcaggcctcacatgtctgggagatgtaggctgcctgggctggtggcccctgagccgcatggcctccctgggccccaggacaccggccccgagcaggtcacgaggacggagggccatgtgttgggtcagcaccatcagctcctgcccatgttaactcagccgacaccgcagcagcatggtgacaggtccccccagggtgtctgcctctacagaggaagggactgaagcacccagagagctggcagcttcatggcggctgaagagatgcattggcctgtccctatgaaggccattggtgcccagaacctgctaaccatgcctgggggcgtggccaaggctggctacctgcacaagaagggcggtacccagctgcagctgctgaaatggcccctgcgctttgtcatcatccacaaacgctgcgtctactacttcaagagtagcacctctgcctccccgcagggcgccttctccctgagtggctataaccgggtgatgcgggcggctgaggagaccacgtccaacaacgttttccccttcaagatcatccatatcagcaagaagcaccgcacgtggttcttctcggcctcctccgaggaggagcgcaagagctggatggccttgctgcgcagggagattggccacttccacgaaaagaaagacctgcccttggacaccag

SEQ ID NO: 18927 - DNA, 1071 bp, Homo sapiens
  source 1..1071: mol_type = unassigned DNA
ggagtgagctgtgggcacagctgtggggcagccaggcgcgtcaggcctcacatgtctgggagatgtaggctgcctgggctggtggcccctgagccgcatggcctccctgggccccaggacaccggccccgagcaggtcacgaggacggagggccatgtgttgggtcagcaccatcagcttcatggcggctgaagagatgcattggcctgtccctatgaaggccattggtgcccagaacctgctaaccatgcctgggggcgtggccaaggctggctacctgcacaagaagggcggtacccagctgcagctgctgaaatggcccctgcgctttgtcatcatccacaaacgctgcgtctactacttcaagagtagcacctctgcctccccgcagggcgccttctccctgagtggctataaccgggtgatgcgggcggctgaggagaccacgtccaacaacgttttccccttcaagatcatccatatcagcaagaagcaccgcacgtggttcttctcggcctcctccgaggaggagcgcaaggtgactgggggtccgaggacgagtgcaaggtgactgggggtgtgggcctgcaggcaccaggctggacctgccttgggggctcgctggtcctggggcgctggcctctcagccccgggcaaagagaaggtgtggctgggacacaggcagctgggtgggtgctgccccagctccatccccatgcccagagcctggtgccagcgcccacacaaggaacatgctgtcctgggaggtgcccctgtgggctgaggggagccacacagccatgttgtatccagccgggtcgcctcctctgaccttgggagtcacagcagagcaggcagggcagtgaaggtggaggggtgcggtggggcccaccctggtggcaccgtgcccaccacagccccgctgacctgcagagctggatggccttgctgcgcagggagattggccacttccacgaaaagaaagacctgcccttggacaccagcgactccagctcggacacagacagcttctacggcgcagttgagcggcctgtggatatcagcctttcc

SEQ ID NO: 18928 - DNA, 2318 bp, Homo sapiens
  source 1..2318: mol_type = unassigned DNA
gtgagctgtgggcacagctgtggggcagccaggcgcgtcaggcctcacatgtctgggagatgtaggctgcctgggctggtggcccctgagccgcatggcctccctgggccccaggacaccggccccgagcaggtcacgaggacggagggccatgtgttgggtcagcaccatcagcttcatggcggctgaagagatgcattggcctgtccctatgaaggccattggtgcccagaacctgctaaccatgcctgggggcgtggccaaggctggctacctgcacaagaagggcggtacccagctgcagctgctgaaatggcccctgcgctttgtcatcatccacaaacgctgcgtctactacttcaagagtagcacctctgcctccccgcagggcgccttctccctgagtggctataaccgggtgatgcgggcggctgaggagaccacgtccaacaacgttttccccttcaagatcatccatatcagcaagaagcaccgcacgtggttcttctcggcctcctccgaggaggagcgcaagagctggatggccttgctgcgcagggagattggccacttccacgaaaagaaagacctgcccttggacaccagcgactccagctcggacacagacagcttctacggcgcagttgagcggcctgtggatatcagcctttccccgtaccccacggacaatgaagactatgagcacgacgatgaggatgactcctacctggagcctgactccccggagcccggaaggcttgaggatgccctgatgcacccaccggcttacccaccacccccagtgcccacgcccaggaagccagccttctctgacatgccccgggcccactcctttacctccaagggccccggtcccctactgccacccccgccccctaagcacggcctcccagatgttggcctggctgctgaggactccaagagggacccactgtgcccgaggcgggctgagccttgccccagggtacctgctaccccccgaaggatgagcgatccccctctgagcaccatgcccaccgcacccggcctccggaaacccccttgcttccgggagagtgccagccccagcccggagccctggacccctggccacggggcctgctccacttccagtgctgccatcatggccactgccacctccagaaactgtgacaaactcaagtccttccacctgtccccccgaggaccacccacatctgagcccccacctgtgccagccaacaagcccaagttcctgaagatagctgaagaggaccccccaagggaggcagccatgcccggactctttgtgccccccgtggctccccggcctcctgcgctgaagctgccagtgcctgaggccatggcgcggcccgcagtcctgcccaggccagagaagccgcagctcccgcacctccagcgatcaccccccgatgggcagagtttcaggagcttctcctttgaaaagccccggcaaccctcacaggctgacactggcggggacgactcggacgaggactatgagaaggtgccactgcccaactcggtcttcgtcaacaccacggagtcctgcgaagtggaaaggttgttcaaggctacaagcccccggggagagccccaggatggactctactgcatccggaactcctctaccaagtcggggaaggtcctggttgtgtgggacgaaacctctaacaaagtgaggaactatcgcatttttgagaaggactctaagttctacctggagggcgaggtcctgtttgtgagtgtgggcagcatggtggagcactaccacacccacgtgctgcccagccaccagagcctgctgctgcggcacccctacggctacactgggcctaggtgatggcagtccatgtggctgccaggccaaggcagtcacaggggccctgaccccaggccacacagacggacatgggcccacatgggagggtgagcaggagcaaggctgtgcttgcctagggcctctgtgatggacatctcgtaggacccagccagtctcatccagcaggttgggttctagggctgaaccaggcgccaggctccagaggacgaagggactctgttgccccacactaacttgccctgtcccaatcccagaaacccaggaccaagctgtgcctgggctccaaggacaggaacactggtccccccatcacactcacccctaagtgggctgggagccaggcagggccagggcagctgggtgggggccggggctggccctgggacccccaggaacgctaagacacaggctccagtaggggctgttgcctccaataaagcagcagtgagctttg

SEQ ID NO: 18929 - DNA, 491 bp, Homo sapiens
  source 1..491: mol_type = unassigned DNA
gacaccgcagcagcatggtgacaggtccccccagggtgtctgcctctacagaggaagggactgaagcacccagagagctggcaggtgccgttttgcagaggccactttcccgagggagctggttgcaagggcccggcgggatgggacctgggcggggcctcagagccgaggctcccgcgccggccgtggatttccaaccaagctgtgtggactggcaggtgttgggggagtggagcgggaggcctcgtttgcatcgaaggcttcttgattccaggctgcaccaacagatgtgggcctcctgtcccaagcgcccaccaacctccttgcagcgtggggaaactgaggcccgcagggggctcacgtgcctcccgcgcacggtgacgcggcagggggcggggccgggaggggcgcgccgggatcctcacctgcccgcccagtcccccgccgagaggggaggagccggcggctgccaggccagggccggcgggcat

SEQ ID NO: 18930 - DNA, 2351 bp, Homo sapiens
  source 1..2351: mol_type = unassigned DNA
ggggaggagccggcggctgccaggccagggccggcgggcatggcgggctccgggccgcggccgcggagctggggccggcgggaggcgggcgcccgggacgaggcggcggcggccgggggacgcggcccggggccgtgccggtgctcgcaggggaggcgggcgtggatcgccccggggaagccggccatgcccgccgcgtggacgcccttcatggcggctgaagagatgcattggcctgtccctatgaaggccattggtgcccagaacctgctaaccatgcctgggggcgtggccaaggctggctacctgcacaagaagggcggtacccagctgcagctgctgaaatggcccctgcgctttgtcatcatccacaaacgctgcgtctactacttcaagagtagcacctctgcctccccgcagggcgccttctccctgagtggctataaccgggtgatgcgggcggctgaggagaccacgtccaacaacgttttccccttcaagatcatccatatcagcaagaagcaccgcacgtggttcttctcggcctcctccgaggaggagcgcaagagctggatggccttgctgcgcagggagattggccacttccacgaaaagaaagacctgcccttggacaccagcgactccagctcggacacagacagcttctacggcgcagttgagcggcctgtggatatcagcctttccccgtaccccacggacaatgaagactatgagcacgacgatgaggatgactcctacctggagcctgactccccggagcccggaaggcttgaggatgccctgatgcacccaccggcttacccaccacccccagtgcccacgcccaggaagccagccttctctgacatgccccgggcccactcctttacctccaagggccccggtcccctactgccacccccgccccctaagcacggcctcccagatgttggcctggctgctgaggactccaagagggacccactgtgcccgaggcgggctgagccttgccccagggtacctgctaccccccgaaggatgagcgatccccctctgagcaccatgcccaccgcacccggcctccggaaacccccttgcttccgggagagtgccagccccagcccggagccctggacccctggccacggggcctgctccacttccagtgctgccatcatggccactgccacctccagaaactgtgacaaactcaagtccttccacctgtccccccgaggaccacccacatctgagcccccacctgtgccagccaacaagcccaagttcctgaagatagctgaagaggaccccccaagggaggcagccatgcccggactctttgtgccccccgtggctccccggcctcctgcgctgaagctgccagtgcctgaggccatggcgcggcccgcagtcctgcccaggccagagaagccgcagctcccgcacctccagcgatcaccccccgatgggcagagtttcaggagcttctcctttgaaaagccccggcaaccctcacaggctgacactggcggggacgactcggacgaggactatgagaaggtgccactgcccaactcggtcttcgtcaacaccacggagtcctgcgaagtggaaaggttgttcaaggctacaagcccccggggagagccccaggatggactctactgcatccggaactcctctaccaagtcggggaaggtcctggttgtgtgggacgaaacctctaacaaagtgaggaactatcgcatttttgagaaggactctaagttctacctggagggcgaggtcctgtttgtgagtgtgggcagcatggtggagcactaccacacccacgtgctgcccagccaccagagcctgctgctgcggcacccctacggctacactgggcctaggtgatggcagtccatgtggctgccaggccaaggcagtcacaggggccctgaccccaggccacacagacggacatgggcccacatgggagggtgagcaggagcaaggctgtgcttgcctagggcctctgtgatggacatctcgtaggacccagccagtctcatccagcaggttgggttctagggctgaaccaggcgccaggctccagaggacgaagggactctgttgccccacactaacttgccctgtcccaatcccagaaacccaggaccaagctgtgcctgggctccaaggacaggaacactggtccccccatcacactcacccctaagtgggctgggagccaggcagggccagggcagctgggtgggggccggggctggccctgggacccccaggaacgctaagacacaggctccagtaggggctgttgcctccaataaagcagcagtgagctttgc

SEQ ID NO: 18931 - DNA, 1087 bp, Homo sapiens
  source 1..1087: mol_type = unassigned DNA
ccttggcctgtggttgggggtcctgcggctgggacccgcccctgacccctccctgcccagaggggctgtctttgggtgcagaaggagctggtggggtccagccgggtgacccaggccgaggccggcagaagacagcctgatgccttgaagacttcctcttgcacttttgttggagggtgctggtttgctaaaagcagagagtatttttctttttatttattttgtttttaattttttaattttagctccagctcagttgcccagactggagagcagtggccaatcatagcttactgcctcctggaactcctggctcaatcgatcctcctggataagcctcctccgggtactatagcttcatggcggctgaagagatgcattggcctgtccctatgaaggccattggtgcccagaacctgctaaccatgcctgggggcgtggccaaggctggctacctgcacaagaagggcggtacccagctgcagctgctgaaatggcccctgcgctttgtcatcatccacaaacgctgcgtctactacttcaagagtagcacctctgcctccccgcagggcgccttctccctgagtggctataaccgggtgatgcgggcggctgaggagaccacgtccaacaacgttttccccttcaagatcatccatatcagcaagaagcaccgcacgtggttcttctcggcctcctccgaggaggagcgcaaggtgactgggggtccgaggacgagtgcaaggtgactgggggtgtgggcctgcaggcaccaggctggacctgccttgggggctcgctggtcctggggcgctggcctctcagccccgggcaaagagaaggtgtggctgggacacaggcagctgggtgggtgctgccccagctccatccccatgcccagagcctggtgccagcgcccacacaaggaacatgctgtcctgggaggtgcccctgtgggctgaggggagccacacagccatgttgtatccagccgggtcgcctcctctgaccttgggagtcacagcagagcaggcagggcagtgaaggtggaggggtgcggtggggcccaccctggtggcaccgtgcc

SEQ ID NO: 18932 - DNA, 2579 bp, Homo sapiens
  source 1..2579: mol_type = unassigned DNA
cagccgggtgacccaggccgaggccggcagaagacagcctgatgccttgaagacttcctcttgcacttttgttggagggtgctggtttgctaaaagcagagagtatttttctttttatttattttgtttttaattttttaattttagctccagctcagttgcccagactggagagcagtggccaatcatagcttactgcctcctggaactcctggctcaatcgatcctcctggataagcctcctccgggtactatagcttcatggcggctgaagagatgcattggcctgtccctatgaaggccattggtgcccagaacctgctaaccatgcctgggggcgtggccaaggctggctacctgcacaagaagggcggtacccagctgcagctgctgaaatggcccctgcgctttgtcatcatccacaaacgctgcgtctactacttcaagagtagcacctctgcctccccgcagggcgccttctccctgagtggctataaccggcagcccagaccccagccagcccaggccctgtcccaaacagaggctgggccctaggattccctgctccagggtcctcccaggccgggatcagtttccagcttcacgcatgtcctgggctgggctctatccagtgatgggccatgagctgccctggagggccttctgcactaacaggcagggtgatgcgggcggctgaggagaccacgtccaacaacgttttccccttcaagatcatccatatcagcaagaagcaccgcacgtggttcttctcggcctcctccgaggaggagcgcaagagctggatggccttgctgcgcagggagattggccacttccacgaaaagaaagacctgcccttggacaccagcgactccagctcggacacagacagcttctacggcgcagttgagcggcctgtggatatcagcctttccccgtaccccacggacaatgaagactatgagcacgacgatgaggatgactcctacctggagcctgactccccggagcccggaaggcttgaggatgccctgatgcacccaccggcttacccaccacccccagtgcccacgcccaggaagccagccttctctgacatgccccgggcccactcctttacctccaagggccccggtcccctactgccacccccgccccctaagcacggcctcccagatgttggcctggctgctgaggactccaagagggacccactgtgcccgaggcgggctgagccttgccccagggtacctgctaccccccgaaggatgagcgatccccctctgagcaccatgcccaccgcacccggcctccggaaacccccttgcttccgggagagtgccagccccagcccggagccctggacccctggccacggggcctgctccacttccagtgctgccatcatggccactgccacctccagaaactgtgacaaactcaagtccttccacctgtccccccgaggaccacccacatctgagcccccacctgtgccagccaacaagcccaagttcctgaagatagctgaagaggaccccccaagggaggcagccatgcccggactctttgtgccccccgtggctccccggcctcctgcgctgaagctgccagtgcctgaggccatggcgcggcccgcagtcctgcccaggccagagaagccgcagctcccgcacctccagcgatcaccccccgatgggcagagtttcaggagcttctcctttgaaaagccccggcaaccctcacaggctgacactggcggggacgactcggacgaggactatgagaaggtgccactgcccaactcggtcttcgtcaacaccacggagtcctgcgaagtggaaaggttgttcaaggctacaagcccccggggagagccccaggatggactctactgcatccggaactcctctaccaagtcggggaaggtcctggttgtgtgggacgaaacctctaacaaagtgaggaactatcgcatttttgagaaggactctaagttctacctggagggcgaggtcctgtttgtgagtgtgggcagcatggtggagcactaccacacccacgtgctgcccagccaccagagcctgctgctgcggcacccctacggctacactgggcctaggtgatggcagtccatgtggctgccaggccaaggcagtcacaggggccctgaccccaggccacacagacggacatgggcccacatgggagggtgagcaggagcaaggctgtgcttgcctagggcctctgtgatggacatctcgtaggacccagccagtctcatccagcaggttgggttctagggctgaaccaggcgccaggctccagaggacgaagggactctgttgccccacactaacttgccctgtcccaatcccagaaacccaggaccaagctgtgcctgggctccaaggacaggaacactggtccccccatcacactcacccctaagtgggctgggagccaggcagggccagggcagctgggtgggggccggggctggccctgggacccccaggaacgctaagacacaggctccagtaggggctgttgcctccaataaagcagcagtgagcttt

SEQ ID NO: 18933 - DNA, 9211 bp, Homo sapiens
  source 1..9211: mol_type = unassigned DNA
cagccgggtgacccaggccgaggccggcagaagacagcctgatgccttgaagacttcctcttgcacttttgttggagggtgctggtttgctaaaagcagagagtatttttctttttatttattttgtttttaattttttaattttagctccagctcagttgcccagactggagagcagtggccaatcatagcttactgcctcctggaactcctggctcaatcgatcctcctggataagcctcctccgggtactatagcttcatggcggctgaagagatgcattggcctgtccctatgaaggccattggtgcccagaacctgctaaccatgcctgggggcgtggccaaggctggctacctgcacaagaagggcggtacccagctgcagctgctgaaatggcccctgcgctttgtcatcatccacaaacgctgcgtctactacttcaagagtagcacctctgcctccccgcagggcgccttctccctgagtggctataaccgggtgatgcgggcggctgaggagaccacgtccaacaacgttttccccttcaagatcatccatatcagcaagaagcaccgcacgtggttcttctcggcctcctccgaggaggagcgcaagagctggatggccttgctgcgcagggagattggccacttccacgaaaagaaagacctgcccttggacaccagcgactccagctcggacacagacagcttctacggcgcagttgagcggcctgtggatatcagcctttccccgtaccccacggacaatgaagactatgagcacgacgatgaggatgactcctacctggagcctgactccccggagcccggaaggcttgaggatgccctgatgcacccaccggcttacccaccacccccagtgcccacgcccaggaagccagccttctctgacatgccccgggcccactcctttacctccaagggccccggtcccctactgccacccccgccccctaagcacggcctcccagatgttggcctggctgctgaggactccaagagggacccactgtgcccgaggcgggctgagccttgccccagggtacctgctaccccccgaaggatgagcgatccccctctgagcaccatgcccaccgcacccggcctccggaaacccccttgcttccgggagagtgccagccccagcccggagccctggacccctggccacggggcctgctccacttccagtgctgccatcatggccactgccacctccagaaactgtgacaaactcaagtccttccacctgtccccccgaggaccacccacatctgagcccccacctgtgccagccaacaagcccaagttcctgaagatagctgaagaggaccccccaagggaggcagccatgcccggactctttgtgccccccgtggctccccggcctcctgcgctgaagctgccagtgcctgaggccatggcgcggcccgcagtcctgcccaggccagagaagccgcagctcccgcacctccagcgatcaccccccgatgggcagagtttcaggagcttctcctttgaaaagccccggcaaccctcacaggctgacactggcggggacgactcggacgaggactatgagaaggtgccactgcccaactcggtcttcgtcaacaccacggagtcctgcgaagtggaaaggttgttcaaggctacaagcccccggggagagccccaggatggactctactgcatccggaactcctctaccaagtcggggaaggtcctggttgtgtgggacgaaacctctaacaaagtgaggaactatcgcatttttgagaaggactctaagttctacctggagggcgaggtcctgtttgtgagtgtgggcagcatggtggagcactaccacacccacgtgctgcccagccaccagagcctgctgctgcggcacccctacggctacactgggcctaggtgatggcagtccatgtggctgccaggccaaggcagtcacaggggccctgaccccaggccacacagacggacatgggcccacatgggagggtgagcaggagcaaggctgtgcttgcctagggcctctgtgatggacatctcgtaggacccagccagtctcatccagcaggttgggttctagggctgaaccaggcgccaggctccagaggacgaagggactctgttgccccacactaacttgccctgtcccaatcccagaaacccaggaccaagctgtgcctgggctccaaggacaggaacactggtccccccatcacactcacccctaagtgggctgggagccaggcagggccagggcagctgggtgggggccggggctggccctgggacccccaggaacgctaagacacaggctccagtaggggctgttgcctccaataaagcagcagtgagctttgccttggtggctggggcttgattgggaaggaggggattaccagcttactgggtgcccatgctgatgtctaagtggtgaccgcagcagtacccgggaaccccaacagttggttgtcttgtcttccagggtgcaggtcactgagtgacttccccagggtgcacagcgagtaacagatcaggacccaaacttgggcagtctgggctgggagcccacaccccactcaccagttctgctgcctcaggtcaggccagggcagtgctgctgcagagctagaaggccctgcagctacagctgcttcattccctgcattagtgcctggttactgggtacctcctgagtggctgtccccgttccagaacttgcatacactgagcgggctacagagctagaaggccctgcagctacagctgcttcattccctgcattagcgagcagttattgggtacctcctgcatgcctggtcccattccagacaggggcctctggcctggctgagttcacagcccagtctggggacagctgggtatgaggtgcttacggcacagtgtccagggcagctgggtgtgcagggactgggggctcccggaagattttttggaggaagtaacagctacgatgggatgggaacagtggaccctaagcaggccaagggtgcgtagggacggtggtacccagatgcccaagtcttccaggcaatacctggctcaggcccagccccaatccatccccttactttctgccatggagttccagcaggtcactctccctggcacaccttccaggctggatttttaatgaaacagactcagggaggtaggggctggcagggaccctagaatccttgtgatttttcttagcaccttatgtcagggaaacctaaactgaggtcagcacttgggcccactgacagtgactgactgggggagaaggtcctgcagcccccttcccctgggtgtgttctggggacctgtggtttgctggcggaaacaagtgatgaggctggttagcggatgtgggaggctgtgaccccagggggccatagggtgcggtggaactgcaggccctgcagatgacggcagccagctgcttccaggaaccaggtgtccaaggccacctctgcaggggtttcctcttcagcctgcctggggtgagaggtcagtgcaccacagccgaggctggagcacagggagcttctgttgttctgatctatctctggaaaaccagccattcctcctccctgcagtcagaattctttgccctgtctgacctgaacttgcttagggagtcatgccactccccactgtggccatagtttctcttcctgtaaaattttattattttagttttttgtttttgagatgtagtctcaccctgtcgcccaggctggagtgcaatgccgtgatctccgctcactgccacctccgcctctctagttcaagcgattttcctgcctcagcctcccgagtagctgggattccaggcgcccgccaccacgcctggctaattttttgtatttttagtagagacgggattttatcatgttggccaggctggtctcgaactcctgacctcaggtgatctgcccaccttggcctcccaaagtgctgggattacaggcatgagccactgtgcctggccccttcctgtaaaatttttaaatggagaattgggtgcgagatgtggtttccagcctggtgcctggggtgctgagctagtgagtggtgcagtccaggacacctttgctttatgtcacttacacggtcacctggagccggctcaagtggctaaagcatcctggggcccagagccaggtgataggtccctctggccaactggacagttgaggcctgtggttacccgaagcccagctggggccctggtccagcctcgcctcccagactctgcacctgctagcacagctgtccacgtctgtgtgagctgctctaggccgagggcctcagtttcaagagtgtgttggggtgggatggggcaggccgtggtcctccagcatgaagaaggagccatgaggagttcccatgacctcccgagacttgccataagtgttctagtccacatataagggtagggttgggattaccatttactgaccacatctgtgaggtgccgagctgggtgcttgacatcatttgcttggagaagcagctgctagtagacccattttacaggtgagagaaccaagtctcacagaggcctgggttcaagtcccacctctgccactaactggcatgtgaccctatctatccttcactgctctgagcctagaccctggcccctgcctggctccctgccaggctccctgccacccctcacgacctctgatggtcgttgtgggggtctcttgcctggctcccagggctagggttagggctctggaggtgctttcactcaaccaagggggccacagcactggggagtgaaactgccccgcctcaccctgcgttgccctctgggtctgtgagggtgggctggcaggaggcctaggccttgccctaggggcagtcctgcttcctcattttatagatagggaaactgaggctttgggaggactcactgacatacctaccttcaagatgagttcaggtgggctcagttctggggcttgggaaaagggccccagtggctttgggaagcacccccagcccagggtgaaacatgcttcttctcttcctgtggttccatccgaaggattgtggtgagccccgtgccttcagttaataaagatttgtattgtgaaaagattttttcttttttttttgggacacagtctcactctgtcgcccaggctagagtggattggcgtgatctcggctcaatgcaaatctccagggttcaatcgattctcctgcctcaccctcccatgtagctgggattacagctgcctgccaaatttttgtatttttagtggaaccggggtttcaccatgttggccaggctggtcttgaactcctgacctcaactgatccgcccaccttggcctcccaagtgctgggattacaggcgcgagccacggcgcccagccttgaaaagatgtttttagaaccagaagaaacctcggttcccactgatccttctgggccacgttgtgcggagctcccctgctggttggggctcagcgcagccccagggaggtgcttcctgcacctcaggatgggcgagggtgggcattgggggagagggggacctgggacctgcggcttagttccctgaggcaggcagggcttattggggccatttcatagaaaggcagattgaagctcagcagggaagaggcttttgagggtgatccaggcgctggagggatggcctaggacaccagggtcacaccaggaacatgggagggccgtgcttgtctctagacgaggggaatgggggaagggccacaacctctgtttctgtgacccagcagcatcaagcccctcgctgggcacctcgcacacaccccctgccttatctctgcctgcacgccctgttccctccacctagactgcctgctgagggggcagtgccaggaggttgcctgtccttggggaagaggggcagtgaccctgtgaagatgcttgacagacaacccccaccacctcagaagtgtgtgtgagtggtgaacccttttaagccatcttccagccattctcactggagggagatttgatgggtacagagcagacccctacctgtctaccctccttcggacccctaggaagcttcgcaggccttccaggctgccagacagctgccctggcgttgccgtctgcttcttccctggccccactctgaggggctcagagctgaggcagaatccctttttcattcatttcctgcagaataaaacaacatacagaaaagtgaataaaacataaatgcacaacctaacacactgttaggaagtgaacgatctgcaaccaccatcaggaaatagttttgccagcacccaagtgccctcccctcacagtgtcacttccggcctctctgccctggcttatgtgagtcttgtgttcttgtttttctaaaaagtcttcagcacccaattatgcaggcattgcagtattttcctgtttctgtgctttatccccttgaatcatacagatgcaaattctggcagctggcttctttggctcgttattatgtctgtgagatttattcatgttgctgtgcgtagtatagtttgtgcatgttcattgctaaaaacttccattgtttggctgtatcgtagttcacagattcatttcactgtcagtcaagcttgtccaatgcatgcagcccaggatgcctttgaatgtggcccaacacaaatttgtaaactttcttaaaacattataaagatttttgtttgcgatttttttttttagctcatcagctatagttagtggtagtgtattttatgcgtgacccgagacagttcttccggtatggtccatggaagccaaaagattggacatgcctgctgtagatggacagttggtttgtttctagtttggggtaactacacacaatgctgctagcaacagttttgtccatgtctctgatgcacgtgtgttttttgcaaatggtgcacaaatttttctagggtttgtactcaggagtctgactcctgggttctagggtatgaagatctttctaaatattgttctagtttacgtgcccaccagcagtaaaacagaattcccttgccttcccatccttggcagacatttcacttttgccagtctggtggggtgtatagttatggccttaatttgcatttagctaattaccaaggagattgagcatatttttatgtttttattaaccattttgattttgtctcctgtgaagtgtctatcatcttttgcccattttttaacttgttgtctttttctttttcttttctttttttttttttctgagacagggtctcactctgttgccctggctggagtgcagtggtgcaatctcagctcactgcagccttgagtcaggctcaggtgattctctcacctcagcctcccaagtagctgggaccacaggcccacaccaccaagcccagctaattttttgtatttttaagtagagacgggtttcatcatgttatgcaggctgctctcaaactcttgagctcaagcgatctgctggcctcagcctcccaaagttgggattataggcgtgagctaccagattttttcttattaatctaataattctttgtatagtcttgatattatccataatgtgtattgcaaatatcttctctaactctggcttgactgtttatggtgtcctttttttttggggggggttttttgagacaaggtcttgctctgtcacccaggctggagtgttatggcacaatcttggcttattgcagcctcaattcctaggcttaaacagtcctcccacctcagcctcctgagtagccggaactacagtcacgcacttccatgtccagataattttttttttttttttagagataggatcttactatgccccagctggtctcaaactcctagactcaatgagcctcccatcttgacctcccaaagtgctgggagtacaggcatgagccactgtgcatgccagttcttatttttaatgcagttgaattgatcagtgttttcattttggttagtgctttttgtggcttaagaaattctttccaggctgggtacagtggctcacacctgtaatgccagcactttgggggcagaggcaggaggattacttgagctcaggagtttgagaccaacctggacaacatggcgaaacaccatctctacaaaaaatacaaaaattagctggacatggtggtgcgtgcctgtagtcccagctactcaggtggctggggtgagaggattgcttgagcccagaaggtcaaggctgcagtgagctgtgattgtgccactgcacttcagcctgtgagacagagtgagaccctatctcaaaaaaaaccaaaaaaaaaaaaaaaaaaaagaaaaccactgaaattatttccactccaaggtcatgaagatagtctcttagattatattctgaaatccttataaatgtaaatttcatatttaggcctttaattcacctagatttggttttttgcatatggtgtgaggtaaggattcactttcatttttttctctccatagggttacacacctgtcctatcattgtttgtaatctaactttctgcgcccatctgcaatgccacctctgtcatatgtccacatatgacatatgtagatctgttgttggattctttcctctgttccattagtctgtctgttcttgtgccaatatcaagctgtcttcattattatcaattatgtattgagatctgataaagtaagtcttttccaccttatttttcttctttgagagtgtcttgactattctggctctttgtattttcatgtaaggtttttctcccatataagttttaaaatcagcttgtcaattccaacaacaatgatgcacttgatagtttgggaatttattatagctatcaatcagttttgggaaaattgacgtctttacaatattgagttttctgattcatgaacatggtttacctctctttccatttgggtcttctttaaggtttaccaataggattttatatttttgtccattgtggtcttgcttatcttaagtttgatttgtaaatattttatgtttcttttagtctattgtaaattgtgtatttttaatttcatttttttttttgttaatagcatataaaacacaccttgtcttttaactggagcattttgtccattgtgtatttaatgtaattaaatctaccatcttattttatgctaca

SEQ ID NO: 18934 - DNA, 537 bp, Homo sapiens
  source 1..537: mol_type = unassigned DNA
cagaacctgctaaccatgcctgggggcgtggccaaggctggctacctgcacaagaagggcggtacccagctgcagctgctgaaatggcccctgcgctttgtcatcatccacaaacgctgcgtctactacttcaagagtagcacctctgcctccccgcagggcgccttctccctgagtggctataaccggcagcccagaccccagccagcccaggccctgtcccaaacagaggctgggccctaggattccctgctccagggtcctcccaggccgggatcagtttccagcttcacgcatgtcctgggctgggctctatccagtgatgggccatgagctgccctggagggccttctgcactaacaggcagggtgatgcgggcggctgaggagaccacgtccaacaacgttttccccttcaagatcatccatatcagcaagaagcaccgcacgtggttcttctcggcctcctccgaggaggagcgcaaggtgactgggggtccgaggacgagtgcaaggtgactgggggtgtgggcctgca

SEQ ID NO: 18935 - DNA, 566 bp, Homo sapiens
  source 1..566: mol_type = unassigned DNA
atcatccatatcagcaagaagcaccgcacgtggttcttctcggcctcctccgaggaggagcgcaaggtgactgggggtccgaggacgagtgcaagagctggatggccttgctgcgcagggagattggccacttccacgaaaagaaagacctgcccttggacaccagcgactccagctcggacacagacagcttctacggcgcagttgagcggcctgtggatatcagcctttccccgtaccccacggacaatgaagactatgagcacgacgatgaggatgactcctacctggagcctgactccccggagcccggaaggcttgaggatgccctgatgcacccaccggcttacccaccacccccagtgcccacgcccaggaagccagccttctctgacatgccccgggcccactcctttacctccaagggccccggtcccctactgccacccccgccccctaagcacggcctcccagatgttggcctggctgctgaggactccaagagggacccactgtgcccgaggcgggctgagccttgccccagggtacctgctaccccccgaagg

SEQ ID NO: 18936 - DNA, 917 bp, Homo sapiens
  source 1..917: mol_type = unassigned DNA
gagtgcaaggtgactgggggtgtgggcctgcaggcaccaggctggacctgccttgggggctcgctggtcctggggcgctggcctctcagccccgggcaaagagaaggtgtggctgggacacaggcagctgggtgggtgctgccccagctccatccccatgcccagagcctggtgccagcgcccacacaaggaacatgctgtcctgggaggtgcccctgtgggctgaggggagccacacagccatgttgtatccagccgggtcgcctcctctgaccttgggagtcacagcagagcaggcagggcagtgaaggtggaggggtgcggtggggcccaccctggtggcaccgtgcccaccacagccccgctgacctgcagagctggatggccttgctgcgcagggagattggccacttccacgaaaagaaagacctgcccttggacaccagcgactccagctcggacacagacagcttctacggcgcagttgagcggcctgtggatatcagcctttccccgtaccccacggacaatgaagactatgagcacgacgatgaggatgactcctacctggagcctgactccccggagcccggaaggcttgaggatgccctgatgcacccaccggcttacccaccacccccagtgcccacgcccaggaagccagccttctctgacatgccccgggcccactcctttacctccaagggccccggtcccctactgccacccccgccccctaagcacggcctcccagatgttggcctggctgctgaggactccaagagggacccactgtgcccgaggcgggctgagccttgccccagggtacctgctaccccccgaaggatgagcgatccccctctgagcaccatgcccaccgcacccggcctccggaaacccccttgcttccgggagag

SEQ ID NO: 18937 - DNA, 3617 bp, Homo sapiens
  source 1..3617: mol_type = unassigned DNA
ttgctctgtgtttgtgtgtgcatgtctgcgtgttgctctgtgtttgtgtgtgcatgtccgcgtgttgctctgtgtgtgtgcatgtccacgtgttgctctgtgtttgtgtgtgcatgtccgcgtgttgctctgtgtgtgtgcatgtccgcgtgttgctgtttgtgtgtgcatgtctgcgtgttgctctgtgtgtgtgtgcatgtccgcgtgttgctctgtgtgtgtgtgtgtgcatgtctgcatgttgctctgtgtgtgtgtgcatgtctgtgtgttgctctgtgtttgtgtgtgcatgtctgcgtgttgctctgtgtgtgtgtgcatgtccacgtgttgctctgtgtgtgtgcatgtcctcatgttgctctgtgtgtgtgtgcatgtccgcatgttgctctgtgtgtgtgcatgtccgcgtgttgcttgtgtttgtgtgtgcgtgtccgtgtgtcgctcgtctgtgtgtgaacatgtgtgcttgtcctgtatctgtgtttatctgtatacttccatgtctgtgtgacagagtccttgtgtctgtgtgtctacatgtctgcgcgtgtccctgtgtctttgtgtatatatatccatgcctgtgtgcctgtgttcctgcgtgtgcttgtgtgtgcacgtgtgcatttgtgtgtttgtcagagtatgtgtgcatgtgtgtgtctgtcagcgtatccatgtgtgcatgtgtgtgtctgtcagcgtatccgtgtgtgcatgtgtgtgtctgtcagcttaaccatgtgtgcatgtgtttgtcagtgtatccgtgtgtgcatctgtgtatctgtccatgtatccgcgtgtgcctgtgtgtacctttgtgtgagcatcaagggacctcccaggcctggtgctcaccgtccgccccaacgcaccctgcattgcagcgactccagctcggacacagacagcttctacggcgcagttgagcggcctgtggatatcagcctttccccgtaccccacggacaatgaagactatgagcacgacgatgaggatgactcctacctggagcctgactccccggagcccggaaggcttgaggatgccctgatgcacccaccggcttacccaccacccccagtgcccacgcccaggaagccagccttctctgacatgccccgggcccactcctttacctccaagggccccggtcccctactgccacccccgccccctaagcacggcctcccagatgttggcctggctgctgaggactccaagagggacccactgtgcccgaggcgggctgagccttgccccagggtacctgctaccccccgaaggatgagcgatccccctctgagcaccatgcccaccgcacccggcctccggaaacccccttgcttccgggagagtgccagccccagcccggagccctggacccctggccacggggcctgctccacttccagtgctgccatcatggccactgccacctccagaaactgtgacaaactcaagtccttccacctgtccccccgaggaccacccacatctgagcccccacctgtgccagccaacaagcccaagttcctgaagatagctgaagaggaccccccaagggaggcagccatgcccggactctttgtgccccccgtggctccccggcctcctgcgctgaagctgccagtgcctgaggccatggcgcggcccgcagtcctgcccaggccagagaagccgcagctcccgcacctccagcgatcaccccccgatgggcagagtttcaggagcttctcctttgaaaagccccggcaaccctcacaggctgacactggcggggacgactcggacgaggactatgagaaggtgccactgcccaactcggtcttcgtcaacaccacggagtcctgcgaagtggaaaggtcagcacaaagccctgtgtgtgctgggtcctccgccatgcccggcttcctgcttctgtgtccctctcactagcttccgtgttggggagttgctggcacaagttcatggccctgcgtgcagcagaaaccagaggagtggacctccctgctctgtcccatgcccagctggcaccctggctggccagggctctgctgggctgcttctgtcagcctcacggcagcccgacgtgctcagctcctgagacctacaacagcgagaggacagaaagccaggcttgggagcggggcgggaaggtccgtgtgaaagctgcccgaggaggactcacccgctaatatgactgtcttattttaggttgttcaaggctacaagcccccggggagagccccaggatggactctactgcatccggaactcctctaccaagtcggggaaggtcctggttgtgtgggacgaaacctctaacaaagtgaggaactatcgcatttttgagaaggtgagagggctctgagtgggacggggaccctggccgcatggcctggcaaggggcagggcagaatctccctgatgaggcataggcagcgggtagactgagactggcacctccaggataccgccctccccttcccctccaccatcgctcaccccccacccctcctgctcagcctccctcctctcgtggcctacctttgtcctccactgaccctagtggggatgggcggtcagccatagaccctgggttgcttgtcttgtctttttctttttgcggggacaggggtctcactgtctttctcaggctggtttcaaattctggggctcaagcaatcctcccacctcggcctcccacagtgctgggattacaggcgtgggccaccgtgcctggcctaggttcatttcctgaccttgtctgaagtgctctgggtgcaggctcctggacatggaggacggaggggaagtgaggtgggaacatggagagcacaggcctgatgcggaggccaccttgggggcaccaccgacagccaggggccagcctggtgatgccgctgttgatgctgctgccttgttttacagacggggagactgaggcctagagccgcagagtggcctggccctgctgacgctcccccttctcttcccccacaggactctaagttctacctggagggcgaggtcctgtttgtgagtgtgggcagcatggtggagcactaccacacccacgtgctgcccagccaccagagcctgctgctgcggcacccctacggctacactgggcctaggtgatggcagtccatgtggctgccaggccaaggcagtcacaggggccctgaccccaggccacacagacggacatgggcccacatgggagggtgagcaggagcaaggctgtgcttgcctagggcctctgtgatggacatctcgtaggacccagccagtctcatccagcaggttgggttctagggctgaaccaggcgccaggctccagaggacgaagggactctgttgccccacactaacttgccctgtcccaatcccagaaacccaggaccaagctgtgcctgggctccaaggacaggaacactggtccccccatcacactcacccctaagtgggctgggagccaggcagggccagggcagctgggtgggggccggggctggccctgggacccccaggaacgctaagacacaggctccagtaggggctgttgcctccaataaagcagcagtgagctttgc

SEQ ID NO: 18938 - DNA, 2247 bp, Homo sapiens
  source 1..2247: mol_type = unassigned DNA
gtgtgtgtgtgcatgtccgcatgttgctctgtgtgtgtgcatgtccgcgtgttgcttgtgtttgtgtgtgcgtgtccgtgtgtcgctcgtctgtgtgtgaacatgtgtgcttgtcctgtatctgtgtttatctgtatacttccatgtctgtgtgacagagtccttgtgtctgtgtgtctacatgtctgcgcgtgtccctgtgtctttgtgtatatatatccatgcctgtgtgcctgtgttcctgcgtgtgcttgtgtgtgcacgtgtgcatttgtgtgtttgtcagagtatgtgtgcatgtgtgtgtctgtcagcgtatccatgtgtgcatgtgtgtgtctgtcagcgtatccgtgtgtgcatgtgtgtgtctgtcagcttaaccatgtgtgcatgtgtttgtcagtgtatccgtgtgtgcatctgtgtatctgtccatgtatccgcgtgtgcctgtgtgtacctttgtgtgagcatcaagggacctcccaggcctggtgctcaccgtccgccccaacgcaccctgcattgcagcgactccagctcggacacagacagcttctacggcgcagttgagcggcctgtggatatcagcctttccccgtaccccacggacaatgaagactatgagcacgacgatgaggatgactcctacctggagcctgactccccggagcccggaaggcttgaggatgccctgatgcacccaccggcttacccaccacccccagtgcccacgcccaggaagccagccttctctgacatgccccgggcccactcctttacctccaagggccccggtcccctactgccacccccgccccctaagcacggcctcccagatgttggcctggctgctgaggactccaagagggacccactgtgcccgaggcgggctgagccttgccccagggtacctgctaccccccgaaggatgagcgatccccctctgagcaccatgcccaccgcacccggcctccggaaacccccttgcttccgggagagtgccagccccagcccggagccctggacccctggccacggggcctgctccacttccagtgctgccatcatggccactgccacctccagaaactgtgacaaactcaagtccttccacctgtccccccgaggaccacccacatctgagcccccacctgtgccagccaacaagcccaagttcctgaagatagctgaagaggaccccccaagggaggcagccatgcccggactctttgtgccccccgtggctccccggcctcctgcgctgaagctgccagtgcctgaggccatggcgcggcccgcagtcctgcccaggccagagaagccgcagctcccgcacctccagcgatcaccccccgatgggcagagtttcaggagcttctcctttgaaaagccccggcaaccctcacaggctgacactggcggggacgactcggacgaggactatgagaaggtgccactgcccaactcggtcttcgtcaacaccacggagtcctgcgaagtggaaaggttgttcaaggctacaagcccccggggagagccccaggatggactctactgcatccggaactcctctaccaagtcggggaaggtcctggttgtgtgggacgaaacctctaacaaagtgaggaactatcgcatttttgagaaggactctaagttctacctggagggcgaggtcctgtttgtgagtgtgggcagcatggtggagcactaccacacccacgtgctgcccagccaccagagcctgctgctgcggcacccctacggctacactgggcctaggtgatggcagtccatgtggctgccaggccaaggcagtcacaggggccctgaccccaggccacacagacggacatgggcccacatgggagggtgagcaggagcaaggctgtgcttgcctagggcctctgtgatggacatctcgtaggacccagccagtctcatccagcaggttgggttctagggctgaaccaggcgccaggctccagaggacgaagggactctgttgccccacactaacttgccctgtcccaatcccagaaacccaggaccaagctgtgcctgggctccaaggacaggaacactggtccccccatcacactcacccctaagtgggctgggagccaggcagggccagggcagctgggtgggggccggggctggccctgggacccccaggaacgctaagacacaggctccagtaggggctgttgcctccaataaagcagcagtgagctttgc

SEQ ID NO: 18939 - DNA, 844 bp, Homo sapiens
  source 1..844: mol_type = unassigned DNA
acagagtccttgtgtctgtgtgtctacatgtctgcgcgtgtccctgtgtctttgtgtatatatatccatgcctgtgtgcctgtgttcctgcgtgtgcttgtgtgtgcacgtgtgcatttgtgtgtttgtcagagtatgtgtgcatgtgtgtgtctgtcagcgtatccatgtgtgcatgtgtgtgtctgtcagcgtatccgtgtgtgcatgtgtgtgtctgtcagcttaaccatgtgtgcatgtgtttgtcagtgtatccgtgtgtgcatctgtgtatctgtccatgtatccgcgtgtgcctgtgtgtacctttgtgtgagcatcaagggacctcccaggcctggtgctcaccgtccgccccaacgcaccctgcattgcagcgactccagctcggacacagacagcttctacggcgcagttgagcggcctgtggatatcagcctttccccgtaccccacggacaatgaagactatgagcacgacgatgaggatgactcctacctggagcctgactccccggagcccggaaggcttgagggcgatcaccccccgatgggcagagtttcaggagcttctcctttgaaaagccccggcaaccctcacaggctgacactggcggggacgactcggacgaggactatgagaaggtgccactgcccaactcggtcttcgtcaacaccacggagtcctgcgaagtggaaaggttgttcaaggctacaagcccccggggagagccccaggatggactctactgcatccggaactcctctaccaagtcggggaaggtcctggttgtgtgggacgaaacctctaacaaagtgaggaactatcgcatttttgagaa

SEQ ID NO: 18940 - DNA, 866 bp, Homo sapiens
  source 1..866: mol_type = unassigned DNA
ccgggagagtgccagccccagcccggagccctggacccctggccacggggcctgctccacttccagtgctgccatcatggccactgccacctccagaaactgtgacaaactcaagtccttccacctgtccccccgaggaccacccacatctgagcccccacctgtgccagccaacaagcccaagttcctgaagatagctgaagaggaccccccaagggaggcagccatgcccggactctttgtgccccccgtggctccccggcctcctgcgctgaagctgccagtgcctgaggccatggcgcggcccgcagtcctgcccaggccagagaagccgcagctcccgcacctccagcgatcaccccccgatgggcagagtttcaggagcttctcctttgaaaagccccggcaaccctcacaggctgacactggcggggacgactcggacgaggactatgagaaggttgttcaaggctacaagcccccggggagagccccaggatggactctactgcatccggaactcctctaccaagtcggggaaggtcctggttgtgtgggacgaaacctctaacaaagtgaggaactatcgcatttttgagaaggactctaagttctacctggagggcgaggtcctgtttgtgagtgtgggcagcatggtggagcactaccacacccacgtgctgcccagccaccagagcctgctgctgcggcacccctacggctacactgggcctaggtgatggcagtccatgtggctgccaggccaaggcagtcacaggggccctgaccccaggccacacagacggacatgggcccacatgggagggtgagcaggagcaaggctgtgcttgcctagggcctctgtg

SEQ ID NO: 18941 - DNA, 9211 bp, Homo sapiens
  source 1..9211: mol_type = unassigned DNA
acttggtgctgcccagggagcagggaacaggaagtcccgggtggggaggaagcaccggcggccacaggcctcagaagcagcaggagtgagctgtgggcacagctgtggggcagccaggcgcgtcaggcctcacatgtctgggagatgtaggctgcctgggctggtggcccctgagccgcatggcctccctgggccccaggacaccggccccgagcaggtcacgaggacggagggccatgtgttgggtcagcaccatcagcttcatggcggctgaagagatgcattggcctgtccctatgaaggccattggtgcccagaacctgctaaccatgcctgggggcgtggccaaggctggctacctgcacaagaagggcggtacccagctgcagctgctgaaatggcccctgcgctttgtcatcatccacaaacgctgcgtctactacttcaagagtagcacctctgcctccccgcagggcgccttctccctgagtggctataaccgggtgatgcgggcggctgaggagaccacgtccaacaacgttttccccttcaagatcatccatatcagcaagaagcaccgcacgtggttcttctcggcctcctccgaggaggagcgcaagagctggatggccttgctgcgcagggagattggccacttccacgaaaagaaagacctgcccttggacaccagcgactccagctcggacacagacagcttctacggcgcagttgagcggcctgtggatatcagcctttccccgtaccccacggacaatgaagactatgagcacgacgatgaggatgactcctacctggagcctgactccccggagcccggaaggcttgaggatgccctgatgcacccaccggcttacccaccacccccagtgcccacgcccaggaagccagccttctctgacatgccccgggcccactcctttacctccaagggccccggtcccctactgccacccccgccccctaagcacggcctcccagatgttggcctggctgctgaggactccaagagggacccactgtgcccgaggcgggctgagccttgccccagggtacctgctaccccccgaaggatgagcgatccccctctgagcaccatgcccaccgcacccggcctccggaaacccccttgcttccgggagagtgccagccccagcccggagccctggacccctggccacggggcctgctccacttccagtgctgccatcatggccactgccacctccagaaactgtgacaaactcaagtccttccacctgtccccccgaggaccacccacatctgagcccccacctgtgccagccaacaagcccaagttcctgaagatagctgaagaggaccccccaagggaggcagccatgcccggactctttgtgccccccgtggctccccggcctcctgcgctgaagctgccagtgcctgaggccatggcgcggcccgcagtcctgcccaggccagagaagccgcagctcccgcacctccagcgatcaccccccgatgggcagagtttcaggagcttctcctttgaaaagccccggcaaccctcacaggctgacactggcggggacgactcggacgaggactatgagaaggtgccactgcccaactcggtcttcgtcaacaccacggagtcctgcgaagtggaaaggttgttcaaggctacaagcccccggggagagccccaggatggactctactgcatccggaactcctctaccaagtcggggaaggtcctggttgtgtgggacgaaacctctaacaaagtgaggaactatcgcatttttgagaaggactctaagttctacctggagggcgaggtcctgtttgtgagtgtgggcagcatggtggagcactaccacacccacgtgctgcccagccaccagagcctgctgctgcggcacccctacggctacactgggcctaggtgatggcagtccatgtggctgccaggccaaggcagtcacaggggccctgaccccaggccacacagacggacatgggcccacatgggagggtgagcaggagcaaggctgtgcttgcctagggcctctgtgatggacatctcgtaggacccagccagtctcatccagcaggttgggttctagggctgaaccaggcgccaggctccagaggacgaagggactctgttgccccacactaacttgccctgtcccaatcccagaaacccaggaccaagctgtgcctgggctccaaggacaggaacactggtccccccatcacactcacccctaagtgggctgggagccaggcagggccagggcagctgggtgggggccggggctggccctgggacccccaggaacgctaagacacaggctccagtaggggctgttgcctccaataaagcagcagtgagctttgccttggtggctggggcttgattgggaaggaggggattaccagcttactgggtgcccatgctgatgtctaagtggtgaccgcagcagtacccgggaaccccaacagttggttgtcttgtcttccagggtgcaggtcactgagtgacttccccagggtgcacagcgagtaacagatcaggacccaaacttgggcagtctgggctgggagcccacaccccactcaccagttctgctgcctcaggtcaggccagggcagtgctgctgcagagctagaaggccctgcagctacagctgcttcattccctgcattagtgcctggttactgggtacctcctgagtggctgtccccgttccagaacttgcatacactgagcgggctacagagctagaaggccctgcagctacagctgcttcattccctgcattagcgagcagttattgggtacctcctgcatgcctggtcccattccagacaggggcctctggcctggctgagttcacagcccagtctggggacagctgggtatgaggtgcttacggcacagtgtccagggcagctgggtgtgcagggactgggggctcccggaagattttttggaggaagtaacagctacgatgggatgggaacagtggaccctaagcaggccaagggtgcgtagggacggtggtacccagatgcccaagtcttccaggcaatacctggctcaggcccagccccaatccatccccttactttctgccatggagttccagcaggtcactctccctggcacaccttccaggctggatttttaatgaaacagactcagggaggtaggggctggcagggaccctagaatccttgtgatttttcttagcaccttatgtcagggaaacctaaactgaggtcagcacttgggcccactgacagtgactgactgggggagaaggtcctgcagcccccttcccctgggtgtgttctggggacctgtggtttgctggcggaaacaagtgatgaggctggttagcggatgtgggaggctgtgaccccagggggccatagggtgcggtggaactgcaggccctgcagatgacggcagccagctgcttccaggaaccaggtgtccaaggccacctctgcaggggtttcctcttcagcctgcctggggtgagaggtcagtgcaccacagccgaggctggagcacagggagcttctgttgttctgatctatctctggaaaaccagccattcctcctccctgcagtcagaattctttgccctgtctgacctgaacttgcttagggagtcatgccactccccactgtggccatagtttctcttcctgtaaaattttattattttagttttttgtttttgagatgtagtctcaccctgtcgcccaggctggagtgcaatgccgtgatctccgctcactgccacctccgcctctctagttcaagcgattttcctgcctcagcctcccgagtagctgggattccaggcgcccgccaccacgcctggctaattttttgtatttttagtagagacgggattttatcatgttggccaggctggtctcgaactcctgacctcaggtgatctgcccaccttggcctcccaaagtgctgggattacaggcatgagccactgtgcctggccccttcctgtaaaatttttaaatggagaattgggtgcgagatgtggtttccagcctggtgcctggggtgctgagctagtgagtggtgcagtccaggacacctttgctttatgtcacttacacggtcacctggagccggctcaagtggctaaagcatcctggggcccagagccaggtgataggtccctctggccaactggacagttgaggcctgtggttacccgaagcccagctggggccctggtccagcctcgcctcccagactctgcacctgctagcacagctgtccacgtctgtgtgagctgctctaggccgagggcctcagtttcaagagtgtgttggggtgggatggggcaggccgtggtcctccagcatgaagaaggagccatgaggagttcccatgacctcccgagacttgccataagtgttctagtccacatataagggtagggttgggattaccatttactgaccacatctgtgaggtgccgagctgggtgcttgacatcatttgcttggagaagcagctgctagtagacccattttacaggtgagagaaccaagtctcacagaggcctgggttcaagtcccacctctgccactaactggcatgtgaccctatctatccttcactgctctgagcctagaccctggcccctgcctggctccctgccaggctccctgccacccctcacgacctctgatggtcgttgtgggggtctcttgcctggctcccagggctagggttagggctctggaggtgctttcactcaaccaagggggccacagcactggggagtgaaactgccccgcctcaccctgcgttgccctctgggtctgtgagggtgggctggcaggaggcctaggccttgccctaggggcagtcctgcttcctcattttatagatagggaaactgaggctttgggaggactcactgacatacctaccttcaagatgagttcaggtgggctcagttctggggcttgggaaaagggccccagtggctttgggaagcacccccagcccagggtgaaacatgcttcttctcttcctgtggttccatccgaaggattgtggtgagccccgtgccttcagttaataaagatttgtattgtgaaaagattttttcttttttttttgggacacagtctcactctgtcgcccaggctagagtggattggcgtgatctcggctcaatgcaaatctccagggttcaatcgattctcctgcctcaccctcccatgtagctgggattacagctgcctgccaaatttttgtatttttagtggaaccggggtttcaccatgttggccaggctggtcttgaactcctgacctcaactgatccgcccaccttggcctcccaagtgctgggattacaggcgcgagccacggcgcccagccttgaaaagatgtttttagaaccagaagaaacctcggttcccactgatccttctgggccacgttgtgcggagctcccctgctggttggggctcagcgcagccccagggaggtgcttcctgcacctcaggatgggcgagggtgggcattgggggagagggggacctgggacctgcggcttagttccctgaggcaggcagggcttattggggccatttcatagaaaggcagattgaagctcagcagggaagaggcttttgagggtgatccaggcgctggagggatggcctaggacaccagggtcacaccaggaacatgggagggccgtgcttgtctctagacgaggggaatgggggaagggccacaacctctgtttctgtgacccagcagcatcaagcccctcgctgggcacctcgcacacaccccctgccttatctctgcctgcacgccctgttccctccacctagactgcctgctgagggggcagtgccaggaggttgcctgtccttggggaagaggggcagtgaccctgtgaagatgcttgacagacaacccccaccacctcagaagtgtgtgtgagtggtgaacccttttaagccatcttccagccattctcactggagggagatttgatgggtacagagcagacccctacctgtctaccctccttcggacccctaggaagcttcgcaggccttccaggctgccagacagctgccctggcgttgccgtctgcttcttccctggccccactctgaggggctcagagctgaggcagaatccctttttcattcatttcctgcagaataaaacaacatacagaaaagtgaataaaacataaatgcacaacctaacacactgttaggaagtgaacgatctgcaaccaccatcaggaaatagttttgccagcacccaagtgccctcccctcacagtgtcacttccggcctctctgccctggcttatgtgagtcttgtgttcttgtttttctaaaaagtcttcagcacccaattatgcaggcattgcagtattttcctgtttctgtgctttatccccttgaatcatacagatgcaaattctggcagctggcttctttggctcgttattatgtctgtgagatttattcatgttgctgtgcgtagtatagtttgtgcatgttcattgctaaaaacttccattgtttggctgtatcgtagttcacagattcatttcactgtcagtcaagcttgtccaatgcatgcagcccaggatgcctttgaatgtggcccaacacaaatttgtaaactttcttaaaacattataaagatttttgtttgcgatttttttttttagctcatcagctatagttagtggtagtgtattttatgcgtgacccgagacagttcttccggtatggtccatggaagccaaaagattggacatgcctgctgtagatggacagttggtttgtttctagtttggggtaactacacacaatgctgctagcaacagttttgtccatgtctctgatgcacgtgtgttttttgcaaatggtgcacaaatttttctagggtttgtactcaggagtctgactcctgggttctagggtatgaagatctttctaaatattgttctagtttacgtgcccaccagcagtaaaacagaattcccttgccttcccatccttggcagacatttcacttttgccagtctggtggggtgtatagttatggccttaatttgcatttagctaattaccaaggagattgagcatatttttatgtttttattaaccattttgattttgtctcctgtgaagtgtctatcatcttttgcccattttttaacttgttgtctttttctttttcttttctttttttttttttctgagacagggtctcactctgttgccctggctggagtgcagtggtgcaatctcagctcactgcagccttgagtcaggctcaggtgattctctcacctcagcctcccaagtagctgggaccacaggcccacaccaccaagcccagctaattttttgtatttttaagtagagacgggtttcatcatgttatgcaggctgctctcaaactcttgagctcaagcgatctgctggcctcagcctcccaaagttgggattataggcgtgagctaccagattttttcttattaatctaataattctttgtatagtcttgatattatccataatgtgtattgcaaatatcttctctaactctggcttgactgtttatggtgtcctttttttttggggggggttttttgagacaaggtcttgctctgtcacccaggctggagtgttatggcacaatcttggcttattgcagcctcaattcctaggcttaaacagtcctcccacctcagcctcctgagtagccggaactacagtcacgcacttccatgtccagataattttttttttttttttagagataggatcttactatgccccagctggtctcaaactcctagactcaatgagcctcccatcttgacctcccaaagtgctgggagtacaggcatgagccactgtgcatgccagttcttatttttaatgcagttgaattgatcagtgttttcattttggttagtgctttttgtggcttaagaaattctttccaggctgggtacagtggctcacacctgtaatgccagcactttgggggcagaggcaggaggattacttgagctcaggagtttgagaccaacctggacaacatggcgaaacaccatctctacaaaaaatacaaaaattagctggacatggtggtgcgtgcctgtagtcccagctactcaggtggctggggtgagaggattgcttgagcccagaaggtcaaggctgcagtgagctgtgattgtgccactgcacttcagcctgtgagacagagtgagaccctatctcaaaaaaaaccaaaaaaaaaaaaaaaaaaaagaaaaccactgaaattatttccactccaaggtcatgaagatagtctcttagattatattctgaaatccttataaatgtaaatttcatatttaggcctttaattcacctagatttggttttttgcatatggtgtgaggtaaggattcactttcatttttttctctccatagggttacacacctgtcctatcattgtttgtaatctaactttctgcgcccatctgcaatgccacctctgtcatatgtccacatatgacatatgtagatctgttgttggattctttcctctgttccattagtctgtctgttcttgtgccaatatcaagctgtcttcattattatcaattatgtattgagatctgataaagtaagtcttttccaccttatttttcttctttgagagtgtcttgactattctggctctttgtattttcatgtaaggtttttctcccatataagttttaaaatcagcttgtcaattccaacaacaatgatgcacttgatagtttgggaatttattatagctatcaatcagttttgggaaaattgacgtctttacaatattgagttttctgattcatgaacatggtttacctctctttccatttgggtcttctttaaggtttaccaataggattttatatttttgtccattgtggtcttgcttatcttaagtttgatttgtaaatattttatgtttcttttagtctattgtaaattgtgtatttttaatttcatttttttttttgttaatagcatataaaacacaccttgtcttttaactggagcattttgtccattgtgtatttaatgtaattaaatctaccatcttattttatgcta

SEQ ID NO: 18942 - DNA, 9158 bp, Homo sapiens
  source 1..9158: mol_type = unassigned DNA
ggggaggagccggcggctgccaggccagggccggcgggcatggcgggctccgggccgcggccgcggagctggggccggcgggaggcgggcgcccgggacgaggcggcggcggccgggggacgcggcccggggccgtgccggtgctcgcaggggaggcgggcgtggatcgccccggggaagccggccatgcccgccgcgtggacgcccttcatggcggctgaagagatgcattggcctgtccctatgaaggccattggtgcccagaacctgctaaccatgcctgggggcgtggccaaggctggctacctgcacaagaagggcggtacccagctgcagctgctgaaatggcccctgcgctttgtcatcatccacaaacgctgcgtctactacttcaagagtagcacctctgcctccccgcagggcgccttctccctgagtggctataaccgggtgatgcgggcggctgaggagaccacgtccaacaacgttttccccttcaagatcatccatatcagcaagaagcaccgcacgtggttcttctcggcctcctccgaggaggagcgcaagagctggatggccttgctgcgcagggagattggccacttccacgaaaagaaagacctgcccttggacaccagcgactccagctcggacacagacagcttctacggcgcagttgagcggcctgtggatatcagcctttccccgtaccccacggacaatgaagactatgagcacgacgatgaggatgactcctacctggagcctgactccccggagcccggaaggcttgaggatgccctgatgcacccaccggcttacccaccacccccagtgcccacgcccaggaagccagccttctctgacatgccccgggcccactcctttacctccaagggccccggtcccctactgccacccccgccccctaagcacggcctcccagatgttggcctggctgctgaggactccaagagggacccactgtgcccgaggcgggctgagccttgccccagggtacctgctaccccccgaaggatgagcgatccccctctgagcaccatgcccaccgcacccggcctccggaaacccccttgcttccgggagagtgccagccccagcccggagccctggacccctggccacggggcctgctccacttccagtgctgccatcatggccactgccacctccagaaactgtgacaaactcaagtccttccacctgtccccccgaggaccacccacatctgagcccccacctgtgccagccaacaagcccaagttcctgaagatagctgaagaggaccccccaagggaggcagccatgcccggactctttgtgccccccgtggctccccggcctcctgcgctgaagctgccagtgcctgaggccatggcgcggcccgcagtcctgcccaggccagagaagccgcagctcccgcacctccagcgatcaccccccgatgggcagagtttcaggagcttctcctttgaaaagccccggcaaccctcacaggctgacactggcggggacgactcggacgaggactatgagaaggtgccactgcccaactcggtcttcgtcaacaccacggagtcctgcgaagtggaaaggttgttcaaggctacaagcccccggggagagccccaggatggactctactgcatccggaactcctctaccaagtcggggaaggtcctggttgtgtgggacgaaacctctaacaaagtgaggaactatcgcatttttgagaaggactctaagttctacctggagggcgaggtcctgtttgtgagtgtgggcagcatggtggagcactaccacacccacgtgctgcccagccaccagagcctgctgctgcggcacccctacggctacactgggcctaggtgatggcagtccatgtggctgccaggccaaggcagtcacaggggccctgaccccaggccacacagacggacatgggcccacatgggagggtgagcaggagcaaggctgtgcttgcctagggcctctgtgatggacatctcgtaggacccagccagtctcatccagcaggttgggttctagggctgaaccaggcgccaggctccagaggacgaagggactctgttgccccacactaacttgccctgtcccaatcccagaaacccaggaccaagctgtgcctgggctccaaggacaggaacactggtccccccatcacactcacccctaagtgggctgggagccaggcagggccagggcagctgggtgggggccggggctggccctgggacccccaggaacgctaagacacaggctccagtaggggctgttgcctccaataaagcagcagtgagctttgccttggtggctggggcttgattgggaaggaggggattaccagcttactgggtgcccatgctgatgtctaagtggtgaccgcagcagtacccgggaaccccaacagttggttgtcttgtcttccagggtgcaggtcactgagtgacttccccagggtgcacagcgagtaacagatcaggacccaaacttgggcagtctgggctgggagcccacaccccactcaccagttctgctgcctcaggtcaggccagggcagtgctgctgcagagctagaaggccctgcagctacagctgcttcattccctgcattagtgcctggttactgggtacctcctgagtggctgtccccgttccagaacttgcatacactgagcgggctacagagctagaaggccctgcagctacagctgcttcattccctgcattagcgagcagttattgggtacctcctgcatgcctggtcccattccagacaggggcctctggcctggctgagttcacagcccagtctggggacagctgggtatgaggtgcttacggcacagtgtccagggcagctgggtgtgcagggactgggggctcccggaagattttttggaggaagtaacagctacgatgggatgggaacagtggaccctaagcaggccaagggtgcgtagggacggtggtacccagatgcccaagtcttccaggcaatacctggctcaggcccagccccaatccatccccttactttctgccatggagttccagcaggtcactctccctggcacaccttccaggctggatttttaatgaaacagactcagggaggtaggggctggcagggaccctagaatccttgtgatttttcttagcaccttatgtcagggaaacctaaactgaggtcagcacttgggcccactgacagtgactgactgggggagaaggtcctgcagcccccttcccctgggtgtgttctggggacctgtggtttgctggcggaaacaagtgatgaggctggttagcggatgtgggaggctgtgaccccagggggccatagggtgcggtggaactgcaggccctgcagatgacggcagccagctgcttccaggaaccaggtgtccaaggccacctctgcaggggtttcctcttcagcctgcctggggtgagaggtcagtgcaccacagccgaggctggagcacagggagcttctgttgttctgatctatctctggaaaaccagccattcctcctccctgcagtcagaattctttgccctgtctgacctgaacttgcttagggagtcatgccactccccactgtggccatagtttctcttcctgtaaaattttattattttagttttttgtttttgagatgtagtctcaccctgtcgcccaggctggagtgcaatgccgtgatctccgctcactgccacctccgcctctctagttcaagcgattttcctgcctcagcctcccgagtagctgggattccaggcgcccgccaccacgcctggctaattttttgtatttttagtagagacgggattttatcatgttggccaggctggtctcgaactcctgacctcaggtgatctgcccaccttggcctcccaaagtgctgggattacaggcatgagccactgtgcctggccccttcctgtaaaatttttaaatggagaattgggtgcgagatgtggtttccagcctggtgcctggggtgctgagctagtgagtggtgcagtccaggacacctttgctttatgtcacttacacggtcacctggagccggctcaagtggctaaagcatcctggggcccagagccaggtgataggtccctctggccaactggacagttgaggcctgtggttacccgaagcccagctggggccctggtccagcctcgcctcccagactctgcacctgctagcacagctgtccacgtctgtgtgagctgctctaggccgagggcctcagtttcaagagtgtgttggggtgggatggggcaggccgtggtcctccagcatgaagaaggagccatgaggagttcccatgacctcccgagacttgccataagtgttctagtccacatataagggtagggttgggattaccatttactgaccacatctgtgaggtgccgagctgggtgcttgacatcatttgcttggagaagcagctgctagtagacccattttacaggtgagagaaccaagtctcacagaggcctgggttcaagtcccacctctgccactaactggcatgtgaccctatctatccttcactgctctgagcctagaccctggcccctgcctggctccctgccaggctccctgccacccctcacgacctctgatggtcgttgtgggggtctcttgcctggctcccagggctagggttagggctctggaggtgctttcactcaaccaagggggccacagcactggggagtgaaactgccccgcctcaccctgcgttgccctctgggtctgtgagggtgggctggcaggaggcctaggccttgccctaggggcagtcctgcttcctcattttatagatagggaaactgaggctttgggaggactcactgacatacctaccttcaagatgagttcaggtgggctcagttctggggcttgggaaaagggccccagtggctttgggaagcacccccagcccagggtgaaacatgcttcttctcttcctgtggttccatccgaaggattgtggtgagccccgtgccttcagttaataaagatttgtattgtgaaaagattttttcttttttttttgggacacagtctcactctgtcgcccaggctagagtggattggcgtgatctcggctcaatgcaaatctccagggttcaatcgattctcctgcctcaccctcccatgtagctgggattacagctgcctgccaaatttttgtatttttagtggaaccggggtttcaccatgttggccaggctggtcttgaactcctgacctcaactgatccgcccaccttggcctcccaagtgctgggattacaggcgcgagccacggcgcccagccttgaaaagatgtttttagaaccagaagaaacctcggttcccactgatccttctgggccacgttgtgcggagctcccctgctggttggggctcagcgcagccccagggaggtgcttcctgcacctcaggatgggcgagggtgggcattgggggagagggggacctgggacctgcggcttagttccctgaggcaggcagggcttattggggccatttcatagaaaggcagattgaagctcagcagggaagaggcttttgagggtgatccaggcgctggagggatggcctaggacaccagggtcacaccaggaacatgggagggccgtgcttgtctctagacgaggggaatgggggaagggccacaacctctgtttctgtgacccagcagcatcaagcccctcgctgggcacctcgcacacaccccctgccttatctctgcctgcacgccctgttccctccacctagactgcctgctgagggggcagtgccaggaggttgcctgtccttggggaagaggggcagtgaccctgtgaagatgcttgacagacaacccccaccacctcagaagtgtgtgtgagtggtgaacccttttaagccatcttccagccattctcactggagggagatttgatgggtacagagcagacccctacctgtctaccctccttcggacccctaggaagcttcgcaggccttccaggctgccagacagctgccctggcgttgccgtctgcttcttccctggccccactctgaggggctcagagctgaggcagaatccctttttcattcatttcctgcagaataaaacaacatacagaaaagtgaataaaacataaatgcacaacctaacacactgttaggaagtgaacgatctgcaaccaccatcaggaaatagttttgccagcacccaagtgccctcccctcacagtgtcacttccggcctctctgccctggcttatgtgagtcttgtgttcttgtttttctaaaaagtcttcagcacccaattatgcaggcattgcagtattttcctgtttctgtgctttatccccttgaatcatacagatgcaaattctggcagctggcttctttggctcgttattatgtctgtgagatttattcatgttgctgtgcgtagtatagtttgtgcatgttcattgctaaaaacttccattgtttggctgtatcgtagttcacagattcatttcactgtcagtcaagcttgtccaatgcatgcagcccaggatgcctttgaatgtggcccaacacaaatttgtaaactttcttaaaacattataaagatttttgtttgcgatttttttttttagctcatcagctatagttagtggtagtgtattttatgcgtgacccgagacagttcttccggtatggtccatggaagccaaaagattggacatgcctgctgtagatggacagttggtttgtttctagtttggggtaactacacacaatgctgctagcaacagttttgtccatgtctctgatgcacgtgtgttttttgcaaatggtgcacaaatttttctagggtttgtactcaggagtctgactcctgggttctagggtatgaagatctttctaaatattgttctagtttacgtgcccaccagcagtaaaacagaattcccttgccttcccatccttggcagacatttcacttttgccagtctggtggggtgtatagttatggccttaatttgcatttagctaattaccaaggagattgagcatatttttatgtttttattaaccattttgattttgtctcctgtgaagtgtctatcatcttttgcccattttttaacttgttgtctttttctttttcttttctttttttttttttctgagacagggtctcactctgttgccctggctggagtgcagtggtgcaatctcagctcactgcagccttgagtcaggctcaggtgattctctcacctcagcctcccaagtagctgggaccacaggcccacaccaccaagcccagctaattttttgtatttttaagtagagacgggtttcatcatgttatgcaggctgctctcaaactcttgagctcaagcgatctgctggcctcagcctcccaaagttgggattataggcgtgagctaccagattttttcttattaatctaataattctttgtatagtcttgatattatccataatgtgtattgcaaatatcttctctaactctggcttgactgtttatggtgtcctttttttttggggggggttttttgagacaaggtcttgctctgtcacccaggctggagtgttatggcacaatcttggcttattgcagcctcaattcctaggcttaaacagtcctcccacctcagcctcctgagtagccggaactacagtcacgcacttccatgtccagataattttttttttttttttagagataggatcttactatgccccagctggtctcaaactcctagactcaatgagcctcccatcttgacctcccaaagtgctgggagtacaggcatgagccactgtgcatgccagttcttatttttaatgcagttgaattgatcagtgttttcattttggttagtgctttttgtggcttaagaaattctttccaggctgggtacagtggctcacacctgtaatgccagcactttgggggcagaggcaggaggattacttgagctcaggagtttgagaccaacctggacaacatggcgaaacaccatctctacaaaaaatacaaaaattagctggacatggtggtgcgtgcctgtagtcccagctactcaggtggctggggtgagaggattgcttgagcccagaaggtcaaggctgcagtgagctgtgattgtgccactgcacttcagcctgtgagacagagtgagaccctatctcaaaaaaaaccaaaaaaaaaaaaaaaaaaaagaaaaccactgaaattatttccactccaaggtcatgaagatagtctcttagattatattctgaaatccttataaatgtaaatttcatatttaggcctttaattcacctagatttggttttttgcatatggtgtgaggtaaggattcactttcatttttttctctccatagggttacacacctgtcctatcattgtttgtaatctaactttctgcgcccatctgcaatgccacctctgtcatatgtccacatatgacatatgtagatctgttgttggattctttcctctgttccattagtctgtctgttcttgtgccaatatcaagctgtcttcattattatcaattatgtattgagatctgataaagtaagtcttttccaccttatttttcttctttgagagtgtcttgactattctggctctttgtattttcatgtaaggtttttctcccatataagttttaaaatcagcttgtcaattccaacaacaatgatgcacttgatagtttgggaatttattatagctatcaatcagttttgggaaaattgacgtctttacaatattgagttttctgattcatgaacatggtttacctctctttccatttgggtcttctttaaggtttaccaataggattttatatttttgtccattgtggtcttgcttatcttaagtttgatttgtaaatattttatgtttcttttagtctattgtaaattgtgtatttttaatttcatttttttttttgttaatagcatataaaacacaccttgtcttttaactggagcattttgtccattgtgtatttaatgtaattaaatctaccatcttattttatgcta

SEQ ID NO: 18943 - DNA, 5194 bp, Homo sapiens
  source 1..5194: mol_type = unassigned DNA
cgcccaggcgcgggaccaccctccgcccgccgaggcgggggcccagcgcgcccggcactctcggcggtccgggcccctcgccactaccgccgccgccgccgccgtgagtcccgcggagccgcgcgcgcccccggctgggccgagccgctggccgacgagcggagcctcaggagccggcggggacgccatgcgagccagcgtctcccttctctcctggacagaaggccgtgtcctgggacttctctgatggcgagaggctgcggctgtaccaggaagaaacatattgccgagtggatgccgccgcgcagcgtgtttgcttgaggcagaagcttcagcatctgctgggataactggaggaagaaatatgaagccttagcggctttacccgggaagcgagtttcgagatggcggctcagcggatccgagcggccaactccaatggcctccctcgctgcaagtcagaggggaccctgattgacctgagcgaagggttttcagagacgagctttaatgacatcaaagtgccttctcccagtgccttgctcgtagacaaccccacacctttcggaaatgcaaaggaagtgattgcgatcaaggactattgccccaccaacttcaccacactgaagttctccaagggcgaccatctctacgtcttggacacatctggcggtgagtggtggtacgcacacaacaccaccgaaatgggctacatcccctcctcctatgtgcagcccttgaactaccggaactcaacactgagtgacagcggtatgattgataatcttccagacagcccagacgaggtagccaaggagctggagctgctcgggggatggacagatgacaaaaaagtaccaggcagaatgtacagtaataaccctttctggaatggggtccagaccaatccatttctgaatgggaacgtgcccgtcatgcccagcctggatgagctgaatcccaaaagtactgtggatttgctcctttttgacgcaggtacatcctccttcaccgaatccagctcagccaccacgaatagcactggcaacatcttcgatgagcttccagtcacaaacggactccacgcagagccgccggtcaggcgggacaaccccttcttcagaagcaagcgctcctacagtctctcggaactctccgtcctccaagccaagtccgatgctcccacatcgtcgagtttcttcaccggcttgaaatcacctgcccccgagcaatttcagagccgggaggattttcgaactgcctggctaaaccacaggaagctggcccggtcttgccacgacctggacttgcttggccaaagccctggttggggccagacccaagccgtggagacaaacatcgtgtgcaagctggatagctccgggggtgctgtccagcttcctgacaccagcatcagcatccacgtgcccgagggccacgtcgcccctggggagacccagcagatctccatgaaagccctgctggaccccccgctggagctcaacagtgacaggtcctgcagcatcagccctgtgctggaggtcaagctgagcaacctggaggtgaaaacctctatcatcttggagatgaaagtgtcagccgagataaaaaatgacctttttagcaaaagcacagtgggcctccagtgcctgaggagcgactcgaaggaagggccatatgtctccgtcccgctcaactgcagctgtggggacacggtccaggcacagctgcacaacctggagccctgtatgtacgtggctgtcgtggcccatggcccaagcatcctctacccttccaccgtgtgggacttcatcaataaaaaagtcacagtgggtctctacggccctaaacacatccacccatccttcaagacggtagtgaccatttttgggcatgactgtgccccaaagacgctcctggtcagcgaggtcacacgccaggcacccaaccctgccccggtggccctgcagctgtgggggaagcaccagttcgttttgtccaggccccaggatctcaaggtctgtatgttttccaatatgacgaattacgaggtcaaagccagcgagcaggccaaagtggtgcgaggattccagctgaagctgggcaaggtgagccgcctgatcttccccatcacctcccagaaccccaacgagctctctgacttcacgctgcgggttcaggtgaaggacgaccaggaggccatcctcacccagttttgtgtccagactcctcagccaccccctaaaagtgccatcaagccttccgggcaaaggaggtttctcaagaagaacgaagtcgggaaaatcatcctgtccccgtttgccaccactacaaagtacccgactttccaggaccgcccggtgtccagcctcaagtttggtaagttgctcaagactgtggtgcggcagaacaagaaccactacctgctggagtacaagaagggcgacgggatcgccctgctcagcgaggagcgggtcaggctccggggccagctgtggaccaaggagtggtacatcggctactaccagggcagggtgggcctcgtgcacaccaagaacgtgctggtggtcggcagggcccggcccagcctgtgctcgggccccgagctgagcacctcggtgctgctggagcagatcctgcggccctgcaaattcctcacgtacatctatgcctccgtgaggaccctgctcatggagaacatcagcagctggcgctccttcgctgacgccctgggctacgtgaacctgccgctcacctttttctgccgggcagagctggatagtgagcccgagcgggtggcgtccgtcctagaaaagctgaaggaggactgtaacaacactgagaacaaagaacggaagtccttccagaaggagcttgtgatggccctactgaagatggactgccagggcctggtggtcagactcatccaggactttgtgctcctgaccacggctgtagaggtggcccagcgctggcgggagctggctgagaagctggccaaggtctccaagcagcagatggacgcctacgagtctccccaccgggacaggaacggggttgtggacagcgaggccatgtggaagcctgcgtatgacttcttactcacctggagccatcagatcggggacagctaccgggatgtcatccaggagctgcacctgggcctggacaagatgaaaaaccccatcaccaagcgctggaagcacctcactgggactctgatcttggtgaactccctggacgttctgagagcagccgccttcagccctgcggaccaggacgacttcgtgatttgaatgggtcccctcccctcctgctgctctggagtgcaagccctcttctgccctgcgtgccctgctgtcaccgcggagctgaagagggaggaaggggcggctgctcagacagatttagggcccgccagctaggctacacccatcatgcgccgccctcctccatcgagggagaggcctgaagggactgcctactgcagctcgttgccaatcacatagctttctatttgttaagtataaatttaaatttaaaatcacttttttaacgaatggggggaagggatctatgagaaaggtggtatctaatttttttatggaccataaaggtttaaaagaaaataggggcacaggctgttgaggtttttatgttgttatagacctttttaaattatgttagagatgtatataggtatttaaaggtcactgggagcgtttctgattcccggccacactttgcatttcaacactcagcccggaaagatgctcgttcggttgttggacctctttcactccctgcgtgtaagaaggtgaatcacgtgggaaaaagtggcttttcagtaaacgggtacagctcattctttctgagaaggccccaggtcctgctccctcctcggatttgattgtcttccgtgctttgcctcactcgtagtaaatgaccatccatagaatatgtgaatctttggtgagcttcagtgggcagagtgaagtcccgcattagcatttaggtgccctgagctgtttctgccaatagattagaaagcagccatgagttgacagtctttagggcccctgccagtgtgcaattagtcattgacaagaacaatgccatttgagagtgaggtggtccctgctgctacgaggccattgtactgttttttccttgaggtcaaagcagtgcttcccatagagtttgctgcctcttctgtggacaggaagaaaacttcatgaccgaatcagagccttggtggccactgactctcgtgcttattgcagatgctgtggttggcctcacaagcaacgccttatgctgatgtgcagaggtgccagctgccatttgccaaactctgcatttcatttcatctaaggcttaacccctcttccttcctggtgtacctgtgtctcctcggaaggaagtcatagtttagatgaaaccattttttgtacaatgtaaagatcatctgagcaagatgagcattttgtaaaaatgaaaatgtgactcacataaaatcaggaacttgacacagtgttgcattaataactttagggtgcagacatgctgtgtgaatctcacaatgcgtcgtagatgtcgcgtgttggaagggagcaggaggaaggactgatactggcaaatcagtagagtgaggtgatccttagcaacgtgccaggacacttcctgtgtgcctgcagttgtcagggaccatttgggatcccgaatctcattctctaaaactgctttcttgaaacatgttacttccttagtataatcaatgtatactcccttactggcctgaaacgttgtatagctacttattcagatactgaagaccaacggactgaaaaaaagaacaaacattagctattttatgctgcaagaaccaggacacacaattcgccaatcatcccaccatataaccttcgattgtgcttctcaactccaccccataatttctcccagagaccatctatcaccttttccccaaagaagaaacaaaaccagttgcaccttaaaccatggatattttttcctcaggggctttaaatagtttcctatgcaacgtgtcttgtagcacaaataaaattctacaaaagttgcagtaaattttatttggatattttaacctgttaagtgtgtgtgtgttttctgtacccaaccagactttaaataaaacaaacatgaaacctaa

SEQ ID NO: 18944 - DNA, 612 bp, Homo sapiens
  source 1..612: mol_type = unassigned DNA
ggcggtccgggcccctcgccactaccgccgccgccgccgccgtgagtcccgcggagccgcgcgcgcccccggctgggccgagccgctggccgacgagcggagcctcaggagccggcggggacgccatgcgagccagatccctcctgtgaggatgaaattgaaaactccggtttctggcttggcgatcgggtgaccgagcagccgcgaggtgacagcgccggcggcccgcgggcggggaccggctgggatagaggcgcgttgttctctgagcgatgtttaccgagaagcccgctccgcggcacgggcgggtgtcagttgggaccccaaccctgggtcccgcggctcctagcccggggcctgcggtgtagacgggggttggggacaggcccagctggccctgaccgggtgtcgggcgcccagagatgccgcgcgggaggagccgcgggagagccgccggactcagcgagcagagggtcgtggagcctgatggatcgatgagatctgaaaaagaacactgtgcgagattgtattcctgcttattctttccaagttagtaggcagattggaactatagaatttatccgtgataataataaagttcgcataactttt

SEQ ID NO: 18945 - DNA, 593 bp, Homo sapiens
  source 1..593: mol_type = unassigned DNA
gtgagtcccgcggagccgcgcgcgcccccggctgggccgagccgctggccgacgagcggagcctcaggagccggcggggacgccatgcgagccaggaagaaacatattgccgagtggatgccgccgcgcagcgtgtttgcttgaggcagaagcttcagcatctgctgggataactggaggaagaaatatgaagccttagcggctttacccgggaagcgagtttcgagatggcggctcagcggatccgagcggccaactccaatggcctccctcgctgcaagtcagaggggaccctgattgacctgagcgaagggttttcagagacgagctttaatgacatcaaagtgccttctcccagtgccttgctcgtagacaaccccacacctttcggaaatgcaaaggaagtgattgcgatcaaggactattgccccaccaacttcaccacactgaagttctccaagggcgaccatctctacgtcttggacacatctggcggtgagtggtggtacgcacacaacaccaccgaaatgggctacatcccctcctcctatgtgcagcccttgaactaccggaactcaacactgagtgacagc

SEQ ID NO: 18946 - DNA, 5231 bp, Homo sapiens
  source 1..5231: mol_type = unassigned DNA
accttaagagggacaactgaaacagagacaagcaccccaacagtagggtgcttcgaggtcctggaggggagccctggccctgtggagagagaccgagtcgtgcagcgtccgtggcctgcatttgaaactgaagggcaagaggctggtgagatccgagagtcatgccgctgcgtggaggaacatgctgaacctctggaggaacggctctacctccaggtcaggctggaggcttttgcatttggtttggcgaggagagacagcaggatttctgggtgccggacatgcttctcggtcagagctgcgtctcccttctctcctggacagaaggccgtgtcctgggacttctctgatggcgagaggctgcggctgtaccaggaagaaacatattgccgagtggatgccgccgcgcagcgtgtttgcttgaggcagaagcttcagcatctgctgggataactggaggaagaaatatgaagccttagcggctttacccgggaagcgagtttcgagatggcggctcagcggatccgagcggccaactccaatggcctccctcgctgcaagtcagaggggaccctgattgacctgagcgaagggttttcagagacgagctttaatgacatcaaagtgccttctcccagtgccttgctcgtagacaaccccacacctttcggaaatgcaaaggaagtgattgcgatcaaggactattgccccaccaacttcaccacactgaagttctccaagggcgaccatctctacgtcttggacacatctggcggtgagtggtggtacgcacacaacaccaccgaaatgggctacatcccctcctcctatgtgcagcccttgaactaccggaactcaacactgagtgacagcggtatgattgataatcttccagacagcccagacgaggtagccaaggagctggagctgctcgggggatggacagatgacaaaaaagtaccaggcagaatgtacagtaataaccctttctggaatggggtccagaccaatccatttctgaatgggaacgtgcccgtcatgcccagcctggatgagctgaatcccaaaagtactgtggatttgctcctttttgacgcaggtacatcctccttcaccgaatccagctcagccaccacgaatagcactggcaacatcttcgatgagcttccagtcacaaacggactccacgcagagccgccggtcaggcgggacaaccccttcttcagaagcaagcgctcctacagtctctcggaactctccgtcctccaagccaagtccgatgctcccacatcgtcgagtttcttcaccggcttgaaatcacctgcccccgagcaatttcagagccgggaggattttcgaactgcctggctaaaccacaggaagctggcccggtcttgccacgacctggacttgcttggccaaagccctggttggggccagacccaagccgtggagacaaacatcgtgtgcaagctggatagctccgggggtgctgtccagcttcctgacaccagcatcagcatccacgtgcccgagggccacgtcgcccctggggagacccagcagatctccatgaaagccctgctggaccccccgctggagctcaacagtgacaggtcctgcagcatcagccctgtgctggaggtcaagctgagcaacctggaggtgaaaacctctatcatcttggagatgaaagtgtcagccgagataaaaaatgacctttttagcaaaagcacagtgggcctccagtgcctgaggagcgactcgaaggaagggccatatgtctccgtcccgctcaactgcagctgtggggacacggtccaggcacagctgcacaacctggagccctgtatgtacgtggctgtcgtggcccatggcccaagcatcctctacccttccaccgtgtgggacttcatcaataaaaaagtcacagtgggtctctacggccctaaacacatccacccatccttcaagacggtagtgaccatttttgggcatgactgtgccccaaagacgctcctggtcagcgaggtcacacgccaggcacccaaccctgccccggtggccctgcagctgtgggggaagcaccagttcgttttgtccaggccccaggatctcaaggtctgtatgttttccaatatgacgaattacgaggtcaaagccagcgagcaggccaaagtggtgcgaggattccagctgaagctgggcaaggtgagccgcctgatcttccccatcacctcccagaaccccaacgagctctctgacttcacgctgcgggttcaggtgaaggacgaccaggaggccatcctcacccagttttgtgtccagactcctcagccaccccctaaaagtgccatcaagccttccgggcaaaggaggtttctcaagaagaacgaagtcgggaaaatcatcctgtccccgtttgccaccactacaaagtacccgactttccaggaccgcccggtgtccagcctcaagtttggtaagttgctcaagactgtggtgcggcagaacaagaaccactacctgctggagtacaagaagggcgacgggatcgccctgctcagcgaggagcgggtcaggctccggggccagctgtggaccaaggagtggtacatcggctactaccagggcagggtgggcctcgtgcacaccaagaacgtgctggtggtcggcagggcccggcccagcctgtgctcgggccccgagctgagcacctcggtgctgctggagcagatcctgcggccctgcaaattcctcacgtacatctatgcctccgtgaggaccctgctcatggagaacatcagcagctggcgctccttcgctgacgccctgggctacgtgaacctgccgctcacctttttctgccgggcagagctggatagtgagcccgagcgggtggcgtccgtcctagaaaagctgaaggaggactgtaacaacactgagaacaaagaacggaagtccttccagaaggagcttgtgatggccctactgaagatggactgccagggcctggtggtcagactcatccaggactttgtgctcctgaccacggctgtagaggtggcccagcgctggcgggagctggctgagaagctggccaaggtctccaagcagcagatggacgcctacgagtctccccaccgggacaggaacggggttgtggacagcgaggccatgtggaagcctgcgtatgacttcttactcacctggagccatcagatcggggacagctaccgggatgtcatccaggagctgcacctgggcctggacaagatgaaaaaccccatcaccaagcgctggaagcacctcactgggactctgatcttggtgaactccctggacgttctgagagcagccgccttcagccctgcggaccaggacgacttcgtgatttgaatgggtcccctcccctcctgctgctctggagtgcaagccctcttctgccctgcgtgccctgctgtcaccgcggagctgaagagggaggaaggggcggctgctcagacagatttagggcccgccagctaggctacacccatcatgcgccgccctcctccatcgagggagaggcctgaagggactgcctactgcagctcgttgccaatcacatagctttctatttgttaagtataaatttaaatttaaaatcacttttttaacgaatggggggaagggatctatgagaaaggtggtatctaatttttttatggaccataaaggtttaaaagaaaataggggcacaggctgttgaggtttttatgttgttatagacctttttaaattatgttagagatgtatataggtatttaaaggtcactgggagcgtttctgattcccggccacactttgcatttcaacactcagcccggaaagatgctcgttcggttgttggacctctttcactccctgcgtgtaagaaggtgaatcacgtgggaaaaagtggcttttcagtaaacgggtacagctcattctttctgagaaggccccaggtcctgctccctcctcggatttgattgtcttccgtgctttgcctcactcgtagtaaatgaccatccatagaatatgtgaatctttggtgagcttcagtgggcagagtgaagtcccgcattagcatttaggtgccctgagctgtttctgccaatagattagaaagcagccatgagttgacagtctttagggcccctgccagtgtgcaattagtcattgacaagaacaatgccatttgagagtgaggtggtccctgctgctacgaggccattgtactgttttttccttgaggtcaaagcagtgcttcccatagagtttgctgcctcttctgtggacaggaagaaaacttcatgaccgaatcagagccttggtggccactgactctcgtgcttattgcagatgctgtggttggcctcacaagcaacgccttatgctgatgtgcagaggtgccagctgccatttgccaaactctgcatttcatttcatctaaggcttaacccctcttccttcctggtgtacctgtgtctcctcggaaggaagtcatagtttagatgaaaccattttttgtacaatgtaaagatcatctgagcaagatgagcattttgtaaaaatgaaaatgtgactcacataaaatcaggaacttgacacagtgttgcattaataactttagggtgcagacatgctgtgtgaatctcacaatgcgtcgtagatgtcgcgtgttggaagggagcaggaggaaggactgatactggcaaatcagtagagtgaggtgatccttagcaacgtgccaggacacttcctgtgtgcctgcagttgtcagggaccatttgggatcccgaatctcattctctaaaactgctttcttgaaacatgttacttccttagtataatcaatgtatactcccttactggcctgaaacgttgtatagctacttattcagatactgaagaccaacggactgaaaaaaagaacaaacattagctattttatgctgcaagaaccaggacacacaattcgccaatcatcccaccatataaccttcgattgtgcttctcaactccaccccataatttctcccagagaccatctatcaccttttccccaaagaagaaacaaaaccagttgcaccttaaaccatggatattttttcctcaggggctttaaatagtttcctatgcaacgtgtcttgtagcacaaataaaattctacaaaagttgcagtaaattttatttggatattttaa

SEQ ID NO: 18947 - DNA, 638 bp, Homo sapiens
  source 1..638: mol_type = unassigned DNA
actgaaacagagacaagcaccccaacagtagggtgcttcgaggtcctggaggggagccctggccctgtggagagagaccgagtcgtgcagcgtccgtggcctgcatttgaaactgaagggcaagaggctggtgagatccgagagtcatgccgctgcgtggaggaacatgctgaacctctggaggaacggctctacctccagtatcttttgtggctggcagactctgagatggccttcagtgatccacacctcctggtgttcacatcctgtgaagtcccctccctttggcgtgagccgagctagcaacttgcttctaaccagtaggatgcatccaagttgatgctgtgccttcctcccgtgattacattatgtgggcttagaacttcttccttgacaacagatggtctcccctgctggctgtggtggagcaggctgccatatagagaggccatgtggcaaggaactgagggtggcctcccccggcagccagcatgcagttgaagcctcagtcccatggccacaagtaactggatgctacaacaagcagatgaccctggaggacccctcccccagatgaccctggaggacccctccccagtctagccttgagatgacaccccagcctgggccaagacttt

SEQ ID NO: 18948 - DNA, 5044 bp, Homo sapiens
  source 1..5044: mol_type = unassigned DNA
gaaacagagacaagcaccccaacagtagggtgcttcgaggtcctggaggggagccctggccctgtggagagagaccgagtcgtgcagcgtccgtggcctgcatttgaaactgaagggcaagaggctggtgagatccgagagtcatgccgctgcgtggaggaacatgctgaacctctggaggaacggctctacctccagcgtctcccttctctcctggacagaaggccgtgtcctgggacttctctgatggcgagaggctgcggctgtaccaggaagaaatatgaagccttagcggctttacccgggaagcgagtttcgagatggcggctcagcggatccgagcggccaactccaatggcctccctcgctgcaagtcagaggggaccctgattgacctgagcgaagggttttcagagacgagctttaatgacatcaaagtgccttctcccagtgccttgctcgtagacaaccccacacctttcggaaatgcaaaggaagtgattgcgatcaaggactattgccccaccaacttcaccacactgaagttctccaagggcgaccatctctacgtcttggacacatctggcggtgagtggtggtacgcacacaacaccaccgaaatgggctacatcccctcctcctatgtgcagcccttgaactaccggaactcaacactgagtgacagcggtatgattgataatcttccagacagcccagacgaggtagccaaggagctggagctgctcgggggatggacagatgacaaaaaagtaccaggcagaatgtacagtaataaccctttctggaatggggtccagaccaatccatttctgaatgggaacgtgcccgtcatgcccagcctggatgagctgaatcccaaaagtactgtggatttgctcctttttgacgcaggtacatcctccttcaccgaatccagctcagccaccacgaatagcactggcaacatcttcgatgagcttccagtcacaaacggactccacgcagagccgccggtcaggcgggacaaccccttcttcagaagcaagcgctcctacagtctctcggaactctccgtcctccaagccaagtccgatgctcccacatcgtcgagtttcttcaccggcttgaaatcacctgcccccgagcaatttcagagccgggaggattttcgaactgcctggctaaaccacaggaagctggcccggtcttgccacgacctggacttgcttggccaaagccctggttggggccagacccaagccgtggagacaaacatcgtgtgcaagctggatagctccgggggtgctgtccagcttcctgacaccagcatcagcatccacgtgcccgagggccacgtcgcccctggggagacccagcagatctccatgaaagccctgctggaccccccgctggagctcaacagtgacaggtcctgcagcatcagccctgtgctggaggtcaagctgagcaacctggaggtgaaaacctctatcatcttggagatgaaagtgtcagccgagataaaaaatgacctttttagcaaaagcacagtgggcctccagtgcctgaggagcgactcgaaggaagggccatatgtctccgtcccgctcaactgcagctgtggggacacggtccaggcacagctgcacaacctggagccctgtatgtacgtggctgtcgtggcccatggcccaagcatcctctacccttccaccgtgtgggacttcatcaataaaaaagtcacagtgggtctctacggccctaaacacatccacccatccttcaagacggtagtgaccatttttgggcatgactgtgccccaaagacgctcctggtcagcgaggtcacacgccaggcacccaaccctgccccggtggccctgcagctgtgggggaagcaccagttcgttttgtccaggccccaggatctcaaggtctgtatgttttccaatatgacgaattacgaggtcaaagccagcgagcaggccaaagtggtgcgaggattccagctgaagctgggcaaggtgagccgcctgatcttccccatcacctcccagaaccccaacgagctctctgacttcacgctgcgggttcaggtgaaggacgaccaggaggccatcctcacccagttttgtgtccagactcctcagccaccccctaaaagtgccatcaagccttccgggcaaaggaggtttctcaagaagaacgaagtcgggaaaatcatcctgtccccgtttgccaccactacaaagtacccgactttccaggaccgcccggtgtccagcctcaagtttggtaagttgctcaagactgtggtgcggcagaacaagaaccactacctgctggagtacaagaagggcgacgggatcgccctgctcagcgaggagcgggtcaggctccggggccagctgtggaccaaggagtggtacatcggctactaccagggcagggtgggcctcgtgcacaccaagaacgtgctggtggtcggcagggcccggcccagcctgtgctcgggccccgagctgagcacctcggtgctgctggagcagatcctgcggccctgcaaattcctcacgtacatctatgcctccgtgaggaccctgctcatggagaacatcagcagctggcgctccttcgctgacgccctgggctacgtgaacctgccgctcacctttttctgccgggcagagctggatagtgagcccgagcgggtggcgtccgtcctagaaaagctgaaggaggactgtaacaacactgagaacaaagaacggaagtccttccagaaggagcttgtgatggccctactgaagatggactgccagggcctggtggtcagactcatccaggactttgtgctcctgaccacggctgtagaggtggcccagcgctggcgggagctggctgagaagctggccaaggtctccaagcagcagatggacgcctacgagtctccccaccgggacaggaacggggttgtggacagcgaggccatgtggaagcctgcgtatgacttcttactcacctggagccatcagatcggggacagctaccgggatgtcatccaggagctgcacctgggcctggacaagatgaaaaaccccatcaccaagcgctggaagcacctcactgggactctgatcttggtgaactccctggacgttctgagagcagccgccttcagccctgcggaccaggacgacttcgtgatttgaatgggtcccctcccctcctgctgctctggagtgcaagccctcttctgccctgcgtgccctgctgtcaccgcggagctgaagagggaggaaggggcggctgctcagacagatttagggcccgccagctaggctacacccatcatgcgccgccctcctccatcgagggagaggcctgaagggactgcctactgcagctcgttgccaatcacatagctttctatttgttaagtataaatttaaatttaaaatcacttttttaacgaatggggggaagggatctatgagaaaggtggtatctaatttttttatggaccataaaggtttaaaagaaaataggggcacaggctgttgaggtttttatgttgttatagacctttttaaattatgttagagatgtatataggtatttaaaggtcactgggagcgtttctgattcccggccacactttgcatttcaacactcagcccggaaagatgctcgttcggttgttggacctctttcactccctgcgtgtaagaaggtgaatcacgtgggaaaaagtggcttttcagtaaacgggtacagctcattctttctgagaaggccccaggtcctgctccctcctcggatttgattgtcttccgtgctttgcctcactcgtagtaaatgaccatccatagaatatgtgaatctttggtgagcttcagtgggcagagtgaagtcccgcattagcatttaggtgccctgagctgtttctgccaatagattagaaagcagccatgagttgacagtctttagggcccctgccagtgtgcaattagtcattgacaagaacaatgccatttgagagtgaggtggtccctgctgctacgaggccattgtactgttttttccttgaggtcaaagcagtgcttcccatagagtttgctgcctcttctgtggacaggaagaaaacttcatgaccgaatcagagccttggtggccactgactctcgtgcttattgcagatgctgtggttggcctcacaagcaacgccttatgctgatgtgcagaggtgccagctgccatttgccaaactctgcatttcatttcatctaaggcttaacccctcttccttcctggtgtacctgtgtctcctcggaaggaagtcatagtttagatgaaaccattttttgtacaatgtaaagatcatctgagcaagatgagcattttgtaaaaatgaaaatgtgactcacataaaatcaggaacttgacacagtgttgcattaataactttagggtgcagacatgctgtgtgaatctcacaatgcgtcgtagatgtcgcgtgttggaagggagcaggaggaaggactgatactggcaaatcagtagagtgaggtgatccttagcaacgtgccaggacacttcctgtgtgcctgcagttgtcagggaccatttgggatcccgaatctcattctctaaaactgctttcttgaaacatgttacttccttagtataatcaatgtatactcccttactggcctgaaacgttgtatagctacttattcagatactgaagaccaacggactgaaaaaaagaacaaacattagctattttatgctgcaagaaccaggacacacaattcgccaatcatcccaccatataaccttcgattgtgcttctcaactccaccccataatttctcccagagaccatctatcaccttttccccaaagaagaaacaaaaccagttgcaccttaaaccatggatattttttcctcaggggctttaaatagtttcctatgcaacgtgtcttgtagcacaaataaaattctacaaaagttgcagtaaattttatttggatattttaa

SEQ ID NO: 18949 - DNA, 570 bp, Homo sapiens
  source 1..570: mol_type = unassigned DNA
aacagagacaagcaccccaacagtagggtgcttcgaggtcctggaggggagccctggccctgtggagagagaccgagtcgtgcagcgtccgtggcctgcatttgaaactgaagggcaagaggctggtgagatccgagagtcatgccgctgcgtggaggaacatgctgaacctctggaggaacggctctacctccagcgtctcccttctctcctggacagaaggccgtgtcctgggacttctctgatggcgagaggctgcggctgtaccaggaagaaacatattgccgagtggatgccgccgcgcagcgtgtttgcttgaggcagaagcttcagcatctgctgggataactggaggaagaaatatgaagccttagcggctttacccgggaagcgagtttcgagatggcggctcagcggatccgagcggccaactccaatggcctccctcgctgcaagtcagaggggaccctgattgacctgagcgaagggttttcagagacgagctttaatgacatcaaagtgccttctcccagtgccttgctcgtagacaaccccacacctttcggaaat

SEQ ID NO: 18950 - DNA, 829 bp, Homo sapiens
  source 1..829: mol_type = unassigned DNA
cgcagttggctggtgtttgtttgcacaaggattctttggtaacaatctgcagtcggtttctggcggaatgtgaggtgaagtcacgactgactttcgggatggagcgtctcccttctctcctggacagaaggccgtgtcctgggacttctctgatggcgagaggctgcggctgtaccaggaagaaacatattgccgagtggatgccgccgcgcagcgtgtttgcttgaggcagaagcttcagcatctgctgggataactggaggaagaaatatgaagccttagcggctttacccgggaagcgagtttcgagatggcggctcagcggatccgagcggccaactccaatggcctccctcgctgcaagtcagaggggaccctgattgacctgagcgaagggttttcagagacgagctttaatgacatcaaagtgccttctcccagtgccttgctcgtagacaaccccacacctttcggaaatgcaaaggaagtgattgcgatcaaggactattgccccaccaacttcaccacactgaagttctccaagggcgaccatctctacgtcttggacacatctggcggtgagtggtggtacgcacacaacaccaccgaaatgggctacatcccctcctcctatgtgcagcccttgaactaccggaactcaacactgagtgacagcggtatgattgataatcttccagacagcccagacgaggtagccaaggagctggagctgctcgggggatggacagatgacaaaaaagtaccaggcagaatgtacagtaataaccctttctggaatggggtccagaccaatccatttctgaatggg

SEQ ID NO: 18951 - DNA, 257 bp, Homo sapiens
  source 1..257: mol_type = unassigned DNA
tggtgtttgtttgcacaaggattctttggtaacaatctgcagtcggtttctggcggaatgtgaggtgaagtcacgactgactttcgggatggagatttgtgcttgagaagctctgagttcccgtctgtccacctgcattggcatatggcgtctcccttctctcctggacagaaggccgtgtcctgggacttctctgatggcgagaggctgcggctgtaccagttggagacaagaaagaagcttctccaagctcccct

SEQ ID NO: 18952 - DNA, 481 bp, Homo sapiens
  source 1..481: mol_type = unassigned DNA
cagttccgtctgtcgcattgatgttggctggttctgctctcaaaggcgccggctctgtagtgatgtcagcgccgtgtgacttgaggaggagaccccactgctgcgcgtctcccttctctcctggacagaaggccgtgtcctgggacttctctgatggcgagaggctgcggctgtaccagcgaatccactttctgttgccacccgtggaacgttctcactcttccaagaagccaggctagcagctcccccaccccagcagccgcgggacagagcccaggttgggtggtgtgtacacaaaggagggattgttctcacgtcgccctgcgacgagatggggatggacccgcggttagaggtcaccctccctggggcgtcaggggagcatttgtccttgaaacacgctggcaaaaaatgttccaaggaagcctcagctggtgtttgtgaggaagagctggattaaatggtgttctggtaaaatgtt

SEQ ID NO: 18953 - DNA, 500 bp, Homo sapiens
  source 1..500: mol_type = unassigned DNA
agcacagcagcaggggaagaggacagtgaggctgggatgcagcctccatgcagcctgtcgctttctccacaggagctctggcctgggccagactgccgagtcaccctgattcaggagtaggcgtctcccttctctcctggacagaaggccgtgtcctgggacttctctgatggcgagaggctgcggctgtaccaggaagaaacatattgccgagtggatgccgccgcgcagcgtgtttgcttgaggcagaagcttcagcatctgctgggataactggaggaagaaatatgaagccttagcggctttacccgggaagcgagtttcgagatggcggctcagcggatccgagcggccaactccaatggcctccctcgctgcaagtcagaggggaccctgattgacctgagcgaagggttttcagagacgagctttaatgacatcaaagtgccttctcccagtgccttgctcgtagacaaccccacacctttcggaaatgcaaa

SEQ ID NO: 18954 - DNA, 503 bp, Homo sapiens
  source 1..503: mol_type = unassigned DNA
agagtttcatatgctggaccacattttagcttttattgttttttttttcccattgtccaaaaagttaagcaacaagtggccacacttttacgtgactacaacctggagttctgcaaagaaggaataatccaatactcaaggttgtgttgtgtgaggaagcaaagaaacacttacaatttattgaccacttctttcaagtcatttgtctgcacctctcgggtcatgatttccatcatcttcttccggatttggcggacctgttggtgctgagcataagaggtcttccgtatctgattgttgcgttttttagtaaaaccaacacagaacagacgaagcaagtaaccatcggtagtcttgacatcaacgtgagcttcaatcattgtctggagaaaaaagataccgtcagatttaacaggttttacgttatccatttatccctcaagttctaattttaaaaagctggattgtcaaacactcattattaaatataaagtatcctaaca

SEQ ID NO: 18955 - DNA, 5284 bp, Homo sapiens
  source 1..5284: mol_type = unassigned DNA
gaaatccaacttctgaaatgttctgggtggtagatagttaagggtgaagctgtattggtcttagtatttgcagatgttgtagctgactgctcatttttccccctccccattctgttagaagcttctgccaaccatgattcatggaatgatttttttgagctgagtaatctgtggctttgcagtttccttgctttctttccttagctaaatctcttctagtgttagcaaagtatttagcacaggaaagatcttataaaatgaaataatgcatgtaatgatgcattttccaagtagatgattttaacaaaccgtaagcttttatgcctgtccttcattgtgtcttttctgcctctgtcaggcgaactgtgatgaagagccttatacttaggaagacacaactacctttgaacagtcctttgtgaaatctaatgatcgcaacgaacgaaataaaccagaacatcgttcttcaagccaaggacccttgtcatccattagagcggtaatcaagagatcttctcggacttctattcagagtgaacttcatcgagatagaaggcgcccagagatcaccattgtggcagctgagccactgaggccagcctcgtggtttccaggaaccccacccccaggactgggatttcctacatcatctgcagcaggctcttggaggcctaatgagctggttcctgctgagctcccaccatcttatgaacaagttataaaagaaatcaaccaagttcaagttaatactacaaataataataatgctgctgctactccaaggcacactattacttctgcaactcagactgacttttcagaagaaatagacaacgatctgcctcaaagtaatgcaacactacaggcacctctcaagcctcttcagcctttctcagcagtctcgtctggcaatcttccaacaaatgtggcacctttaatcgtctttgatatttctgaagaaccgaattgtccagaaaaccccagtgctacaagatgtccagtgccaaaaccaagatcaaaaagcaacctcagaccaatacccagagattctcacattaaagagcaaagtcaacagaaaatcagcccagcagccgtaggagaggagtcatccccaggccggccccagtctctgctggacaacgctagcacctcagacagtcaggcagtgatgaacattatgaacacagaacaaagccaaaatagtattgtttccagaattaaagtgtttgagggtcagacaaacatagaaacctcaggactgcccaagaaaccagaaattactccacgttcacttcctccaaagcctactgtttcctcagggaaaccttctgtagctcccaaaccagctgctaacagagcttctggagagtgggactctgggactgagaacagactcaaggtgacctccaaggaaggactcaccccataccctcccctgcaagaagcgggaagcatcccagtaaccaaacctgaattgccaaagaaaccaaaccctggccttatacgaagtgttaatcctgagattccgggaagagggcccctggctgagagctctgatagtgggaagaaagtgccaactcctgccccgcggcctttgctgctgaagaaatctgtttcctcagaaaaccccacctacccttcagctccactgaaacctgtcactgttcctccccgactcgcaggggcatcacaagccaaagcatacaagtcactgggagaagggcccccagccaaccccccagttccagttctgcagagcaagcccttggtggacatcgatctcatcagctttgatgatgatgttttgcccaccccatcggggaacctggctgaagaatctgttggttcagagatggttctagatccctttcagctccctgcaaaaacagaaccaataaaagaacgagcagttcaaccagcacccaccaggaagcccactgtaattcgaattccagccaaaccaggaaaatgtttacatgaggatccacaaagtccacctcctctccctgctgaaaaacctattggaaacactttcagtacagtatctggaaagctcagtaatgttgagagaactagaaacttggaatccaaccacccaggtcaaacaggaggttttgtgcgagtacccccaaggttgccaccgagacctgtgaatggaaaaaccattccaactcaacagcctccaaccaaggtgccccctgagagaccacctcccccaaagctttctgcaaccagaagatctaataagaaactgccttttaatcgatcctcttctgacatggatcttcagaaaaaacaaagtaacttggcaactggactctcaaaagccaagagtcaagtttttaaaaatcaagatccggtgctaccccctcgtcccaaaccaggacaccctctctacagtaaatacatgcgtggggatgtacttgtgatgctgaagcagacggaaaataattacttggagtgccaaaagggagaagacactggcagagttcacctgtctcaaatgaagattatcactccacttgatgaacatcttagaagcagaccaaacgatccaagccacgctcagaagcctgttgacagtggtgctcctcatgctgtcgttcttcatgatttcccagcagagcaagttgatgatttgaacctcacttctggagaaattgtttatcttctggagaagatagatacagattggtacagagggaactgtagaaaccagattggcatatttcctgccaactatgtcaaagtgattattgatatcccagaaggaggaaatgggaaaagagaatgtgtttcatctcattgtgttaaaggctcaagatgtgttgctcggtttgaatatattggagagcagaaggatgagttgagtttctcagagggagaaattattattcttaaagagtatgtgaatgaggaatgggccagaggagaagttcgaggcagaactgggattttccccctgaactttgtggagcctgttgaggattatcccacctctggtgcaaatgttttaagcacaaaggtaccactgaaaaccaaaaaagaagattctggctcaaactctcaggttaacagtcttccggcagaatggtgtgaagctcttcacagttttacagcagagaccagtgatgacttatcattcaagaggggagaccggatccagattctggaacgtctggattctgactggtgcaggggcagactgcaggacagggaggggatcttcccagcagtgtttgtgaggccctgcccagctgaggcaaaaagtatgttggccatagtaccgaaggggaggaaggccaaagccttatatgatttccgaggggagaatgaagatgaactttccttcaaggctggagatataataacagagctggaatctgtagatgatgactggatgagtggagaacttatgggaaaatctggaatatttcccaaaaactacatacagtttctacagatcagctagaggagaagcttgtctgtgttccttggcacaagaactcacttgaactatcaccttgactatcagatatgtttttgcactattttttttaactgaaaaagaaatatctaagctgtacatggtacactagaattttctgaaagcagaaaacgttcagattttgtagttaattttcattacaatagaaacatgcacatggaaacccatgagctaggattctaccgaggaaaacatctagtgggattagcaaggtgaagggaaagcatctggtggcatggcagcatggggaggctcacacacagaagttgcacgtggacatctgttttaatcagcacaagtgaattaaccatgcttcttcatttttttactttagttaaaaaagaggacatttaatattctacatgctgtaactatcaggacatggttagcaatctcaatttcatttttgatattcaaattaattcttacagcttgagcatatcagccttattaccagagcaaatccttccttcagatgggatagtttactgactagttggagcatttgtaagcacatggtgaaatcagcccctgcccaccaaaataatctttatgttaccaagtgattcccatttgtctaaggatttgaagggggtctaaattggatgtatcttacttagtctaaagaaccaaaaccatccctgaaatgccttgctaatacaactaatccttccatatatgtgccatacttatttttttcctcagtgtatactttatgttaacagggttattacaaagcacattttctgaatctgcaatcattcctttgacaattactggacccaaaggaaaattcattttctttgcattattccagtaatatataaaaactgtgtcttgttatagtagtacattatgaatcacatataaaatcttacaatacagaacaactgttaagatggaaaacagtgccaaacctccacagctcatttctttgtaatataatcagaatgaaaaataatttaagaggacagaagactggtacttttttgttttattttttctctagcttatccctgcacaattattagagtgaatgaaaaaccactttcctgctttccattgttataaattctaagcttaagataaaagtggttctttacatgactgaatcaattacaatttatgggctagagccaaataggttgaagacaatcatccaaacagatcaatggaatagaatttcattggaaatgtaaaacactttcccaacaatggtcatgactttcttctgtttttgagaagagtttcatatgctggaccacattttagcttttattgttttttttttcccattgtccaaaaagttaagcaacaagtggccacacttttacgtgactacaacctggagttctgcaaagaaggtaatatttacttggtctttgactaaagttatctccccattctatggttacattttattttggactatggggacttctaatacgttttggtaaagaagagagtataaagaaaattcttgtcaaatttcactcaaaagtaatttcatgagaaatcaatgatttaaagcattatccaaattaaattatcatttgcagcaaactgtacaacagcaggaaggatatggaatggaacatgaggtatatatctttgcctttataattttaacatcttatattgaagattctgaaaacctatctttattagaggaaaatctcaatcttcagttttggccttctgtcagcagaatgataagtgcaatagttgtaaatctacttgacactgtaataaactgaactgaactttcaaagtccc

SEQ ID NO: 18956 - DNA, 4888 bp, Homo sapiens
  source 1..4888: mol_type = unassigned DNA
ccagaacatcgttcttcaagccaaggacccttgtcatccattagagcggtaatcaagagatcttctcggacttctattcagagtgaacttcatcgagatagaaggcgcccagagatcaccattgtggcagctgagccactgaggccagcctcgtggtttccaggaaccccacccccaggactgggatttcctacatcatctgcagcaggctcttggaggcctaatgagctggttcctgctgagctcccaccatcttatgaacaagttataaaagaaatcaaccaagttcaagttaatactacaaataataataatgctgctgctactccaaggcacactattacttctgcaactcagactgacttttcagaagaaatagacaacgatctgcctcaaacactacaggcacctctcaagcctcttcagcctttctcagcagtctcgtctggcaatcttccaacaaatgtggcacctttaatcgtctttgatatttctgaagaaccgaattgtccagaaaaccccagtgctacaagatgtccagtgccaaaaccaagatcaaaaagcaacctcagaccaatacccagagattctcacattaaagagcaaagtcaacagaaaatcagcccagcagccgtaggagaggagtcatccccaggccggccccagtctctgctggacaacgctagcacctcagacagtcaggcagtgatgaacattatgaacacagaacaaagccaaaatagtattgtttccagaattaaagtgtttgagggtcagacaaacatagaaacctcaggactgcccaagaaaccagaaattactccacgttcacttcctccaaagcctactgtttcctcagggaaaccttctgtagctcccaaaccagctgctaacagagcttctggagagtgggactctgggactgagaacagactcaaggtgacctccaaggaaggactcaccccataccctcccctgcaagaagcgggaagcatcccagtaaccaaacctgaattgccaaagaaaccaaaccctggccttatacgaagtgttaatcctgagattccgggaagagggcccctggctgagagctctgatagtgggaagaaagtgccaactcctgccccgcggcctttgctgctgaagaaatctgtttcctcagaaaaccccacctacccttcagctccactgaaacctgtcactgttcctccccgactcgcaggggcatcacaagccaaagcatacaagtcactgggagaagggcccccagccaaccccccagttccagttctgcagagcaagcccttggtggacatcgatctcatcagctttgatgatgatgttttgcccaccccatcggggaacctggctgaagaatctgttggttcagagatggttctagatccctttcagctccctgcaaaaacagaaccaataaaagaacgagcagttcaaccagcacccaccaggaagcccactgtaattcgaattccagccaaaccaggaaaatgtttacatgaggatccacaaagtccacctcctctccctgctgaaaaacctattggaaacactttcagtacagtatctggaaagctcagtaatgttgagagaactagaaacttggaatccaaccacccaggtcaaacaggaggttttgtgcgagtacccccaaggttgccaccgagacctgtgaatggaaaaaccattccaactcaacagcctccaaccaaggtgccccctgagagaccacctcccccaaagctttctgcaaccagaagatctaataagaaactgccttttaatcgatcctcttctgacatggatcttcagaaaaaacaaagtaacttggcaactggactctcaaaagccaagagtcaagtttttaaaaatcaagatccggtgctaccccctcgtcccaaaccaggacaccctctctacagtaaatacatgctgtctgtgcctcatggaattgccaatgaagatattgtctctcaaaaccccggagaactctcttgtaagcgtggggatgtacttgtgatgctgaagcagacggaaaataattacttggagtgccaaaagggagaagacactggcagagttcacctgtctcaaatgaagattatcactccacttgatgaacatcttagaagcagaccaaacgatccaagccacgctcagaagcctgttgacagtggtgctcctcatgctgtcgttcttcatgatttcccagcagagcaagttgatgatttgaacctcacttctggagaaattgtttatcttctggagaagatagatacagattggtacagagggaactgtagaaaccagattggcatatttcctgccaactatgtcaaagtgattattgatatcccagaaggaggaaatgggaaaagagaatgtgtttcatctcattgtgttaaaggctcaagatgtgttgctcggtttgaatatattggagagcagaaggatgagttgagtttctcagagggagaaattattattcttaaagagtatgtgaatgaggaatgggccagaggagaagttcgaggcagaactgggattttccccctgaactttgtggagcctgttgaggattatcccacctctggtgcaaatgttttaagcacaaaggtaccactgaaaaccaaaaaagaagattctggctcaaactctcaggttaacagtcttccggcagaatggtgtgaagctcttcacagttttacagcagagaccagtgatgacttatcattcaagaggggagaccggatccagattctggaacgtctggattctgactggtgcaggggcagactgcaggacagggaggggatcttcccagcagtgtttgtgaggccctgcccagctgaggcaaaaagtatgttggccatagtaccgaaggggaggaaggccaaagccttatatgatttccgaggggagaatgaagatgaactttccttcaaggctggagatataataacagagctggaatctgtagatgatgactggatgagtggagaacttatgggaaaatctggaatatttcccaaaaactacatacagtttctacagatcagctagaggagaagcttgtctgtgttccttggcacaagaactcacttgaactatcaccttgactatcagatatgtttttgcactattttttttaactgaaaaagaaatatctaagctgtacatggtacactagaattttctgaaagcagaaaacgttcagattttgtagttaattttcattacaatagaaacatgcacatggaaacccatgagctaggattctaccgaggaaaacatctagtgggattagcaaggtgaagggaaagcatctggtggcatggcagcatggggaggctcacacacagaagttgcacgtggacatctgttttaatcagcacaagtgaattaaccatgcttcttcatttttttactttagttaaaaaagaggacatttaatattctacatgctgtaactatcaggacatggttagcaatctcaatttcatttttgatattcaaattaattcttacagcttgagcatatcagccttattaccagagcaaatccttccttcagatgggatagtttactgactagttggagcatttgtaagcacatggtgaaatcagcccctgcccaccaaaataatctttatgttaccaagtgattcccatttgtctaaggatttgaagggggtctaaattggatgtatcttacttagtctaaagaaccaaaaccatccctgaaatgccttgctaatacaactaatccttccatatatgtgccatacttatttttttcctcagtgtatactttatgttaacagggttattacaaagcacattttctgaatctgcaatcattcctttgacaattactggacccaaaggaaaattcattttctttgcattattccagtaatatataaaaactgtgtcttgttatagtagtacattatgaatcacatataaaatcttacaatacagaacaactgttaagatggaaaacagtgccaaacctccacagctcatttctttgtaatataatcagaatgaaaaataatttaagaggacagaagactggtacttttttgttttattttttctctagcttatccctgcacaattattagagtgaatgaaaaaccactttcctgctttccattgttataaattctaagcttaagataaaagtggttctttacatgactgaatcaattacaatttatgggctagagccaaataggttgaagacaatcatccaaacagatcaatggaatagaatttcattggaaatgtaaaacactttcccaacaatggtcatgactttcttctgtttttgagaagagtttcatatgctggaccacattttagcttttattgttttttttttcccattgtccaaaaagttaagcaacaagtggccacacttttacgtgactacaacctggagttctgcaaagaaggtaatatttacttggtctttgactaaagttatctccccattctatggttacattttattttggactatggggacttctaatacgttttggtaaagaagagagtataaagaaaattcttgtcaaatttcactcaaaagtaatttcatgagaaatcaatgatttaaagcattatccaaattaaattatcatttgcagcaaactgtacaacagcaggaaggatatggaatggaacatgaggtatatatctttgcctttataattttaacatcttatattgaagattctgaaaacctatctttattagaggaaaatctcaatcttcagttttggccttctgtcagcagaatgataagtgcaatagttgtaaatctacttgacactgtaataaactgaactgaactttcaaa

SEQ ID NO: 18957 - DNA, 4038 bp, Homo sapiens
  source 1..4038: mol_type = unassigned DNA
tcggttaagatggaggaatgccgagtcatatatccttcccccaaaattaaatatttgaagggatatgtcttattttatttctgggatagaatgtttttcattttcatgttactgaagtgtagttttactaaactactaaatcggagactgctaagcaccttccctgtgccaggcacagcactgggtagggtgagggccctgggagtaaatattctgggacaggcacagggggtgtacagggaaagagtctttcctctctgtggcatctgggaggctttaggatgtgggaaagatggtctcctcatctcagttgcccctcattttcaggcagacacgtatgaaatgattacactcccctgaaagatcagcttctacataattcaagatcatcctcaatctctctcatcagagaggaagaaaagccgcatgaattatttacagaacactaagttatttccttttatgagctccaactttgtttttgtctctgcaaactgagattttgtttatccatgaatagtttccccaggggcatgaaaaatatgactcttaaattatgaatgaggttttttgtttcagtccatgttaactaaaacatgcaaaataaactatgtttttcattagatccctttcagctccctgcaaaaacagaaccaataaaagaacgagcagttcaaccagcacccaccaggaagcccactgtaattcgaattccagccaaaccaggaaaatgtttacatgaggatccacaaagtccacctcctctccctgctgaaaaacctattggaaacactttcagtacagtatctggaaagctcagtaatgttgagagaactagaaacttggaatccaaccacccaggtcaaacaggaggttttgtgcgagtacccccaaggttgccaccgagacctgtgaatggaaaaaccattccaactcaacagcctccaaccaaggtgccccctgagagaccacctcccccaaagctttctgcaaccagaagatctaataagaaactgccttttaatcgatcctcttctgacatggatcttcagaaaaaacaaagtaacttggcaactggactctcaaaagccaagagtcaagtttttaaaaatcaagatccggtgctaccccctcgtcccaaaccaggacaccctctctacagtaaatacatgcgtggggatgtacttgtgatgctgaagcagacggaaaataattacttggagtgccaaaagggagaagacactggcagagttcacctgtctcaaatgaagattatcactccacttgatgaacatcttagaagcagaccaaacgatccaagccacgctcagaagcctgttgacagtggtgctcctcatgctgtcgttcttcatgatttcccagcagagcaagttgatgatttgaacctcacttctggagaaattgtttatcttctggagaagatagatacagattggtacagagggaactgtagaaaccagattggcatatttcctgccaactatgtcaaagtgattattgatatcccagaaggaggaaatgggaaaagagaatgtgtttcatctcattgtgttaaaggctcaagatgtgttgctcggtttgaatatattggagagcagaaggatgagttgagtttctcagagggagaaattattattcttaaagagtatgtgaatgaggaatgggccagaggagaagttcgaggcagaactgggattttccccctgaactttgtggagcctgttgaggattatcccacctctggtgcaaatgttttaagcacaaaggtaccactgaaaaccaaaaaagaagattctggctcaaactctcaggttaacagtcttccggcagaatggtgtgaagctcttcacagttttacagcagagaccagtgatgacttatcattcaagaggggagaccggatccagattctggaacgtctggattctgactggtgcaggggcagactgcaggacagggaggggatcttcccagcagtgtttgtgaggccctgcccagctgaggcaaaaagtatgttggccatagtaccgaaggggaggaaggccaaagccttatatgatttccgaggggagaatgaagatgaactttccttcaaggctggagatataataacagagctggaatctgtagatgatgactggatgagtggagaacttatgggaaaatctggaatatttcccaaaaactacatacagtttctacagatcagctagaggagaagcttgtctgtgttccttggcacaagaactcacttgaactatcaccttgactatcagatatgtttttgcactattttttttaactgaaaaagaaatatctaagctgtacatggtacactagaattttctgaaagcagaaaacgttcagattttgtagttaattttcattacaatagaaacatgcacatggaaacccatgagctaggattctaccgaggaaaacatctagtgggattagcaaggtgaagggaaagcatctggtggcatggcagcatggggaggctcacacacagaagttgcacgtggacatctgttttaatcagcacaagtgaattaaccatgcttcttcatttttttactttagttaaaaaagaggacatttaatattctacatgctgtaactatcaggacatggttagcaatctcaatttcatttttgatattcaaattaattcttacagcttgagcatatcagccttattaccagagcaaatccttccttcagatgggatagtttactgactagttggagcatttgtaagcacatggtgaaatcagcccctgcccaccaaaataatctttatgttaccaagtgattcccatttgtctaaggatttgaagggggtctaaattggatgtatcttacttagtctaaagaaccaaaaccatccctgaaatgccttgctaatacaactaatccttccatatatgtgccatacttatttttttcctcagtgtatactttatgttaacagggttattacaaagcacattttctgaatctgcaatcattcctttgacaattactggacccaaaggaaaattcattttctttgcattattccagtaatatataaaaactgtgtcttgttatagtagtacattatgaatcacatataaaatcttacaatacagaacaactgttaagatggaaaacagtgccaaacctccacagctcatttctttgtaatataatcagaatgaaaaataatttaagaggacagaagactggtacttttttgttttattttttctctagcttatccctgcacaattattagagtgaatgaaaaaccactttcctgctttccattgttataaattctaagcttaagataaaagtggttctttacatgactgaatcaattacaatttatgggctagagccaaataggttgaagacaatcatccaaacagatcaatggaatagaatttcattggaaatgtaaaacactttcccaacaatggtcatgactttcttctgtttttgagaagagtttcatatgctggaccacattttagcttttattgttttttttttcccattgtccaaaaagttaagcaacaagtggccacacttttacgtgactacaacctggagttctgcaaagaaggtaatatttacttggtctttgactaaagttatctccccattctatggttacattttattttggactatggggacttctaatacgttttggtaaagaagagagtataaagaaaattcttgtcaaatttcactcaaaagtaatttcatgagaaatcaatgatttaaagcattatccaaattaaattatcatttgcagcaaactgtacaacagcaggaaggatatggaatggaacatgaggtatatatctttgcctttataattttaacatcttatattgaagattctgaaaacctatctttattagaggaaaatctcaatcttcagttttggccttctgtcagcagaatgataagtgcaatagttgtaaatctacttgacactgtaataaactgaactgaactttc

SEQ ID NO: 18958 - DNA, 5107 bp, Homo sapiens
  source 1..5107: mol_type = unassigned DNA
agccatttgcttcctgagtggccacattccagctgtgcagactggtcatagcacatctgccaatcagaacaggccctggagggaagcccttggatactgagtcttgtttacatgcatcgtgactctgtttctcccttcctcttgtgtgttgtaccactaggaagattagtggggaaatttgctattacatgcctaagtaaactatgtaactaggatcacagccacaggaaatgatgttctggacagagttttagctcggctttagccacagatcgcaacgaacgaaataaaccagaacatcgttcttcaagccaaggacccttgtcatccattagagcggtaatcaagagatcttctcggacttctattcagagtgaacttcatcgagatagaaggcgcccagagatcaccattgtggcagctgagccactgaggccagcctcgtggtttccaggaaccccacccccaggactgggatttcctacatcatctgcagcaggctcttggaggcctaatgagctggttcctgctgagctcccaccatcttatgaacaagttataaaagaaatcaaccaagttcaagttaatactacaaataataataatgctgctgctactccaaggcacactattacttctgcaactcagactgacttttcagaagaaatagacaacgatctgcctcaaacactacaggcacctctcaagcctcttcagcctttctcagcagtctcgtctggcaatcttccaacaaatgtggcacctttaatcgtctttgatatttctgaagaaccgaattgtccagaaaaccccagtgctacaagatgtccagtgccaaaaccaagatcaaaaagcaacctcagaccaatacccagagattctcacattaaagagcaaagtcaacagaaaatcagcccagcagccgtaggagaggagtcatccccaggccggccccagtctctgctggacaacgctagcacctcagacagtcaggcagtgatgaacattatgaacacagaacaaagccaaaatagtattgtttccagaattaaagtgtttgagggtcagacaaacatagaaacctcaggactgcccaagaaaccagaaattactccacgttcacttcctccaaagcctactgtttcctcagggaaaccttctgtagctcccaaaccagctgctaacagagcttctggagagtgggactctgggactgagaacagactcaaggtgacctccaaggaaggactcaccccataccctcccctgcaagaagcgggaagcatcccagtaaccaaacctgaattgccaaagaaaccaaaccctggccttatacgaagtgttaatcctgagattccgggaagagggcccctggctgagagctctgatagtgggaagaaagtgccaactcctgccccgcggcctttgctgctgaagaaatctgtttcctcagaaaaccccacctacccttcagctccactgaaacctgtcactgttcctccccgactcgcaggggcatcacaagccaaagcatacaagtcactgggagaagggcccccagccaaccccccagttccagttctgcagagcaagcccttggtggacatcgatctcatcagctttgatgatgatgttttgcccaccccatcggggaacctggctgaagaatctgttggttcagagatggttctagatccctttcagctccctgcaaaaacagaaccaataaaagaacgagcagttcaaccagcacccaccaggaagcccactgtaattcgaattccagccaaaccaggaaaatgtttacatgaggatccacaaagtccacctcctctccctgctgaaaaacctattggaaacactttcagtacagtatctggaaagctcagtaatgttgagagaactagaaacttggaatccaaccacccaggtcaaacaggaggttttgtgcgagtacccccaaggttgccaccgagacctgtgaatggaaaaaccattccaactcaacagcctccaaccaaggtgccccctgagagaccacctcccccaaagctttctgcaaccagaagatctaataagaaactgccttttaatcgatcctcttctgacatggatcttcagaaaaaacaaagtaacttggcaactggactctcaaaagccaagagtcaagtttttaaaaatcaagatccggtgctaccccctcgtcccaaaccaggacaccctctctacagtaaatacatgcgtggggatgtacttgtgatgctgaagcagacggaaaataattacttggagtgccaaaagggagaagacactggcagagttcacctgtctcaaatgaagattatcactccacttgatgaacatcttagaagcagaccaaacgatccaagccacgctcagaagcctgttgacagtggtgctcctcatgctgtcgttcttcatgatttcccagcagagcaagttgatgatttgaacctcacttctggagaaattgtttatcttctggagaagatagatacagattggtacagagggaactgtagaaaccagattggcatatttcctgccaactatgtcaaagtgattattgatatcccagaaggaggaaatgggaaaagagaatgtgtttcatctcattgtgttaaaggctcaagatgtgttgctcggtttgaatatattggagagcagaaggatgagttgagtttctcagagggagaaattattattcttaaagagtatgtgaatgaggaatgggccagaggagaagttcgaggcagaactgggattttccccctgaactttgtggagcctgttgaggattatcccacctctggtgcaaatgttttaagcacaaaggtaccactgaaaaccaaaaaagaagattctggctcaaactctcaggttaacagtcttccggcagaatggtgtgaagctcttcacagttttacagcagagaccagtgatgacttatcattcaagaggggagaccggatccagattctggaacgtctggattctgactggtgcaggggcagactgcaggacagggaggggatcttcccagcagtgtttgtgaggccctgcccagctgaggcaaaaagtatgttggccatagtaccgaaggggaggaaggccaaagccttatatgatttccgaggggagaatgaagatgaactttccttcaaggctggagatataataacagagctggaatctgtagatgatgactggatgagtggagaacttatgggaaaatctggaatatttcccaaaaactacatacagtttctacagatcagctagaggagaagcttgtctgtgttccttggcacaagaactcacttgaactatcaccttgactatcagatatgtttttgcactattttttttaactgaaaaagaaatatctaagctgtacatggtacactagaattttctgaaagcagaaaacgttcagattttgtagttaattttcattacaatagaaacatgcacatggaaacccatgagctaggattctaccgaggaaaacatctagtgggattagcaaggtgaagggaaagcatctggtggcatggcagcatggggaggctcacacacagaagttgcacgtggacatctgttttaatcagcacaagtgaattaaccatgcttcttcatttttttactttagttaaaaaagaggacatttaatattctacatgctgtaactatcaggacatggttagcaatctcaatttcatttttgatattcaaattaattcttacagcttgagcatatcagccttattaccagagcaaatccttccttcagatgggatagtttactgactagttggagcatttgtaagcacatggtgaaatcagcccctgcccaccaaaataatctttatgttaccaagtgattcccatttgtctaaggatttgaagggggtctaaattggatgtatcttacttagtctaaagaaccaaaaccatccctgaaatgccttgctaatacaactaatccttccatatatgtgccatacttatttttttcctcagtgtatactttatgttaacagggttattacaaagcacattttctgaatctgcaatcattcctttgacaattactggacccaaaggaaaattcattttctttgcattattccagtaatatataaaaactgtgtcttgttatagtagtacattatgaatcacatataaaatcttacaatacagaacaactgttaagatggaaaacagtgccaaacctccacagctcatttctttgtaatataatcagaatgaaaaataatttaagaggacagaagactggtacttttttgttttattttttctctagcttatccctgcacaattattagagtgaatgaaaaaccactttcctgctttccattgttataaattctaagcttaagataaaagtggttctttacatgactgaatcaattacaatttatgggctagagccaaataggttgaagacaatcatccaaacagatcaatggaatagaatttcattggaaatgtaaaacactttcccaacaatggtcatgactttcttctgtttttgagaagagtttcatatgctggaccacattttagcttttattgttttttttttcccattgtccaaaaagttaagcaacaagtggccacacttttacgtgactacaacctggagttctgcaaagaaggtaatatttacttggtctttgactaaagttatctccccattctatggttacattttattttggactatggggacttctaatacgttttggtaaagaagagagtataaagaaaattcttgtcaaatttcactcaaaagtaatttcatgagaaatcaatgatttaaagcattatccaaattaaattatcatttgcagcaaactgtacaacagcaggaaggatatggaatggaacatgaggtatatatctttgcctttataattttaacatcttatattgaagattctgaaaacctatctttattagaggaaaatctcaatcttcagttttggccttctgtcagcagaatgataagtgcaatagttgtaaatctacttgacactgtaataaactgaactgaactttc

SEQ ID NO: 18959 - DNA, 5228 bp, Homo sapiens
  source 1..5228: mol_type = unassigned DNA
agagcgggagtgggagtgggaaaggccagggattaagaggccgccgggacgccgcaaggaggcggggaatcggctcggcccgcgccctgccgctgcccggccggctgcaggtggagttcgcggaggtggccatttccacagccgccgccgacgcctcctctccgggagccgccttccccccggcccgagggcggtggcgtggggcgccgggtgcaggcgttctggggcgccggggccgcagctcgctggccatcccgcggctgcgccccgcgcctcgcccatggctgagggccggcggcgggaggacgaggaggaagagctacgcgagcgccgcgaacttggtggccagcgccgcgcccggggccgtgcgctctcgggccactcggccgcagatcgcaacgaacgaaataaaccagaacatcgttcttcaagccaaggacccttgtcatccattagagcggtaatcaagagatcttctcggacttctattcagagtgaacttcatcgagatagaaggcgcccagagatcaccattgtggcagctgagccactgaggccagcctcgtggtttccaggaaccccacccccaggactgggatttcctacatcatctgcagcaggctcttggaggcctaatgagctggttcctgctgagctcccaccatcttatgaacaagttataaaagaaatcaaccaagttcaagttaatactacaaataataataatgctgctgctactccaaggcacactattacttctgcaactcagactgacttttcagaagaaatagacaacgatctgcctcaaacactacaggcacctctcaagcctcttcagcctttctcagcagtctcgtctggcaatcttccaacaaatgtggcacctttaatcgtctttgatatttctgaagaaccgaattgtccagaaaaccccagtgctacaagatgtccagtgccaaaaccaagatcaaaaagcaacctcagaccaatacccagagattctcacattaaagagcaaagtcaacagaaaatcagcccagcagccgtaggagaggagtcatccccaggccggccccagtctctgctggacaacgctagcacctcagacagtcaggcagtgatgaacattatgaacacagaacaaagccaaaatagtattgtttccagaattaaagtgtttgagggtcagacaaacatagaaacctcaggactgcccaagaaaccagaaattactccacgttcacttcctccaaagcctactgtttcctcagggaaaccttctgtagctcccaaaccagctgctaacagagcttctggagagtgggactctgggactgagaacagactcaaggtgacctccaaggaaggactcaccccataccctcccctgcaagaagcgggaagcatcccagtaaccaaacctgaattgccaaagaaaccaaaccctggccttatacgaagtgttaatcctgagattccgggaagagggcccctggctgagagctctgatagtgggaagaaagtgccaactcctgccccgcggcctttgctgctgaagaaatctgtttcctcagaaaaccccacctacccttcagctccactgaaacctgtcactgttcctccccgactcgcaggggcatcacaagccaaagcatacaagtcactgggagaagggcccccagccaaccccccagttccagttctgcagagcaagcccttggtggacatcgatctcatcagctttgatgatgatgttttgcccaccccatcggggaacctggctgaagaatctgttggttcagagatggttctagatccctttcagctccctgcaaaaacagaaccaataaaagaacgagcagttcaaccagcacccaccaggaagcccactgtaattcgaattccagccaaaccaggaaaatgtttacatgaggatccacaaagtccacctcctctccctgctgaaaaacctattggaaacactttcagtacagtatctggaaagctcagtaatgttgagagaactagaaacttggaatccaaccacccaggtcaaacaggaggttttgtgcgagtacccccaaggttgccaccgagacctgtgaatggaaaaaccattccaactcaacagcctccaaccaaggtgccccctgagagaccacctcccccaaagctttctgcaaccagaagatctaataagaaactgccttttaatcgatcctcttctgacatggatcttcagaaaaaacaaagtaacttggcaactggactctcaaaagccaagagtcaagtttttaaaaatcaagatccggtgctaccccctcgtcccaaaccaggacaccctctctacagtaaatacatgcgtggggatgtacttgtgatgctgaagcagacggaaaataattacttggagtgccaaaagggagaagacactggcagagttcacctgtctcaaatgaagattatcactccacttgatgaacatcttagaagcagaccaaacgatccaagccacgctcagaagcctgttgacagtggtgctcctcatgctgtcgttcttcatgatttcccagcagagcaagttgatgatttgaacctcacttctggagaaattgtttatcttctggagaagatagatacagattggtacagagggaactgtagaaaccagattggcatatttcctgccaactatgtcaaagtgattattgatatcccagaaggaggaaatgggaaaagagaatgtgtttcatctcattgtgttaaaggctcaagatgtgttgctcggtttgaatatattggagagcagaaggatgagttgagtttctcagagggagaaattattattcttaaagagtatgtgaatgaggaatgggccagaggagaagttcgaggcagaactgggattttccccctgaactttgtggagcctgttgaggattatcccacctctggtgcaaatgttttaagcacaaaggtaccactgaaaaccaaaaaagaagattctggctcaaactctcaggttaacagtcttccggcagaatggtgtgaagctcttcacagttttacagcagagaccagtgatgacttatcattcaagaggggagaccggatccagattctggaacgtctggattctgactggtgcaggggcagactgcaggacagggaggggatcttcccagcagtgtttgtgaggccctgcccagctgaggcaaaaagtatgttggccatagtaccgaaggggaggaaggccaaagccttatatgatttccgaggggagaatgaagatgaactttccttcaaggctggagatataataacagagctggaatctgtagatgatgactggatgagtggagaacttatgggaaaatctggaatatttcccaaaaactacatacagtttctacagatcagctagaggagaagcttgtctgtgttccttggcacaagaactcacttgaactatcaccttgactatcagatatgtttttgcactattttttttaactgaaaaagaaatatctaagctgtacatggtacactagaattttctgaaagcagaaaacgttcagattttgtagttaattttcattacaatagaaacatgcacatggaaacccatgagctaggattctaccgaggaaaacatctagtgggattagcaaggtgaagggaaagcatctggtggcatggcagcatggggaggctcacacacagaagttgcacgtggacatctgttttaatcagcacaagtgaattaaccatgcttcttcatttttttactttagttaaaaaagaggacatttaatattctacatgctgtaactatcaggacatggttagcaatctcaatttcatttttgatattcaaattaattcttacagcttgagcatatcagccttattaccagagcaaatccttccttcagatgggatagtttactgactagttggagcatttgtaagcacatggtgaaatcagcccctgcccaccaaaataatctttatgttaccaagtgattcccatttgtctaaggatttgaagggggtctaaattggatgtatcttacttagtctaaagaaccaaaaccatccctgaaatgccttgctaatacaactaatccttccatatatgtgccatacttatttttttcctcagtgtatactttatgttaacagggttattacaaagcacattttctgaatctgcaatcattcctttgacaattactggacccaaaggaaaattcattttctttgcattattccagtaatatataaaaactgtgtcttgttatagtagtacattatgaatcacatataaaatcttacaatacagaacaactgttaagatggaaaacagtgccaaacctccacagctcatttctttgtaatataatcagaatgaaaaataatttaagaggacagaagactggtacttttttgttttattttttctctagcttatccctgcacaattattagagtgaatgaaaaaccactttcctgctttccattgttataaattctaagcttaagataaaagtggttctttacatgactgaatcaattacaatttatgggctagagccaaataggttgaagacaatcatccaaacagatcaatggaatagaatttcattggaaatgtaaaacactttcccaacaatggtcatgactttcttctgtttttgagaagagtttcatatgctggaccacattttagcttttattgttttttttttcccattgtccaaaaagttaagcaacaagtggccacacttttacgtgactacaacctggagttctgcaaagaaggtaatatttacttggtctttgactaaagttatctccccattctatggttacattttattttggactatggggacttctaatacgttttggtaaagaagagagtataaagaaaattcttgtcaaatttcactcaaaagtaatttcatgagaaatcaatgatttaaagcattatccaaattaaattatcatttgcagcaaactgtacaacagcaggaaggatatggaatggaacatgaggtatatatctttgcctttataattttaacatcttatattgaagattctgaaaacctatctttattagaggaaaatctcaatcttcagttttggccttctgtcagcagaatgataagtgcaatagttgtaaatctacttgacactgtaataaactgaactgaactttc

SEQ ID NO: 18960 - DNA, 2656 bp, Homo sapiens
  source 1..2656: mol_type = unassigned DNA
cccagtgctacaagatgtccagtgccaaaaccaagatcaaaaagcaacctcagaccaatacccagagattctcacattaaagagcaaagtcaacagaaaatcagcccagcagccgtaggagaggagtcatccccaggccggccccagtctctgctggacaacgctagcacctcagacagtcaggcagtgatgaacattatgaacacagaacaaagccaaaatagtattgtttccagaattaaagtgtttgagggtcagacaaacatagaaacctcaggactgcccaagaaaccagaaattactccacgttcacttcctccaaagcctactgtttcctcagggaaaccttctgtagctcccaaaccagctgctaacagagcttctggagagtgggactctgggactgagaacagactcaaggtgacctccaaggaaggactcaccccataccctcccctgcaagaagcgggaagcatcccagtaaccaaacctgaattgccaaagaaaccaaaccctggccttatacgaagtgttaatcctgagattccgggaagagggcccctggctgagagctctgatagtgggaagaaagtgccaactcctgccccgcggcctttgctgctgaagaaatctgtttcctcagaaaaccccacctacccttcagctccactgaaacctgtcactgttcctccccgactcgcaggggcatcacaagccaaagcatacaagtcactgggagaagggcccccagccaaccccccagttccagttctgcagagcaagcccttggtggacatcgatctcatcagctttgatgatgatgttttgcccaccccatcggggaacctggctgaagaatctgttggttcagagatggttctaggtttacatgaggatccacaaagtccacctcctctccctgctgaaaaacctattggaaacactttcagtacagtatctggaaagctcagtaatgttgagagaactagaaacttggaatccaaccacccaggtcaaacaggaggttttgtgcgagtacccccaaggttgccaccgagacctgtgaatggaaaaaccattccaactcaacagcctccaaccaaggtgccccctgagagaccacctcccccaaagctttctgcaaccagaagatctaataagaaactgccttttaatcgatcctcttctgacatggatcttcagaaaaaacaaagtaacttggcaactggactctcaaaagccaagagtcaagtttttaaaaatcaagatccggtgctaccccctcgtcccaaaccaggacaccctctctacagtaaatacatgcgtggggatgtacttgtgatgctgaagcagacggaaaataattacttggagtgccaaaagggagaagacactggcagagttcacctgtctcaaatgaagattatcactccacttgatgaacatcttagaagcagaccaaacgatccaagccacgctcagaagcctgttgacagtggtgctcctcatgctgtcgttcttcatgatttcccagcagagcaagttgatgatttgaacctcacttctggagaaattgtttatcttctggagaagatagatacagattggtacagagggaactgtagaaaccagattggcatatttcctgccaactatgtcaaagtgattattgatatcccagaaggaggaaatgggaaaagagaatgtgtttcatctcattgtgttaaaggctcaagatgtgttgctcggtttgaatatattggagagcagaaggatgagttgagtttctcagagggagaaattattattcttaaagagtatgtgaatgaggaatgggccagaggagaagttcgaggcagaactgggattttccccctgaactttgtggagcctgttgaggattatcccacctctggtgcaaatgttttaagcacaaaggtaccactgaaaaccaaaaaagaagattctggctcaaactctcaggttaacagtcttccggcagaatggtgtgaagctcttcacagttttacagcagagaccagtgatgacttatcattcaagaggggagaccggatccagattctggaacgtctggattctgactggtgcaggggcagactgcaggacagggaggggatcttcccagcagtgtttgtgaggccctgcccagctgaggcaaaaagtatgttggccatagtaccgaaggggaggaaggccaaagccttatatgatttccgaggggagaatgaagatgaactttccttcaaggctggagatataataacagagctggaatctgtagatgatgactggatgagtggagaacttatgggaaaatctggaatatttcccaaaaactacatacagtttctacagatcagctagaggagaagcttgtctgtgttccttggcacaagaactcacttgaactatcaccttgactatcagatatgtttttgcactattttttttaactgaaaaagaaatatctaagctgtacatggtacactagaattttctgaaagcagaaaacgttcagattttgtagttaattttcattacaatagaaacatgcacatggaaacccatgagctaggattctaccgaggaaaacatctagtgggattagcaaggtgaagggaaagcatctggtggc

SEQ ID NO: 18961 - DNA, 698 bp, Homo sapiens
  source 1..698: mol_type = unassigned DNA
tttagctgctggagaaggtgcactttaggcacacacatgccaaattcctaaatgatcagcaacttaagaggaggttatttgattgtgaataagccttttattggtttacgtttaagctgtctgtgcctcatggaattgccaatgaagatattgtctctcaaaaccccggagaactctcttgtaaggtaaagtagagctctttccttactggttaatgtaaaaaaaaaattactggcctctgttactaccattacacattattaaatgctttaggctccaaagattaaaatgtgaaaaagtaataatgttttattaaataataattgcttcagagagtggtattgtaccttgcagcgtggggatgtacttgtgatgctgaagcagacggaaaataattacttggagtgccaaaagggagaagacactggcagagttcacctgtctcaaatgaagattatcactccacttgatgaacatcttagaagcagaccaaacgatccaagccacgctcagaagcctgttgacagtggtgctcctcatgctgtcgttcttcatgatttcccagcagagcaagttgatgatttgaacctcacttctggagaaattgtttatcttctggagaagatagatacagattggtacagagggaactgtagaaaccagattggcatatttcctgccaactatgtcaaagtgat

SEQ ID NO: 18962 - DNA, 882 bp, Homo sapiens
  source 1..882: mol_type = unassigned DNA
aaacatagaaacctcaggactgcccaagaaaccagaaattactccacgttcacttcctccaaagcctactgtttcctcagggaaaccttctgtagctcccaaaccagctgctaacagagcttctggagagtgggactctgggactgagaacagactcaaggtgacctccaaggaaggactcaccccataccctcccctgcaagaagcgggaagcatcccagtaaccaaacctgaattgccaaagaaaccaaaccctggccttatacgaagtgttaatcctgagattccgggaagagggcccctggctgagagctctgatagtgggaagaaagtgccaactcctgccccgcggcctttgctgctgaagaaatctgtttcctcagaaaaccccacctacccttcagctccactgaaacctgtcactgttcctccccgactcgcaggggcatcacaagccaaagcatacaagtcactgggagaagggcccccagccaaccccccagttccagttctgcagagcaagcccttggtggacatcgatctcatcagctttgatgatgatgttttgcccaccccatcggggaacctggctgaagaatctgttggttcagagatggttctagaccatgtggaggcattacctttaacaagagagttaatcaataatctttttaaaagagctgaacataagcataattaggctgaaagaaactgggagaattatctcttgtcgtctttgccacttctgaagaactgcttcccccaatgaccctcagattctgataagtaaaaatttttaaaataataaaatagtgatttatctaaatggttatattattcaaggttacaaatagaagctacttgttatgaactaaatatgcc

SEQ ID NO: 18963 - DNA, 555 bp, Homo sapiens
  source 1..555: mol_type = unassigned DNA
gattccatgctgactatcctccgtcttaatcctggttttcttcaaccagtgcataatactgttgattagatttaaactttcatcggtacgatctcattcctagtacgttgccttaagattatacccaagtctccaagattaccttcttcctaaaacatgagatcgcaacgaacgaaataaaccagaacatcgttcttcaagccaaggacccttgtcatccattagagcggtaatcaagagatcttctcggacttctattcagagtgaacttcatcgagatagaaggcgcccagagatcaccattgtggcagctgagccactgaggccagcctcgtggtttccaggaaccccacccccaggactgggatttcctacatcatctgcagcaggctcttggaggcctaatgagctggttcctgctgagctcccaccatcttatgaacaagttataaaagaaatcaaccaagttcaagttaatactacaaataataataatgctgctgctactccaaggcacactattacttctgcaactcagactgacttttcagaaga

SEQ ID NO: 18964 - DNA, 659 bp, Homo sapiens
  source 1..659: mol_type = unassigned DNA
atgatttttttgagctgagtaatctgtggctttgcagtttccttgctttctttccttagctaaatctcttctagtgttagcaaagtatttagcacaggaaagatcttataaaatgaaataatgcatgtaatgatgcattttccaagtagatgattttaacaaaccgtaagcttttatgcctgtccttcattgtgtcttttctgcctctgtcaggcgaactgtgatgaagagccttatacttaggaagacacaactacctttgaacagtcctttgtgaaatctaatgatcgcaacgaacgaaataaaccagaacatcgttcttcaagccaaggacccttgtcatccattagagcggtaatcaagagatcactcatgaatagtacacagcaaaaatgccccgtggaagagcttctcggacttctattcagagtgaacttcatcgagatagaaggcgcccagagatcaccattgtggcagctgagccactgaggccagcctcgtggtttccaggaaccccacccccaggactgggatttcctacatcatctgcagcaggctcttggaggcctaatgagctggttcctgctgagctcccaccatcttatgaacaagttataaaagaaatcaaccaagttcaagttaatactacaaataataat

SEQ ID NO: 18965 - DNA, 557 bp, Homo sapiens
  source 1..557: mol_type = unassigned DNA
gcatcgtgactctgtttctcccttcctcttgtgtgttgtaccactaggaagattagtggggaaatttgctattacatgcctaagtaaactatgtaactaggatcacagccacaggaaatgatgttctggacagagttttagctcggctttagccacaggcgaactgtgatgaagagccttatacttaggaagacacaactacctttgaacagtcctttgtgaaatctaatgatcgcaacgaacgaaataaaccagaacatcgttcttcaagccaaggacccttgtcatccattagagcggtaatcaagagatcttctcggacttctattcagagtgaacttcatcgagatagaaggcgcccagagatcaccattgtggcagctgagccactgaggccagcctcgtggtttccaggaaccccacccccaggactgggatttcctacatcatctgcagcaggctcttggaggcctaatgagctggttcctgctgagctcccaccatcttatgaacaagttataaaagaaatcaaccaagttcaagttaatactacaaat

SEQ ID NO: 18966 - DNA, 5273 bp, Homo sapiens
  source 1..5273: mol_type = unassigned DNA
tcatttttccccctccccattctgttagaagcttctgccaaccatgattcatggaatgatttttttgagctgagtaatctgtggctttgcagtttccttgctttctttccttagctaaatctcttctagtgttagcaaagtatttagcacaggaaagatcttataaaatgaaataatgcatgtaatgatgcattttccaagtagatgattttaacaaaccgtaagcttttatgcctgtccttcattgtgtcttttctgcctctgtcaggcgaactgtgatgaagagccttatacttaggaagacacaactacctttgaacagtcctttgtgaaatctaatgatcgcaacgaacgaaataaaccagaacatcgttcttcaagccaaggacccttgtcatccattagagcggtaatcaagagatcttctcggacttctattcagagtgaacttcatcgagatagaaggcgcccagagatcaccattgtggcagctgagccactgaggccagcctcgtggtttccaggaaccccacccccaggactgggatttcctacatcatctgcagcaggctcttggaggcctaatgagctggttcctgctgagctcccaccatcttatgaacaagttataaaagaaatcaaccaagttcaagttaatactacaaataataataatgctgctgctactccaaggcacactattacttctgcaactcagactgacttttcagaagaaatagacaacgatctgcctcaaagttttgttttggtctcgtcagcactacaggcacctctcaagcctcttcagcctttctcagcagtctcgtctggcaatcttccaacaaatgtggcacctttaatcgtctttgatatttctgaagaaccgaattgtccagaaaaccccagtgctacaagatgtccagtgccaaaaccaagatcaaaaagcaacctcagaccaatacccagagattctcacattaaagagcaaagtcaacagaaaatcagcccagcagccgtaggagaggagtcatccccaggccggccccagtctctgctggacaacgctagcacctcagacagtcaggcagtgatgaacattatgaacacagaacaaagccaaaatagtattgtttccagaattaaagtgtttgagggtcagacaaacatagaaacctcaggactgcccaagaaaccagaaattactccacgttcacttcctccaaagcctactgtttcctcagggaaaccttctgtagctcccaaaccagctgctaacagagcttctggagagtgggactctgggactgagaacagactcaaggtgacctccaaggaaggactcaccccataccctcccctgcaagaagcgggaagcatcccagtaaccaaacctgaattgccaaagaaaccaaaccctggccttatacgaagtgttaatcctgagattccgggaagagggcccctggctgagagctctgatagtgggaagaaagtgccaactcctgccccgcggcctttgctgctgaagaaatctgtttcctcagaaaaccccacctacccttcagctccactgaaacctgtcactgttcctccccgactcgcaggggcatcacaagccaaagcatacaagtcactgggagaagggcccccagccaaccccccagttccagttctgcagagcaagcccttggtggacatcgatctcatcagctttgatgatgatgttttgcccaccccatcggggaacctggctgaagaatctgttggttcagagatggttctagatccctttcagctccctgcaaaaacagaaccaataaaagaacgagcagttcaaccagcacccaccaggaagcccactgtaattcgaattccagccaaaccaggaaaatgtttacatgaggatccacaaagtccacctcctctccctgctgaaaaacctattggaaacactttcagtacagtatctggaaagctcagtaatgttgagagaactagaaacttggaatccaaccacccaggtcaaacaggaggttttgtgcgagtacccccaaggttgccaccgagacctgtgaatggaaaaaccattccaactcaacagcctccaaccaaggtgccccctgagagaccacctcccccaaagctttctgcaaccagaagatctaataagaaactgccttttaatcgatcctcttctgacatggatcttcagaaaaaacaaagtaacttggcaactggactctcaaaagccaagagtcaagtttttaaaaatcaagatccggtgctaccccctcgtcccaaaccaggacaccctctctacagtaaatacatgctgtctgtgcctcatggaattgccaatgaagatattgtctctcaaaaccccggagaactctcttgtaagcgtggggatgtacttgtgatgctgaagcagacggaaaataattacttggagtgccaaaagggagaagacactggcagagttcacctgtctcaaatgaagattatcactccacttgatgaacatcttagaagcagaccaaacgatccaagccacgctcagaagcctgttgacagtggtgctcctcatgctgtcgttcttcatgatttcccagcagagcaagttgatgatttgaacctcacttctggagaaattgtttatcttctggagaagatagatacagattggtacagagggaactgtagaaaccagattggcatatttcctgccaactatgtcaaagtgattattgatatcccagaaggaggaaatgggaaaagagaatgtgtttcatctcattgtgttaaaggctcaagatgtgttgctcggtttgaatatattggagagcagaaggatgagttgagtttctcagagggagaaattattattcttaaagagtatgtgaatgaggaatgggccagaggagaagttcgaggcagaactgggattttccccctgaactttgtggagcctgttgaggattatcccacctctggtgcaaatgttttaagcacaaaggtaccactgaaaaccaaaaaagaagattctggctcaaactctcaggttaacagtcttccggcagaatggtgtgaagctcttcacagttttacagcagagaccagtgatgacttatcattcaagaggggagaccggatccagattctggaacgtctggattctgactggtgcaggggcagactgcaggacagggaggggatcttcccagcagtgtttgtgaggccctgcccagctgaggcaaaaagtatgttggccatagtaccgaaggggaggaaggccaaagccttatatgatttccgaggggagaatgaagatgaactttccttcaaggctggagatataataacagagctggaatctgtagatgatgactggatgagtggagaacttatgggaaaatctggaatatttcccaaaaactacatacagtttctacagatcagctagaggagaagcttgtctgtgttccttggcacaagaactcacttgaactatcaccttgactatcagatatgtttttgcactattttttttaactgaaaaagaaatatctaagctgtacatggtacactagaattttctgaaagcagaaaacgttcagattttgtagttaattttcattacaatagaaacatgcacatggaaacccatgagctaggattctaccgaggaaaacatctagtgggattagcaaggtgaagggaaagcatctggtggcatggcagcatggggaggctcacacacagaagttgcacgtggacatctgttttaatcagcacaagtgaattaaccatgcttcttcatttttttactttagttaaaaaagaggacatttaatattctacatgctgtaactatcaggacatggttagcaatctcaatttcatttttgatattcaaattaattcttacagcttgagcatatcagccttattaccagagcaaatccttccttcagatgggatagtttactgactagttggagcatttgtaagcacatggtgaaatcagcccctgcccaccaaaataatctttatgttaccaagtgattcccatttgtctaaggatttgaagggggtctaaattggatgtatcttacttagtctaaagaaccaaaaccatccctgaaatgccttgctaatacaactaatccttccatatatgtgccatacttatttttttcctcagtgtatactttatgttaacagggttattacaaagcacattttctgaatctgcaatcattcctttgacaattactggacccaaaggaaaattcattttctttgcattattccagtaatatataaaaactgtgtcttgttatagtagtacattatgaatcacatataaaatcttacaatacagaacaactgttaagatggaaaacagtgccaaacctccacagctcatttctttgtaatataatcagaatgaaaaataatttaagaggacagaagactggtacttttttgttttattttttctctagcttatccctgcacaattattagagtgaatgaaaaaccactttcctgctttccattgttataaattctaagcttaagataaaagtggttctttacatgactgaatcaattacaatttatgggctagagccaaataggttgaagacaatcatccaaacagatcaatggaatagaatttcattggaaatgtaaaacactttcccaacaatggtcatgactttcttctgtttttgagaagagtttcatatgctggaccacattttagcttttattgttttttttttcccattgtccaaaaagttaagcaacaagtggccacacttttacgtgactacaacctggagttctgcaaagaaggtaatatttacttggtctttgactaaagttatctccccattctatggttacattttattttggactatggggacttctaatacgttttggtaaagaagagagtataaagaaaattcttgtcaaatttcactcaaaagtaatttcatgagaaatcaatgatttaaagcattatccaaattaaattatcatttgcagcaaactgtacaacagcaggaaggatatggaatggaacatgaggtatatatctttgcctttataattttaacatcttatattgaagattctgaaaacctatctttattagaggaaaatctcaatcttcagttttggccttctgtcagcagaatgataagtgcaatagttgtaaatctacttgacactgtaataaactgaactgaactttcaaagtc

SEQ ID NO: 18967 - DNA, 1170 bp, Homo sapiens
  source 1..1170: mol_type = unassigned DNA
gcggctcaagtagcccaggtctccacgcaacaatgaagcgtgggcggccccagcagcttcatttgcatatcgccgcggcttggccaatgggctgcgcaggggctttggaacgcagtgttgccatcggcgtgcgcgcgtgtgtgcgagtgtgacagcggctgtggctgtggccgtggccgtgggaggcgggcccggcggagcccagccgcggggggaccggcccgggctcccgctccccgagcgcgtcgcggccgcgtggcccagccgagccttgagaccaccccgcccctgccggtcgcagtcgcgatgtcggtggccgggctgaagaagcagttccacaaagccagccagctatttagtgaaaaaataagtggtgctgaaggaactaaactagacgatgaatttcttgacatggaaaggaaaatagatgttaccaataaagttgttgcagaaattctttcaaaaaccactgaatatcttcagccaaatccaggtaaagttgaaatattctcttgttcatttgctgtcacagactctaataacccatgtttacttggtgtttagttgacataatgtagaaacaatgtcgtctgtgtcccaataatgaaattcagtttttaaagctgagtctccagtgaccaaaggtagttgcattcggtcctactgatgagaaagagaacagctatttttgtgaatttcagttgacatcatccgaatggagtgctggtcatagcaacaagagagcactgagcaaaggttttatgagttgcttcagaaagccactaaacatttggcaaatattttcttccttatttcctctttataatttttttaaaaattctgcccttgtgtactatatacataaaggtatatgttaatttgaaaaagctttctctttgtggcttaaatgctggagaaacaagatgtggtgaatacgaaaggctgcttaaatccagtgtcacatcagcttctccactgaaggtctgggtttctaggtccccaagcagcatctattgatgagattttcccaggttgtaaattataggaaccaatagagggcgcccaagctttgagttctgtggatttctaaagccacctttcctttttaggaatttattatctgcgtagagttcctgtgattcccttgactgtaggaatcagcacaaacct

SEQ ID NO: 18968 - DNA, 1806 bp, Homo sapiens
  source 1..1806: mol_type = unassigned DNA
gcggctcaagtagcccaggtctccacgcaacaatgaagcgtgggcggccccagcagcttcatttgcatatcgccgcggcttggccaatgggctgcgcaggggctttggaacgcagtgttgccatcggcgtgcgcgcgtgtgtgcgagtgtgacagcggctgtggctgtggccgtggccgtgggaggcgggcccggcggagcccagccgcggggggaccggcccgggctcccgctccccgagcgcgtcgcggccgcgtggcccagccgagccttgagaccaccccgcccctgccggtcgcagtcgcgatgtcggtggccgggctgaagaagcagttccacaaagccagccagctatttagtgaaaaaataagtggtgctgaaggaactaaactagacgatgaatttcttgacatggaaaggaaaatagatgttaccaataaagttgttgcagaaattctttcaaaaaccactgaatatcttcagccaaatccagcatacagagctaagctaggaatgctgaacactgtgtcgaagatccgagggcaggtgaagaccacaggatacccgcagacggaaggcttgctgggggactgtatgctgaaatacgggaaggagctcggggaagactccacctttggcaatgcattgatagaagttggtgaatccatgaagctaatggctgaggtgaaagactctcttgatattaatgtaaagcaaacttttattgatccacttcagttactacaagataaagatttaaaagagatcgggcatcacctgaaaaagctggaaggccgccgcctggattacgattataaaaagaaacgagtaggtaagataccagacgaagaagtcagacaagcggtagaaaaatttgaagagtcaaaggagttggctgaaagaagcatgtttaactttttagaaaatgatgtagaacaagtcagccagttggctgtgttcatagaggcagcattagactatcacagacagtccacagagattctgcaggagctgcagagcaagctacagatgcgaatatcagctgcatccagtgtccccagacgagaatacaagccaaggcctgtgaaaaggagttctagtgagctcaatggagtttccaccacctctgtagtgaagacgacaggttctaacattcccatggaccagccctgctgtcgtggtctctatgactttgagccagaaaaccaaggagaattaggatttaaagaaggggacatcattacattaaccaatcaaatagatgaaaactggtatgaaggaatgatacacggagaatcgggattcttccccattaattacgtggaagtgatcgtgcctttacctcagtaaatgtgtaacacaaactctggacatactttcgtaactgaaatgaattcacaccagtgtgctctcagtgcggtgttctgtgacatcctttgctctctgaccaacttaatgacttttgtatgtgtgctctctttataatgtattttatatcactttaatttgtataaatgattttcttgtccttgctacatgaaaatattttcttttttgcttcctgtcctaaaagtcattggttaaatgtatttgcttcctgtggctaaaaataagtctcacccattgcagttatgtcaacgaatggcctatattcctcagctgcaatgaaatggtaacatttgaaactaagaaatgctaaatattttgtttctcgacattcctgatgacgtctggtcttttcttttcattgtattttaagcttacctgtgaatagcccaataaacatgacacactgtgttggcaaaa

SEQ ID NO: 18969 - DNA, 1647 bp, Homo sapiens
  source 1..1647: mol_type = unassigned DNA
gtgacagcggctgtggctgtggccgtggccgtgggaggcgggcccggcggagcccagccgcggggggaccggcccgggctcccgctccccgagcgcgtcgcggccgcgtggcccagccgagccttgagaccaccccgcccctgccggtcgcagtcgcgatgtcggtggccgggctgaagaagcagttccacaaagccagccagctatttagtgaaaaaataagtggtgctgaaggaactaaactagacgatgaatttcttgacatggaaaggaaaatagatgttaccaataaagttgttgcagaaattctttcaaaaaccactgaatatcttcagccaaatccagagctaagctaggaatgctgaacactgtgtcgaagatccgagggcaggtgaagaccacaggatacccgcagacggaaggcttgctgggggactgtatgctgaaatacgggaaggagctcggggaagactccacctttggcaatgcattgatagaagttggtgaatccatgaagctaatggctgaggtgaaagactctcttgatattaatgtaaagcaaacttttattgatccacttcagttactacaagataaagatttaaaagagatcgggcatcacctgaaaaagctggaaggccgccgcctggattacgattataaaaagaaacgagtaggtaagataccagacgaagaagtcagacaagcggtagaaaaatttgaagagtcaaaggagttggctgaaagaagcatgtttaactttttagaaaatgatgtagaacaagtcagccagttggctgtgttcatagaggcagcattagactatcacagacagtccacagagattctgcaggagctgcagagcaagctacagatgcgaatatcagctgcatccagtgtccccagacgagaatacaagccaaggcctgtgaaaaggagttctagtgagctcaatggagtttccaccacctctgtagtgaagacgacaggttctaacattcccatggaccagccctgctgtcgtggtctctatgactttgagccagaaaaccaaggagaattaggatttaaagaaggggacatcattacattaaccaatcaaatagatgaaaactggtatgaaggaatgatacacggagaatcgggattcttccccattaattacgtggaagtgatcgtgcctttacctcagtaaatgtgtaacacaaactctggacatactttcgtaactgaaatgaattcacaccagtgtgctctcagtgcggtgttctgtgacatcctttgctctctgaccaacttaatgacttttgtatgtgtgctctctttataatgtattttatatcactttaatttgtataaatgattttcttgtccttgctacatgaaaatattttcttttttgcttcctgtcctaaaagtcattggttaaatgtatttgcttcctgtggctaaaaataagtctcacccattgcagttatgtcaacgaatggcctatattcctcagctgcaatgaaatggtaacatttgaaactaagaaatgctaaatattttgtttctcgacattcctgatgacgtctggtcttttcttttcattgtattttaagcttacctgtgaatagcccaataaacatgacacactgtgttggc

SEQ ID NO: 18970 - DNA, 2012 bp, Homo sapiens
  source 1..2012: mol_type = unassigned DNA
gcgatgtcggtggccgggctgaagaagcagttccacaaagccagccagtagagatgggtttcaccatgttggccaatatggtctcgatctcctgacctcgtgatccgcctgcctcggcctcccagagtgctgggattacaggtgtgagccactgtgcccagcctcttctctcactatccgtttctgacaaatgaaaaaaatggatgtgggtcctgcagaacctgaggccagctctaaccagtctttcatggatgcatacacctgcctgcaggcgctgctcccaggttatgaggctggttcttgggtttgactctgggaatcatgctcattgatctgcttttcctaatcatgtcagtgaatacctacacgtgaagaaaactcaagctgcaccataaagctaaaggaagaaggagcttttaagtgaataagaccattttcccaatgagcagtgtcataaacattgaggactctcttaaatcagaagatgaatgaatggatggaatctttgctgggataatatgcaatcaagctaataggtgccttacctggacctcccaacagctatttagtgaaaaaataagtggtgctgaaggaactaaactagacgatgaatttcttgacatggaaaggaaaatagatgttaccaataaagttgttgcagaaattctttcaaaaaccactgaatatcttcagccaaatccagcatacagagctaagctaggaatgctgaacactgtgtcgaagatccgagggcaggtgaagaccacaggatacccgcagacggaaggcttgctgggggactgtatgctgaaatacgggaaggagctcggggaagactccacctttggcaatgcattgatagaagttggtgaatccatgaagctaatggctgaggtgaaagactctcttgatattaatgtaaagcaaacttttattgatccacttcagttactacaagataaagatttaaaagagatcgggcatcacctgaaaaagctggaaggccgccgcctggattacgattataaaaagaaacgagtaggtaagataccagacgaagaagtcagacaagcggtagaaaaatttgaagagtcaaaggagttggctgaaagaagcatgtttaactttttagaaaatgatgtagaacaagtcagccagttggctgtgttcatagaggcagcattagactatcacagacagtccacagagattctgcaggagctgcagagcaagctacagatgcgaatatcagctgcatccagtgtccccagacgagaatacaagccaaggcctgtgaaaaggagttctagtgagctcaatggagtttccaccacctctgtagtgaagacgacaggttctaacattcccatggaccagccctgctgtcgtggtctctatgactttgagccagaaaaccaaggagaattaggatttaaagaaggggacatcattacattaaccaatcaaatagatgaaaactggtatgaaggaatgatacacggagaatcgggattcttccccattaattacgtggaagtgatcgtgcctttacctcagtaaatgtgtaacacaaactctggacatactttcgtaactgaaatgaattcacaccagtgtgctctcagtgcggtgttctgtgacatcctttgctctctgaccaacttaatgacttttgtatgtgtgctctctttataatgtattttatatcactttaatttgtataaatgattttcttgtccttgctacatgaaaatattttcttttttgcttcctgtcctaaaagtcattggttaaatgtatttgcttcctgtggctaaaaataagtctcacccattgcagttatgtcaacgaatggcctatattcctcagctgcaatgaaatggtaacatttgaaactaagaaatgctaaatattttgtttctcgacattcctgatgacgtctggtcttttcttttcattgtattttaagcttacctgtgaatagcccaataaacatgacacactgtgttggc

SEQ ID NO: 18971 - DNA, 758 bp, Homo sapiens
  source 1..758: mol_type = unassigned DNA
cctacagcagactggaaccagcagattaggaaggcccaagggactgcttcgggaaggccattgacagcaggaaaaagtgacaggtcgcagccagactacaagggaggcaagagaaaaactataaaaagcaggaacaaaaacactcaaaagacacagcagtctgggggatttactaaaagacaaagagccctactcaggttctaacattcccatggaccagccctgctgtcgtggtctctatgactttgagccagaaaaccaaggagaattaggatttaaagaaggggacatcattacattaaccaatcaaatagatgaaaactggtatgaaggaatgatacacggagaatcgggattcttccccattaattacgtggaagtgatcgtgcctttacctcagtaaatgtgtaacacaaactctggacatactttcgtaactgaaatgaattcacaccagtgtgctctcagtgcggtgttctgtgacatcctttgctctctgaccaacttaatgacttttgtatgtgtgctctctttataatgtattttatatcactttaatttgtataaatgattttcttgtccttgctacatgaaaatattttcttttttgcttcctgtcctaaaagtcattggttaaatgtatttgcttcctgtggctaaaaataagtctcacccattgcagttatgtcaacgaatggcctatattcctcagctgcaatgaaatggtaacatttgaaactaagaaatgctaaatattt

SEQ ID NO: 18972 - DNA, 458 bp, Homo sapiens
  source 1..458: mol_type = unassigned DNA
acaaaaacactcaaaagacacagcagtctgggggatttactaaaagacaaagagccctactcaggtctcaggagtaagagaaaatcaacacaaggccacttggggagggcagtgctggctgaagccgtctcactggacagcccagggtcaggggtttcagccgcctgttcaaggacaccgagatccacagcagccacctgggagctcctacacaactatgcccagcgattccaggttctaacattcccatggaccagccctgctgtcgtggtctctatgactttgagccagaaaaccaaggagaattaggatttaaagaaggggacatcattacattaaccaatcaaatagatgaaaactggtatgaaggaatgatacacggagaatcgggattcttccccattaattacgtggaagtgatcgtgcctttacctcagtaaatgtgtaacacaaactct

SEQ ID NO: 18973 - DNA, 5272 bp, Homo sapiens
  source 1..5272: mol_type = unassigned DNA
cgccccgggcgccggctgcgtcccggcctcctcctcctcttcctccgccctccttggctgggaaagtgggaggcggcggcggcggcgtggtgtgtgtgcgcgcgtgaggggggcagcagagaggagtctcccggtgccgccgcggcgtcagagacactgcgagcggcgagcgcggtggggccgcatctgcatcagccgccgcagccgctgcggggccgcgaacaaagaggaggagccgaggcgcgagagcaaagtctgaaatggatgttacatgagtcattttaagggatgcacacaactatgaacatttctgaagattttttctcagtaaagtagataaagatggatgaatcagccttgttggatcttttggagtgtccggtgtgtctagagcgccttgatgcttctgcgaaggtcttgccttgccagcatacgttttgcaagcgatgtttgctggggatcgtaggttctcgaaatgaactcagatgtcccgagtgcaggactcttgttggctcgggtgtcgaggagcttcccagtaacatcttgctggtcagacttctggatggcatcaaacagaggccttggaaacctggtcctggtgggggaagtgggaccaactgcacaaatgcattaaggtctcagagcagcactgtggctaattgtagctcaaaagatctgcagagctcccagggcggacagcagcctcgggtgcaatcctggagccccccagtgaggggtatacctcagttaccatgtgccaaagcattatacaactatgaaggaaaagagcctggagaccttaaattcagcaaaggtgacatcatcattttgcgaagacaagtggatgaaaattggtaccatggggaagtcaatggaatccatggctttttccccaccaactttgtgcagattattaaaccgttacctcagcccccacctcagtgcaaagcactttatgactttgaagtgaaagacaaggaagcagacaaagattgccttccatttgcaaaggatgatgttctgactgtgatccgaagagtggatgaaaactgggctgaaggaatgctggcagacaaaataggaatatttccaatttcatatgttgagtttaactcggctgctaagcagctgatagaatgggataagcctcctgtgccaggagttgatgctggagaatgttcctcggcagcagcccagagcagcactgccccaaagcactccgacaccaagaagaacaccaaaaagcggcactccttcacttccctcactatggccaacaagtcctcccaggcatcccagaaccgccactccatggagatcagcccccctgtcctcatcagctccagcaaccccactgctgctgcacggatcagcgagctgtctgggctctcctgcagtgccccttctcaggttcatataagtaccaccgggttaattgtgaccccgcccccaagcagcccagtgacaactggcccctcgtttactttcccatcagatgttccctaccaagctgcccttggaactttgaatcctcctcttccaccaccccctctcctggctgccactgtccttgcctccacaccaccaggcgccaccgccgctgctgctgctgctggaatgggaccgaggcccatggcaggatccactgaccagattgcacatttacggccgcagactcgccccagtgtgtatgttgctatatatccatacactcctcggaaagaggatgaactagagctgagaaaaggggagatgtttttagtgtttgagcgctgccaggatggctggttcaaagggacatccatgcataccagcaagataggggttttccctggcaattatgtggcaccagtcacaagggcggtgacaaatgcttcccaagctaaagtccctatgtctacagctggccagacaagtcggggagtgaccatggtcagtccttccacggcaggagggcctgcccagaagctccagggaaatggcgtggctgggagtcccagtgttgtccccgcagctgtggtatcagcagctcacatccagacaagtcctcaggctaaggtcttgttgcacatgacggggcaaatgacagtcaaccaggcccgcaatgctgtgaggacagttgcagcgcacaaccaggaacgccccacggcagcagtgacacccatccaggtacagaatgccgccggcctcagccctgcatctgtgggcctgtcccatcactcgctggcctccccacaacctgcgcctctgatgccaggctcagccacgcacactgctgccatcagtatcagtcgagccagtgcccctctggcctgtgcagcagctgctccactgacttccccaagcatcaccagtgcttctctggaggctgagcccagtggccggatagtgaccgttctccctggactccccacatctcctgacagtgcttcatcagcttgtgggaacagttcagcaaccaaaccagacaaggatagcaaaaaagaaaaaaagggtttgttgaagttgctttctggcgcctccactaaacggaagccccgcgtgtctcctccagcatcgcccaccctagaagtggagctgggcagtgcagagcttcctctccagggagcggtggggcccgaactgccaccaggaggtggccatggcagggcaggctcctgccctgtggacggggacggaccggtcacgactgcagtggcaggagcagccctggcccaggatgcttttcataggaaggcaagttccctggactccgcagttcccatcgctccacctcctcgccaggcctgttcctccctgggtcctgtcttgaatgagtctagacctgtcgtttgtgaaaggcacagggtggtggtttcctatcctcctcagagtgaggcagaacttgaacttaaagaaggagatattgtgtttgttcataaaaaacgagaggatggctggttcaaaggcacattacaacgtaatgggaaaactggccttttcccaggaagctttgtggaaaacatatgaggagactgacactgaagaagcttaaaatcacttcacacaacaaagtagcacaaagcagtttaacagaaagagcacatttgtggacttccagatggtcaggagatgagcaaaggattggtatgtgactctgatgccccagcacagttaccccagcgagcagaatgaagaagatgtttgtgtgggttttgttagtctggattcggatgtataaggtgtgccttgtactgtctgatttactacacagagaaacttttttttttttttaagatatatgactaaaatggacaattgtttacaaggcttaactaatttatttgcttttttaaacttgaacttttcgtataatagatacgttctttggattatgattttaagaaattattaatttatgaaatgataggtaaggagaagctggattatctcctgttgagagcaagagattcgttttgacatagagtgaatgcattttcccctctcctcctccctgctaccattatattttggggttatgttttgcttctttaagatagaaatcccagttctctaatttggttttcttctttgggaaaccaaacatacaaatgaatcagtatcaattagggcctggggtagagagacagaaacttgagagaagagaagttagtgattccctctctttctagtttggtaggaatcaccctgaagacctagtcctcaatttaattgtgtgggtttttaattttcctagaatgaagtgactgaaacaatgagaaagaatacagcacaacccttgaacaaaatgtatttagaaatatatttagttttatagcagaagcagctcaattgtttggttggaaagtaggggaaattgaagttgtagtcactgtctgagaatggctatgaagcgtcatttcacattttaccccaactgacctgcatgcccaggacacaagtaaaacatttgtgagatagtggtggtaagtgatgcactcgtgttaagtcaaaggctataagaaacactgtgaaaagttcatattcatccattgtgattctttccccacgtcttgcatgtattactggattcccacagtaatatagactgtgcatggtgtgtatatttcattgcgatttcctgttaagatgagtttgtactcagaattgaccaattcaggaggtgtaaaaataaacagtgttctcttctctaccccaaagccactactgaccaaggtctcttcagtgcactcgctccctctctggctaaggcatgcattagccactacacaagtcattagtgaaagtggtcttttatgtcctcccagcagacagacatcaaggatgagttaaccaggagactactcctgtgactgtggagctctggaaggcttggtgggagtgaatttgcccacaccttacaattgtggcaggatccagaagagcctgtctttttatatccattccttgatgtcattggcctctcccaccgatttcattacggtgccacgcagtcatggatctgggtagtccggaaaacaaaaggagggaagacagcctggtaatgaataagatccttaccacagttttctcatgggaaatacataataaaccctttcatctttttttttttcctttaagaattaaaactgggaaatagaaacatgaactgaaaagtcttgcaatgacaagaggtttcatggtcttaaaaagatactttatgtggttgaagatgaaatcattcctaaattaaccttttttttaaaaaaaaacaatgtatattatgttcctgtgtgttgaatttaaaaaaaaaatactttacttggatattcatgtaatatataaaggtttggtgaaatgaactttagttaggaaaaagctggcatcagctttcatctgtgtaagttgacaccaatgtgtcataatattctttattttgggaaattagtgtattttataaaaattttaaaaagaaaaaagactactacaggttaagataatttttttacctgtcttttctccatattttaagctatgtgattgaagtacctctgttcatagtttcctggtataaagttggttaaaatttcatctgttaatagatcattaggtaatataatgtatgggttttctattggttttttgcagacagtagagggagattttgtaacaagggcttgttacacagtgatatggtaatgataaaattgcgatttatcactccttttcatgttaataatttgaggactggataaaaggtttcaagattaaaatttgatgttcaaacctttgt

SEQ ID NO: 18974 - DNA, 1657 bp, Homo sapiens
  source 1..1657: mol_type = unassigned DNA
ccaaagcattatacaactatgaaggaaaagagcctggagaccttaaattcagcaaaggtgacatcatcattttgcgaagacaagtggatgaaaattggtaccatggggaagtcaatggaatccatggctttttccccaccaactttgtgcagattattaaaccgttacctcagcccccacctcagtgcaaagcactttatgactttgaagtgaaagacaaggaagcagacaaagattgccttccatttgcaaaggatgatgttctgactgtgatccgaagagtggatgaaaactgggctgaaggaatgctggcagacaaaataggaatatttccaatttcatatgttgagtttaactcggctgctaagcagctgatagaatgggataagcctcctgtgccaggagttgatgctggagaatgttcctcggcagcagcccagagcagcactgccccaaagcactccgacaccaagaagaacaccaaaaagcggcactccttcacttccctcactatggccaacaagtcctcccaggcatcccagaaccgccactccatggagatcagcccccctgtcctcatcagctccagcaaccccactgctgctgcacggatcagcgagctgtctgggctctcctgcagtgccccttctcaggttcatataagtaccaccgggttaattgtgaccccgcccccaagcagcccagtgacaactggcccctcgtttactttcccatcagatgttccctaccaagctgcccttggagcgccaccgccgctgctgctgctgctggaatgggaccgaggcccatggcaggatccactgaccagattgcacatttacggccgcagactcgccccagtgtgtatgttgctatatatccatacactcctcggaaagaggatgaactagagctgagaaaaggggagatgtttttagtgtttgagcgctgccaggatggctggttcaaagggacatccatgcataccagcaagataggggttttccctggcaattatgtggcaccagtcacaagggcggtgacaaatgcttcccaagctaaagtccctatgtctacagctggccagacaagtcggggagtgaccatggtcagtccttccacggcaggagggcctgcccagaagctccagggaaatggcgtggctgggagtcccagtgttgtccccgcagctgtggtatcagcagctcacatccagacaagtcctcaggctaaggtcttgttgcacatgacggggcaaatgacagtcaaccaggcccgcaatgctgtgaggacagttgcagcgcacaaccaggaacgccccacggcagcagtgacacccatccaggtacagaatgccgccggcctcagccctgcatctgtgggcctgtcccatcactcgctggcctccccacaacctgcgcctctgatgccaggctcagccacgcacactgctgccatcagtatcagtcgagccagtgcccctctggcctgtgcagcagctgctccactgacttccccaagcatcaccagtgcttctctggaggctgagcccagtggccggatagtgaccgttctccctggactccccacatctcctgacagtgcttcatcagcttgtgggaacagttcagcaaccaaaccagacaaggatagcaaa

SEQ ID NO: 18975 - DNA, 2020 bp, Homo sapiens
  source 1..2020: mol_type = unassigned DNA
cgtaggttctcgaaatgaactcagatgtcccgagtgcaggactcttgttggctcgggtgtcgaggagcttcccagtaacatcttgctggtcagacttctggatggcatcaaacagaggccttggaaacctggtcctggtgggggaagtgggaccaactgcacaaatgcattaaggtctcagagcagcactgtggctaattgtagctcaaaagatctgcagagctcccagggcggacagcagcctcgggtgcaatcctggagccccccagtgaggggtatacctcagttaccatgtgccaaagcattatacaactatgaaggaaaagagcctggagaccttaaattcagcaaaggtgacatcatcattttgcgaagacaagtggatgaaaattggtaccatggggaagtcaatggaatccatggctttttccccaccaactttgtgcagattattaaaccgttacctcagcccccacctcagtgcaaagcactttatgactttgaagtgaaagacaaggaagcagacaaagattgccttccatttgcaaaggatgatgttctgactgtgatccgaagagtggatgaaaactgggctgaaggaatgctggcagacaaaataggaatatttccaatttcatatgttgagtttaactcggctgctaagcagctgatagaatgggataagcctcctgtgccaggagttgatgctggagaatgttcctcggcagcagcccagagcagcactgccccaaagcactccgacaccaagaagaacaccaaaaagcggcactccttcacttccctcactatggccaacaagtcctcccaggcatcccagaaccgccactccatggagatcagcccccctgtcctcatcagctccagcaaccccactgctgctgcacggatcagcgagctgtctgggctctcctgcagtgccccttctcaggttcatataagtaccaccgggttaattgtgaccccgcccccaagcagcccagtgacaactggcccctcgtttactttcccatcagatgttccctaccaagctgcccttggaactttgaatcctcctcttccaccaccccctctcctggctgccactgtccttgcctccacaccaccaggcgccaccgccgctgctgctgctgctggaatgggaccgaggcccatggcaggatccactgaccagattgcacatttacggccgcagactcgccccagtgtgtatgttgctatatatccatacactcctcggaaagaggatgaactagagctgagaaaaggggagatgtttttagtgtttgagcgctgccaggatggctggttcaaagggacatccatgcataccagcaagataggggttttccctggcaattatgtggcaccagtcacaagggcggtgacaaatgcttcccaagctaaagtccctatgtctacagctggccagacaagtcggggagtgaccatggtcagtccttccacggcaggagggcctgcccagaagctccagggaaatggcgtggctgggagtcccagtgttgtccccgcagctgtggtatcagcagctcacatccagacaagtcctcaggctaaggtcttgttgcacatgacggggcaaatgacagtcaaccaggcccgcaatgctgtgaggacagttgcagcgcacaaccaggaacgccccacggcagcagtgacacccatccaggtacagaatgccgccggcctcagccctgcatctgtgggcctgtcccatcactcgctggcctccccacaacctgcgcctctgatgccaggctcagccacgcacactgctgccatcagtatcagtcgagccagtgcccctctggcctgtgcagcagctgctccactgacttccccaagcatcaccagtgcttctctggaggctgagcccagtggccggatagtgaccgttctccctggactccccacatctcctgacagtgcttcatcagcttgtgggaacagttcagcaaccaaaccagacaaggatagcaaa

SEQ ID NO: 18976 - DNA, 487 bp, Homo sapiens
  source 1..487: mol_type = unassigned DNA
gcggccggcgcggggtcgacggggacccagcgtcggcggacccctagccgcggagaaggcggtggtctcgacattcccccatccccgccctggagcaaagtctgaaatggatgttacatgagtcattttaagggatgcacacaactatgaacatttctgaagattttttctcagtaaagtagataaagatggatgaatcagccttgttggatcttttggagtgtccggtgtgtctagagcgccttgatgcttctgcgaaggtcttgccttgccagcatacgttttgcaagcgatgtttgctggggatcgtaggttctcgaaatgaactcagatgtcccgagtgcaggactcttgttggctcgggtgtcgaggagcttcccagtaacatcttgctggtcagacttctggatggcatcaaacagaggccttggaaacctggtcctggtgggggaagtgggaccaactgcacaaatgcattaaggtctca

SEQ ID NO: 18977 - DNA, 591 bp, Homo sapiens
  source 1..591: mol_type = unassigned DNA
cagagtttatcaactactgccctgaagggcgcttttctgttttagctgctttcaagcaaatctgtgtcttttagaattgtcaaccttcagctctttttggttgggcaaaattaaacagttctatttttaataacagcgaagaaacatatgtatttaatattgggatcatttaccacgagcgattacatgaggcatggtttcttaaacgctaaagtggcttaaaaaagggaatttagttggatataaaagtaaatttcagagcaaagtctgaaatggatgttacatgagtcattttaagggatgcacacaactatgaacatttctgaagattttttctcagtaaagtagataaagatggatgaatcagccttgttggatcttttggagtgtccggtgtgtctagagcgccttgatgcttctgcgaaggtcttgccttgccagcatacgttttgcaagcgatgtttgctggggatcgtaggttctcgaaatgaactcagatgtcccgagtgcaggactcttgttggctcgggtgtcgaggagcttcccagtaacatcttgctggtcagacttctggatggcatcaaacagagg

SEQ ID NO: 18978 - DNA, 5803 bp, Homo sapiens
  source 1..5803: mol_type = unassigned DNA
ccggtccccgccacgcaggccggtcggtgagccacttcgcaccgccacagccctagcatcgggccaccagccggggtgaagaaagtcacggcggagcccggctccccagtcctgatgctggctgccggtggcgggctccacgccggccccgggacctaggcagccgcgcgagaccgctgcgggcgcctcccccatgctgctcggagcgtcctggctgtgcgcatccaaggcggccgccgctgctgcgcagagcgagggcgacgaggacaggccaggcgagcgacggcggcgtcgggcggcggccaccgccgcgggggcgggcgaggacatggacgagtcgtcgctgctggacctgctggagtgctccgtgtgtctggagcgcctggacaccacggccaaggtgctgccatgccaacacactttctgccgccgctgcctggagagcatcgtgtgctcgcgccacgagctgcgctgccccgagtgccgcatcctggtgggctgcggcgtggacgaactgcccgccaacatcttgctggtgcgactgctggacggcatccgtcagcggccccgcgcgggcaccagccccggcggcagcccgcccgcgcgtcccatcccaggccagagtgcggcccccacgctcgcgggcggcgggggcggcgcggcaggcagcaccccgggttccccggttttcctctccgcggccgcgggcagcaccgccggcagtctgcgggagctggcgaccagcaggaccgcgccggcggcaaagaatccctgcctgcttccctatggcaaggccctctacagctacgaggggaaggaacctggtgacctcaagttcaacaagggggacatcatcgtcctgcggcgcaaggtggatgaacagtggtaccacggcgagctgcacggcacacagggcttcctcccagccagctatatccagtgcatccagcccttgccacacgccccgccccagggaaaagcactttatgatttcgagatgaaggacaaagaccaagacaaggactgtctgaccttcaccaaggacgagattctgacggtgctcaggagagtggatgagaactgggcggaaggcatgctgggagacaagatcgggatcttcccgctcctgtacgtggagctcaatgactccgccaagcagctcattgagatggacaagccatgcccagccgctgcatccagctgcaatgcctccctgccctctgactccggcgctgtggccagcgtggccccaagtcccactttaagcagctcaggggcggtcagtgcctttcagcggcgtgtggatggcaagaagaacaccaagaaacgccactccttcaccgcgctcagtgtgacgcacagatcctcccaggctgccagccacaggcattccatggaaattagtgctccagtgttgatcagctccagcgatccccgagccgcggccaggattggagaccttgctcatctgtcgtgcgctgctcccacccaggatgtctcctcctcggcgggatctacccccacggctgtcccacgggctgcctcggtgtctggagagcagggcacgcctcccaaggtccagctgcccctcaacgtgtacctggcgctctacgcctacaagccccagaagagtgacgagctggagctgcacaagggagagatgtaccgggtcctcgagaagtgtcaggatggctggttcaagggggcgtctctgaggaccggggtctctggggtgttccccggaaactacgtgacacccgtttccagggtgcctgcaggaggggcagggccgccccggaataatgtagtcggagggtctccactggccaaagggataaccacaaccatgcacccaggcagtgggagtctgagcagcctggccactgccaccaggcccgccctgcccatcaccactccccaggcccacgcccagcaccccacagcctcgcccccaacaggcagctgtctacggcactcagcccagccaacggccagccaagcccggagcaccatttcaacagctgcccactctgcagcccaggctcaggaccggccaactgccaccgtgtcacccctgcgcacccagaactctccatcccgcctgcctgccaccagcctcaggccccactcggtggtgtccccgcagcacagccaccagcccccggtgcagatgtgcccacggccggccatccccctcacatcagcagcatcagccatcacacctcccaacgtcagtgccgcaaacctcaacggggaggctggaggggggcccatcggtgttctgtccacatccagccccaccaacacgggatgcaaactagacgagaagaaaagtgaaaagaaagagaagaagagtgggctcctgaagcttctagccggagcatccaccaagaagaagtcacgctccccgccatctgtgtctccaacccacgacccccaggtggccgtggacgccctgctccaaggtgcagtgggccccgaagtgtcctcactgtccatccacggcagggcagggtcctgccccatagagagcgagatgcagggtgccatggggatggagcctctgcacaggaaggcaggctccttggatctaaacttcacatctccttcccggcaagctccgctgtccatggctgccatccgccccgagcccaagctgttgcccagagagaggtaccgcgtggtggtctcgtacccaccccagagtgaggcggagatcgagctgaaggaaggcgacatcgtctttgtgcacaagaagcgtgaggacggctggtacaaggggaccctgcagcggaacggccgcacaggcctcttcccgggcagcttcgtcgagagcttctgagaactggtgctccctgcacccagctcacagagggggaggccgcctgggaagctccacggcacacagagagggagccatggcgccccaagggttccaggtcatctccaaggcacctggcgggggataccctggcccagggtgggggccagggactgtggaggtcgtgccttctcccaaaacccccaaacggagagcacacctgggatgttcttcaaggaaatgcccaccccctctgtggaaactgcaaagaaagcaccttgaggaagagaggcaggtgccggcgcaggcaggcctgtggctgtggtttgcagccatggcagcgttctcatttaccacctaagcagggttggaggttgcaggaggtctgcaggcgaggtgggtggcatgggggccaggagcgctggagatcatctttctgggctgccctgggcttcccgcggggcccaggttgctctgtcaccattctatatacctcagtcacctgccgcccggctgctcagcaggggtgtttgtgaggccctgggggtgccccggaaggggcaccccaccgcccctgttgggaaccagagcagaatctgtgggcttgtcgcctgccagtagtataagcaacactttctgttcaccaccattgtcccttgcattacttctttcttacagcatatttttaacataaagctgttagactttatatatttctaataggtcagacattgcctatttttcatacatctggtgctgcctttttgtaaaactaataatgacttggttgagcttgaaagaaaagatgtctgaggcgacatcaaaggggcagaatttttatatttcccatatggctttgggagagcgccgagaagccgccatcccgcacctcagcgctggccagtactctgggggctggcggggtggatccattgagggggtcggagggagcttggaagcagccggtttctttaaactcttaccaaaaccccgcgctctgtctagacggtgatgattattattcaagacctggaaacatttcgaggaagggccactataattgtccttttgtgtggcggtagaaggagcacgcaggtcaaccccagccgggaaggcaaaatcttccctttattgcctcagagagaactgcaattagcattctcagaagatgatttcttggtatcaaaatgtgcagtttctacaacagtttagatcaccaccaccatttttcttcttttttaaaaataaataactgctcccatttcaggcagtgcaaaccttcatctgctggagaccagaggtacaaggagatcagggggttgcagcaccgctgcaggcttgcaagatcggggagttgggagggcgagagaggaggaggtgcagctttgatgctgggacctccctgagtggggctgatgaatgtatattcattagcaccatggctcacttcccaggaagactgatcaggagcccttcagggacaattttgttctcaagattcacaccttaggaacacatttttatcacctcaaaattttgatccatcacccctctctccacctatatttttacaaataccattcagacttaaattaagctgaagaaactagcctttggtaacatagggtgtcattggttttcagggatgtaaccaattccagaaatacattcttttgcctggcatgaagactttgaaacacgggccgcttattttcagagttcctgttttgggacgtgacttggctacttgttacttccaggtggtcaccacacggcgggggtcatgcctttccctcccccaagatgataatagatttaatagactcaaagaagttgttcagaatcaaagaagaaaaagtctggcttaaacatagtaacttctgtgtgccaggttaatgacaaccaaaagctctctatttaccattattgccaaacttcatcagttgcccatcctgcaccaaaatcctgtgcgtgtttaaattcacgttgtcaccaaagaggtgcacagatcaacaacctggatgacgcaggtgttctccagggaaaccagaccaagtcaagtctccaggtaacttttttgaagtcttttttttaaggcgcgcaggtaccaagcaacagaatagagtaacctgaacgttcttactctcccaggcatggcccacgtggtgcttcaggtagaaatgtgcttcaccctcctggtggggggcgaggacacagcccactgcatgcagcatggtagagagctggggcgaatatctccatgtctttggaggatgtcagctggccgctttcagggcagagtcgggtgggcgttggtgccaccttaggaaggagagcgatgcgtgggtctggccagagctctggagccaatgccgggctgcctgagagcagaggaaatgcatggcccatgtgcatttctgagtattttaaactcgttcaggccctgcagccttcatgatgatgtagctcgcagagaagagcaggagcagaattagccctttcttcaggccatcttgcctcaaagggtacacatgtttggcggttaagatgaaactaacccttatgtttcatcctggccccatgatgtacacatcttagccatgtagtggccttggggggccacagagatttcctttgaggagcatggtagagtccacagccatggctgaagtcagtggacaccgaggggacaggactgcaggccaccaggggcctctgcccagagggaggcagagaggatggcggccacgggtgctctcctggcatcctcatggggtgatgccaggccgggcacttcaaaacaggctcagccgactgggagatcctttgtactttgcacagttcacacacacaaacacacacaccctatcccaagtgtttttgttagacacaaatgtcagcgtgtgattttggaagacttgtcagtgatgacaaaccatgatgcctgtgtttctgagtctttaaataaaaatgaacatggag

SEQ ID NO: 18979 - DNA, 4416 bp, Homo sapiens
  source 1..4416: mol_type = unassigned DNA
tgcattgtgcattgagcaggcctcggtccctcgtgtgccagggaggaggcgggaggagggacaccgttgggaggctgtcccttgcagcactcttctggcctgtgttcccaagggcctcggccagggtaggatggtacacacatgggtggctgcttctgcatccccagggagcggagtctgacccggggcccaggtaaagaaactccttccaaggatccaactgtatcgagtgagtgtatagcctcatctgaatacaaggaaaaatgttttctgccacagaacattaatccagacctgacactctccttctgtgtaaagagccgctccaggaggtgtgtaaatggacccctacaggaagctgctcggaggcggctctgggcactggagaatgaggaccaggaggtgcgcatgctgtttaaggacctctcagcaaggttggtcagtatccagtctcagagggcccagtttctcatcaccttcaagaccatggaggaaatctggaagttctccacctaccttaatttaggctacgtatccatgtgtctagaacatctcctctttgaccacaagtactggctcaactgcatattggtggaggatacagagatccaagtgtctgtagatgataaacacctggaaacaatatacctgggactcctgatacaggaaggccacttcttctgcagagccctgtgctccgtgactccaccagccgagaaggaaggggaatgcttgacactttgcaagaatgagttaatctcagtgaagatggcagaagctggctccgagttggaaggcgtgtctttggtgacaggtcagcggggcctggtactggtgtcagccttggagcctctgcctctccctttccaccagtggttcctaaagaattatccaggaagctgtggcctttccaggaagagggattggacaggctcctatcagattggcagaggacgctgtaaggccttgacgggttatgagccaggagaaaaggatgaactgaatttctaccagggagaaagcattgagatcatcggctttgtcatacctgggcttcagtggttcattggaaagtcgacaagttcaggacaagtgggctttgtccccaccaggaacatagatcctgattcttattccccaatgagcaggaactctgcctttctcagtgatgaggagagatgctccctgttggccctgggaagtgataagcagactgagtgttccagcttcctccacactcttgctcgcactgacatcacatctgtctaccggctcagtgggtttgaatccatccagaatcctccaaatgatctgagtgcatcccagcctgaaggtttcaaggaggtcaggcctggcagagcctgggaggagcatcaggccgtggggtccagacagtccagcagctctgaggactccagcctggaggaggagctcctctcggccacctcagacagctatcgcctgccggagcctgatgaccttgatgacccggaactgctcatggacctaagcactggtcaggaggaggaggctgagaacttcgcccccatattggcttttctggatcatgagggttatgctgaccactttaagagtctctatgacttctccttctctttcctcacttcttccttttatagcttctctgaggaggatgagtttgtggcctacctggaggcatcaagaaagtgggccaagaagagccacatgacctgggcccatgcccgtctctgcttcctcctgggccggctgagcatcaggaaggtcaaactctctcaggccagggtgtacttcgaggaggccatccacattctcaatggagcatttgaggacctatccttggtggccactctgtacatcaatttggctgccatctacctgaaacagaggctgagacataaaggctccgccctgttggaaaaggcaggtgccctgctggcctgcctgcctgaccgtgagtctagtgccaagcatgaactcgacgtggtggcctacgtgctgcgccaggggattgtggtgggcagcagcccgctggaggccagggcctgctttctggccatccgcttgctcctgagcctaggccggcacgaggaggtcctgccctttgccgagcgcctgcagctcctctctggacaccctcctgcctctgaggctgtggccagtgttttgagttttctgtatgacaagaaatatcttccacaccttgcagtggcctctgtccagcaacatggtatccagagtgcccaagggatgtctcttcctatttggcaggtccaccttgtcctccagaacacaaccaagctccttggctttccttccccaggctggggtgaagtttctgccttggcctgcccaatgctcagacaggccctggctgcctgtgaggaactagcagaccggagcacccagagggccctgtgtctcatcctttccaaagtgtacctcgagcacaggtctcctgacggtgccatccactacctgagccaggccttggtgctagggcagctgctgggtgagcaggaatcctttgagtcttctctctgcctggcatgggcctatctcttagccagccaggccaagaaggctttggatgtgcttgagccactgctatgctccctgaaggagacagagagtctcactcaaaggggagtcatctataacctcctgggacttgcactccaaggtgaaggccgggtgaacagggcagccaagagctatcttcgggccttgaacagagcccaggaggtgggagatgtgcataaccaggcagtggctatggccaatcttggccacctgagccttaagtcctgggctcagcatccagccagaaactatctcctgcaggctgtacgactctattgtgaacttcaggccagtaaggagacagacatggaattagtacaggtgtttctctggttggcccaagttctggtgtctggacaccagctgacccatggccttctttgttatgaaatggcattgctgtttggcttaaggcatcgacatctaaagagtcagcttcaggccaccaaatccctctgccatttctacagctctgtgtccccaaaccctgaggcatgcatcacctaccatgagcactggctggccctggctcagcaactcagggaccgggagatggaagggaggctgctggagtccctggggcagctttatcggaacctaaataccgccaggtccctcaggaggtcactcacatgcatcaaggagagcctgcgtatcttcattgacctgggggagacagacaaggctgctgaggcctggcttggggcggggcgactccactacctcatgcaggaagacgagctggtggagctgtgcctgcaggcagccatccagacagccctgaagtcagaggagcctttgctggctctcaaactttatgaagaagcaggtgatgtgttcttcaatgggacccgccacaggcatcatgcagtggagtactaccgagctggagctgttcctttagcaaggaggttgaaggcggtgagaactgagctccggattttcaataagctgacagagctgcagattagcctcgaaggctatgagaaggctttggaatttgccaccctggccgccaggctcagcacagtcacaggagatcagaggcaagagctggtggcctttcaccgcctggctacagtgtactactccctgcacatgtatgagatggctgaggactgctacctgaagaccctgtccctctgtccaccatggctgcagagtcccaaggaggccctgtactatgccaaggtgtattatcgcctgggcagactcaccttctgccagctgaagtttctcctctgttgcccaggctggagttcagtggtacagtcagggcttcctgcgacctcagactccggggctcaagtgatcctccagtgtcaacctcctgagtagctggaactacagggcagttgcaggctggcccagggcagacccaactgagggcaatggtccttagagctatggccaccctgacgtggatgcctggtgagaggcttgtgaacagagaagactaactgtggagatgctgacccatttagcttttacctgtcccaggatggttggagatctctgggagagagagagaggtaatgaggactcagttttgaccaaggcaagatggcttcaaaaaaataacaaatgccttggcaatgatttcttggacatgataccagaagcacaggcaacaaaagcaaaaacagatgagtaacactacatcaaactaaaaacttctgcacagcaaaggaaacaaccaacaaaatgagaaggcaacttacagaatggaagaaaatatttgagaaccatatatctggtaaaggcaaaagactcccaccggaagccaaccagatgtggctgcctaatcttggacttcccagtctccagaactgt

SEQ ID NO: 18980 - DNA, 316 bp, Homo sapiens
  source 1..316: mol_type = unassigned DNA
tgcaggatatctctctcagtcttccaattcttaggagatcagaggcaagagctggtggcctttcaccgcctggctacagtgtactactccctgcacatgtatgagatggctgaggactgctacctgaagaccctgtccctctgtccaccatggctgcagagtcccaaggaggccctgtactatgccaaggtgtattatcgcctgggcagactcaccttctgccagctgaagggcagttgcaggctggcccagggcagacccaactgagggcaatggtccttagagctatggccaccctgacgtggatgcctggtga

SEQ ID NO: 18981 - DNA, 7324 bp, Homo sapiens
  source 1..7324: mol_type = unassigned DNA
gccagggtaggatggtacacacatgggtggctgcttctgcatccccagggagcggagtctgacccggggcccaggtaaagaaactccttccaaggatccaactgtatcgagtgagtgtatagcctcatctgaatacaaggaaaaatgttttctgccacagaacattaatccagacctgacactctccttctgtgtaaagagccgctccaggaggtgtgtaaatggacccctacaggaagctgctcggaggcggctctgggcactggagaatgaggaccaggaggtgcgcatgctgtttaaggacctctcagcaaggttggtcagtatccagtctcagagggcccagtttctcatcaccttcaagaccatggaggaaatctggaagttctccacctaccttaatttaggctacgtatccatgtgtctagaacatctcctctttgaccacaagtactggctcaactgcatattggtggaggatacagagatccaagtgtctgtagatgataaacacctggaaacaatatacctgggactcctgatacaggaaggccacttcttctgcagagccctgtgctccgtgactccaccagccgagaaggaaggggaatgcttgacactttgcaagaatgagttaatctcagtgaagatggcagaagctggctccgagttggaaggcgtgtctttggtgacaggtggttcctaaagaattatccaggaagctgtggcctttccaggaagagggattggacaggctcctatcagattggcagaggacgctgtaaggccttgacgggttatgagccaggagaaaaggatgaactgaatttctaccagggagaaagcattgagatcatcggctttgtcatacctgggcttcagtggttcattggaaagtcgacaagttcaggacaagtgggctttgtccccaccaggaacatagatcctgattcttattccccaatgacttggtgtgtttcttcaatatgaagattcatgtctttcttcaattctggaaaattttcagtccttcttcctttgaatattgcctctctctcgttctttttagtctctcttctggaattcctattagaggagcaggaactctgcctttctcagtgatgaggagagatgctccctgttggccctgggaagtgataagcagactgagtgttccagcttcctccacactcttgctcgcactgacatcacatctgtctaccggctcagtgggtttgaatccatccagaatcctccaaatgatctgagtgcatcccagcctgaaggtttcaaggaggtcaggcctggcagagcctgggaggagcatcaggccgtggggtccagacagtccagcagctctgaggactccagcctggaggaggagctcctctcggccacctcagacagctatcgcctgccggagcctgatgaccttgatgacccggaactgctcatggacctaagcactggtcaggaggaggaggctgagaacttcgcccccatattggcttttctggatcatgagggttatgctgaccactttaagagtctctatgacttctccttctctttcctcacttcttccttttatagcttctctgaggaggatgagtttgtggcctacctggaggcatcaagaaagtgggccaagaagagccacatgacctgggcccatgcccgtctctgcttcctcctgggccggctgagcatcaggaaggtcaaactctctcaggccagggtgtacttcgaggaggccatccacattctcaatggagcatttgaggacctatccttggtggccactctgtacatcaatttggctgccatctacctgaaacagaggctgagacataaaggctccgccctgttggaaaaggcaggtgccctgctggcctgcctgcctgaccgtgagtctagtgccaagcatgaactcgacgtggtggcctacgtgctgcgccaggggattgtggtgggcagcagcccgctggaggccagggcctgctttctggccatccgcttgctcctgagcctaggccggcacgaggaggtcctgccctttgccgagcgcctgcagctcctctctggacaccctcctgcctctgaggctgtggccagtgttttgagttttctgtatgacaagaaatatcttccacaccttgcagtggcctctgtccagcaacatggtatccagagtgcccaagggatgtctcttcctatttggcaggtccaccttgtcctccagaacacaaccaagctccttggctttccttccccaggctggggtgaagtttctgccttggcctgcccaatgctcagacaggccctggctgcctgtgaggaactagcagaccggagcacccagagggccctgtgtctcatcctttccaaagtgtacctcgagcacaggtctcctgacggtgccatccactacctgagccaggccttggtgctagggcagctgctgggtgagcaggaatcctttgagtcttctctctgcctggcatgggcctatctcttagccagccaggccaagaaggctttggatgtgcttgagccactgctatgctccctgaaggagacagagagtctcactcaaaggggagtcatctataacctcctgggacttgcactccaaggtgaaggccgggtgaacagggcagccaagagctatcttcgggccttgaacagagcccaggaggtgggagatgtgcataaccaggcagtggctatggccaatcttggccacctgagccttaagtcctgggctcagcatccagccagaaactatctcctgcaggctgtacgactctattgtgaacttcaggccagtaaggagacagacatggaattagtacaggtgtttctctggttggcccaagttctggtgtctggacaccagctgacccatggccttctttgttatgaaatggcattgctgtttggcttaaggcatcgacatctaaagagtcagcttcaggccaccaaatccctctgccatttctacagctctgtgtccccaaaccctgaggcatgcatcacctaccatgagcactggctggccctggctcagcaactcagggaccgggagatggaagggaggctgctggagtccctggggcagctttatcggaacctaaataccgccaggtccctcaggaggtcactcacatgcatcaaggagagcctgcgtatcttcattgacctgggggagacagacaaggctgctgaggcctggcttggggcggggcgactccactacctcatgcaggaagacgagctggtggagctgtgcctgcaggcagccatccagacagccctgaagtcagaggagcctttgctggctctcaaactttatgaagaagcaggtgatgtgttcttcaatgggacccgccacaggcatcatgcagtggagtactaccgagctggagctgttcctttagcaaggaggttgaaggcggtgagaactgagctccggattttcaataagctgacagagctgcagattagcctcgaaggctatgagaaggctttggaatttgccaccctggccgccaggctcagcacagtcacaggagatcagaggcaagagctggtggcctttcaccgcctggctacagtgtactactccctgcacatgtatgagatggctgaggactgctacctgaagaccctgtccctctgtccaccatggctgcagagtcccaaggaggccctgtactatgccaaggtgtattatcgcctgggcagactcaccttctgccagctgaaggatgcccatgatgccactgagtacttccttctggccctggcagcagcggtcctgctgggtgatgaggagcttcaggacaccattaggagcaggctggacaacatctgccagagccccctgtggcacagcaggccctccgggtgctcctcagagagggcgcggtggctgagtggtggtggcctggccctctgaggaaagctgtcctgtctctggacatttggcatggccagactctgaccccactgccctaggctcttaaatactcattgggagggtccgagtccttacctggcctagccccctcatttcacaagaagaagaatgaagtccaggaggagaagggctcattgcaggccacagaaagatttgatggtgcagcgatgagaattcctggttccaggctttgcatctggagcctttaccggttgactgttgccttccacacaaacagcctctgaaaagcactttctccatacataattctggagaagatgagggatcttgccctccaggagccttccttcctcccccaatgaggaaatcagtcactgcactggtgcaaaggcaagcagattggaatttgtgctcttcaccgattttctcagggaaagaccccttccccttgccagcagaggaacctgtagttttttccatttctttcttcagaaccaaagtatgtatcactcctcatgctcacagggattgacaggagagaattcaccaggatcttagctcaaaagacacagcctcagaatggccagatggattgcacgaaacctgacttggattcaccatcttcctcctgccataaggctgtgctcccacataacctcccagaagctccagggaagctttccaagagcaaaggcttggaaattgaatgttaagaaaattatgacataaattacatgtaaatagtgtatatgattaaatattgtccagttacatttacacacacattttgtctcatccacaatgggggcagatgagatggaggacttgatggatgggagagaataccaatacatgtcttttttttttttttttttttttgagacagtttctcctctgttgcccaggctggagttcagtggtacagtcagggcttcctgcgacctcagactccggggctcaagtgatcctccagtgtcaacctcctgagtagctggaactacaggcatgtgccatacccaactacaaggcatcttattgatttcagggcagctgctttacaaagcatctctattaataacatcactgcatagcacactgagtggcctaaaacacttataatctcatggtttctgaagggcaggaatccaagcatgacttagctgagcccaccagcttagggtggttcacaggctgcaatcagctggggctgcagttatctcaacttcaactagagaaggatgggcttccaagctcacccacacagctgttgttaggagtcagttttttgctagctgttggccagaggcttcctgcagccacttgccacgtgggcctctccacagggcagtcacaacatggcaccatgcttcactagagggagcaaacaagaggagcaagaaccagagtgagcaggagaaaagggagtgactctttctataacctgatcacagaagtgacatctccttagtcttgcctattcaattcataataaatgagtcactaggtctagctcccacaagaggggagtgtttaccaacagcttgaataccagatggtgaggaatcattggggatcatttcagaagtgacctaccacagtatctgagttctttgataatgaaattgggaattctctaatttcagcaaactgaaaatatggtccactaaccagcagcatcagcatcacctgtgagattgtttgaaatgaaaatctgtggccccacctatgatctctgaatcagaatctctggatcccagaacgctgactcgtccaagctttcctggtgattttaatgcaccctaaagtatgggaagcaccactgcagggcaagagccctcagatagtgtgcataactattacctggtgaggttgtggaacatgaacttcttggtttctatctctaataattctgattcagtagatctgggatgtatcccaggaacatgcatttttagaaagcaactcaagcaagcctgatgcaggtggttcacccttgctccttttctgtgaaccacaaggataccagccataattccctgcatctgatgcccatcagcttagcttttattatcagaccatctgcccttaatttctagcttcttgggctgaccagatgattggttgtatgaaagggtgagatgggagtggtgagttgagccgccattgcatcttctagtcatcaaggttgtctactaattggcacacattttctcttagagatgtggttggttgtcaaaaggctgtctactctagagagtattctccaggaaggagaagcttccagttgtctaattagtaaagttatctaatctactaccatggagaatagatgtggttttgcccccaccacaagctgtaaaagccccaagctgggagggacgttgcggttgaggctattcagtctaatctcccgtgcatagtcctttcaacaacattcctgggagacagtcaggggcacacacattccagaacagttacatatcgtgtatttgaagaaggctcacacagccctggaaaccatgccactggccattccccatctgactcaggttacagatcccctcccttttcccactgaccactcactctcctctggccagatttgtttctgtttctctgaaagagcagttcccacaactgcatgaggcttttgatattggccggtgggtgaagagtacagagggatgttactatacttaatttgattcttcctctccccagcagccacatctgtccttggcttccattgagctttataatcagttgaaacttctgtgtcttctgacttgaacttctgtttggacagatctttctcaattgctgcaaatatgcacatgcatttgcatatgcatacacatacacacacatacgtgaagagcgttgtttctatccatgttacatctccttggaaattttagctaaaatttcccaattctgtgcactttgatttacctataaatctgatgaatttacccataaccaggtcagttataaaaatgtttagcatgtttccaaagacaagggtaagactatttttttaaaataagaaaaacattgtgctatataattgcaattactacattctatatgtaaaccgcttgctaaaactcttttaaaaagtgtttaaaattttcatttttgaaatgtgggccagctattccctttggaaacatgttgatgctgtctttttttcatgatccacagagagtaaagtggtgattggatttggtctctacttaaacatttaaaaaaataagtgtatcatagccaaacatgatctagttaccctctttattctaattgttccctcaaatcttatatgggctgtgtgactgctggctccttacatctaatctaaataaagaacaagaagggcattgc

SEQ ID NO: 18982 - DNA, 712 bp, Homo sapiens
  source 1..712: mol_type = unassigned DNA
tcctttagcaaggaggttgaaggcggtgagaactgagctccggattttcaataagctgacagagctgcagattagcctcgaaggctatgagaaggctttggaatttgccaccctggccgccaggctcagcacagtcacaggagatcagaggcaagagctggtggcctttcaccgcctggctacagtgtactactccctgcacatgtatgagatggctgaggactgctacctgaagaccctgtccctctgtccaccatggctgcagagtcccaaggaggccctgtactatgccaaggtgtattatcgcctgggcagactcaccttctgccagctgaagtttctcctctgttgcccaggctggagttcagtggtacagtcagggcttcctgcgacctcagactccggggctcaagtgatcctccagtgtcaacctcctgagtagctggaactacagcaaactgaaaatatggtccactaaccagcagcatcagcatcacctgtgagattgtttgaaatgaaaatctgtggccccacctatgatctctgaatcagaatctctggatcccagaacgctgactcgtccaagctttcctggtgattttaatgcaccctaaagtatgggaagcaccactgcagggcaagagccctcagatagtgtgcataactattacctggtgaggttgtggaacatgaacttcttggtttctatctc

SEQ ID NO: 18983 - DNA, 4153 bp, Homo sapiens
  source 1..4153: mol_type = unassigned DNA
tgcaagaatgagttaatctcagtgaagatggcagaagctggctccgagttggaaggcgtgtctttggtgacaggtcagcggggcctggtactggtgtcagccttggagcctctgcctctccctttccaccagtggttcctaaagaattatccaggaagctgtggcctttccaggaagagggattggacaggctcctatcagattggcagaggacgctgtaaggccttgacgggttatgagccaggagaaaaggatgaactgaatttctaccagggagaaagcattgagatcatcggctttgtcatacctgggcttcagtggttcattggaaagtcgacaagttcaggacaagtgggctttgtccccaccaggaacatagatcctgattcttattccccaatgacttggtgtgtttcttcaatatgaagattcatgtctttcttcaattctggaaaattttcagtccttcttcctttgaatattgcctctctctcgttctttttagtctctcttctggaattcctattagaggagcaggaactctgcctttctcagtgatgaggagagatgctccctgttggccctgggaagtgataagcagactgagtgttccagcttcctccacactcttgctcgcactgacatcacatctgtctaccggctcagtgggtttgaatccatccagaatcctccaaatgatctgagtgcatcccagcctgaaggtttcaaggaggtcaggcctggcagagcctgggaggagcatcaggccgtggggtccagacagtccagcagctctgaggactccagcctggaggaggagctcctctcggccacctcagacagctatcgcctgccggagcctgatgaccttgatgacccggaactgctcatggacctaagcactggtcaggaggaggaggctgagaacttcgcccccatattggcttttctggatcatgagggttatgctgaccactttaagagtctctatgacttctccttctctttcctcacttcttccttttatagcttctctgaggaggatgagtttgtggcctacctggaggcatcaagaaagtgggccaagaagagccacatgacctgggcccatgcccgtctctgcttcctcctgggccggctgagcatcaggaaggtcaaactctctcaggccagggtgtacttcgaggaggccatccacattctcaatggagcatttgaggacctatccttggtggccactctgtacatcaatttggctgccatctacctgaaacagaggctgagacataaaggctccgccctgttggaaaaggcaggtgccctgctggcctgcctgcctgaccgtgagtctagtgccaagcatgaactcgacgtggtggcctacgtgctgcgccaggggattgtggtgggcagcagcccgctggaggccagggcctgctttctggccatccgcttgctcctgagcctaggccggcacgaggaggtcctgccctttgccgagcgcctgcagctcctctctggacaccctcctgcctctgaggctgtggccagtgttttgagttttctgtatgacaagaaatatcttccacaccttgcagtggcctctgtccagcaacatggtatccagagtgcccaagggatgtctcttcctatttggcaggtccaccttgtcctccagaacacaaccaagctccttggctttccttccccaggctggggtgaagtttctgccttggcctgcccaatgctcagacaggccctggctgcctgtgaggaactagcagaccggagcacccagagggccctgtgtctcatcctttccaaagtgtacctcgagcacaggtctcctgacggtgccatccactacctgagccaggccttggtgctagggcagctgctgggtgagcaggaatcctttgagtcttctctctgcctggcatgggcctatctcttagccagccaggccaagaaggctttggatgtgcttgagccactgctatgctccctgaaggagacagagagtctcactcaaaggggagtcatctataacctcctgggacttgcactccaaggtgaaggccgggtgaacagggcagccaagagctatcttcgggccttgaacagagcccaggaggtgggagatgtgcataaccaggcagtggctatggccaatcttggccacctgagccttaagtcctgggctcagcatccagccagaaactatctcctgcaggctgtacgactctattgtgaacttcaggccagtaaggagacagacatggaattagtacaggtgtttctctggttggcccaagttctggtgtctggacaccagctgacccatggccttctttgttatgaaatggcattgctgtttggcttaaggcatcgacatctaaagagtcagcttcaggccaccaaatccctctgccatttctacagctctgtgtccccaaaccctgaggcatgcatcacctaccatgagcactggctggccctggctcagcaactcagggaccgggagatggaagggaggctgctggagtccctggggcagctttatcggaacctaaataccgccaggtccctcaggaggtcactcacatgcatcaaggagagcctgcgtatcttcattgacctgggggagacagacaaggctgctgaggcctggcttggggcggggcgactccactacctcatgcaggaagacgagctggtggagctgtgcctgcaggcagccatccagacagccctgaagtcagaggagcctttgctggctctcaaactttatgaagaagcaggtgatgtgttcttcaatgggacccgccacaggcatcatgcagtggagtactaccgagctggagctgttcctttagcaaggaggttgaaggcggtgagaactgagctccggattttcaataagctgacagagctgcagattagcctcgaaggctatgagaaggctttggaatttgccaccctggccgccaggctcagcacagtcacagaggcaagagctggtggcctttcaccgcctggctacagtgtactactccctgcacatgtatgagatggctgaggactgctacctgaagaccctgtccctctgtccaccatggctgcagagtcccaaggaggccctgtactatgccaaggtgtattatcgcctgggcagactcaccttctgccagctgaaggatgcccatgatgccactgagtacttccttctggccctggcagcagcggtcctgctgggtgatgaggagcttcaggacaccattaggagcaggctggacaacatctgccagagccccctgtggcacagcaggccctccgggtgctcctcagagagggcgcggtggctgagtggtggtggcctggccctctgaggaaagctgtcctgtctctggacatttggcatggccagactctgaccccactgccctaggctcttaaatactcattgggagggtccgagtccttacctggcctagccccctcatttcacaagaagaagaatgaagtccaggaggagaagggctcattgcaggccacagaaagatttgatggtgcagcgatgagaattcctggttccaggctttgcatctggagcctttaccggttgactgttgccttccacacaaacagcctctgaaaagcactttctccatacataattctggagaagatgagggatcttgccctccaggagccttccttcctcccccaatgaggaaatcagtcactgcactggtgcaaaggcaagcagattggaatttgtgctcttcaccgattttctcagggaaagaccccttccccttgccagcagaggaacctgtagttttttccatttctttcttcagaaccaaagtatgtatcactcctcatgctcacagggattgacaggagagaattcaccaggatcttagctcaaaagacacagcctcagaatggccagatggattgcacgaaacctgacttggattcaccatcttcctcctgccataaggctgtgctcccacataacctcccagaagctccagggaagctttccaagagcaaaggcttggaaattgaatgttaagaaaattatgacataaattacatgtaaatagtgtatatgattaaatattgtccagttacatttacacac

SEQ ID NO: 18984 - DNA, 2681 bp, Homo sapiens
  source 1..2681: mol_type = unassigned DNA
attatccatgtaacagccatagcacaatcctgggtacatggtaagtccttggtaagtgttgcctgtgccacactattattatattacaggtgctgttgttccccaagtgtaaagtaaatgatattttattctcttcataagctatgttcccattgcaaaaggactgtgccctgaattttaaattagttaatttttagttaaaagtgcattttcccatgaagctaaaatgtaaatgaaggtcaggttcccattaccctaactcagaacatagctgaatatcttgtgtttatgtcaaaagctagtgggaaacaataatagtcatcagaacagataaatggcagaataaaaaagatttaaaaacccctcatcttgaatgttggtgtttgaagaaaagcaggtttgatagagaagccttgattagatgtaagggtaaatgtaatattctgtgatgattccaggagggtcttctgggcattttcaagggcatcgggtgtggatgataccggactttattttgtctaattgcattcttgagagagccttccctcttttccctacctttttccttattgcataggatctcatctgagtgactgtgtgctaatctcaggaaaggccttggaggccccaggcagttcctctgagcactctttatccctcactggatgggagctgaagggaggttgtatgcatcctttatataagtacttcccctgtggctgatttttccatatcagagaattttctctctcttagattttcttttttaattttggcttttggctctttgaagcttaaaagtgatgtttttagatggtatcccacagccaccttgcaaatattccaaagacatgattgtaagcctttgttccctgtaaaagattgctctgtattaaaacaaatccaccaaacaacaagtcatagacccgttagaaaccagcattctaaagcatggtttaagtgtgaacaggtgtttgtagcttatctgagactgacagtaggtaaaggggccaaggagagactgctacatggtggtacccaagataattctctgaagagagagacttttgtgtgaggaagacatttattatacagagtgatttattgcaattcttagctactccatcaagctagacttgtcaccatgtcccattaaaagggtttaagaagaattctttctcagaatcctgcattacagtagcatctgcaataaggagaaaattttcttctgggaatcactccaggaaaccttgacccatcctctacttagtcactcttatagagccctgcattttcttttgtagcatttatgacatgtgtaatgttacatttgtttgtgggattatttaaggaatgtctgtcatgtgagacaataagctttatgagtacaggcacctcttctgtcttatttcctatgccccagcacagtccctgacatctagtagaccttcaaaaagttttatggaatgaatgagtgaacaaatgatgcaaagtgttggttgcaggatatctctctcagtcttccaattcttaggagatcagaggcaagagctggtggcctttcaccgcctggctacagtgtactactccctgcacatgtatgagatggctgaggactgctacctgaagaccctgtccctctgtccaccatggctgcagagtcccaaggaggccctgtactatgccaaggtgtattatcgcctgggcagactcaccttctgccagctgaaggatgcccatgatgccactgagtacttccttctggccctggcagcagcggtcctgctgggtgatgaggagcttcaggacaccattaggagcaggctggacaacatctgccagagccccctgtggcacagcaggccctccgggtgctcctcagagagggcgcggtggctgagtggtggtggcctggccctctgaggaaagctgtcctgtctctggacatttggcatggccagactctgaccccactgccctaggctcttaaatactcattgggagggtccgagtccttacctggcctagccccctcatttcacaagaagaagaatgaagtccaggaggagaagggctcattgcaggccacagaaagatttgatggtgcagcgatgagaattcctggttccaggctttgcatctggagcctttaccggttgactgttgccttccacacaaacagcctctgaaaagcactttctccatacataattctggagaagatgagggatcttgccctccaggagccttccttcctcccccaatgaggaaatcagtcactgcactggtgcaaaggcaagcagattggaatttgtgctcttcaccgattttctcagggaaagaccccttccccttgccagcagaggaacctgtagttttttccatttctttcttcagaaccaaagtatgtatcactcctcatgctcacagggattgacaggagagaattcaccaggatcttagctcaaaagacacagcctcagaatggccagatggattgcacgaaacctgacttggattcaccatcttcctcctgccataaggctgtgctcccacataacctcccagaagctccagggaagctttccaagagcaaaggcttggaaattgaatgttaagaaaattatgacataaattacatgtaaatagtgtatatgattaaatattgtccagttacattt

SEQ ID NO: 18985 - DNA, 3077 bp, Homo sapiens
  source 1..3077: mol_type = unassigned DNA
ctgagtgttccagcttcctccacactcttgctcgcactgacatcacatctgtctaccggctcagtgggtttgaatccatccagaatcctccaaatgatctgagtggtgagtagcgatcatgctgaacctgacattcatccttgaggacagcacttctgtcctcttgccaagagcggccaccttaggtgcaggtgcccaaggttgctcaactttgcctgtccttacagcatcccagcctgaaggtttcaaggaggtcaggcctggcagagcctgggaggagcatcaggccgtggggtccagacagtccagcagctctgaggactccagcctggaggaggagctcctctcggccacctcagacagctatcgcctgccggagcctgatgaccttgatgacccggaactgctcatggacctaagcactggtcaggaggaggaggctgagaacttcgcccccatattggcttttctggatcatgagggttatgctgaccactttaagagtctctatgacttctccttctctttcctcacttcttccttttatagcttctctgaggaggatgagtttgtggcctacctggaggcatcaagaaagtgggccaagaagagccacatgacctgggcccatgcccgtctctgcttcctcctgggccggctgagcatcaggaaggtcaaactctctcaggccagggtgtacttcgaggaggccatccacattctcaatggagcatttgaggacctatccttggtggccactctgtacatcaatttggctgccatctacctgaaacagaggctgagacataaaggctccgccctgttggaaaaggcaggtgccctgctggcctgcctgcctgaccgtgagtctagtgccaagcatgaactcgacgtggtggcctacgtgctgcgccaggggattgtggtgggcagcagcccgctggaggccagggcctgctttctggccatccgcttgctcctgagcctaggccggcacgaggaggtcctgccctttgccgagcgcctgcagctcctctctggacaccctcctgcctctgaggctgtggccagtgttttgagttttctgtatgacaagaaatatcttccacaccttgcagtggcctctgtccagcaacatggtatccagagtgcccaagggatgtctcttcctatttggcaggtccaccttgtcctccagaacacaaccaagctccttggctttccttccccaggctggggtgaagtttctgccttggcctgcccaatgctcagacaggccctggctgcctgtgaggaactagcagaccggagcacccagagggccctgtgtctcatcctttccaaagtgtacctcgagcacaggtctcctgacggtgccatccactacctgagccaggccttggtgctagggcagctgctgggtgagcaggaatcctttgagtcttctctctgcctggcatgggcctatctcttagccagccaggccaagaaggctttggatgtgcttgagccactgctatgctccctgaaggagacagagagtctcactcaaaggggagtcatctataacctcctgggacttgcactccaaggtgaaggccgggtgaacagggcagccaagagctatcttcgggccttgaacagagcccaggaggtgggagatgtgcataaccaggcagtggctatggccaatcttggccacctgagccttaagtcctgggctcagcatccagccagaaactatctcctgcaggctgtacgactctattgtgaacttcaggccagtaaggagacagacatggaattagtacaggtgtttctctggttggcccaagttctggtgtctggacaccagctgacccatggccttctttgttatgaaatggcattgctgtttggcttaaggcatcgacatctaaagagtcagcttcaggccaccaaatccctctgccatttctacagctctgtgtccccaaaccctgaggcatgcatcacctaccatgagcactggctggccctggctcagcaactcagggaccgggagatggaagggaggctgctggagtccctggggcagctttatcggaacctaaataccgccaggtccctcaggaggtcactcacatgcatcaaggagagcctgcgtatcttcattgacctgggggagacagacaaggctgctgaggcctggcttggggcggggcgactccactacctcatgcaggaagacgagctggtggagctgtgcctgcaggcagccatccagacagccctgaagtcagaggagcctttgctggctctcaaactttatgaagaagcaggtgatgtgttcttcaatgggacccgccacaggcatcatgcagtggagtactaccgagctggagctgttcctttagcaaggaggttgaaggcggtgagaactgagctccggattttcaataagctgacagagctgcagattagcctcgaaggctatgagaaggctttggaatttgccaccctggccgccaggctcagcacagtcacaggagatcagaggcaagagctggtggcctttcaccgcctggctacagtgtactactccctgcacatgtatgagatggctgaggactgctacctgaagaccctgtccctctgtccaccatggctgcagagtcccaaggaggccctgtactatgccaaggtgtattatcgcctgggcagactcaccttctgccagctgaaggatgcccatgatgccactgagtacttccttctggccctggcagcagcggtcctgctgggtgatgaggagcttcaggacaccattaggagcaggctggacaacatctgccagagccccctgtggcacagcaggccctccgggtgctcctcagagagggcgcggtggctgagtggtggtggcctggccctctgaggaaagctgtcctgtctctggacatttggcatggccagactctgaccccactgccctaggctcttaaatactcattgggagggtccgagtccttacctggcctagccccctcatttcacaagaagaagaatgaagtccaggaggagaagggctcattgca

SEQ ID NO: 18986 - DNA, 4059 bp, Homo sapiens
  source 1..4059: mol_type = unassigned DNA
agggaggaggcgggaggagggacaccgttgggaggctgtcccttgcagcactcttctggcctgtgttcccaagggcctcggccagggtaggatggtacacacatgggtggctgcttctgcatccccagggagcggagtctgacccggggcccaggtaaagaaactccttccaaggatccaactgtatcgagtgagtgtatagcctcatctgaatacaaggaaaaatgttttctgccacagaacattaatccagacctgacactctccttctgtgtaaagagccgctccaggaggtgtgtaaatggacccctacaggaagctgctcggaggcggctctgggcactggagaatgaggaccaggaggtgcgcatgctgtttaaggacctctcagcaaggttggtcagtatccagtctcagagggcccagtttctcatcaccttcaagaccatggaggaaatctggaagttctccacctaccttaatttaggctacgtatccatgtgtctagaacatctcctctttgaccacaagtactggctcaactgcatattggtggaggatacagagatccaagtgtctgtagatgataaacacctggaaacaatatacctgggactcctgatacaggaaggccacttcttctgcagagccctgtgctccgtgactccaccagccgagaaggaaggggaatgcttgacactttgcaagaatgagttaatctcagtgaagatggcagaagctggctccgagttggaaggcgtgtctttggtgacaggtcagcggggcctggtactggtgtcagccttggagcctctgcctctccctttccaccagtggttcctaaagaattatccaggaagctgtggcctttccaggaagagggattggacaggctcctatcagattggcagaggacgctgtaaggccttgacgggttatgagccaggagaaaaggatgaactgaatttctaccagggagaaagcattgagatcatcggctttgtcatacctgggcttcagtggttcattggaaagtcgacaagttcaggacaagtgggctttgtccccaccaggaacatagatcctgattcttattccccaatgagcaggaactctgcctttctcagtgatgaggagagatgctccctgttggccctgggaagtgataagcagactgagtgttccagcttcctccacactcttgctcgcactgacatcacatctgtctaccggctcagtgggtttgaatccatccagaatcctccaaatgatctgagtgcatcccagcctgaaggtttcaaggaggtcaggcctggcagagcctgggaggagcatcaggccgtggggtccagacagtccagcagctctgaggactccagcctggaggaggagctcctctcggccacctcagacagctatcgcctgccggagcctgatgaccttgatgacccggaactgctcatggacctaagcactggtcaggaggaggaggctgagaacttcgcccccatattggcttttctggatcatgagggttatgctgaccactttaagagtctctatgacttctccttctctttcctcacttcttccttttatagcttctctgaggaggatgagtttgtggcctacctggaggcatcaagaaagtgggccaagaagagccacatgacctgggcccatgcccgtctctgcttcctcctgggccggctgagcatcaggaaggtcaaactctctcaggccagggtgtacttcgaggaggccatccacattctcaatggagcatttgaggacctatccttggtggccactctgtacatcaatttggctgccatctacctgaaacagaggctgagacataaaggctccgccctgttggaaaaggcaggtgccctgctggcctgcctgcctgaccgtgagtctagtgccaagcatgaactcgacgtggtggcctacgtgctgcgccaggggattgtggtgggcagcagcccgctggaggccagggcctgctttctggccatccgcttgctcctgagcctaggccggcacgaggaggtcctgccctttgccgagcgcctgcagctcctctctggacaccctcctgcctctgaggctgtggccagtgttttgagttttctgtatgacaagaaatatcttccacaccttgcagtggcctctgtccagcaacatggtatccagagtgcccaagggatgtctcttcctatttggcaggtccaccttgtcctccagaacacaaccaagctccttggctttccttccccaggctggggtgaagtttctgccttggcctgcccaatgctcagacaggccctggctgcctgtgaggaactagcagaccggagcacccagagggccctgtgtctcatcctttccaaagtgtacctcgagcacaggtctcctgacggtgccatccactacctgagccaggccttggtgctagggcagctgctgggtgagcaggaatcctttgagtcttctctctgcctggcatgggcctatctcttagccagccaggccaagaaggctttggatgtgcttgagccactgctatgctccctgaaggagacagagagtctcactcaaaggggagtcatctataacctcctgggacttgcactccaaggtgaaggccgggtgaacagggcagccaagagctatcttcgggccttgaacagagcccaggaggtgggagatgtgcataaccaggcagtggctatggccaatcttggccacctgagccttaagtcctgggctcagcatccagccagaaactatctcctgcaggctgtacgactctattgtgaacttcaggccagtaaggagacagacatggaattagtacaggtgtttctctggttggcccaagttctggtgtctggacaccagctgacccatggccttctttgttatgaaatggcattgctgtttggcttaaggcatcgacatctaaagagtcagcttcaggccaccaaatccctctgccatttctacagctctgtgtccccaaaccctgaggcatgcatcacctaccatgagcactggctggccctggctcagcaactcagggaccgggagatggaagggaggctgctggagtccctggggcagctttatcggaacctaaataccgccaggtccctcaggaggtcactcacatgcatcaaggagagcctgcgtatcttcattgacctgggggagacagacaaggctgctgaggcctggcttggggcggggcgactccactacctcatgcaggaagacgagctggtggagctgtgcctgcaggcagccatccagacagccctgaagtcagaggagcctttgctggctctcaaactttatgaagaagcaggtgatgtgttcttcaatgggacccgccacaggcatcatgcagtggagtactaccgagctggagctgttcctttagcaaggaggttgaaggcggtgagaactgagctccggattttcaataagctgacagagctgcagattagcctcgaaggctatgagaaggctttggaatttgccaccctggccgccaggctcagcacagtcacaggagatcagaggcaagagctggtggcctttcaccgcctggctacagtgtactactccctgcacatgtatgagatggctgaggactgctacctgaagaccctgtccctctgtccaccatggctgcagagtcccaaggaggccctgtactatgccaaggtgtattatcgcctgggcagactcaccttctgccagctgaaggatgcccatgatgccactgagtacttccttctggccctggcagcagcggtcctgctgggtgatgaggagcttcaggacaccattaggagcaggctggacaacatctgccagagccccctgtggcacagcaggccctccgggtgctcctcagagagggcgcggtggctgagtggtggtggcctggccctctgaggaaagctgtcctgtctctggacatttggcatggccagactctgaccccactgccctaggctcttaaatactcattgggagggtccgagt

SEQ ID NO: 18987 - DNA, 4002 bp, Homo sapiens
  source 1..4002: mol_type = unassigned DNA
ctgtcccttgcagcactcttctggcctgtgttcccaagggcctcggccagggtaggatggtacacacatgggtggctgcttctgcatccccagggagcggagtctgacccggggcccaggtaaagaaactccttccaaggatccaactgtatcgagtgagtgtatagcctcatctgaatacaaggaaaaatgttttctgccacagaacattaatccagacctgacactctccttctgtgtaaagagccgctccaggaggtgtgtaaatggacccctacaggaagctgctcggaggcggctctgggcactggagaatgaggaccaggaggtgcgcatgctgtttaaggacctctcagcaaggttggtcagtatccagtctcagagggcccagtttctcatcaccttcaagaccatggaggaaatctggaagttctccacctaccttaatttagaacatctcctctttgaccacaagtactggctcaactgcatattggtggaggatacagagatccaagtgtctgtagatgataaacacctggaaacaatatacctgggactcctgatacaggaaggccacttcttctgcagagccctgtgctccgtgactccaccagccgagaaggaaggggaatgcttgacactttgcaagaatgagttaatctcagtgaagatggcagaagctggctccgagttggaaggcgtgtctttggtgacaggtcagcggggcctggtactggtgtcagccttggagcctctgcctctccctttccaccagtggttcctaaagaattatccaggaagctgtggcctttccaggaagagggattggacaggctcctatcagattggcagaggacgctgtaaggccttgacgggttatgagccaggagaaaaggatgaactgaatttctaccagggagaaagcattgagatcatcggctttgtcatacctgggcttcagtggttcattggaaagtcgacaagttcaggacaagtgggctttgtccccaccaggaacatagatcctgattcttattccccaatgagcaggaactctgcctttctcagtgatgaggagagatgctccctgttggccctgggaagtgataagcagactgagtgttccagcttcctccacactcttgctcgcactgacatcacatctgtctaccggctcagtgggtttgaatccatccagaatcctccaaatgatctgagtgcatcccagcctgaaggtttcaaggaggtcaggcctggcagagcctgggaggagcatcaggccgtggggtccagacagtccagcagctctgaggactccagcctggaggaggagctcctctcggccacctcagacagctatcgcctgccggagcctgatgaccttgatgacccggaactgctcatggacctaagcactggtcaggaggaggaggctgagaacttcgcccccatattggcttttctggatcatgagggttatgctgaccactttaagagtctctatgacttctccttctctttcctcacttcttccttttatagcttctctgaggaggatgagtttgtggcctacctggaggcatcaagaaagtgggccaagaagagccacatgacctgggcccatgcccgtctctgcttcctcctgggccggctgagcatcaggaaggtcaaactctctcaggccagggtgtacttcgaggaggccatccacattctcaatggagcatttgaggacctatccttggtggccactctgtacatcaatttggctgccatctacctgaaacagaggctgagacataaaggctccgccctgttggaaaaggcaggtgccctgctggcctgcctgcctgaccgtgagtctagtgccaagcatgaactcgacgtggtggcctacgtgctgcgccaggggattgtggtgggcagcagcccgctggaggccagggcctgctttctggccatccgcttgctcctgagcctaggccggcacgaggaggtcctgccctttgccgagcgcctgcagctcctctctggacaccctcctgcctctgaggctgtggccagtgttttgagttttctgtatgacaagaaatatcttccacaccttgcagtggcctctgtccagcaacatggtatccagagtgcccaagggatgtctcttcctatttggcaggtccaccttgtcctccagaacacaaccaagctccttggctttccttccccaggctggggtgaagtttctgccttggcctgcccaatgctcagacaggccctggctgcctgtgaggaactagcagaccggagcacccagagggccctgtgtctcatcctttccaaagtgtacctcgagcacaggtctcctgacggtgccatccactacctgagccaggccttggtgctagggcagctgctgggtgagcaggaatcctttgagtcttctctctgcctggcatgggcctatctcttagccagccaggccaagaaggctttggatgtgcttgagccactgctatgctccctgaaggagacagagagtctcactcaaaggggagtcatctataacctcctgggacttgcactccaaggtgaaggccgggtgaacagggcagccaagagctatcttcgggccttgaacagagcccaggaggtgggagatgtgcataaccaggcagtggctatggccaatcttggccacctgagccttaagtcctgggctcagcatccagccagaaactatctcctgcaggctgtacgactctattgtgaacttcaggccagtaaggagacagacatggaattagtacaggtgtttctctggttggcccaagttctggtgtctggacaccagctgacccatggccttctttgttatgaaatggcattgctgtttggcttaaggcatcgacatctaaagagtcagcttcaggccaccaaatccctctgccatttctacagctctgtgtccccaaaccctgaggcatgcatcacctaccatgagcactggctggccctggctcagcaactcagggaccgggagatggaagggaggctgctggagtccctggggcagctttatcggaacctaaataccgccaggtccctcaggaggtcactcacatgcatcaaggagagcctgcgtatcttcattgacctgggggagacagacaaggctgctgaggcctggcttggggcggggcgactccactacctcatgcaggaagacgagctggtggagctgtgcctgcaggcagccatccagacagccctgaagtcagaggagcctttgctggctctcaaactttatgaagaagcaggtgatgtgttcttcaatgggacccgccacaggcatcatgcagtggagtactaccgagctggagctgttcctttagcaaggaggttgaaggcggtgagaactgagctccggattttcaataagctgacagagctgcagattagcctcgaaggctatgagaaggctttggaatttgccaccctggccgccaggctcagcacagtcacaggagatcagaggcaagagctggtggcctttcaccgcctggctacagtgtactactccctgcacatgtatgagatggctgaggactgctacctgaagaccctgtccctctgtccaccatggctgcagagtcccaaggaggccctgtactatgccaaggtgtattatcgcctgggcagactcaccttctgccagctgaaggatgcccatgatgccactgagtacttccttctggccctggcagcagcggtcctgctgggtgatgaggagcttcaggacaccattaggagcaggctggacaacatctgccagagccccctgtggcacagcaggccctccgggtgctcctcagagagggcgcggtggctgagtggtggtggcctggccctctgaggaaagctgtcctgtctctggacatttggcatggccagactctgaccccactgccctaggctcttaaatactcattgggagggtccgag

SEQ ID NO: 18988 - DNA, 4051 bp, Homo sapiens
  source 1..4051: mol_type = unassigned DNA
tcggccagggtaggatggtacacacatgggtggctgcttctgcatccccagggagcggagtctgacccggggcccaggtaaagaaactccttccaaggatccaactgtatcgagtgagtgtatagcctcatctgaatacaaggaaaaatgttttctgccacagaacattaatccagacctgacactctccttctgtgtaaagagccgctccaggaggtgtgtaaatggacccctacaggaagctgctcggaggcggctctgggcactggagaatgaggaccaggaggtgcgcatgctgtttaaggacctctcagcaaggttggtcagtatccagtctcagagggcccagtttctcatcaccttcaagaccatggaggaaatctggaagttctccacctaccttaatttaggctacgtatccatgtgtctagaacatctcctctttgaccacaagtactggctcaactgcatattggtggaggatacagagatccaagtgtctgtagatgataaacacctggaaacaatatacctgggactcctgatacaggaaggccacttcttctgcagagccctgtgctccgtgactccaccagccgagaaggaaggggaatgcttgacactttgcaagaatgagttaatctcagtgaagatggcagaagctggctccgagttggaaggcgtgtctttggtgacaggtggttcctaaagaattatccaggaagctgtggcctttccaggaagagggattggacaggctcctatcagattggcagaggacgctgtaaggccttgacgggttatgagccaggagaaaaggatgaactgaatttctaccagggagaaagcattgagatcatcggctttgtcatacctgggcttcagtggttcattggaaagtcgacaagttcaggacaagtgggctttgtccccaccaggaacatagatcctgattcttattccccaatgacttggtgtgtttcttcaatatgaagattcatgtctttcttcaattctggaaaattttcagtccttcttcctttgaatattgcctctctctcgttctttttagtctctcttctggaattcctattagaggagcaggaactctgcctttctcagtgatgaggagagatgctccctgttggccctgggaagtgataagcagactgagtgttccagcttcctccacactcttgctcgcactgacatcacatctgtctaccggctcagtgggtttgaatccatccagaatcctccaaatgatctgagtgcatcccagcctgaaggtttcaaggaggtcaggcctggcagagcctgggaggagcatcaggccgtggggtccagacagtccagcagctctgaggactccagcctggaggaggagctcctctcggccacctcagacagctatcgcctgccggagcctgatgaccttgatgacccggaactgctcatggacctaagcactggtcaggaggaggaggctgagaacttcgcccccatattggcttttctggatcatgagggttatgctgaccactttaagagtctctatgacttctccttctctttcctcacttcttccttttatagcttctctgaggaggatgagtttgtggcctacctggaggcatcaagaaagtgggccaagaagagccacatgacctgggcccatgcccgtctctgcttcctcctgggccggctgagcatcaggaaggtcaaactctctcaggccagggtgtacttcgaggaggccatccacattctcaatggagcatttgaggacctatccttggtggccactctgtacatcaatttggctgccatctacctgaaacagaggctgagacataaaggctccgccctgttggaaaaggcaggtgccctgctggcctgcctgcctgaccgtgagtctagtgccaagcatgaactcgacgtggtggcctacgtgctgcgccaggggattgtggtgggcagcagcccgctggaggccagggcctgctttctggccatccgcttgctcctgagcctaggccggcacgaggaggtcctgccctttgccgagcgcctgcagctcctctctggacaccctcctgcctctgaggctgtggccagtgttttgagttttctgtatgacaagaaatatcttccacaccttgcagtggcctctgtccagcaacatggtatccagagtgcccaagggatgtctcttcctatttggcaggtccaccttgtcctccagaacacaaccaagctccttggctttccttccccaggctggggtgaagtttctgccttggcctgcccaatgctcagacaggccctggctgcctgtgaggaactagcagaccggagcacccagagggccctgtgtctcatcctttccaaagtgtacctcgagcacaggtctcctgacggtgccatccactacctgagccaggccttggtgctagggcagctgctgggtgagcaggaatcctttgagtcttctctctgcctggcatgggcctatctcttagccagccaggccaagaaggctttggatgtgcttgagccactgctatgctccctgaaggagacagagagtctcactcaaaggggagtcatctataacctcctgggacttgcactccaaggtgaaggccgggtgaacagggcagccaagagctatcttcgggccttgaacagagcccaggaggtgggagatgtgcataaccaggcagtggctatggccaatcttggccacctgagccttaagtcctgggctcagcatccagccagaaactatctcctgcaggctgtacgactctattgtgaacttcaggccagtaaggagacagacatggaattagtacaggtgtttctctggttggcccaagttctggtgtctggacaccagctgacccatggccttctttgttatgaaatggcattgctgtttggcttaaggcatcgacatctaaagagtaagtatgtcccatgctgctgggaagctatagagaaaagtgttggatcaagttttatccatttcctatctcaagtcatctcattcatgtccctgctttgtgttcaggtcagcttcaggccaccaaatccctctgccatttctacagctctgtgtccccaaaccctgaggcatgcatcacctaccatgagcactggctggccctggctcagcaactcagggaccgggagatggaagggaggctgctggagtccctggggcagctttatcggaacctaaataccgccaggtgagtcagggtcaggaactgtcctagaagcagctttccttccttaaggagaaacagtgttctttcccacaggaagcaagtccaaatgtacatggtataggcggggctttgtgcaaaagagcaagggctctgcagccaccacaatgcatccatcacttattagtggtgtagccttgggcaagctatttaatttctccatgtctcagtttcctcatcagccaaaggaagataataatggcatctatcttatagtgttattgtgaaggataaatgagttaatgctcataaaacactcataactgtgcctgatacatagataggtctcagtaatgccactgttacttgtgtgtttctataaccacctgtcacaggatcatgactgaggctgcataattcagagaagtggcagttataccaaggacagaagaaccttcaggaggtcttcattgccaagggcaactggttttaaagaaaggtcacccccactgaaagcaggggtgtaaaatgtcatggtaaaaaaaagttttatcgggaacttacctttaaaatgaaattgtagattatgaaatgaagtgtgttttcaccttttagttaagaatatttagattacaatttcaactttgcattaagtcttagaataaacatggaataaaaggagtgttgactttttggcttaattgtgctgacaaaatgatgtaacagcacaatggagcattctttgttttgtgattgattttttaggactaccttaaaaatcctcatttttgtaaaaataaatcaaaacttaacagttt

SEQ ID NO: 18989 - DNA, 3276 bp, Homo sapiens
  source 1..3276: mol_type = unassigned DNA
gtgttcccaagggcctcggccagggtaggatggtacacacatgggtggctgcttctgcatccccagggagcggagtctgacccggggcccaggtaaagaaactccttccaaggatccaactgtatcgagtgagtgtatagcctcatctgaatacaaggaaaaatgttttctgccacagaacattaatccagacctgacactctccttctgtgtaaagagccgctccaggaggtgtgtaaatggacccctacaggaagctgctcggaggcggctctgggcactggagaatgaggaccaggaggtgcgcatgctgtttaaggtattataaaaaaaccaggccgggtgcggtggctcacgcctgtaatcccagcactttgggaggccaaggacctctcagcaaggttggtcagtatccagtctcagagggcccagtttctcatcaccttcaagaccatggaggaaatctggaagttctccacctaccttaatttaggctacgtatccatgtgtctagaacatctcctctttgaccacaagtactggctcaactgcatattggtggaggatacagagatccaagtgtctgtagatgataaacacctggaaacaatatacctgggactcctgatacaggaaggccacttcttctgcagagccctgtgctccgtgactccaccagccgagaaggaaggggaatgcttgacactttgcaagaatgagttaatctcagtgaagatggcagaagctggctccgagttggaaggcgtgtctttggtgacaggtcagcggggcctggtactggtgtcagccttggagcctctgcctctccctttccaccagtggttcctaaagaattatccaggaagctgtggcctttccaggaagagggattggacaggctcctatcagattggcagaggacgctgtaaggccttgacgggttatgagccaggagaaaaggatgaactgaatttctaccagggagaaagcattgagatcatcggctttgtcatacctgggcttcagtggttcattggaaagtcgacaagttcaggacaagtgggctttgtccccaccaggaacatagatcctgattcttattccccaatgagcaggaactctgcctttctcagtgatgaggagagatgctccctgttggccctgggaagtgataagcagactgagtgttccagcttcctccacactcttgctcgcactgacatcacatctgtctaccggctcagtgggtttgaatccatccagaatcctccaaatgatctgagtgcatcccagcctgaaggtttcaaggaggtcaggcctggcagagcctgggaggagcatcaggccgtggggtccagacagtccagcagctctgaggactccagcctggaggaggagctcctctcggccacctcagacagctatcgcctgccggagcctgatgaccttgatgacccggaactgctcatggacctaagcactggtcaggaggaggaggctgagaacttcgcccccatattggcttttctggatcatgagggttatgctgaccactttaagagtctctatgacttctccttctctttcctcacttcttccttttatagcttctctgaggaggatgagtttgtggcctacctggaggcatcaagaaagtgggccaagaagagccacatgacctgggcccatgcccgtctctgcttcctcctgggccggctgagcatcaggaaggtcaaactctctcaggccagggtgtacttcgaggaggccatccacattctcaatggagcatttgaggacctatccttggtggccactctgtacatcaatttggctgccatctacctgaaacagaggctgagacataaaggctccgccctgttggaaaaggcaggtgccctgctggcctgcctgcctgaccgtgagtctagtgccaagcatgaactcgacgtggtggcctacgtgctgcgccaggggattgtggtgggcagcagcccgctggaggccagggcctgctttctggccatccgcttgctcctgagcctaggccggcacgaggaggtcctgccctttgccgagcgcctgcagctcctctctggacaccctcctgcctctgaggctgtggccagtgttttgagttttctgtatgacaagaaatatcttccacaccttgcagtggcctctgtccagcaacatggtatccagagtgcccaagggatgtctcttcctatttggcaggtccaccttgtcctccagaacacaaccaagctccttggctttccttccccaggctggggtgaagtttctgccttggcctgcccaatgctcagacaggccctggctgcctgtgaggaactagcagaccggagcacccagagggccctgtgtctcatcctttccaaagtgtacctcgagcacaggtctcctgacggtgccatccactacctgagccaggccttggtgctagggcagctgctgggtgagcaggaatcctttgagtcttctctctgcctggcatgggcctatctcttagccagccaggccaagaaggctttggatgtgcttgagccactgctatgctccctgaaggagacagagagtctcactcaaaggggagtcatctataacctcctgggacttgcactccaaggtgaaggccgggtgaacagggcagccaagagctatcttcgggccttgaacagagcccaggaggtgggagatgtgcataaccaggcagtggctatggccaatcttggccacctgagccttaagtcctgggctcagcatccagccagaaactatctcctgcaggctgtacgactctattgtgaacttcaggccagtaaggagacagacatggaattagtacaggtgtttctctggttggcccaagttctggtgtctggacaccagctgacccatggccttctttgttatgaaatggcattgctgtttggcttaaggcatcgacatctaaagagtaagtatgtcccatgctgctgggaagctatagagaaaagtgttggatcaagttttatccatttcctatctcaagtcatctcattcatgtccctgctttgtgttcaggtcagcttcaggccaccaaatccctctgccatttctacagctctgtgtccccaaaccctgaggcatgcatcacctaccatgagcactggctggccctggctcagcaactcagggaccgggagatggaagggaggctgctggagtccctggggcagctttatcggaacctaaataccgccaggtgagtca

SEQ ID NO: 18990 - DNA, 721 bp, Homo sapiens
  source 1..721: mol_type = unassigned DNA
gtgtgtatgatccacaggcacttgttcttattgttgtttgtgtcattgccgttgttgtgggtggtgatcttgagaggcagttttaataggatattggggacagatgtcattttcataacttatatttggacttctgcacctcacgctaatttacctcaaatgacacactctccagatatcagagctccttgaatcacagcaacagagggatgggttttgagctcagaggaatgacccaactccacgcaagcaagccgctgaagtctctgcacgctgccgtccgactggccactgggtgtcactcttgtctatgtttgctgggtgtcagggtctgagaagaaattcagcctttgctgaagtctccatcttctccgtgagcaggaactctgcctttctcagtgatgaggagagatgctccctgttggccctgggaagtgataagcagactgagtgttccagcttcctccacactcttgctcgcactgacatcacatctgtctaccggctcagtgggtttgaatccatccagaatcctccaaatgatctgagtgcatcccagcctgaaggtttcaaggaggtcaggcctggcagagcctgggaggagcatcaggccgtggggtccagacagtccagcagctctgaggactccagcctggaggaggagctcctctcggccacctcagacagctatcgcctgccggagcctgatgaccttgatgac

SEQ ID NO: 18991 - DNA, 570 bp, Homo sapiens
  source 1..570: mol_type = unassigned DNA
ctgtagatgataaacacctggaaacaatatacctgggactcctgatacaggaaggccacttcttctgcagagccctgtgctccgtgactccaccagccgagaaggaaggggaatgcttgacactttgcaagaatgagttaatctcagtgaagatggcagaagctggctccgagttggaaggcgtgtctttggtgacaggtggttcctaaagaattatccaggaagctgtggcctttccaggaagagggattggacaggctcctatcagattggcagaggacgctgtaaggccttgacgggttatgagccaggagaaaaggatgaactgaatttctaccagggagaaagcattgagatcatcggctttgtcatacctgggcttcagtggttcattggaaagtcgacaagttcaggacaagtgggctttgtccccaccaggaacatagatcctgattcttattccccaatgagcaggaactctgcctttctcagtgatgaggagagatgctccctgttggccctgggaagtgataagcagactgagtgttccagcttcctccacactcttgc

SEQ ID NO: 18992 - DNA, 573 bp, Homo sapiens
  source 1..573: mol_type = unassigned DNA
gtgttcccaagggcctcggccagggtaggatggtacacacatgggtggctgcttctgcatccccagggagcggagtctgacccggggcccaggtaaagaaactccttccaaggatccaactgtatcgagtgagtgtatagcctcatctgaatacaaggaaaaatgttttctgccacagaacattaatccagcctgatccttctctctctgttctctttaagacctgacactctccttctgtgtaaagagccgctccaggaggtgtgtaaatggacccctacaggaagctgctcggaggcggctctgggcactggagaatgaggaccaggaggtgcgcatgctgtttaaggacctctcagcaaggttggtcagtatccagtctcagagggcccagtttctcatcaccttcaagaccatggaggaaatctggaagttctccacctaccttaatttaggctacgtatccatgtgtctagaacatctcctctttgaccacaagtactggctcaactgcatattggtggaggatacagagatccaagtgtctgtagatgataaacacctggaaacaat

SEQ ID NO: 18993 - DNA, 4522 bp, Homo sapiens
  source 1..4522: mol_type = unassigned DNA
tcccaagggcctcggccagggtaggatggtacacacatgggtggctgcttctgcatccccagggagcggagtctgacccggggcccaggtaaagaaactccttccaaggatccaactgtatcgagtgagtgtatagcctcatctgaatacaaggaaaaatgttttctgccacagaacattaatccagacctgacactctccttctgtgtaaagagccgctccaggaggtgtgtaaatggacccctacaggaagctgctcggaggcggctctgggcactggagaatgaggaccaggaggtgcgcatgctgtttaaggtgagcatgaaggaaacaggtgaatgctgagtactgacttgtgtcagtctgctacaggatccctagcatctaagacagcatctggaacaaagtaggtcctcggaaaaaacatctaataggtagactgaatgaatgaaagattccgtgcacattctctgcacaggagtggagaggagtgggcaggaactctgaatgaggcaacttggagttgctgagtcagagaaaatttggtttcaaatattctattagttgtgatctttgacaagttacttaacctatatagaatgggagttgttataatacctacctcattaagtatactttttttctaatgcggtaatttcaaattctttttttttactgtgatacaatatacataacataaaattttccattttaatcattttttaagtgtatgattctctatgacactaagtacattcacaacctatccacctccagaactttttcatcatctcaaactgaaattccatatctattaaacaataactcccattatccccatgtctcagctcctggtaaccgctaagtatatatttttaaagtaccaagattgccaatcaaaaaacaataccttataaatacttgggtgagaggaggaaaaaaacaataaagtaaataaaccaatttctcatctttcatagtaggtagataatatcttcatttgttaaaaccaaggaagaatggtatgatcaaattatttacagtttaggatgtattaagtaggagaactaaagtcagaaatggaaaaaagttgtttcaactagaggtagggaaaggataatattactttacataaactaatatgttctagttactttttacagtttctgcatgaatctggtacaaactgaaggagaaaagtgttctaaatgtcatgcagcaaaaaaagataatgtctggtttttcagggggaaaacgagattgtatgagtagagagcttggcattgtgtttggtgatatgtgttccataaacagtagctacatttttttgaattttattttattttttttaatatctggaattcaggaactgggagacactggctgctattggtactgtagattttcctttattttgagtctcatttggtatggcaggagcagggttgattgagagagctggtctgctgggctgaagcttgagtcagacatacttgtgggctacagttgaggcctggagtcagctagatctgaaatctaatcaaggctccgcagcttactccctgaaggtgaccttggacaatttacttaacctctctgtgccttggcccccttgaatatgcaacagggataatgccatttttcattagatctaagatgccattgattataaaatgcactgttattttatgtacttccaagaaagaaaacaaatgctgccaattatggttgatgacatacttccttatcttttagttcagaagtggttaaatgtgataaaagcacattttggaatggcccaaatactgtcattgcattctcttcatagcgcttttgtgggagttaaatgacatattgctcataaagctctgggtgaagtgccagggatgtagtaaattctctgtaagttgatttttacctagcaccccttccctaatgatggatctggggcctcctggggtttggtatggcagaaggaaccccagagttctgattttactgaactggggcttttcttctggattcttctatcttcttcttcctctaagtttccctcatgatagagctcctggagttggtactgatgacaggacctggcctggtggagggatgttctgaccgtcacttgttacagtcaactccggaggcttggacaaacaacagatttaagggaaaactaagtctgggcagtgattcagacctgctttttttttaggtattataaaaaaaccaggccgggtgcggtggctcacgcctgtaatcccagcactttgggaggccaaggtgggtggatcatgaggtcaagagatcgagaccatcctggccaacatggtgaaaccccatctctactaaaatacaaaaaattagccaagcgtggtggcaggtgcctgtagtcccagctactcgagaggctgaggcaggggaatcgcttgaacctgggaggcggaggttgcagtgagccgagattgcgccactgcactgcactccagcctggcgacagagcgagactccgtctaaaaaaacaaaacaaaagaaaacaaaaaaacccccaagaggcttatagtcttcctgtcactctccttgtgagcatgtaaattggaaagccttcctgggggacagttgggtgactgcattttaggattgaaaatgtgcatatccttgcatttccaattgcacctcttagaaatacatgtgttaaaacaattaagaatgtgcacaaagatttagctataaagatgtttatcacagtaccatttaggattttaaaaaatgtaaaacaatccaaacatgaaaccataagaaaatgataataattcattatgttaatgcaacaatggcacatgtaaccattaagaatggtgtaaactttgtgatgacatagaagatgctttgcaaaatattgcttagcagcaaaagaagattgcaaaataatttatgcaatgtgattctatatatgtgaaatagttatatggaaacttgtgtaggaaaaaagatgcaaatttattacatgaagatgttaacactgatgatctttaggagtagggactagggatgattatttttgtgtgttttggtttttctgttttcagctttgtattaataaaaataatcattagacatagactcataatcaaatttgctttcaagatgccttctatgaatcagcgtcctttatcctcccacatacacttttttttttaaacacaaaaagtagcattctttgcccatagttctattccctggcttcttttgctgctgccgctgtatagcagtattatatctggagcctatatcagtacacaaagagcttctttcttcttttctgtggctgcataatacaatatttcactttatggataaattgtactccattttaaccaatctcttattgatgaatatttaagttgtttccattttttggtgacgtaaaaatcaatgccataatcaagaagttcatacagagtatttggtctatataagagcttgctaatgggacacttctgtcatcccaggctgactcattgtttcctttacgtaggacctctcagcaaggttggtcagtatccagtctcagagggcccagtttctcatcaccttcaagaccatggaggaaatctggaagttctccacctaccttaatttaggtatggtacaaggcaagcaggtggaggatgacctcctccacaatttagccaatttgtagggcttgacatgaaggaattggcctggctctggtaattaagagaaatagagccttaaaaaagatggttaacttttgaaatttcacaaagtgcctcaaactaaatctaaggcaaatattaactattattctaaaatgccgtatgaagaagtttgcttttttgtgtccagggagatctttttttattagataaccaatcaattggaaaacagttattggtcatctactaagttcaaagtactgaaatagatgtgaacttggtgctagtgtgtgtgttttaaactatagggaactaatcttgagtaagatcgaagtagctgctcaacatagtcaatagcaaagttccagatgttttattgcatgtatttggaaaagagttaaagaaagaaatagagaaattatctgcttatagcaacctaaggctgcagcgttttctagaaggtaaagaaggacattgggatgcagcgtcagttccactgtggtgggaaatggttcacctgccttctccagacagaacaacttataatggggaagttaaagtgaagccaaacaaaacaacaggccacctaatttgatggatgttttatatctcccagaaaatgctgggctccatgccgacatacacaaggacagattttgtgcaggggtggagggtcaagatgactcatgactggaaaacataaggtgtatcttctcctcttatggtctggagatctgatctccacactacacatctccttcctgaccatcagacatcctcactattcaaactgtgctccatagaccggctcgttggcagcacatagagtctgttaaaaaaaa

SEQ ID NO: 18994 - DNA, 4785 bp, Homo sapiens
  source 1..4785: mol_type = unassigned DNA
atgcaattaatggccctggagcagaggtttgggtctgggttgccgggtgggggacagcctctgtgtctcatgatgtcttctccactccccccaccacccccccatttctcctgcctccctgccagcgattacatcattaaggagaagacagtcttgctgcagaagaaggacagtgaggggtttgggttcgtgctccggggggccaaggcgcagacccccatcgaggagttcacccccaccccggccttcccggcgctgcagtacctggagtcggtggacgagggtggcgtggcatggcgagctggactgcgaatgggagacttcctcatcgaggtgaacgggcagaatgtggtgaaggtcggccaccgacaggtggtgaacatgatccgccaagggggcaacacgctgatggtgaaggtggtgatggtcaccaggcacccggacatggatgaggcagtgcacaagaaagcaccccagcaggccaagcggctgccgcccccaaccatctccctgcgttccaaatctatgacctcagagctggaggagatggagtacgagcagcagccggcgccggtgcccagcatggagaaaaagcggaccgtgtatcagatggctctcaacaaactggacgaaatcctggccgcagctcaacagaccatcagtgcaagcgaaagccctggtcccggtggcctcgcgtccctgggcaaacaccgacccaaaggtttctttgccactgagtcgagcttcgatccccaccaccgtgcccagccaagttacgagcgtccttctttcctgcctccaggacctgggttgatgctccggcaaaaatctatcggtgcggcagaagatgacagaccttacctagcacccccagccatgaaattcagccgcagcctgtctgtgcctggttcggaggacattcccccgccacccaccacgtccccaccggagcctccctacagcacacctccagtcccctcctcctcagggcgcctcaccccctcccctcggggagggcccttcaaccctggctctggtggccccctccccgcctcctcccctgcatcctttgacgggccctcccctcccgacactcgcgtggggagccgcgagaagagcctgtaccacagtgggcccctgcccccggcccaccaccacccgccccaccaccaccaccaccacgccccgccccctcagccccaccaccaccacgcccacccccctcatcctcccgagatggagacaggcggctctcccgacgaccctccaccccgcctggctctggggccccagcccagcctgcgaggctggaggggcggcgggcccagcccgaccccgggggccccgtccccatcgcaccacggcagcgcgggcgggggcggcggctcctcccagggcccggctctacgctatttccagctgcccccgcgggcggccagcgcagccatgtacgtgcccgcccgctcgggccgcggccgcaagggcccgctggtcaagcagaccaaggtggaaggcgagccccagaagggcggcggcctcccgcccgcgccgtcgcccacgtccccggcctccccgcagccgccgcccgccgtggccgcgccctcggagaagaactccatccccatccccaccatcatcatcaaggccccgtccaccagtagcagcggccgcagcagccagggcagcagcaccgaggcggagccccccacccagccggagcccacgggaggcggcggcggcggcggctcctcgcccagccccgccccggccatgtcacccgtgcccccgtccccctcgcccgtgcccacccccgcctcgcccagcggcccggccacgctggacttcacgagccagttcggggccgccctggtgggggcggcccggagggaggggggctggcagaatgaggcgcgccggcgctccacgctgttcctgtccaccgacgcgggggacgaggacggcggggacggcgggctgggcacaggggcggccccgggcccgcggctgcgccactccaaatccatcgacgagggcatgttctccgccgagccctacctccgactggagtctgcgggcagcggcgcgggctacggcggctacggggccggtagccgagcctacgggggtggcgggggcagcagcgccttcaccagcttcctgcccccgcgacccctggtgcacccgctgaccggcaaggccctggatcccgcctccccgctggggctggccctggccgcccgcgagcgagcgctgaaggagtcctcggagggcggcggggccccccagccgcctcccaggcccccatcgccccgctacgaggccccgccgcccaccccgcaccaccactcgccccacgcccaccacgagccagtgctgcgtctctggggggcctccccgccggaccctgcgcgccgggagctggggtacagggccgggctgggcagccaggagaagtcccttcccgccagcccgcccgccgcccggcgttccctgctacaccgcctgccgcccaccgctcccggggtggggcccctcctgctgcagctggggacggagcccccggccccgcaccccggagtaagcaagccctggaggtccgcagcccccgaagaacccgagcggctgccgctgcacgtgcggttccttgaaaactgccagccccgggcccctgtgacgagcggaaggggtcccccctcggaggacgggccgggggtcccgccgcccagcccacgccggtccgtgcccccctccccgacctccccgagggccagcgaagagaacgggctgcccctgctggtcctgccgcctcccgccccctcggtggatgtggaagatggcgaattccttttcgtggaaccgctgcctccgcctctggaattctccaacagcttcgaaaagccagagtcgcccctcacgcctgggcctccccacccgctgcccgacacacctgcccctgccaccccgttaccccctgtgccacccccggctgtggccgcagcccctcccaccctggactccaccgcatccagcctgacatcctatgacagcgaggtggccaccctgacccagggggcctccgccgctcctggggacccccatccaccaggcccgcctgccccagcagcaccggctcccgctgccccacagcctggcccggaccctccgcctggcacggattctggcatcgaggaggtggacagtcggagcagcagtgaccacccactggagaccatcagcagcgcctccacgctgagcagcctatctgccgaaggtggtggcagcgcagggggtgggggcggggctggggccggtgtggccagtgggccggagcttctggacacctatgtggcctacctggacggccaggcctttgggggcagcagtactcccggcccgccataccctcctcagctcatgactccctctaagctccggggccgggcgctaggagccagcggaggcctgcggcctggccccagcgggggactccgagaccctgttacccccaccagccccaccgtctcggtgacaggggctggaaccgatgggctgctggccctgcgtgcttgttcaggaccccccacggcaggcgtggcggggggtccggtggctgtagagccagaagtcccaccggtgcccttgccgacggcctcctctctgccccggaagctgctgccctgggaggagggcccgggcccaccgccaccacctctgcccgggcccttggcccagcctcaggcctcagccttggccacagtaaaagccagcatcatcagtgaactcagctccaagcttcagcagtttgggggctcctcggcagctggcggcgctctgccctgggcccgaggaggcagtgggggaggcggagacagccaccacgggggagccagctatgtccccgagaggacctcctccctgcagcggcagagactctccgacgactcccagtcctcactcctctccaagcctgtcagcagcctgtttcagaactggcccaaaccacctctgccgccactccccaccggaacaggggtctcccctacagccgctgcggccccaggggccacctcaccctcagcctcctcctcctccacgtccacccgccacctccagggcgtggagttcgagatgcggccccctctgctccgccgggcccccagcccctcgctgctgcccgcctcggagcacaaggtcagccctgcgcccaggccctcgtccctgcccatcctgccttccggacccctctacccaggcctctttgacatccgtggctccccaactggaggggcaggaggctcggctgaccccttcgccccagtctttgtgccgccacacccggggatatccggggggctcgggggagccttgtcaggggcctcgcgctccctctcaccgacccgcctgctctcgctgcccccggacaagccgtttggcgctaaacctctggggttctggaccaagttcgacgtggctgattggctggagtggctgggtttggcggagcaccgagcccagttcctggaccacgagatcgatggctcccacctgcccgccttgaccaaggaggactacgtcgatctaggtgtgaccagggtgggccaccgcatgaacatcgaccgggctctcaaattcttcctggagaggtgatggctggcctggacggaccagccccgtccacagaactcttgagcctgctggcctcttgacctctgacccctgactgtcattctctccccgggccagggactctgttcaaactgcgccctgccctcatctcccaaggcc

SEQ ID NO: 18995 - DNA, 6643 bp, Homo sapiens
  source 1..6643: mol_type = unassigned DNA
gtcgccccgtggccccacaatgacccacagccccgcgacaagcgaggacgaggaacgccacagtgccagcgagtgtcccgaggggggctcagagtccgacagctccccagacgggccaggtcgaggcccccgggggacccggggccagggcagtggggcacctggtagcctggcctctgttagaggcctccagggccgctcaatgtccgtcccagacgacgcccacttcagcatgatggtcttcaggattggcatcccggacctgcaccagacaaaatgccttcgcttcaaccccgatgccaccatctggacggccaagcagcaggtgctctgtgccctgagcgagagcctgcaggatgtgctcaactatggcctgttccaaccggccacctccggccgcgatgccaacttcctggaggaggagaggctgctgcgggagtacccccagtcctttgagaagggggtcccctacctggagttccgatacaagacccgagtttacaaacagaccaacctggatgagaagcagctggccaagttgcacacgaagacggggttgaagaagttcctggagtatgtgcagctcgggacatctgacaaggtggcgcggctgctggacaaggggctggaccccaattaccatgactcggattcgggagagacccccttgacactggcggcccagaccgaaggctctgtagaggtgattcgaaccctgtgcctgggcggggcccacattgacttccgggcccgggatggcatgaccgcactgcataaggccgcatgcgcccgacactgcctggcactcacggcgctcctggaccttgggggttcccccaactacaaggaccgtcgggggctgacccctctgttccacacggccatggtgggtggtgacccccgatgctgcgagctgctcctgttcaacagggcccagctgggcatagctgatgagaacggctggcaggaaatccaccaggcctgccagcggggtcactctcagcacctggagcatctgcttttctacggggctgagcctggagcccagaacgcctcggggaacacggctctgcacatctgcgccctctacaacaaggagacctgtgccaggatcctcctgtatcgaggtgccgacaaggatgtgaagaacaacaacggacagacccccttccaggtggcagtgattgctgggaattttgagctgggggagctgatccgaaaccaccgagaacaggatgtggtgcccttccaggagtcccccaagtacgcggcccggcgacgggggcccccaggcacagggctgacggtgcccccggcgctgctgcgggccaacagtgacaccagcatggcgctgcccgactggatggtgttctccgccccgggggccgcgtcctctggggcccctggccctacctcagggtcccagggccagtcgcagccctcggcccccaccaccaagctcagcagcgggaccctccgaagtgccagcagcccccggggtgccagggcccgctctccatcccgagggaggcaccctgaggacgccaagaggcagccccgaggccggcccagctccagcgggacaccccgggaagggccagccgggggcacggggggctcagggggccccgggggctccctgggcagccgcgggaggcggaggaagctctactcagcggtacccggacgctccttcatggctgtgaagtcctaccaggcccaagccgagggggagatctccctgagcaagggcgagaagatcaaagtacttagcatcggggaaggaggcttctgggaaggccaggtcaaaggtcgtgttggctggttcccctctgactgcctggaagaagtggcgaatcgctctcaggagagcaagcaagaaagccgcagtgacaaggcaaagagactcttccggcattataccgtgggctcctacgacagctttgatgccccaagcttaatggatgggattggcccagggagcgattacatcattaaggagaagacagtcttgctgcagaagaaggacagtgaggggtttgggttcgtgctccggggggccaaggcgcagacccccatcgaggagttcacccccaccccggccttcccggcgctgcagtacctggagtcggtggacgagggtggcgtggcatggcgagctggactgcgaatgggagacttcctcatcgaggtgaacgggcagaatgtggtgaaggtcggccaccgacaggtggtgaacatgatccgccaagggggcaacacgctgatggtgaaggtggtgatggtcaccaggcacccggacatggatgaggcagtgcacaagaaagcaccccagcaggccaagcggctgccgcccccaaccatctccctgcgttccaaatctatgacctcagagctggaggagatggagtacgagcagcagccggcgccggtgcccagcatggagaaaaagcggaccgtgtatcagatggctctcaacaaactggacgaaatcctggccgcagctcaacagaccatcagtgcaagcgaaagccctggtcccggtggcctcgcgtccctgggcaaacaccgacccaaaggtttctttgccactgagtcgagcttcgatccccaccaccgtgcccagccaagttacgagcgtccttctttcctgcctccaggacctgggttgatgctccggcaaaaatctatcggtgcggcagaagatgacagaccttacctagcacccccagccatgaaattcagccgcagcctgtctgtgcctggttcggaggacattcccccgccacccaccacgtccccaccggagcctccctacagcacacctccagtcccctcctcctcagggcgcctcaccccctcccctcggggagggcccttcaaccctggctctggtggccccctccccgcctcctcccctgcatcctttgacgggccctcccctcccgacactcgcgtggggagccgcgagaagagcctgtaccacagtgggcccctgcccccggcccaccaccacccgccccaccaccaccaccaccacgccccgccccctcagccccaccaccaccacgcccacccccctcatcctcccgagatggagacaggcggctctcccgacgaccctccaccccgcctggctctggggccccagcccagcctgcgaggctggaggggcggcgggcccagcccgaccccgggggccccgtccccatcgcaccacggcagcgcgggcgggggcggcggctcctcccagggcccggctctacgctatttccagctgcccccgcgggcggccagcgcagccatgtacgtgcccgcccgctcgggccgcggccgcaagggcccgctggtcaagcagaccaaggtggaaggcgagccccagaagggcggcggcctcccgcccgcgccgtcgcccacgtccccggcctccccgcagccgccgcccgccgtggccgcgccctcggagaagaactccatccccatccccaccatcatcatcaaggccccgtccaccagtagcagcggccgcagcagccagggcagcagcaccgaggcggagccccccacccagccggagcccacgggaggcggcggcggcggcggctcctcgcccagccccgccccggccatgtcacccgtgcccccgtccccctcgcccgtgcccacccccgcctcgcccagcggcccggccacgctggacttcacgagccagttcggggccgccctggtgggggcggcccggagggaggggggctggcagaatgaggcgcgccggcgctccacgctgttcctgtccaccgacgcgggggacgaggacggcggggacggcgggctgggcacaggggcggccccgggcccgcggctgcgccactccaaatccatcgacgagggcatgttctccgccgagccctacctccgactggagtctgcgggcagcggcgcgggctacggcggctacggggccggtagccgagcctacgggggtggcgggggcagcagcgccttcaccagcttcctgcccccgcgacccctggtgcacccgctgaccggcaaggccctggatcccgcctccccgctggggctggccctggccgcccgcgagcgagcgctgaaggagtcctcggagggcggcggggccccccagccgcctcccaggcccccatcgccccgctacgaggccccgccgcccaccccgcaccaccactcgccccacgcccaccacgagccagtgctgcgtctctggggggcctccccgccggaccctgcgcgccgggagctggggtacagggccgggctgggcagccaggagaagtcccttcccgccagcccgcccgccgcccggcgttccctgctacaccgcctgccgcccaccgctcccggggtggggcccctcctgctgcagctggggacggagcccccggccccgcaccccggagtaagcaagccctggaggtccgcagcccccgaagaacccgagcggctgccgctgcacgtgcggttccttgaaaactgccagccccgggcccctgtgacgagcggaaggggtcccccctcggaggacgggccgggggtcccgccgcccagcccacgccggtccgtgcccccctccccgacctccccgagggccagcgaagagaacgggctgcccctgctggtcctgccgcctcccgccccctcggtggatgtggaagatggcgaattccttttcgtggaaccgctgcctccgcctctggaattctccaacagcttcgaaaagccagagtcgcccctcacgcctgggcctccccacccgctgcccgacacacctgcccctgccaccccgttaccccctgtgccacccccggctgtggccgcagcccctcccaccctggactccaccgcatccagcctgacatcctatgacagcgaggtggccaccctgacccagggggcctccgccgctcctggggacccccatccaccaggcccgcctgccccagcagcaccggctcccgctgccccacagcctggcccggaccctccgcctggcacggattctggcatcgaggaggtggacagtcggagcagcagtgaccacccactggagaccatcagcagcgcctccacgctgagcagcctatctgccgaaggtggtggcagcgcagggggtgggggcggggctggggccggtgtggccagtgggccggagcttctggacacctatgtggcctacctggacggccaggcctttgggggcagcagtactcccggcccgccataccctcctcagctcatgactccctctaagctccggggccgggcgctaggagccagcggaggcctgcggcctggccccagcgggggactccgagaccctgttacccccaccagccccaccgtctcggtgacaggggctggaaccgatgggctgctggccctgcgtgcttgttcaggaccccccacggcaggcgtggcggggggtccggtggctgtagagccagaagtcccaccggtgcccttgccgacggcctcctctctgccccggaagctgctgccctgggaggagggcccgggcccaccgccaccacctctgcccgggcccttggcccagcctcaggcctcagccttggccacagtaaaagccagcatcatcagtgaactcagctccaagcttcagcagtttgggggctcctcggcagctggcggcgctctgccctgggcccgaggaggcagtgggggaggcggagacagccaccacgggggagccagctatgtccccgagaggacctcctccctgcagcggcagagactctccgacgactcccagtcctcactcctctccaagcctgtcagcagcctgtttcagaactggcccaaaccacctctgccgccactccccaccggaacaggggtctcccctacagccgctgcggccccaggggccacctcaccctcagcctcctcctcctccacgtccacccgccacctccagggcgtggagttcgagatgcggccccctctgctccgccgggcccccagcccctcgctgctgcccgcctcggagcacaaggtcagccctgcgcccaggccctcgtccctgcccatcctgccttccggacccctctacccaggcctctttgacatccgtggctccccaactggaggggcaggaggctcggctgaccccttcgccccagtctttgtgccgccacacccggggatatccggggggctcgggggagccttgtcaggggcctcgcgctccctctcaccgacccgcctgctctcgctgcccccggacaagccgtttggcgctaaacctctggggttctggaccaagttcgacgtggctgattggctggagtggctgggtttggcggagcaccgagcccagttcctggaccacgagatcgatggctcccacctgcccgccttgaccaaggaggactacgtcgatctaggtgtgaccagggtgggccaccgcatgaacatcgaccgggctctcaaattcttcctggagaggtgatggctggcctggacggaccagccccgtccacagaactcttgagcctgctggcctcttgacctctgacccctgactgtcattctctccccgggccagggactctgttcaaactgcgccctgccctcatctcccaaggcc

SEQ ID NO: 18996 - DNA, 6622 bp, Homo sapiens
  source 1..6622: mol_type = unassigned DNA
ggccgcgggcgccgccgaccgggactcagcagccccgccaggcagccgcctgtgatgctgccgtcccccgtcgccccgtggccccacaatgacccacagccccgcgacaagcgaggacgaggaacgccacagtgccagcgagtgtcccgaggggggctcagagtccgacagctccccagacgggccaggtcgaggcccccgggggacccggggccagggcagtggggcacctggtagcctggcctctgttagaggcctccagggccgctcaatgtccgtcccagacgacgcccacttcagcatgatggtcttcaggattggcatcccggacctgcaccagacaaaatgccttcgcttcaaccccgatgccaccatctggacggccaagcagcaggtgctctgtgccctgagcgagagcctgcaggatgtgctcaactatggcctgttccaaccggccacctccggccgcgatgccaacttcctggaggaggagaggctgctgcgggagtacccccagtcctttgagaagggggtcccctacctggagttccgatacaagacccgagtttacaaacagaccaacctggatgagaagcagctggccaagttgcacacgaagacggggttgaagaagttcctggagtatgtgcagctcgggacatctgacaaggtggcgcggctgctggacaaggggctggaccccaattaccatgactcggattcgggagagacccccttgacactggcggcccagaccgaaggctctgtagaggtgattcgaaccctgtgcctgggcggggcccacattgacttccgggcccgggatggcatgaccgcactgcataaggccgcatgcgcccgacactgcctggcactcacggcgctcctggaccttgggggttcccccaactacaaggaccgtcgggggctgacccctctgttccacacggccatggtgggtggtgacccccgatgctgcgagctgctcctgttcaacagggcccagctgggcatagctgatgagaacggctggcaggaaatccaccaggcctgccagcggggtcactctcagcacctggagcatctgcttttctacggggctgagcctggagcccagaacgcctcggggaacacggctctgcacatctgcgccctctacaacaaggagacctgtgccaggatcctcctgtatcgaggtgccgacaaggatgtgaagaacaacaacggacagacccccttccaggtggcagtgattgctgggaattttgagctgggggagctgatccgaaaccaccgagaacaggatgtggtgcccttccaggagtcccccaagtacgcggcccggcgacgggggcccccaggcacagggctgacggtgcccccggcgctgctgcgggccaacagtgacaccagcatggcgctgcccgactggatggtgttctccgccccgggggccgcgtcctctggggcccctggccctacctcagggtcccagggccagtcgcagccctcggcccccaccaccaagctcagcagcgggaccctccgaagtgccagcagcccccggggtgccagggcccgctctccatcccgagggaggcaccctgaggacgccaagaggcagccccgaggccggcccagctccagcgggacaccccgggaagggccagccgggggcacggggggctcagggggccccgggggctccctgggcagccgcgggaggcggaggaagctctactcagcggtacccggacgctccttcatggctgtgaagtcctaccaggcccaagccgagggggagatctccctgagcaagggcgagaagatcaaagtacttagcatcggggaaggaggcttctgggaaggccaggtcaaaggtcgtgttggctggttcccctctgactgcctggaagaagtggcgaatcgctctcaggagagcaagcaagaaagccgcagtgacaaggcaaagagactcttccggcattataccgtgggctcctacgacagctttgatgccccaagcttaatggatgggattggcccagggagcgattacatcattaaggagaagacagtcttgctgcagaagaaggacagtgaggggtttgggttcgtgctccggggggccaaggcgcagacccccatcgaggagttcacccccaccccggccttcccggcgctgcagtacctggagtcggtggacgagggtggcgtggcatggcgagctggactgcgaatgggagacttcctcatcgaggtgaacgggcagaatgtggtgaaggtcggccaccgacaggtggtgaacatgatccgccaagggggcaacacgctgatggtgaaggtggtgatggtcaccaggcacccggacatggatgaggcagtgcacaagaaagcaccccagcaggccaagcggctgccgcccccaaccatctccctgcgttccaaatctatgacctcagagctggaggagatggtctccccctggaagaagaagagtgagtacgagcagcagccggcgccggtgcccagcatggagaaaaagcggaccgtgtatcagatggctctcaacaaactggacgaaatcctggccgcagctcaacagaccatcagtgcaagcgaaagccctggtcccggtggcctcgcgtccctgggcaaacaccgacccaaaggtttctttgccactgagtcgagcttcgatccccaccaccgtgcccagccaagttacgagcgtccttctttcctgcctccaggacctgggttgatgctccggcaaaaatctatcggtgcggcagaagatgacagaccttacctagcacccccagccatgaaattcagccgcagcctgtctgtgcctggttcggaggacattcccccgccacccaccacgtccccaccggagcctccctacagcacacctccagtcccctcctcctcagggcgcctcaccccctcccctcggggagggcccttcaaccctggctctggtggccccctccccgcctcctcccctgcatcctttgacgggccctcccctcccgacactcgcgtggggagccgcgagaagagcctgtaccacagtgggcccctgcccccggcccaccaccacccgccccaccaccaccaccaccacgccccgccccctcagccccaccaccaccacgcccacccccctcatcctcccgagatggagacaggcggctctcccgacgaccctccaccccgcctggctctggggccccagcccagcctgcgaggctggaggggcggcgggcccagcccgaccccgggggccccgtccccatcgcaccacggcagcgcgggcgggggcggcggctcctcccagggcccggctctacgctatttccagctgcccccgcgggcggccagcgcagccatgtacgtgcccgcccgctcgggccgcggccgcaagggcccgctggtcaagcagaccaaggtggaaggcgagccccagaagggcggcggcctcccgcccgcgccgtcgcccacgtccccggcctccccgcagccgccgcccgccgtggccgcgccctcggagaagaactccatccccatccccaccatcatcatcaaggccccgtccaccagtagcagcggccgcagcagccagggcagcagcaccgaggcggagccccccacccagccggagcccacgggaggcggcggcggcggcggctcctcgcccagccccgccccggccatgtcacccgtgcccccgtccccctcgcccgtgcccacccccgcctcgcccagcggcccggccacgctggacttcacgagccagttcggggccgccctggtgggggcggcccggagggaggggggctggcagaatgaggcgcgccggcgctccacgctgttcctgtccaccgacgcgggggacgaggacggcggggacggcgggctgggcacaggggcggccccgggcccgcggctgcgccactccaaatccatcgacgagggcatgttctccgccgagccctacctccgactggagtctgcgggcagcggcgcgggctacggcggctacggggccggtagccgagcctacgggggtggcgggggcagcagcgccttcaccagcttcctgcccccgcgacccctggtgcacccgctgaccggcaaggccctggatcccgcctccccgctggggctggccctggccgcccgcgagcgagcgctgaaggagtcctcggagggcggcggggccccccagccgcctcccaggcccccatcgccccgctacgaggccccgccgcccaccccgcaccaccactcgccccacgcccaccacgagccagtgctgcgtctctggggggcctccccgccggaccctgcgcgccgggagctggggtacagggccgggctgggcagccaggagaagtcccttcccgccagcccgcccgccgcccggcgttccctgctacaccgcctgccgcccaccgctcccggggtggggcccctcctgctgcagctggggacggagcccccggccccgcaccccggagtaagcaagccctggaggtccgcagcccccgaagaacccgagcggctgccgctgcacgtgcggttccttgaaaactgccagccccgggcccctgtgacgagcggaaggggtcccccctcggaggacgggccgggggtcccgccgcccagcccacgccggtccgtgcccccctccccgacctccccgagggccagcgaagagaacgggctgcccctgctggtcctgccgcctcccgccccctcggtggatgtggaagatggcgaattccttttcgtggaaccgctgcctccgcctctggaattctccaacagcttcgaaaagccagagtcgcccctcacgcctgggcctccccacccgctgcccgacacacctgcccctgccaccccgttaccccctgtgccacccccggctgtggccgcagcccctcccaccctggactccaccgcatccagcctgacatcctatgacagcgaggtggccaccctgacccagggggcctccgccgctcctggggacccccatccaccaggcccgcctgccccagcagcaccggctcccgctgccccacagcctggcccggaccctccgcctggcacggattctggcatcgaggaggtggacagtcggagcagcagtgaccacccactggagaccatcagcagcgcctccacgctgagcagcctatctgccgaaggtggtggcagcgcagggggtgggggcggggctggggccggtgtggccagtgggccggagcttctggacacctatgtggcctacctggacggccaggcctttgggggcagcagtactcccggcccgccataccctcctcagctcatgactccctctaagctccggggccgggcgctaggagccagcggaggcctgcggcctggccccagcgggggactccgagaccctgttacccccaccagccccaccgtctcggtgacaggggctggaaccgatgggctgctggccctgcgtgcttgttcaggaccccccacggcaggcgtggcggggggtccggtggctgtagagccagaagtcccaccggtgcccttgccgacggcctcctctctgccccggaagctgctgccctgggaggagggcccgggcccaccgccaccacctctgcccgggcccttggcccagcctcaggcctcagccttggccacagtaaaagccagcatcatcagtgaactcagctccaagcttcagcagtttgggggctcctcggcagctggcggcgctctgccctgggcccgaggaggcagtgggggaggcggagacagccaccacgggggagccagctatgtccccgagaggacctcctccctgcagcggcagagactctccgacgactcccagtcctcactcctctccaagcctgtcagcagcctgtttcagaactggcccaaaccacctctgccgccactccccaccggaacaggggtctcccctacagccgctgcggccccaggggccacctcaccctcagcctcctcctcctccacgtccacccgccacctccagggcgtggagttcgagatgcggccccctctgctccgccgggcccccagcccctcgctgctgcccgcctcggagcacaaggtcagccctgcgcccaggccctcgtccctgcccatcctgccttccggacccctctacccaggcctctttgacatccgtggctccccaactggaggggcaggaggctcggctgaccccttcgccccagtctttgtgccgccacacccggggatatccggggggctcgggggagccttgtcaggggcctcgcgctccctctcaccgacccgcctgctctcgctgcccccggacaagccgtttggcgctaaacctctggggttctggaccaagttcgacgtggctgattggctggagtggctgggtttggcggagcaccgagcccagttcctggaccacgagatcgatggctcccacctgcccgccttgaccaaggaggactacgtcgatctaggtgtgaccagggtgggccaccgcatgaacatcgaccgggctctcaaattcttcctggagaggtgatggctggcctggacggaccagccc

SEQ ID NO: 18997 - DNA, 6459 bp, Homo sapiens
  source 1..6459: mol_type = unassigned DNA
atgacccacagccccgcgacaagcgaggacgaggaacgccacagtgccagcgagtgtcccgaggggggctcagagtccgacagctccccagacgggccaggtcgaggcccccgggggacccggggccagggcagtggggcacctggtagcctggcctctgttagaggcctccagggccgctcaatgtccgtcccagacgacgcccacttcagcatgatggtcttcaggattggcatcccggacctgcaccagacaaaatgccttcgcttcaaccccgatgccaccatctggacggccaagcagcaggtgctctgtgccctgagcgagagcctgcaggatgtgctcaactatggcctgttccaaccggccacctccggccgcgatgccaacttcctggaggaggagaggctgctgcgggagtacccccagtcctttgagaagggggtcccctacctggagttccgatacaagacccgagtttacaaacagaccaacctggatgagaagcagctggccaagttgcacacgaagacggggttgaagaagttcctggagtatgtgcagctcgggacatctgacaaggtggcgcggctgctggacaaggggctggaccccaattaccatgactcggattcgggagagacccccttgacactggcggcccagaccgaaggctctgtagaggtgattcgaaccctgtgcctgggcggggcccacattgacttccgggcccgggatggcatgaccgcactgcataaggccgcatgcgcccgacactgcctggcactcacggcgctcctggaccttgggggttcccccaactacaaggaccgtcgggggctgacccctctgttccacacggccatggtgggtggtgacccccgatgctgcgagctgctcctgttcaacagggcccagctgggcatagctgatgagaacggctggcaggaaatccaccaggcctgccagcggggtcactctcagcacctggagcatctgcttttctacggggctgagcctggagcccagaacgcctcggggaacacggctctgcacatctgcgccctctacaacaaggagacctgtgccaggatcctcctgtatcgaggtgccgacaaggatgtgaagaacaacaacggacagacccccttccaggtggcagtgattgctgggaattttgagctgggggagctgatccgaaaccaccgagaacaggatgtggtgcccttccaggagtcccccaagtacgcggcccggcgacgggggcccccaggcacagggctgacggtgcccccggcgctgctgcgggccaacagtgacaccagcatggcgctgcccgactggatggtgttctccgccccgggggccgcgtcctctggggcccctggccctacctcagggtcccagggccagtcgcagccctcggcccccaccaccaagctcagcagcgggaccctccgaagtgccagcagcccccggggtgccagggcccgctctccatcccgagggaggcaccctgaggacgccaagaggcagccccgaggccggcccagctccagcgggacaccccgggaagggccagccgggggcacggggggctcagggggccccgggggctccctgggcagccgcgggaggcggaggaagctctactcagcggtacccggacgctccttcatggctgtgaagtcctaccaggcccaagccgagggggagatctccctgagcaagggcgagaagatcaaagtacttagcatcggggaaggaggcttctgggaaggccaggtcaaaggtcgtgttggctggttcccctctgactgcctggaagaagtggcgaatcgctctcaggagagcaagcaagaaagccgcagtgacaaggcaaagagactcttccggcattataccgtgggctcctacgacagctttgatgccccaagcgattacatcattaaggagaagacagtcttgctgcagaagaaggacagtgaggggtttgggttcgtgctccggggggccaaggcgcagacccccatcgaggagttcacccccaccccggccttcccggcgctgcagtacctggagtcggtggacgagggtggcgtggcatggcgagctggactgcgaatgggagacttcctcatcgaggtgaacgggcagaatgtggtgaaggtcggccaccgacaggtggtgaacatgatccgccaagggggcaacacgctgatggtgaaggtggtgatggtcaccaggcacccggacatggatgaggcagtgcacaagaaagcaccccagcaggccaagcggctgccgcccccaaccatctccctgcgttccaaatctatgacctcagagctggaggagatggagtacgagcagcagccggcgccggtgcccagcatggagaaaaagcggaccgtgtatcagatggctctcaacaaactggacgaaatcctggccgcagctcaacagaccatcagtgcaagcgaaagccctggtcccggtggcctcgcgtccctgggcaaacaccgacccaaaggtttctttgccactgagtcgagcttcgatccccaccaccgtgcccagccaagttacgagcgtccttctttcctgcctccaggacctgggttgatgctccggcaaaaatctatcggtgcggcagaagatgacagaccttacctagcacccccagccatgaaattcagccgcagcctgtctgtgcctggttcggaggacattcccccgccacccaccacgtccccaccggagcctccctacagcacacctccagtcccctcctcctcagggcgcctcaccccctcccctcggggagggcccttcaaccctggctctggtggccccctccccgcctcctcccctgcatcctttgacgggccctcccctcccgacactcgcgtggggagccgcgagaagagcctgtaccacagtgggcccctgcccccggcccaccaccacccgccccaccaccaccaccaccacgccccgccccctcagccccaccaccaccacgcccacccccctcatcctcccgagatggagacaggcggctctcccgacgaccctccaccccgcctggctctggggccccagcccagcctgcgaggctggaggggcggcgggcccagcccgaccccgggggccccgtccccatcgcaccacggcagcgcgggcgggggcggcggctcctcccagggcccggctctacgctatttccagctgcccccgcgggcggccagcgcagccatgtacgtgcccgcccgctcgggccgcggccgcaagggcccgctggtcaagcagaccaaggtggaaggcgagccccagaagggcggcggcctcccgcccgcgccgtcgcccacgtccccggcctccccgcagccgccgcccgccgtggccgcgccctcggagaagaactccatccccatccccaccatcatcatcaaggccccgtccaccagtagcagcggccgcagcagccagggcagcagcaccgaggcggagccccccacccagccggagcccacgggaggcggcggcggcggcggctcctcgcccagccccgccccggccatgtcacccgtgcccccgtccccctcgcccgtgcccacccccgcctcgcccagcggcccggccacgctggacttcacgagccagttcggggccgccctggtgggggcggcccggagggaggggggctggcagaatgaggcgcgccggcgctccacgctgttcctgtccaccgacgcgggggacgaggacggcggggacggcgggctgggcacaggggcggccccgggcccgcggctgcgccactccaaatccatcgacgagggcatgttctccgccgagccctacctccgactggagtctgcgggcagcggcgcgggctacggcggctacggggccggtagccgagcctacgggggtggcgggggcagcagcgccttcaccagcttcctgcccccgcgacccctggtgcacccgctgaccggcaaggccctggatcccgcctccccgctggggctggccctggccgcccgcgagcgagcgctgaaggagtcctcggagggcggcggggccccccagccgcctcccaggcccccatcgccccgctacgaggccccgccgcccaccccgcaccaccactcgccccacgcccaccacgagccagtgctgcgtctctggggggcctccccgccggaccctgcgcgccgggagctggggtacagggccgggctgggcagccaggagaagtcccttcccgccagcccgcccgccgcccggcgttccctgctacaccgcctgccgcccaccgctcccggggtggggcccctcctgctgcagctggggacggagcccccggccccgcaccccggagtaagcaagccctggaggtccgcagcccccgaagaacccgagcggctgccgctgcacgtgcggttccttgaaaactgccagccccgggcccctgtgacgagcggaaggggtcccccctcggaggacgggccgggggtcccgccgcccagcccacgccggtccgtgcccccctccccgacctccccgagggccagcgaagagaacgggctgcccctgctggtcctgccgcctcccgccccctcggtggatgtggaagatggcgaattccttttcgtggaaccgctgcctccgcctctggaattctccaacagcttcgaaaagccagagtcgcccctcacgcctgggcctccccacccgctgcccgacacacctgcccctgccaccccgttaccccctgtgccacccccggctgtggccgcagcccctcccaccctggactccaccgcatccagcctgacatcctatgacagcgaggtggccaccctgacccagggggcctccgccgctcctggggacccccatccaccaggcccgcctgccccagcagcaccggctcccgctgccccacagcctggcccggaccctccgcctggcacggattctggcatcgaggaggtggacagtcggagcagcagtgaccacccactggagaccatcagcagcgcctccacgctgagcagcctatctgccgaaggtggtggcagcgcagggggtgggggcggggctggggccggtgtggccagtgggccggagcttctggacacctatgtggcctacctggacggccaggcctttgggggcagcagtactcccggcccgccataccctcctcagctcatgactccctctaagctccggggccgggcgctaggagccagcggaggcctgcggcctggccccagcgggggactccgagaccctgttacccccaccagccccaccgtctcggtgacaggggctggaaccgatgggctgctggccctgcgtgcttgttcaggaccccccacggcaggcgtggcggggggtccggtggctgtagagccagaagtcccaccggtgcccttgccgacggcctcctctctgccccggaagctgctgccctgggaggagggcccgggcccaccgccaccacctctgcccgggcccttggcccagcctcaggcctcagccttggccacagtaaaagccagcatcatcagtgaactcagctccaagcttcagcagtttgggggctcctcggcagctggcggcgctctgccctgggcccgaggaggcagtgggggaggcggagacagccaccacgggggagccagctatgtccccgagaggacctcctccctgcagcggcagagactctccgacgactcccagtcctcactcctctccaagcctgtcagcagcctgtttcagaactggcccaaaccacctctgccgccactccccaccggaacaggggtctcccctacagccgctgcggccccaggggccacctcaccctcagcctcctcctcctccacgtccacccgccacctccagggcgtggagttcgagatgcggccccctctgctccgccgggcccccagcccctcgctgctgcccgcctcggagcacaaggtcagccctgcgcccaggccctcgtccctgcccatcctgccttccggacccctctacccaggcctctttgacatccgtggctccccaactggaggggcaggaggctcggctgaccccttcgccccagtctttgtgccgccacacccggggatatccggggggctcgggggagccttgtcaggggcctcgcgctccctctcaccgacccgcctgctctcgctgcccccggacaagccgtttggcgctaaacctctggggttctggaccaagttcgacgtggctgattggctggagtggctgggtttggcggagcaccgagcccagttcctggaccacgagatcgatggctcccacctgcccgccttgaccaaggaggactacgtcgatctaggtgtgaccagggtgggccaccgcatgaacatcgaccgggctctcaaattcttcctggagaggtga

SEQ ID NO: 18998 - DNA, 422 bp, Homo sapiens
  source 1..422: mol_type = unassigned DNA
tatagaatagtggtgaagagctcagactttggtgccatataaccgggctctgccacttcctgtgtgtccttagactctccgacgactcccagtcctcactcctctccaagcctgtcagcagcctgtttcagaactggcccaaaccacctctgccgccactccccaccggaacaggggtctcccctacagccgctgcggccccaggggccacctcaccctcagcctcctcctcctccacgtccacccgccacctccagggcgtggagttcgagatgcggccccctctgctccgccgggcccccagcccctcgctgctgcccgcctcggagcacaaggtcagccctgcgcccaggccctcgtccctgcccatcctgccttccggacccctctacccaggcctctttgacatccgtggctcccca

SEQ ID NO: 18999 - DNA, 668 bp, Homo sapiens
  source 1..668: mol_type = unassigned DNA
cccggcccgccataccctcctcagctcatgactccctctaagctccggggccgggcgctaggagccagcggaggcctgcggcctggccccagcgggggactccgagaccctgttacccccaccagccccaccgtctcggtgacaggggctggaaccgatgggctgctggccctgcgtgcttgttcaggaccccccacggcaggcgtggcggggggtccggtggctgtagagccagaagtcccaccggtgcccttgccgacggcctcctctctgccccggaagctgctgccctgggaggagggcccgggcccaccgccaccacctctgcccgggcccttggcccagcctcaggcctcagccttggccacagtaaaagccagcatcatcagtgaactcagctccaagcttcagcagtttgggggctcctcggcagctggcggcgctctgccctgggcccgaggaggcagtgggggaggcggagacagccaccacgggggagccagctatgtccccgagaggacctcctccctgcagcggcagagtatagaatagtggtgaagagctcagactttggtgccatataaccgggctctgccacttcctgtgtgtccttagactctccgacgactcccagtcctcactcctctccaagcctgtcagcagcctgt

SEQ ID NO: 19000 - DNA, 558 bp, Homo sapiens
  source 1..558: mol_type = unassigned DNA
tgccaggatcctcctgtatcgaggtgccgacaaggatgtgaagaacaacaacggacagacccccttccaggtggcagtgattgctgggaattttgagctgggggagctgatccgaaaccaccgagaacaggatgtgggtgagtgacagggagctcggactgcacagagaacctggggcggttgaggtttcatggtgggatgggggagttgggggacctgacttgggggccaggataggatggagaaaaccctagaggaccaaaaatgtctggatggtggtgggggagcaattccaggcccccctccctttctcatctctgtctttctccctcatgcctctctcccaccatctcttgcccccgcatggccccctgcttgccttttctcccctaacatctgccccccgccgccactgtgccctctcagtgcccttccaggagtcccccaagtacgcggcccggcgacgggggcccccaggcacagggctgacggtgcccccggcgctgctgcgggccaacagtgacaccagcatggcgctgcccgactggatggtgttct

SEQ ID NO: 19001 - DNA, 780 bp, Homo sapiens
  source 1..780: mol_type = unassigned DNA
gacccccttgacactggcggcccagaccgaaggctctgtagaggtgattcgaaccctgtgcctgggcggggcccacattgacttccgggcccgggatggcatgaccgcactgcataaggccgcatgcgcccgacactgcctggcactcacggcgctcctggaccttgggggttcccccaactacaaggaccgtcgggggctgacccctctgttccacacggccatggtgggtggtgacccccgatgctgcgagctgctcctgttcaacagggcccagctgggcatagctgatgagaacggctggcaggaaatccaccaggcctgccagcggggtcactctcagcacctggagcatctgcttttctacggggctgagcctggagcccagaacgcctcggggaacacggctctgcacatctgcgccctctacaacaaggtctgcctagcagcggccaccccaggcccctcacatccccgatagccgcctcccccagggccaagctcagacactcctcttgactgcatctctgcaccctccacttcttcactatttccaccctttcatccagtcattcctccattcattcctccatccatccatccatccatccatccatccatccaacagatatttactgagctcctctgtatcaggcctggagctgggtgctggggacaaagtgttgagctcatggcctagcagagggcagacaacatagtttgctgctacagtccagagtgctcagagcaaagtcacagggaatccagatccctgcggga

SEQ ID NO: 19002 - DNA, 1879 bp, Homo sapiens
  source 1..1879: mol_type = unassigned DNA
cttccccaccccctgcacctgagccgcggcggcggctcctgagctccggcggggctgggcgcggcgccgctcgggttcccgcggccgatccaggtgtgcgcggacgctggcgctcccggggggctcggacccgcccccgactcgccgagccaggatatttttgttggtataaaattatggattgagaatacttttctttcatcacttgaaaattactgtgccactttcttttggtctccacagtttctgatgagaaatgtctggaaatctctccaggcaccctgctttggccctctagaatacagacagttcctgctctaagaggccatctgtgaggctcagtctcccaacacctctgacacaggcagccatgccgcgcagcccaacatccagcgaggacgagatggcccagagcttctccgactactccgtggggtcggagtcagacagctccaaagaagagaccatctatgacacgatccgggccactgcggagaagccgggcggtgccaggacggaggagagccagggcaacacgctggtgatccgcgtggtcatccatgacctgcagcagacgaaatgcattcgatttaacccggatgccacagtgtgggttgcaaagcagcggatcctgtgtacattaacccagagtttgaaagatgtcctgaactacggcctgttccagccggccagcaatgggcgtgacgggcgttccttccctggagtttcgatacaagaagcgggtgtataaacaagccagtctcgatgagaaacagttggccaagctccacacgaagaccaatctgaagaaatgcatggatcacattcagcatcgcttggtggagaagatcaccaagatgctggaccgaggcctggatcccaatttccacgacccggagaccggagagacccccctgaccttagccgctcagctggacgactctgtggaggtcatcaaagctctcaaaaatggtggagctcacctggacttccgtgccaaagatgggatgaccgccctacacaaagctgcccgagcgaggaaccaagttgccctgaagacccttttagagcttggtgcatccccagattataaagacagttacggcctcaccccgctgtatcacacagccatcgtcggaggtgatccctactgctgcgagcttctcctgcacgaacacgccactgtgtgctgcaaagatgagaacggctggcacgagatccaccaggcctgcaggtacgggcacgtgcagcacctggagcacctgctgttctacggggcagacatgagtgcccagaatgcctcggggaacacggccttgcacatctgcgccctctacaaccaggacagctgtgcaagagtgcttctgtttcgaggcggaaataaggagttaaaaaactacaacagccagactccatttcagatggactctcactctgttgcgcagagtgcaatggcacgatcccggctcactgcaacctccacttcccgggttcaagcgattctcctgcctcagcctcccaagtagctgggattacaggttcgtgccaccatgcctggctagtttttgtatttttggtggagatgggttttgctatgttggccagactggtctcgaactcttgaccttaagtgatctgcctgcctctacctccgaaattgttgggattacaggcatgagccttcatgtctgacccagtctattaagttttatcatgaatctatgttgtcatatccgatgtgtcttgataaaatatttatccaaaatccgatcctgcaactgtcaaagatgattatgtagatttcccctgcttatctgctaatgcgatgaattatatttgtcaattttcttatttctaaaataaactcacctagccatga

SEQ ID NO: 19003 - DNA, 434 bp, Homo sapiens
  source 1..434: mol_type = unassigned DNA
acgaacacgccactgtgtgctgcaaagatgagaacggctggcacgagatccaccaggcctgcaggtacgggcacgtgcagcacctggagcacctgctgttctacggggcagacatgagtgcccagaatgcctcggggaacacggccttgcacatctgcgccctctacaaccaggacagctgtgcaagagtgcttctgtttcgaggcggaaataaggagttaaaaaactacaacagccagactccatttcaggtggccataatagcaggcaactttgagctggcagaatacatcaagaaccacaaggaaacagacattggtgagtaggcacgtggagaaactgtgttgggatttggtttggagatgctctgaggaatcagtcactcaccagctttttaaaattctcctaagattggtttagagcctgcttttagc

SEQ ID NO: 19004 - DNA, 557 bp, Homo sapiens
  source 1..557: mol_type = unassigned DNA
attctataaactgcagggcccaagctgcaggtttcaccttcctgagggtcgccacccgggaggcagaggcaccaggatggacgtgggaactacctccgctcttcctttctcacagtgcccttccgagaggccccggcgtactccaaccgccggcggcggccccccaacacgctggccgccccccgggtcctgctgcgctccaacagtgacaacaacctcaatgccagcgctcccgactgggccgtctgctccacggccacctcgcaccgcagcctgtcaccccagctgctgcagcagatgcccagcaagcccgagggggccgcgaagaccattgggagctacgtgcccgggccccgcagccggtccccatcgctcaacaggctgggcggcgcaggcgaggacggcaagaggccgcagcctctctggcatgtcgggtcgccttttgctcttggtgccaacaaggactcactctcggccttcgagtacccggggcccaagcggaagctctacagtgccgtgcccgggaggctcttcgtcgctgtcaagccataccaacc

SEQ ID NO: 19005 - DNA, 510 bp, Homo sapiens
  source 1..510: mol_type = unassigned DNA
cactctcggccttcgagtacccggggcccaagcggaagctctacagtgccgtgcccgggaggctcttcgtcgctgtcaagccataccaaccccaagtggacggcgagatcccccttcaccgcggtgacagggtcaaagttctgagcatcggtgaagggggcttctgggaaggcagcgcccgcggccacatcggatggtttccggcggagtgcgtggaggaggtccagtgtaagcccagggacagccaggcagaaacccgcgctgaccgcagcaagaagcttttcaggcactacaccgtgggctcctatgacagcttcgacacttccaggtggaatggctgtgaaggaagggggcaggcgagccaccaggtagccagatcttctaagcacagcaggtttgagttcgtctgatgtgtggaaagagccctgcatctttgacaatgtgactggcacaggcacgtggttggatttttctgcagaaaccacacctgtgtgtcaccagctgtgggga

SEQ ID NO: 19006 - DNA, 2775 bp, Homo sapiens
  source 1..2775: mol_type = unassigned DNA
agccgggtttgagagcagcccgtctacgtgcagttggttcccagctgacagacagaatatggggtgggctttgtcaccagcacgctgggtctggcatgcccagctatgctcggaagtgcaccgtgcccagacacccgccacctctccccgggtcccagctgctctagcaccgaggggccgggctgcacgcctgtccttcctcccatccaggaaggttatataatgagcggaccgctgccaaagtcagagggaaaatgaagtctttgttaaatgccttcaccaagaaggaagtgcccttccgagaggccccggcgtactccaaccgccggcggcggccccccaacacgctggccgccccccgggtcctgctgcgctccaacagtgacaacaacctcaatgccagcgctcccgactgggccgtctgctccacggccacctcgcaccgcagcctgtcaccccagctgctgcagcagatgcccagcaagcccgagggggccgcgaagaccattgggagctacgtgcccgggccccgcagccggtccccatcgctcaacaggctgggcggcgcaggcgaggacggcaagaggccgcagcctctctggcatgtcgggtcgccttttgctcttggtgccaacaaggactcactctcggccttcgagtacccggggcccaagcggaagctctacagtgccgtgcccgggaggctcttcgtcgctgtcaagccataccaaccccaagtggacggcgagatcccccttcaccgcggtgacagggtcaaagttctgagcatcggtgaagggggcttctgggaaggcagcgcccgcggccacatcggatggtttccggcggagtgcgtggaggaggtccagtgtaagcccagggacagccaggcagaaacccgcgctgaccgcagcaagaagcttttcaggcactacaccgtgggctcctatgacagcttcgacacttccaggttgcagacacatttgggggtccctgcaaccctcggagacagctggagtctggacctgtagggcctggttgtggaaacagccccgctgcctcctgcccggtggctctggaggccccttccgcacatccagggcgggtcggctgctccagttctgccttcccacccagtgctgggatgtgcaacgccccccaccgaatgctcagatgtgcagccccctcctctgctggcctggaccttggacctcacacgtgcacatgttctgacatcagtgcctcatccgatgtccaaccccggccagaggaaccaccgtcgcttcagccccactctgaccttggaagccccaccctgcatggaggcagaggtgggaactctgtcatccaccgttccccacagaccactcacagccgctttaagagaacagccagggcttctaggcaggagcacgacagtgttcacgctgatggccagggagcctcctcagccagcagcagccgactcgtgcttgtgcattgttcagatggaagcatgatcattggatggaagttcctggcacaggtgcaagttgaccctgagtcattccagaaggattcgggcctcaccggaaagaacgccaggaaaagccatagggcaacagctcttctgccatttcagtcctcatgggtgaaactggggtaaagcgtgagtggctggggccctgctgacacctgcacttgtgcgtcaccgccaagctgtgtccctagactgccctgggtgagtaggcagccaacgtctgcagccccgtgtggtcagctgctcctgccctcccgcctcatcacggcccttcagacatcagggccggctgcctaccttccaaccccactctgtctggaatgttcttttctcttctgtcccctccccagtcctccaacccattctcctatgtatacttcagtcctcctcctccaggaagtcttccaggtgcccgtatggttctcacagaaccacgtcctgcactgttgaaggcacacatttctgtgactgtggattgatgtttatcttcctcacttgcccggcctttgctctaacgatcaccacagactagggggctcaaaacaagagaagtcacttacctgtcacagccctggaggccagaggtccaaaaccaagatgacagcagggccacgctccctccgggggctccaggggagagtcttcctcctccacctctgctgttggcctgcagtccttggtgctcctcagctgggccacatcactccagcctccacatcactccagcctctgcctccaccttcccatggcctcctctgcactgcctctgggtgtcaacctccctctgcttttctcgcgtaagggcacagtcattggtttaggaccctccctaaatccaggaagatctcaactcaagacccttaactaattatacctgcaaagacccaaattccaagtgtcgtcactttcacagacgctgggggttaggaattggacacatttttttgggtgggttgagtcaccattcaactgaccacaccagacaactctataaggaccagactgggcctggtttgttccttcctaaatgcccagcacccagttcatcccctgactctcagtgggtattcaggatgtaacagctggattgatttattgatttacacggcggcttgacactggccccagttacttctgaactttgaaacccagtcccagctggtcacggaagaactaaagctgtcaccagacggggccaccaacccagctgggatcctgagagctatgagtaaagccatctggtctaccccaataac

SEQ ID NO: 19007 - DNA, 762 bp, Homo sapiens
  source 1..762: mol_type = unassigned DNA
ttcgtcgctgtcaagccataccaaccccaagtggacggcgagatcccccttcaccgcggtgacagggtcaaagttctgagcatcggtgaagggggcttctgggaaggcagcgcccgcggccacatcggatggtttccggcggagtgcgtggaggaggtccagtgtaagcccagggacagccaggcagaaacccgcgctgaccgcagcaagaagcttttcaggcactacaccgtgggctcctatgacagcttcgacacttccagtgactgcattattgaggagaagacggtggtcctgcagaaaaaagacaatgagggctttggattcgtgcttcgaggggccaaagctgacacacccattgaagaattcacaccaacaccggctttcccagccctacagtacctggagtccgtggatgaaggtggggtggcgtggcaagccggactaaggaccggggacttcttgattgagatgtttgtctcagatttcctagaatcgaagtattcatattttgaaaagtatccatttcatacataggaaactgtgtcttagaagaaagttatctcacagaggagacaaatgttcagcccccttggcacagatagtgctgtttgctgtcagaggaaaaagccttcctgggcattaattaatttcccggggccattccttacccgcctgctgcagggctctgatgacgcctatggtttttgtgattgttttcttggccctgaagtggccaatctcatttttgtgttaatttct

SEQ ID NO: 19008 - DNA, 2123 bp, Homo sapiens
  source 1..2123: mol_type = unassigned DNA
ctcctcctgcaccctcgctgcctcctttcctccatgctgcctggatctggcgagctggggtgattaattggctatgatgatgaacgtccccggcggaggagcggccgcggtgatgatgacgggctacaataatggtcgctgtccccggaattctctctacagtgactgcattattgaggagaagacggtggtcctgcagaaaaaagacaatgagggctttggattcgtgcttcgaggggccaaagctgacacacccattgaagaattcacaccaacaccggctttcccagccctacagtacctggagtccgtggatgaaggtggggtggcgtggcaagccggactaaggaccggggacttcttgattgaggttaacaatgagaatgttgtcaaagtcggccacaggcaggtggtgaacatgatccggcagggagggaatcacctggtccttaaggtggtcacggtgaccaggaatctggaccccgacgacaccgccaggaagaaagctcccccgcctccaaagcgggcaccgaccacagccctcaccctgcgctccaagtccatgacctcggagctggaggagctcgtggataaagcctcggtccggaagaagaaggataaacccgaggagatagtcccggcctccaagccctcccgcgctgctgagaacatggctgtggaaccgagggtggcgaccatcaagcagcggcccagcagccggtgcttcccggcgggctcagacatgaactctgtgtacgaacgccaaggaatcgccgtgatgacgcccactgttcctgggagcccaaaagccccgtttctgggcatccctcgaggtacgatgcgaaggcagaaatcaataggtaagaagtgtggcactcccccacagaagttgcccctgggctttcaaacacagccttaggcccctcaggaattctgagccctgggcctctcacagttgccttggcgtcccaccccagcaaggccctgccagcccacccaccagagggtgggaacctggccttgcccactagggagccattggaacatctgagtggcatgaaactcatcccccctgaaggacacaaaatctagggtggcttctgtcatcttgaagcccagttatctgtgataattccagcagggtaaagcgggagggtgggcggggtggtgcgagccaacccccctcccccaccctgccctgctcagggtgggaagggtaagtgggttccctgcattccccagccaccaccaggcctggagtatgagctcagcagatgtacttccaagggtggttgggtcaggtctcgaaatgaaataatgtactgtgtgttgcagaaaactgccttcctttcttcttaatgtcacaattattcctattgaccctgttgcaggcaaaggtacacttgaccttgagacaaggtcacacttgaccctttgagacagtccctttgtgagataattcagcattgcctttactgtgtcaattctggtagaagctaaggcccttgccctgtgagagttgtggaggcaaccctgggactctggtctgcccagcccaccccaggggcactgtcctgtgtgttctggaaatgcctctgggctgctgtgcaaaagcgcagcgtgcttgtgagtctcaggtggataactgtaggcagtcactaggcagtaagtggccgtggaggtggtgtctgctgtgcttaaagctccccctgcaccagcaaactcagggaaagctgcgtatttgtcttgcggttactggttaataacaactgatttcctcctgtcagacagcagaatctttctatcaggttagtgaaccttacggtttggaatctgtaatctgaatgtaacccagtttactttataaggtgtattcttaaattagtactccttgggaacagaattgccagacagccaactcagagtgactggtcaatggagaacactttgaacgagccatctttgcaatgccaaaatgtcctcccacaaggagtatgttaaatttggaatacccttatcgaatggaagttttcattggaataaattattgtagtttgtcctaggactttttttcatttcaagtaatttattttgctacctctttgaaaacctgcatgctccca

SEQ ID NO: 19009 - DNA, 1376 bp, Homo sapiens
  source 1..1376: mol_type = unassigned DNA
gatgaacgtccccggcggaggagcggccgcggtgatgatgacgggctacaataatggtcgctgtccccggaattctctctacagtgactgcattattgaggagaagacggtggtcctgcagaaaaaagacaatgagggctttggattcgtgcttcgaggggccaaagctgacacacccattgaagaattcacaccaacaccggctttcccagccctacagtacctggagtccgtggatgaaggtggggtggcgtggcaagccggactaaggaccggggacttcttgattgaggttaacaatgagaatgttgtcaaagtcggccacaggcaggtggtgaacatgatccggcagggagggaatcacctggtccttaaggtggtcacggtgaccaggaatctggaccccgacgacaccgccaggaagaaagctcccccgcctccaaagcgggcaccgaccacagccctcaccctgcgctccaagtccatgacctcggagctggaggagctcgtggataaagcctcggtccggaagaagaaggataaacccgaggagatagtcccggcctccaagccctcccgcgctgctgagaacatggctgtggaaccgagggtggcgaccatcaagcagcggcccagcagccggtgcttcccggcgggctcagacatgaactctgtgtacgaacgccaaggaatcgccgtgatgacgcccactgttcctgggagcccaaaagccccgtttctgggcatccctcgagaagcccggagatcatgagcaccatctcaggtacacggagcacgacggtcaccttcactgttcgccccggcacctcccagcccatcaccctgcagagccggccccccgactatgaaagcaggacctcaggaacaagacgtgccccaagccctgtggtctcgccaacagagatgaacaaagagaccctgcccgcccccctgtctgctgccaccgcctctccttctcccgctctctcagatgtctttagccttccaagccagcccccttctggggatctatttggcttgaacccagcgggacgcagtaggtcgccatccccctcgatactgcaacagccaatctcaaataagccttttacaactaaacctgtccacctgtggactaaaccagatgtggccgattggctggaaagtctaaacttgggtgaacataaagaggccttcatggacaatgagatcgatggcagtcacttaccaaacctgcagaaggaggacctcatcgatcttggggtaactcgagtcgggcacagaatgaacatagaaagggctttgaaacagctgctggacagataaggacggctgctctccacctcgcagactgctcttgttataagtagagatgg

SEQ ID NO: 19010 - DNA, 5738 bp, Homo sapiens
  source 1..5738: mol_type = unassigned DNA
tgggaagtgctgctctaactggtcagccattgagctccaaagacagccccagtgcaagtcgatgaactggcccccagcagacgggcaggggcttcagtcttgccctccagggagtctccccacacggcagcatctctactgtttgcagctctccccctcttgcccatgaccctttcactgagacactgcagcccaccaccattcacggtcacgatgtcacaccagtgcactcctcatgctctccagagcccctccacccagggtaacccaccacataggagggagaggagcccacttcatgtgggaagatgtggagacaggagaaaagtgcacccaagctggcatctgacagagccagggctccagcagacatctctcaagtccaggtcttgaagagagagccgtggtaggatggatcttttcagaagcggtgggtgggccgttcatatccacgtgaatgggcccaaaaggcaagagacccacacctctcctcccctccccagtggctgtggctttcctagggacaataggatgaatgggctttcagtgtggggacagcaaaacatgcactagggcccagagtggcagttctcttggtgtggagagtgcctgccacaggccttggccagagcccgtgagggagtggtgtgtgaaaggccacctccacgtgggtaagcgtgaggacttggacttctctggcactgagatgggacctcctgcctgtgggagtcatctggccaccaccctggggccagtaaaggttggagctagaagggtcgtcctccctgacttgagctctgagggctttgcctgcccagccagagcggcaaggcacaggggaccctcggggacgcccatggccaccctggggaagacagggctcctcacgcgttctgcttttcagtaaggcccgtgtgtcctaccagtgagcctctcacatgaaaggggctaaaaataacacagggtaccccagctccttctgcaacaaaactgtccactgggtgggcgctggacagtgctgcctcaggaaggtgagcgcagcccacactggccacacaagccacgccctgctgtctgggtttccgggtgatctcaacccctgagtgccctgcgtagctacaggggttccagttactgaaaggggccacctgggaaggatcctgccctgctcttgtccatttacccaaaaagcctaaggctgccaggcggctgaggggcctgtcctccaggtgtgctccttcccacctgctgaagctgaggcgctggagatgttgcctggcacgttctacccaggtgacaggaccccactctgtccctgtctccgtgccctcttcaagggaccccttccaaatgcctcagtggccaccctcccgagggtcccccggccctgccccccagcacaggcaggtcccccagcccctctgtcccagttcaggtgagtgggctgacgtggtgtgctccccccagcacaggcaggtcccccagcccctctgtcccagttcaggtgagtgggctgacgtggtgtgctctggtgtctccaactttgctctggcccctttctccccctcccccaccctggcatggcaaatcattcgttcactgccagtggatctgccactagacactctggcatggtttgggcgtctccctcgccttcctgggtgatctgcagccagctgccctgactcggtgacctgccttgtgatggttttctctgtgttgctgtttcagaagcccggagatcatgagcaccatctcaggtacacggagcacgacggtcaccttcactgttcgccccggcacctcccagcccatcaccctgcagagccggccccccgactatgaaagcaggacctcaggaacaagacgtgccccaagccctgtggtctcgccaacagagatgaacaaagagaccctgcccgcccccctgtctgctgccaccgcctctccttctcccgctctctcagatgtctttagccttccaagccagcccccttctggggatctatttggcttgaacccagcgggacgcagtaggtcgccatccccctcgatactgcaacagccaatctcaaataagccttttacaactaaacctgtccacctgtggactaaaccagatgtggccgattggctggaaagtctaaacttgggtgaacataaagaggccttcatggacaatgagatcgatggcagtcacttaccaaacctgcagaaggaggacctcatcgatcttggggtaactcgagtcgggcacagaatgaacatagaaagggctttgaaacagctgctggacagataaggacggctgctctccacctcgcagactgctcttgttataagtagagatgggctcgtgctgaaacatctgaatgccaagcgaagtctgtgagcatcaaccccactccatgggtttgtctcctggtacccaaagaaatactgagttgtgtccacaacatggctgggtcttcagacccctggctcaccatgtgggtgtcttgggcagtttctatcacacatgggacaaggggagggagtttttctaacatggaaaaagattctcagcctgccgcccagcatgcaggtggcctcgctttgccgggtccgagaggctccccgtcaattttgcacgggatcctagctcttgtaggcagacaccagtgcactctagatacctcctgagacctccgtcctctgctttccgggcagctctcaccaccccaggccccggcatgaggcctttcctcagtcctgtggcctctcagaggacacctgatgctcacctgcccctctttctcctgcacttggcttgcagtgagatgctcccagatgcatttgtccagtgccccatcatgggcctgaaaggcagagaaactttttcctacacagattcttttccccatctcctcctgtggtttgcatccatggctctttggccatgaggttcctggcagtgctgggagtttggatgggatcgtgcccagctttgcttagctttctttatttctgcaaatctgttagcataattccaaggtggccaagcagatgtcacatggagttagtcaaagcacaaagtcacgattccacaatggaggggagacctggccaagggagccagccagcgtgcaactgcccaagctccaggtctccaggacaagagcagttgtctgccatgagcacccatccaggatggagaataagggcttctctgcctctcagaattctttttaattgaagatgtcttgagctctgcaaagatcagagcaggtgagcatccactttgacatgaaggacaagaagacgcatggctcatggcgggcacatgcggctgccagtgagacagcgtctcctctgggagctgggcgggcacagcatcctcagttctgtgcccagccaagggtgagcatctctgctgagacagtccttttgctctcggaggccagggaagatggtacttagaggcttttcccctatcgctctgggtgtctaggaatcccaccagcttgtcttaacagtacaacagcttctttgaggacccagtgggtatggagtatagacagaacccagggttgagaacagaaggtgggcggcaggatcagagtgaaagcagaggcgtgaggagaggaaagcagggaggtctcctgggctgccaggtcagcctctctggcaaggctttcttgagccccgcccctttctttccccggagtccctccaccccataacaatacctcgaatttccaaaagaggtcaccagatgcacatgggccgcaaaacacacagtcaggcttccagcacattctcccccatttggaggatactcgaatgtcaggtttttggttttattattatttcagaactagctcagcccatctctaattataaaacatggttttgttttttttttttcctttttttcttgattaggtctggaacagctctagaatgaacacataaaatttagcaatttaaaatctttctttactgcaagtttaaatagttgtacagatagtttataagcacaatattttaagaaaaaaaagtggctggtctactaggcagcctttgtgccacttcagtgctagaaagttaaagaaaaaaaaacttttgtgatttaataatactatttctgtggaataattataaaagtatgacctttttaaatcaaccttatttggatgcatctgaaccagcagagctgtgttatattttctatctttgctagaacttcgtcattgaaggacaatttcttcaaagtggttacaattcataatgcagcagtttctccaaaaacaaaaacaaaacacacaccacacacacgcgcttttccagtcacacacccctgatgttggaaccaagtttttggaccttctgttccaaaaccttttgcaggtcaatctttgtatttgaaatgatccaatccaacttgaagtcaattgaatattaaggcgctttacttccgtgtgctttcagtttttccatcatgagatgaatgagcattactctagataaatttcaagacaggatactacaggtggcctgctgaggctgccccatattttagaaaatgtaaaaatggtggtttggccattaatttgtcttccatttgatgataccgcaaaattccgtgagtccattcctttggcatggcactttccctgggcctacagttggtattacctctgtgctcagtgccaggcaaaacactagctcaaaggagagtcaaggaaaccgctggcagacgataaccagtcgaaactcgtgacttcggtttgttgaactttggcagccagttggtgagggccagatgttattccctttcttaaagatactccaagccacatgccactaaccacaagcaagctggctgcaagactaaagagctgataacatagtttatttttacactgtcttattatagagaagtaatagacctatcagaacctgcactgaccaacaaataaacacatgttgccaagatgaatcggtctctatctctatctgcttattttggtactgaaagcaatagttcctcattcaaatcaccacccactgttctccccctttgggacatgttaggacgaggccctattccatgcccctctttaatggtggaacaaatgttaaactgctcatctaaagatcatgttgatattattccaggttttaagatcaacttttgttacatactgtaatttaaataaactgcatttacatgcctagtttctgtaatattgtgtatacaaaacccaaatctctcaaaatgtaaattatgtatacctgccaagataccttttccagggtgtctgcgcacattttaagttaattcacataatataaaaattactcaatgtgactgttgatttgctgaactttacatatcacaaagtgaattatttgtgatactttagttaataaaatggtaaatttttttctcagttattgaacaagcaagcattatccagttgatctggcaatgactttttgtgtgtgggccacaatattgattttcccattaacaatttttttttgttttttaaatactaatatgtttcacactatagtttgtgtaacaacacgtgttcgcattatctatgttgctgttacttttgtgcttttattctttttagactttataaaaaaaaaaaaaagctcctgtaatttgcactttctcccaatccttaaatctcttgtatggcaaccaaaattactgtaaaaaaataaatatactattgcactaa

SEQ ID NO: 19011 - DNA, 8850 bp, Homo sapiens
  source 1..8850: mol_type = unassigned DNA
tcctttcctccatgctgcctggatctggcgagctggggtgattaattggctatgatgatgaacgtccccggcggaggagcggccgcggtgatgatgacgggctacaataatggtcgctgtccccggaattctctctacagtgactgcattattgaggagaagacggtggtcctgcagaaaaaagacaatgagggctttggattcgtgcttcgaggggccaaagctgacacacccattgaagaattcacaccaacaccggctttcccagccctacagtacctggagtccgtggatgaaggtggggtggcgtggcaagccggactaaggaccggggacttcttgattgaggttaacaatgagaatgttgtcaaagtcggccacaggcaggtggtgaacatgatccggcagggagggaatcacctggtccttaaggtggtcacggtgaccaggaatctggaccccgacgacaccgccaggaagaaagctcccccgcctccaaagcgggcaccgaccacagccctcaccctgcgctccaagtccatgacctcggagctggaggagctcggtttgcaagcctcggtccggaagaagaaggataaacccgaggagatagtcccggcctccaagccctcccgcgctgctgagaacatggctgtggaaccgagggtggcgaccatcaagcagcggcccagcagccggtgcttcccggcgggctcagacatgaactctgtgtacgaacgccaaggaatcgccgtgatgacgcccactgttcctgggagcccaaaagccccgtttctgggcatccctcgaggtacgatgcgaaggcagaaatcaatagacagcagaatctttctatcaggaataacagaggaagagcggcagtttctggctcctccaatgctgaagttcaccagaagcctgtccatgccggacacctctgaggacatcccccctccaccgcagtctgtgcccccgtccccaccaccaccttccccaaccacttacaactgccccaagtccccaactccaagagtctacgggacgattaagcctgcgttcaatcagaattctgccgccaaggtgtcccccgccaccaggtccgacaccgtggccaccatgatgagggagaaggggatgtacttcaggagagagctggaccgctactccttggactctgaagacctctacagtcggaatgccggcccgcaagccaacttccgcaacaagagaggccagatgccagaaaacccatactcagaggtggggaagatcgccagcaaagccgtctacgtccccgccaagcccgccaggcggaaggggatgctggtgaagcagtccaacgtggaggacagccccgagaagacgtgctccatccctatcccgaccatcatcgtgaaggagccgtccaccagcagcagcggcaagagcagccagggcagcagcatggagatcgacccccaggccccggagccaccgagccagctgcggcctgacgaaagcctgaccgtcagcagcccctttgccgccgccatcgccggagccgtccgcgaccgtgagaagcggctggaagccaggaggaactccccggccttcctctccacagacctgggggatgaggatgtgggcctggggccacccgcccccaggacgcggccctccatgttccccgaggagggggattttgctgacgaggacagcgctgagcagctgtcatcccccatgccgagtgccacgcccagggagcccgaaaaccatttcgtgggtggcgccgaggccagtgctccgggtgaggctgggaggccgctgaattccacgtccaaagcccaggggcccgagagcagcccagcagtgccctccgcgagcagcggcacagccggccccgggaattatgtccacccactcacagggcggctgcttgatcccagctccccgctggccctggcactctccgcaagggaccgagccatgaaggagtctcaacagggacccaaaggggaggcccccaaggccgacctcaacaaacctctttacattgataccaaaatgcggcccagcctggatgccggcttccctacggtcaccaggcagaacacccggggacccctgaggcggcaggagacggagaacaagtacgagaccgacctgggccgagaccggaaaggcgatgacaagaagaacatgctgatcgacatcatggacacgtcccagcagaagtcggctggcctgctgatggtgcacaccgtggacgccactaagctggacaacgccctgcaggaagaggacgagaaggcagaggtggagatgaagccagacagctcgccgtccgaggtgccagaaggtgtttccgaaaccgaaggtgctttacagatctccgctgcccccgagcccaccaccgtgcccggcagaaccatcgtcgcggtgggctccatggaagaggcggtgattttgccattccgcatccctcctccccctctggcatccgtggacttggatgaggattttatttttacagagccattgcctcctcccctggaatttgcaaatagttttgatatccccgatgaccgggcagcttctgtcccggctctctcagacttagtgaagcagaagaaaagcgacacccctcagtccccttcgttgaactccagccaaccaaccaactctgcagacagcaagaagccagccagtctttcaaactgtctgcctgcctcattcctgccaccccctgaaagctttgacgccgtcgccgactctgggatcgaggaggtggacagccggagtagcagcgaccaccacctcgagacgaccagcactatctccaccgtgtctagcatctccaccctgtcttccgaaggtggagagaatgtggacacctgcacagtctatgcagatgggcaagcatttatggttgacaaacccccagtacctcctaagccaaaaatgaagcccatcattcacaaaagcaatgcactttatcaagacgcgctcgtggaagaagatgtagatagctttgttatccccccgcccgctcccccgcccccgccgggcagtgcccagcctgggatggccaaggttctccagccaaggacctccaagttgtggggcgacgtcacagagatcaaaagcccgattctctcaggcccaaaggcaaacgttattagtgaattgaactctatcctacagcaaatgaaccgagagaaattggcaaagccgggggaaggactggattcaccaatgggagccaagtccgccagcctcgctccaagaagcccggagatcatgagcaccatctcaggtacacggagcacgacggtcaccttcactgttcgccccggcacctcccagcccatcaccctgcagagccggccccccgactatgaaagcaggacctcaggaacaagacgtgccccaagccctgtggtctcgccaacagagatgaacaaagagaccctgcccgcccccctgtctgctgccaccgcctctccttctcccgctctctcagatgtctttagccttccaagccagcccccttctggggatctatttggcttgaacccagcgggacgcagtaggtcgccatccccctcgatactgcaacagccaatctcaaataagccttttacaactaaacctgtccacctgtggactaaaccagatgtggccgattggctggaaagtctaaacttgggtgaacataaagaggccttcatggacaatgagatcgatggcagtcacttaccaaacctgcagaaggaggacctcatcgatcttggggtaactcgagtcgggcacagaatgaacatagaaagggctttgaaacagctgctggacagataaggacggctgctctccacctcgcagactgctcttgttataagtagagatgggctcgtgctgaaacatctgaatgccaagcgaagtctgtgagcatcaaccccactccatgggtttgtctcctggtacccaaagaaatactgagttgtgtccacaacatggctgggtcttcagacccctggctcaccatgtgggtgtcttgggcagtttctatcacacatgggacaaggggagggagtttttctaacatggaaaaagattctcagcctgccgcccagcatgcaggtggcctcgctttgccgggtccgagaggctccccgtcaattttgcacgggatcctagctcttgtaggcagacaccagtgcactctagatacctcctgagacctccgtcctctgctttccgggcagctctcaccaccccaggccccggcatgaggcctttcctcagtcctgtggcctctcagaggacacctgatgctcacctgcccctctttctcctgcacttggcttgcagtgagatgctcccagatgcatttgtccagtgccccatcatgggcctgaaaggcagagaaactttttcctacacagattcttttccccatctcctcctgtggtttgcatccatggctctttggccatgaggttcctggcagtgctgggagtttggatgggatcgtgcccagctttgcttagctttctttatttctgcaaatctgttagcataattccaaggtggccaagcagatgtcacatggagttagtcaaagcacaaagtcacgattccacaatggaggggagacctggccaagggagccagccagcgtgcaactgcccaagctccaggtctccaggacaagagcagttgtctgccatgagcacccatccaggatggagaataagggcttctctgcctctcagaattctttttaattgaagatgtcttgagctctgcaaagatcagagcaggtgagcatccactttgacatgaaggacaagaagacgcatggctcatggcgggcacatgcggctgccagtgagacagcgtctcctctgggagctgggcgggcacagcatcctcagttctgtgcccagccaagggtgagcatctctgctgagacagtccttttgctctcggaggccagggaagatggtacttagaggcttttcccctatcgctctgggtgtctaggaatcccaccagcttgtcttaacagtacaacagcttctttgaggacccagtgggtatggagtatagacagaacccagggttgagaacagaaggtgggcggcaggatcagagtgaaagcagaggcgtgaggagaggaaagcagggaggtctcctgggctgccaggtcagcctctctggcaaggctttcttgagccccgcccctttctttccccggagtccctccaccccataacaatacctcgaatttccaaaagaggtcaccagatgcacatgggccgcaaaacacacagtcaggcttccagcacattctcccccatttggaggatactcgaatgtcaggtttttggttttattattatttcagaactagctcagcccatctctaattataaaacatggttttgttttttttttttcctttttttcttgattaggtctggaacagctctagaatgaacacataaaatttagcaatttaaaatctttctttactgcaagtttaaatagttgtacagatagtttataagcacaatattttaagaaaaaaaagtggctggtctactaggcagcctttgtgccacttcagtgctagaaagttaaagaaaaaaaaacttttgtgatttaataatactatttctgtggaataattataaaagtatgacctttttaaatcaaccttatttggatgcatctgaaccagcagagctgtgttatattttctatctttgctagaacttcgtcattgaaggacaatttcttcaaagtggttacaattcataatgcagcagtttctccaaaaacaaaaacaaaacacacaccacacacacgcgcttttccagtcacacacccctgatgttggaaccaagtttttggaccttctgttccaaaaccttttgcaggtcaatctttgtatttgaaatgatccaatccaacttgaagtcaattgaatattaaggcgctttacttccgtgtgctttcagtttttccatcatgagatgaatgagcattactctagataaatttcaagacaggatactacaggtggcctgctgaggctgccccatattttagaaaatgtaaaaatggtggtttggccattaatttgtcttccatttgatgataccgcaaaattccgtgagtccattcctttggcatggcactttccctgggcctacagttggtattacctctgtgctcagtgccaggcaaaacactagctcaaaggagagtcaaggaaaccgctggcagacgataaccagtcgaaactcgtgacttcggtttgttgaactttggcagccagttggtgagggccagatgttattccctttcttaaagatactccaagccacatgccactaaccacaagcaagctggctgcaagactaaagagctgataacatagtttatttttacactgtcttattatagagaagtaatagacctatcagaacctgcactgaccaacaaataaacacatgttgccaagatgaatcggtctctatctctatctgcttattttggtactgaaagcaatagttcctcattcaaatcaccacccactgttctccccctttgggacatgttaggacgaggccctattccatgcccctctttaatggtggaacaaatgttaaactgctcatctaaagatcatgttgatattattccaggttttaagatcaacttttgttacatactgtaatttaaataaactgcatttacatgcctagtttctgtaatattgtgtatacaaaacccaaatctctcaaaatgtaaattatgtatacctgccaagataccttttccagggtgtctgcgcacattttaagttaattcacataatataaaaattactcaatgtgactgttgatttgctgaactttacatatcacaaagtgaattatttgtgatactttagttaataaaatggtaaatttttttctcagttattgaacaagcaagcattatccagttgatctggcaatgactttttgtgtgtgggccacaatattgattttcccattaacaatttttttttgttttttaaatactaatatgtttcacactatagtttgtgtaacaacacgtgttcgcattatctatgttgctgttacttttgtgcttttattctttttagactttataaaaaaaaaaaaaagctcctgtaatttgcactttctcccaatccttaaatctcttgtatggcaaccaaaattactgtaaaaaaataaatatactattgcactaaggttgtggttctgattgcaaacaaacagtgaacactgtctgaattaaacaaaaagctgcccgacttgcaatctaatgtagattatctcaggcattgtggccagctctgcctctctaaaactgaccagaaaaatctctctcatcgagtaaacaggctcctgtcactgagctaatctgccttggttccatttccttattctcaatttatcaatggatacgtgcatgttatttcagaattatgcaaaacgtcaaaatctgcttctgtgaccgctgctataggcgtggagctgaggctcggcttttccttttgttctgggtggaagcagcggtgccgcggagggccagccagatccggacccttcccttagggtccagtctccccacaccccagcagggtgtcttctagccataaggccaagggagtggcagaactgggccgcctctctggttgacaagcaaaccacatgctaaggcttggagcaagagagaatttgtgtctattggcaaagaactaagccaggaagacatgggccatccctccgctttagggaagcatattttaaacctaaacgttgaacttcttctttggcctcaccagtgaaaacttgttgtctttagttcctaaagtttcttctactttggcacattccccagttgagcagcagcctctatgcttccacgttcaggaaaaattccagtcctcatatcttttgtagttcaccctcaagctctcccgcttcaccatccaatagtttctcccaaaccttggcacccccctagactttgcttccaatggtttcttccagaccacttttcctagatgaatatattcgtttaccttactaggaaaattattggaagattttttcttttacttgaaattggaggcattttaataactggcgaactggaatgtgtttctgtatttgtagacaaccatgaacccatgcaagtaggtgaacattccacagtggctgggtgaccacagcagctgcatgcagacaggactgcccgtgctttgtggggaatcagagaatttccaaacttgtttctcagacttccgcagatctcatcactttgatttctaatccatgctgtattggtgattttgtttatcgttcctgtaacttgttctacattccacagtctttaccgttttatgttcaaaattacaacaatccctgtccattgattccactctggaactctttgttcatgccaattttgaaattttaatacgagccttcaaataaacacagaaaagaaaaaaaaaaaggaaaaaaaataaagtgtgtgccttgggtgttttgaacctgatctgcataaaaccatattgtattcaaatgctgtatctttcatgaaaggataaatatatcttcaatgtattaatgtagctgataaaatagttatagtgccttgttttctgaactgagaagcccatatcaatgcacaacgtaaagaaaggacggttcgagctatgaaatgttgaggacacctacacgtgattctggagcctttctcatcataagactgtggaaaatacacagtcgtttaagttaaaaataaaaagtaaattga

SEQ ID NO: 19012 - DNA, 1373 bp, Homo sapiens
  source 1..1373: mol_type = unassigned DNA
gatgaacgtccccggcggaggagcggccgcggtgatgatgacgggctacaataatggtcgctgtccccggaattctctctacagtgactgcattattgaggagaagacggtggtcctgcagaaaaaagacaatgagggctttggattcgtgcttcgaggggccaaagctgacacacccattgaagaattcacaccaacaccggctttcccagccctacagtacctggagtccgtggatgaaggtggggtggcgtggcaagccggactaaggaccggggacttcttgattgaggttaacaatgagaatgttgtcaaagtcggccacaggcaggtggtgaacatgatccggcagggagggaatcacctggtccttaaggtggtcacggtgaccaggaatctggaccccgacgacaccgccaggaagaaagctcccccgcctccaaagcgggcaccgaccacagccctcaccctgcgctccaagtccatgacctcggagctggaggagctcgtgcaagcctcggtccggaagaagaaggataaacccgaggagatagtcccggcctccaagccctcccgcgctgctgagaacatggctgtggaaccgagggtggcgaccatcaagcagcggcccagcagccggtgcttcccggcgggctcagacatgaactctgtgtacgaacgccaaggaatcgccgtgatgacgcccactgttcctgggagcccaaaagccccgtttctgggcatccctcgagaagcccggagatcatgagcaccatctcaggtacacggagcacgacggtcaccttcactgttcgccccggcacctcccagcccatcaccctgcagagccggccccccgactatgaaagcaggacctcaggaacaagacgtgccccaagccctgtggtctcgccaacagagatgaacaaagagaccctgcccgcccccctgtctgctgccaccgcctctccttctcccgctctctcagatgtctttagccttccaagccagcccccttctggggatctatttggcttgaacccagcgggacgcagtaggtcgccatccccctcgatactgcaacagccaatctcaaataagccttttacaactaaacctgtccacctgtggactaaaccagatgtggccgattggctggaaagtctaaacttgggtgaacataaagaggccttcatggacaatgagatcgatggcagtcacttaccaaacctgcagaaggaggacctcatcgatcttggggtaactcgagtcgggcacagaatgaacatagaaagggctttgaaacagctgctggacagataaggacggctgctctccacctcgcagactgctcttgttataagtagagatgg

SEQ ID NO: 19013 - DNA, 381 bp, Homo sapiens
  source 1..381: mol_type = unassigned DNA
agaaagctgctcccagttccggttcatcgaccactcagctttccattttctgaatggacctccgtggctcaagcaatcctctcacctcagcctcccaaggagttgggaccacagacacacagactacaggtctggaaatctctccaggcaccctgctttggccctctagaatacagacagttcctgctctaagaggccatctgtgaggctcagtctcccaacacctctggatcacactctgttgcccaagctgagagcagtggtgcagtcacagctcactgcagccttgacttcctagactcaagcaattctcctgcctcagcctcccaatagctggaaccacaggcatgtgccactacactcagctaatttttgattttt

SEQ ID NO: 19014 - DNA, 635 bp, Homo sapiens
  source 1..635: mol_type = unassigned DNA
agacccccctgaccttagccgctcagctggacgactctgtggaggtcatcaaagctctcaaaaatggtggagctcacctggacttccgtgccaaagatgggatgaccgccctacacaaagctgcccgagcgaggaaccaagttgccctgaagacccttttagagcttggtgcatccccagattataaagacagttacggcctcaccccgctgtatcacacagccatcgtcggaggtgatccctactgctgcgagcttctcctgcacgaacacgccactgtgtgctgcaaagatgagaacggctggcacgagatccaccaggcctgcaggtacgggcacgtgcagcacctggagcacctgctgttctacggggcagacatgagtgcccagaatgcctcggggaacacggccttgcacatctgcgccctctacaaccaggacagctgtgcaagagtgcttctgtttcgaggcggaaataaggagttaaaaaactacaacagccagactccatttcagccacagaaagcagctaccagagaccataggtgggtgtcagttcccacacttctgctgctcaggcccccccggacacacgaagccagggccgccctgccatctgcgtcccccagagtgctg

SEQ ID NO: 19015 - DNA, 736 bp, Homo sapiens
  source 1..736: mol_type = unassigned DNA
ctttgaaatggggctaatcactgcagttaagggagtgtccagaagtttgcatagcatcacatataggtggccataatagcaggcaactttgagctggcagaatacatcaagaaccacaaggaaacagacattgtgcccttccgagaggccccggcgtactccaaccgccggcggcggccccccaacacgctggccgccccccgggtcctgctgcgctccaacagtgacaacaacctcaatgccagcgctcccgactgggccgtctgctccacggccacctcgcaccgcagcctgtcaccccagctgctgcagcagatgcccagcaagcccgagggggccgcgaagaccattgggagctacgtgcccgggccccgcagccggtccccatcgctcaacaggctgggcggcgcaggcgaggacggcaagaggccgcagcctctctggcatgtcgggtcgccttttgctcttggtgccaacaaggactcactctcggccttcgagtacccggggcccaagcggaagctctacagtgccgtgcccgggaggctcttcgtcgctgtcaagccataccaaccccaagtggacggcgagatcccccttcaccgcggtgacagggtcaaagttctgagcatcggtgaagggggcttctgggaaggcagcgcccgcggccacatcggatggtttccggcggagtgcgtggaggaggtccagtgtaagcccagggacagccaggcag

SEQ ID NO: 19016 - DNA, 522 bp, Homo sapiens
  source 1..522: mol_type = unassigned DNA
cagccctacagtacctggagtccgtggatgaaggtggggtggcgtggcaagccggactaaggaccggggacttcttgattgaggctgtggatcaccggaagtcactcagcctctaaggtgaatacccacaagtacacccacatcctccagccccttggcactccctctcatggagccagctgggctgcagtgatcctggagggtgaccctgtctgaagctgcagcccacacacaccactggaggccgcagctgtggaggcagacccgggcctgcagcagagcaggatcaatgtcacccatatcttgtcaattgtgactgcaaacttcagaaggactcagagtggaaagtcttggcaaccatgttgcggttcagacagtgggagccatgcttctgcgaatgagcctggggactggggactgtggtcccagccctggatttgatgaggggagtatccctgtcctgcgagggtgcagtgtcacttttccactcccatttggggtcaactcttaacagcatccctg

SEQ ID NO: 19017 - DNA, 460 bp, Homo sapiens
  source 1..460: mol_type = unassigned DNA
gtacagaaacccgcgctgaccgcagcaagaagcttttcaggcactacaccgtgggctcctatgacagcttcgacacttccagtgactgcattattgaggagaagacggtggtcctgcagaaaaaagacaatgagggctttggattcgtgcttcgaggggccaaagctgacacacccattgaagaattcacaccaacaccggctttcccagccctacagtacctggagtccgtggatgaaggtggggtggcgtggcaagccggactaaggaccggggacttcttgattgaggttaacaatgagaatgttgtcaaagtcggccacaggcaggtggtgaacatgatccggcagggagggaatcacctggtccttaaggtggtcacggtgaccaggaatctggaccccgacgacaccgccaggaagaaagataaacccgaggagatagtcccggcctccaagcc

SEQ ID NO: 19018 - DNA, 939 bp, Homo sapiens
  source 1..939: mol_type = unassigned DNA
ctcctcctgcaccctcgctgcctcctttcctccatgctgcctggatctggcgagctggggtgattaattggctatgatgatgaacgtccccggcggaggagcggccgcggtgatgatgacgggctacaataatggtcgctgtccccggaattctctctacagtgactgcattattgaggagaagacggtggtcctgcagaaaaaagacaatgagggctttggattcgtgcttcgaggggccaaagctgacacacccattgaagaattcacaccaacaccggctttcccagccctacagtacctggagtccgtggatgaaggtggggtggcgtggcaagccggactaaggaccggggacttcttgattgaggttaacaatgagaatgttgtcaaagtcggccacaggcaggtggtgaacatgatccggcagggagggaatcacctggtccttaaggtggtcacggtgaccaggaatctggaccccgacgacaccgccaggaagaaagctcccccgcctccaaagcgggcaccgaccacagccctcaccctgcgctccaagtccatgacctcggagctggaggagctcgataaacccgaggagatagtcccggcctccaagccctcccgcgctgctgagaacatggctgtggaaccgagggtggcgaccatcaagcagcggcccagcagccggtgcttcccggcgggctcagacatgaactctgtgtacgaacgccaaggaatcgccgtgatgacgcccactgttcctgggagcccaaaagccccgtttctgggcatccctcgaggtacgatgcgaaggcagaaatcaataggtaagaagtgtggcactcccccacagaagttgcccctgggctttcaaacacagccttaggcccctcaggaattctgagccctgggcctctcacagttgccttggcgtcc

SEQ ID NO: 19019 - DNA, 9062 bp, Homo sapiens
  source 1..9062: mol_type = unassigned DNA
ctctagaatacagacagttcctgctctaagaggccatctgtgaggctcagtctcccaacacctctgacacaggcagccatgccgcgcagcccaacatccagcgaggacgagatggcccagagcttctccgactactccgtggggtcggagtcagacagctccaaagaagagaccatctatgacacgatccgggccactgcggagaagccgggcggtgccaggacggaggagagccagggcaacacgctggtgatccgcgtggtcatccatgacctgcagcagacgaaatgcattcgatttaacccggatgccacagtgtgggttgcaaagcagcggatcctgtgtacattaacccagagtttgaaagatgtcctgaactacggcctgttccagccggccagcaatgggcgtgacggcaagttcctggatgaggagcggctcctgcgcgagtacccacagcccgtgggtgagggcgttccttccctggagtttcgatacaagaagcgggtgtataaacaagccagtctcgatgagaaacagttggccaagctccacacgaagaccaatctgaagaaatgcatggatcacattcagcatcgcttggtggagaagatcaccaagatgctggaccgaggcctggatcccaatttccacgacccggagaccggagagacccccctgaccttagccgctcagctggacgactctgtggaggtcatcaaagctctcaaaaatggtggagctcacctggacttccgtgccaaagatgggatgaccgccctacacaaagctgcccgagcgaggaaccaagttgccctgaagacccttttagagcttggtgcatccccagattataaagacagttacggcctcaccccgctgtatcacacagccatcgtcggaggtgatccctactgctgcgagcttctcctgcacgaacacgccactgtgtgctgcaaagatgagaacggctggcacgagatccaccaggcctgcaggtacgggcacgtgcagcacctggagcacctgctgttctacggggcagacatgagtgcccagaatgcctcggggaacacggccttgcacatctgcgccctctacaaccaggacagctgtgcaagagtgcttctgtttcgaggcggaaataaggagttaaaaaactacaacagccagactccatttcaggtggccataatagcaggcaactttgagctggcagaatacatcaagaaccacaaggaaacagacattgtgcccttccgagaggccccggcgtactccaaccgccggcggcggccccccaacacgctggccgccccccgggtcctgctgcgctccaacagtgacaacaacctcaatgccagcgctcccgactgggccgtctgctccacggccacctcgcaccgcagcctgtcaccccagctgctgcagcagatgcccagcaagcccgagggggccgcgaagaccattgggagctacgtgcccgggccccgcagccggtccccatcgctcaacaggctgggcggcgcaggcgaggacggcaagaggccgcagcctctctggcatgtcgggtcgccttttgctcttggtgccaacaaggactcactctcggccttcgagtacccggggcccaagcggaagctctacagtgccgtgcccgggaggctcttcgtcgctgtcaagccataccaaccccaagtggacggcgagatcccccttcaccgcggtgacagggtcaaagttctgagcatcggtgaagggggcttctgggaaggcagcgcccgcggccacatcggatggtttccggcggagtgcgtggaggaggtccagtgtaagcccagggacagccaggcagaaacccgcgctgaccgcagcaagaagcttttcaggcactacaccgtgggctcctatgacagcttcgacacttccagtgactgcattattgaggagaagacggtggtcctgcagaaaaaagacaatgagggctttggattcgtgcttcgaggggccaaagctgacacacccattgaagaattcacaccaacaccggctttcccagccctacagtacctggagtccgtggatgaaggtggggtggcgtggcaagccggactaaggaccggggacttcttgattgaggttaacaatgagaatgttgtcaaagtcggccacaggcaggtggtgaacatgatccggcagggagggaatcacctggtccttaaggtggtcacggtgaccaggaatctggaccccgacgacaccgccaggaagaaagctcccccgcctccaaagcgggcaccgaccacagccctcaccctgcgctccaagtccatgacctcggagctggaggagctcgtggataaagcctcggtccggaagaagaaggataaacccgaggagatagtcccggcctccaagccctcccgcgctgctgagaacatggctgtggaaccgagggtggcgaccatcaagcagcggcccagcagccggtgcttcccggcgggctcagacatgaactctgtgtacgaacgccaaggaatcgccgtgatgacgcccactgttcctgggagcccaaaagccccgtttctgggcatccctcgaggtacgatgcgaaggcagaaatcaatagacagcagaatctttctatcaggaataacagaggaagagcggcagtttctggctcctccaatgctgaagttcaccagaagcctgtccatgccggacacctctgaggacatcccccctccaccgcagtctgtgcccccgtccccaccaccaccttccccaaccacttacaactgccccaagtccccaactccaagagtctacgggacgattaagcctgcgttcaatcagaattctgccgccaaggtgtcccccgccaccaggtccgacaccgtggccaccatgatgagggagaaggggatgtacttcaggagagagctggaccgctactccttggactctgaagacctctacagtcggaatgccggcccgcaagccaacttccgcaacaagagaggccagatgccagaaaacccatactcagaggtggggaagatcgccagcaaagccgtctacgtccccgccaagcccgccaggcggaaggggatgctggtgaagcagtccaacgtggaggacagccccgagaagacgtgctccatccctatcccgaccatcatcgtgaaggagccgtccaccagcagcagcggcaagagcagccagggcagcagcatggagatcgacccccaggccccggagccaccgagccagctgcggcctgacgaaagcctgaccgtcagcagcccctttgccgccgccatcgccggagccgtccgcgaccgtgagaagcggctggaagccaggaggaactccccggccttcctctccacagacctgggggatgaggatgtgggcctggggccacccgcccccaggacgcggccctccatgttccccgaggagggggattttgctgacgaggacagcgctgagcagctgtcatcccccatgccgagtgccacgcccagggagcccgaaaaccatttcgtgggtggcgccgaggccagtgctccgggtgaggctgggaggccgctgaattccacgtccaaagcccaggggcccgagagcagcccagcagtgccctccgcgagcagcggcacagccggccccgggaattatgtccacccactcacagggcggctgcttgatcccagctccccgctggccctggcactctccgcaagggaccgagccatgaaggagtctcaacagggacccaaaggggaggcccccaaggccgacctcaacaaacctctttacattgataccaaaatgcggcccagcctggatgccggcttccctacggtcaccaggcagaacacccggggacccctgaggcggcaggagacggagaacaagtacgagaccgacctgggccgagaccggaaaggcgatgacaagaagaacatgctgatcgacatcatggacacgtcccagcagaagtcggctggcctgctgatggtgcacaccgtggacgccactaagctggacaacgccctgcaggaagaggacgagaaggcagaggtggagatgaagccagacagctcgccgtccgaggtgccagaaggtgtttccgaaaccgaaggtgctttacagatctccgctgcccccgagcccaccaccgtgcccggcagaaccatcgtcgcggtgggctccatggaagaggcggtgattttgccattccgcatccctcctccccctctggcatccgtggacttggatgaggattttatttttacagagccattgcctcctcccctggaatttgcaaatagttttgatatccccgatgaccgggcagcttctgtcccggctctctcagacttagtgaagcagaagaaaagcgacacccctcagtccccttcgttgaactccagccaaccaaccaactctgcagacagcaagaagccagccagtctttcaaactgtctgcctgcctcattcctgccaccccctgaaagctttgacgccgtcgccgactctgggatcgaggaggtggacagccggagtagcagcgaccaccacctcgagacgaccagcactatctccaccgtgtctagcatctccaccctgtcttccgaaggtggagagaatgtggacacctgcacagtctatgcagatgggcaagcatttatggttgacaaacccccagtacctcctaagccaaaaatgaagcccatcattcacaaaagcaatgcactttatcaagacgcgctcgtggaagaagatgtagatagctttgttatccccccgcccgctcccccgcccccgccgggcagtgcccagcctgggatggccaaggttctccagccaaggacctccaagttgtggggcgacgtcacagagatcaaaagcccgattctctcaggcccaaaggcaaacgttattagtgaattgaactctatcctacagcaaatgaaccgagagaaattggcaaagccgggggaaggactggattcaccaatgggagccaagtccgccagcctcgctccaagaagcccggagatcatgagcaccatctcaggtacacggagcacgacggtcaccttcactgttcgccccggcacctcccagcccatcaccctgcagagccggccccccgactatgaaagcaggacctcaggaacaagacgtgccccaagccctgtggtctcgccaacagagatgaacaaagagaccctgcccgcccccctgtctgctgccaccgcctctccttctcccgctctctcagatgtctttagccttccaagccagcccccttctggggatctatttggcttgaacccagcgggacgcagtaggtcgccatccccctcgatactgcaacagccaatctcaaataagccttttacaactaaacctgtccacctgtggactaaaccagatgtggccgattggctggaaagtctaaacttgggtgaacataaagaggccttcatggacaatgagatcgatggcagtcacttaccaaacctgcagaaggaggacctcatcgatcttggggtaactcgagtcgggcacagaatgaacatagaaagggctttgaaacagctgctggacagataaggacggctgctctccacctcgcagactgctcttgttataagtagagatgggctcgtgctgaaacatctgaatgccaagcgaagtctgtgagcatcaaccccactccatgggtttgtctcctggtacccaaagaaatactgagttgtgtccacaacatggctgggtcttcagacccctggctcaccatgtgggtgtcttgggcagtttctatcacacatgggacaaggggagggagtttttctaacatggaaaaagattctcagcctgccgcccagcatgcaggtggcctcgctttgccgggtccgagaggctccccgtcaattttgcacgggatcctagctcttgtaggcagacaccagtgcactctagatacctcctgagacctccgtcctctgctttccgggcagctctcaccaccccaggccccggcatgaggcctttcctcagtcctgtggcctctcagaggacacctgatgctcacctgcccctctttctcctgcacttggcttgcagtgagatgctcccagatgcatttgtccagtgccccatcatgggcctgaaaggcagagaaactttttcctacacagattcttttccccatctcctcctgtggtttgcatccatggctctttggccatgaggttcctggcagtgctgggagtttggatgggatcgtgcccagctttgcttagctttctttatttctgcaaatctgttagcataattccaaggtggccaagcagatgtcacatggagttagtcaaagcacaaagtcacgattccacaatggaggggagacctggccaagggagccagccagcgtgcaactgcccaagctccaggtctccaggacaagagcagttgtctgccatgagcacccatccaggatggagaataagggcttctctgcctctcagaattctttttaattgaagatgtcttgagctctgcaaagatcagagcaggtgagcatccactttgacatgaaggacaagaagacgcatggctcatggcgggcacatgcggctgccagtgagacagcgtctcctctgggagctgggcgggcacagcatcctcagttctgtgcccagccaagggtgagcatctctgctgagacagtccttttgctctcggaggccagggaagatggtacttagaggcttttcccctatcgctctgggtgtctaggaatcccaccagcttgtcttaacagtacaacagcttctttgaggacccagtgggtatggagtatagacagaacccagggttgagaacagaaggtgggcggcaggatcagagtgaaagcagaggcgtgaggagaggaaagcagggaggtctcctgggctgccaggtcagcctctctggcaaggctttcttgagccccgcccctttctttccccggagtccctccaccccataacaatacctcgaatttccaaaagaggtcaccagatgcacatgggccgcaaaacacacagtcaggcttccagcacattctcccccatttggaggatactcgaatgtcaggtttttggttttattattatttcagaactagctcagcccatctctaattataaaacatggttttgttttttttttttcctttttttcttgattaggtctggaacagctctagaatgaacacataaaatttagcaatttaaaatctttctttactgcaagtttaaatagttgtacagatagtttataagcacaatattttaagaaaaaaaagtggctggtctactaggcagcctttgtgccacttcagtgctagaaagttaaagaaaaaaaaacttttgtgatttaataatactatttctgtggaataattataaaagtatgacctttttaaatcaaccttatttggatgcatctgaaccagcagagctgtgttatattttctatctttgctagaacttcgtcattgaaggacaatttcttcaaagtggttacaattcataatgcagcagtttctccaaaaacaaaaacaaaacacacaccacacacacgcgcttttccagtcacacacccctgatgttggaaccaagtttttggaccttctgttccaaaaccttttgcaggtcaatctttgtatttgaaatgatccaatccaacttgaagtcaattgaatattaaggcgctttacttccgtgtgctttcagtttttccatcatgagatgaatgagcattactctagataaatttcaagacaggatactacaggtggcctgctgaggctgccccatattttagaaaatgtaaaaatggtggtttggccattaatttgtcttccatttgatgataccgcaaaattccgtgagtccattcctttggcatggcactttccctgggcctacagttggtattacctctgtgctcagtgccaggcaaaacactagctcaaaggagagtcaaggaaaccgctggcagacgataaccagtcgaaactcgtgacttcggtttgttgaactttggcagccagttggtgagggccagatgttattccctttcttaaagatactccaagccacatgccactaaccacaagcaagctggctgcaagactaaagagctgataacatagtttatttttacactgtcttattatagagaagtaatagacctatcagaacctgcactgaccaacaaataaacacatgttgccaagatgaatcggtctctatctctatctgcttattttggtactgaaagcaatagttcctcattcaaatcaccacccactgttctccccctttgggacatgttaggacgaggccctattccatgcccctctttaatggtggaacaaatgttaaactgctcatctaaagatcatgttgatattattccaggttttaagatcaacttttgttacatactgtaatttaaataaactgcatttacatgcctagtttctgtaatattgtgtatacaaaacccaaatctctcaaaatgtaaattatgtatacctgccaagataccttttccagggtgtctgcgcacattttaagttaattcacataatataaaaattactcaatgtgactgttgatttgctgaactttacatatcacaaagtgaattatttgtgatactttagttaataaaatggtaaatttttttctcagttattgaacaagcaagcattatccagttgatctggcaatgactttttgtgtgtgggccacaatattgattttcccattaacaatttttttttgttttttaaatactaatatgtttcacactatagtttgtgtaacaacacgtgttcgcattatctatgttgctgttacttttgtgcttttattctttttagactttataaaaaaaaaaaaaagctcctgtaatttgcactttctcccaatccttaaatctcttgtatggcaaccaaaattactgtaaaaaaataaatatactattgcact

SEQ ID NO: 19020 - DNA, 7271 bp, Homo sapiens
  source 1..7271: mol_type = unassigned DNA
tcctttcctccatgctgcctggatctggcgagctggggtgattaattggctatgatgatgaacgtccccggcggaggagcggccgcggtgatgatgacgggctacaataatggtcgctgtccccggaattctctctacagtgactgcattattgaggagaagacggtggtcctgcagaaaaaagacaatgagggctttggattcgtgcttcgaggggccaaagctgacacacccattgaagaattcacaccaacaccggctttcccagccctacagtacctggagtccgtggatgaaggtggggtggcgtggcaagccggactaaggaccggggacttcttgattgaggttaacaatgagaatgttgtcaaagtcggccacaggcaggtggtgaacatgatccggcagggagggaatcacctggtccttaaggtggtcacggtgaccaggaatctggaccccgacgacaccgccaggaagaaagctcccccgcctccaaagcgggcaccgaccacagccctcaccctgcgctccaagtccatgacctcggagctggaggagctcgtggataaagcctcggtccggaagaagaaggataaacccgaggagatagtcccggcctccaagccctcccgcgctgctgagaacatggctgtggaaccgagggtggcgaccatcaagcagcggcccagcagccggtgcttcccggcgggctcagacatgaactctgtgtacgaacgccaaggaatcgccgtgatgacgcccactgttcctgggagcccaaaagccccgtttctgggcatccctcgaggtacgatgcgaaggcagaaatcaatagacagcagaatctttctatcaggaataacagaggaagagcggcagtttctggctcctccaatgctgaagttcaccagaagcctgtccatgccggacacctctgaggacatcccccctccaccgcagtctgtgcccccgtccccaccaccaccttccccaaccacttacaactgccccaagtccccaactccaagagtctacgggacgattaagcctgcgttcaatcagaattctgccgccaaggtgtcccccgccaccaggtccgacaccgtggccaccatgatgagggagaaggggatgtacttcaggagagagctggaccgctactccttggactctgaagacctctacagtcggaatgccggcccgcaagccaacttccgcaacaagagaggccagatgccagaaaacccatactcagaggtggggaagatcgccagcaaagccgtctacgtccccgccaagcccgccaggcggaaggggatgctggtgaagcagtccaacgtggaggacagccccgagaagacgtgctccatccctatcccgaccatcatcgtgaaggagccgtccaccagcagcagcggcaagagcagccagggcagcagcatggagatcgacccccaggccccggagccaccgagccagctgcggcctgacgaaagcctgaccgtcagcagcccctttgccgccgccatcgccggagccgtccgcgaccgtgagaagcggctggaagccaggaggaactccccggccttcctctccacagacctgggggatgaggatgtgggcctggggccacccgcccccaggacgcggccctccatgttccccgaggagggggattttgctgacgaggacagcgctgagcagctgtcatcccccatgccgagtgccacgcccagggagcccgaaaaccatttcgtgggtggcgccgaggccagtgctccgggtgaggctgggaggccgctgaattccacgtccaaagcccaggggcccgagagcagcccagcagtgccctccgcgagcagcggcacagccggccccgggaattatgtccacccactcacagggcggctgcttgatcccagctccccgctggccctggcactctccgcaagggaccgagccatgaaggagtctcaacagggacccaaaggggaggcccccaaggccgacctcaacaaacctctttacattgataccaaaatgcggcccagcctggatgccggcttccctacggtcaccaggcagaacacccggggacccctgaggcggcaggagacggagaacaagtacgagaccgacctgggccgagaccggaaaggcgatgacaagaagaacatgctgatcgacatcatggacacgtcccagcagaagtcggctggcctgctgatggtgcacaccgtggacgccactaagctggacaacgccctgcaggaagaggacgagaaggcagaggtggagatgaagccagacagctcgccgtccgaggtgccagaaggtgtttccgaaaccgaaggtgctttacagatctccgctgcccccgagcccaccaccgtgcccggcagaaccatcgtcgcggtgggctccatggaagaggcggtgattttgccattccgcatccctcctccccctctggcatccgtggacttggatgaggattttatttttacagagccattgcctcctcccctggaatttgcaaatagttttgatatccccgatgaccgggcagcttctgtcccggctctctcagacttagtgaagcagaagaaaagcgacacccctcagtccccttcgttgaactccagccaaccaaccaactctgcagacagcaagaagccagccagtctttcaaactgtctgcctgcctcattcctgccaccccctgaaagctttgacgccgtcgccgactctgggatcgaggaggtggacagccggagtagcagcgaccaccacctcgagacgaccagcactatctccaccgtgtctagcatctccaccctgtcttccgaaggtggagagaatgtggacacctgcacagtctatgcagatgggcaagcatttatggttgacaaacccccagtacctcctaagccaaaaatgaagcccatcattcacaaaagcaatgcactttatcaagacgcgctcgtggaagaagatgtagatagctttgttatccccccgcccgctcccccgcccccgccgggcagtgcccagcctgggatggccaaggttctccagccaaggacctccaagttgtggggcgacgtcacagagatcaaaagcccgattctctcaggcccaaaggcaaacgttattagtgaattgaactctatcctacagcaaatgaaccgagagaaattggcaaagccgggggaaggactggattcaccaatgggagccaagtccgccagcctcgctccaagaagcccggagatcatgagcaccatctcaggtacacggagcacgacggtcaccttcactgttcgccccggcacctcccagcccatcaccctgcagagccggccccccgactatgaaagcaggacctcaggaacaagacgtgccccaagccctgtggtctcgccaacagagatgaacaaagagaccctgcccgcccccctgtctgctgccaccgcctctccttctcccgctctctcagatgtctttagccttccaagccagcccccttctggggatctatttggcttgaacccagcgggacgcagtaggtcgccatccccctcgatactgcaacagccaatctcaaataagccttttacaactaaacctgtccacctgtggactaaaccagatgtggccgattggctggaaagtctaaacttgggtgaacataaagaggccttcatggacaatgagatcgatggcagtcacttaccaaacctgcagaaggaggacctcatcgatcttggggtaactcgagtcgggcacagaatgaacatagaaagggctttgaaacagctgctggacagataaggacggctgctctccacctcgcagactgctcttgttataagtagagatgggctcgtgctgaaacatctgaatgccaagcgaagtctgtgagcatcaaccccactccatgggtttgtctcctggtacccaaagaaatactgagttgtgtccacaacatggctgggtcttcagacccctggctcaccatgtgggtgtcttgggcagtttctatcacacatgggacaaggggagggagtttttctaacatggaaaaagattctcagcctgccgcccagcatgcaggtggcctcgctttgccgggtccgagaggctccccgtcaattttgcacgggatcctagctcttgtaggcagacaccagtgcactctagatacctcctgagacctccgtcctctgctttccgggcagctctcaccaccccaggccccggcatgaggcctttcctcagtcctgtggcctctcagaggacacctgatgctcacctgcccctctttctcctgcacttggcttgcagtgagatgctcccagatgcatttgtccagtgccccatcatgggcctgaaaggcagagaaactttttcctacacagattcttttccccatctcctcctgtggtttgcatccatggctctttggccatgaggttcctggcagtgctgggagtttggatgggatcgtgcccagctttgcttagctttctttatttctgcaaatctgttagcataattccaaggtggccaagcagatgtcacatggagttagtcaaagcacaaagtcacgattccacaatggaggggagacctggccaagggagccagccagcgtgcaactgcccaagctccaggtctccaggacaagagcagttgtctgccatgagcacccatccaggatggagaataagggcttctctgcctctcagaattctttttaattgaagatgtcttgagctctgcaaagatcagagcaggtgagcatccactttgacatgaaggacaagaagacgcatggctcatggcgggcacatgcggctgccagtgagacagcgtctcctctgggagctgggcgggcacagcatcctcagttctgtgcccagccaagggtgagcatctctgctgagacagtccttttgctctcggaggccagggaagatggtacttagaggcttttcccctatcgctctgggtgtctaggaatcccaccagcttgtcttaacagtacaacagcttctttgaggacccagtgggtatggagtatagacagaacccagggttgagaacagaaggtgggcggcaggatcagagtgaaagcagaggcgtgaggagaggaaagcagggaggtctcctgggctgccaggtcagcctctctggcaaggctttcttgagccccgcccctttctttccccggagtccctccaccccataacaatacctcgaatttccaaaagaggtcaccagatgcacatgggccgcaaaacacacagtcaggcttccagcacattctcccccatttggaggatactcgaatgtcaggtttttggttttattattatttcagaactagctcagcccatctctaattataaaacatggttttgttttttttttttcctttttttcttgattaggtctggaacagctctagaatgaacacataaaatttagcaatttaaaatctttctttactgcaagtttaaatagttgtacagatagtttataagcacaatattttaagaaaaaaaagtggctggtctactaggcagcctttgtgccacttcagtgctagaaagttaaagaaaaaaaaacttttgtgatttaataatactatttctgtggaataattataaaagtatgacctttttaaatcaaccttatttggatgcatctgaaccagcagagctgtgttatattttctatctttgctagaacttcgtcattgaaggacaatttcttcaaagtggttacaattcataatgcagcagtttctccaaaaacaaaaacaaaacacacaccacacacacgcgcttttccagtcacacacccctgatgttggaaccaagtttttggaccttctgttccaaaaccttttgcaggtcaatctttgtatttgaaatgatccaatccaacttgaagtcaattgaatattaaggcgctttacttccgtgtgctttcagtttttccatcatgagatgaatgagcattactctagataaatttcaagacaggatactacaggtggcctgctgaggctgccccatattttagaaaatgtaaaaatggtggtttggccattaatttgtcttccatttgatgataccgcaaaattccgtgagtccattcctttggcatggcactttccctgggcctacagttggtattacctctgtgctcagtgccaggcaaaacactagctcaaaggagagtcaaggaaaccgctggcagacgataaccagtcgaaactcgtgacttcggtttgttgaactttggcagccagttggtgagggccagatgttattccctttcttaaagatactccaagccacatgccactaaccacaagcaagctggctgcaagactaaagagctgataacatagtttatttttacactgtcttattatagagaagtaatagacctatcagaacctgcactgaccaacaaataaacacatgttgccaagatgaatcggtctctatctctatctgcttattttggtactgaaagcaatagttcctcattcaaatcaccacccactgttctccccctttgggacatgttaggacgaggccctattccatgcccctctttaatggtggaacaaatgttaaactgctcatctaaagatcatgttgatattattccaggttttaagatcaacttttgttacatactgtaatttaaataaactgcatttacatgcctagtttctgtaatattgtgtatacaaaacccaaatctctcaaaatgtaaattatgtatacctgccaagataccttttccagggtgtctgcgcacattttaagttaattcacataatataaaaattactcaatgtgactgttgatttgctgaactttacatatcacaaagtgaattatttgtgatactttagttaataaaatggtaaatttttttctcagttattgaacaagcaagcattatccagttgatctggcaatgactttttgtgtgtgggccacaatattgattttcccattaacaatttttttttgttttttaaatactaatatgtttcacactatagtttgtgtaacaacacgtgttcgcattatctatgttgctgttacttttgtgcttttattctttttagactttataaaaaaaaaaaaaagctcctgtaatttgcactttctcccaatccttaaatctcttgtatggcaaccaaaattactgtaaaaaaataaatatactattgcact

SEQ ID NO: 19021 - DNA, 6821 bp, Homo sapiens
  source 1..6821: mol_type = unassigned DNA
ctggtccttaaggtggtcacggtgaccaggaatctggaccccgacgacaccgccaggaagaaagctcccccgcctccaaagcgggcaccgaccacagccctcaccctgcgctccaagtccatgacctcggagctggaggagctcgataaacccgaggagatagtcccggcctccaagccctcccgcgctgctgagaacatggctgtggaaccgagggtggcgaccatcaagcagcggcccagcagccggtgcttcccggcgggctcagacatgaactctgtgtacgaacgccaaggaatcgccgtgatgacgcccactgttcctgggagcccaaaagccccgtttctgggcatccctcgaggtacgatgcgaaggcagaaatcaatagacagcagaatctttctatcaggaataacagaggaagagcggcagtttctggctcctccaatgctgaagttcaccagaagcctgtccatgccggacacctctgaggacatcccccctccaccgcagtctgtgcccccgtccccaccaccaccttccccaaccacttacaactgccccaagtccccaactccaagagtctacgggacgattaagcctgcgttcaatcagaattctgccgccaaggtgtcccccgccaccaggtccgacaccgtggccaccatgatgagggagaaggggatgtacttcaggagagagctggaccgctactccttggactctgaagacctctacagtcggaatgccggcccgcaagccaacttccgcaacaagagaggccagatgccagaaaacccatactcagaggtggggaagatcgccagcaaagccgtctacgtccccgccaagcccgccaggcggaaggggatgctggtgaagcagtccaacgtggaggacagccccgagaagacgtgctccatccctatcccgaccatcatcgtgaaggagccgtccaccagcagcagcggcaagagcagccagggcagcagcatggagatcgacccccaggccccggagccaccgagccagctgcggcctgacgaaagcctgaccgtcagcagcccctttgccgccgccatcgccggagccgtccgcgaccgtgagaagcggctggaagccaggaggaactccccggccttcctctccacagacctgggggatgaggatgtgggcctggggccacccgcccccaggacgcggccctccatgttccccgaggagggggattttgctgacgaggacagcgctgagcagctgtcatcccccatgccgagtgccacgcccagggagcccgaaaaccatttcgtgggtggcgccgaggccagtgctccgggtgaggctgggaggccgctgaattccacgtccaaagcccaggggcccgagagcagcccagcagtgccctccgcgagcagcggcacagccggccccgggaattatgtccacccactcacagggcggctgcttgatcccagctccccgctggccctggcactctccgcaagggaccgagccatgaaggagtctcaacagggacccaaaggggaggcccccaaggccgacctcaacaaacctctttacattgataccaaaatgcggcccagcctggatgccggcttccctacggtcaccaggcagaacacccggggacccctgaggcggcaggagacggagaacaagtacgagaccgacctgggccgagaccggaaaggcgatgacaagaagaacatgctgatcgacatcatggacacgtcccagcagaagtcggctggcctgctgatggtgcacaccgtggacgccactaagctggacaacgccctgcaggaagaggacgagaaggcagaggtggagatgaagccagacagctcgccgtccgaggtgccagaaggtgtttccgaaaccgaaggtgctttacagatctccgctgcccccgagcccaccaccgtgcccggcagaaccatcgtcgcggtgggctccatggaagaggcggtgattttgccattccgcatccctcctccccctctggcatccgtggacttggatgaggattttatttttacagagccattgcctcctcccctggaatttgcaaatagttttgatatccccgatgaccgggcagcttctgtcccggctctctcagacttagtgaagcagaagaaaagcgacacccctcagtccccttcgttgaactccagccaaccaaccaactctgcagacagcaagaagccagccagtctttcaaactgtctgcctgcctcattcctgccaccccctgaaagctttgacgccgtcgccgactctgggatcgaggaggtggacagccggagtagcagcgaccaccacctcgagacgaccagcactatctccaccgtgtctagcatctccaccctgtcttccgaaggtggagagaatgtggacacctgcacagtctatgcagatgggcaagcatttatggttgacaaacccccagtacctcctaagccaaaaatgaagcccatcattcacaaaagcaatgcactttatcaagacgcgctcgtggaagaagatgtagatagctttgttatccccccgcccgctcccccgcccccgccgggcagtgcccagcctgggatggccaaggttctccagccaaggacctccaagttgtggggcgacgtcacagagatcaaaagcccgattctctcaggcccaaaggcaaacgttattagtgaattgaactctatcctacagcaaatgaaccgagagaaattggcaaagccgggggaaggactggattcaccaatgggagccaagtccgccagcctcgctccaagaagcccggagatcatgagcaccatctcaggtacacggagcacgacggtcaccttcactgttcgccccggcacctcccagcccatcaccctgcagagccggccccccgactatgaaagcaggacctcaggaacaagacgtgccccaagccctgtggtctcgccaacagagatgaacaaagagaccctgcccgcccccctgtctgctgccaccgcctctccttctcccgctctctcagatgtctttagccttccaagccagcccccttctggggatctatttggcttgaacccagcgggacgcagtaggtcgccatccccctcgatactgcaacagccaatctcaaataagccttttacaactaaacctgtccacctgtggactaaaccagatgtggccgattggctggaaagtctaaacttgggtgaacataaagaggccttcatggacaatgagatcgatggcagtcacttaccaaacctgcagaaggaggacctcatcgatcttggggtaactcgagtcgggcacagaatgaacatagaaagggctttgaaacagctgctggacagataaggacggctgctctccacctcgcagactgctcttgttataagtagagatgggctcgtgctgaaacatctgaatgccaagcgaagtctgtgagcatcaaccccactccatgggtttgtctcctggtacccaaagaaatactgagttgtgtccacaacatggctgggtcttcagacccctggctcaccatgtgggtgtcttgggcagtttctatcacacatgggacaaggggagggagtttttctaacatggaaaaagattctcagcctgccgcccagcatgcaggtggcctcgctttgccgggtccgagaggctccccgtcaattttgcacgggatcctagctcttgtaggcagacaccagtgcactctagatacctcctgagacctccgtcctctgctttccgggcagctctcaccaccccaggccccggcatgaggcctttcctcagtcctgtggcctctcagaggacacctgatgctcacctgcccctctttctcctgcacttggcttgcagtgagatgctcccagatgcatttgtccagtgccccatcatgggcctgaaaggcagagaaactttttcctacacagattcttttccccatctcctcctgtggtttgcatccatggctctttggccatgaggttcctggcagtgctgggagtttggatgggatcgtgcccagctttgcttagctttctttatttctgcaaatctgttagcataattccaaggtggccaagcagatgtcacatggagttagtcaaagcacaaagtcacgattccacaatggaggggagacctggccaagggagccagccagcgtgcaactgcccaagctccaggtctccaggacaagagcagttgtctgccatgagcacccatccaggatggagaataagggcttctctgcctctcagaattctttttaattgaagatgtcttgagctctgcaaagatcagagcaggtgagcatccactttgacatgaaggacaagaagacgcatggctcatggcgggcacatgcggctgccagtgagacagcgtctcctctgggagctgggcgggcacagcatcctcagttctgtgcccagccaagggtgagcatctctgctgagacagtccttttgctctcggaggccagggaagatggtacttagaggcttttcccctatcgctctgggtgtctaggaatcccaccagcttgtcttaacagtacaacagcttctttgaggacccagtgggtatggagtatagacagaacccagggttgagaacagaaggtgggcggcaggatcagagtgaaagcagaggcgtgaggagaggaaagcagggaggtctcctgggctgccaggtcagcctctctggcaaggctttcttgagccccgcccctttctttccccggagtccctccaccccataacaatacctcgaatttccaaaagaggtcaccagatgcacatgggccgcaaaacacacagtcaggcttccagcacattctcccccatttggaggatactcgaatgtcaggtttttggttttattattatttcagaactagctcagcccatctctaattataaaacatggttttgttttttttttttcctttttttcttgattaggtctggaacagctctagaatgaacacataaaatttagcaatttaaaatctttctttactgcaagtttaaatagttgtacagatagtttataagcacaatattttaagaaaaaaaagtggctggtctactaggcagcctttgtgccacttcagtgctagaaagttaaagaaaaaaaaacttttgtgatttaataatactatttctgtggaataattataaaagtatgacctttttaaatcaaccttatttggatgcatctgaaccagcagagctgtgttatattttctatctttgctagaacttcgtcattgaaggacaatttcttcaaagtggttacaattcataatgcagcagtttctccaaaaacaaaaacaaaacacacaccacacacacgcgcttttccagtcacacacccctgatgttggaaccaagtttttggaccttctgttccaaaaccttttgcaggtcaatctttgtatttgaaatgatccaatccaacttgaagtcaattgaatattaaggcgctttacttccgtgtgctttcagtttttccatcatgagatgaatgagcattactctagataaatttcaagacaggatactacaggtggcctgctgaggctgccccatattttagaaaatgtaaaaatggtggtttggccattaatttgtcttccatttgatgataccgcaaaattccgtgagtccattcctttggcatggcactttccctgggcctacagttggtattacctctgtgctcagtgccaggcaaaacactagctcaaaggagagtcaaggaaaccgctggcagacgataaccagtcgaaactcgtgacttcggtttgttgaactttggcagccagttggtgagggccagatgttattccctttcttaaagatactccaagccacatgccactaaccacaagcaagctggctgcaagactaaagagctgataacatagtttatttttacactgtcttattatagagaagtaatagacctatcagaacctgcactgaccaacaaataaacacatgttgccaagatgaatcggtctctatctctatctgcttattttggtactgaaagcaatagttcctcattcaaatcaccacccactgttctccccctttgggacatgttaggacgaggccctattccatgcccctctttaatggtggaacaaatgttaaactgctcatctaaagatcatgttgatattattccaggttttaagatcaacttttgttacatactgtaatttaaataaactgcatttacatgcctagtttctgtaatattgtgtatacaaaacccaaatctctcaaaatgtaaattatgtatacctgccaagataccttttccagggtgtctgcgcacattttaagttaattcacataatataaaaattactcaatgtgactgttgatttgctgaactttacatatcacaaagtgaattatttgtgatactttagttaataaaatggtaaatttttttctcagttattgaacaagcaagcattatccagttgatctggcaatgactttttgtgtgtgggccacaatattgattttcccattaacaatttttttttgttttttaaatactaatatgtttcacactatagtttgtgtaacaacacgtgttcgcattatctatgttgctgttacttttgtgcttttattctttttagactttataaaaaaaaaaaaaagctcctgtaatttgcactttctcccaatccttaaatctcttgtatggcaaccaaaattactgtaaaaaaataaatatactattgcact

SEQ ID NO: 19022 - DNA, 9208 bp, Homo sapiens
  source 1..9208: mol_type = unassigned DNA
ttaaacccccttcaaggaaaagcaaaacaaaactgctgcctcatttctcctctggctgattttcccgggcttccctggaagatgcgtgtggtcgggacaagccggaggagctcattcccgacgccgccgctgctgaggccgccgctgccgccgccgccgttcgggccacttactttctttgccctgggcggcgtcctggccagccccccttgagcctccagctcagccatccctcaggcagccgccccaccatgtatgactccttcctccggctggctccggctctgcctgcccccaccctgcaagtctcattgtgccacgctcgcctatcccggtagccacccccctcttccttcgctcctcctgcaccctcgctgcctcctttcctccatgctgcctggatctggcgagctggggtgattaattggctatgatgatgaacgtccccggcggaggagcggccgcggtgatgatgacgggctacaataatggtcgctgtccccggaattctctctacagtgactgcattattgaggagaagacggtggtcctgcagaaaaaagacaatgagggctttggattcgtgcttcgaggggccaaagctgacacacccattgaagaattcacaccaacaccggctttcccagccctacagtacctggagtccgtggatgaaggtggggtggcgtggcaagccggactaaggaccggggacttcttgattgaggttaacaatgagaatgttgtcaaagtcggccacaggcaggtggtgaacatgatccggcagggagggaatcacctggtccttaaggtggtcacggtgaccaggaatctggaccccgacgacaccgccaggaagaaagctcccccgcctccaaagcgggcaccgaccacagccctcaccctgcgctccaagtccatgacctcggagctggaggagctcgtggataaagataaacccgaggagatagtcccggcctccaagccctcccgcgctgctgagaacatggctgtggaaccgagggtggcgaccatcaagcagcggcccagcagccggtgcttcccggcgggctcagacatgaactctgtgtacgaacgccaaggaatcgccgtgatgacgcccactgttcctgggagcccaaaagccccgtttctgggcatccctcgaggtacgatgcgaaggcagaaatcaatagacagcagaatctttctatcaggaataacagaggaagagcggcagtttctggctcctccaatgctgaagttcaccagaagcctgtccatgccggacacctctgaggacatcccccctccaccgcagtctgtgcccccgtccccaccaccaccttccccaaccacttacaactgccccaagtccccaactccaagagtctacgggacgattaagcctgcgttcaatcagaattctgccgccaaggtgtcccccgccaccaggtccgacaccgtggccaccatgatgagggagaaggggatgtacttcaggagagagctggaccgctactccttggactctgaagacctctacagtcggaatgccggcccgcaagccaacttccgcaacaagagaggccagatgccagaaaacccatactcagaggtggggaagatcgccagcaaagccgtctacgtccccgccaagcccgccaggcggaaggggatgctggtgaagcagtccaacgtggaggacagccccgagaagacgtgctccatccctatcccgaccatcatcgtgaaggagccgtccaccagcagcagcggcaagagcagccagggcagcagcatggagatcgacccccaggccccggagccaccgagccagctgcggcctgacgaaagcctgaccgtcagcagcccctttgccgccgccatcgccggagccgtccgcgaccgtgagaagcggctggaagccaggaggaactccccggccttcctctccacagacctgggggatgaggatgtgggcctggggccacccgcccccaggacgcggccctccatgttccccgaggagggggattttgctgacgaggacagcgctgagcagctgtcatcccccatgccgagtgccacgcccagggagcccgaaaaccatttcgtgggtggcgccgaggccagtgctccgggtgaggctgggaggccgctgaattccacgtccaaagcccaggggcccgagagcagcccagcagtgccctccgcgagcagcggcacagccggccccgggaattatgtccacccactcacagggcggctgcttgatcccagctccccgctggccctggcactctccgcaagggaccgagccatgaaggagtctcaacagggacccaaaggggaggcccccaaggccgacctcaacaaacctctttacattgataccaaaatgcggcccagcctggatgccggcttccctacggtcaccaggcagaacacccggggacccctgaggcggcaggagacggagaacaagtacgagaccgacctgggccgagaccggaaaggcgatgacaagaagaacatgctgatcgacatcatggacacgtcccagcagaagtcggctggcctgctgatggtgcacaccgtggacgccactaagctggacaacgccctgcaggaagaggacgagaaggcagaggtggagatgaagccagacagctcgccgtccgaggtgccagaaggtgtttccgaaaccgaaggtgctttacagatctccgctgcccccgagcccaccaccgtgcccggcagaaccatcgtcgcggtgggctccatggaagaggcggtgattttgccattccgcatccctcctccccctctggcatccgtggacttggatgaggattttatttttacagagccattgcctcctcccctggaatttgcaaatagttttgatatccccgatgaccgggcagcttctgtcccggctctctcagacttagtgaagcagaagaaaagcgacacccctcagtccccttcgttgaactccagccaaccaaccaactctgcagacagcaagaagccagccagtctttcaaactgtctgcctgcctcattcctgccaccccctgaaagctttgacgccgtcgccgactctgggatcgaggaggtggacagccggagtagcagcgaccaccacctcgagacgaccagcactatctccaccgtgtctagcatctccaccctgtcttccgaaggtggagagaatgtggacacctgcacagtctatgcagatgggcaagcatttatggttgacaaacccccagtacctcctaagccaaaaatgaagcccatcattcacaaaagcaatgcactttatcaagacgcgctcgtggaagaagatgtagatagctttgttatccccccgcccgctcccccgcccccgccgggcagtgcccagcctgggatggccaaggttctccagccaaggacctccaagttgtggggcgacgtcacagagatcaaaagcccgattctctcaggcccaaaggcaaacgttattagtgaattgaactctatcctacagcaaatgaaccgagagaaattggcaaagccgggggaaggactggattcaccaatgggagccaagtccgccagcctcgctccaagaagcccggagatcatgagcaccatctcaggtacacggagcacgacggtcaccttcactgttcgccccggcacctcccagcccatcaccctgcagagccggccccccgactatgaaagcaggacctcaggaacaagacgtgccccaagccctgtggtctcgccaacagagatgaacaaagagaccctgcccgcccccctgtctgctgccaccgcctctccttctcccgctctctcagatgtctttagccttccaagccagcccccttctggggatctatttggcttgaacccagcgggacgcagtaggtcgccatccccctcgatactgcaacagccaatctcaaataagccttttacaactaaacctgtccacctgtggactaaaccagatgtggccgattggctggaaagtctaaacttgggtgaacataaagaggccttcatggacaatgagatcgatggcagtcacttaccaaacctgcagaaggaggacctcatcgatcttggggtaactcgagtcgggcacagaatgaacatagaaagggctttgaaacagctgctggacagataaggacggctgctctccacctcgcagactgctcttgttataagtagagatgggctcgtgctgaaacatctgaatgccaagcgaagtctgtgagcatcaaccccactccatgggtttgtctcctggtacccaaagaaatactgagttgtgtccacaacatggctgggtcttcagacccctggctcaccatgtgggtgtcttgggcagtttctatcacacatgggacaaggggagggagtttttctaacatggaaaaagattctcagcctgccgcccagcatgcaggtggcctcgctttgccgggtccgagaggctccccgtcaattttgcacgggatcctagctcttgtaggcagacaccagtgcactctagatacctcctgagacctccgtcctctgctttccgggcagctctcaccaccccaggccccggcatgaggcctttcctcagtcctgtggcctctcagaggacacctgatgctcacctgcccctctttctcctgcacttggcttgcagtgagatgctcccagatgcatttgtccagtgccccatcatgggcctgaaaggcagagaaactttttcctacacagattcttttccccatctcctcctgtggtttgcatccatggctctttggccatgaggttcctggcagtgctgggagtttggatgggatcgtgcccagctttgcttagctttctttatttctgcaaatctgttagcataattccaaggtggccaagcagatgtcacatggagttagtcaaagcacaaagtcacgattccacaatggaggggagacctggccaagggagccagccagcgtgcaactgcccaagctccaggtctccaggacaagagcagttgtctgccatgagcacccatccaggatggagaataagggcttctctgcctctcagaattctttttaattgaagatgtcttgagctctgcaaagatcagagcaggtgagcatccactttgacatgaaggacaagaagacgcatggctcatggcgggcacatgcggctgccagtgagacagcgtctcctctgggagctgggcgggcacagcatcctcagttctgtgcccagccaagggtgagcatctctgctgagacagtccttttgctctcggaggccagggaagatggtacttagaggcttttcccctatcgctctgggtgtctaggaatcccaccagcttgtcttaacagtacaacagcttctttgaggacccagtgggtatggagtatagacagaacccagggttgagaacagaaggtgggcggcaggatcagagtgaaagcagaggcgtgaggagaggaaagcagggaggtctcctgggctgccaggtcagcctctctggcaaggctttcttgagccccgcccctttctttccccggagtccctccaccccataacaatacctcgaatttccaaaagaggtcaccagatgcacatgggccgcaaaacacacagtcaggcttccagcacattctcccccatttggaggatactcgaatgtcaggtttttggttttattattatttcagaactagctcagcccatctctaattataaaacatggttttgttttttttttttcctttttttcttgattaggtctggaacagctctagaatgaacacataaaatttagcaatttaaaatctttctttactgcaagtttaaatagttgtacagatagtttataagcacaatattttaagaaaaaaaagtggctggtctactaggcagcctttgtgccacttcagtgctagaaagttaaagaaaaaaaaacttttgtgatttaataatactatttctgtggaataattataaaagtatgacctttttaaatcaaccttatttggatgcatctgaaccagcagagctgtgttatattttctatctttgctagaacttcgtcattgaaggacaatttcttcaaagtggttacaattcataatgcagcagtttctccaaaaacaaaaacaaaacacacaccacacacacgcgcttttccagtcacacacccctgatgttggaaccaagtttttggaccttctgttccaaaaccttttgcaggtcaatctttgtatttgaaatgatccaatccaacttgaagtcaattgaatattaaggcgctttacttccgtgtgctttcagtttttccatcatgagatgaatgagcattactctagataaatttcaagacaggatactacaggtggcctgctgaggctgccccatattttagaaaatgtaaaaatggtggtttggccattaatttgtcttccatttgatgataccgcaaaattccgtgagtccattcctttggcatggcactttccctgggcctacagttggtattacctctgtgctcagtgccaggcaaaacactagctcaaaggagagtcaaggaaaccgctggcagacgataaccagtcgaaactcgtgacttcggtttgttgaactttggcagccagttggtgagggccagatgttattccctttcttaaagatactccaagccacatgccactaaccacaagcaagctggctgcaagactaaagagctgataacatagtttatttttacactgtcttattatagagaagtaatagacctatcagaacctgcactgaccaacaaataaacacatgttgccaagatgaatcggtctctatctctatctgcttattttggtactgaaagcaatagttcctcattcaaatcaccacccactgttctccccctttgggacatgttaggacgaggccctattccatgcccctctttaatggtggaacaaatgttaaactgctcatctaaagatcatgttgatattattccaggttttaagatcaacttttgttacatactgtaatttaaataaactgcatttacatgcctagtttctgtaatattgtgtatacaaaacccaaatctctcaaaatgtaaattatgtatacctgccaagataccttttccagggtgtctgcgcacattttaagttaattcacataatataaaaattactcaatgtgactgttgatttgctgaactttacatatcacaaagtgaattatttgtgatactttagttaataaaatggtaaatttttttctcagttattgaacaagcaagcattatccagttgatctggcaatgactttttgtgtgtgggccacaatattgattttcccattaacaatttttttttgttttttaaatactaatatgtttcacactatagtttgtgtaacaacacgtgttcgcattatctatgttgctgttacttttgtgcttttattctttttagactttataaaaaaaaaaaaaagctcctgtaatttgcactttctcccaatccttaaatctcttgtatggcaaccaaaattactgtaaaaaaataaatatactattgcactaaggttgtggttctgattgcaaacaaacagtgaacactgtctgaattaaacaaaaagctgcccgacttgcaatctaatgtagattatctcaggcattgtggccagctctgcctctctaaaactgaccagaaaaatctctctcatcgagtaaacaggctcctgtcactgagctaatctgccttggttccatttccttattctcaatttatcaatggatacgtgcatgttatttcagaattatgcaaaacgtcaaaatctgcttctgtgaccgctgctataggcgtggagctgaggctcggcttttccttttgttctgggtggaagcagcggtgccgcggagggccagccagatccggacccttcccttagggtccagtctccccacaccccagcagggtgtcttctagccataaggccaagggagtggcagaactgggccgcctctctggttgacaagcaaaccacatgctaaggcttggagcaagagagaatttgtgtctattggcaaagaactaagccaggaagacatgggccatccctccgctttagggaagcatattttaaacctaaacgttgaacttcttctttggcctcaccagtgaaaacttgttgtctttagttcctaaagtttcttctactttggcacattccccagttgagcagcagcctctatgcttccacgttcaggaaaaattccagtcctcatatcttttgtagttcaccctcaagctctcccgcttcaccatccaatagtttctcccaaaccttggcacccccctagactttgcttccaatggtttcttccagaccacttttcctagatgaatatattcgtttaccttactaggaaaattattggaagattttttcttttacttgaaattggaggcattttaataactggcgaactggaatgtgtttctgtatttgtagacaaccatgaacccatgcaagtaggtgaacattccacagtggctgggtgaccacagcagctgcatgcagacaggactgcccgtgctttgtggggaatcagagaatttccaaacttgtttctcagacttccgcagatctcatcactttgatttctaatccatgctgtattggtgattttgtttatcgttcctgtaacttgttctacattccacagtctttaccgttttatgttcaaaattacaacaatccctgtccattgattccactctggaactctttgttcatgccaattttgaaattttaatacgagccttcaaataaacacagaaaagaaaaaaaaaaaggaaaaaaaataaagtgtgtgccttgggtgttttgaacctgatctgcataaaaccatattgtattcaaatgctgtatctttcatgaaaggataaatatatcttcaatgtattaatgtagctgataaaatagttatagtgccttgttttctgaactgagaagcccatatcaatgcacaacgtaaagaaaggacggttcgagctatgaaatgttgaggacacctacacgtgattctggagcctttctcatcataagactgtggaaaatacacagtcgtttaagttaaaaataaaaagtaaattga

SEQ ID NO: 19023 - DNA, 7394 bp, Homo sapiens
  source 1..7394: mol_type = unassigned DNA
atgcagctgagccgcgccgccgccgccgccgccgccgcccctgcggagcccccggagccgctgtcccccgcgccggccccggccccggccccccccggccccctcccgcgcagcgcggccgacggggctccggcgggggggaagggggggccggggcgccgcgcgcggagtccccgggcgctccgttccccggcgcgagcggccccggcccgggccccggcgcggggatggacggccccggggccagcgccgtggtcgtgcgcgtcggcatcccggacctgcagcagacgaagtgcctgcgcctggacccggccgcgcccgtgtgggccgccaagcagcgcgtgctctgcgccctcaaccacagcctccaggacgcgctcaactatgggcttttccagccgccctcccggggccgcgccggcaagttcctggatgaggagcggctcctgcaggagtacccgcccaacctggacacgcccctgccctacctggagtttcgatacaagcggcgagtttatgcccagaacctcatcgatgataagcagtttgcaaagcttcacacaaaggcgaacctgaagaagttcatggactacgtccagctgcatagcacggacaaggtggcacgcctgttggacaaggggctggaccccaacttccatgaccctgactcaggagagtgccccctgagcctcgcagcccagctggacaacgccacggacctgctaaaggtgctgaagaatggtggtgcccacctggacttccgcactcgcgatgggctcactgccgtgcactgtgccacacgccagcggaatgcggcagcactgacgaccctgctggacctgggggcttcacctgactacaaggacagccgcggcttgacacccctctaccacagcgccctggggggtggggatgccctctgctgtgagctgcttctccacgaccacgctcagctggggatcaccgacgagaatggctggcaggagatccaccaggcctgccgctttgggcacgtgcagcatctggagcacctgctgttctatggggcagacatgggggcccagaacgcctcggggaacacagccctgcacatctgtgccctctacaaccaggagagctgtgctcgtgtcctgctcttccgtggagctaacagggatgtccgcaactacaacagccagacagccttccaggtggccatcatcgcagggaactttgagcttgcagaggttatcaagacccacaaagactcggatgttgtaccattcagggaaacccccagctatgcgaagcggcggcgactggctggccccagtggcttggcatcccctcggcctctgcagcgctcagccagcgatatcaacctgaagggggaggcacagccagcagcttctcctggaccctcgctgagaagcctcccccaccagctgctgctccagcggctgcaagaggagaaagatcgtgaccgggatgccgaccaggagagcaacatcagtggccctttagcaggcagggccggccaaagcaagatcagccccgcgccccctgcgccccccgcaccgccgccccggggcccgaagcggaaactttacagcgccgtccccggccgcaagttcatcgccgtgaaggcgcacagcccgcagggtgaaggcgagatcccgctgcaccgcggcgaggccgtgaaggtgctcagcattggggagggcggtttctgggagggaaccgtgaaaggccgcacgggctggttcccggccgactgcgtggaggaagtgcagatgaggcagcatgacacacggcctgaaacgcgggaggaccggacgaagcggctctttcggcactacacagtgggctcctacgacagcctcacctcacacagcgattatgtcattgatgacaaagtggctgtcctgcagaaacgggaccacgagggctttggttttgtgctccggggagccaaagcagagacccccatcgaggagttcacgcccacgccagccttcccggcgctgcagtatctcgagtcggtggacgtggagggtgtggcctggagggccgggctgcgcacgggagacttcctcatcgaggtgaacggggtgaacgtggtgaaggtcggacacaagcaggtggtggctctgattcgccagggtggcaaccgcctcgtcatgaaggttgtgtctgtgacaaggaagccagaagaggacggggctcggcgcagagccccaccgccccccaagagggcccccagcaccacactgaccctgcgctccaagtccatgacagctgagctcgaggaacttgcctccattcggagaagaaaaggggagaagctggacgagatgctggcagccgccgcagagccaacgctgcggccagacatcgcagacgcagactccagagccgccaccgtcaaacagaggcccaccagtcggaggatcacacccgccgagattagctcattgtttgaacgccagggcctcccaggcccagagaagctgccgggctccttgcggaaggggattccacggaccaagtctgtaggggaggacgagaagctggcgtccctgctggaagggcgcttcccgcggagcacctcgatgcaagacccggtgcgcgagggtcgcggcatcccgcccccgccgcagaccgcgccgcctcccccgcccgcgccctactacttcgactcggggccgcccccggccttctcgccgccgcccccgccgggccgcgcctacgacacggtgcgctccagcttcaagcccggcctggaggcgcgcctgggcgcgggcgctgccggcctgtacgagccgggcgcggccctcggcccgctgccgtatcccgagcggcagaagcgcgcgcgctccatgatcatcctgcaggactcggcgcccgagtcgggcgacgcccctcgacccccgcccgcggccaccccgcccgagcgacccaagcgccggccgcggccgcccggccccgacagcccctacgccaacctgggcgccttcagcgccagcctcttcgctccgtccaagccgcagcgccgcaagagccccctggtgaagcagctgcaggtggaggacgcgcaggagcgcgcggccctggccgtgggcagccccggtcccggcggcggcagcttcgcccgcgagccctccccgacccaccgcggtccgcgcccgggtggcctcgactacggcgcgggcgatggcccggggctcgcgttcggcggcccgggcccggccaaggaccggcggctggaggagcggcgccgctccactgtgttcctgtccgtgggggccatcgagggcagcgcccccggcgcggatctgccatccctacagccctcccgctccatcgacgagcgcctcctggggaccggccccaccgccggccgcgacctgctgctgccctccccggtgtctgccctgaagccgttggtcagcggcccgagcctggggccctcgggttccaccttcatccacccactcaccggcaaacccctggaccccagctcacccctggcccttgccctggctgcccgagagcgagctctggcctcccaggcgccctcccggtcccccacacccgtgcacagtcccgacgccgaccgccccggacccctgtttgtggatgtacaggcccgggacccagagcgagggtccctggcttccccggctttctccccacggagcccagcctggattcctgtgcctgctcgcagggaggcagagaaggtcccccgggaggagcggaagtcacccgaggacaagaagtccatgatcctcagcgtcctggacacatccctgcagcggccagctggcctcatcgttgtgcacgccaccagcaacgggcaggagcccagcaggctggggggggccgaagaggagcgcccgggcaccccggagttggccccggcccccatgcagtcagcggctgtggcagagcccctgcccagcccccgggcccagccccctggtggcaccccggcagacgccgggccaggccagggcagctcagaggaagagccagagctggtgtttgctgtgaacctgccacctgcccagctgtcgtccagcgatgaggagaccagggaggagctggcccgaattgggttggtgccaccccctgaagagtttgccaacggggtcctgctggccaccccactcgctggcccgggcccctcgcccaccacggtgcccagcccggcctcagggaagcccagcagtgagccaccccctgcccctgagtctgcagccgactctggggtggaggaggctgacacacgcagctccagcgacccccacctggagaccacaagcaccatctccacggtgtccagcatgtccaccttgagctcggagagcggggaactcactgacacccacacctccttcgctgacggacacacttttctactcgagaagccaccagtgcctcccaagcccaagctcaagtccccgctggggaaggggccggtgaccttcagggacccgctgctgaagcagtcctcggacagcgagctcatggcccagcagcaccacgccgcctctgccgggctggcctctgccgccgggcctgcccgccctcgctacctcttccagagaaggtccaagctatggggggaccccgtggagagccgggggctccctgggcctgaagacgacaaaccaactgtgatcagtgagctcagctcccgcctgcagcagctgaacaaggacacgcgttccctgggggaggaaccagttggtggcctgggcagcctgctggaccctgccaagaagtcgcccatcgcagcagctcggtgtcgatcccccatggtcgggctcaggctcttcagcagcctcggtgagctgagctccatttcagcgcagcgcagccccgggggcccgggcggcggggcctcgtactcggtgaggcccagtggccgctaccccgtggcgagacgcgccccgagcccggtgaagcccgcgtcgctggagcgggtggaggggctgggggcgggcgcggggggcgcagggcggcccttcggcctcacgccccccaccatcctcaagtcgtccagcctctccatcccgcacgagcccaaggaggtgcgcttcgtggtgcgcagcgtgagcgcgcgcagtcgctccccctcgccgtcgccgctgccctcgcccgcgtccggccccggccccggcgcccccggcccacgccgacccttccagcagaagccgctgcagctctggagcaagttcgacgtgggcgactggctggagagcatccacctaggcgagcaccgcgaccgcttcgaggaccatgagatagaaggcgcgcacctacccgcgcttaccaaggacgacttcgtggagctgggcgtcacgcgcgtgggccaccgcatgaacatcgagcgcgcgctcaggcagctggacggcagctgacgccccacccccactcccgccccggccgtgccctgccggcagggccccccacccccaccccgggccgcgggctcggcctgccccttacgacggcgcccgggccaggaatgttgcatgaatcgtcctgtttgctgttgctcggagactcgccctgtacattgcttagtgccctcaccggccgcccagcccacccagcgcacagtcaggaagggcgtggaccagggaggctggggcgggaggtgccgggggtggggtgccctagcgtgaccacctccttcgcagctcctggtggccattctcccagagggggaacctagtccagcatgcgaggtcaggacccgccttggtgactcggggggaggggggagacattgggattctcgatgggggccaaggagcccccctgttttgcatattttaatccactctatatttggaacgagaaaaggaacaaatatctctgtccgtaatagtttcctctcccctcccttctacttccactggtcccactgcagctgcccagtcttccatctccggcccctcactgccactgccaccccacaacggggcaggggacgctccagctggtctggggttggccagggccctagtggcccgccctggggccccagctcggcccctcgcctcgctgagctctagtgtgccccaccgacccttcaggtgctgctcgtggtgggaggggcggcaggccgcgggtcctgctgtgcacccgcgggaccagccggcctgggagaccatcggccgggggggatgagggcagggccctgccgctccaccgcagccatcttcctcacagggtctctccccaaggagggggctagcttggtccccatgctcttgggcaactacagcagagaagcctccctgccttggaccccaaagtctcctgtcctgccctttatgtgtgtgggtgaaactgggtgcgtctgagcacgtgggagccgtgtgtgtgcctgattactgagtggccaccaggggccgctctggactagcgcggggccgtggaggcgtgcaccgtgtgcatgcgtggggtgtacctgtgagagcaccctgtctcctcttccaaagaaagtcagaggccatcctgcaccctgggtccagctgtttgcccagcctgtccttccagagcctcacccagcctgagcggggttccctggtgaatccctgctgcttggggaggccccaagggccccttggaggcagcgcccccaccttgggcttctgagggcatcatagggggacccctagagtcagttcaccacaggccctggggagagtcaaagacccccgagggtgcccagccccccacactgtgactcctcacactcagcgatgacctgtggggtggggggccctgggacgtttttaaacctagggtttggagtctggactaagctccatccacgtcactcacaagtttctgtttatatttctagctttttttaataaaataaaaaaaaaaagaaaacagaagttttcacaacccaggggcctggcacgccggtctgtgcctgcccgccccgccctggcccaccggccccactccctgggcacagagtcacacccactcatccttccgccaacagtccaggtcacacagcagcagtcactgtaacagactgccacatacacactcggtctcacactcacctgtgggttttggttccgttcaatttgggtttttaactttacagggtcagttccgcttcacctccttttgtatggagttccatccggggggtttcaccccctgctccagtcctgaggcctcctgaccctgacgttgtgatacgccccacagagatctatgtttcttatattattattattgataataattattataatattattatgtaataaatttataagaaatgaagccatggctcagttgcctgcttgaggggatatttgtgtctgtccctcataccggccacacaaacctcctcagcctggaccacatgc

SEQ ID NO: 19024 - DNA, 5175 bp, Homo sapiens
  source 1..5175: mol_type = unassigned DNA
atggacggccccggggccagcgccgtggtcgtgcgcgtcggcatcccggacctgcagcagacgaagtgcctgcgcctggacccggccgcgcccgtgtgggccgccaagcagcgcgtgctctgcgccctcaaccacagcctccaggacgcgctcaactatgggcttttccagccgccctcccggggccgcgccggcaagttcctggatgaggagcggctcctgcaggagtacccgcccaacctggacacgcccctgccctacctggagtttcgatacaagcggcgagtttatgcccagaacctcatcgatgataagcagtttgcaaagcttcacacaaaggcgaacctgaagaagttcatggactacgtccagctgcatagcacggacaaggtggcacgcctgttggacaaggggctggaccccaacttccatgaccctgactcaggagagtgccccctgagcctcgcagcccagctggacaacgccacggacctgctaaaggtgctgaagaatggtggtgcccacctggacttccgcactcgcgatgggctcactgccgtgcactgtgccacacgccagcggaatgcggcagcactgacgaccctgctggacctgggggcttcacctgactacaaggacagccgcggcttgacacccctctaccacagcgccctggggggtggggatgccctctgctgtgagctgcttctccacgaccacgctcagctggggatcaccgacgagaatggctggcaggagatccaccaggcctgccgctttgggcacgtgcagcatctggagcacctgctgttctatggggcagacatgggggcccagaacgcctcggggaacacagccctgcacatctgtgccctctacaaccaggagagctgtgctcgtgtcctgctcttccgtggagctaacagggatgtccgcaactacaacagccagacagccttccaggtggccatcatcgcagggaactttgagcttgcagaggttatcaagacccacaaagactcggatgttgtaccattcagggaaacccccagctatgcgaagcggcggcgactggctggccccagtggcttggcatcccctcggcctctgcagcgctcagccagcgatatcaacctgaagggggaggcacagccagcagcttctcctggaccctcgctgagaagcctcccccaccagctgctgctccagcggctgcaagaggagaaagatcgtgaccgggatgccgaccaggagagcaacatcagtggccctttagcaggcagggccggccaaagcaagatcagggagggggctggcaggccctgccccgcgccccctgcgccccccgcaccgccgccccggggcccgaagcggaaactttacagcgccgtccccggccgcaagttcatcgccgtgaaggcgcacagcccgcagggtgaaggcgagatcccgctgcaccgcggcgaggccgtgaaggtgctcagcattggggagggcggtttctgggagggaaccgtgaaaggccgcacgggctggttcccggccgactgcgtggaggaagtgcagatgaggcagcatgacacacggcctgaaacgcgggaggaccggacgaagcggctctttcggcactacacagtgggctcctacgacagcctcacctcacacagcgattatgtcattgatgacaaagtggctgtcctgcagaaacgggaccacgagggctttggttttgtgctccggggagccaaagcagagacccccatcgaggagttcacgcccacgccagccttcccggcgctgcagtatctcgagtcggtggacgtggagggtgtggcctggagggccgggctgcgcacgggagacttcctcatcgaggtgaacggggtgaacgtggtgaaggtcggacacaagcaggtggtggctctgattcgccagggtggcaaccgcctcgtcatgaaggttgtgtctgtgacaaggaagccagaagaggacggggctcggcgcagagccccaccgccccccaagagggcccccagcaccacactgaccctgcgctccaagtccatgacagctgagctcgaggaacttgcctccattcggagaagaaaaggggagaagctggacgagatgctggcagccgccgcagagccaacgctgcggccagacatcgcagacgcagactccagagccgccaccgtcaaacagaggcccaccagtcggaggatcacacccgccgagattagctcattgtttgaacgccagggcctcccaggcccagagaagctgccgggctccttgcggaaggggattccacggaccaagtctgtaggggaggacgagaagctggcgtccctgctggaagggcgcttcccgcggagcacctcgatgcaagacccggtgcgcgagggtcgcggcatcccgcccccgccgcagaccgcgccgcctcccccgcccgcgccctactacttcgactcggggccgcccccggccttctcgccgccgcccccgccgggccgcgcctacgacacggtgcgctccagcttcaagcccggcctggaggcgcgcctgggcgcgggcgctgccggcctgtacgagccgggcgcggccctcggcccgctgccgtatcccgagcggcagaagcgcgcgcgctccatgatcatcctgcaggactcggcgcccgagtcgggcgacgcccctcgacccccgcccgcggccaccccgcccgagcgacccaagcgccggccgcggccgcccggccccgacagcccctacgccaacctgggcgccttcagcgccagcctcttcgctccgtccaagccgcagcgccgcaagagccccctggtgaagcagctgcaggtggaggacgcgcaggagcgcgcggccctggccgtgggcagccccggtcccggcggcggcagcttcgcccgcgagccctccccgacccaccgcggtccgcgcccgggtggcctcgactacggcgcgggcgatggcccggggctcgcgttcggcggcccgggcccggccaaggaccggcggctggaggagcggcgccgctccactgtgttcctgtccgtgggggccatcgagggcagcgcccccggcgcggatctgccatccctacagccctcccgctccatcgacgagcgcctcctggggaccggccccaccgccggccgcgacctgctgctgccctccccggtgtctgccctgaagccgttggtcagcggcccgagcctggggccctcgggttccaccttcatccacccactcaccggcaaacccctggaccccagctcacccctggcccttgccctggctgcccgagagcgagctctggcctcccaggcgccctcccggtcccccacacccgtgcacagtcccgacgccgaccgccccggacccctgtttgtggatgtacaggcccgggacccagagcgagggtccctggcttccccggctttctccccacggagcccagcctggattcctgtgcctgctcgcagggaggcagagaaggtcccccgggaggagcggaagtcacccgaggacaagaagtccatgatcctcagcgtcctggacacatccctgcagcggccagctggcctcatcgttgtgcacgccaccagcaacgggcaggagcccagcaggctggggggggccgaagaggagcgcccgggcaccccggagttggccccggcccccatgcagtcagcggctgtggcagagcccctgcccagcccccgggcccagccccctggtggcaccccggcagacgccgggccaggccagggcagctcagaggaagagccagagctggtgtttgctgtgaacctgccacctgcccagctgtcgtccagcgatgaggagaccagggaggagctggcccgaattgggttggtgccaccccctgaagagtttgccaacggggtcctgctggccaccccactcgctggcccgggcccctcgcccaccacggtgcccagcccggcctcagggaagcccagcagtgagccaccccctgcccctgagtctgcagccgactctggggtggaggaggctgacacacgcagctccagcgacccccacctggagaccacaagcaccatctccacggtgtccagcatgtccaccttgagctcggagagcggggaactcactgacacccacacctccttcgctgacggacacacttttctactcgagaagccaccagtgcctcccaagcccaagctcaagtccccgctggggaaggggccggtgaccttcagggacccgctgctgaagcagtcctcggacagcgagctcatggcccagcagcaccacgccgcctctgccgggctggcctctgccgccgggcctgcccgccctcgctacctcttccagagaaggtccaagctatggggggaccccgtggagagccgggggctccctgggcctgaagacgacaaaccaactgtgatcagtgagctcagctcccgcctgcagcagctgaacaaggacacgcgttccctgggggaggaaccagttggtggcctgggcagcctgctggaccctgccaagaagtcgcccatcgcagcagctcggctcttcagcagcctcggtgagctgagctccatttcagcgcagcgcagccccgggggcccgggcggcggggcctcgtactcggtgaggcccagtggccgctaccccgtggcgagacgcgccccgagcccggtgaagcccgcgtcgctggagcgggtggaggggctgggggcgggcgcggggggcgcagggcggcccttcggcctcacgccccccaccatcctcaagtcgtccagcctctccatcccgcacgagcccaaggaggtgcgcttcgtggtgcgcagcgtgagcgcgcgcagtcgctccccctcgccgtcgccgctgccctcgcccgcgtccggccccggccccggcgcccccggcccacgccgacccttccagcagaagccgctgcagctctggagcaagttcgacgtgggcgactggctggagagcatccacctaggcgagcaccgcgaccgcttcgaggaccatgagatagaaggcgcgcacctacccgcgcttaccaaggacgacttcgtggagctgggcgtcacgcgcgtgggccaccgcatgaacatcgagcgcgcgctcaggcagctggacggcagctga

SEQ ID NO: 19025 - DNA, 7091 bp, Homo sapiens
  source 1..7091: mol_type = unassigned DNA
atggacggccccggggccagcgccgtggtcgtgcgcgtcggcatcccggacctgcagcagacgaagtgcctgcgcctggacccggccgcgcccgtgtgggccgccaagcagcgcgtgctctgcgccctcaaccacagcctccaggacgcgctcaactatgggcttttccagccgccctcccggggccgcgccggcaagttcctggatgaggagcggctcctgcaggagtacccgcccaacctggacacgcccctgccctacctggagtttcgatacaagcggcgagtttatgcccagaacctcatcgatgataagcagtttgcaaagcttcacacaaaggcgaacctgaagaagttcatggactacgtccagctgcatagcacggacaaggtggcacgcctgttggacaaggggctggaccccaacttccatgaccctgactcaggagagtgccccctgagcctcgcagcccagctggacaacgccacggacctgctaaaggtgctgaagaatggtggtgcccacctggacttccgcactcgcgatgggctcactgccgtgcactgtgccacacgccagcggaatgcggcagcactgacgaccctgctggacctgggggcttcacctgactacaaggacagccgcggcttgacacccctctaccacagcgccctggggggtggggatgccctctgctgtgagctgcttctccacgaccacgctcagctggggatcaccgacgagaatggctggcaggagatccaccaggcctgccgctttgggcacgtgcagcatctggagcacctgctgttctatggggcagacatgggggcccagaacgcctcggggaacacagccctgcacatctgtgccctctacaaccaggagagctgtgctcgtgtcctgctcttccgtggagctaacagggatgtccgcaactacaacagccagacagccttccaggtggccatcatcgcagggaactttgagcttgcagaggttatcaagacccacaaagactcggatgttgtaccattcagggaaacccccagctatgcgaagcggcggcgactggctggccccagtggcttggcatcccctcggcctctgcagcgctcagccagcgatatcaacctgaagggggaggcacagccagcagcttctcctggaccctcgctgagaagcctcccccaccagctgctgctccagcggctgcaagaggagaaagatcgtgaccgggatgccgaccaggagagcaacatcagtggccctttagcaggcagggccggccaaagcaagatcagtccagctggcccaggggatccgggccctggacctggagggcccgcgccccctgcgccccccgcaccgccgccccggggcccgaagcggaaactttacagcgccgtccccggccgcaagttcatcgccgtgaaggcgcacagcccgcagggtgaaggcgagatcccgctgcaccgcggcgaggccgtgaaggtgctcagcattggggagggcggtttctgggagggaaccgtgaaaggccgcacgggctggttcccggccgactgcgtggaggaagtgcagatgaggcagcatgacacacggcctgaaacgcgggaggaccggacgaagcggctctttcggcactacacagtgggctcctacgacagcctcacctcacacagcgattatgtcattgatgacaaagtggctgtcctgcagaaacgggaccacgagggctttggttttgtgctccggggagccaaagcagagacccccatcgaggagttcacgcccacgccagccttcccggcgctgcagtatctcgagtcggtggacgtggagggtgtggcctggagggccgggctgcgcacgggagacttcctcatcgaggtgaacggggtgaacgtggtgaaggtcggacacaagcaggtggtggctctgattcgccagggtggcaaccgcctcgtcatgaaggttgtgtctgtgacaaggaagccagaagaggacggggctcggcgcagagccccaccgccccccaagagggcccccagcaccacactgaccctgcgctccaagtccatgacagctgagctcgaggaacttgcctccattcggagaagaaaaggggagaagctggacgagatgctggcagccgccgcagagccaacgctgcggccagacatcgcagacgcagactccagagccgccaccgtcaaacagaggcccaccagtcggaggatcacacccgccgagattagctcattgtttgaacgccagggcctcccaggcccagagaagctgccgggctccttgcggaaggggattccacggaccaagtctgtaggggaggacgagaagctggcgtccctgctggaagggcgcttcccgcggagcacctcgatgcaagacccggtgcgcgagggtcgcggcatcccgcccccgccgcagaccgcgccgcctcccccgcccgcgccctactacttcgactcggggccgcccccggccttctcgccgccgcccccgccgggccgcgcctacgacacggtgcgctccagcttcaagcccggcctggaggcgcgcctgggcgcgggcgctgccggcctgtacgagccgggcgcggccctcggcccgctgccgtatcccgagcggcagaagcgcgcgcgctccatgatcatcctgcaggactcggcgcccgagtcgggcgacgcccctcgacccccgcccgcggccaccccgcccgagcgacccaagcgccggccgcggccgcccggccccgacagcccctacgccaacctgggcgccttcagcgccagcctcttcgctccgtccaagccgcagcgccgcaagagccccctggtgaagcagctgcaggtggaggacgcgcaggagcgcgcggccctggccgtgggcagccccggtcccggcggcggcagcttcgcccgcgagccctccccgacccaccgcggtccgcgcccgggtggcctcgactacggcgcgggcgatggcccggggctcgcgttcggcggcccgggcccggccaaggaccggcggctggaggagcggcgccgctccactgtgttcctgtccgtgggggccatcgagggcagcgcccccggcgcggatctgccatccctacagccctcccgctccatcgacgagcgcctcctggggaccggccccaccgccggccgcgacctgctgctgccctccccggtgtctgccctgaagccgttggtcagcggcccgagcctggggccctcgggttccaccttcatccacccactcaccggcaaacccctggaccccagctcacccctggcccttgccctggctgcccgagagcgagctctggcctcccaggcgccctcccggtcccccacacccgtgcacagtcccgacgccgaccgccccggacccctgtttgtggatgtacaggcccgggacccagagcgagggtccctggcttccccggctttctccccacggagcccagcctggattcctgtgcctgctcgcagggaggcagagaaggtcccccgggaggagcggaagtcacccgaggacaagaagtccatgatcctcagcgtcctggacacatccctgcagcggccagctggcctcatcgttgtgcacgccaccagcaacgggcaggagcccagcaggctggggggggccgaagaggagcgcccgggcaccccggagttggccccggcccccatgcagtcagcggctgtggcagagcccctgcccagcccccgggcccagccccctggtggcaccccggcagacgccgggccaggccagggcagctcagaggaagagccagagctggtgtttgctgtgaacctgccacctgcccagctgtcgtccagcgatgaggagaccagggaggagctggcccgaattgggttggtgccaccccctgaagagtttgccaacggggtcctgctggccaccccactcgctggcccgggcccctcgcccaccacggtgcccagcccggcctcagggaagcccagcagtgagccaccccctgcccctgagtctgcagccgactctggggtggaggaggctgacacacgcagctccagcgacccccacctggagaccacaagcaccatctccacggtgtccagcatgtccaccttgagctcggagagcggggaactcactgacacccacacctccttcgctgacggacacacttttctactcgagaagccaccagtgcctcccaagcccaagctcaagtccccgctggggaaggggccggtgaccttcagggacccgctgctgaagcagtcctcggacagcgagctcatggcccagcagcaccacgccgcctctgccgggctggcctctgccgccgggcctgcccgccctcgctacctcttccagagaaggtccaagctatggggggaccccgtggagagccgggggctccctgggcctgaagacgacaaaccaactgtgatcagtgagctcagctcccgcctgcagcagctgaacaaggacacgcgttccctgggggaggaaccagttggtggcctgggcagcctgctggaccctgccaagaagtcgcccatcgcagcagctcggctcttcagcagcctcggtgagctgagctccatttcagcgcagcgcagccccgggggcccgggcggcggggcctcgtactcggtgaggcccagtggccgctaccccgtggcgagacgcgccccgagcccggtgaagcccgcgtcgctggagcgggtggaggggctgggggcgggcgcggggggcgcagggcggcccttcggcctcacgccccccaccatcctcaagtcgtccagcctctccatcccgcacgagcccaaggaggtgcgcttcgtggtgcgcagcgtgagcgcgcgcagtcgctccccctcgccgtcgccgctgccctcgcccgcgtccggccccggccccggcgcccccggcccacgccgacccttccagcagaagccgctgcagctctggagcaagttcgacgtgggcgactggctggagagcatccacctaggcgagcaccgcgaccgcttcgaggaccatgagatagaaggcgcgcacctacccgcgcttaccaaggacgacttcgtggagctgggcgtcacgcgcgtgggccaccgcatgaacatcgagcgcgcgctcaggcagctggacggcagctgacgccccacccccactcccgccccggccgtgccctgccggcagggccccccacccccaccccgggccgcgggctcggcctgccccttacgacggcgcccgggccaggaatgttgcatgaatcgtcctgtttgctgttgctcggagactcgccctgtacattgcttagtgccctcaccggccgcccagcccacccagcgcacagtcaggaagggcgtggaccagggaggctggggcgggaggtgccgggggtggggtgccctagcgtgaccacctccttcgcagctcctggtggccattctcccagagggggaacctagtccagcatgcgaggtcaggacccgccttggtgactcggggggaggggggagacattgggattctcgatgggggccaaggagcccccctgttttgcatattttaatccactctatatttggaacgagaaaaggaacaaatatctctgtccgtaatagtttcctctcccctcccttctacttccactggtcccactgcagctgcccagtcttccatctccggcccctcactgccactgccaccccacaacggggcaggggacgctccagctggtctggggttggccagggccctagtggcccgccctggggccccagctcggcccctcgcctcgctgagctctagtgtgccccaccgacccttcaggtgctgctcgtggtgggaggggcggcaggccgcgggtcctgctgtgcacccgcgggaccagccggcctgggagaccatcggccgggggggatgagggcagggccctgccgctccaccgcagccatcttcctcacagggtctctccccaaggagggggctagcttggtccccatgctcttgggcaactacagcagagaagcctccctgccttggaccccaaagtctcctgtcctgccctttatgtgtgtgggtgaaactgggtgcgtctgagcacgtgggagccgtgtgtgtgcctgattactgagtggccaccaggggccgctctggactagcgcggggccgtggaggcgtgcaccgtgtgcatgcgtggggtgtacctgtgagagcaccctgtctcctcttccaaagaaagtcagaggccatcctgcaccctgggtccagctgtttgcccagcctgtccttccagagcctcacccagcctgagcggggttccctggtgaatccctgctgcttggggaggccccaagggccccttggaggcagcgcccccaccttgggcttctgagggcatcatagggggacccctagagtcagttcaccacaggccctggggagagtcaaagacccccgagggtgcccagccccccacactgtgactcctcacactcagcgatgacctgtggggtggggggccctgggacgtttttaaacctagggtttggagtctggactaagctccatccacgtcactcacaagtttctgtttatatttctagctttttttaataaaataaaaaaaaaaagaaaacagaagttttcacaacccaggggcctggcacgccggtctgtgcctgcccgccccgccctggcccaccggccccactccctgggcacagagtcacacccactcatccttccgccaacagtccaggtcacacagcagcagtcactgtaacagactgccacatacacactcggtctcacactcacctgtgggttttggttccgttcaatttgggtttttaactttacagggtcagttccgcttcacctccttttgtatggagttccatccggggggtttcaccccctgctccagtcctgaggcctcctgaccctgacgttgtgatacgccccacagagatctatgtttcttatattattattattgataataattattataatattattatgtaataaatttataagaaatg

SEQ ID NO: 19026 - DNA, 7094 bp, Homo sapiens
  source 1..7094: mol_type = unassigned DNA
atggacggccccggggccagcgccgtggtcgtgcgcgtcggcatcccggacctgcagcagacgaagtgcctgcgcctggacccggccgcgcccgtgtgggccgccaagcagcgcgtgctctgcgccctcaaccacagcctccaggacgcgctcaactatgggcttttccagccgccctcccggggccgcgccggcaagttcctggatgaggagcggctcctgcaggagtacccgcccaacctggacacgcccctgccctacctggagtttcgatacaagcggcgagtttatgcccagaacctcatcgatgataagcagtttgcaaagcttcacacaaaggcgaacctgaagaagttcatggactacgtccagctgcatagcacggacaaggtggcacgcctgttggacaaggggctggaccccaacttccatgaccctgactcaggagagtgccccctgagcctcgcagcccagctggacaacgccacggacctgctaaaggtgctgaagaatggtggtgcccacctggacttccgcactcgcgatgggctcactgccgtgcactgtgccacacgccagcggaatgcggcagcactgacgaccctgctggacctgggggcttcacctgactacaaggacagccgcggcttgacacccctctaccacagcgccctggggggtggggatgccctctgctgtgagctgcttctccacgaccacgctcagctggggatcaccgacgagaatggctggcaggagatccaccaggcctgccgctttgggcacgtgcagcatctggagcacctgctgttctatggggcagacatgggggcccagaacgcctcggggaacacagccctgcacatctgtgccctctacaaccaggagagctgtgctcgtgtcctgctcttccgtggagctaacagggatgtccgcaactacaacagccagacagccttccaggtggccatcatcgcagggaactttgagcttgcagaggttatcaagacccacaaagactcggatgttgtaccattcagggaaacccccagctatgcgaagcggcggcgactggctggccccagtggcttggcatcccctcggcctctgcagcgctcagccagcgatatcaacctgaagggggaggcacagccagcagcttctcctggaccctcgctgagaagcctcccccaccagctgctgctccagcggctgcaagaggagaaagatcgtgaccgggatgccgaccaggagagcaacatcagtggccctttagcaggcagggccggccaaagcaagatcagcccgagcgggcccggcggccccggccccgcgcccggccccggccccgcgccccctgcgccccccgcaccgccgccccggggcccgaagcggaaactttacagcgccgtccccggccgcaagttcatcgccgtgaaggcgcacagcccgcagggtgaaggcgagatcccgctgcaccgcggcgaggccgtgaaggtgctcagcattggggagggcggtttctgggagggaaccgtgaaaggccgcacgggctggttcccggccgactgcgtggaggaagtgcagatgaggcagcatgacacacggcctgaaacgcgggaggaccggacgaagcggctctttcggcactacacagtgggctcctacgacagcctcacctcacacagcgattatgtcattgatgacaaagtggctgtcctgcagaaacgggaccacgagggctttggttttgtgctccggggagccaaagcagagacccccatcgaggagttcacgcccacgccagccttcccggcgctgcagtatctcgagtcggtggacgtggagggtgtggcctggagggccgggctgcgcacgggagacttcctcatcgaggtgaacggggtgaacgtggtgaaggtcggacacaagcaggtggtggctctgattcgccagggtggcaaccgcctcgtcatgaaggttgtgtctgtgacaaggaagccagaagaggacggggctcggcgcagagccccaccgccccccaagagggcccccagcaccacactgaccctgcgctccaagtccatgacagctgagctcgaggaacttgcctccattcggagaagaaaaggggagaagctggacgagatgctggcagccgccgcagagccaacgctgcggccagacatcgcagacgcagactccagagccgccaccgtcaaacagaggcccaccagtcggaggatcacacccgccgagattagctcattgtttgaacgccagggcctcccaggcccagagaagctgccgggctccttgcggaaggggattccacggaccaagtctgtaggggaggacgagaagctggcgtccctgctggaagggcgcttcccgcggagcacctcgatgcaagacccggtgcgcgagggtcgcggcatcccgcccccgccgcagaccgcgccgcctcccccgcccgcgccctactacttcgactcggggccgcccccggccttctcgccgccgcccccgccgggccgcgcctacgacacggtgcgctccagcttcaagcccggcctggaggcgcgcctgggcgcgggcgctgccggcctgtacgagccgggcgcggccctcggcccgctgccgtatcccgagcggcagaagcgcgcgcgctccatgatcatcctgcaggactcggcgcccgagtcgggcgacgcccctcgacccccgcccgcggccaccccgcccgagcgacccaagcgccggccgcggccgcccggccccgacagcccctacgccaacctgggcgccttcagcgccagcctcttcgctccgtccaagccgcagcgccgcaagagccccctggtgaagcagctgcaggtggaggacgcgcaggagcgcgcggccctggccgtgggcagccccggtcccggcggcggcagcttcgcccgcgagccctccccgacccaccgcggtccgcgcccgggtggcctcgactacggcgcgggcgatggcccggggctcgcgttcggcggcccgggcccggccaaggaccggcggctggaggagcggcgccgctccactgtgttcctgtccgtgggggccatcgagggcagcgcccccggcgcggatctgccatccctacagccctcccgctccatcgacgagcgcctcctggggaccggccccaccgccggccgcgacctgctgctgccctccccggtgtctgccctgaagccgttggtcagcggcccgagcctggggccctcgggttccaccttcatccacccactcaccggcaaacccctggaccccagctcacccctggcccttgccctggctgcccgagagcgagctctggcctcccaggcgccctcccggtcccccacacccgtgcacagtcccgacgccgaccgccccggacccctgtttgtggatgtacaggcccgggacccagagcgagggtccctggcttccccggctttctccccacggagcccagcctggattcctgtgcctgctcgcagggaggcagagaaggtcccccgggaggagcggaagtcacccgaggacaagaagtccatgatcctcagcgtcctggacacatccctgcagcggccagctggcctcatcgttgtgcacgccaccagcaacgggcaggagcccagcaggctggggggggccgaagaggagcgcccgggcaccccggagttggccccggcccccatgcagtcagcggctgtggcagagcccctgcccagcccccgggcccagccccctggtggcaccccggcagacgccgggccaggccagggcagctcagaggaagagccagagctggtgtttgctgtgaacctgccacctgcccagctgtcgtccagcgatgaggagaccagggaggagctggcccgaattgggttggtgccaccccctgaagagtttgccaacggggtcctgctggccaccccactcgctggcccgggcccctcgcccaccacggtgcccagcccggcctcagggaagcccagcagtgagccaccccctgcccctgagtctgcagccgactctggggtggaggaggctgacacacgcagctccagcgacccccacctggagaccacaagcaccatctccacggtgtccagcatgtccaccttgagctcggagagcggggaactcactgacacccacacctccttcgctgacggacacacttttctactcgagaagccaccagtgcctcccaagcccaagctcaagtccccgctggggaaggggccggtgaccttcagggacccgctgctgaagcagtcctcggacagcgagctcatggcccagcagcaccacgccgcctctgccgggctggcctctgccgccgggcctgcccgccctcgctacctcttccagagaaggtccaagctatggggggaccccgtggagagccgggggctccctgggcctgaagacgacaaaccaactgtgatcagtgagctcagctcccgcctgcagcagctgaacaaggacacgcgttccctgggggaggaaccagttggtggcctgggcagcctgctggaccctgccaagaagtcgcccatcgcagcagctcggctcttcagcagcctcggtgagctgagctccatttcagcgcagcgcagccccgggggcccgggcggcggggcctcgtactcggtgaggcccagtggccgctaccccgtggcgagacgcgccccgagcccggtgaagcccgcgtcgctggagcgggtggaggggctgggggcgggcgcggggggcgcagggcggcccttcggcctcacgccccccaccatcctcaagtcgtccagcctctccatcccgcacgagcccaaggaggtgcgcttcgtggtgcgcagcgtgagcgcgcgcagtcgctccccctcgccgtcgccgctgccctcgcccgcgtccggccccggccccggcgcccccggcccacgccgacccttccagcagaagccgctgcagctctggagcaagttcgacgtgggcgactggctggagagcatccacctaggcgagcaccgcgaccgcttcgaggaccatgagatagaaggcgcgcacctacccgcgcttaccaaggacgacttcgtggagctgggcgtcacgcgcgtgggccaccgcatgaacatcgagcgcgcgctcaggcagctggacggcagctgacgccccacccccactcccgccccggccgtgccctgccggcagggccccccacccccaccccgggccgcgggctcggcctgccccttacgacggcgcccgggccaggaatgttgcatgaatcgtcctgtttgctgttgctcggagactcgccctgtacattgcttagtgccctcaccggccgcccagcccacccagcgcacagtcaggaagggcgtggaccagggaggctggggcgggaggtgccgggggtggggtgccctagcgtgaccacctccttcgcagctcctggtggccattctcccagagggggaacctagtccagcatgcgaggtcaggacccgccttggtgactcggggggaggggggagacattgggattctcgatgggggccaaggagcccccctgttttgcatattttaatccactctatatttggaacgagaaaaggaacaaatatctctgtccgtaatagtttcctctcccctcccttctacttccactggtcccactgcagctgcccagtcttccatctccggcccctcactgccactgccaccccacaacggggcaggggacgctccagctggtctggggttggccagggccctagtggcccgccctggggccccagctcggcccctcgcctcgctgagctctagtgtgccccaccgacccttcaggtgctgctcgtggtgggaggggcggcaggccgcgggtcctgctgtgcacccgcgggaccagccggcctgggagaccatcggccgggggggatgagggcagggccctgccgctccaccgcagccatcttcctcacagggtctctccccaaggagggggctagcttggtccccatgctcttgggcaactacagcagagaagcctccctgccttggaccccaaagtctcctgtcctgccctttatgtgtgtgggtgaaactgggtgcgtctgagcacgtgggagccgtgtgtgtgcctgattactgagtggccaccaggggccgctctggactagcgcggggccgtggaggcgtgcaccgtgtgcatgcgtggggtgtacctgtgagagcaccctgtctcctcttccaaagaaagtcagaggccatcctgcaccctgggtccagctgtttgcccagcctgtccttccagagcctcacccagcctgagcggggttccctggtgaatccctgctgcttggggaggccccaagggccccttggaggcagcgcccccaccttgggcttctgagggcatcatagggggacccctagagtcagttcaccacaggccctggggagagtcaaagacccccgagggtgcccagccccccacactgtgactcctcacactcagcgatgacctgtggggtggggggccctgggacgtttttaaacctagggtttggagtctggactaagctccatccacgtcactcacaagtttctgtttatatttctagctttttttaataaaataaaaaaaaaaagaaaacagaagttttcacaacccaggggcctggcacgccggtctgtgcctgcccgccccgccctggcccaccggccccactccctgggcacagagtcacacccactcatccttccgccaacagtccaggtcacacagcagcagtcactgtaacagactgccacatacacactcggtctcacactcacctgtgggttttggttccgttcaatttgggtttttaactttacagggtcagttccgcttcacctccttttgtatggagttccatccggggggtttcaccccctgctccagtcctgaggcctcctgaccctgacgttgtgatacgccccacagagatctatgtttcttatattattattattgataataattattataatattattatgtaataaatttataagaaatg

SEQ ID NO: 19027 - DNA, 9768 bp, Homo sapiens
  source 1..9768: mol_type = unassigned DNA
tgcttttgctgtgagcagccccaagcagctgggcgctccatcagaggcaactatgacttttgcaaagcaaacgtgcaaccccaagcagcggtctcccgggccggggctgcgcggccgccgctgtgctggcttttaacggtgggagggcaccatcctcttgctctgctctcgttctccagaaggctgtcccggggcccccactctccgtcccgctccggggacagtggctcgcctgctatgcgcggcagcccgcgccggggccggcaccagcagcgcccgggcggatgcagcgagcccacggaggggcatgcttccacgcaccaagtataaccgcttcaggaatgactcggtgacatcggtcgatgaccttctccacagcctgtcggtgagcggcggcggaggcaaggtttcggcggcgcgcgcgaccccggcggcggctccctacttggtgtccggcgaggcgctgcgcaaggcgcccgacgatgggcccggcagcctgggccacctgctccacaaggtgtcccacctgaaactctccagctcgggcctccgcggcctgtcgtcggccgcccgggagcgggcgggcgcgcggctctcgggcagctgcagcgcgcccagcctggccgccccggacggcagtgcgccctcggcgccccgcgccccggccatgagcgccgccaggaagggccggcccggcgacgagccgctgcccaggccccctcggggggcgccgcacgccagcgaccaggtgctggggcccggagtcacctacgtggtcaagtacttggggtgcattgaagttctgcgctcaatgaggtctcttgacttcagtacaagaacacaaattaccagggaagccatcagccgcgtctgtgaagctgtgcctggtgcgaagggagccttcaagaagagaaagcctccaagcaaaatgctgtccagcatcttgggaaagagcaacctccagtttgcgggaatgagcatctctctgaccatctccacggccagtctgaacctgcgaactccggactccaaacagatcatagcgaatcaccacatgcggtccatctccttcgcctctgggggagacccggacacaactgactatgttgcatatgtggctaaggaccctgttaatcgcagagcttgtcacattttggaatgctgtgatgggctggcccaggatgtcatcggctccatcggacaagcctttgagctccggtttaagcaatatttacagtgtcctaccaagattcccgctctccatgatcgaatgcagagtctggatgagccatggacggaagaggagggagatggctcagaccacccatactacaacagcatcccaagcaagatgcctcctccagggggctttcttgatactagactgaaacccagaccccatgctcctgacacagcccagtttgcaggaaaagagcagacttattaccagggaagacacttaggagacacttttggcgaagactggcagcaaacacctttaaggcaagggtcctcggacatctacagcacgccagaagggaaactgcacgtggcccccacgggagaagcacccacctacgtcaacactcagcagatcccaccacaggcctggccggctgcggtcagcagtgctgagagcagcccaaggaaagacctctttgacatgaaaccttttgaagatgctctcaagaaccagcccttggggcccgtgttaagcaaggcagcctccgtggagtgcatcagccctgtgtcacctagagccccagatgccaagatgctggaggaactgcaagccgagacttggtaccaaggagagatgagcaggaaggaggcagaggggctgctggagaaagacggagacttcctggtcaggaagagcaccaccaacccgggctcctttgtcctcacgggcatgcacaatggccaggccaagcacctgctgctcgtggacccagaaggcacgatccggacaaaggacagagtctttgacagtatcagccacctcatcaaccaccacctagaaagcagcctgcccattgtctctgcagggagtgagctgtgtctccagcagccagtggagaggaagcagtgacctggccagcactgctcccagcactgcgcaccaggtcaggaggacctggagtggactagaatcggggctgctggaactgggacagctgcctgtggctcagagccttcttcaaaagcttcaaaaggaaggcttcctttaaggtcaagtttcataaacttggttctgaatttctcatatgcatattaaaggtgtacatacctatacatcctgtacaaattatccctctatatttatattttttaagactaagaaagatgtaagactaatgttctgtgctgtatgtttttaatgaaaaaaaaaaataagtttaactgtagttgtccaggcaaaaatttaattcaactgacccatcccaccgggaaatgccactaggaaggtgtagcctgcagttttacctaataagcacaactggaggggaatagaaacacagaattgtgagggaatcgcaaggcatgctgctcagagcatgcctagccctgcactgaaagctatgagatactggttctgaggcatggctgtgcttgctggtgggagcgggcatcctcccttggcctccctgggacacctcctgtgctccctgcactgcactccacgtgcctggggtgtctacacaactcgctgcagcttcactaaagaacaggtggcactccagcttctccgggtcctgctgagcacagggccccgccacccttgaccccagttgtgcgaggagtacttgggaattcatttcatgccaaaatggcacaaaataagcttcaccaaccaagattttgattgacaagtgcttccctgttctcatgtatctaatgctaaaatgggtatttgtagaagggtggtcggggcaaattcctggtttgtgtctccctctagtcagcggttgactacaggctgcttatggtaattgctagtaaagtcccccgcccgccttatacaataggggagaagcctgtgtgacagcaagagcaggcacccatcccagagctcagtcccgaagactcaggtattgaggcttctggggctgcatgtgccagaaacccaggagtcactggaatccatttgaggtactgcctctggcatgagggatgggggaaaggcctgctgtcccaacaacaaggtttctccgttgctgcagggaagagcatgtgcctgcccccactctttgtcttgactccctttcttccaggtaaaatactgtcatttcctgaggagtcatttggtgttagaaagctggcaatgtttatacctttcaaatactatctgggctgagattgccctgtgattttcacagatgccctttaaagaatagatggatccatttgcttgctggcagcgtggctcttgttctggtgagaccccacagggtacagcaccctgtagggtatgggtcagcagaacagaaagacacactaaacacgcttagagttggatagtgataaatctgatcctgtaaggagagttatgaggagactgaaaaatctggcagataataatactgctaagttctaatgccaatggtatgagccccatttctgccttggggtgtgcgtgtggccagatggaaggacaggttagagctaaccagtgaggatgagtcagggcaggccccagccttcatacatggccttctagggagtctttgcctttgagggtccagtgaatttgagatgacagtgaagtcagtgttctagaatgttctgcagtggattgaaactctggagagtctgacactactgtagactgcactgctgttttctgaaatggttttggcttcaggcatcatgtggatactctgcttagtgatccagaagcagacggctccacggggttgctggcagcagctgcatcaggctcctgccccaagacagcatagacttgggtgctctgagagctgccctgcacatctgtcctctgggaggctgggagccctggagagacacacacagctctgacccacctgtgcatgaatgtgcaccacatagaaaaatgtgcgaaatgaccttctttctacattcatgcattccccacttgtgaaaggtcaaaatgctattataacattcagggacaatagcaaagtaggaaatgcaagttaggagctgtgaatgctgtaacatttgatttactttatttttctcttggggggacttgaatggtaacctgcagctttagtagctcttgctgtgaagtcagtgtctagttcgatggtgatagaaaatatatatattttttgcatgagaatcaatttagaaaatttaaagtattggagtcgaattttttctttttaatattaattcaaaatatacatttttaagctcagattatatattggttacactagaatagtgccagtgaagtgagcaggcttcagacatagcagatggcagcgattttctaatctttgttccctcccatttgtaaagtgggttagagcacacattagttatcccaactcttccctccagcactgtgtggtgggccattcctgtgagcctcacagacacatggggaaagtgaggctggggctggtgccacaccttcctggaggccatgttgtcatctggctgcagagctcttctgctcactcagcatttcgtgagccctgctgtgtgccagcctgtgctttgagctcaggattccaaggcaaaagcaatggaggctcctccctgtctagcctgggcccctcttccccacactttctcaggccacatctctgcctgggcagggcagggaagctgaacaatgaacgcagcgggaatggcattaggccttgcgttccagggcctcaggcttccagggcacagtcgctgctgctgtgctgggccaccctggtcctgcagagtgcacctgggccctgctgtccctccaatgggcacccccaacacttaaccccaaactctatgtcttctgggagtacaaggtgggggccagcagtcctaaaacggcccctctgcccttaccgagtggccctagagacccccacccacctcccctaaccccacgaatgaatcagctgtgcttcaaatgacatctctgtcccacggaggccggctgggcctctcatgggggtgctcattgtggtttaagtcagctttgattcttgacctccaaggctgcctctgagtagctaaccggagaatcgggtggggaggtgaaaaacaccgcagtcaaatgactcaatctttaatcctgtgcttaagacaccactgttgctgttttttatatttgaagcacccaaagactgggcgtccgctcagccttgatgagcgagcagctattttgtcaggccatctatgatgttgggataatggacaaaggcctgattgggccatatatggccttctttagggcctcctggaggtggaggaagttgtgggtaatttctaataaagacgggaaatgacaagccgtgtgtgtaggtaaagtcctaacttaaaaggaaggacaggcctagggaagggtggaccctaaagggcccatgtgccaggggaacagtggacatgtgtgtccagcccaacctccatgtctggtgctgggattctgaaggtggcccccagctcccaaaataaagctttccttttcagtagcgtccgacacttgggtagcttctttctataagcaatgcttgaagatggacgtctgggtcctcatttcctccaaactggctgctacctgaaggcagtcacacatttcttttctgttgggctgagctgggcagaagcctcggactataggcctttccagggcagaggcaatgcgggccacgagtagatacctccatccagcctccaccctggcacacccagaacggcgtggactcaggcgggttgctggatttctctgagccttggcgtgctctacactgcagggctatacatgttcccagcttgagggcgtgctggggattgacaaatatatgaaacatataagcgcaatgattttctaaaattgtgcattcccagcgtgcccattggttctctctcgctggcccaactttgtgtgctgtccataaatccctttctgtggacggtgacagtaggattgggagtgagtgggaagattgtggaaagattgcaaagaggtcattgcaggactcagacagaccttgcagtgggtttcagagtaatactcaggttctcccatggaactttcaaagctggctctaagaaagatgaagaggacaaacccactcctggacatagtgccaacctagaactgtcagctccacacaggatcacagggaagggagcttggtaagacagcccagtagggggccctgcttttcagaagaggaaactggagccatgcaagggcctggggatcaacttagaaaagagcacaggactcacagtcctgggcctgcacgtaaagctagccccctgccccacggaaatggcaagcagtgcttccctccaggggttctacatctgtgctccatctcaaaatgcataaaagcctgagtcattcagatgggagagacagtgtttctacttcctcttagttggggttcctccagaaggagaccctgagagaggacttgaggttatgtagtttatttgagtgaagatcccggaagtagggagagaaggaagctgacggggaaggcgtgcattatcaagtaagttaccgtcatgtgcacaactggagctgaatcccaccggggaaccccgagagacagagctgacaccccagagttcacccagcaaggcggggagacagctggggtatttattcaccaagtctatcacttatgaaaggctgtttctggaaacaatttctgactggccctgcacacacctgagcatacttcctaagccggggatgtccctgagctgagacaggcgttcgtgacaagcagacttcgagtggaaggcaggcatcagaaccaccctgtgagctggttcagacaaagattgcaggcccttccacccccctggccccgccaagttcctgactccctaggtctggagtggggcccgggaatttgcatttcaaaaaatctcgaggtgatgctggtgcagctgctctgaagtcttgactttgagaaccactcactagtgagagtttccagcccttacctgtctcttattgatggctttcccccctctaatttataattatgctttcacaccacttcatgtcacagatcccagggtccgtgctgtgaatttaaaagtggagaattaataagcatttataactccatgcaaccattgctggcagcttaaatgccatctgccagccataatttatttataatggggtttatacatatttataagtttgcaagcaacaaatgcacagttttaaaactggcacattttatagcagccagaaaaattgcaactttataccaggacttgtgaatgtgaattgcatatgtatatacatatacgcatatacttacattgattaaaaacggatctgcatctctgtacacacgcagattggctctgtgttgtgcaccttgggactcctccctgggctttggttttacagctaagtaggaagtcaaacaaacgtgaagaatttgggaattggcaggctgtggcatcagccatggaggatggtcctggatgctgtaggatgtgagatccagcacaaagagaacaagaacaggacatgaggaccacagggattgggggaacccactgtgggaaatgacagagaagccagtgggggaagacaaagaaagaagaaggtggaggcagaataaaggtgagaagaagggaaggggaggataaaacaagtccagatttagatcttccttcatgcagccatgcatagctgtctgaggccagcagggaaggaggagaaagggaaggtgtggtggaggaggctgtgctcgtgatgtcatgctttcgtgtattcccaggtgcagctgcatatacttggcacagtttcttgggatttctagccagtttcttggcctcatttgtgcattagttaatatgtggctggccctgtactgggatggtgggatagagaagtgaatgtatgaggcctctgcctgagtttataacctagaaagaaataaagacacacacacacaaaggtgttggagtgtgacaagccttaaggtacccgtgtgtccaagtaaagtagaaccagcaagggtggagtgcccaggtcagtctggggactctggaggcttcgcactgcaggcgtcagatactgagtgttagtggcacggagaagagtgtggaaggctcaggatgggggtggacagcctggagttgtcactctcagtagagatgctagaaggggcgggaggtgatcccagcctcccttctttcctcctcctggctgtcacagatgctctgaattgatgaatccttcaggccaaaaacacacaggctccttccctaggtctggaaaaatggttctcgctgaaaaagcaccaggaataaaatctcatacaattttaggtgtctattttgttgtctcaccttgaaatactgcagacagaaaaacatgcacatggggagctgtggtcctgagctttgaggtaatgaattcccactcatgtgatcatttttaccataaccaaagtttctaaccatcaaaatcaagtgacaattaaaacaggcattaatggataaatccgtctttaaatattaatggggttaattttgttaacagctatgtgttggttgcaagtggaatgttctctgttcatttgacttttgaatataacttgttccagaatattgtaaaattaagtatgtgaatgtttctttgtattcagaattaaacatttggtgttaaaatcccaggattaggagacaactccatgtaaatttaatgtgtaataataagataataactttttaaaaagcatttggatggcaaattatacatactgacaaatgaatattatctgaaagttgttttgtttccattaacttttgtgaaacaaaaagaattactgtaacagtctatgtcttggcgtattgccaattcaccactttctactttgtgctggaacagaactggcttttttgacatccctgaggagtggaaatgcaaaacgaatttcaagttctctaatctttgttctatgacaaatgaaaaaacctaagttatctggtgttttggagatttgagaatacagcaggtgaagagaattagcttaaattccctcctcccttttgataaatccacagggattccttcactctgtcaggaaatggtgtggtttccaagcattagcccttcatgatctgtctggtgcatttctgtgctcctgggatcgccaagtgcaggcacggcatcgcatccccaggtgtcatcctgtgacccaggaggggaagatgacacacccaatttaggtaatgctgcacttcttgttataattggttattggaaaatgtgcctttattatcagaacagtggtgtgcgcatttctgattatggagctaacttttggatatctgacttagatactaaaaacatttgggtgttgcagttttgcacttgtagatacaacttaaaagcatgaaactggtgatttaattagatgttttctataaaatgcaccttgttacatttctgtgaaagggtcttaccagcgtggaataactggctcaagggttgagagaaacaaccattttctaaacagttaattgtttaaaggactatacatgtaagtctgcaggcaataaaggctgttgtgaaaagta

SEQ ID NO: 19028 - DNA, 569 bp, Homo sapiens
  source 1..569: mol_type = unassigned DNA
cccacgggagaagcacccacctacgtcaacactcagcagatcccaccacaggcctggccggctgcggtcagcagtgctgagagcagcccaaggaaagacctctttgacatgaaaccttttgaagatgctctcaagaaccagcccttggggcccgtgttaagcaaggcagcctccgtggagtgcatcagccctgtgtcacctagagccccagatgccaagatgctggaggaactgcaagccgagacttggtaccaaggagagatgagcaggaaggaggcagaggggctgctggagaaagacggagacttcctggtcaggaagagcaccaccaacccgggctcctttgtcctcacgggcatgcacaatggccaggccaagcacctgctgctcgtggacccagaaggcacgagaagtaactcctactgatgttggccatccctggcactacagctgtatctgaataatcccgtaggtttggctgaatttttcatcttcccgtcaagaaagacattcatctttacctggggcatagtccaagaattgctaagtttaataaatgcagttaaatc

SEQ ID NO: 19029 - DNA, 4558 bp, Homo sapiens
  source 1..4558: mol_type = unassigned DNA
agaacagaaggctggggtgagggtgggagtcgggtgctaaatatttctactaggctcctgcaaggctagtgatgcagcgggccccccgaccggcgctcgcccgggttctgcgcctaagagttggccgtgagcgacccgcgccgccgggagcctgggtctaggctctcccgacaaggattccaaggcgagaacactggtgcctctgcctgggccagggagagactgaaatcagagcaggggaggcgtttcccccatgggctgtcacccttaaggggccgggagccgaggtgggcgagctcgagagcagagttggagaggtggctgctgtgagttgcatcgggcgttgaggtatctgatgtctgcaccgtttatctaccagacgacgaggcgatttatgcaacagtatcctgtttcagcactgccaaggctatgcgagaacgcggccaggacagcctggcaggactcgtgctgtatgtaggactcttcgggcaccccgggatgctgcacagggccaagtacagccgctttcggaacgagtcgatcacgtccttggacgaaggtagctccggaggctcggtcgggaacaagggctcgccgcagcctccccaccccgccctggcacctcacctgccgactgaagatgccaccttgccgtcgcaggagagccccaccccactgtgcaccttgatcccccgcatggcaagcatgaagctggccaacccggccactttgctgagtctgaaaaacttttgcctgggtaccaaagaggtgcctcggctgaagctccaggaaagccgggacccaggttccagcggcccctcttccccagaaaccagtttaagtaggtccgggactgcacctccaccgcagcaggacctggtgggacacagggcaaccgccctaacccctgattcgtgcccgcttcctggccctggggagccaacacttaggagcaggcaggacaggcactttctacagcacctgttggggatgggcatgaactactgtgtgaggtacatgggctgtgttgaagtgctgcaatcaatgagatcactggattttggaatgagaacccaagttacaagggaagcaataagtcgcctgtgtgaagctgtccccggggcaaatggagccattaaaaagcgaaagcctccagttaagttcctatcaacagtccttggcaaaagtaatcttcagttttcaggaatgaatataaaactgaccatctcaacatgcagtctcacattgatgaatcttgacaaccaacagattattgcaaatcatcatatgcagtctatttcatttgcctctggaggggatcctgatactacagactatgttgcctacgtagctaaagatccagttaatcaacgagcctgtcacatattggaatgccacaatggaatggcccaagacgtcataagtaccatagggcaggcttttgaactccggtttaaacagtacttgaaaaatccttctttgaatacttcttgtgaaagtgaggaggtgcatattgatagccatgccgaggagagagaagatcatgaatattacaatgaaattccagggaagcagccaccagtaggtggtgtttcagatatgcggatcaaagttcaagccacggaacaaatggcttactgccccatacagtgtgaaaagttgtgctatttgcctggaaactccaagtgcagcagtgtatatgagaactgtttagaacaaagcagggcaataggtaatgtccatccaagaggggtgcagtcccagcgagatacctcattattgaagcacacgtgccgagtggatctctttgatgacccctgctacattaatacacaggctcttcaaagtacacctggctctgctggaaatcaaaggtcagcccaaccactggggagcccatggcactgcggaaaggcaccagaaactgttcagccgggtgccacagcccagcctgccagctcacattctttgccacacattaagcagcagctgtggagcgaagaatgctatcatggcaagctgagcaggaaggcggcagagagcctcttggtaaaggatggggactttttggttcgagagagtgcaacatcccctggccaatatgtgctgagtggactacagggaggccaagcaaaacatcttctcctggtggatcctgaaggcaaggtgaggaccaaggatcatgtatttgataatgtcggccaccttatcagataccatatggataacagtttgccaatcatctcctctggaagcgaagtaagccttaaacaaccagtgagaaaagataataatccagcacttttgcattccaacaaatgacagtattgaagcaccatcacactgatatttcaagaaaccccattttgtattaggacacaaagataatttaaactttgtttgtagataaaatagagcacaaactgtgaagtgcatctttccaagaccatcatggaccaggtcctctataaaatgaagaactaacaaaaattagtcttcagaaatgaaaatcagaaaagaggaagagggttggtcattttaaaagaaattatatgtatgcacggatgtcactttttaaggccatattgcattgataacaagctaaaagcacaactaaaatttcacatgctaacgacaacttgaatgaactgctggggcagtggtatgtgcctttcaacttgataatttgggggacattttcatattgggagattaattctaagtatcttcatgttctatgactatagaaccatttgccaaaaaaaaaagcttttcttgctacaaaaaataagcaattttcttgagccttattgactttattacattttctgtttagcagcatttttcactgcaatgttaaaataaatatgacattgaattcgaactgtgtgtatgtcagtggaatcaaatcaaaagccactaacatggctgtctgtttcattggactgtcccatttgctggttaaaaggattggggcccaaatcctctggcctagcatttctcagtgtttgctattcagactgtctaaatacagcatgtgacaagctgaagaagccaaatctatcagtcatttctgatttcattatattctccccctcttcctgctaaaaagacaaaaaacaaaaaacaaaaaaaacaaaaaaaacctcatgagtgcatggatttaaaagagggcaaacaaaaccagtattcttcatatttactattcaaattggtttcattcttagtaaaagtacagaatctatttgaaattatagtaaaatttcttcttgattggctgacactgaatcatagtttctcacctacatatatccttagcacctcgtatagatatgatcagacaaaatgcagaaggaaaaaaaaacatattgaatgaagcacttggaaagattttccacatgtagaccaactggtaaactaacagagtgattaagcatggtgtacagaaaagcattacgctgagtcttaccagtgtgaccttcagcaagttgctgaatctgtttgggttccagtttccttggcaataaaatgagctaaatgggctaggtgaatttggaggactacttcagtcctaacttatagtatgagtctctaaaaagcaagtttttcatttgttagaggtcgttattgataaccagtctgtatagttaaggtaaaaaattaagcttttcttctatagtctgtgtccatactcacagaatgaatggcacacctgagatcaacattcacatagtttagactccaaaccattcagtctaaaatactgaaactttggaatatagggaatgatgataaaagtggatttggtttgagtagcagaaaactacttatgtccttttcttgcctttccaagaaaaatgttttttgtttttttttttaatcttgagttatctggatattgccttgactccatttcattttggctatgtagatacaacttagtctttgtgattgtgatatatttgctaagttttaaataaaacttcttttggatagaaatcattagaaaccaagcatactgcactctaatattttactgtaaaggcttatgatttttatttctactgccattaattttttagatggatttgtttcctcttacacaactagaattaatgtatttttcaccagttttccatataccttaggtcttgatcgtttgtccttaaaaaggggatcagcatgagtatagacagtagaaatgtatgggtagtctaaccacttttatcagagacagagcagggctgtggtctcactctagctgagcagagtattaacttggtagcaagagttcctgatacaaatagatgcaatgactgtaaatggtgtcagcagtacacatggataatcagtatttgactgtaatagtatagtagttaaatacagcacttaaaaataccacagacacagttaaagcaaaaggaaacaataaaaggaatgtctgcatgctattttaatctcacattctttatctgtcttaaagtggaaatccatttgcctataaatacctgtaaacgactttaaaaaataaatgattattgctttgtgacaattgaca

SEQ ID NO: 19030 - DNA, 2799 bp, Homo sapiens
  source 1..2799: mol_type = unassigned DNA
tttttaaaaacatgttttacctgtttttaccttcaacttaaaagcctcaggttttaagttgtatatacttatatgaattatatgactgtgtatacttacaggattcaagcacatttcatttattctgcactttatttctattattattacattatagttatgtagaattatacaactcaccataatgtagaatcaatgggagccctgagcttgttttcctgcaactagatggtcccatctgggggtgatgagacacagtgacacccgaggtgtgttccttatgtccggtctattctgtaatctcattttggttgctgttactgtggaaaatcctgcctcacaaagataggatgttgaaaatggaaggaggcttttcagtacttttgtggcaatctcaggatgttccgccttgactttaatcgagaacgtatggagatttgaagttgtctcaaacatacttttaaggccaccgtcatttgcaatatcaagcagttgatcctcttctagcgtggacaaagtggattcacctggcttattcacaaatgggtcacagatccattccgtcttttgtggatgagaagtgtgatggttaatactgagtgtcaacttgattggattgaaggatacaagtattgatcattggtgtgtctgtgagggtgttgccaaaggagattaacatttgagtcagtgggctgcgaaaggcagacccacccttaatctggttgggcacaatctaatcagctgccagcttggctagaatataagcaggcagaaaaatgtgaaaagagagactggcctagcctcccagcctaaatctttctcctgtgttggatgcttcctgccctcgaacattggattcccaagttcttcagtttcagaactcggactggctctcctctctccttagcctgcagacagcctattgtaggaccttgtgatcatattattgcaaatcatcatatgcagtctatttcatttgcctctggaggggatcctgatactacagactatgttgcctacgtagctaaagatccagttaatcaacgagcctgtcacatattggaatgccacaatggaatggcccaagacgtcataagtaccatagggcaggcttttgaactccggtttaaacagtacttgaaaaatccttctttgaatacttcttgtgaaagtgaggaggtgcatattgatagccatgccgaggagagagaagatcatgaatattacaatgaaattccagggaagcagccaccagtaggtggtgtttcagatatgcggatcaaagttcaagccacggaacaaatggcttactgccccatacagtgtgaaaagttgtgctatttgcctggaaactccaagtgcagcagtgtatatgagaactgtttagaacaaagcagggcaataggtaatgtccatccaagaggggtgcagtcccagcgagatacctcattattgaagcacacgtgccgagtggatctctttgatgacccctgctacattaatacacaggctcttcaaagtacacctggctctgctggaaatcaaaggtcagcccaaccactggggagcccatggcactgcggaaaggcaccagaaactgttcagccgggtgccacagcccagcctgccagctcacattctttgccacacattaagcagcagctgtggagcgaagaatgctatcatggcaagctgagcaggaaggcggcagagagcctcttggtaaaggatggggactttttggttcgagagagtgcaacatcccctggccaatatgtgctgagtggactacagggaggccaagcaaaacatcttctcctggtggatcctgaaggcaaggtgaggaccaaggatcatgtatttgataatgtcggccaccttatcagataccatatggataacagtttgccaatcatctcctctggaagcgaagtaagccttaaacaaccagtgagaaaagataataatccagcacttttgcattccaacaaatgacagtattgaagcaccatcacactgatatttcaagaaaccccattttgtattaggacacaaagataatttaaactttgtttgtagataaaatagagcacaaactgtgaagtgcatctttccaagaccatcatggaccaggtcctctataaaatgaagaactaacaaaaattagtcttcagaaatgaaaatcagaaaagaggaagagggttggtcattttaaaagaaattatatgtatgcacggatgtcactttttaaggccatattgcattgataacaagctaaaagcacaactaaaatttcacatgctaacgacaacttgaatgaactgctggggcagtggtatgtgcctttcaacttgataatttgggggacattttcatattgggagattaattctaagtatcttcatgttctatgactatagaaccatttgccaaaaaaaaaagcttttcttgctacaaaaaataagcaattttcttgagccttattgactttattacattttctgtttagcagcatttttcactgcaatgttaaaataaatatgacattgaattcgaactgtgtgtatgtcagtggaatcaaatcaaaagccactaacatggctgtctgtttcattggactgtcccatttgctggttaaaaggattggggcccaaatcctctggcctagcatttctcagtgtttgctattcagactgtctaaatacagcatgtgacaagctgaagaagccaaatctatcagtcatttctgatttcattatattctccccctcttcctgctaaaaagacaaaaaacaaaaa

SEQ ID NO: 19031 - DNA, 1447 bp, Homo sapiens
  source 1..1447: mol_type = unassigned DNA
aggtaccgcctcctacttggcgcgccactgtggttggagtagctcagtgttttctccggggtgttggcgtcgccttttgagctacgtttccatcgattcgaacttcgtatctagggaccctgcatgcaagagcttatagtgaagaaatacttggtcccatttcttttcgcctgggaggtatctttccactattagcaatgcgattattgcaaatcatcatatgcagtctatttcatttgcctctggaggggatcctgatactacagactatgttgcctacgtagctaaagatccagttaatcaacgagcctgtcacatattggaatgccacaatggaatggcccaagacgtcataagtaccatagggcaggcttttgaactccggtttaaacagtacttgaaaaatccttctttgaatacttcttgtgaaagtgaggaggtgcatattgatagccatgccgaggagagagaagatcatgaatattacaatgaaattccagggaagcagccaccagtaggtggtgtttcagatatgcggatcaaagttcaagccacggaacaaatggcttactgccccatacagtgtgaaaagttgtgctatttgcctggaaactccaagtgcagcagtgtatatgagaactgtttagaacaaagcagggcaataggtaatgtccatccaagaggggtgcagtcccagcgagatacctcattattgaagcacacgtgccgagtggatctctttgatgacccctgctacattaatacacaggctcttcaaagtacacctggctctgctggaaatcaaaggtcagcccaaccactggggagcccatggcactgcggaaaggcaccagaaactgttcagccgggtgccacagcccagcctgccagctcacattctttgccacacattaagcagcagctgtggagcgaagaatgctatcatggcaagctgagcaggaaggcggcagagagcctcttggtaaaggatggggactttttggttcgagagagtgcaacatcccctggccaatatgtgctgagtggactacagggaggccaagcaaaacatcttctcctggtggatcctgaaggcaaggtgaggaccaaggatcatgtatttgataatgtcggccaccttatcagataccatatggataacagtttgccaatcatctcctctggaagcgaagtaagccttaaacaaccagtgagaaaagataataatccagcacttttgcattccaacaaatgacagtattgaagcaccatcacactgatatttcaagaaaccccattttgtattaggacacaaagataatttaaactttgtttgtagataaaatagagcacaaactgtgaagtgcatctttccaagaccatcatggaccaggtcctctataaaatgaagaactaacaaaaattagtcttcagaaatgaaaatcag

SEQ ID NO: 19032 - DNA, 821 bp, Homo sapiens
  source 1..821: mol_type = unassigned DNA
gaagaaatacttggtcccatttcttttcgcctgggaggtatctttccactattagcaatgcgattattgcaaatcatcatatgcagtctatttcatttgcctctggaggggatcctgatactacagactatgttgcctacgtagctaaagatccagttaatcaacgagcctgtcacatattggaatgccacaatggaatggcccaagacgtcataagtaccatagggcaggcttttgaactccggtttaaacagtacttgaaaaatccttctttgaatacttcttgtgaaagtgaggaggtgcatattgatagccatgccgaggagagagaagatcatgaatattacaatgaaattccagggaagcagccaccagtaggtggtgtttcagatatgcggatcaaagttcaagccacggaacaaatggcttactgccccatacagtgtgaaaagttgtgctatttggtaatgtccatccaagaggggtgcagtcccagcgagatacctcattattgaagcacacgtgccgagtggatctctttgatgacccctgctacattaatacacaggctcttcaaagtacacctggctctgctggaaatcaaaggtcagcccaaccactggggagcccatggcactgcggaaaggcaccagaaactgttcagccgggtgccacagcccagcctgccagctcacattctttgccacacattaagcagcagctgtggagcgaagaatgctatcatggcaagctgagcaggaaggcggcagagagcctcttggtaaaggatggggactttttggttcgagagagtgcaacat

SEQ ID NO: 19033 - DNA, 885 bp, Homo sapiens
  source 1..885: mol_type = unassigned DNA
accgcctcctacttggcgcgccactgtggttggagtagctcagtgttttctccggggtgttggcgtcgccttttgagctacgtttccatcgattcgaacttcgtatctagggaccctgcatgcaagagcgtaacagtttctgtgttacttaaccctactgctgcttgtaatgctgcaaaccggaaaataaccttacatggccttcgtaacatttaatgctccttcccccccttcctcttcccctgggcaatttaccgatgtactgatgacttgtaaatccacgtctccaaaccagacaacatccataaccacagatcagcatattaagaactaatccattttgtccttttagtgttttcatttaaaaagttaaattcacaaacaacagatatattgtactttttttttttttagttatagtgaagaaatacttggtcccatttcttttcgcctgggaggtatctttccactattagcaatgcgattattgcaaatcatcatatgcagtctatttcatttgcctctggaggggatcctgatactacagactatgttgcctacgtagctaaagatccagttaatcaacgagcctgtcacatattggaatgccacaatggaatggcccaagacgtcataagtaccatagggcaggcttttgaactccggtttaaacagtacttgaaaaatccttctttgaatacttcttgtgaaagtgaggaggtgcatattgatagccatgccgaggagagagaagatcatgaatattacaatgaaattccagggaagcagccaccagtaggtggtgtttcagatatgcggatcaaagttcaagccacggaacaaatggcttactgccccatacagtgtgaaaagttgtgctatttg

SEQ ID NO: 19034 - DNA, 864 bp, Homo sapiens
  source 1..864: mol_type = unassigned DNA
gcttgttttcctgcaactagatggtcccatctgggggtgatgagacacagtgacacccgaggtgtgttccttatgtccggtctattctgtaatctcattttggttgctgttactgtggaaaatcctgcctcacaaagataggatgttgaaaatggaaggaggcttttcagtacttttgtggcaatctcaggatgttccgccttgactttaatcgagaacgtatggagatttgaagttgtctcaaacatacttttaaggccaccgtcatttgcaatatcaagcagttgatcctcttctagcgtggacaaagtggattcacctggcttattcacaaatgggtcacagatccattccgtcttttgtggatgagaagtgtgatggttaatactgagtgtcaacttgattggattgaaggatacaagtattgatcattggtgtgtctgtgagggtgttgccaaaggagattaacatttgagtcagtgggctgcgaaaggcagacccacccttaatctggttgggcacaatctaatcagctgccagcttggctagaatataagcaggcagaaaaatgtgaaaagagagactggcctagcctcccagcctaaatctttctcctgtgttggatgcttcctgccctcgaacattggattcccaagttcttcagtttcagaactcggactggctctcctctctccttagcctgcagacagcctattgtaggaccttgtgatcatattattgcaaatcatcatatgcagtctatttcatttgcctctggaggggatcctgtaagtatggattcacagaagttctttttatgagttaaaataacttcttgacatttggggctggatgataataaaa

SEQ ID NO: 19035 - DNA, 2062 bp, Homo sapiens
  source 1..2062: mol_type = unassigned DNA
gccccatgttactgagcggagctcctccggctggctcccgcccggggccgcgaacgcaggggagcgctgggggcggcccgggggggtcccgccggggcgccgggggtgcgggagccggcccaggagggggcggcagcggcggagtagccaagtggctccgggagcacctgggcttccgcggggggggcggcggcggagggggcagcaagccggcgccccccgagcccgactaccgcccccctgcgccctctccggccgcgccccccgcgccgcccccggacatcctggccgcctacaggctgcagcgggagcgcgacttcgaagacccctactccggggggtcgtccggctccgccgccctcgccacccctgtcgcccccggacccacgccgcccccgcgccacggctctcccccacaccgccttattcgggtcgagaccccggggcccccggcgccgcctgctgatgagcggatctccggaccccccgccagcagcgataggctagctatcctagaagactatgcggacccgtttgatgttcaggagactggcgaaggctcagcaggagcttcaggagccccagagaaggtccctgaaaatgatggctacatggagccctatgaggctcaaaagatgatggccgagatccggggctccaaggagacagcaactcagcccttgcctctgtatgacacaccctatgagccagaggaggatggggccaccgcggaaggtgagggggccccctggccccgggagtcccgcctgccagaggatgatgagaggccccctgaggagtatgaccagccctgggagtggaagaaggagcggatttccaaagcctttgcagcccagtttgaaggaccggagaagagctgcctgtcacctggccgggaggagaaggggcggctacctccccgactctctgcagggaaccccaagtcagccaaacccctaagcatggagcccagcagccccctgggggagtggacagatccagcactgcctctggaaaaccagctggtatcacggggccatcagccgaaccgacgccgagaacctgctccggctgtgcaaagaggccagctacctggtgcgcaacagtgagaccagcaagaatgacttctccctctccctcaagagcagccagggattcatgcacatgaagctgtcccgaaccaaggaacacaaatatgtgctgggccagaacagcccgcccttcagcagcgtccctgaaattgtgcaccactatgccagccgcaagctacccattaagggagccgaacacatgtccctgctctaccctgtggccatccggactctttagatgtgaagccagggcactgtgatagacctgtacccagccctgtgcccatcacctggctgagggctgtggctcttgccagggacgtgatctttcaaacctttcttctcctgggatccagtagaagctggagattccttaatttattctaaagggaaagggctcctggggccttggagtaaggggttgtctggagctggggaaagaggaatccctggagagaaaggatagcccctggaggaagggggttccagagctactgggatggtagggagtttcagactggcagctccggctcctttccgaccttagggcagaggtggtgacctccaccaccaccaccctctccccactgggtccgtgcgaggtagtgcagaattcggccccttggggcgccttaccacctctctgcctccgtccccgacttccaccccagaccgtcggagggctccgcccagagtctggtaagaggtttggggaagacaggcccctgggaagcagccggctttggggggtggggagagaaggggaggggctcgggcagagggaactgtgcagtccccaggccgccccggctccgggccagaggcaataaataaacccgatcctgccgggcacagccgcgcccgcgcctccggcgccgtccccgggctgacgggggagggagcggagaagcgagcgcagattctgcgtataaatcagctctggagcagacacagcccggctgtgaaaagca

SEQ ID NO: 19036 - DNA, 2500 bp, Homo sapiens
  source 1..2500: mol_type = unassigned DNA
gtactaaccactatacgatcacggcgagctaccgggacgccacgacgagcagctgacccagtgttgcccttctcgtctagatggcggccattccagctttcctaagcgtccattatctaccaggttcctcccgcacccacgttcacccgcaagagcagccgggagcgctgtggactccctagcccgaagtctcctcttggctgtacgcacggaccgcaaaagaagggacatgaaagtgctttgcaaccaaaggattcctatgaggccgggcctgcaatgatgtgaagcccctgaggacgcccgaatggtggcccaaagtctctctgacgctcaccatgccctgactatcatgctatctgaacgactttggctgggactggagctcttaaattttacaagaaggaaaatcagttctgacccaccaccatacaacttccttgaggcgcgagggtgtccacaatctccacagaggcggcattgggtcaccgctggaggatgcagcaggagggaggacccgtgaggagcgccccctgtaggaccggaaccctggagggttcgcggcaagggtctccggggcataggaaacgggcatcccccaagggtagtctgagttccgcccagccccattcctggatgctcacgccgtctcccctaaactcccactgcgctcaccgggagcccatctcatcatcaccacagcccgtggctaatgggccaaaacagaagaagaaaagcaactggcggagtacaacgcgcctgcgcattatcagactcagggacaggctggaacctcgccccctagctatcctagaagactatgcggacccgtttgatgttcaggagactggcgaaggctcagcaggagcttcaggagccccagagaaggtccctgaaaatgatggctacatggagccctatgaggctcaaaagatgatggccgagatccggggctccaaggagacagcaactcagcccttgcctctgtatgacacaccctatgagccagaggaggatggggccaccgcggaaggtgagggggccccctggccccgggagtcccgcctgccagaggatgatgagaggccccctgaggagtatgaccagccctgggagtggaagaaggagcggatttccaaagcctttgcagttgacattaaggtcatcaaagacctaccttggcctccacctgtgggacagctggacagcagcccctccctgcctgatggggacagggacatctccggtccagcctcgcccctccctgagcccagcctggaggacagcagcgcccagtttgaaggaccggagaagagctgcctgtcacctggccgggaggagaaggggcggctacctccccgactctctgcagggaaccccaagtcagccaaacccctaagcatggagcccagcagccccctgggggagtggacagatccagcactgcctctggaaaaccaggtctggtatcacggggccatcagccgaaccgacgccgagaacctgctccggctgtgcaaagaggccagctacctggtgcgcaacagtgagaccagcaagaatgacttctccctctccctcaagagcagccagggattcatgcacatgaagctgtcccgaaccaaggaacacaaatatgtgctgggccagaacagcccgcccttcagcagcgtccctgaaattgtgcaccactatgccagccgcaagctacccattaagggagccgaacacatgtccctgctctaccctgtggccatccggactctttagatgtgaagccagggcactgtgatagacctgtacccagccctgtgcccatcacctggctgagggctgtggctcttgccagggacgtgatctttcaaacctttcttctcctgggatccagtagaagctggagattccttaatttattctaaagggaaagggctcctggggccttggagtaaggggttgtctggagctggggaaagaggaatccctggagagaaaggatagcccctggaggaagggggttccagagctactgggatggtagggagtttcagactggcagctccggctcctttccgaccttagggcagaggtggtgacctccaccaccaccaccctctccccactgggtccgtgcgaggtagtgcagaattcggccccttggggcgccttaccacctctctgcctccgtccccgacttccaccccagaccgtcggagggctccgcccagagtctggtaagaggtttggggaagacaggcccctgggaagcagccggctttggggggtggggagagaaggggaggggctcgggcagagggaactgtgcagtccccaggccgccccggctccgggccagaggcaataaataaacccgatcctgccgggcacagccgcgcccgcgcctccggcgccgtccccgggctgacgggggagggagcggagaagcgagcgcagattctgcgtataaatcagctctggagcagacacagcccggctgtgaaaagca

SEQ ID NO: 19037 - DNA, 1731 bp, Homo sapiens
  source 1..1731: mol_type = unassigned DNA
catgttactgagcggagctcctccggctggctcccgcccggggccgcgaacgcaggggagcgctgggggcggcccgggggggtcccgccggggcgccgggggtgcgggagccggcccaggagggggcggcagcggcggagtagccaagtggctccgggagcacctgggcttccgcggggggggcggcggcggagggggcagcaagccggcgccccccgagcccgactaccgcccccctgcgccctctccggccgcgccccccgcgccgcccccggacatcctggccgcctacaggctgcagcgggagcgcgacttcgaagacccctactccggggggtcgtccggctccgccgccctcgccacccctgtcgcccccggacccacgccgcccccgcgccacggctctcccccacaccgccttattcgggtcgagaccccggggcccccggcgccgcctgctgatgagcggatctccggaccccccgccagcagcgataggctagctatcctagaagactatgcggacccgtttgatgttcaggagactggcgaaggctcagcaggagcttcaggagccccagagaaggtccctgaaaatgatggctacatggagccctatgaggctcaaaagatgatggccgagatccggggctccaaggagacagcaactcagcccttgcctctgtatgacacaccctatgagccagaggaggatggggccaccgcggaaggtgagggggccccctggccccgggagtcccgcctgccagaggatgatgagaggccccctgaggagtatgaccagccctgggagtggaagaaggagcggatttccaaagcctttgcaggagcagccagggattcatgcacatgaagctgtcccgaaccaaggaacacaaatatgtgctgggccagaacagcccgcccttcagcagcgtccctgaaattgtgcaccactatgccagccgcaagctacccattaagggagccgaacacatgtccctgctctaccctgtggccatccggactctttagatgtgaagccagggcactgtgatagacctgtacccagccctgtgcccatcacctggctgagggctgtggctcttgccagggacgtgatctttcaaacctttcttctcctgggatccagtagaagctggagattccttaatttattctaaagggaaagggctcctggggccttggagtaaggggttgtctggagctggggaaagaggaatccctggagagaaaggatagcccctggaggaagggggttccagagctactgggatggtagggagtttcagactggcagctccggctcctttccgaccttagggcagaggtggtgacctccaccaccaccaccctctccccactgggtccgtgcgaggtagtgcagaattcggccccttggggcgccttaccacctctctgcctccgtccccgacttccaccccagaccgtcggagggctccgcccagagtctggtaagaggtttggggaagacaggcccctgggaagcagccggctttggggggtggggagagaaggggaggggctcgggcagagggaactgtgcagtccccaggccgccccggctccgggccagaggcaataaataaacccgatcctgccgggcacagccgcgcccgcgcctccggcgccgtccccgggctgacgggggagggagcggagaagcgagcgcagattctgcgtataaat

SEQ ID NO: 19038 - DNA, 1163 bp, Homo sapiens
  source 1..1163: mol_type = unassigned DNA
gagttgccacctgggtgcccatgggcactgcaggctagagctgaggaggcccacgccagcctcggaggggtcgcagctctgggcatgggcccaggacttggctagctatcctagaagactatgcggacccgtttgatgttcaggagactggcgaaggctcagcaggagcttcaggagccccagagaaggtccctgaaaatgatggctacatggagccctatgaggctcaaaagatgatggccgagatccggggctccaaggagacagcaactcagcccttgcctctgtatgacacaccctatgagccagaggaggatggggccaccgcggaaggtgagggggccccctggccccgggagtcccgcctgccagaggatgatgagaggccccctgaggagtatgaccagccctgggagtggaagaaggagcggatttccaaagcctttgcagcccagtttgaaggaccggagaagagctgcctgtcacctggccgggaggagaaggggcggctacctccccgactctctgcagggaaccccaagtcagccaaacccctaagcatggagcccagcagccccctgggggagtggacagatccagcactgcctctggaaaaccaggtctggtatcacggggccatcagccgaaccgacgccgagaacctgctccggctgtgcaaagaggccagctacctggtgcgcaacagtgagaccagcaagaatgacttctccctctccctcaagagcagccagggattcatgcacatgaagctgtcccgaaccaaggaacacaaatatgtgctgggccagaacagcccgcccttcagcagcgtccctgaaattgtgcaccactatgccagccgcaagctacccattaagggagccgaacacatgtccctgctctaccctgtggccatccggactctttagatgtgaagccagggcactgtgatagacctgtacccagccctgtgcccatcacctggctgagggctgtggctcttgccagggacgtgatctttcaaacctttcttctcctgggatccagtagaagctggagattccttaatttattctaaagggaaagggctcctggggccttggagtaaggggttgtctggagctggggaaagaggaatccctggagagaaaggatagcccctg

SEQ ID NO: 19039 - DNA, 604 bp, Homo sapiens
  source 1..604: mol_type = unassigned DNA
ccccctggccccgggagtcccgcctgccagaggatgatgagaggccccctgaggagtatgaccagccctgggagtggaagaaggagcggatttccaaagcctttgcaggggacacccacaatgggtgggcctggacagcgagggacccagcagagatgccccccttcctctctctcatccttagctggtatcacggggccatcagccgaaccgacgccgagaacctgctccggctgtgcaaagaggccagctacctggtgcgcaacagtgagaccagcaagaatgacttctccctctccctcaagagcagccagggattcatgcacatgaagctgtcccgaaccaaggaacacaaatatgtgctgggccagaacagcccgcccttcagcagcgtccctgaaattgtgcaccactatgccagccgcaagctacccattaagggagccgaacacatgtccctgctctaccctgtggccatccggactctttagatgtgaagccagggcactgtgatagacctgtacccagccctgtgcccatcacctggctgagggctgtggctcttgccagggacgtgatctttcaaacctttcttctcctggga

SEQ ID NO: 19040 - DNA, 603 bp, Homo sapiens
  source 1..603: mol_type = unassigned DNA
cagcccctccctgcctgatggggacagggacatctccggtccagcctcgcccctccctgagcccagcctggaggacagcagcgcccagtttgaaggaccggagaagagctgcctgtcacctggccgggaggagaaggggcggctacctccccgactctctgcagggaaccccaagtcagccaaacccctaagcatggagcccagcagccccctgggggagtggacagatccagcactgcctctggaaaaccaggtctggtatcacggggccatcagccgaaccgacgccgagaacctgctccggctgtgcaaagaggccagctacctgctgtcatactctaggagtctgaattgtaaaatcaaagaagcatttcccagaaaagtttttgtcaaaaatttgatttacataacctcagaaatgtgtattgctttaaaaattataaagttcatggagcataccaagcagcctgtataccatttctaaaccaactactcccctgcaagatagatctcttttttatagacagaaaataaattcaaagaggtttgttacttgcccaaggccacccggtaataaagtccccaaaccaggatttgaaccca

SEQ ID NO: 19041 - DNA, 2499 bp, Homo sapiens
  source 1..2499: mol_type = unassigned DNA
ccccatgttactgagcggagctcctccggctggctcccgcccggggccgcgaacgcaggggagcgctgggggcggcccgggggggtcccgccggggcgccgggggtgcgggagccggcccaggagggggcggcagcggcggagtagccaagtggctccgggagcacctgggcttccgcggggggggcggcggcggagggggcagcaagccggcgccccccgagcccgactaccgcccccctgcgccctctccggccgcgccccccgcgccgcccccggacatcctggccgcctacaggctgcagcgggagcgcgacttcgaagacccctactccggggggtcgtccggctccgccgccctcgccacccctgtcgcccccggacccacgccgcccccgcgccacggctctcccccacaccgccttattcgggtcgagaccccggggcccccggcgccgcctgctgatgagcggatctccggaccccccgccagcagcgataggctagctatcctagaagactatgcggacccgtttgatgttcaggagactggcgaaggctcagcaggagcttcaggagccccagagaaggtccctgaaaatgatggctacatggagccctatgaggctcaaaagatgatggccgagatccggggctccaaggagacagcaactcagcccttgcctctgtatgacacaccctatgagccagaggaggatggggccaccgcggaaggtgagggggccccctggccccgggagtcccgcctgccagaggatgatgagaggccccctgaggagtatgaccagccctgggagtggaagaaggagcggatttccaaagcctttgcagttgacattaaggtcatcaaagacctaccttggcctccacctgtgggacagctggacagcagcccctccctgcctgatggggacagggacatctccggtccagcctcgcccctccctgagcccagcctggaggacagcagcgcccagtttgaaggaccggagaagagctgcctgtcacctggccgggaggagaaggggcggctacctccccgactctctgcagggaaccccaagtcagccaaacccctaagcatggagcccagcagccccctgggggagtggacagatccagcactgcctctggaaaaccagctggtatcacggggccatcagccgaaccgacgccgagaacctgctccggctgtgcaaagaggccagctacctggtgcgcaacagtgagaccagcaagaatgacttctccctctccctcaagtgagtggggacagttgtggtttcagggacagcaagcagggtggaaggggactccagtattccccttatgcccaaccaagctggggaggtccccatcccccatgaacaatccccaggcactgggggtcctgagatgtctgagactcagcccctgctctcaaggagctcagagtccattgggagaaatagttgatccgcagcatccagctcagaagggttctgttctagttgtgtggcctggcccccttaacctctctaggcctcagtttccttactaatgaaatggatgggggataatatagggaaggattaggtgaaataatgcatgggaagtgcttagcatagtgctaagggctcaataaattatcactgtcattattaatggaagcccaagatgttctagaagcataggcaaggagataggagctttgcgtgagggagtctgtagggtgttggggggggctggttcctggaaggagggcagggcagtggacacaaagtatttctgtttactctgaggaagagtgtgtgtgtctgtgtgtgtgttcggggatggggggtgtctgagcttttgggtcctggaagacgtagaggaggcaaggccctccctccccatcaggctttcctcccaggagcagcagatcagcctcccagactccctggtagcatggccagccctgccctgggcaaccaggagttctgcctggtagaccctgcaccccgttaggaagccagtggggtggtatgttcatttgccccccaccatcactagtaggacacctgcaccactttctaccacattctctgggaccatcagagtacagatataccctcccattcagacaaatccaatctatgggaacttggggctgctaaacaagacatatttgggggataattattcaacttccctcaaagataatagaaaaagtggtgggtgtgttggctcacatctgtaatcccagcactttcaaaggccgtggcaggtggatcacctgaagtcaggagttcgagaccaacctgaccaacatggtgaaaccccgtctctactaaaaatacaaaaattagttgggtgtgatggtgagcactggtaatgccagctactcgggaggctgaggcaggaaaatcgcttgaacccaggaggcggaggttgcagtgagccgatattgcgccattgcactccagcccaggccaacaacagcaagactctgtctcag

SEQ ID NO: 19042 - DNA, 884 bp, Homo sapiens
  source 1..884: mol_type = unassigned DNA
ctggcgaaggctcagcaggagcttcaggagccccagagaaggtccctgaaaatgatggctacatggagccctatgaggctcaaaagatgatggccgagatccggggctccaaggagacagcaactcagcccttgcctctgtatgacacaccctatgagccagaggaggatggggccaccgcggaaggtgagggggccccctggccccgggagtcccgcctgccagaggatgatgagaggccccctgaggagtatgaccagccctgggagtggaagaaggagcggatttccaaagcctttgcagcccagtttgaaggaccggagaagagctgcctgtcacctggccgggaggagaaggggcggctacctccccgactctctgcagggaaccccaagtcagccaaacccctaagcatggagcccagcagccccctgggggagtggacagatccagcactgcctctggaaaaccaggtctggtatcacggggccatcagccgaaccgacgccgagaacctgctccggctgtgcaaagaggccagctacctggtgcgcaacagtgagaccagcaagaatgacttctccctctccctcaagtgagtggggacagttgtggtttcagggacagcaagcagggtggaaggggactccagtattccccttatgcccaaccaagctggggaggtccccatcccccatgaacaatccccaggcactgggggtcctgagatgtctgagactcagcccctgctctcaaggagctcagagtccattgggagaaatagttgatccgcagcatccagctcagaagggttctgttctagttgtgtggcctggcccccttaacctctctaggcctcagtttccttactaatgaaatggatg

SEQ ID NO: 19043 - DNA, 597 bp, Homo sapiens
  source 1..597: mol_type = unassigned DNA
atgaccagccctgggagtggaagaaggagcggatttccaaagcctttgcagttgacattaaggtcatcaaagacctaccttggcctccacctgtgggacagctggacagcagcccctccctgcctgatggggacagggacatctccggtccagcctcgcccctccctgagcccagcctggaggacagcagcgcccagtttgaaggaccggagaagagctgcctgtcacctggccgggaggagaaggggcggctacctccccgactctctgcagggaaccccaagtcagccaaacccctaagcatggagcccagcagccccctgggggagtggacagatccagcactgcctctggaaaaccaggtgggacacccacaatgggtgggcctggacagcgagggacccagcagagatgccccccttcctctctctcatccttagctggtatcacggggccatcagccgaaccgacgccgagaacctgctccggctgtgcaaagaggccagctacctggtgcgcaacagtgagaccagcaagaatgacttctccctctccctcaagtgagtggggacagttgtggtttcagggacagcaagc

SEQ ID NO: 19044 - DNA, 577 bp, Homo sapiens
  source 1..577: mol_type = unassigned DNA
gataggctagctatcctagaagactatgcggacccgtttgatgttcaggagactggcgaaggctcagcaggagcttcaggagccccagagaaggtccctgaaaatgatggctacatggagccctatgaggctcaaaagatgatggccgagatccggggctccaaggagacagcaactcagcccttgcctctgtatgacacaccctatgagccagaggaggatggggccaccgcggaaggtgagggggccccctggccccgggagtcccgcctgccagaggatgatgagaggccccctgaggagtatgaccagccctgggagtggaagaaggagcggatttccaaagcctttgcagccagactggaaaaccacaggattctaatattcttcctgtaaagcacacaccattgaggatgggccgtttatctccagaagtctccttggagaatcaatactgtttggattgcttaatgggaaaatctatgctcgtcattaggaaacctcgttagcagtccagcagccgccagtggcatcactcttctcaggatggggggtggggattaaatttcaataaaac

SEQ ID NO: 19045 - DNA, 578 bp, Homo sapiens
  source 1..578: mol_type = unassigned DNA
agtgttgcccttctcgtctagatggcggccattccagctttcctaagcgtccattatctaccaggttcctcccgcacccacgttcacccgcaagagcagccgggagcgctgtggactccctagcccgaagtctcctcttggctgtacgcacggaccgcaaaagaagggacatgaaagtgctttgcaaccaaaggattcctatgaggccgggcctgcaatgatgtgaagcccctgaggacgcccgaatggtggcccaaagtctctctgacgctcaccatgccctgactatcatgctatctgaacgactttggctgggactggagctcttaaattttacaagaaggaaaatcagttctgacccaccaccatacaacttccttgaggcgcgagctagctatcctagaagactatgcggacccgtttgatgttcaggagactggcgaaggctcagcaggagcttcaggagccccagagaaggtccctgaaaatgatggctacatggagccctatgaggctcaaaagatgatggccgagatccggggctccaaggagacagcaactcagcccttgcctctgta

SEQ ID NO: 19046 - DNA, 7575 bp, Homo sapiens
  source 1..7575: mol_type = unassigned DNA
cgccgccactgccgcccgcgcctcgatggcgccatcgccccggagccgctgaccgctcagcgcctccagcccggcccgcgcggcgggtcctccgagcccggcccgccgggggagcggcctgccgcggaagcctccccgcgccctcccgcccggccccgccatggcgctgcggcgcctcctgctgctgctgctgctctcgctggagtccctggacctgctgcccagcgtccacggagcccgcggccgcgccgccaaccggaccctgagtgcaggcggcgctgccgtcgggggccggagggccgggggcgccctggcacggggcggccgcgagctgaacggcaccgcccgggcgcccggaatcccggaggcgggaagccggcgggggcagcccgcggcggctgtggcggcggcggccagcgcggccgtcacctacgagacgtgctggggctactacgacgtgagcggccagtacgacaaggagttcgagtgtaacaacagcgagagcggctacctgtactgctgcggtacctgctactaccgcttctgctgcaagaagcgccacgagaagctggaccagcgccagtgcaccaactaccagagcccggtgtgggtacagacgcccagcaccaaggtggtgtcgccggggcccgagaacaagtacgacccggagaaggacaagaccaacttcaccgtctacatcacctgcggggtgatcgccttcgtcatcgtggccggcgtcttcgccaaggtctcctacgacaaggcccaccgccctccacgggagatgaacatccacagggctctggctgacatcttaagacaacagggaccaatccccatagcacactgtgaaagagaaactatctcggctatcgatacctctcccaaagagaacacgccggtcagatcgtcctccaaaaaccactacactcctgtgcgtacggccaagcagactccagggcattatgggaaggatgcttaccgaagtggaggacctgatctccataacttcatctcatctggatttgtcacattaggaagaggacacaccaagggtgatcatcaatataaccatccgattttgagcagtgttacccagatcccgccacatgagaagccacggatgaacaacatcctgacatcagccaccgagccctatgacctctccttctcccgctcgttccagaacttggcccacctgcccccatcctacgagtctgcagtaaagaccaaccccagcaagtattcatctctgaagaggctaaccgacaaggaggctgacgagtattacatgagacggcggcacctgcccgacctggctgcccgcggcaccctccccctcaatgtcatccagatgtcccaacagaagccgttgccaagggaacgaccccgccggcccatccgggccatgtcccaggacagggtcctgtccccggatcggggcctgccagatgagttcagcatgccctacgaccgcatcctgtccgacgagcagctgctctccacggagcgcctgcactcccaggacccgctgctgtccccggagcggacggcctttcccgagcagtcgctgtccagggccatctcgcacacggacgtctttgtgtccacacccgtgctggaccgctaccgcatgagcaagatgcactctcatcccagtgcctccaataactcatacgccaccctgggccagagccagacggcagccaagcgtcatgcctttgcctcacgcagacacaacacggtggagcagctgcactacatcccgggccaccacacctgctacacagccagcaagaccgaagtgaccgtgtgaccggcggggcagggccggggctgctgggcgtggcagagcagagcgggggccgggaggggccaggagcagagcttctagccttgccactctcccttcccttgtcccctctgtaggaagtgggggtgggccacctttgcccaaaaagccatacccccggggacacagccccgatggcctggtccaatacacttagacccaggaccaagagcaatcgctcttgctcctccagaagaatcagtggggagtgaggagggggctaggccccattctcacccccgaccaccttcaccaactccctttccgtcccgcgcctccttctccccatccgggggactcagctgcaggttctgtcagcagagagacccttgcttgactgtggtctgaagctgcctgggtttgaaggggccagcgggtccaatcagtgggctgaccggataggctactcggtctcattcattcatctagaaccgcatcacagaaatctcctagtgcctaaaaactgcctgctcgctctctcagagccagggagctgctgtgtccataagcacaataatgattcttttcttgcctgctggaactctctggtccccactgagtgacccttcctttgctgacccctgagggcccaaccctggccctgtgcccctcccctcaactccaggaccaggaggggttcccttccttcagctgcctccccattggtgggaactccacccccttccagctgactgcccgcccataaggaccctgggcctgtcctttcagcgggctgtgctccttccctggccctgaggatttcacccttgagttttctggggttttggctgtagccttcgcagaggggagtagcaatggggtgctggccctcccagacacccgatcatctccgcactccctccaggcctctagacctgaccatgactgccactcaggctgccttctccacccctgctctgctcccaggaggcacctgcggtggccagagagccagggtggggagggccactgtgatgtgcggggtctcgggctcaacattcgcatcctgcagggctccacctgttcccacatgcacctccggcaggacctagacagaagtttctagagagcagcttttcagcccccagacaaggaggatgagaggtggttgtcctgcatcctctccgctcatccttccttccccatctctgtctacctgctcagttcagagatcactcctactgcctgtgtccccttcccccacatcctccctgcaactttattcctcctagctgatccttcagatccgtgcctcctctggatcaaagggacaaagacctattagcaaaagcaaacaaaggtcctccaggcgactggcctaggggctaactgggcaggtccccacagcatcatccctttgtgcaggcactggggtacctggtagaccatggtcctcagctctgttgggggaccgccactgcccgcccacctcagcctcttccccgcctccagcctgggggttggcatggtgtgacggcctcctggggaggtgacagtgaattcagcagcatccgctcccccaagaccagagagcctggtgggggaaagaaggggttccctcattctcagggccagggcacccgctgggttggggctgggggaatcaactccaggctattgggtgaaggtgtgatcctaaaaacagtcagatccaacagcagtgcccttataaatggggttttacctgccctcagttctgcactcatggccctttaaaaaggcgagtgtagaaggagaatttattggtgtcagccctggagatttttaatctaaccaagtccacaaaccacagagaaagcaatggactgtgtcctttcactgatttcaagagttccaaagctctcatctccttctcccctctgcagggtgtgcctcccaacaggaacaggaaaccatcaccctggatcttagggggatggaggctgggggttgtgaaagccactgtcagaccccacactggggatgcattcctggagtcgtgcggctggaaggccagggactaccctctctgctttcctcccaacagacacataaaccttcttaagggctggtccccaggggtttataagagtttgttccagaaggtgaggctaagagggttggaaaggaagaagtgagtctgaatagagcaggtggctcccagctgggcccctgagcccagcacctttgaatcgtctaatctgtggccatcccttggaaggcaggatgctggtggtgaggggaaaggacctgagtggctgagaatgcccttcccaggtgtctacatgcaggtatacaccaaaccagaaagctgatcccatctccagtgtcaaagcttctcagcaccaagttctccagcccccagggtgacacttttccccaggggtcctccccaagccctgtctctgacagggtttctgtctctctcaggggttgttgatgagttgattccaagacatttctcatcccagccttaccactgtctggctgaaaggctctgatgtcagttgggttggaaaattctactgcaatgcttacttcttttcaaggatttcttctgcttcacctttgggtctagaagcaaggaatgaagggagggagagagggagggagggaggggaggagggaagaaaaaagaagtagagataggtctacagacttgctccaattcagtcccacatttcaaaatccagaaaactatgtcatagctgggacagagaggtatcccatttattcagctgtcccatccatcttcatggaacaagcaaagccacatcaataggcaagttcacgtagcagataaaagaggcttctggggctggaacctagatgccatgatttctagcccaaccaggctggtggcctctaccatacatagaagtaccatccacccttacagtaaaagcctccctcctgctcacaaaggaagcctaaagcccaagatttccctctccttgttttattcatttttgcacatctctgttgctctaacagaaatgaactggaatctgcacaggttctctcctgccctgaaagttctgcctggtttccttggcctctgatggcattgaagctttcacaatccctcctgcatctccaccttccctgtcttgctccaggctcctggctccatgccttcctgtgtcaaaaaggctttgccaagaattacttcacctcctaaccaggcttctgccctcagggctcccccagtgtcttgggagtgtcttgggccacacgactgcctcttagaaagttccaaccttgcccccaattcaaatttctcctcccctctttccactctccctcccagaaactcctgatttccagaaaacctcagatttccaggccaggtcactcattccttcctctcatctccctcttcctccatctaccttcctccattcaccttcctccattcctaatttcttttccctggtcttgctataatctccagctctaaaaatcagagctctcaatgaaaacaatggaagaataagacattctttcggtcttctgtttgcctcactggtgtatccttcatctcctgcccctgtgagttgataccccagtgcacggagccaagggcttttcccctctgagctctgggagggaagggaatggagctctgggtttgagatgtcatggcctgtgatagtcagtttggttcctgccactagcaagtcccctgaagctcccaacccagcctgatgttagcccagaagctcctgctctggccaaagactcctatccttgagggctctcagccactgctccaacacacttgcccccttcctgcttgtgtatgtcacttatcctcctttgtccacaaagacttgagggcctcctgagtctccaagcatggaggaatatccatgccaacatccctgccatcaaactcaatccattttcttcagagataccttgtctgtcaccagcctccaacttcatattccttccacaggcaactgtgcacttgacccaaggtaaaatgaaagggctgccaatcactcggactccagaaggtgcctgccctgagaagagctggcatgttacctcccacatacatttcctgtcatcctgtccgaatctgggaaattttgctctggagtattttcaagaaagcgcattgtgttttaatgaagtatttttcagggttccaatgttattttttataaatgcagcattttaatggcagattcaatatgaaggacatgtcttcctgggctctatatttgattttggaaggcagcatactctaggagaaaaaaagcatagggctgaggctctgaagacacagcttccagccctggctttgtctccgagggggagtcatgttccccactcagtgcctcagtttccccatctgtaaaatgaggggctttgactagatgagctctgaagtttcatccagctcttacactgtagggctttcattccctgccagcacctgctctccccgttcctccccacctccactgagctgcacacatcccacaatgcctgccccacagcgatgtcctcagatgtcctggacagccaccgcactcctcactagagcctggggtgggcctgatgggctcggccacccagggatgccctcgtacctgaagtttaagggcctaaccattcaataggtcaccaactgtgtgccatggaagccctcttgtaaagacacacctaaaccatcctaagtgactgtggaattctggggaattctgagtttggagtttccatttggatacggtccttatagctggagggaggcggttccaatttcagagagggagctggctggagagaaaggtctggaggttggcccataagggcatgaagtttgtacttgagggcagctgggaaattcatttcaagctgcagaggaacgtgttcacaggctgttgtgtggcaatgaatgtcatgataacccactctggaatatgtgtcctgaagaccaagtctggacactgaggctccattccaactggaggaggaggcatctccatctgggctgctaggaaggggcactcatcccatcctagtacctttgtagcccttcgtcatgacactaccgtcctcccggtgaaggcttgtgaagcaagaatggagagtccaagtttgtgatattcaaacccatcttgtaaatcagcaaacacattaaccttccatcagtcagagaaataatgttgtggctgtgtgtttccttaatgctctccctcctgagggaggagaagaccctgctcaactttgctgcccaccctgcagtgacccctgaatgccacaccatgggaggactcattcattggctttgtagtggcaaatattcctctagttctataactcaactagacattttgtagtaaagaattcttgaaattctctaataaaaagcaattcttactgtaatatttttagtttggggacacaatttcctaaggggggattaatgaacatttttatgcattagcccaatttatgaattccatgtttattatatggtagtactgatgaaaagtacctttctatctgtatctttgcagtttcttcgttactcatatgtaagcctcatggtaagcagtgctctagtaactgcttctctgtacaaatctcatcgttctacttacctgtcaaagcacattctacatgtactgtaaacagatacactttagtaagatttagtcttaaggatttttccacttttgtcagtaacagatatttatggattaaaaaataaagccgtttcaacataa

SEQ ID NO: 19047 - DNA, 7518 bp, Homo sapiens
  source 1..7518: mol_type = unassigned DNA
cgccgccactgccgcccgcgcctcgatggcgccatcgccccggagccgctgaccgctcagcgcctccagcccggcccgcgcggcgggtcctccgagcccggcccgccgggggagcggcctgccgcggaagcctccccgcgccctcccgcccggccccgccatggcgctgcggcgcctcctgctgctgctgctgctctcgctggagtccctggacctgctgcccagcgtccacggagcccgcggccgcgccgccaaccggaccctgagtgcaggcggcgctgccgtcgggggccggagggccgggggcgccctggcacggggcggccgcgagctgaacggcaccgcccgggcgcccggaatcccggaggcgggaagccggcgggggcagcccgcggcggctgtggcggcggcggccagcgcggccgtcacctacgagacgtgctggggctactacgacgtgagcggccagtacgacaaggagttcgagtgtaacaacagcgagagcggctacctgtactgctgcggtacctgctactaccgcttctgctgcaagaagcgccacgagaagctggaccagcgccagtgcaccaactaccagagcccggtgtgggtacagacgcccagcaccaaggtggtgtcgccggggcccgagaacaagtacgacccggagaaggacaagaccaacttcaccgtctacatcacctgcggggtgatcgccttcgtcatcgtggccggcgtcttcgccaaggtctcctacgacaaggcccaccgccctccacgggagatgaacatccacagggctctggctgacatcttaagacaacagggaccaatccccatagcacactgtgaaagagaaactatctcggctatcgatacctctcccaaagagaacacgccggtcagatcgtcctccaaaaaccactacactcctgtgcgtacggccaagcagactccagggcattatgggaaggatgcttaccgaagtggaggacctgatctccataacttcatctcatctggatttgtcacattaggaagaggacacaccaaggagaagccacggatgaacaacatcctgacatcagccaccgagccctatgacctctccttctcccgctcgttccagaacttggcccacctgcccccatcctacgagtctgcagtaaagaccaaccccagcaagtattcatctctgaagaggctaaccgacaaggaggctgacgagtattacatgagacggcggcacctgcccgacctggctgcccgcggcaccctccccctcaatgtcatccagatgtcccaacagaagccgttgccaagggaacgaccccgccggcccatccgggccatgtcccaggacagggtcctgtccccggatcggggcctgccagatgagttcagcatgccctacgaccgcatcctgtccgacgagcagctgctctccacggagcgcctgcactcccaggacccgctgctgtccccggagcggacggcctttcccgagcagtcgctgtccagggccatctcgcacacggacgtctttgtgtccacacccgtgctggaccgctaccgcatgagcaagatgcactctcatcccagtgcctccaataactcatacgccaccctgggccagagccagacggcagccaagcgtcatgcctttgcctcacgcagacacaacacggtggagcagctgcactacatcccgggccaccacacctgctacacagccagcaagaccgaagtgaccgtgtgaccggcggggcagggccggggctgctgggcgtggcagagcagagcgggggccgggaggggccaggagcagagcttctagccttgccactctcccttcccttgtcccctctgtaggaagtgggggtgggccacctttgcccaaaaagccatacccccggggacacagccccgatggcctggtccaatacacttagacccaggaccaagagcaatcgctcttgctcctccagaagaatcagtggggagtgaggagggggctaggccccattctcacccccgaccaccttcaccaactccctttccgtcccgcgcctccttctccccatccgggggactcagctgcaggttctgtcagcagagagacccttgcttgactgtggtctgaagctgcctgggtttgaaggggccagcgggtccaatcagtgggctgaccggataggctactcggtctcattcattcatctagaaccgcatcacagaaatctcctagtgcctaaaaactgcctgctcgctctctcagagccagggagctgctgtgtccataagcacaataatgattcttttcttgcctgctggaactctctggtccccactgagtgacccttcctttgctgacccctgagggcccaaccctggccctgtgcccctcccctcaactccaggaccaggaggggttcccttccttcagctgcctccccattggtgggaactccacccccttccagctgactgcccgcccataaggaccctgggcctgtcctttcagcgggctgtgctccttccctggccctgaggatttcacccttgagttttctggggttttggctgtagccttcgcagaggggagtagcaatggggtgctggccctcccagacacccgatcatctccgcactccctccaggcctctagacctgaccatgactgccactcaggctgccttctccacccctgctctgctcccaggaggcacctgcggtggccagagagccagggtggggagggccactgtgatgtgcggggtctcgggctcaacattcgcatcctgcagggctccacctgttcccacatgcacctccggcaggacctagacagaagtttctagagagcagcttttcagcccccagacaaggaggatgagaggtggttgtcctgcatcctctccgctcatccttccttccccatctctgtctacctgctcagttcagagatcactcctactgcctgtgtccccttcccccacatcctccctgcaactttattcctcctagctgatccttcagatccgtgcctcctctggatcaaagggacaaagacctattagcaaaagcaaacaaaggtcctccaggcgactggcctaggggctaactgggcaggtccccacagcatcatccctttgtgcaggcactggggtacctggtagaccatggtcctcagctctgttgggggaccgccactgcccgcccacctcagcctcttccccgcctccagcctgggggttggcatggtgtgacggcctcctggggaggtgacagtgaattcagcagcatccgctcccccaagaccagagagcctggtgggggaaagaaggggttccctcattctcagggccagggcacccgctgggttggggctgggggaatcaactccaggctattgggtgaaggtgtgatcctaaaaacagtcagatccaacagcagtgcccttataaatggggttttacctgccctcagttctgcactcatggccctttaaaaaggcgagtgtagaaggagaatttattggtgtcagccctggagatttttaatctaaccaagtccacaaaccacagagaaagcaatggactgtgtcctttcactgatttcaagagttccaaagctctcatctccttctcccctctgcagggtgtgcctcccaacaggaacaggaaaccatcaccctggatcttagggggatggaggctgggggttgtgaaagccactgtcagaccccacactggggatgcattcctggagtcgtgcggctggaaggccagggactaccctctctgctttcctcccaacagacacataaaccttcttaagggctggtccccaggggtttataagagtttgttccagaaggtgaggctaagagggttggaaaggaagaagtgagtctgaatagagcaggtggctcccagctgggcccctgagcccagcacctttgaatcgtctaatctgtggccatcccttggaaggcaggatgctggtggtgaggggaaaggacctgagtggctgagaatgcccttcccaggtgtctacatgcaggtatacaccaaaccagaaagctgatcccatctccagtgtcaaagcttctcagcaccaagttctccagcccccagggtgacacttttccccaggggtcctccccaagccctgtctctgacagggtttctgtctctctcaggggttgttgatgagttgattccaagacatttctcatcccagccttaccactgtctggctgaaaggctctgatgtcagttgggttggaaaattctactgcaatgcttacttcttttcaaggatttcttctgcttcacctttgggtctagaagcaaggaatgaagggagggagagagggagggagggaggggaggagggaagaaaaaagaagtagagataggtctacagacttgctccaattcagtcccacatttcaaaatccagaaaactatgtcatagctgggacagagaggtatcccatttattcagctgtcccatccatcttcatggaacaagcaaagccacatcaataggcaagttcacgtagcagataaaagaggcttctggggctggaacctagatgccatgatttctagcccaaccaggctggtggcctctaccatacatagaagtaccatccacccttacagtaaaagcctccctcctgctcacaaaggaagcctaaagcccaagatttccctctccttgttttattcatttttgcacatctctgttgctctaacagaaatgaactggaatctgcacaggttctctcctgccctgaaagttctgcctggtttccttggcctctgatggcattgaagctttcacaatccctcctgcatctccaccttccctgtcttgctccaggctcctggctccatgccttcctgtgtcaaaaaggctttgccaagaattacttcacctcctaaccaggcttctgccctcagggctcccccagtgtcttgggagtgtcttgggccacacgactgcctcttagaaagttccaaccttgcccccaattcaaatttctcctcccctctttccactctccctcccagaaactcctgatttccagaaaacctcagatttccaggccaggtcactcattccttcctctcatctccctcttcctccatctaccttcctccattcaccttcctccattcctaatttcttttccctggtcttgctataatctccagctctaaaaatcagagctctcaatgaaaacaatggaagaataagacattctttcggtcttctgtttgcctcactggtgtatccttcatctcctgcccctgtgagttgataccccagtgcacggagccaagggcttttcccctctgagctctgggagggaagggaatggagctctgggtttgagatgtcatggcctgtgatagtcagtttggttcctgccactagcaagtcccctgaagctcccaacccagcctgatgttagcccagaagctcctgctctggccaaagactcctatccttgagggctctcagccactgctccaacacacttgcccccttcctgcttgtgtatgtcacttatcctcctttgtccacaaagacttgagggcctcctgagtctccaagcatggaggaatatccatgccaacatccctgccatcaaactcaatccattttcttcagagataccttgtctgtcaccagcctccaacttcatattccttccacaggcaactgtgcacttgacccaaggtaaaatgaaagggctgccaatcactcggactccagaaggtgcctgccctgagaagagctggcatgttacctcccacatacatttcctgtcatcctgtccgaatctgggaaattttgctctggagtattttcaagaaagcgcattgtgttttaatgaagtatttttcagggttccaatgttattttttataaatgcagcattttaatggcagattcaatatgaaggacatgtcttcctgggctctatatttgattttggaaggcagcatactctaggagaaaaaaagcatagggctgaggctctgaagacacagcttccagccctggctttgtctccgagggggagtcatgttccccactcagtgcctcagtttccccatctgtaaaatgaggggctttgactagatgagctctgaagtttcatccagctcttacactgtagggctttcattccctgccagcacctgctctccccgttcctccccacctccactgagctgcacacatcccacaatgcctgccccacagcgatgtcctcagatgtcctggacagccaccgcactcctcactagagcctggggtgggcctgatgggctcggccacccagggatgccctcgtacctgaagtttaagggcctaaccattcaataggtcaccaactgtgtgccatggaagccctcttgtaaagacacacctaaaccatcctaagtgactgtggaattctggggaattctgagtttggagtttccatttggatacggtccttatagctggagggaggcggttccaatttcagagagggagctggctggagagaaaggtctggaggttggcccataagggcatgaagtttgtacttgagggcagctgggaaattcatttcaagctgcagaggaacgtgttcacaggctgttgtgtggcaatgaatgtcatgataacccactctggaatatgtgtcctgaagaccaagtctggacactgaggctccattccaactggaggaggaggcatctccatctgggctgctaggaaggggcactcatcccatcctagtacctttgtagcccttcgtcatgacactaccgtcctcccggtgaaggcttgtgaagcaagaatggagagtccaagtttgtgatattcaaacccatcttgtaaatcagcaaacacattaaccttccatcagtcagagaaataatgttgtggctgtgtgtttccttaatgctctccctcctgagggaggagaagaccctgctcaactttgctgcccaccctgcagtgacccctgaatgccacaccatgggaggactcattcattggctttgtagtggcaaatattcctctagttctataactcaactagacattttgtagtaaagaattcttgaaattctctaataaaaagcaattcttactgtaatatttttagtttggggacacaatttcctaaggggggattaatgaacatttttatgcattagcccaatttatgaattccatgtttattatatggtagtactgatgaaaagtacctttctatctgtatctttgcagtttcttcgttactcatatgtaagcctcatggtaagcagtgctctagtaactgcttctctgtacaaatctcatcgttctacttacctgtcaaagcacattctacatgtactgtaaacagatacactttagtaagatttagtcttaaggatttttccacttttgtcagtaacagatatttatggattaaaaaataaagccgtttcaacataa

SEQ ID NO: 19048 - DNA, 7262 bp, Homo sapiens
  source 1..7262: mol_type = unassigned DNA
atggcgctgcggcgcctcctgctgctgctgctgctctcgctggagtccctggacctgctgcccagcgtccacggagcccgcggccgcgccgccaaccggaccctgagtgcaggcggcgctgccgtcgggggccggagggccgggggcgccctggcacggggcggccgcgagctgaacggcaccgcccgggcgcccggaatcccggaggcgggaagccggcgggggcagcccgcggcggctgtggcggcggcggccagcgcggccgtcacctacgagacgtgctggggctactacgacgtgagcggccagtacgacaaggagttcgagtgtaacaacagcgagagcggctacctgtactgctgcggtacctgctactaccgcttctgctgcaagaagcgccacgagaagctggaccagcgccagtgcaccaactaccagagcccggtgtgggtacagacgcccagcaccaaggtggtgtcgccggggcccgagaacaagtacgacccggagaaggacaagaccaacttcaccgtctacatcacctgcggggtgatcgccttcgtcatcgtggccggcgtcttcgccaaggtctcctacgacaaggcccaccgccctccacgggagatgaacatccacagggctctggctgacatcttaagacaacagggaccaatccccatagcacactgtgaaagagaaactatctcggctatcgatacctctcccaaagagaacacgccggtcagatcgtcctccaaaaaccactacactcctgtgcgtacggccaagcagactccagagaagccacggatgaacaacatcctgacatcagccaccgagccctatgacctctccttctcccgctcgttccagaacttggcccacctgcccccatcctacgagtctgcagtaaagaccaaccccagcaagtattcatctctgaagaggctaaccgacaaggaggctgacgagtattacatgagacggcggcacctgcccgacctggctgcccgcggcaccctccccctcaatgtcatccagatgtcccaacagaagccgttgccaagggaacgaccccgccggcccatccgggccatgtcccaggacagggtcctgtccccggatcggggcctgccagatgagttcagcatgccctacgaccgcatcctgtccgacgagcagctgctctccacggagcgcctgcactcccaggacccgctgctgtccccggagcggacggcctttcccgagcagtcgctgtccagggccatctcgcacacggacgtctttgtgtccacacccgtgctggaccgctaccgcatgagcaagatgcactctcatcccagtgcctccaataactcatacgccaccctgggccagagccagacggcagccaagcgtcatgcctttgcctcacgcagacacaacacggtggagcagctgcactacatcccgggccaccacacctgctacacagccagcaagaccgaagtgaccgtgtgaccggcggggcagggccggggctgctgggcgtggcagagcagagcgggggccgggaggggccaggagcagagcttctagccttgccactctcccttcccttgtcccctctgtaggaagtgggggtgggccacctttgcccaaaaagccatacccccggggacacagccccgatggcctggtccaatacacttagacccaggaccaagagcaatcgctcttgctcctccagaagaatcagtggggagtgaggagggggctaggccccattctcacccccgaccaccttcaccaactccctttccgtcccgcgcctccttctccccatccgggggactcagctgcaggttctgtcagcagagagacccttgcttgactgtggtctgaagctgcctgggtttgaaggggccagcgggtccaatcagtgggctgaccggataggctactcggtctcattcattcatctagaaccgcatcacagaaatctcctagtgcctaaaaactgcctgctcgctctctcagagccagggagctgctgtgtccataagcacaataatgattcttttcttgcctgctggaactctctggtccccactgagtgacccttcctttgctgacccctgagggcccaaccctggccctgtgcccctcccctcaactccaggaccaggaggggttcccttccttcagctgcctccccattggtgggaactccacccccttccagctgactgcccgcccataaggaccctgggcctgtcctttcagcgggctgtgctccttccctggccctgaggatttcacccttgagttttctggggttttggctgtagccttcgcagaggggagtagcaatggggtgctggccctcccagacacccgatcatctccgcactccctccaggcctctagacctgaccatgactgccactcaggctgccttctccacccctgctctgctcccaggaggcacctgcggtggccagagagccagggtggggagggccactgtgatgtgcggggtctcgggctcaacattcgcatcctgcagggctccacctgttcccacatgcacctccggcaggacctagacagaagtttctagagagcagcttttcagcccccagacaaggaggatgagaggtggttgtcctgcatcctctccgctcatccttccttccccatctctgtctacctgctcagttcagagatcactcctactgcctgtgtccccttcccccacatcctccctgcaactttattcctcctagctgatccttcagatccgtgcctcctctggatcaaagggacaaagacctattagcaaaagcaaacaaaggtcctccaggcgactggcctaggggctaactgggcaggtccccacagcatcatccctttgtgcaggcactggggtacctggtagaccatggtcctcagctctgttgggggaccgccactgcccgcccacctcagcctcttccccgcctccagcctgggggttggcatggtgtgacggcctcctggggaggtgacagtgaattcagcagcatccgctcccccaagaccagagagcctggtgggggaaagaaggggttccctcattctcagggccagggcacccgctgggttggggctgggggaatcaactccaggctattgggtgaaggtgtgatcctaaaaacagtcagatccaacagcagtgcccttataaatggggttttacctgccctcagttctgcactcatggccctttaaaaaggcgagtgtagaaggagaatttattggtgtcagccctggagatttttaatctaaccaagtccacaaaccacagagaaagcaatggactgtgtcctttcactgatttcaagagttccaaagctctcatctccttctcccctctgcagggtgtgcctcccaacaggaacaggaaaccatcaccctggatcttagggggatggaggctgggggttgtgaaagccactgtcagaccccacactggggatgcattcctggagtcgtgcggctggaaggccagggactaccctctctgctttcctcccaacagacacataaaccttcttaagggctggtccccaggggtttataagagtttgttccagaaggtgaggctaagagggttggaaaggaagaagtgagtctgaatagagcaggtggctcccagctgggcccctgagcccagcacctttgaatcgtctaatctgtggccatcccttggaaggcaggatgctggtggtgaggggaaaggacctgagtggctgagaatgcccttcccaggtgtctacatgcaggtatacaccaaaccagaaagctgatcccatctccagtgtcaaagcttctcagcaccaagttctccagcccccagggtgacacttttccccaggggtcctccccaagccctgtctctgacagggtttctgtctctctcaggggttgttgatgagttgattccaagacatttctcatcccagccttaccactgtctggctgaaaggctctgatgtcagttgggttggaaaattctactgcaatgcttacttcttttcaaggatttcttctgcttcacctttgggtctagaagcaaggaatgaagggagggagagagggagggagggaggggaggagggaagaaaaaagaagtagagataggtctacagacttgctccaattcagtcccacatttcaaaatccagaaaactatgtcatagctgggacagagaggtatcccatttattcagctgtcccatccatcttcatggaacaagcaaagccacatcaataggcaagttcacgtagcagataaaagaggcttctggggctggaacctagatgccatgatttctagcccaaccaggctggtggcctctaccatacatagaagtaccatccacccttacagtaaaagcctccctcctgctcacaaaggaagcctaaagcccaagatttccctctccttgttttattcatttttgcacatctctgttgctctaacagaaatgaactggaatctgcacaggttctctcctgccctgaaagttctgcctggtttccttggcctctgatggcattgaagctttcacaatccctcctgcatctccaccttccctgtcttgctccaggctcctggctccatgccttcctgtgtcaaaaaggctttgccaagaattacttcacctcctaaccaggcttctgccctcagggctcccccagtgtcttgggagtgtcttgggccacacgactgcctcttagaaagttccaaccttgcccccaattcaaatttctcctcccctctttccactctccctcccagaaactcctgatttccagaaaacctcagatttccaggccaggtcactcattccttcctctcatctccctcttcctccatctaccttcctccattcaccttcctccattcctaatttcttttccctggtcttgctataatctccagctctaaaaatcagagctctcaatgaaaacaatggaagaataagacattctttcggtcttctgtttgcctcactggtgtatccttcatctcctgcccctgtgagttgataccccagtgcacggagccaagggcttttcccctctgagctctgggagggaagggaatggagctctgggtttgagatgtcatggcctgtgatagtcagtttggttcctgccactagcaagtcccctgaagctcccaacccagcctgatgttagcccagaagctcctgctctggccaaagactcctatccttgagggctctcagccactgctccaacacacttgcccccttcctgcttgtgtatgtcacttatcctcctttgtccacaaagacttgagggcctcctgagtctccaagcatggaggaatatccatgccaacatccctgccatcaaactcaatccattttcttcagagataccttgtctgtcaccagcctccaacttcatattccttccacaggcaactgtgcacttgacccaaggtaaaatgaaagggctgccaatcactcggactccagaaggtgcctgccctgagaagagctggcatgttacctcccacatacatttcctgtcatcctgtccgaatctgggaaattttgctctggagtattttcaagaaagcgcattgtgttttaatgaagtatttttcagggttccaatgttattttttataaatgcagcattttaatggcagattcaatatgaaggacatgtcttcctgggctctatatttgattttggaaggcagcatactctaggagaaaaaaagcatagggctgaggctctgaagacacagcttccagccctggctttgtctccgagggggagtcatgttccccactcagtgcctcagtttccccatctgtaaaatgaggggctttgactagatgagctctgaagtttcatccagctcttacactgtagggctttcattccctgccagcacctgctctccccgttcctccccacctccactgagctgcacacatcccacaatgcctgccccacagcgatgtcctcagatgtcctggacagccaccgcactcctcactagagcctggggtgggcctgatgggctcggccacccagggatgccctcgtacctgaagtttaagggcctaaccattcaataggtcaccaactgtgtgccatggaagccctcttgtaaagacacacctaaaccatcctaagtgactgtggaattctggggaattctgagtttggagtttccatttggatacggtccttatagctggagggaggcggttccaatttcagagagggagctggctggagagaaaggtctggaggttggcccataagggcatgaagtttgtacttgagggcagctgggaaattcatttcaagctgcagaggaacgtgttcacaggctgttgtgtggcaatgaatgtcatgataacccactctggaatatgtgtcctgaagaccaagtctggacactgaggctccattccaactggaggaggaggcatctccatctgggctgctaggaaggggcactcatcccatcctagtacctttgtagcccttcgtcatgacactaccgtcctcccggtgaaggcttgtgaagcaagaatggagagtccaagtttgtgatattcaaacccatcttgtaaatcagcaaacacattaaccttccatcagtcagagaaataatgttgtggctgtgtgtttccttaatgctctccctcctgagggaggagaagaccctgctcaactttgctgcccaccctgcagtgacccctgaatgccacaccatgggaggactcattcattggctttgtagtggcaaatattcctctagttctataactcaactagacattttgtagtaaagaattcttgaaattctctaataaaaagcaattcttactgtaatatttttagtttggggacacaatttcctaaggggggattaatgaacatttttatgcattagcccaatttatgaattccatgtttattatatggtagtactgatgaaaagtacctttctatctgtatctttgcagtttcttcgttactcatatgtaagcctcatggtaagcagtgctctagtaactgcttctctgtacaaatctcatcgttctacttacctgtcaaagcacattctacatgtactgtaaacagatacactttagtaagatttagtcttaaggatttttccacttttgtcagtaacagatatttatggattaaaaaataaagccgtttcaacataa

SEQ ID NO: 19049 - DNA, 1329 bp, Homo sapiens
  source 1..1329: mol_type = unassigned DNA
gaccaacttcaccgtctacatcacctgcggggtgatcgccttcgtcatcgtggccggcgtcttcgccaaggtctcctacgacaaggcccaccgccctccacgggagatgaacatccacagggctctggctgacatcttaagacaacagggaccaatccccatagcacactgtgaaagagaaactatctcggctatcgatacctctcccaaagagaacacgccggtcagatcgtcctccaaaaaccactacactcctgtgcgtacggccaagcagactccagggcattatgggaaggatgcttaccgaagtggaggacctgatctccataacttcatctcatctggatttgtcacattaggaagaggacacaccaagggtacagtggaaaccattttttactaaaatacagaggttgcctagggaacgccatctgaaatgagaagatggtgtggaggccagaggcttgtctgggacaggaataagtggggtggttccatggcagcttgtcctggtgacatgcgtggcttctgacaggagttactggaggtcacaggtgtgactttagagggcgatagacttccaagagacacccatcccactccacccatggcggggacacagatgccggcggctccttgtgggaagggaccacagggagtgtggtggaaaactgccggtggatgtagcagcatttgcaatgtgtgtgttcgcctcttggctattattccttttccttttgaaagctacattttataaaccaatgtcaatgttctgtactgtggtatctaagccggtgtgcatgtggagagtttcagcatcctaagtgtgtctccataaacactctatgatgtggacacaaaggtagaaggttatgcagaccttcaagcctcaagatgaaagctaacctagagtttctgctgagctgctttacaacctagctgacagcttgcagagcatctgtgcagggggcatggactcctcctcaattctgtcttttgtttaaacaaggtcctacgagtgttgtgagcattctgtcacatcaagagtcactggatccctaactcctttaattaccgtcccaacacctgtgtgctgttatagatcaaatgtgaattctgttgtaggggtagtgtatccctgtcttcccctgagatacgtgtcttgtgtgagtaaacaaggaactgtgcaatattttcttacattccatgcacctactttttaaattccttatgtgatgtttgttcatcctatagagaaaaaaaaatctgtatctgtgtatgtattttctgttgtgtctatttgtgtctaaataaagtttatcgaggata

SEQ ID NO: 19050 - DNA, 6033 bp, Homo sapiens
  source 1..6033: mol_type = unassigned DNA
atgccggccctcctgctcctcgtactcctggcctctagcgccggccaggccagggcgcgcccgtccaacgccacgagcgccgagcccgcgggcccgctgcccgccctgctggcgcacctgcggcgcctgaccggggcgctgacgggcggcgggggcgcggcgagcccaggcgccaacggcaccaggaccggccccgcgggcggggcgggcgcggcggcccgggcgccccctcccgccgagctctgccacggctactacgatgtcatgggccagtacgacgccaccttcaactgcagcaccggctcctaccgcttctgctgtggcacctgccactaccgcttctgctgtgagcaccgtcacatgcgcctggcgcaggcctcctgctccaactacgacacgccgcgctgggccaccacgccgccgccgctagctgggggcgccgggggcgctgggggtgcgggcggggggccagggcccggccaggccgggtggttggaagggggccggactgggggtgccgggggccgcgggggcgagggccccgggggcagcacagcctacgtcgtgtgcggggtcatcagcttcgccctggccgtgggcgtcggcgccaaagtggccttcagcaaggcgtcccgtgcgccccgggcgcaccgggatatcaacgtgcccagagctctggtggacattctgagacatcaggcggggcctgggacccgcccggaccgggcccgaagcagctccctgaccccggggatcggcggtcccgacagcatgccccccaggacgcccaagaacctctacaacaccgtgaagacccccaacctcgactggcgagccttgccgccgcccagcccctccttgcactactccacgctgtcctgctctcggtccttccacaacctctcgcatctgcccccgtcctacgaggctgccgtgaaatccgagctgaaccgctactcttccctcaagaggctggccgagaaggatctggacgaggcctacctgaagcgccggcccctggaattgccccgcggcacgctgcccctgcacgcgctgcggcggccgggcacggggggcggctatcgcatggaggcctggggcggcccagaggagctgggcctggcgcccgcgcccaacccccggcgggtcatgtcccaggagcacctgctgggcgatggtggccgttcgcgctacgagttcacgctgccgcgcgcgcgcctggtgtcgcaggagcacctgctgctgtcctcgcccgaggccctgcgccagagtcgcgagcacctgctgtcgcccccgcgcagccccgcgctgccccccgaccccaccgcccgggccagcctggccgcctcgcactccaacctgctgctggggcccggggggcccccaacaccgctgcgcgggctgccgccaccgtccagcctgcacgcccaccaccaccacgccctgcacggctcgccgcagccggcctggatgtccgacgccggcgggggcgggggcacactggcccgcaggccgcccttccagcgccagggcacgctggagcagctgcagttcatcccgggccaccacctgccccagcacctgcgcacggccagcaagaacgaggtgactgtctgaggccagggccgggtctggggggctgcggcctcccgggccccccgtcccagcctggatcccccgacacaggcgcacacatgccaggggcctggggcccagatcggcccttggacaggagtgaaagcctccttctgggatgtcctggcagacaagattcctcctcctattacttcactgcttgagccaaggcctccttcccatgatgtcatcccagaggaagaggccggctcatgaggtcatcactagcaaaaatgtctgtgttctgtgatgtcatcacagggacaaagcctcgttcccatgaggtcatcacagaggaagaggccggcccgtgaggtcagcgctggaggccatgtccatgttctatggtgtcctcagaggcttccttcttgtggtataataacagagacgacgccttgttccatgacattccttcctgtggtgtcactgcagagacaatctcacctggatgatgtcatctctaactccaaggcctcttttggcatcatcgccatggggaagatattttctccctgtgtctttgcagcagagaagatgcctctgtcctatgatgtcatcattacagacaaagccatcttcctgggacacgtcgcaggggaaaatgcctcaccgattgtgtcctcactagacataaggtccccttttcacaacatcatcacagggaccctgcctccttcctgtgatgccatcaccagagaaggtgccttgccctatgacgtcatcagagggaccgtgcctcttcctgtgatgtcatcaccagagatgaccacccactctgggacctctccaggaggaggtcccttctgtgatgtcgcccagatgctatgtgctctgagatggcacaaagagatgcctccactgctgccaccatgttgtagaaggcagggcaggcccagagtccaggaccaccccagggaagatgccagagagcagagaggggccctgtcctgagatgttgtctgaaggaagcatcgctggggagccgcccatgtggagggcctcctccagagatgatggtctgtgtaggctgttggcagtgacacccctacccccaatgctgtgatggcatcaccagagcttcctcctcagaggcactgcccactctggaaggccatcggtattggtggtgtcaccagagttactgccttgtcccaccatgacttagcttggttgctccctccccagactccagggacatgtccagcaggatctctgccagaccctctgaggggaaatggggccttggatcccacatctgtgccatgactcctgggagacaggacctccagatggccttctgctcccaggaggccactctggatcaccaggatcctggagttctggcactcataggtgtcccatagcctggcctcacttttctttctgccatatctagagacaatcacctctgtcaacaaagtcctagccttctactggggggaggtgcttggggtacacctactcttgccctcactgacactgtcagcatcacacaacacccgccactcatgatggcaccacacccggggtcaagtgttacccatgtctgaggatggaatccttccccaggattacctatgacccacaactatggtatcatcttcttccaggatttaccatgactaatggtgtcaccatctgccaagactccccatagccaatggtgtcaccatcctccatgattcctcacaaccatggtgtcatcatctttcaggagccaccacagctgacggtgtcatcatctcctagattccaccatgaccagtgatgacattaccttccagaatccactacacctgacagagacatcctctactgaaatccactaggactgatgattccaccatttcccataatccctcatgattttggtgtcatcacctcccaagacccatgatgcccaatagtgtcatcatcatttgcagggatgcatggtgtcatcatctccagggatccacttcaaccatgtgccaccacctcccaggatttcattcaaacatgtgccactacctcccagtatccacttcaactatggtgttatcacctgccaggatccacgagagccaatgctgtcaccatccactaggatccaccataaccctggtgtcatcatctcctgtgatccatgaggtccagtgctgtcaccatccactaggatccaccatgaccctggtgtcatcatctcctgtgatccatgaggtccagtgctgtcaccatccactaggatccaccataaccctggtgtcatcatctcccaggatccatgaggtccagtgctgtctgtcaccatccactagtatccaccataaccctggtgtcatcttctcccaggatccatgaggtccagtgctgtcaccatccactaggatccgccataaccctggtgtcatcatccgtgatccatgaggtccagtgctgtcaccatccactaggatccaccataaccctggtgtcatcatctcccaggatccatgaggtccagtgttgtcaccatctactaggatccaccatgaccctggtgttatcatctcccaggatccatgaggtccagtgttgtcaccatctattaggatccaccatgaccctggtgttatcatctcccaggatccatgaggtccagtgctgtcaccacccactaggatccaccataaccctggtgtcatcccagagtccactgcaaccatgtgccatcatcccccaagagccatcatcttaggagccaagtaccgtgacgggctgtatttcagttgtcctctggggccgcatggtacttacagttgttcacttaaggggaaccagcacaacaggccatattcccgtttccactaaaaggacaggggtggggccagctgtccccctctgaagacttcacccctactctggccctccttatgtcactgcctcactcctgaccgaggatgatgcctgcatcaatcccaccacagatgtggcctcagccaacctcaccttaccccccggtgaggcacccaggcccctcctgacagcagcgctgtccctcacccagccatctgattggtgacagggtcaacccagcaacctctcattatcaccagagaggaagcatttcaaccctcaggtgacgccactgccccctgcccaatccctgtcacttgggcccctaccaggatcagcactccactggccccggccaaattctcctcagagatccctgacccccgcgggataggtcaaagctggtgaccgactggggccttcagtgctgtcttctgctggcctcatcctgcagcagggacactggagagcaatggtccctgccagcacatctgcgggaccaggggtgctccttcacctccctccctaacaccttaacacccggggagcctccgggggtggcaggaagtccccagcacccaatgcacaatcttccctcaattctctttgtacatagccatgttgcgggggcggccattcccccactcttaaagggctacacgcccctcccccagcccctagggcgaggtggggggggcctcttcttcctcccctgggccgtccccctccctcttatgtctccccgcaaacactggcacctcacactccttcttgtcaggagcttggggcagacaactggcccttggttcccaccacactgaggaaatgggggttacccaaatccacctgggccctggtgccagtttttcaaccccacggcttctagctgctctgaggggctcctcccatcccttccagggcctccccagccccgcactgctcaggccaactgtgacttccccagaaaggagccagcttgagcacccaccccctcccagccccctcccctctgctcaacacctccgcggaacactcagctttctccagctgccgggatttgggggtctgggcctttcagcttttttatcccccctccactagctctagcccagcctggattccagggatcccacccctagccctgtccctattcagttggcacaggctgcctgaccctggggccttgatttgatctcaaataagccatagaggagagaggtcttgaggggtgggagcaggtgtgtactgacaattcccctccacatgtcttgagctgggacctcgtcatctgagacttccccatgccccaacaaatgcaaatgcacacaaacccatgcatacacaagcacacacacacaggcatctccccgtctggttgggggagcatgggagggggcacttcacagggagaagataaatagttccacacctgaagaccctccaacagcttctgcctccctcctcatcacttcctctctccaccccctctccaacactggccccttcccctaattaattccctggtgaggacagccagaggagctgcgacttggtattttttggaataaatagacattttcctga

SEQ ID NO: 19051 - DNA, 2321 bp, Homo sapiens
  source 1..2321: mol_type = unassigned DNA
gcgggggcgagggccccgggggcagcacagcctacgtcgtgtgcggggtcatcagcttcgccctggccgtgggcgtcggcgccaaagtggccttcagcaaggcgtcccgtgcgccccgggcgcaccgggatatcaacgtgcccagagctctggtggacattctgagacatcaggcggggcctgggacccgcccggaccgggcccgaagcagctccctgaccccggggatcggcggtcccgacagcatgccccccaggacgcccaagaacctctacaacaccgtgaagacccccaacctcgctacctgcacctcaacgtcaacagccccaagcaccacgccgccacactggactggcgagccttgccgccgcccagcccctccttgcactactccacgctgtcctgctctcggtccttccacaacctctcgcatctgcccccgtcctacgaggctgccgtgaaatccgagctgaaccgctactcttccctcaagaggctggccgagaaggatctggacgaggcctacctgaagcgccggcccctggaattgccccgcggcacgctgcccctgcacgcgctgcggcggccgggcacggggggcggctatcgcatggaggcctggggcggcccagaggagctgggcctggcgcccgcgcccaacccccggcgggtcatgtcccaggagcacctgctgggcgatggtggccgttcgcgctacgagttcacgctgccgcgcgcgcgcctggtgtcgcaggagcacctgctgctgtcctcgcccgaggccctgcgccagagtcgcgagcacctgctgtcgcccccgcgcagccccgcgctgccccccgaccccaccgcccgggccagcctggccgcctcgcactccaacctgctgctggggcccggggggcccccaacaccgctgcgcgggctgccgccaccgtccagcctgcacgcccaccaccaccacgccctgcacggctcgccgcagccggcctggatgtccgacgccggcgggggcgggggcacactggcccgcaggccgcccttccagcgccagggcacgctggagcagctgcagttcatcccgggccaccacctgccccagcacctgcgcacggccagcaagaacgaggtgactgtctgaggccagggccgggtctggggggctgcggcctcccgggccccccgtcccagcctggatcccccgacacaggcgcacacatgccaggggcctggggcccagatcggcccttggacaggagtgaaagcctccttctgggatgtcctggcagacaagattcctcctcctattacttcactgcttgagccaaggcctccttcccatgatgtcatcccagaggaagaggccggctcatgaggtcatcactagcaaaaatgtctgtgttctgtgatgtcatcacagggacaaagcctcgttcccatgaggtcatcacagaggaagaggccggcccgtgaggtcagcgctggaggccatgtccatgttctatggtgtcctcagaggcttccttcttgtggtataataacagagacgacgccttgttccatgacattccttcctgtggtgtcactgcagagacaatctcacctggatgatgtcatctctaactccaaggcctcttttggcatcatcgccatggggaagatattttctccctgtgtctttgcagcagagaagatgcctctgtcctatgatgtcatcattacagacaaagccatcttcctgggacacgtcgcaggggaaaatgcctcaccgattgtgtcctcactagacataaggtccccttttcacaacatcatcacagggaccctgcctccttcctgtgatgccatcaccagagaaggtgccttgccctatgacgtcatcagagggaccgtgcctcttcctgtgatgtcatcaccagagatgaccacccactctgggacctctccaggaggaggtcccttctgtgatgtcgcccagatgctatgtgctctgagatggcacaaagagatgcctccactgctgccaccatgttgtagaaggcagggcaggcccagagtccaggaccaccccagggaagatgccagagagcagagaggggccctgtcctgagatgttgtctgaaggaagcatcgctggggagccgcccatgtggagggcctcctccagagatgatggtctgtgtaggctgttggcagtgacacccctacccccaatgctgtgatggcatcaccagagcttcctcctcagaggcactgcccactctggaaggccatcggtattggtggtgtcaccagagttactgccttgtcccaccatgact

SEQ ID NO: 19052 - DNA, 486 bp, Homo sapiens
  source 1..486: mol_type = unassigned DNA
gtcgggccgcgcgggagcccccgaggcgcagggtcccgcggcgcccggcacgacagccccggaggggggcgaccgctgccgcggctactacgacgtgatgggccagtgggacccgcccttcaactgcagctccggagcctacagcttctgctgcggcacgtgcggctaccgcttctgctgccacgacgggccgcggcgcctcgaccagagccgctgttccaactacgacacgccggcctgggtccagacaggccggccgcccgcccgcgcccgcgacaccgcagcgccccgggaccccggccgcgagcgcagccatacggccgtctacgctgtgtgcggcgtcgcagcgctgctggtgctggccggcatcggggcgcgcctgggactggagagggcgcacagcccgcgcgcgcggcgcacagtgaccagggcgctgacagagcttctgaagcagccgggcccccaggagccactgcctcccaccct

SEQ ID NO: 19053 - DNA, 1405 bp, Homo sapiens
  source 1..1405: mol_type = unassigned DNA
atggcgcgggccggggcgcggggactgctcggcggccgccgtcctcccggcctccggctcgcgctcgcgcttcggctcgcgttgctgctggcgcggccgccgtcgggccgcgcgggagcccccgaggcgcagggtcccgcggcgcccggcacgacagccccggaggggggcgaccgctgccgcggctactacgacgtgatgggccagtgggacccgcccttcaactgcagctccggagcctacagcttctgctgcggcacgtgcggctaccgcttctgctgccacgacgggccgcggcgcctcgaccagagccgctgttccaactacgacacgccggcctgggtccagacaggccggccgcccgcccgcgcccgcgacaccgcagcgccccgggaccccggccgcgagcgcagccatacggccgtctacgctgtgtgcggcgtcgcagcgctgctggtgctggccggcatcggggcgcgcctgggactggagagggcgcacagcccgcgcgcgcggcgcacagtgaccagggcgctgacagagcttctgaagcagccgggcccccaggagccactgcctcccaccctgggcccacccctgggtggctgtgtccaggtgcagatgggggacggcctcccccggggctccccccacaacagcgcagacaagaagcgcctcaacaacgcgccccgggggtcggccgccccggggcccccgcgcggcccgcggctgcagggcggcggcagcctgacgctgcagccagactacgccaagtacgccacgttcaaggccgccgcgctcaaggccgcagaggccgccccgcgggacttctgtcagcgtttccccgccctcgagccgtccccgcggcaacccccggcgcgggctccgcgaccatccccggacttgcctgcgccgctggacgcctgcccctgggccccgccggtctacgcgccccctgccgcgccgggcccctatgccgcctggacctccagtcgcccggcccggcccgccccgctcagccacccgacggctcgggccttccaggtaccccggcgacccgggcacgcggcccggcgccagttcagtgtgaagatgcctgagaccttcaacccgcagctccccggcctttacggcagcgcgggccgcgggtcccggtacctaaggaccaatagcaagaccgaggtcaccgtgtgaagcggggccgcggtgccctcgaggcatgggctggggtcctgtctgcccgtcggagcctcaggccacagggagaggagcgcctgccgtaaggccagctcttctgtctgcctcaacggcagtggtgtcttggagcctgcaggccgcgggttcgtcttgtaaataagcccttttatgtggttcctgcccctgagaataaagaagccccagcgtg

SEQ ID NO: 19054 - DNA, 7447 bp, Homo sapiens
  source 1..7447: mol_type = unassigned DNA
tctgcggcgctcggagcctcccttgcgatcccacggccgggactgcccggagtgcatgggcgcgggccagggacgctgagcggtcgcgccatggagggcgccgagccccgcgcgcggcccgagcgcctggccgaggccgagacgcgggcggcggacggcgggcgcctggtggaggtgcagctgagcggcggcgccccgtggggcttcaccctgaagggcggccgcgagcacggcgagccgctggtcatcaccaagattgaagagggcagtaaagccgcggcggtcgacaagttactggctggagatgagatcgtcggcatcaatgacattggtctctcagggtttagacaggaagcgatttgcctggtgaaggggtcccataagaccctgaagctggtcgtcaaaaggaggagcgagctgggctggaggcctcactcctggcatgccaccaagttctctgacagccaccccgagctagcggcctccccattcacctccaccagcggctgtccttcctggtccggccgacaccacgcgagttcttcctcccacgacctgtccagttcctgggagcagacgaacctacagcgcaccttagatcacttcagctccttggggagcgttgacagcctggaccacccctccagtcgcctctcggtggccaagtccaacagcagcatcgaccacctgggcagccacagcaagcgcgactcggcctacggctccttctccaccagctctagcactcctgaccacaccttgtccaaagccgacacgtcctccgcagagaacatcctctacactgtgggcctctgggaggctcccaggcagggtggccggcaggcccaggccgcaggcgaccctcagggctcggaggagaagctcagttgtttcccgcccagggtccccggtgacagcggcaaaggccccaggccagagtacaatgccgagcccaagctggctgcccctgggaggtccaattttgggccagtctggtatgttcccgataagaagaaagcaccatcatccccacctcctccccctccccctctccgcagtgacagctttgctgccaccaagagccacgagaaggcccagggccctgtgttctcagaggcggctgcggcacagcactttacggccctggcccaggctcagcctcgtggtgaccggagaccagagctcaccgatcggccttggaggtcagcacacccggggagcctcgggaagggatcgggaggcccgggctgcccacaggaggcccacgcagacggcagctggccgccctccaaggatggagcttccagtaggctgcaggcctctctgtccagctcagatgtgcgcttccctcagtctcctcatagcggccgacaccctcccctatacagcgaccacagccccctctgtgctgacagccttgggcaggagccaggggctgccagcttccagaacgacagccctcctcaggtgagggggctcagcagctgtgaccagaagctggggagcggctggcagggtccccggccctgtgtgcagggagacctgcaagcagcacagctctgggcgggatgctggccttctgacacagcccttggagccctcgagagtcttcccccacccacggtgggccagagcccacgccatcacctacctcagcctgagggtcctccggatgcccgcgagacaggacggtgttacccgctggacaaaggggccgagggctgctccgcgggagcccaggagcctcccagggccagccgtgcagaaaaagccagccagaggctggcagccagcatcacgtgggcagatggggagagcagcaggatctgcccgcaggagacgcccctgttgcactccctgacccaggaggggaagcgccggcctgagagcagtccagaggacagcgccaccagaccgccaccgttcgacgcccacgtgggcaagcccacccgaagaagcgaccgctttgccaccaccctgcggaatgagatccagatgcatagagccaagctgcagaagagccggagcacagtggctctgactgcagcaggggaggcggaggatggcaccggccgctggagggccgggttgggaggtggcacccaggaaggacccctcgctggcacctataaagaccacctgaaagaggcccaagcccgggtcctgagggccacgtccttcaagcgccgcgacttggaccccaacccaggagacctatacccggagtcactggaacaccggatgggggatccagacactgtcccccacttctgggaggcaggcctggcccagccaccctcatctacaagtggcgggccccacccgccccgcatcggaggccggagacggttcacagctgagcagaaattgaagtcctactcggaacctgagaagatgaacgaggtgggcctcacgaggggctacagtcctcaccagcaccccaggacatctgaggatactgtgggcacgtttgctgacaggtggaagttttttgaggaaacgagcaaacctgttccccagaggcctgcccagaagcaagctcttcacggaatcccgagagacaagccagagaggccgcggacagcgggccgcacatgtgagggcacggagccctggtcgcgcaccacctcccttggggacagcctcaacgctcacagcgcagcggagaaggcagggacttcagacctgccgcggaggctcggcacctttgcagagtatcaggcctcttggaaggaacagaggaaacctctggaggccaggagctctgggcgctgccactcagcggatgacatcctggatgtgagcctggacccacaggagaggccgcagcacgttcatgggaggtcccggtcttcaccgtccacagaccactacaagcaggaagcttctgtcgaactgcgaaggcaggcaggggaccccggcgagcccagagaagagcttccctccgcagtccgggccgaggagggacagtccacgccgagacaagcagatgcccagtgtcgggaaggcagcccaggatcacagcagcacccaccgagtcagaaggcaccgaacccacccacattctctgaactatctcactgccggggagccccagagctgccccgggagggccggggccgagcgggaaccctacctcgagattatagatactcggaggagagcaccccagcagacttgggaccccgagcccagagccctggctcacccctgcatgctcgaggacaagactcgtggccagtgagctcagccctgctctccaagaggccagccccacagaggccaccgccacccaagcgcgagcccaggagatacagggccacagacggcgcacctgctgacgcccccgtgggcgtcctcggcaggcccttcccaacgccatcccctgcgtccctggatgtgtatgtggcccgcctgtccctctcccacagcccctctgtgttcagcagtgcccagccccaggacaccccgaaggccactgtctgtgagcgtggaagccagcatgtgagcggggacgcatcacgtcctctgccagaagcactgctccctcccaagcagcagcacctgcgcctgcagacggccaccatggagacctcgcgctccccctcgccccagttcgccccccagaaactgacggacaaacctcccctgctcatccaggatgaggattcaaccagaattgagcgggtgatggacaacaacaccacggtgaagatggtgcccatcaagatcgtgcactcggagagccagccagagaaggagagccgccagagcctggcatgccccgccgagccacctgccctgccccacgggctggagaaagaccagatcaagacgctgagcacatctgagcagttctactcgcgcttctgtctgtacacgcggcagggtgctgagcccgaggccccacatagggcccagccggctgagccccagcccctgggcacccaggtgccccccgagaaagaccgctgcacctcccctccagggctcagctacatgaaggccaaagagaagactgtggaagacctgaagtcggaggagctggccagggagatcgtggggaaggataagtccctggccgacatcctggatcccagtgtgaagatcaaaaccactatggacttgatggaaggcatcttccccaaagacgagcacctcctggaagaagcccagcaacggaggaagctgctccccaaaatcccctctcctagaagcacagaggagaggaaagaggagcccagcgtgcctgcggccgtgtccctggccaccaattctacctactacagcacgtcggcccccaaggcggagctgctgatcaagatgaaggacctgcaggagcagcaggagcacgaagaggattcgggaagcgacttggaccacgacctgtcggtgaagaagcaggagctcatcgagagcatcagccgcaagctgcaggtgctccgggaggcccgcgagagcctgctggaggacgtgcaggccaacaccgtgctgggggccgaggtggaggccatcgtgaaaggcgtctgcaagcccagcgagtttgacaagttccggatgttcattggagacctggacaaagtggtgaacctcctgctgtcgctgtcaggccgcctggcccgggtggagaatgccctcaataatttggacgacggcgcttctcccggtgatcggcaatcactgcttgagaagcagagagtcctgatccagcagcacgaggacgccaaggagctcaaggagaacctggaccgccgcgagcgcatcgtctttgacattttggccaactatctgagcgaggagagcctcgcggactatgagcacttcgtgaagatgaagtcggccctcatcatcgagcagcgggagctggaagataaaatccaccttggtgaagagcagctgaagtgcttattggacagccttcagcccgaaaggggcaaataagagaccagtccccggtggaggaggggcacggggcctccgagctccagctccgttcccaaggatactcgtgaagaccccatctgtgttcatggcctggaaagagacttctcccatagcaaagaggctgttataaaagcaataacttttgtgtttgtgtgggatgatttatttaattttttagtttcccctttgattgctgagagccattttcctttacacataactacacctgacaccaggctctgctggatgtgagtttccactgcatgggctgtgggctgggcctgtggtgcctgccgagtggtcactgtcagtgggaaacccgttgttcctcccgtcttcagatgctgagccaactgcttggacagcagccagcgcgtcatgacgtgcatgagagggggaccctggtgctcatcttctcttgtcattcatccaggcatgggctgccaggttttgtccctgctcgttcaacagtgtgagcatttgtctctgttatctaatgatgttctctgacccagcagaaatcatcatcatgatgatgataatttattaactttttggaagggtgaatagtttcctaatggttaaaaaccaactgtgaaaggaaccacctgtgtggttgggttcactcattctcagattaaattgccacttaaagaaataacgtgcatgctttaaaaaacacagtcacgcaccaagcaggcaaatagctttagtccttctcacctcacatcacagttgttctgcaaagtaaaattttttggttaagagcgtgtccagtagtaatgtgcttgttagctgtttctcaagaccaacagaagattttttcagttactttccccccatgtattttgtatgcatatgattgtccgtgataattggctacttttccattgtttcctccttaaatcgtttagcatggcatgagggccacattccatggacgggaagaccccttcctcttcagaggtcccgtggactacacagctcctgagcttgatctttttctgccatgaagtttaaagattctatgcccatttccttgattgaaatggcaggattctaaagagagcctggtttgttaaaagaaaacactgtcatgctgtcagttcccaattgacaagtcacagactgggagaaaatatttgcaaatcgtgtatctgacaaaaggtttgtgtccaggatgtacaaagaactctcaaaccggatagtaagaaaacaaacagcccaagtgaaaagcaggcaaaagacttgaatagacacttcaccaaagagcatacacgcgtggcaaacaagcacacgaaaagacgttcagccgccgatggcttggttataatttataacttacttatttttatctaataattgtagattcagtgtatttcttcaaaaaatgtttaattaaatgcatgttaatggtgagtgaatcccttgggtgacttcgtgtttaggtcgtattagggcatttgttggatcaacggatcattttaaccctgacttccccttattcccataaaagaagttttccagtggaatggagatttcattttgtcagcagcagtgaccacagccttaccaaagcagacgcgtgcgcgtgcacagatgcacacacacagatgtcttaaaagactagaatccacacttcctgagccagaggggccgtgttgacggtaatgcattctctatagagccaagtccaaactggcaagctcaatgatgcaggcaataaaccgcctttttggcagcctaccaatgccaaaaggataaatgtctttccaaaagtgtgtattcctgttaaattaagctcttgctaacttgaaaaatccctgttctgccagcgaagcttcctcctcctctccagctggtagtcacttgcgtgaatgctggtcagtctgaaaaggtgaagctggctgtgcacttacccccatctttctccctcggggagacgacccaaggaatttcagagtattttgtttggcagagcttttacctgttattctttgccctcaaatacagtattgtggtcattttgatgatatgtgtgtaaaatgtgaataatccaattggtgtctgtactcagccttttgatgtctttttaggactttctcttctacacagcaatacgtcgtgctcgagtatccttgtagcaaagcacatagagccagctgtcctgtcagttcccctgtttgcctctgaaacgtctggttagtggggacccaaagattctagtgagtcaacatccataactctgtatctagttgtattattcatagaaaatcaatctggtgctaatggttggccctggtgttgttgggtggcagctgctccttcgccctcttgtagtgtggctgtggagggctctgcctatggggggtggcctgtggcttgtatccttcagtccaccacagcaaatgtgtgtagatttcatgctcgacacttaccactcacctatcaacagatcatcctgcttgactgtaacaaaataaatagtgtctcttcaagtgaa

SEQ ID NO: 19055 - DNA, 855 bp, Homo sapiens
  source 1..855: mol_type = unassigned DNA
aaggcagcttgaggacttggtgtctcattatgttgccctttgcaggaagcttctgtcgaactgcgaaggcaggcaggggaccccggcgagcccagagaagagcttccctccgcagtccgggccgaggagggacagtccacgccgagacaagcagatgcccagtgtcgggaaggcagcccaggatcacagcagcacccaccgagtcagaaggcaccgaacccacccacattctctgaactatctcactgccggggagccccagagctgccccgggagggccggggccgagcgggaaccctacctcgagattatagatactcggaggagagcaccccagcagacttgggaccccgagcccagagccctggctcacccctgcatgctcgaggacaagactcgtggccagtgagctcagccctgctctccaagaggccagccccacagaggccaccgccacccaagcgcgagcccaggagatacagggccacagacggcgcacctgctgacgcccccgtgggcgtcctcggcaggcccttcccaacgccatcccctgcgtccctggatgtgtatgtggcccgcctgtccctctcccacagcccctctgtgttcagcagtgcccagccccaggacaccccgaaggccactgtctgtgagcgtggaagccagcatgtgagcggggacgcatcacgtcctctgccagaagcactgctccctcccaagcagcagcacctgcgcctgcagacggccaccatggagacctcgcgctccccctcgccccagttcgccccccagaaactgacggacaaacctcccctgctcatccaggatgaggattcaaccagaattgagcgggtg

SEQ ID NO: 19056 - DNA, 2276 bp, Homo sapiens
  source 1..2276: mol_type = unassigned DNA
gtttgtagttcccagtggctcttttgttctgctatcttgaagggcaggttgcttgtcagctcacaatgctgtgggtaaggtctggtgaggtcggcgaatgtgttctcattgtttattcttctgcctgaagatgagaaataatgcaaatcagggtgcagattccggctcgagctccacaggcgtgcacgtatgtgtaagggcatgctcgccggtgctgcatgtcctcgtggatgcatgcaatttttacagctttgggattcacggttagctgaaagcacattggaactggaaggcggtgctcttaacaccgtgttctaggctggaagccgtagagccatcatctgctctgatgggactgcagcccttggtatgtgggacccttgctccatgtgagttctgcagatgggttccccgagggagctggctggaggacgccagcatcgcatgaagacctgcctgcctcgtttgccttttgtttttcagtagcagtaagaaacaggcattctcactacacaggcattgaatgcggacattgagaaaaaatgacaagcagatgcccagtgtcgggaaggcagcccaggatcacagcagcacccaccgagtcagaaggcaccgaacccacccacattctctgaactatctcactgccggggagccccagagctgccccgggagggccggggccgagcgggaaccctacctcgagattatagatactcggaggagagcaccccagcagacttgggaccccgagcccagagccctggctcacccctgcatgctcgaggacaagactcgtggccagtgagctcagccctgctctccaagaggccagccccacagaggccaccgccacccaagcgcgagcccaggagatacagggccacagacggcgcacctgctgacgcccccgtgggcgtcctcggcaggcccttcccaacgccatcccctgcgtccctggatgtgtatgtggcccgcctgtccctctcccacagcccctctgtgttcagcagtgcccagccccaggacaccccgaaggccactgtctgtgagcgtggaagccagcatgtgagcggggacgcatcacgtcctctgccagaagcactgctccctcccaagcagcagcacctgcgcctgcagacggccaccatggagacctcgcgctccccctcgccccagttcgccccccagaaactgacggacaaacctcccctgctcatccaggatgaggattcaaccagaattgagcgggtgatggacaacaacaccacggtgaagatggtgcccatcaagatcgtgcactcggagagccagccagagaaggagagccgccagagcctggcatgccccgccgagccacctgccctgccccacgggctggagaaagaccagatcaagacgctgagcacatctgagcagttctactcgcgcttctgtctgtacacgcggcagggtgctgagcccgaggccccacatagggcccagccggctgagccccagcccctgggcacccaggtgccccccgagaaagaccgctgcacctcccctccagggctcagctacatgaaggccaaagagaagactgtggaagacctgaagtcggaggagctggccagggagatcgtggggaaggataagtccctggccgacatcctggatcccagtgtgaagatcaaaaccactatggacttgatggaaggcatcttccccaaagacgagcacctcctggaagaagcccagcaacggaggaagctgctccccaaaatcccctctcctagaagcacagaggagaggaaagaggagcccagcgtgcctgcggccgtgtccctggccaccaattctacctactacagcacgtcggcccccaaggcggagctgctgatcaagatgaaggacctgcaggagcagcaggagcacgaagaggattcgggaagcgacttggaccacgacctgtcggtgaagaagcaggagctcatcgagagcatcagccgcaagctgcaggtgctccgggaggcccgcgagagcctgctggaggacgtgcaggccaacaccgtgctgggggccgaggtggaggccatcgtgaaaggcgtctgcaagcccagcgagtttgacaagttccggatgttcattggagacctggacaaagtggtgaacctcctgctgtcgctgtcaggccgcctggcccgggtggagaatgccctcaataatttggacgacggcgcttctcccggtgatcggcaatcactgcttgagaagcagagagtcctgatccagca

SEQ ID NO: 19057 - DNA, 4615 bp, Homo sapiens
  source 1..4615: mol_type = unassigned DNA
atcaacaagacagcaggcacagacaggccagctgttgtgagcttggctttaggactccattcagtaggcaggaggagagctgcagcagaggcgggctgtgggtccctgaagcacatcgctgccttcacagctgggcgaactcccatccagcacgacaagcagatgcccagtgtcgggaaggcagcccaggatcacagcagcacccaccgagtcagaaggcaccgaacccacccacattctctgaactatctcactgccggggagccccagagctgccccgggagggccggggccgagcgggaaccctacctcgagattatagatactcggaggagagcaccccagcagacttgggaccccgagcccagagccctggctcacccctgcatgctcgaggacaagactcgtggccagtgagctcagccctgctctccaagaggccagccccacagaggccaccgccacccaagcgcgagcccaggagatacagggccacagacggcgcacctgctgacgcccccgtgggcgtcctcggcaggcccttcccaacgccatcccctgcgtccctggatgtgtatgtggcccgcctgtccctctcccacagcccctctgtgttcagcagtgcccagccccaggacaccccgaaggccactgtctgtgagcgtggaagccagcatgtgagcggggacgcatcacgtcctctgccagaagcactgctccctcccaagcagcagcacctgcgcctgcagacggccaccatggagacctcgcgctccccctcgccccagttcgccccccagaaactgacggacaaacctcccctgctcatccaggatgaggattcaaccagaattgagcgggtgatggacaacaacaccacggtgaagatggtgcccatcaagatcgtgcactcggagagccagccagagaaggagagccgccagagcctggcatgccccgccgagccacctgccctgccccacgggctggagaaagaccagatcaagacgctgagcacatctgagcagttctactcgcgcttctgtctgtacacgcggcagggtgctgagcccgaggccccacatagggcccagccggctgagccccagcccctgggcacccaggtgccccccgagaaagaccgctgcacctcccctccagggctcagctacatgaaggccaaagagaagactgtggaagacctgaagtcggaggagctggccagggagatcgtggggaaggataagtccctggccgacatcctggatcccagtgtgaagatcaaaaccactatggacttgatggaaggcatcttccccaaagacgagcacctcctggaagaagcccagcaacggaggaagctgctccccaaaatcccctctcctagaagcacagaggagaggaaagaggagcccagcgtgcctgcggccgtgtccctggccaccaattctacctactacagcacgtcggcccccaaggcggagctgctgatcaagatgaaggacctgcaggagcagcaggagcacgaagaggattcgggaagcgacttggaccacgacctgtcggtgaagaaggagctcatcgagagcatcagccgcaagctgcaggtgctccgggaggcccgcgagagcctgctggaggacgtgcaggccaacaccgtgctgggggccgaggtggaggccatcgtgaaaggcgtctgcaagcccagcgagtttgacaagttccggatgttcattggagacctggacaaagtggtgaacctcctgctgtcgctgtcaggccgcctggcccgggtggagaatgccctcaataatttggacgacggcgcttctcccggtgatcggcaatcactgcttgagaagcagagagtcctgatccagcagcacgaggacgccaaggagctcaaggagaacctggaccgccgcgagcgcatcgtctttgacattttggccaactatctgagcgaggagagcctcgcggactatgagcacttcgtgaagatgaagtcggccctcatcatcgagcagcgggagctggaagataaaatccaccttggtgaagagcagctgaagtgcttattggacagccttcagcccgaaaggggcaaataagagaccagtccccggtggaggaggggcacggggcctccgagctccagctccgttcccaaggatactcgtgaagaccccatctgtgttcatggcctggaaagagacttctcccatagcaaagaggctgttataaaagcaataacttttgtgtttgtgtgggatgatttatttaattttttagtttcccctttgattgctgagagccattttcctttacacataactacacctgacaccaggctctgctggatgtgagtttccactgcatgggctgtgggctgggcctgtggtgcctgccgagtggtcactgtcagtgggaaacccgttgttcctcccgtcttcagatgctgagccaactgcttggacagcagccagcgcgtcatgacgtgcatgagagggggaccctggtgctcatcttctcttgtcattcatccaggcatgggctgccaggttttgtccctgctcgttcaacagtgtgagcatttgtctctgttatctaatgatgttctctgacccagcagaaatcatcatcatgatgatgataatttattaactttttggaagggtgaatagtttcctaatggttaaaaaccaactgtgaaaggaaccacctgtgtggttgggttcactcattctcagattaaattgccacttaaagaaataacgtgcatgctttaaaaaacacagtcacgcaccaagcaggcaaatagctttagtccttctcacctcacatcacagttgttctgcaaagtaaaattttttggttaagagcgtgtccagtagtaatgtgcttgttagctgtttctcaagaccaacagaagattttttcagttactttccccccatgtattttgtatgcatatgattgtccgtgataattggctacttttccattgtttcctccttaaatcgtttagcatggcatgagggccacattccatggacgggaagaccccttcctcttcagaggtcccgtggactacacagctcctgagcttgatctttttctgccatgaagtttaaagattctatgcccatttccttgattgaaatggcaggattctaaagagagcctggtttgttaaaagaaaacactgtcatgctgtcagttcccaattgacaagtcacagactgggagaaaatatttgcaaatcgtgtatctgacaaaaggtttgtgtccaggatgtacaaagaactctcaaaccggatagtaagaaaacaaacagcccaagtgaaaagcaggcaaaagacttgaatagacacttcaccaaagagcatacacgcgtggcaaacaagcacacgaaaagacgttcagccgccgatggcttggttataatttataacttacttatttttatctaataattgtagattcagtgtatttcttcaaaaaatgtttaattaaatgcatgttaatggtgagtgaatcccttgggtgacttcgtgtttaggtcgtattagggcatttgttggatcaacggatcattttaaccctgacttccccttattcccataaaagaagttttccagtggaatggagatttcattttgtcagcagcagtgaccacagccttaccaaagcagacgcgtgcgcgtgcacagatgcacacacacagatgtcttaaaagactagaatccacacttcctgagccagaggggccgtgttgacggtaatgcattctctatagagccaagtccaaactggcaagctcaatgatgcaggcaataaaccgcctttttggcagcctaccaatgccaaaaggataaatgtctttccaaaagtgtgtattcctgttaaattaagctcttgctaacttgaaaaatccctgttctgccagcgaagcttcctcctcctctccagctggtagtcacttgcgtgaatgctggtcagtctgaaaaggtgaagctggctgtgcacttacccccatctttctccctcggggagacgacccaaggaatttcagagtattttgtttggcagagcttttacctgttattctttgccctcaaatacagtattgtggtcattttgatgatatgtgtgtaaaatgtgaataatccaattggtgtctgtactcagccttttgatgtctttttaggactttctcttctacacagcaatacgtcgtgctcgagtatccttgtagcaaagcacatagagccagctgtcctgtcagttcccctgtttgcctctgaaacgtctggttagtggggacccaaagattctagtgagtcaacatccataactctgtatctagttgtattattcatagaaaatcaatctggtgctaatggttggccctggtgttgttgggtggcagctgctccttcgccctcttgtagtgtggctgtggagggctctgcctatggggggtggcctgtggcttgtatccttcagtccaccacagcaaatgtgtgtagatttcatgctcgacacttaccactcacctatcaacagatcatcctgcttgactgtaacaaaataaatagtgtctcttcaagtg

SEQ ID NO: 19058 - DNA, 11020 bp, Homo sapiens
  source 1..11020: mol_type = unassigned DNA
gttattaactgtaagactgtttgaattgtcaggtctttgtggtgagctgaattctgcatggcagtgcttactgtgcagaaaggttgcaatgcctcactttgccttaatccatgttcctctaacttccttactctttctctcaagaggaggcaagtggctgtggcggccgcagcagtggctgatcatcactgaaaataccaaagaaaagaactgagctgcctccttcatattttttccattgaggattaatttaccgtgctttttcattttctctacatcctgcaaaagtttttttctctcctaagaaacaaactatgaactgattgttgaaaaaaagaagtaaaaagttttagcacagcttctctgtctcttcgggacaagttagaaaattctgaagtgagccgaagcatagtaagtgctttctttctttttaagctacttctggggagggaggaggctattgtaatggtaaatttcactccgagaggaagaaagggttgataatcaatcaaaaatgaggtattcctttgagtatttgtgattttcttactatattgtaagatgcttttaattttctctgtaaaataggcagaaatggttttagtgtgtgtatgtgtgaaataaaagctcagaaaagcaatcttcagagcgccactgaaggaagttttgacgaacggagtagagatgtataccacttgggggcttcagtgagaacccagaattcctggaggaggatttacattcagaaatgttgaagtgaaaattccttctggttcagcatcttggagttcagcttggaagaacattttacgtatggaagaatttgcttctccaaacctctcttttggccattgtgtgtcctgaaggatgggacaacttgtgctgtagaagcactgcttgcctgagtttgcttcaggcattttaaatttaacttgagggatcatgtgtttggcatgatgaggaccactgaagacttccacaagcctagtgccacattaaactctaacacggccaccaagggaaggtacatttatctggaggcattcctggagggaggagctccctggggttttactctaaagggtggcctggagcacggagaaccattaatcatctctaaggtcgaagaagggggcaaagcagacaccctgagctccaaactgcaggctggggatgaggttgtgcacatcaatgaggtgactctgagcagctccagaaaggaggcagtttccctggtgaaaggatcctacaagaccctcaggctggtagtgcgcagagatgtgtgcacagacccaggccatgcagatactggtgcctctaacttcgtcagcccagaacacctcacctctggcccccagcacaggaaagcagcgtggtcaggaggggttaaacttcggctgaagcacaggcgcagtgagcctgcaggccgacctcactcgtggcacacaactaaatctggggagaagcaacccgatgccagcatgatgcagatatctcagggtatgatcggccctccttggcaccaaagctaccattccagctcctctactagtgacctctccaactatgaccatgcttatctaaggcggagccctgaccagtgcagctcccaggggagcatggagagcctggagcccagtggggcatacccaccctgtcatctttcccctgccaagtccaccggcagcattgaccagctcagccacttccataacaagagagactcggcttacagctctttctccaccagttctagcatcctagagtatccacaccctggcatctctggccgggagcgttcaggctccatggacaatacttctgctcgaggtggcctcctcgaagggatgaggcaggcagatattcgctatgtcaagacagtctatgacacccggaggggagtctcagcagagtatgaggtgaactcttcagccctgctgcttcaaggtagggaggcccgagcctcagcaaatggtcagggctatgataaatggtctaatattcctcggggcaagggagtgccacccccatcctggagccagcagtgccccagttccttggagactgccacggacaaccttcctcctaaggtgggtgcacccctgcctccagctcggagtgacagttacgcagcatttcggcaccgtgagcggcccagctcctggtctagccttgatcagaaacggctctgccggcctcaggcaaactctttaggctccctgaagtctccattcatagaggagcagctgcatactgtgctggagaagagtccagagaacagccccccagtgaagcccaagcataactatacccagaaggcccaacctggccaacctctgctgccgaccagcatctacccggtaccttccctggagccacactttgcccaggtgcctcagccttctgtgagtagcaacggtatgctctaccctgcactggccaaggagagtggatacatagcccctcagggagcatgcaacaagatggctaccattgatgagaatgggaaccagaatggatctggcaggcctgggtttgccttctgccagcccttagaacatgacttgctgtccccagtggagaagaaaccagaagctacagccaagtatgtcccctccaaagtccatttctgttcagtgcctgaaaatgaggaggatgcctccctgaagagacatctcacacctccccaaggcaacagcccacattccaatgagagaaagagcacccacagtaacaaaccatcttctcatccccacagcctcaaatgccctcaggctcaggcctggcaagcgggtgaagacaagagatcttccaggctctcagagccctgggagggcgatttccaggaagaccacaatgccaacctctggaggaggctggagagagaaggcctaggccagagcctgtcaggcaactttggcaagaccaagtcagccttctcatctctccagaacattcctgagagtctgagaagacacagcagcctggagctaggccggggaacccaggagggttaccccgggggcaggcccacctgtgcagtcaacaccaaggcagaagaccctgggaggaaagccgctcctgacctcgggagccatctggaccggcaggtttcctacccgcggcccgaggggaggaccggtgcctcggcttctttcaacagcacagacccaagtcccgaagagccgcctgccccctcgcacccgcacacatccagtctgggccggagggggcccggcccaggcagcgcctcggctcttcagggctttcagtacgggaagccccactgctcggtgctggagaaggtctccaaattcgagcagcgagagcaagggagccagagaccgagtgtgggcggctctggttttggccataactataggccccacaggaccgtctcaacttccagtacttctgggaatgacttcgaggagacaaaagcacacattcgtttctctgagtcagctgaacccctaggcaacggggagcagcacttcaaaaacggggagctgaagttggaagaggcttcccggcagccctgcggtcagcagctgagcggaggagcgtcggacagcggccgtggcccccagaggccggacgctcggctcctccgtagccagagcaccttccagctctccagcgagccagagagggagcccgagtggcgggacaggcccggctcgcccgaatcgcccctgctggatgcccccttcagccgcgcctaccggaacagcatcaaggacgcacagtcccgtgtcttgggggccacctcctttcgacgtcgagacctggagctgggggcgcccgtggcgtcgaggtcctggcggccacggccttcctcggcccacgtggggctgcggagccccgaggcgtcggcctccgcctccccgcacacgccccgggagcggcacagcgtgacccctgctgagggcgacctggccaggcccgtgccccctgccgcccggagaggtgctcgccggcgcctgactcccgagcagaagaagcgctcctactcggagcccgagaagatgaacgaggtggggatcgtggaggaggccgaaccggcacccctgggcccgcagagaaatgggatgcgtttcccggagagcagcgtggccgaccggcgccgtctcttcgagcgcgatggcaaggcctgctccacgctcagcctgtcggggcccgagctgaagcagttccagcagagcgccctggcggactacatccagcgcaagaccggcaagcggcctacctccgccgccggctgcagcctccaggagcccgggccactgcgtgagcgcgcccagagtgcctacctccagcccggccccgcggcgctcgaaggctccggcctcgcctcggcctccagcttgagctcactgcgggagcccagcctgcagccccgcagggaggccacgctcctgccggccacagttgcagaaacccagcaggctccccgagatcgcagcagctccttcgccggtggccgccgcctcggggaacggcgacgcggggacctgcttagcggagcaaacggtggaacaaggggcacccagagaggggatgagacccccagggagccatcctcctggggggccagggccgggaagtccatgtcggccgaggacctgctggaacgctcggacgtccttgcgggccctgtccatgtgaggtccaggtcatctcccgccaccgcagacaagcgccaggatgtgcttttggggcaagacagtggctttggtcttgtgaaggatccatgttatttggctggtcctggatctaggtcactcagttgttcagaaagaggccaagaagagatgctgccgctcttccaccatctcacccctcgttggggtggttcaggctgcaaagccattggtgattcctccgttcctagtgaatgtcctggaaccctggaccatcagaggcaagccagtaggacaccctgccccaggccaccactggcaggaacgcaagggctggtcacagacaccagggctgcacccctgaccccaattggcacccctctgccttcagccattccctctggctactgctcacaggacggtcagacagggcgacagcctctcccgccctacacccctgccatgatgcacagaagcaatggtcacaccctgacccagcctcccggtccaagaggctgtgagggcgatggcccagagcatggggtagaagagggaacgaggaagagggtctcgctgcctcagtggccacctccttctcgagcaaagtgggcccacgcagccagagaggacagccttcctgaggaatcctcagcccctgattttgcaaacctgaagcactatcaaaaacagcagagtcttccaagtttatgcagcacttctgacccagacacacctcttggggccccgagcactccagggaggatctccctccgaatatctgagtctgtcctgcgggactccccgccacctcatgaggattatgaagacgaagtgtttgtgagggatccgcaccccaaggccacgtccagccccacatttgaacctcttcccccacccccacctcctccaccgagtcaggaaaccccggtgtatagcatggatgacttccctccacctcctccccacactgtatgtgaggcgcagctggacagtgaggatcccgaggggccacgccccagcttcaacaaactttctaaagtgacaattgcaagggaaaggcacatgcctggtgcagcccatgtggtaggtagtcagacactggcttccagactccaaacttctatcaagggttcagaggctgagtccacaccaccctccttcatgagcgttcacgcccaacttgctgggtctcttggtgggcagccagcacccatccagactcaaagcctcagccatgatccagtcagtggaactcagggtttagaaaagaaagtcagtcctgatcctcagaagagttcagaagacatcagaacagaggctttggccaaggaaattgtccaccaagacaaatctctagcagacattttggatccagactccaggctgaagacaacaatggacctgatggaaggtttgtttccccgagatgtgaacttgctgaaggaaaacagtgtaaagaggaaggccatacagagaactgtcagctcttcaggatgtgaaggcaagaggaatgaagacaaggaagcagtgagcatgttggttaactgccctgcctactacagtgtgtctgctcccaaggctgagctactgaacaaaatcaaagagatgccagcagaagtgaatgaggaagaggaacaggcagatgtcaatgaaaagaaggctgagctcattggaagtctcacccacaagctggagaccctccaggaggcgaaggggagcctgctcacggacatcaagctcaacaacgccctgggagaagaggtggaggctctgatcagcgagctctgcaagcccaatgagtttgacaagtataggatgttcataggggatttggacaaggtggtcaacctgctgctctccctctcggggcgtctagcccgtgttgagaatgtccttagcggccttggtgaagatgccagtaatgaagaaaggagctctctttacgagaaaaggaagatcctggctggtcagcatgaggatgcccgggagctgaaggagaacctggatcgcagggagcgagtagtgctgggcatcttggccaattacctttcagaggagcagctccaggactaccagcacttcgtgaaaatgaagtccacgctcctcattgagcaacggaagctggatgacaagatcaagctgggccaggagcaggtcaagtgtctgctggagagcctgccctcagatttcattcccaaggctggggccctggctctgcccccaaacctcacgagtgagcccattcctgctgggggctgtactttcagtggtattttcccaacattaacctctccactttaacctcttctaaaatacccaaccaaaagatcactgtttctctcaacactatttaatctgaaaaatgtttcagtacaaaccactgtttgaactatctgggttattggtgtttgttcctgatgaaaggaaaaaaattctctccaggaggaagcctttttccttcttgcccttcctgattgatcttctgagagctcgaatgctgctggacacgtacccctttctattattactttgtagtagaaagaaagttaatgaaactgagaactgattggagggtgtttgatcatttagtttttaacaggctgaggcaacatggatcagtgtgtgtccccctcaggaatgtatccacagtggccttccttgctggtgggcagtgtatcctgatggcagggtacaagtaccattaatgaagggtctgcaacataaagccttaaaaagacacacactaagaaaactgtaaaaccttgaacattgttatttatattttttaaaatggaaaagatcactatgtttgttgtgctaaccacttatttgattctgttttgtggtggacatagatgattacgtttgagctttgtattttgtgaaaaccttaatgaaatgaattccaaagatagtcacgttgagcgtgaagactttttttcttacattcctgtcttatttttaccaacacgagcaggcattctgcgcttccactggactgagtatgggggagtcctgctcccctcctgtctcacaccttccccaggaggaaggcctcatgcactgcggttattgcatcatttcctagtgcttcatgtcattatcactggtggggaaacaaagctaaattttattaacaaagacaactctcagacctatataataggaggaggacgtccagaatccaacaaaattcaaacggagcccatgctgttctcctgaacaagatttgggctaaatacggcctgtttattgaggctgttttaatgatgctttaaaaaaaaaaaatgttttctaaaatgtcaaacctgttgaccacactttgattaaaaactgcctccttaacctctgaagactgattttgctttatcatgtttcaataataacatttcagaggttactctgtagccccagttgtaagcttataaaaacaaactggaaggctgaggaggttatgggctggcagccaggctatgtttacagctgctggagatggcagtagccttatactttgagcaggtagtacatcccaggctgtgctagaggtagatttgttttttcacgtttgatctgtggctggtggccacctttgttgatttgggcttacgagtttcatagtagccagtcttagaaaattgggggagtaaaattttgaagtaaaaaaaaaaaaaaaatgacaagggaaccaaatgctccttctccccttagtacattttcattacttaatgaagttttatctcctatgtaagaatatcaaaattgtagtttgggtctccagtagagatgtcttttgattaacttataaacaactggccacccagaagtttcctttgcatagtcaaccaaagctatggctttgttctttggagcttatatactgcatgactccattgatacaaataagacagcaccttggtttcccagggatgttttcattcagaggtcctgtctcccaggaaagcagtagaaccagtgacagcattcaacagccacactgcatggtcatcagtcttaggccaacatgggagcctgaaattaactccatcagtaactacctgtgtgtcttgctgatactgaatgagccctcacaagccaagccaggtggaagacagccagcaaacgtctacagttattcttagtgaaattcctcagaggaatccagggggctcccagttcccaacactcttcgagatgaccatttttcgggatttgactggggaacattttacatattcagtctttctcaaaaatttttatttattttcttgagaaagggtcttactatgttgcccaggctggagtgcagagtggtgcgataacagctcattgcagtctgaacctctgaggctcaagccatcctcccatctcagcctcccaagtagctgggaccacaggtgtgcaccactatgcttggctaattttttgattttttatagagacgggggtctcgctatgttgcccaggctggtttcaaactcctgggctcaagggatccttccgctttggtcccagaagtgctgggattacaggcatgagccacttcacccagccacttttctaatttatagacataaaagtaattgactcccacagcacagtaacaggcaatgctgcttggcatgccacaaacatctgaaagcttgtgacactcctaggattgtgtccattctttcattatgtggaaactttgttctgttatgtgaaatgggtaaggcaccaagtgagactttgaaatctaatttttaggtggatgtgatatttattgtaataggacttgacctctgtactttaaagaaatcactaaccaaattttcaaagtttccttttaaatgcgtttagctagaaatctatgtatttatccctttcctattttgcattcttctcccactatttttaaaaactcatttacagtagaaaccattcttctttctcccaacagtatcctttgccaagaccatgagaacagtaaggagcatgttgttggtcagggtttcagaatacgcgtgatgtcactgagaatgtttgctcacagtcaataattgtctttgtggatgtgataattttggagatacacttctggtcagaactcaggtgagataatcttgcaatactccaaatgcagatactccagccacccgcaaggttccaggaaaggacaatgtcctgcgagaaaatcaggaggcctccacttcctgggccacttgagaagttcctgggcatgtcactacatgttggttgactcagccatttctcatgctgttttgtttcttgcggtggccacttaaccccaaagaatgaagggaggatccacagtgaaagtgcctgagtttctctatgagaccagatgctgtcgaaaccaaacatcttttcctttgctctatgggaacattttagggtttgttttgcacagctggtttccagactagaagattaacaagtttgggtccacccctaagaatcagtggctgtcttttaaggtgaggagtgtgggcttaactgaggtcctttgagggagctataaaggagaaacaacctgggacatcccagttttcctattcctccactgttaatatctcatctaaaataattcatgagtttaaatggtaaatatatgctttaagctctacctttaaacttgtatgttattcaggcatctcttattaagatactgggtctctggatacccaaggaaatgttggctttttattcttatgtggttccaaatttacttctcttcagtttaattgtccatggtagtgctggcttcattgttaggttggagttattattttccttttagaacaacatgaattttattcaccttactattagaaaaaggaataactacagccagaaataacttcatttcctacaaggtataaaaagtggtcaagtgaatgtgaaggggcttttctacacaggaatatattatcgggaacaaagtatttcctgctgccttaactctttgggatgcataggataaaatgataaagaccattttaatatcagaaagggttgtcttattaatttttaaataaaacttcacatttcttaatggggagctcattcagaaactaaataatggtttctcaaagtgtggtcaggatacgatctgcatcagaatccttggaatgcttgttaaaaataccaattgctatgacaaaaccaagtctgctggaaactgcatttcagcaggtttcccatgttattctgatgtattttaacatttgagagccactaccaatcatctgtacagttcctactgttatgatcacaataagactaacatgaatttaataatctgaataatttttaaaatttaaataaacagaaattgaagttaaatttaaaaataaaaataacctcagaagttgaaa

SEQ ID NO: 19059 - DNA, 611 bp, Homo sapiens
  source 1..611: mol_type = unassigned DNA
caccaagggaaggtacatttatctggaggcattcctggagggaggagctccctggggttttactctaaagggtggcctggagcacggagaaccattaatcatctctaaggtcgaagaagggggcaaagcagacaccctgagctccaaactgcaggctggggatgaggttgtgcacatcaatgaggtgactctgagcagctccagaaaggaggcagtttccctggtgaaaggatcctacaagaccctcaggctggtagtgcgcagcctctccccaccggtcactgttagcctcgagtttgaccctcaacatccccagaggatgcctcctaggactcgaacctcatttagtgtctctactgctgatggacgccatgagtggagctgtcgaccaccttgggtgaagtggtggtctccacgtcccacctgggcagcacgatggccacagaaaggttgtatctaccccacccagcacaacacatgcagaaatttcaaaagagcctatttaagtagatgagcatagatagataattctgggagaacatccttaaaaggagtttggttttttgtttgctttgtgtgggtttttgtctaaataaactagactgctttaa

SEQ ID NO: 19060 - DNA, 628 bp, Homo sapiens
  source 1..628: mol_type = unassigned DNA
ctggagggaggagctccctggggttttactctaaagggtggcctggagcacggagaaccattaatcatctctaaggtcgaagaagggggcaaagcagacaccctgagctccaaactgcaggctggggatgaggttgtgcacatcaatgaggtgactctgagcagctccagaaaggaggcagtttccctggtgaaaggatcctacaagaccctcaggctggtagtgcgcagttgaactttcaaaggaaaaggaggctgcctttacatctgacacatgcttatagatggggattatcaacacgcctccagagacatggatggacattcctcccctaccttgcagagatccgggtagaagcctctttgcgctggattaatctggctttgtatttcgtagtgccgtcactttcctgagaagtcttacctttataccttggcacacgtcatcgtcctgagattctgtttcctttgatttattgatgccagagtgactaaggacatttcatttattaactttctttttttctatgtgatctctatactttaaaaaagactggggtgtcttcctggaaacataataggaaggaatgtctgtttcatgaataaatcatttgtgtagtcaaaatgta

SEQ ID NO: 19061 - DNA, 764 bp, Homo sapiens
  source 1..764: mol_type = unassigned DNA
agaagggggcaaagcagacaccctgagctccaaactgcaggctggggatgaggttgtgcacatcaatgaggtgactctgagcagctccagaaaggaggcagtttccctggtgaaaggatcctacaagaccctcaggctggtagtgcgcagagatgtgtgcacagacccaggccatgcagatactggtgcctctaacttcgtcagcccagaacacctcacctctggcccccagcacaggaaagcagcgtggtcaggaggggttaaacttcggctgaagcacaggcgcagtgagcctgcaggccgacctcactcgtggcacacaactaaatctggggagaagcaacccgatgccagcatgatgcagatatctcagggtatgatcggccctccttggcaccaaagctaccattccaggatgtgcttttggggcaagacagtggctttggtcttgtgaaggatccatgttatttggctggtcctggatctaggtcactcagttgttcagaaagaggccaagaagagatgctgccgctcttccaccatctcacccctcgttggggtggttcaggctgcaaagccattggtgattcctccgttcctagtgaatgtcctggaaccctggaccatcagaggcaagccagtaggacaccctgccccaggccaccactggcaggaacgcaagggctggtcacagacaccagggctgcacccctgaccccaattggcacccctctgccttcagccattccctctggctactgctc

SEQ ID NO: 19062 - DNA, 504 bp, Homo sapiens
  source 1..504: mol_type = unassigned DNA
acatcagcgggccagctcctgtcaggcaggcggccggcgattggccgggaggaggcagtcattcaaactgccttttgtgtttggctaatcagggcagcccaggttcccagcggaggtgcgtctgtggtgtcagacacctgtgtctcagctctgtcttcctcgggctggctcctgcggatccttcctgggccagaaccgtgcctctaggccacctcccccaagccaccaagcccccgcggtgggccagccttggcccagtgtcacgcaggacagaaatgaccaacagataactgaggacaatggacctgcctgggcatagacttccttaagggtcccgctttgtcacccagcctggaatgcagtggtgcgatcttgactcaccgcagcttggatctcctgggctcaagcgattctcccgtctcagcctcccgaatagctgggactacagcctctccccaccggtcactgttagcctcgagtttgaccctcaacatccccagagga

SEQ ID NO: 19063 - DNA, 554 bp, Homo sapiens
  source 1..554: mol_type = unassigned DNA
gtgcgtctgtggtgtcagacacctgtgtctcagctctgtcttcctcgggctggctcctgcggatccttcctgggccagaaccgtgcctctaggccacctcccccaagccaccaagcccccgcggtgggccagccttggcccagtgtcacgcaggacagaaatgaccaacagataactgaggacaatggacctgcctgggcatagacttccttaagagatgtgtgcacagacccaggccatgcagatactggtgcctctaacttcgtcagcccagaacacctcacctctggcccccagcacaggaaagcagcgtggtcaggaggggttaaacttcggctgaagcacaggcgcagtgagcctgcaggccgacctcactcgtggcacacaactaaatctggggagaagcaacccgatgccagcatgatgcagatatctcagggtatgatcggccctccttggcaccaaagctaccattccagctcctctactagtgacctctccaactatgaccatgcttatctaaggcggagccctgaccagtgcagctcccaggg

SEQ ID NO: 19064 - DNA, 531 bp, Homo sapiens
  source 1..531: mol_type = unassigned DNA
agctctgtcttcctcgggctggctcctgcggatccttcctgggccagaaccgtgcctctaggccacctcccccaagccaccaagcccccgcggtgggccagccttggcccagtgtcacgcaggacagaaatgaccaacagataactgaggacaatggacctgcctgggcatagacttccttaagcctctccccaccggtcactgttagcctcgagtttgaccctcaacatccccagaggatgcctcctaggactcgaacctcatttagtgtctctactgctgatggacgccatgagtggagctgtcgaccaccttgggtgaagtggtggtctccacgtcccacctgggcagcacgatggccacagaaaggttgtatctaccccacccagcacaacacatgcagaaatttcaaaagagcctatttaagtagatgagcatagatagataattctgggagaacatccttaaaaggagtttggttttttgtttgctttgtgtgggtttttgtctaaataaactagactgctttaa

SEQ ID NO: 19065 - DNA, 475 bp, Homo sapiens
  source 1..475: mol_type = unassigned DNA
gcggatccttcctgggccagaaccgtgcctctaggccacctcccccaagccaccaagcccccgcggtgggccagccttggcccagtgtcacgcaggacagaaatgaccaacagataactgaggacaatggacctgcctgggcatagacttccttaaggtttgttcgacatgggtgaatcaatgaattgcacttcaacagcaaaattggattgtattgattggttggctcactcttctcatcctttatgtttcagagaaggtcggattataaatgcaagcacctacatttaagcaacagttgagatgcttaagaacgtgcttctgtgtgattctgattaatccttaactatgctctgatttcattttacttgtaaatcaattgacacatacttcagggaccatcctgtcttttctctggggttgctgtcaccgtatttgtaacttgaggatttaataattgaagattgataaaaaa

SEQ ID NO: 19066 - DNA, 3766 bp, Homo sapiens
  source 1..3766: mol_type = unassigned DNA
attgttgagcgcgttgggccccgccggcgatgccgcgcgccgcctcctcggagcggcggcgaagtttgaacttggcgtcggcctggagccccgagcagcccgggggcggcggccgcgaggcgagcggcgatgagatgtgtgcacagacccaggccatgcagatactggtgcctctaacttcgtcagcccagaacacctcacctctggcccccagcacaggaaagcagcgtggtcaggaggggttaaacttcggctgaagcacaggcgcagtgagcctgcaggccgacctcactcgtggcacacaactaaatctggggagaagcaacccgatgccagcatgatgcagatatctcagggtatgatcggccctccttggcaccaaagctaccattccagctcctctactagtgacctctccaactatgaccatgcttatctaaggcggagccctgaccagtgcagctcccaggggagcatggagagcctggagcccagtggggcatacccaccctgtcatctttcccctgccaagtccaccggcagcattgaccagctcagccacttccataacaagagagactcggcttacagctctttctccaccagttctagcatcctagagtatccacaccctggcatctctggccgggagcgttcaggctccatggacaatacttctgctcgaggtggcctcctcgaagggatgaggcaggcagatattcgctatgtcaagacagtctatgacacccggaggggagtctcagcagagtatgaggtgaactcttcagccctgctgcttcaaggtagggaggcccgagcctcagcaaatggtcagggctatgataaatggtctaatattcctcggggcaagggagtgccacccccatcctggagccagcagtgccccagttccttggagactgccacggacaaccttcctcctaaggtgggtgcacccctgcctccagctcggagtgacagttacgcagcatttcggcaccgtgagcggcccagctcctggtctagccttgatcagaaacggctctgccggcctcaggcaaactctttaggctccctgaagtctccattcatagaggagcagctgcatactgtgctggagaagagtccagagaacagccccccagtgaagcccaagcataactatacccagaaggcccaacctggccaacctctgctgccgaccagcatctacccggtaccttccctggagccacactttgcccaggtgcctcagccttctgtgagtagcaacggtatgctctaccctgcactggccaaggagagtggatacatagcccctcagggagcatgcaacaagatggctaccattgatgagaatgggaaccagaatggatctggcaggcctgggtttgccttctgccagcccttagaacatgacttgctgtccccagtggagaagaaaccagaagctacagccaagtatgtcccctccaaagtccatttctgttcagtgcctgaaaatgaggaggatgcctccctgaagagacatctcacacctccccaaggcaacagcccacattccaatgagagaaagagcacccacagtaacaaaccatcttctcatccccacagcctcaaatgccctcaggctcaggcctggcaagcgggtgaagacaagagatcttccaggctctcagagccctgggagggcgatttccaggaagaccacaatgccaacctctggaggaggctggagagagaaggcctaggccagagcctgtcaggcaactttggcaagaccaagtcagccttctcatctctccagaacattcctgagagtctgagaagacacagcagcctggagctaggccggggaacccaggagggttaccccgggggcaggcccacctgtgcagtcaacaccaaggcagaagaccctgggaggaaagccgctcctgacctcgggagccatctggaccggcaggtttcctacccgcggcccgaggggaggaccggtgcctcggcttctttcaacagcacagacccaagtcccgaagagccgcctgccccctcgcacccgcacacatccagtctgggccggagggggcccggcccaggcagcgcctcggctcttcagggctttcagtacgggaagccccactgctcggtgctggagaaggtctccaaattcgagcagcgagagcaagggagccagagaccgagtgtgggcggctctggttttggccataactataggccccacaggaccgtctcaacttccagtacttctgggaatgacttcgaggagacaaaagcacacattcgtttctctgagtcagctgaacccctaggcaacggggagcagcacttcaaaaacggggagctgaagttggaagaggcttcccggcagccctgcggtcagcagctgagcggaggagcgtcggacagcggccgtggcccccagaggccggacgctcggctcctccgtagccagagcaccttccagctctccagcgagccagagagggagcccgagtggcgggacaggcccggctcgcccgaatcgcccctgctggatgcccccttcagccgcgcctaccggaacagcatcaaggacgcacagtcccgtgtcttgggggccacctcctttcgacgtcgagacctggagctgggggcgcccgtggcgtcgaggtcctggcggccacggccttcctcggcccacgtggggctgcggagccccgaggcgtcggcctccgcctccccgcacacgccccgggagcggcacagcgtgacccctgctgagggcgacctggccaggcccgtgccccctgccgcccggagaggtgctcgccggcgcctgactcccgagcagaagaagcgctcctactcggagcccgagaagatgaacgaggtggggatcgtggaggaggccgaaccggcacccctgggcccgcagagaaatgggatgcgtttcccggagagcagcgtggccgaccggcgccgtctcttcgagcgcgatggcaaggcctgctccacgctcagcctgtcggggcccgagctgaagcagttccagcagagcgccctggcggactacatccagcgcaagaccggcaagcggcctacctccgccgccggctgcagcctccaggagcccgggccactgcgtgagcgcgcccagagtgcctacctccagcccggccccgcggcgctcgaaggctccggcctcgcctcggcctccagcttgagctcactgcgggagcccagcctgcagccccgcagggaggccacgctcctgccggccacagttgcagaaacccagcaggctccccgagatcgcagcagctccttcgccggtggccgccgcctcggggaacggcgacgcggggacctgcttagcggagcaaacggtggaacaaggggcacccagagaggggatgagacccccagggagccatcctcctggggggccagggccgggaagtccatgtcggccgaggacctgctggaacgctcggacgtccttgcgggccctgtccatgtgaggtccaggtcatctcccgccaccgcagacaagcgccaggtacgtgcaaccagcaagtcctggcctcgaactgtcccttcctccctagaagctttagtggggctccccaaccccccacactctcacccgctctcccagttcagttttccttgtgattacagaaaagtagcatttgttttcatgagttgagtttctcaagtgtcccttacctggtttccttataaagatataggtatctagatt

SEQ ID NO: 19067 - DNA, 789 bp, Homo sapiens
  source 1..789: mol_type = unassigned DNA
aaaccacctcgtttgacagtttgcttcagtgaatccagtttttcccttattaccaaaaccaaattacaggggagtttgtctttataacagttaatataactttcttcctttttgcttagaaaatctgggttttctgagattgggaaataatgctttattgcttcagaggaacatggataaaaaaggaagacacgacactcagtagtggattcgccttcgtagggcagagaactttgttaggtgcaggcttagaaccctgcacttagctgtgctgctttgctctggctccgggagatgtgtgcacagacccaggccatgcagatactggtgcctctaacttcgtcagcccagaacacctcacctctggcccccagcacaggaaagcagcgtggtcaggaggggttaaacttcggctgaagcacaggcgcagtgagcctgcaggccgacctcactcgtggcacacaactaaatctggggagaagcaacccgatgccagcatgatgcagatatctcagggtatgatcggccctccttggcaccaaagctaccattccagctcctctactagtgacctctccaactatgaccatgcttatctaaggcggagccctgaccagtgcagctcccaggggagcatggagagcctggagcccagtggggcatacccaccctgtcatctttcccctgccaagtccaccggcagcattgaccagctcagccacttccataacaagagagactcggcttacagctctttctccaccagttctagcatcctagagtatccac

SEQ ID NO: 19068 - DNA, 6261 bp, Homo sapiens
  source 1..6261: mol_type = unassigned DNA
ccgttttcttgtccattacgcgctatccctccgcctctccttctttcttttcttttctttttttcccttctccttttcccccctctctccccctttctccagctccgtgtcatttcctccttgcgctcgctcgctgcctgagcgtctccagccgggagagtaggcggagcagggcggtgcggggtggcgtagagctggagggcgatggtggcggagctgctgggggcggaggcaacgtagccccctcggaaaaggagcccggcggcgcctgagcccagccgaggatggagaaccggcctgggtccttccagtacgtccctgtgcagctgcaagggggggcaccctggggcttcacccttaaggggggtctggaacactgtgagccgctcacagtgtctaagattgaagatggaggcaaggcagctttgtcccagaagatgaggactggtgatgagctggtgaatatcaatggcactccattatatggctcccgccaagaggccctcattctcatcaaaggctccttccggattctcaagctgattgtcaggaggaggaacgcccctgtcagtaggccgcactcatggcatgtggccaagctgctggagggatgccctgaagcagccaccaccatgcatttcccttctgaagccttcagcttgtcctggcattctggctgcaacacaagtgacgtgtgtgtgcagtggtgtccactctcccggcattgcagcaccgagaaaagcagctccattggcagcatggagagcctggagcaaccaggccaagccacctatgagagccatctgttgcctattgaccagaacatgtaccctaaccagcgtgactcagcctacagctccttctcggccagctcaaatgcttctgactgtgccctttccctcaggccagaggagccagcctctacagactgcatcatgcaaggcccagggccaactaaggcccccagtggccggcctaatgtggctgagacctcaggaggtagtcggcgcaccaatgggggccacctgacccccagctctcagatgtcatcccgtccacaggagggataccagtcagggcccgccaaagcagtcaggggcccaccacaacctccagtgaggcgggacagccttcaggcctccagagcccaactcctcaatggagagcagcgcagggcatctgagcctgtggtccccttgccacagaaggagaaactgagcttagagcctgtgctacccgcaaggaaccctaataggttctgttgcctcagtgggcatgaccaagtgacaagtgagggccatcagaactgtgagttcagtcagcctcctgaatccagccaacagggctctgagcatctactgatgcaggcctcaaccaaagctgttggatccccaaaagcctgtgacagagcttccagcgtggattccaacccactcaatgaggcttctgcagagctagctaaggcttcttttggcagacctccacatctcataggacccacagggcatcgccatagtgcccctgaacagctgctggcatcccacctgcagcatgtgcaccttgataccaggggcagcaaagggatggagctcccacccgtacaggatgggcaccagtggactctgtcccctttgcacagcagccacaaagggaagaaaagtccatgcccccctacaggaggaacccatgaccagtccagcaaagaaagaaagaccagacaagtggatgacaggtctttagttttgggacaccagagccaaagcagtcccccacatggagaggctgatggacacccctcagaaaaaggtttcctggacccaaacagaacaagcagagcagccagtgaattggccaaccagcaaccctctgcctctggctcccttgttcaacaagccacggactgttcttcaaccactaaagcagctagtggcacagaggcaggtgaagaaggggacagcgagcccaaggagtgcagccggatgggtggtaggcgaagtggagggacccggggccgctcgatccaaaaccggcggaagagtgagcgttttgctaccaatctgcgtaatgaaattcagaggaggaaggcccagctccagaaaagcaagggtcccttgtcacagctgtgtgacactaaggagccagtggaagagacccaggagcccccagaaagtcctccactcactgcctctaacacatctcttctatcttcatgtaaaaaacctcccagccccagagacaagctcttcaacaaaagcatgatgctcagagctaggtcttccgagtgcctcagccaagcccctgagagccatgaatctaggacaggcttagagggacgaataagccctggccagaggcctggccagtcctctttgggcctgaacacctggtggaaagcacctgacccatcctcctcagaccctgagaaagcacatgctcactgtggagtccgtggaggtcattggagatggtctccagagcataattcacagccacttgtggcagcagccatggaaggcccttccaacccaggtgacaacaaggaattgaaggcttctactgctcaagctggggaggatgccatcctcttgccttttgcagacagaagaaagttctttgaagagagtagcaaatccttatctacatctcatttgccaggtttaaccactcatagcaacaagacttttacccagagaccaaaacctatagaccaaaacttccagccaatgagctccagctgtagggaattgaggcgccatcccatggaccaatcatatcattccgcagaccaaccatatcatgccacagaccaatcatatcattccatgtcaccccttcagtcagaaactcccacttactcagaatgttttgcaagcaaaggtctagaaaattccatgtgttgtaagccactacactgtggtgattttgattaccacaggacctgctcttactcctgcagtgttcaaggagctctagtccatgatccttgcatttattgttctggggaaatctgccctgccttgctaaagagaaatatgatgccaaattgctacaactgccggtgccaccaccaccaatgcattcggtgttcagtttgctatcataatcctcagcacagtgccctcgaggacagcagcttggcacctggcaacacttggaaacccaggaagctgacagtgcaggaatttcctggggacaaatggaatccaataacaggaaacaggaagaccagccagtcagggagggaaatggctcattccaagactagcttttcatgggcaacccctttccatccttgccttgagaacccagcactggacttgtcaagctaccgagcaatttcttctcttgacctccttggagacttcaaacatgctttgaaaaaatcagaggaaacttcagtttatgaggaggggagctcccttgcctccatgccccacccactgcgcagccgtgccttctcagagagtcacatcagcttggcgccccaaagcacccgggcctgggggcagcataggagggagctctttagcaaaggtgatgagacccagtcggatcttctcggagccaggaagaaggcctttcctcctcctcgccctcctcctcccaactgggagaagtacaggctctttcgtgcagcccagcagcagaagcagcaacagcagcagcagaagcaacaggaggaggaggaggaggaggaagaagaagaagaagaggaagaggaagaggaggaggaggaggcagaggaggaggaagaggagctgccaccccagtatttcagttcagaaacctctggttcctgtgctctcaatcctgaggaggtcctagagcagccacaacccctcagctttggccacctggagggctcgagacagggttcacaaagtgtcccagcagagcaagaatcctttgcactccattccagtgatttcttgcctccaataaggggtcacttgggatctcaacctgagcaggctcagcccccttgctactatggcattggtgggctttggaggacatcgggacaggaagccactgaatccgccaaacaagagtttcagcacttttcgcctccttcaggggccccaggaatccctacctcttactcagcttattacaatatttctgtggccaaggcagagctgctgaacaaactgaaagaccaacctgagatggcagagattggcctaggagaggaggaagttgaccatgaactggctcaaaaaaagatacagcttatcgaaagcatcagcagaaaactttctgtcttgcgggaggcccagcgagggctgctagaggacatcaatgccaattctgcccttggggaggaggtggaggccaacttaaaagccgtctgcaaatccaatgaatttgaaaagtaccacttgtttgttggggacctggacaaagtggtcaacctgttgctgtcactctctggacgactggcccgggtggagaatgctctgaacagcatcgattcagaggccaaccaggagaagttggtactgatagagaagaagcagcagctgacggggcagttggcagatgccaaggagctgaaggagcacgtggaccgccgggagaagttggtgtttggcatggtctcccgctacctgcctcaggaccagctccaagattaccagcactttgtcaagatgaaatctgctctcatcattgaacagcgagagctggaggagaagatcaagctcggggaagagcaactcaaatgtctcagggagagtctactcctggggcccagcaatttctaattctaccagcactctgccacagcatccctgcccagccatgtgggaagtgctttcaatcttctttgttagcagtttctcagcaagtagatagcaattagcagtttgttccagccctctaccctggatgtctctcactaccccttccctagcagtggtcctaaccagctaggagaccctggggaagccacaagcttctacccaagggagctgcagcaaggtgtgatcttagaaccacactctccttcccacagttgccaagggcaagtacttgctgcacagagaaccaaggaagtgccttcattctgctttgtactaggacaccaaagacatcaagtactcatcacccacccatatcatcaacagcctctaaaggctcagagggaatctgccttgcagctctactctgccccagggcttgtggccagccatttctcacagagagctggctgccttgagggcattcacctggcaccagtttcagggcctcacccaagctttgcaggggaaagcacagagggaggaattacactgaaaaaaatgcaagcaaaggttgagtacccccaggtgccccttaggaaggaaccaggtttaaataggctctacccttacctttcccagcagcaagttcaggggaagaggcctactcttagccctggctagtgtgaccctcttcctgtcctaagactttggtcctaccacctcttgtttcatctttcctttacattgctgggggttaccgcaggtgcctaccccagggcttcaccatatgggccattaatagctctactaaaactgacttctagatgtaggtttcattattgggggagggggttcttattgttatattttaaatggccttttgattttatttatttttatgttttgattatttttttcttttttaactaataaggcgagaagagggaagttggagagggaaaagttagcccagaaggaaagcattttctgcagatcagcctgaatccaccgtggctaggcatattcttgctcttctcgtgttgctcacaactacctgcctggatgaatttaggaaagttgcaggatacaaggttaaaacacaagatcaaatgaacaatccgaaaatgttattaagaaaacagttccggccgggcatggtggctcacgcctgaaatcccagcactttgggaggccgaggcaggtggatcacgaggtcaggagatcaagaccatcctggctaacacggtgaaaccctatctctactaaaaatacaaaaaattagccaggtgtggtggcacgcaccagtagtcccagctactcgggaggctgaggcaggagaattgcttgaacctggaaggcagagattgcagtgagctgagaccacaccactgcactccatcctgggcaacagagtgagactttgtctcaaaaagaaagaaagaaagaaagaaagaaagaaagaaagaaaagaaagaaagaaagaaagaaagaaaacagttccatttacaatagcatc

SEQ ID NO: 19069 - DNA, 882 bp, Homo sapiens
  source 1..882: mol_type = unassigned DNA
gcattcacctggcaccagtttcagggcctcacccaagctttgcaggggaaagcacagagggaggaattacactgaaaaaaatgcaagcaaaggttgagtacccccaggtgccccttaggaaggaaccaggtttaaataggctctacccttacctttcccagcagcaagttcaggggaagaggcctactcttagccctggctagtgtgaccctcttcctgtcctaagactttggtcctaccacctcttgtttcatctttcctttacattgctgggggttaccgcaggtgcctaccccagggcttcaccatatgggccattaatagctctactaaaactgacttctagatgcgagaagagggaagttggagagggaaaagttagcccagaaggaaagcattttctgcagatcagcctgaatccaccgtggctaggcatattcttgctcttctcgtgttgctcacaactacctgcctggatgaatttaggaaagttgcaggatacaaggttaaaacacaagatcaaatgaacaatccgaaaatgttattaagaaaacagttccggccgggcatggtggctcacgcctgaaatcccagcactttgggaggccgaggcaggtggatcacgaggtcaggagatcaagaccatcctggctaacacggtgaaaccctatctctactaaaaatacaaaaaattagccaggtgtggtggcacgcaccagtagtcccagctactcgggaggctgaggcaggagaattgcttgaacctggaaggcagagattgcagtgagctgagaccacaccactgcactccatcctgggcaacagagtgagactttgtctcaaaaagaaagaaagaaagaaagaaagaaagaaagaaagaaa

SEQ ID NO: 19070 - DNA, 8919 bp, Homo sapiens
  source 1..8919: mol_type = unassigned DNA
ctttcatccttccctttgccaccagggtgctggctggttcctggagcagcgtcttcactcctatccagctcttgacactggctttcgttccctaaggctgtggccatatctaggtccatccaggctgatggtcataccttgccttcagtgctactccttcctgttcttagaactggaacctgactgtgcctgagccccttggatcacactcagcatcttgggctgatggtccctcgccccagaaggtcttaactggagggcagatgggtcccagctaagggaggacgctggctggagggtttgtcaacgagagtctgagctagccggataccccgctctctcccaagccatctctccaccctgggcaacttccatggaggaacgcccctgtcagtaggccgcactcatggcatgtggccaagctgctggagggatgccctgaagcagccaccaccatgcatttcccttctgaagccttcagcttgtcctggcattctggctgcaacacaagtgacgtgtgtgtgcagtggtgtccactctcccggcattgcagcaccgagaaaagcagctccattggcagcatggagagcctggagcaaccaggccaagccacctatgagagccatctgttgcctattgaccagaacatgtaccctaaccagcgtgactcagcctacagctccttctcggccagctcaaatgcttctgactgtgccctttccctcaggccagaggagccagcctctacagactgcatcatgcaaggcccagggccaactaaggcccccagtggccggcctaatgtggctgagacctcaggaggtagtcggcgcaccaatgggggccacctgacccccagctctcagatgtcatcccgtccacaggagggataccagtcagggcccgccaaagcagtcaggggcccaccacaacctccagtgaggcgggacagccttcaggcctccagagcccaactcctcaatggagagcagcgcagggcatctgagcctgtggtccccttgccacagaaggagaaactgagcttagagcctgtgctacccgcaaggaaccctaataggttctgttgcctcagtgggcatgaccaagtgacaagtgagggccatcagaactgtgagttcagtcagcctcctgaatccagccaacagggctctgagcatctactgatgcaggcctcaaccaaagctgttggatccccaaaagcctgtgacagagcttccagcgtggattccaacccactcaatgaggcttctgcagagctagctaaggcttcttttggcagacctccacatctcataggacccacagggcatcgccatagtgcccctgaacagctgctggcatcccacctgcagcatgtgcaccttgataccaggggcagcaaagggatggagctcccacccgtacaggatgggcaccagtggactctgtcccctttgcacagcagccacaaagggaagaaaagtccatgcccccctacaggaggaacccatgaccagtccagcaaagaaagaaagaccagacaagtggatgacaggtctttagttttgggacaccagagccaaagcagtcccccacatggagaggctgatggacacccctcagaaaaaggtttcctggacccaaacagaacaagcagagcagccagtgaattggccaaccagcaaccctctgcctctggctcccttgttcaacaagccacggactgttcttcaaccactaaagcagctagtggcacagaggcaggtgaagaaggggacagcgagcccaaggagtgcagccggatgggtggtaggcgaagtggagggacccggggccgctcgatccaaaaccggcggaagagtgagcgttttgctaccaatctgcgtaatgaaattcagaggaggaaggcccagctccagaaaagcaagggtcccttgtcacagctgtgtgacactaaggagccagtggaagagacccaggagcccccagaaagtcctccactcactgcctctaacacatctcttctatcttcatgtaaaaaacctcccagccccagagacaagctcttcaacaaaagcatgatgctcagagctaggtcttccgagtgcctcagccaagcccctgagagccatgaatctaggacaggcttagagggacgaataagccctggccagaggcctggccagtcctctttgggcctgaacacctggtggaaagcacctgacccatcctcctcagaccctgagaaagcacatgctcactgtggagtccgtggaggtcattggagatggtctccagagcataattcacagccacttgtggcagcagccatggaaggcccttccaacccaggtgacaacaaggaattgaaggcttctactgctcaagctggggaggatgccatcctcttgccttttgcagacagaagaaagttctttgaagagagtagcaaatccttatctacatctcatttgccaggtttaaccactcatagcaacaagacttttacccagagaccaaaacctatagaccaaaacttccagccaatgagctccagctgtagggaattgaggcgccatcccatggaccaatcatatcattccgcagaccaaccatatcatgccacagaccaatcatatcattccatgtcaccccttcagtcagaaactcccacttactcagaatgttttgcaagcaaaggtctagaaaattccatgtgttgtaagccactacactgtggtgattttgattaccacaggacctgctcttactcctgcagtgttcaaggagctctagtccatgatccttgcatttattgttctggggaaatctgccctgccttgctaaagagaaatatgatgccaaattgctacaactgccggtgccaccaccaccaatgcattcggtgttcagtttgctatcataatcctcagcacagtgccctcgaggacagcagcttggcacctggcaacacttggaaacccaggaagctgacagtgcaggaatttcctggggacaaatggaatccaataacaggaaacaggaagaccagccagtcagggagggaaatggctcattccaagactagcttttcatgggcaacccctttccatccttgccttgagaacccagcactggacttgtcaagctaccgagcaatttcttctcttgacctccttggagacttcaaacatgctttgaaaaaatcagaggaaacttcagtttatgaggaggggagctcccttgcctccatgccccacccactgcgcagccgtgccttctcagagagtcacatcagcttggcgccccaaagcacccgggcctgggggcagcataggagggagctctttagcaaaggtgatgagacccagtcggatcttctcggagccaggaagaaggcctttcctcctcctcgccctcctcctcccaactgggagaagtacaggctctttcgtgcagcccagcagcagaagcagcaacagcagcagcagaagcaacaggaggaggaggaggaggaggaagaagaagaagaagaggaagaggaagaggaggaggaggaggcagaggaggaggaagaggagctgccaccccagtatttcagttcagaaacctctggttcctgtgctctcaatcctgaggaggtcctagagcagccacaacccctcagctttggccacctggagggctcgagacagggttcacaaagtgtcccagcagagcaagaatcctttgcactccattccagtgatttcttgcctccaataaggggtcacttgggatctcaacctgagcaggctcagcccccttgctactatggcattggtgggctttggaggacatcgggacaggaagccactgaatccgccaaacaagagtttcagcacttttcgcctccttcaggggccccaggaatccctacctcttactcagcttattacaatatttctgtggccaaggcagagctgctgaacaaactgaaagaccaacctgagatggcagagattggcctaggagaggaggaagttgaccatgaactggctcaaaaaaagatacagcttatcgaaagcatcagcagaaaactttctgtcttgcgggaggcccagcgagggctgctagaggacatcaatgccaattctgcccttggggaggaggtggaggccaacttaaaagccgtctgcaaatccaatgaatttgaaaagtaccacttgtttgttggggacctggacaaagtggtcaacctgttgctgtcactctctggacgactggcccgggtggagaatgctctgaacagcatcgattcagaggccaaccaggagaagttggtactgatagagaagaagcagcagctgacggggcagttggcagatgccaaggagctgaaggagcacgtggaccgccgggagaagttggtgtttggcatggtctcccgctacctgcctcaggaccagctccaagattaccagcactttgtcaagatgaaatctgctctcatcattgaacagcgagagctggaggagaagatcaagctcggggaagagcaactcaaatgtctcagggagagtctactcctggggcccagcaatttctaattctaccagcactctgccacagcatccctgcccagccatgtgggaagtgctttcaatcttctttgttagcagtttctcagcaagtagatagcaattagcagtttgttccagccctctaccctggatgtctctcactaccccttccctagcagtggtcctaaccagctaggagaccctggggaagccacaagcttctacccaagggagctgcagcaaggtgtgatcttagaaccacactctccttcccacagttgccaagggcaagtacttgctgcacagagaaccaaggaagtgccttcattctgctttgtactaggacaccaaagacatcaagtactcatcacccacccatatcatcaacagcctctaaaggctcagagggaatctgccttgcagctctactctgccccagggcttgtggccagccatttctcacagagagctggctgccttgagggcattcacctggcaccagtttcagggcctcacccaagctttgcaggggaaagcacagagggaggaattacactgaaaaaaatgcaagcaaaggttgagtacccccaggtgccccttaggaaggaaccaggtttaaataggctctacccttacctttcccagcagcaagttcaggggaagaggcctactcttagccctggctagtgtgaccctcttcctgtcctaagactttggtcctaccacctcttgtttcatctttcctttacattgctgggggttaccgcaggtgcctaccccagggcttcaccatatgggccattaatagctctactaaaactgacttctagatgtaggtttcattattgggggagggggttcttattgttatattttaaatggccttttgattttatttatttttatgttttgattatttttttcttttttaactaataaggcgagaagagggaagttggagagggaaaagttagcccagaaggaaagcattttctgcagatcagcctgaatccaccgtggctaggtaagcaagtgccaaggcgttgaattgttcccaccatagctaccgatgtctaggaaggagttttccccttgaactcagagcctccctactgtggcctggccttgtgcttcccttaaagtctaagtgacttgagtttagcattccccagcagggtttaagtttttcttactgatttctttttgaaaccaaagaaatctcctgaaatggagaaaggttcagtcatttctctaccatctccaagctatgggatcagtagaggtgagctcagaaggaactcctctaaccattgctttctcagcctgtggcctggctcaagggaaccaaaactcaaggtagctgggagctccagccagagccagctccccagagcaattgaagacccagccaggatcttaggcatacaaacaactaaaactgctgctgttgccaaggccctgacaccagtagctagtttctatgctggaaaagcagccctcaggtggacgatggcaagaagggggttatggccaaatgctgccctgttatccagcttagctccctgttcctcactaactggggccaatccttggtatcacacaacccagccaaggcctggcatctcttctagttactgctgagttcctcagggtccttgaaggtcaactgtagcagcagggatgtctcattcaaccaaagaatttgccaaggaacttttgctgctgttacaaatacttgtcactagcttccatttcctcttcattgtatttgaaaacaatgggagaatcttggccagcagggtgtcctggggtagggggtggggtaagcctttctgtggagctctgggtttgctcttagtactgctgccagaaacactgttagaatggcaaccctgccattctcccctccagtggaagattctactttattcaggaaggctggtggcttgcaggggctaggcttacacaagccagccaagattgagaaggtaggggagtgctttcaatggaggccatagttgtcatcttttcttctgagcaggctctaggacaaacaatgagcaaattgagatgtcctgtattgggaggatgaggctgatatgtttcatcattctcagaatttgtgggctagagcacctttttgggaatatgggcctagggaaaagaacggtcacttacctggacactatggccatagtcttgagtttttctagtcagcatgtgattggttgtaccttaagtttatgacaccaaaaatactattaactctgttatttttgttcttaatcccatctcaaattagtttctagagttagaatcagaacacaaggatgctcattttcacatggagggaaagttgccaaagcatttaaaaaataaccccaaaagtatatctagcagtgaagcttggtagataaaggtgaactgctaaacagacactggcgtgccacactcctgccagggcagtctcattgtgtgtgacggtgctgcaacactgccagtattacttgagatgcagtctctctcccctgttctcagttcctgggctcagccctcctccaaggcctgccagtgagtagcagtttggaaggcaggccaagggagatccccaaagacagttatcagtcttaacttctgctgtctcccgtcaaatacttatacaggcccccatgggtaataggcaagcatgatggctgatagagaagtcagtgcatgagttactatcacatgtccccccaacccctcctgccacctcccagggctctggataattgaatcttcctgagtcccacagctggagactcaaccaggatatagctgtaaatgcccaagtagaatctgacagaataagacagagacactgaaaataaagccctagaaaggaagaaattggaagcaaagaaaaggagaggtgaaaagataaaaagcctccttcaaggttaggttcaggttctgttttccatttaacctcatgtgccataaagctgcccaggcacaccagagccacatcctgaacccgaccctccctgacagtgctgctctgccagtagcaagccccagatggaggaagctgggcccatttctggccacttccacccatttggagctttgccagaggagtcgtctatgccaataatatttctgcaacagcatattatattatttgaagattagtagatctttttgggggggtggggcaggggacagtttctatagatgaagaaccagtgttggttgtacagctgttgggggtcatctatcccatgtgaagctattctttttccaaatcttgttgtttctgcatttgtgtcctccaccactcccttcttggctgacatagatatgcctgccagattgtcatcaagggtcatatttcaataaaaggtgctaaggacaaaaaaaaatctcatgtgttttaactcaggtgatggaagtctaaagattctgctgaaaagtactggaaaggaatttggtcacctatccatagtccttcacagataaacatatgaccagacccttacccacatccctaaacccttaccctggcctctgagggatggtattgatgctataccattcatcatccccagttaaatagcaggatctgccatagcctttttaggggaacagcttttagacatctatttcaagaccatcctgagtagggggtacagagtttaagccattggttatttctgttgttatcacagtattgaagcatggtatttttctactcagaaggatctcaggatcacagccctgccctttagctcactgatatatttcttcctctctggttactcagtggcaacatcacatccagtctaaccccatgtttagaatgcagaaaaagtcaacaataggtgtaatctcaggtatagacctaagcagtatacagagtctagttctggagtctagcctgatcgaaggtaagccattctttctagacttcttccaatcttgaattctgtctagtattttcatcttacttctagctgatagtccaatctcacaccttcatgctcagctccctggaaagcaagggccttggtgatctgctctccaaggcaacctcaaagattagactcaaatgtattccaggaagcaactctgacattgaaaagctttcttttttcgtgatccatattctgttcacattccaactatcctccttctactcaagatatccattgtggtagagtagaaagagtccagctttggcattagaatgaactgtgttcaaatcctggttctgccacttattcaatgaacctgggctactagctcaacttctgaggtcattttcttatctgtaaaatgggaacagtattatcttgcttgcagttattgtaacttg

SEQ ID NO: 19071 - DNA, 295 bp, Homo sapiens
  source 1..295: mol_type = unassigned DNA
attgaagatggaggcaaggcagctttgtcccagaagatgaggactggtgatgagctggtgaatatcaatggcactccattatatggctcccgccaagaggccctcattctcatcaaaggctccttccggattctcaagctgattgtcaggagactaagtttgctggcccctggtataaagcattctccaaaaagaagaccttgaggctctctctaaagcttaaaaagactgaaagagaaccatcgtagtctacaagtgagaatgaataaaaaaatcacagaatatttaagccaac

SEQ ID NO: 19072 - DNA, 9556 bp, Homo sapiens
  source 1..9556: mol_type = unassigned DNA
ccggcggcgcctgagcccagccgaggatggagaaccggcctgggtccttccagtacgtccctgtgcagctgcaagggggggcaccctggggcttcacccttaaggggggtctggaacactgtgagccgctcacagtgtctaagattgaagatggaggcaaggcagctttgtcccagaagatgaggactggtgatgagctggtgaatatcaatggcactccattatatggctcccgccaagaggccctcattctcatcaaaggctccttccggattctcaagctgattgtcaggaggaggaacgcccctgtcagtaggccgcactcatggcatgtggccaagctgctggagggatgccctgaagcagccaccaccatgcatttcccttctgaagccttcagcttgtcctggcattctggctgcaacacaagtgacgtgtgtgtgcagtggtgtccactctcccggcattgcagcaccgagaaaagcagctccattggcagcatggagagcctggagcaaccaggccaagccacctatgagagccatctgttgcctattgaccagaacatgtaccctaaccagcgtgactcagcctacagctccttctcggccagctcaaatgcttctgactgtgccctttccctcaggccagaggagccagcctctacagactgcatcatgcaaggcccagggccaactaaggcccccagtggccggcctaatgtggctgagacctcaggaggtagtcggcgcaccaatgggggccacctgacccccagctctcagatgtcatcccgtccacaggagggataccagtcagggcccgccaaagcagtcaggggcccaccacaacctccagtgaggcgggacagccttcaggcctccagagcccaactcctcaatggagagcagcgcagggcatctgagcctgtggtccccttgccacagaaggagaaactgagcttagagcctgtgctacccgcaaggaaccctaataggttctgttgcctcagtgggcatgaccaagtgacaagtgagggccatcagaactgtgagttcagtcagcctcctgaatccagccaacagggctctgagcatctactgatgcaggcctcaaccaaagctgttggatccccaaaagcctgtgacagagcttccagcgtggattccaacccactcaatgaggcttctgcagagctagctaaggcttcttttggcagacctccacatctcataggacccacagggcatcgccatagtgcccctgaacagctgctggcatcccacctgcagcatgtgcaccttgataccaggggcagcaaagggatggagctcccacccgtacaggatgggcaccagtggactctgtcccctttgcacagcagccacaaagggaagaaaagtccatgcccccctacaggaggaacccatgaccagtccagcaaagaaagaaagaccagacaagtggatgacaggtctttagttttgggacaccagagccaaagcagtcccccacatggagaggctgatggacacccctcagaaaaaggtttcctggacccaaacagaacaagcagagcagccagtgaattggccaaccagcaaccctctgcctctggctcccttgttcaacaagccacggactgttcttcaaccactaaagcagctagtggcacagaggcaggtgaagaaggggacagcgagcccaaggagtgcagccggatgggtggtaggcgaagtggagggacccggggccgctcgatccaaaaccggcggaagagtgagcgttttgctaccaatctgcgtaatgaaattcagaggaggaaggcccagctccagaaaagcaagggtcccttgtcacagctgtgtgacactaaggagccagtggaagagacccaggagcccccagaaagtcctccactcactgcctctaacacatctcttctatcttcatgtaaaaaacctcccagccccagagacaagctcttcaacaaaagcatgatgctcagagctaggtcttccgagtgcctcagccaagcccctgagagccatgaatctaggacaggcttagagggacgaataagccctggccagaggcctggccagtcctctttgggcctgaacacctggtggaaagcacctgacccatcctcctcagaccctgagaaagcacatgctcactgtggagtccgtggaggtcattggagatggtctccagagcataattcacagccacttgtggcagcagccatggaaggcccttccaacccaggtgacaacaaggaattgaaggcttctactgctcaagctggggaggatgccatcctcttgccttttgcagacagaagaaagttctttgaagagagtagcaaatccttatctacatctcatttgccaggtttaaccactcatagcaacaagacttttacccagagaccaaaacctatagaccaaaacttccagccaatgagctccagctgtagggaattgaggcgccatcccatggaccaatcatatcattccgcagaccaaccatatcatgccacagaccaatcatatcattccatgtcaccccttcagtcagaaactcccacttactcagaatgttttgcaagcaaaggtctagaaaattccatgtgttgtaagccactacactgtggtgattttgattaccacaggacctgctcttactcctgcagtgttcaaggagctctagtccatgatccttgcatttattgttctggggaaatctgccctgccttgctaaagagaaatatgatgccaaattgctacaactgccggtgccaccaccaccaatgcattcggtgttcagtttgctatcataatcctcagcacagtgccctcgaggacagcagcttggcacctggcaacacttggaaacccaggaagctgacagtgcaggaatttcctggggacaaatggaatccaataacaggaaacaggaagaccagccagtcagggagggaaatggctcattccaagactagcttttcatgggcaacccctttccatccttgccttgagaacccagcactggacttgtcaagctaccgagcaatttcttctcttgacctccttggagacttcaaacatgctttgaaaaaatcagaggaaacttcagtttatgaggaggggagctcccttgcctccatgccccacccactgcgcagccgtgccttctcagagagtcacatcagcttggcgccccaaagcacccgggcctgggggcagcataggagggagctctttagcaaaggtgatgagacccagtcggatcttctcggagccaggaagaaggcctttcctcctcctcgccctcctcctcccaactgggagaagtacaggctctttcgtgcagcccagcagcagaagcagcaacagcagcagcagaagcaacaggaggaggaggaggaggaggaagaagaagaagaagaggaagaggaagaggaggaggaggaggcagaggaggaggaagaggagctgccaccccagtatttcagttcagaaacctctggttcctgtgctctcaatcctgaggaggtcctagagcagccacaacccctcagctttggccacctggagggctcgagacagggttcacaaagtgtcccagcagagcaagaatcctttgcactccattccagtgatttcttgcctccaataaggggtcacttgggatctcaacctgagcaggctcagcccccttgctactatggcattggtgggctttggaggacatcgggacaggaagccactgaatccgccaaacaagagtttcagcacttttcgcctccttcaggggccccaggaatccctacctcttactcagcttattacaatatttctgtggccaaggcagagctgctgaacaaactgaaagaccaacctgagatggcagagattggcctaggagaggaggaagttgaccatgaactggctcaaaaaaagatacagcttatcgaaagcatcagcagaaaactttctgtcttgcgggaggcccagcgagggctgctagaggacatcaatgccaattctgcccttggggaggaggtggaggccaacttaaaagccgtctgcaaatccaatgaatttgaaaagtaccacttgtttgttggggacctggacaaagtggtcaacctgttgctgtcactctctggacgactggcccgggtggagaatgctctgaacagcatcgattcagaggccaaccaggagaagttggtactgatagagaagaagcagcagctgacggggcagttggcagatgccaaggagctgaaggagcacgtggaccgccgggagaagttggtgtttggcatggtctcccgctacctgcctcaggaccagctccaagattaccagcactttgtcaagatgaaatctgctctcatcattgaacagcgagagctggaggagaagatcaagctcggggaagagcaactcaaatgtctcagggagagtctactcctggggcccagcaatttctaattctaccagcactctgccacagcatccctgcccagccatgtgggaagtgctttcaatcttctttgttagcagtttctcagcaagtagatagcaattagcagtttgttccagccctctaccctggatgtctctcactaccccttccctagcagtggtcctaaccagctaggagaccctggggaagccacaagcttctacccaagggagctgcagcaaggtgtgatcttagaaccacactctccttcccacagttgccaagggcaagtacttgctgcacagagaaccaaggaagtgccttcattctgctttgtactaggacaccaaagacatcaagtactcatcacccacccatatcatcaacagcctctaaaggctcagagggaatctgccttgcagctctactctgccccagggcttgtggccagccatttctcacagagagctggctgccttgagggcattcacctggcaccagtttcagggcctcacccaagctttgcaggggaaagcacagagggaggaattacactgaaaaaaatgcaagcaaaggttgagtacccccaggtgccccttaggaaggaaccaggtttaaataggctctacccttacctttcccagcagcaagttcaggggaagaggcctactcttagccctggctagtgtgaccctcttcctgtcctaagactttggtcctaccacctcttgtttcatctttcctttacattgctgggggttaccgcaggtgcctaccccagggcttcaccatatgggccattaatagctctactaaaactgacttctagatgtaggtttcattattgggggagggggttcttattgttatattttaaatggccttttgattttatttatttttatgttttgattatttttttcttttttaactaataaggcgagaagagggaagttggagagggaaaagttagcccagaaggaaagcattttctgcagatcagcctgaatccaccgtggctaggtaagcaagtgccaaggcgttgaattgttcccaccatagctaccgatgtctaggaaggagttttccccttgaactcagagcctccctactgtggcctggccttgtgcttcccttaaagtctaagtgacttgagtttagcattccccagcagggtttaagtttttcttactgatttctttttgaaaccaaagaaatctcctgaaatggagaaaggttcagtcatttctctaccatctccaagctatgggatcagtagaggtgagctcagaaggaactcctctaaccattgctttctcagcctgtggcctggctcaagggaaccaaaactcaaggtagctgggagctccagccagagccagctccccagagcaattgaagacccagccaggatcttaggcatacaaacaactaaaactgctgctgttgccaaggccctgacaccagtagctagtttctatgctggaaaagcagccctcaggtggacgatggcaagaagggggttatggccaaatgctgccctgttatccagcttagctccctgttcctcactaactggggccaatccttggtatcacacaacccagccaaggcctggcatctcttctagttactgctgagttcctcagggtccttgaaggtcaactgtagcagcagggatgtctcattcaaccaaagaatttgccaaggaacttttgctgctgttacaaatacttgtcactagcttccatttcctcttcattgtatttgaaaacaatgggagaatcttggccagcagggtgtcctggggtagggggtggggtaagcctttctgtggagctctgggtttgctcttagtactgctgccagaaacactgttagaatggcaaccctgccattctcccctccagtggaagattctactttattcaggaaggctggtggcttgcaggggctaggcttacacaagccagccaagattgagaaggtaggggagtgctttcaatggaggccatagttgtcatcttttcttctgagcaggctctaggacaaacaatgagcaaattgagatgtcctgtattgggaggatgaggctgatatgtttcatcattctcagaatttgtgggctagagcacctttttgggaatatgggcctagggaaaagaacggtcacttacctggacactatggccatagtcttgagtttttctagtcagcatgtgattggttgtaccttaagtttatgacaccaaaaatactattaactctgttatttttgttcttaatcccatctcaaattagtttctagagttagaatcagaacacaaggatgctcattttcacatggagggaaagttgccaaagcatttaaaaaataaccccaaaagtatatctagcagtgaagcttggtagataaaggtgaactgctaaacagacactggcgtgccacactcctgccagggcagtctcattgtgtgtgacggtgctgcaacactgccagtattacttgagatgcagtctctctcccctgttctcagttcctgggctcagccctcctccaaggcctgccagtgagtagcagtttggaaggcaggccaagggagatccccaaagacagttatcagtcttaacttctgctgtctcccgtcaaatacttatacaggcccccatgggtaataggcaagcatgatggctgatagagaagtcagtgcatgagttactatcacatgtccccccaacccctcctgccacctcccagggctctggataattgaatcttcctgagtcccacagctggagactcaaccaggatatagctgtaaatgcccaagtagaatctgacagaataagacagagacactgaaaataaagccctagaaaggaagaaattggaagcaaagaaaaggagaggtgaaaagataaaaagcctccttcaaggttaggttcaggttctgttttccatttaacctcatgtgccataaagctgcccaggcacaccagagccacatcctgaacccgaccctccctgacagtgctgctctgccagtagcaagccccagatggaggaagctgggcccatttctggccacttccacccatttggagctttgccagaggagtcgtctatgccaataatatttctgcaacagcatattatattatttgaagattagtagatctttttgggggggtggggcaggggacagtttctatagatgaagaaccagtgttggttgtacagctgttgggggtcatctatcccatgtgaagctattctttttccaaatcttgttgtttctgcatttgtgtcctccaccactcccttcttggctgacatagatatgcctgccagattgtcatcaagggtcatatttcaataaaaggtgctaaggacaaaaaaaaatctcatgtgttttaactcaggtgatggaagtctaaagattctgctgaaaagtactggaaaggaatttggtcacctatccatagtccttcacagataaacatatgaccagacccttacccacatccctaaacccttaccctggcctctgagggatggtattgatgctataccattcatcatccccagttaaatagcaggatctgccatagcctttttaggggaacagcttttagacatctatttcaagaccatcctgagtagggggtacagagtttaagccattggttatttctgttgttatcacagtattgaagcatggtatttttctactcagaaggatctcaggatcacagccctgccctttagctcactgatatatttcttcctctctggttactcagtggcaacatcacatccagtctaaccccatgtttagaatgcagaaaaagtcaacaataggtgtaatctcaggtatagacctaagcagtatacagagtctagttctggagtctagcctgatcgaaggtaagccattctttctagacttcttccaatcttgaattctgtctagtattttcatcttacttctagctgatagtccaatctcacaccttcatgctcagctccctggaaagcaagggccttggtgatctgctctccaaggcaacctcaaagattagactcaaatgtattccaggaagcaactctgacattgaaaagctttcttttttcgtgatccatattctgttcacattccaactatcctccttctactcaagatatccattgtggtagagtagaaagagtccagctttggcattagaatgaactgtgttcaaatcctggttctgccacttattcaatgaacctgggctactagctcaacttctgaggtcattttcttatctgtaaaatgggaacagtattatcttgcttgcagttattgtaacttgaaaataataaataaaagccactaacaatccaagaagttattaggcagaatcccaggcccaccccaaacccagtgatagcagtctgaattttaactagatttccaggagattcatgaacatattacagcatgggaagtactgacttgttgaaaacatattcagtacatggtaaccattattatagtcctgatctactcaattcattttttccttatcccaggcatattcttgctcttctcgtgttgctcacaactacctgcctggatgaatttaggaaagttgcaggatacaaggttaaaacacaagatcaaatgaacaatccgaaaatgttattaagaaaacagttccggccgggcatggtggctcacgcctgaaatcccagcactttgggaggccgaggcaggtggatcacgaggtcaggagatcaagaccatcctggctaacacggtgaaaccctatctctactaaaaatacaaaaaattagccaggtgtggtggcacgcaccagtagtcccagctactcgggaggctgaggcaggagaattgcttgaacctggaaggcagagattgcagtgagctgagaccacaccactgcactccatcctgggcaacagagtgagactttgtctcaaaaagaaagaaagaaagaaagaaagaaagaaagaaagaaaagaaagaaagaaagaaagaaagaaaacagttccatttacaatagcatc

SEQ ID NO: 19073 - DNA, 6730 bp, Homo sapiens
  source 1..6730: mol_type = unassigned DNA
aggctggcatagcggctgccgacccgccctcgttcctccaccccctgaacgggactgctgggcccgccccgccccgcctgcaggtgaagcggccgcagccgccgagtaggtgcgtggggatgatctcactcgcgcgctccgcgccaggaggaggaggagcgggagcggatccaacttccgggtagtggagccgcaagccaccggcatcttgctttttcttccccctcctcctgtgtgccccgcgccgctccctctttcccttttattcccggccccacccgccaaaatgaacagctcggacgaagagaagcagctgcagctcattaccagtctgaaggagcaagcaataggcgaatatgaagaccttagagcagagaaccagaaaacaaaggagaagtgtgacaaaattaggcaagaacgagatgaagccgttaaaaaactggaagaatttcagaaaatttctcacatggtcatagaggaagttaatttcatgcagaaccatcttgaaatagagaagacttgtcgagaaagtgctgaagctttggcaacaaagctaaataaagaaaataaaacgttgaaaagaatcagcatgttgtacatggccaagctgggaccagatgtaataactgaagagataaacattgatgatgaagattcgactacagacacagacggtgccgccgagacttgtgtctcagtacagtgtcagaagcaaattaaagaacttcgagatcaaattgtatctgttcaggaggaaaagaagattttagccattgagctggaaaatctcaagagcaaactcgtagaagtaattgaagaagtaaataaagttaaacaagaaaagactgttttaaattcagaagttcttgaacagagaaaagtcttagaaaaatgcaatagagtgtccatgttagctgtagaagagtatgaggagatgcaagtaaacctggagctggagaaggaccttcgaaagaaagcagagtcatttgcacaagagatgttcattgagcaaaacaagctaaagagacaaagccaccttctgctgcagagctccatccctgatcagcagcttttgaaagctttagacgaaaatgcaaaactcacccagcaacttgaagaagagagaattcagcatcaacaaaaggtcaaagaattagaagagcaactagaaaatgaaacactccacaaagaaatacacaacctcaaacagcaactggagcttctagaggaagataaaaaggaattggaattgaaatatcagaattctgaagagaaagccagaaatttaaagcactctgttgatgaactccagaaacgagtgaaccagtctgagaattcagtacctccaccacctcctcctccaccaccacttccccctccacctcccaatcctatccgatccctcatgtccatgatccggaaacgatcccaccccagtggcagtggtgctaagaaagaaaaggcaactcaaccagaaacaactgaagaagtcacagatctaaagaggcaagcagttgaagagatgatggatagaattaaaaagggagttcatcttagacccgttaatcagacagccagaccgaagacaaagccagaatcttcgaaaggctgcgaaagtgcagtggatgaactaaaaggaatactggcctcccagtagcattggatgcaggaaaaaatacattgacggtgaaaaacaagccgaaccagttgtagttttagatcctgtttctacacatgaaccccaaaccaaagaccaggttgctgaaaaagatccaactcaacacaaggaggatgaaggcgaaattcaaccagaaaacaaagaagacagcattgaaaacgtgagagagacagacagctccaactgctgatccataaaccagaagcctgacatgtttggaagtccttttcaataagcacatgattagtgttgttatattggcaagggctgtagacattctgctctggtcactgtattcagaatacaggttcttttctggtgtcacttttgtaagtagcaactataaacataagtaagctgtttagcaaaacacacattcctagtaggttttggttttttgatctttataaagatgaggtttttttcctagttactgtattaagtatgacttcttttagaaggttacaaaaaaattcagatgttgatacctttttaggaaatgtgcataccactcatcaaatggaatgctgaaagtttgaggtgcttgtatataatcggataaacaaaactgatcaacccaatgtgattttaaaagcccccaaagaagcttctgttttgggtctgatcctcttgatggagaaactgcagcagcatggaaattgttgggtactgtggcatacaagttattttctacagtagactgagataaactgaaaactcaggagctggcatcaaactcgtagtcccatagtcagtgttaattacacacattgttaactattggatgaaaaatacatgctattgattgtgtccaaagcctcccgaggacctccgtggggatgctctggtagcctgaatacagaactgaggtgaaagtccaaaccttgaattttacagtagtaagttggtaaaccatgtgctctgtgctatgagttaattatgttttcccaaatactaatgtggcacaagtaccatattttatcagagttcttatgtacagtatggtgaagataagtgacaagcacacatttttcttgcttcactgctgttctatattacacaggtttgttgttgttttttttaaaaaagaaattaagcagtagttagtctctaaaaatacaatgtttcaggctaccacagtgaataaatagaaatgtaatcagggattaaaaaaaaaacttatgcagcttttcaaagttgattgtttcaaaattggtgtttatttaaaataagtggtaatgtacttgaatgcactttttatgacaatgattcagtaatggtaattttactattaaagaaagtgaaaggtttagttttgttagcatggctcagcatgtagctgtcaggtgtttttcacctaagggcaaaagaaaatgatagtaataattgcagtagttgtattgtattgtatttttgcacgtgtggtaagcataggcttgaagaggtgggtaggcaggtacatgtacttcctaaatttggagataattatctttctgtaagttcgttatgcttgactgtttccatgttctcccaataatgattttatagttacttatcactttactcatggagaattaaaacgtaatgtttttcaactgtatctttctttaactggataatactgctatatgatatgcttactacagactgcattaattcacgaaacgaattctgttatgctgtaatttgaactctcctcaccacaacttattaaaaaggcaccaatagtttcccattaagggtcagttgtggttattattaacgtttctggtttagttccccaagcttgacattctttaatagaaaattgtatatgatttgacaactttagtaatttttaatagtccctaagatggtttattgagttttctttcatgtttctttgtgctgtcttccttcttgcatctgtgatctgtctgccagcatgcaactcacacacatttaggaatataaaaatatgtacactgtctttccatatttcatcacaccatcacagaataatatggttatcaaaataccctcctttctagagtaagaagttgccctttgggtgaaatgtgttagctggactagggaacaattagtaacaggtattttgaaagtattcctgccttttttaagctgcttactttctctcactgtgattacaaagcattttaaattaatttgacatgaaggtatttgatggaagatattcactcacctttttctgcctacagtttttcccttttcactttggttttgagggggttttgcccctggctggggtgacactgtcaaccaaagcaagggatcccaaataggaagacataggagaaccgtgcttatatctgcaaggtatgttcatagctattgcacacacaaaacttacatacgtcctgcttacacaattttaagttggaaaagactgcatctttatgtttttgatttctctaaaaggttatttatgcttccttctgtttgggaaagataaattaagtcttgtgcgctatagaggattttttttctttaagaaaaacgaatgttgatgcattttatagcccgagtgaggaacagagatagaggtactttgtgccattgctattaaagaaaaagaaaatgtctctttttttttctggaagaataagattttaattaaagcacttgcacccttttgtatgtgagctggtctcaaacaaagtcctcacccacagcagtttcagcagctgaacagtcccatggaagttctgactggcaggcatcaacagggctattagcacccagcatagtttgccctgagtacggaggatggatgctttggctctaactactcaccaataattgctccttccttaccttctttgttaatggtaaactgctggaaatggagtagtacaggtaacaattatttttaattgtctttccagaccagtttttggttgtgtgttcagtaaatgatagtctgtatcacagccttcaagtctggattatttttctaaatgcatactctacctgttcagttacactcgttgtggaacaacattagcttatataccagtaagttgtcgagaatggataaccatctgtcattatcactgaccttcaaagactcatcaagcagtccctgcataaggattggagtggtttgaagtttctcttccaagcactaacatgtccctatcccacagtcattttaatttggtatgtgactgtttctttcatttctttcacagataatattatatatacagttatataaatatatttcatattaaatgttatataacacaagagagagaaagtataagtagaaagagtgcctagcaccctaagaaatttaaattaaaatgctaattatccattggtgagtgcagtctcgaggataggtgagtaaactgctctgtgttgaagtcacactgctgacctggttattgtaataaatcacctctttggttaatttaatttagttattttgttattcattgtacatttttgctctggttttagtaatttaattataatttatatcactgttccagggcatagtctcatgatgtgtgtgtgtgtgtgtgtgtgtgtgtgtgtatttttcaaagggtatgtgaacacccagtcatgtttgttctgcctttcaaatgaattttccttccagtttctcctacccgttgcttgttgctaagcatcaggagaggcagtagcagccacaaactgtgacacagttcttccaacttagagtgataccaaccaagtctcctgcatgctctgagagagtctgcgcctgagccagtttcaaatcatagctttgagaataaagagttggctctgttatgaggaaattaaggtcccttgttagtactctttaaaaggagaggtcctcagtgtgcttaataaaaattatagaatttgtcagaagtctaaacttagccaactcccctacaggtcagtacatagcaatttatataatttttaggagaagcaaatggtaaccattttaacgagaccctaaatcatataaagtggttggatattattatatctatatgtttgtgtctgaatatatttatttctgctactcctctgctataatcccaacactggcttacaaaagagcaattcaggcaatggatatgtcacatcattttttttttttttttttatcacttgcggattgctttttaaatgctgtggtatgaataactgggcatttaataaccttgagaatattaattcatttactgatgtgcttattcatttatactcattcttactccaaaaaggatctaagaagactcgcaaagataaaaataatacaagaaaaactaaaatttaaaaaggagagggaattaggaaaaaaggaatcaagggtaggaaagtgagatgaaattggctcttacaaaaaatggtgatgctctcacacttctacgtgaggttggttacaaaaatgtgtcagtgcttttcagcacagacatgtagaataaacacagaagatggacatctgttcccagcacagagagcttctagggtcattaggtttttgttctcagagatattctgattggtaaaggatggggtgtttgactgagtgtggagttggcaacaaaaatattggcctcttttactggagcgtgtccctgaaaaatggacaggagagctaatagacaaacaaaatccacatggaagtgtggtggctgcaaaacgaagttcacagaatttcaggcaaaaacatcatatatgtaatttaccaaacagtggaattagaagaataaaaaccacaagagttggtgaagttgaagaggaaactccatgtggagacacggcgccgtacttcagacctcccggtctactaatactgatggtgtggctggaacctggggtgtgtacagccctatccagaggatgctcctgtttcggctgattcctctacaccttgtgtggggaaggtgggcaccagcggctccctagccgcagcagcctcaagtgcctccgcagccttttcagcttcctcattaaagtaaaaaaaagtgtgttcttctttgaaacctatttaaagtaacaataaagtttactgtctaa

SEQ ID NO: 19074 - DNA, 3647 bp, Homo sapiens
  source 1..3647: mol_type = unassigned DNA
aacacacaatacctagaatttggagaatgctgcaagacagctttgagggcagctaccacttcttttttgcctgtgaaaattggagggaaagaactttgaattggaagaaagaagaacaccaaaagagaaagagagtgaaaggaattccatcctagtgggaatgatttaatgtgttgtattctttagggataagagtgtagaaatccagaaagcacagttctggccagacttacataggtggagcagtagaattgtcgactactattaaaaatgaattgatggtcctttcattgtatgccaaggattcttaaacagtgtgacaaaattaggcaagaacgagatgaagccgttaaaaaactggaagaatttcagaaaatttctcacatggtcatagaggaagttaatttcatgcagaaccatcttgaaatagagaagacttgtcgagaaagtgctgaagctttggcaacaaagctaaataaagaaaataaaacgttgaaaagaatcagcatgttgtacatggccaagctgggaccagatgtaataactgaagagataaacattgatgatgaagattcgactacagacacagacggtgccgccgagacttgtgtctcagtacagtgtcagaagcaaattaaagaacttcgagatcaaattgtatctgttcaggaggaaaagaagattttagccattgagctggaaaatctcaagagcaaactcgtagaagtaattgaagaagtaaataaagttaaacaagaaaagactgttttaaattcagaagttcttgaacagagaaaagtcttagaaaaatgcaatagagtgtccatgttagctgtagaagagtatgaggagatgcaagtaaacctggagctggagaaggaccttcgaaagaaagcagagtcatttgcacaagagatgttcattgagcaaaacaagctaaagagacaaagccaccttctgctgcagagctccatccctgatcagcagcttttgaaagctttagacgaaaatgcaaaactcacccagcaacttgaagaagagagaattcagcatcaacaaaaggtcaaagaattagaagagcaactagaaaatgaaacactccacaaagaaatacacaacctcaaacagcaactggagcttctagaggaagataaaaaggaattggaattgaaatatcagaattctgaagagaaagccagaaatttaaagcactctgttgatgaactccagaaacgagtgaaccagtctgagaattcagtacctccaccacctcctcctccaccaccacttccccctccacctcccaatcctatccgatccctcatgtccatgatccggaaacgatcccaccccagtggcagtggtgctaagaaagaaaaggcaactcaaccagaaacaactgaagaagtcacagatctaaagaggcaagcagttgaagagatgatggatagaattaaaaagggagttcatcttagacccgttaatcagacagccagaccgaagacaaagccagaatcttcgaaaggctgcgaaagtgcagtggatgaactaaaaggaatactggggacacttaacaaatccactagttcaagaagcttaaaatcccttgaccctgaaaacagtgaaactgagttagaaaggattttgcgtcgcagaaaggtgacagcagaagcagatagcagtagtccaactgggatattagccacctcagagtccaaatccatgccagtgttgggttctgtatccagtgtaacaaaaacagccttgaacaagaaaactctggaggcagaattcaacagcccgtcccccccaacacctgagccaggtgaagggccccgtaaattggaaggatgcacaagttccaaggttacgtttcagcctcccagtagcattggatgcaggaaaaaatacattgacggtgaaaaacaagccgaaccagttgtagttttagatcctgtttctacacatgaaccccaaaccaaagaccaggttgctgaaaaagatccaactcaacacaaggaggatgaaggcgaaattcaaccagaaaacaaagaagacagcattgaaaacgtgagagagacagacagctccaactgctgatccataaaccagaagcctgacatgtttggaagtccttttcaataagcacatgattagtgttgttatattggcaagggctgtagacattctgctctggtcactgtattcagaatacaggttcttttctggtgtcacttttgtaagtagcaactataaacataagtaagctgtttagcaaaacacacattcctagtaggttttggttttttgatctttataaagatgaggtttttttcctagttactgtattaagtatgacttcttttagaaggttacaaaaaaattcagatgttgatacctttttaggaaatgtgcataccactcatcaaatggaatgctgaaagtttgaggtgcttgtatataatcggataaacaaaactgatcaacccaatgtgattttaaaagcccccaaagaagcttctgttttgggtctgatcctcttgatggagaaactgcagcagcatggaaattgttgggtactgtggcatacaagttattttctacagtagactgagataaactgaaaactcaggagctggcatcaaactcgtagtcccatagtcagtgttaattacacacattgttaactattggatgaaaaatacatgctattgattgtgtccaaagcctcccgaggacctccgtggggatgctctggtagcctgaatacagaactgaggtgaaagtccaaaccttgaattttacagtagtaagttggtaaaccatgtgctctgtgctatgagttaattatgttttcccaaatactaatgtggcacaagtaccatattttatcagagttcttatgtacagtatggtgaagataagtgacaagcacacatttttcttgcttcactgctgttctatattacacaggtttgttgttgttttttttaaaaaagaaattaagcagtagttagtctctaaaaatacaatgtttcaggctaccacagtgaataaatagaaatgtaatcagggattaaaaaaaaaacttatgcagcttttcaaagttgattgtttcaaaattggtgtttatttaaaataagtggtaatgtacttgaatgcactttttatgacaatgattcagtaatggtaattttactattaaagaaagtgaaaggtttagttttgttagcatggctcagcatgtagctgtcaggtgtttttcacctaagggcaaaagaaaatgatagtaataattgcagtagttgtattgtattgtatttttgcacgtgtggtaagcataggcttgaagaggtgggtaggcaggtacatgtacttcctaaatttggagataattatctttctgtaagttcgttatgcttgactgtttccatgttctcccaataatgattttatagttacttatcactttactcatggagaattaaaacgtaatgtttttcaactgtatctttctttaactggataatactgctatatgatatgcttactacagactgcattaattcacgaaacgaattctgttatgctgtaatttgaactctcctcaccacaacttattaaaaaggcaccaatagtttcccatt

SEQ ID NO: 19075 - DNA, 2190 bp, Homo sapiens
  source 1..2190: mol_type = unassigned DNA
gcgtgctaggaggcgaggcgaggggcatgcgtgctaggaggcgaggcgaggggcatgcgtgctaggaggcgaggcgaggggcatgcgtgctaggaggcgaggcgaggggcatgcgtgctaggaggcgaggcgagggccaggtgctagggctagaaaggaggcagggctggcgctctagggactcctggagctctcctcctgtgagcctggacccggcacctcacgcagcccatctcccacagcttccgtcgacggaggccggggcctcaccaggaaagtggtttgccctccaatcagtggtctgccttcattttccagattgatgaagtctgcctcagagaaggggcaataggcgaatatgaagaccttagagcagagaaccagaaaacaaaggagaagtgtgacaaaattaggcaagaacgagatgaagccgttaaaaaactggaagaatttcagaaaatttctcacatggtcatagaggaagttaatttcatgcagaaccatcttgaaatagagaagacttgtcgagaaagtgctgaagctttggcaacaaagctaaataaagaaaataaaacgttgaaaagaatcagcatgttgtacatggccaagctgggaccagatgtaataactgaagagataaacattgatgatgaagattcgactacagacacagacggtgccgccgagacttgtgtctcagtacagtgtcagaagcaaattaaagaacttcgagatcaaattgtatctgttcaggaggaaaagaagattttagccattgagctggaaaatctcaagagcaaactcgtagaagtaattgaagaagtaaataaagttaaacaagaaaagactgttttaaattcagaagttcttgaacagagaaaagtcttagaaaaatgcaatagagtgtccatgttagctgtagaagagtatgaggagatgcaagtaaacctggagctggagaaggaccttcgaaagaaagcagagtcatttgcacaagagatgttcattgagcaaaacaagctaaagagacaaagccaccttctgctgcagagctccatccctgatcagcagcttttgaaagctttagacgaaaatgcaaaactcacccagcaacttgaagaagagagaattcagcatcaacaaaaggtcaaagaattagaagagcaactagaaaatgaaacactccacaaagaaatacacaacctcaaacagcaactggagcttctagaggaagataaaaaggaattggaattgaaatatcagaattctgaagagaaagccagaaatttaaagcactctgttgatgaactccagaaacgagtgaaccagtctgagaattcagtacctccaccacctcctcctccaccaccacttccccctccacctcccaatcctatccgatccctcatgtccatgatccggaaacgatcccaccccagtggcagtggtgctaagaaagaaaaggcaactcaaccagaaacaactgaagaagtcacagatctaaagaggcaagcagttgaagagatgatggatagaattaaaaagggagttcatcttagacccgttaatcagacagccagaccgaagacaaagccagaatcttcgaaaggctgcgaaagtgcagtggatgaactaaaaggaatactggggacacttaacaaatccactagttcaagaagcttaaaatcccttgaccctgaaaacagtgaaactgagttagaaaggattttgcgtcgcagaaaggtgacagcagaagcagatagcagtagtccaactgggatattagccacctcagagtccaaatccatgccagtgttgggttctgtatccagtgtaacaaaaacagccttgaacaagaaaactctggaggcagaattcaacagcccgtcccccccaacacctgagccaggtgaagggccccgtaaattggaaggatgcacaagttccaaggttacgtttcaataatctgaatcagaaaatactgcaactccttcctccttttgtctgccttttgttctccaaaagtaagtggaaattacatttccaagaaaggaaatgaaataattgcaggcccaaggtctgcaaaatatgtgttgaattgacagtgaaaaggatccatgtgttgacagacacagttgttagatgccataaaggcagatgtgaagctcaatttatttctcatcttgcttg

SEQ ID NO: 19076 - DNA, 358 bp, Homo sapiens
  source 1..358: mol_type = unassigned DNA
ccaaagaattgaagtattcttaatcatgggacgatgcgtgggctcctggaatagctgactaatctttgaatgctgagattttttttccccctcattcctagtttctcacatggtcatagaggaagttaatttcatgcagaaccatcttgaaatagagaagacttgtcgagaaagtgctgaagctttggcaacaaagctaaataaagaaaataaaacgttgaaaagaatcagcatgttgtacatggccaagctgggaccagatgtaataactgaagagataaacattgatgatgaagattcgactacagacacagacggtgccgccgagacttgtgtctcagtacagtgtcagaagcaa

SEQ ID NO: 19077 - DNA, 5308 bp, Homo sapiens
  source 1..5308: mol_type = unassigned DNA
attgcgtcccgctctacctctgtggttctttgggagcgacccccgggaagcgtccaaagtggagttcccacacacgctgcgaacccacagccggttttctctgaactcgcgtccctgagtccgggaggtggaggcggagaaaagggtgcggagcgaccccacgcagggccgccccccctcccaccagcgcgtcctgccgcgccggcagccacaggctggcatagcggctgccgacccgccctcgttcctccaccccctgaacgggactgctgggcccgccccgccccgcctgcaggtgaagcggccgcagccgccgagtaggtgcgtggggatgatctcactcgcgcgctccgcgccaggaggaggaggagcgggagcggatccaacttccgggtagtggagccgcaagccaccggcatcttgctttttcttccccctcctcctgtgtgccccgcgccgctccctctttcccttttattcccggccccacccgccaaaatgaacagctcggacgaagagaagcagctgcagctcattaccagtctgaaggagcaagtgtgacaaaattaggcaagaacgagatgaagccgttaaaaaactggaagaatttcagaaaatttctcacatggtcatagaggaagttaatttcatgcagaaccatcttgaaatagagaagacttgtcgagaaagtgctgaagctttggcaacaaagctaaataaagaaaataaaacgttgaaaagaatcagcatgttgtacatggccaagctgggaccagatgtaataactgaagagataaacattgatgatgaagattcgactacagacacagacggtgccgccgagacttgtgtctcagtacagtgtcagaagcaaattaaagaacttcgagatcaaattgtatctgttcaggaggaaaagaagattttagccattgagctggaaaatctcaagagcaaactcgtagaagtaattgaagaagtaaataaagttaaacaagaaaagactgttttaaattcagaagttcttgaacagagaaaagtcttagaaaaatgcaatagagtgtccatgttagctgtagaagagtatgaggagatgcaagtaaacctggagctggagaaggaccttcgaaagaaagcagagtcatttgcacaagagatgttcattgagcaaaacaagctaaagagacaaagccaccttctgctgcagagctccatccctgatcagcagcttttgaaagctttagacgaaaatgcaaaactcacccagcaacttgaagaagagagaattcagcatcaacaaaaggtcaaagaattagaagagcaactagaaaatgaaacactccacaaagaaatacacaacctcaaacagcaactggagcttctagaggaagataaaaaggaattggaattgaaatatcagaattctgaagagaaagccagaaatttaaagcactctgttgatgaactccagaaacgagtgaaccagtctgagaattcagtacctccaccacctcctcctccaccaccacttccccctccacctcccaatcctatccgatccctcatgtccatgatccggaaacgatcccaccccagtggcagtggtgctaagaaagaaaaggcaactcaaccagaaacaactgaagaagtcacagatctaaagaggcaagcagttgaagagatgatggatagaattaaaaagggagttcatcttagacccgttaatcagacagccagaccgaagacaaagccagaatcttcgaaaggctgcgaaagtgcagtggatgaactaaaaggaatactggggacacttaacaaatccactagttcaagaagcttaaaatcccttgaccctgaaaacagtgaaactgagttagaaaggattttgcgtcgcagaaaggtgacagcagaagcagatagcagtagtccaactgggatattagccacctcagagtccaaatccatgccagtgttgggttctgtatccagtgtaacaaaaacagccttgaacaagaaaactctggaggcagaattcaacagcccgtcccccccaacacctgagccaggtgaagggccccgtaaattggaaggatgcacaagttccaaggttacgtttcagcctcccagtagcattggatgcaggaaaaaatacattgacggtgaaaaacaagccgaaccagttgtagttttagatcctgtttctacacatgaaccccaaaccaaagaccaggttgctgaaaaagatccaactcaacacaaggaggatgaaggcgaaattcaaccagaaaacaaagaagacagcattgaaaacgtgagagagacagacagctccaactgctgatccataaaccagaagcctgacatgtttggaagtccttttcaataagcacatgattagtgttgttatattggcaagggctgtagacattctgctctggtcactgtattcagaatacaggttcttttctggtgtcacttttgtaagtagcaactataaacataagtaagctgtttagcaaaacacacattcctagtaggttttggttttttgatctttataaagatgaggtttttttcctagttactgtattaagtatgacttcttttagaaggttacaaaaaaattcagatgttgatacctttttaggaaatgtgcataccactcatcaaatggaatgctgaaagtttgaggtgcttgtatataatcggataaacaaaactgatcaacccaatgtgattttaaaagcccccaaagaagcttctgttttgggtctgatcctcttgatggagaaactgcagcagcatggaaattgttgggtactgtggcatacaagttattttctacagtagactgagataaactgaaaactcaggagctggcatcaaactcgtagtcccatagtcagtgttaattacacacattgttaactattggatgaaaaatacatgctattgattgtgtccaaagcctcccgaggacctccgtggggatgctctggtagcctgaatacagaactgaggtgaaagtccaaaccttgaattttacagtagtaagttggtaaaccatgtgctctgtgctatgagttaattatgttttcccaaatactaatgtggcacaagtaccatattttatcagagttcttatgtacagtatggtgaagataagtgacaagcacacatttttcttgcttcactgctgttctatattacacaggtttgttgttgttttttttaaaaaagaaattaagcagtagttagtctctaaaaatacaatgtttcaggctaccacagtgaataaatagaaatgtaatcagggattaaaaaaaaaacttatgcagcttttcaaagttgattgtttcaaaattggtgtttatttaaaataagtggtaatgtacttgaatgcactttttatgacaatgattcagtaatggtaattttactattaaagaaagtgaaaggtttagttttgttagcatggctcagcatgtagctgtcaggtgtttttcacctaagggcaaaagaaaatgatagtaataattgcagtagttgtattgtattgtatttttgcacgtgtggtaagcataggcttgaagaggtgggtaggcaggtacatgtacttcctaaatttggagataattatctttctgtaagttcgttatgcttgactgtttccatgttctcccaataatgattttatagttacttatcactttactcatggagaattaaaacgtaatgtttttcaactgtatctttctttaactggataatactgctatatgatatgcttactacagactgcattaattcacgaaacgaattctgttatgctgtaatttgaactctcctcaccacaacttattaaaaaggcaccaatagtttcccattaagggtcagttgtggttattattaacgtttctggtttagttccccaagcttgacattctttaatagaaaattgtatatgatttgacaactttagtaatttttaatagtccctaagatggtttattgagttttctttcatgtttctttgtgctgtcttccttcttgcatctgtgatctgtctgccagcatgcaactcacacacatttaggaatataaaaatatgtacactgtctttccatatttcatcacaccatcacagaataatatggttatcaaaataccctcctttctagagtaagaagttgccctttgggtgaaatgtgttagctggactagggaacaattagtaacaggtattttgaaagtattcctgccttttttaagctgcttactttctctcactgtgattacaaagcattttaaattaatttgacatgaaggtatttgatggaagatattcactcacctttttctgcctacagtttttcccttttcactttggttttgagggggttttgcccctggctggggtgacactgtcaaccaaagcaagggatcccaaataggaagacataggagaaccgtgcttatatctgcaaggtatgttcatagctattgcacacacaaaacttacatacgtcctgcttacacaattttaagttggaaaagactgcatctttatgtttttgatttctctaaaaggttatttatgcttccttctgtttgggaaagataaattaagtcttgtgcgctatagaggattttttttctttaagaaaaacgaatgttgatgcattttatagcccgagtgaggaacagagatagaggtactttgtgccattgctattaaagaaaaagaaaatgtctctttttttttctggaagaataagattttaattaaagcacttgcacccttttgtatgtgagctggtctcaaacaaagtcctcacccacagcagtttcagcagctgaacagtcccatggaagttctgactggcaggcatcaacagggctattagcacccagcatagtttgccctgagtacggaggatggatgctttggctctaactactcaccaataattgctccttccttaccttctttgttaatggtaaactgctggaaatggagtagtacaggtaacaattatttttaattgtctttccagaccagtttttggttgtgtgttcagtaaatgatagtctgtatcacagccttcaagtctggattatttttctaaatgcatactctacctgttcagttacactcgttgtggaacaacattagcttatataccagtaagttgtcgagaatggataaccatctgtcattatcactgaccttcaaagactcatcaagcagtccctgcataaggattggagtggtttgaagtttctcttccaagcactaacatgtccc

SEQ ID NO: 19078 - DNA, 2400 bp, Homo sapiens
  source 1..2400: mol_type = unassigned DNA
attgcgtcccgctctacctctgtggttctttgggagcgacccccgggaagcgtccaaagtggagttcccacacacgctgcgaacccacagccggttttctctgaactcgcgtccctgagtccgggaggtggaggcggagaaaagggtgcggagcgaccccacgcagggccgccccccctcccaccagcgcgtcctgccgcgccggcagccacaggctggcatagcggctgccgacccgccctcgttcctccaccccctgaacgggactgctgggcccgccccgccccgcctgcaggtgaagcggccgcagccgccgagtaggtgcgtggggatgatctcactcgcgcgctccgcgccaggaggaggaggagcgggagcggatccaacttccgggtagtggagccgcaagccaccggcatcttgctttttcttccccctcctcctgtgtgccccgcgccgctccctctttcccttttattcccggccccacccgccaaaatgaacagctcggacgaagagaagcagctgcagctcattaccagtctgaaggagcaagcaataggcgaatatgaagaccttagagcagagaaccagaaaacaaaggagaagtgtgacaaaattaggcaagaacgagatgaagccgttaaaaaactggaagaatttcagaaaatttctcacatggtcatagaggaagttaatttcatgcagaaccatcttgaaatagagaagacttgtcgagaaagtgctgaagctttggcaacaaagctaaataaagaaaataaaacgttgaaaagaatcagcatgttgtacatggccaagctgggaccagatgtaataactgaagagataaacattgatgatgaagattcgactacagacacagacggtgccgccgagacttgtgtctcagtacagtgtcagaagcaaattaaagaacttcgagatcaaattgtatctgttcaggaggaaaagaagattttagccattgagctggaaaatctcaagagcaaactcgtagaagtaattgaagaagtaaataaagttaaacaagaaaagactgttttaaattcagaagttcttgaacagagaaaagtcttagaaaaatgcaatagagtgtccatgttagctgtagaagagtatgaggagatgcaagtaaacctggagctggagaaggaccttcgaaagaaagcagagtcatttgcacaagagatgttcattgagcaaaacaagctaaagagacaaagccaccttctgctgcagagctccatccctgatcagcagcttttgaaagctttagacgaaaatgcaaaactcacccagcaacttgaagaagagagaattcagcatcaacaaaaggtcaaagaattagaagagcaactagaaaatgaaacactccacaaagaaatacacaacctcaaacagcaactggagcttctagaggaagataaaaaggaattggaattgaaatatcagaattctgaagagaaagccagaaatttaaagcactctgttgatgaactccagaaacgagtgaaccagtctgagaattcagtacctccaccacctcctcctccaccaccacttccccctccacctcccaatcctatccgatccctcatgtccatgatccggaaacgatcccaccccagtggcagtggtgctaagaaagaaaaggcaactcaaccagaaacaactgaagaagtcacagatctaaagaggcaagcagttgaagagatgatggatagaattaaaaagggagttcatcttagacccgttaatcagacagccagaccgaagacaaagccagaatcttcgaaaggctgcgaaagtgcagtggatgaactaaaaggaatactggggacacttaacaaatccactagttcaagaagcttaaaatcccttgaccctgaaaacagtgaaactgagttagaaaggattttgcgtcgcagaaaggtgacagcagaagcagatagcagtagtccaactgggatattagccacctcagagtccaaatccatgccagtgttgggttctgtatccagtgtaacaaaaacagccttgaacaagaaaactctggaggcagaattcaacagcccgtcccccccaacacctgagccaggtgaagggccccgtaaattggaaggatgcacaagttccaaggttacgtttcaataatctgaatcagaaaatactgcaactccttcctccttttgtctgccttttgttctccaaaagtaagtggaaattacatttccaagaaaggaaatgaaataattgcaggcccaaggtctgcaaaatatgtgttgaattgacagtgaaaaggatccatgtgttgacagacacagttgttagatgccataaaggcagatgtgaagctcaatttatttctcatcttgcttg

SEQ ID NO: 19079 - DNA, 5361 bp, Homo sapiens
  source 1..5361: mol_type = unassigned DNA
attgcgtcccgctctacctctgtggttctttgggagcgacccccgggaagcgtccaaagtggagttcccacacacgctgcgaacccacagccggttttctctgaactcgcgtccctgagtccgggaggtggaggcggagaaaagggtgcggagcgaccccacgcagggccgccccccctcccaccagcgcgtcctgccgcgccggcagccacaggctggcatagcggctgccgacccgccctcgttcctccaccccctgaacgggactgctgggcccgccccgccccgcctgcaggtgaagcggccgcagccgccgagtaggtgcgtggggatgatctcactcgcgcgctccgcgccaggaggaggaggagcgggagcggatccaacttccgggtagtggagccgcaagccaccggcatcttgctttttcttccccctcctcctgtgtgccccgcgccgctccctctttcccttttattcccggccccacccgccaaaatgaacagctcggacgaagagaagcagctgcagctcattaccagtctgaaggagcaagcaataggcgaatatgaagaccttagagcagagaaccagaaaacaaaggagaagtgtgacaaaattaggcaagaacgagatgaagccgttaaaaaactggaagaatttcagaaaatttctcacatggtcatagaggaagttaatttcatgcagaaccatcttgaaatagagaagacttgtcgagaaagtgctgaagctttggcaacaaagctaaataaagaaaataaaacgttgaaaagaatcagcatgttgtacatggccaagctgggaccagatgtaataactgaagagataaacattgatgatgaagattcgactacagacacagacggtgccgccgagacttgtgtctcagtacagtgtcagaagcaaattaaagaacttcgagatcaaattgtatctgttcaggaggaaaagaagattttagccattgagctggaaaatctcaagagcaaactcgtagaagtaattgaagaagtaaataaagttaaacaagaaaagactgttttaaattcagaagttcttgaacagagaaaagtcttagaaaaatgcaatagagtgtccatgttagctgtagaagagtatgaggagatgcaagtaaacctggagctggagaaggaccttcgaaagaaagcagagtcatttgcacaagagatgttcattgagcaaaacaagctaaagagacaaagccaccttctgctgcagagctccatccctgatcagcagcttttgaaagctttagacgaaaatgcaaaactcacccagcaacttgaagaagagagaattcagcatcaacaaaaggtcaaagaattagaagagcaactagaaaatgaaacactccacaaagaaatacacaacctcaaacagcaactggagcttctagaggaagataaaaaggaattggaattgaaatatcagaattctgaagagaaagccagaaatttaaagcactctgttgatgaactccagaaacgagtgaaccagtctgagaattcagtacctccaccacctcctcctccaccaccacttccccctccacctcccaatcctatccgatccctcatgtccatgatccggaaacgatcccaccccagtggcagtggtgctaagaaagaaaaggcaactcaaccagaaacaactgaagaagtcacagatctaaagaggcaagcagttgaagagatgatggatagaattaaaaagggagttcatcttagacccgttaatcagacagccagaccgaagacaaagccagaatcttcgaaaggctgcgaaagtgcagtggatgaactaaaaggaatactggggacacttaacaaatccactagttcaagaagcttaaaatcccttgaccctgaaaacagtgaaactgagttagaaaggattttgcgtcgcagaaaggtgacagcagaagcagatagcagtagtccaactgggatattagccacctcagagtccaaatccatgccagtgttgggttctgtatccagtgtaacaaaaacagccttgaacaagaaaactctggaggcagaattcaacagcccgtcccccccaacacctgagccaggtgaagggccccgtaaattggaaggatgcacaagttccaaggttacgtttcagcctcccagtagcattggatgcaggaaaaaatacattgacggtgaaaaacaagccgaaccagttgtagttttagatcctgtttctacacatgaaccccaaaccaaagaccaggttgctgaaaaagatccaactcaacacaaggaggatgaaggcgaaattcaaccagaaaacaaagaagacagcattgaaaacgtgagagagacagacagctccaactgctgatccataaaccagaagcctgacatgtttggaagtccttttcaataagcacatgattagtgttgttatattggcaagggctgtagacattctgctctggtcactgtattcagaatacaggttcttttctggtgtcacttttgtaagtagcaactataaacataagtaagctgtttagcaaaacacacattcctagtaggttttggttttttgatctttataaagatgaggtttttttcctagttactgtattaagtatgacttcttttagaaggttacaaaaaaattcagatgttgatacctttttaggaaatgtgcataccactcatcaaatggaatgctgaaagtttgaggtgcttgtatataatcggataaacaaaactgatcaacccaatgtgattttaaaagcccccaaagaagcttctgttttgggtctgatcctcttgatggagaaactgcagcagcatggaaattgttgggtactgtggcatacaagttattttctacagtagactgagataaactgaaaactcaggagctggcatcaaactcgtagtcccatagtcagtgttaattacacacattgttaactattggatgaaaaatacatgctattgattgtgtccaaagcctcccgaggacctccgtggggatgctctggtagcctgaatacagaactgaggtgaaagtccaaaccttgaattttacagtagtaagttggtaaaccatgtgctctgtgctatgagttaattatgttttcccaaatactaatgtggcacaagtaccatattttatcagagttcttatgtacagtatggtgaagataagtgacaagcacacatttttcttgcttcactgctgttctatattacacaggtttgttgttgttttttttaaaaaagaaattaagcagtagttagtctctaaaaatacaatgtttcaggctaccacagtgaataaatagaaatgtaatcagggattaaaaaaaaaacttatgcagcttttcaaagttgattgtttcaaaattggtgtttatttaaaataagtggtaatgtacttgaatgcactttttatgacaatgattcagtaatggtaattttactattaaagaaagtgaaaggtttagttttgttagcatggctcagcatgtagctgtcaggtgtttttcacctaagggcaaaagaaaatgatagtaataattgcagtagttgtattgtattgtatttttgcacgtgtggtaagcataggcttgaagaggtgggtaggcaggtacatgtacttcctaaatttggagataattatctttctgtaagttcgttatgcttgactgtttccatgttctcccaataatgattttatagttacttatcactttactcatggagaattaaaacgtaatgtttttcaactgtatctttctttaactggataatactgctatatgatatgcttactacagactgcattaattcacgaaacgaattctgttatgctgtaatttgaactctcctcaccacaacttattaaaaaggcaccaatagtttcccattaagggtcagttgtggttattattaacgtttctggtttagttccccaagcttgacattctttaatagaaaattgtatatgatttgacaactttagtaatttttaatagtccctaagatggtttattgagttttctttcatgtttctttgtgctgtcttccttcttgcatctgtgatctgtctgccagcatgcaactcacacacatttaggaatataaaaatatgtacactgtctttccatatttcatcacaccatcacagaataatatggttatcaaaataccctcctttctagagtaagaagttgccctttgggtgaaatgtgttagctggactagggaacaattagtaacaggtattttgaaagtattcctgccttttttaagctgcttactttctctcactgtgattacaaagcattttaaattaatttgacatgaaggtatttgatggaagatattcactcacctttttctgcctacagtttttcccttttcactttggttttgagggggttttgcccctggctggggtgacactgtcaaccaaagcaagggatcccaaataggaagacataggagaaccgtgcttatatctgcaaggtatgttcatagctattgcacacacaaaacttacatacgtcctgcttacacaattttaagttggaaaagactgcatctttatgtttttgatttctctaaaaggttatttatgcttccttctgtttgggaaagataaattaagtcttgtgcgctatagaggattttttttctttaagaaaaacgaatgttgatgcattttatagcccgagtgaggaacagagatagaggtactttgtgccattgctattaaagaaaaagaaaatgtctctttttttttctggaagaataagattttaattaaagcacttgcacccttttgtatgtgagctggtctcaaacaaagtcctcacccacagcagtttcagcagctgaacagtcccatggaagttctgactggcaggcatcaacagggctattagcacccagcatagtttgccctgagtacggaggatggatgctttggctctaactactcaccaataattgctccttccttaccttctttgttaatggtaaactgctggaaatggagtagtacaggtaacaattatttttaattgtctttccagaccagtttttggttgtgtgttcagtaaatgatagtctgtatcacagccttcaagtctggattatttttctaaatgcatactctacctgttcagttacactcgttgtggaacaacattagcttatataccagtaagttgtcgagaatggataaccatctgtcattatcactgaccttcaaagactcatcaagcagtccctgcataaggattggagtggtttgaagtttctcttccaagcactaacatgtccc

SEQ ID NO: 19080 - DNA, 2517 bp, Homo sapiens
  source 1..2517: mol_type = unassigned DNA
ccccgcggggctgcagcgagccaggcatgctcactggcgcaggcccggcccgcagcccgagcaggaagcgccggcgctaggcggccccctgcgctgccagctggagccgggcggagccagcgccccggcgcagggtggctctgccagtccccgcgcgcctgggcggccgcacacgtgtccaggcgtcacgtccgcgcgcgcccccggggcttgcgtcagcggctgttccagaagcgggtgggccagggctctgcgcaccgctggggttcggggcccgggacgccgccgggaggagggcaccgcgcggggtccgacgcggaggcgtgctcggaacgccgggggctgcggagtgcatcagcgcggtccagccctccgcctgccgggcgccgagcgtctccgccgcccggacctgggctgggcgccgtggcgttgcctcggagctcgctgcccgcggggcgcgcaccgccttgacccgggcggccccgcggcaggcaggcgcccgcagttccatggttggttcggagcgcgatgagccgcccgtcctccaccggccccagcgctaataaaccctgcagcaagcagccgccgccgcagccccagcacactccgtccccggctgcgcccccggccgccgccaccatctcggctgcgggccccggctcgtccgcggtgcccgccgcggcggcggtgatctcgggccccggcggcggcggcggggccggcccggtgtccccgcagcaccacgagctgacctcgctcttcgagtgtccggtctgctttgactatgtcctgcctcctattctgcagtgccaggccgggcacctggtgtgtaaccaatgccgccagaagttgagctgctgcccgacgtgcaggggcgccctgacgcccagcatcaggaacctggctatggagaaggtggcctcggcagtcctgtttccctgtaagtatgccaccacgggctgttccctgaccctgcaccatacggagaaaccagaacatgaagacatatgtgaataccgtccctactcctgcccatgtcctggtgcttcctgcaagtggcaggggtccctggaagctgtgatgtcccatctcatgcacgcccacaagagcattaccacccttcagggagaagacatcgtctttctagctacagacattaacttgccaggggctgtcgactgggtgatgatgcagtcatgttttggccatcacttcatgctggtgctggagaaacaagagaagtacgaaggccaccagcagttttttgccatcgtcctgctcattggcacccgcaagcaagccgagaactttgcctacagactggagttgaatgggaaccggcggagattgacctgggaggccacgccccgttcgattcatgacggtgtggctgcggccatcatgaacagcgactgccttgttttcgacacagccatagcacatctttttgcagataatgggaaccttggaatcaatgttactatttctacatgttgtccatgatgtgactttcgtaaaccttcaaaattatttgggcatagtgctctatgtttaataaaggtttttatagatgttttattccatatgtcttcacaagtcaggacccacaattacccgtgttttgtttgaacagcagtgtcccatctggcttcgacccaacaaagttcattaacctgggatgaatggggttggcctgttggtgatttggatgctgttctgtgatctaaaacaactcttattgaattgtatttactccctaaacaacacttgacaggctgttgcacagggcttctatagatcagtgtgttaggaatgggaggccccttcctgcctgccttcccatattggtcccttgacattgacaaaagcacagtgactgtcagcagattcctttacttttgtttgtgggaggtaggaattgttttaatgcattttaaacagtgtttctgaaattggatggctggctaatagacactgaatcacccggagtgcttatcttaaaattgcagatttagggagcctgccaatttaacagtctcatcaggtgattcttttcaacagtaatgtttgagaattactgggttaaattgtgggaaagggtccagattttaaaggtgctttaaggttgccctctgccgatactgtttgtctttctactgtttcatcccctaacttcccccaaccctcaaattaaaactagaactatagatccacatgaacgcacgcctgagatttggccactcacctatgttttgggtggattgcctaggaaagcaagtcatatggccattgatagttctcatgtaattagttttgctcaccactagtacagatgacccgtttacacgtggcttccctcggaagccctcctcaacagtagctggtgtgaaagactaaatcagtagagttggaaaagctttataaccggtgtgtcatatgcttgctatttaaagctgtgtgttggttttgtttttctgccacattcactagttttttaataaatattttccaaaaatg

SEQ ID NO: 19081 - DNA, 427 bp, Homo sapiens
  source 1..427: mol_type = unassigned DNA
acttcggcgacgcttccccgagagtagcccccctcctcaacccagaaaagacaaccccgcggggctgcagcgagccagtgccaggccgggcacctggtgtgtaaccaatgccgccagaagttgagctgctgcccgacgtgcaggggcgccctgacgcccagcatcaggaacctggctatggagaaggtggcctcggcagtcctgtttccctgtaagtatgccaccacgggctgttccctgaccctgcaccatacggagaaaccagaacatgaagacatatgtgaataccgtccctactcctgcccatgtcctggtgcttcctgcaagtggcaggggtccctggaagctgtgatgtcccatctcatgcacgcccacaagagcattaccacccttcagggagaagacatcgtctttctagctacagaca

SEQ ID NO: 19082 - DNA, 452 bp, Homo sapiens
  source 1..452: mol_type = unassigned DNA
gagctgagggacgcgtcagccaggcaccccggggtgtggccagaggacttcggcgacgcttccccgagagtagcccccctcctcaacccagaaaagacaaccccgcggggctgcagcgagccaggcatgctcactggcgcaggcccggcccgcagcccgagcaggaagcgccggcgctaggcggccccctgcgctgccagctggagccgggcggagccagcgccccggcgcagggtggctctgccagtccccgcgcgcctgggcggccgcacacgtgtccaggcgtcacgtccgcgcgcgcccccggggcttgcgtcagcggctgttccagaagcggtgccaggccgggcacctggtgtgtaaccaatgccgccagaagttgagctgctgcccgacgtgcaggggcgccctgacgcccagcatcaggaacctggctatggagaaggtggcct

SEQ ID NO: 19083 - DNA, 7057 bp, Homo sapiens
  source 1..7057: mol_type = unassigned DNA
aagccgggctggagcggagtgtctcagaggctgcgctccttccagggcccaaggactcacagcttcctccgctgccttcccggaccaacaaccccccaaaagttgtgatgcttttctttacccagtgctttggggctgtattagatctcattcatctccggtttcagcactacaaggctaaacgggttttctccgctgccgggcaacttgtctgtgtcgtcaaccccacacacaacctaaagtatgtgtccagtcggcgcgccgtcactcagagcgctccagagcaaggcagcttccaccctcaccatctctcccaccaccactgccaccaccgccaccaccaccacctccgccaccacgcccacccccaccaccttcaccaccaggaggcggggctgcacgccaacccggtgacgccctgcctgtgcatgtgtcccttgttctcctgccagtgggaaggccgcctggaggtggtggtgccccacctgcggcagatccatagggttgacatcctccagggagccgagatcgtcttcctggccacggacatgcacctccccgcgccggctgattggatcatcatgcactcctgccttggccaccactttctgttggtgctgaggaaacaggagaggcatgaagggcacccccagttctttgccaccatgatgctgattgggacccccacccaggccgactgcttcacctatcgcctggagctcaacagaaaccatcggcgcctcaagtgggaggccacgccccggtctgttcttgagtgcgtggactcggtgattacggacggggactgcctcgtcctcaacacctcgctggcacagctcttctctgacaacggcagccttgccattgggattgccatcaccgcgacagaggtcctcccctcagaagctgaaatgtgaggccaggagccacggatgctccccacacagcctccctaggaaacgcctgggacctcccaataccaggactccagactcctttttattcttctcctttcttttttttttttttaatttttaattattattatttttttgtctcaggtactttgtgagatttagtttttgtctgccatgggcattatattatgtaaacatcctgtaatttaagatcttggtgtgatgtttgtcctgccttgttggtgttgttttatagaatgtttgtaagatttattcagaatagttttttcctgtcacctccaagtcctttctccgctagttttgaaaggatcaaaacaccatcaagcagactgttggggttgaaaggaggcttcgtgtgagaatcatttcttgtttctcttttcagtctatttcagagcaagctaaatctgaacgtgtgcagtcggcaggttggggaaggggcccagctcagagatggatcacatttcagaccatccagacatgactctgacagcttcccaggaacctcaaggtcaaagctgagctagccgggcatgaggagatcgtgtctccaccgcagggctggggactgggctagaggtgtcattgtgtgctgagtgctcaggttgatgctggggctcaggagagtagtcagaggcccaccttcctgtgacgggctcttgtcaccttgttcccaggctgtgccgtcttctcctgctctggaatcaaagtcctcagatttttgatgctttcttaaaaacccctttgccttctgttgagcaagtagtagaaaagaataggcaagatggggggtggggatgaaaagcaacaggaaaaagagaacataaaattaatctcccatctctgagagggcactccctcctcagagagttttattatcaagttataaaatccatcagttcctccctagggtgcagttctttcatatcatgcaaaaagcagaaccaggactcatcatcaaatgcaaagaactcagagggtggcacccaggatctctgacctggcgggctggtcatcacttacaaacctgggaggctctcttccctttcctcactttctaaaatgctcctaccgtcccattcagcacgcagacgtgaccacggctcaagtatgtattcagcacctgttgcagtatgaatgacacagtgacggaaatccatatttcctctgcgcaggctgctttctcttatttggttgtcagaacaattcatcaacatcttcttgtagaagtctctcgtgtatttgaagaaagtcagcatgtttagtcaactttgtcttttctgttctaagttggacacctataagccttcccagtaggacctcttctagctcctttttatcgcatttgtcccccccctctggctgctctccagacactgcagaagtcaggcaccccatccccagcacattcccatgacagccaaatgggcctttggccaaccagacattactctccgtgccctgttcctgcacctcaccccctcggcttggtcctggcaggcatccaagtgactacttagtctcaggcaggttgccctggctggccatctgcaattttttctccaccaaaaataactgatcctgaaacacaacacccttcccccaacaactgggttaattctccagccacttttggtgccaacttacacccccacgcaccagaagggaggtgccagtcgatacaagatttaataacagaggctgctctggtcacacagtaatcgctgggcccctggggctgagactgcattccgtcagagccctgagaggggcaaaaaacattgccacagatggaggcacatgtcagatgctgcagtcgcaaaaaaggattggggcctgcgcattctttgagctctcagatgccctgccagggcaccagccaccctcctccaatcacacagatgcccaagaacacctgaggctggtccgtctgtgcgtggaaagactggctgtcttcctcctcactgcatccccaatccccttcccagaacctaagacccccttggctgtaagtcttatgcctttagaagccacaggtcctctcctggtttttgagactcaaccactttgaaagcatttgtgtagcatcacaggtgctccagatcaacaaacaaaaacctcactaagaatataactaacattcacagggccttagggctcctgcagacatcacctttgccttctggttgtgccaagttacctgagccacactgggaatgacttcaggttattttcactgcacacaagactgtattatgaataagtgatcccagatgggagcttatatttttgttcctagaaagctttaggacaaagcatgggaaatgtattattatcttccatctatggtgctccccaaaaggcctctccatatccatatgtgaagaactggagaagaaggagcaaactaacaaccaagaattgggaataggaaatggtaccagcagtttgtatttgagcttcacagttcctgaagggctctttgatttgagtctcaggttaatcctcattagtatcctcaatatactaacagaatagaggttctaagacatgaagtgatcttttcaaggtcacacatcaggtggttagaccacaaccaaaacccagatcaactgactgcaaacttggtgttcttgaagtaagactgatccgaaatattcagcagtcttgccagcttaccagtggactgaggacctgagaatcaactgagtctttgtcctgggatagttgagggagcagggagagaaagactggagtagatttgcttttagaagcatctctgctttaagaactaggccagggatggtggctcacgtccataatcccaggactttgggaggccaaggaaggaggattgcttgagctcaggagtttgagaccagcctgggcaatatagcgagacttcatttctacaaaaaaaaaaatcagctgggcatggtgacacaagcctatagtcttaactactcggaggccaagacagggggatggcttgagcccaggaggttgaggtcacagtgagctgtgattgcaccacttgtaactccagcctgggcaacagagtgagaccctatctctttagaaaaaaaaaaaaagcactagtccacctggaagcagggggcccaggaagtgggtgggctgcagatggaggcttcagtgcgccaggccctttctgaatccctttgcccacacccaggtttctcaccttagagtcccaggagtccctgcacagaacgctgggatctggttgcctcattcacaccaaggtgcaagagttaatgactcactctctaaggagtaattgccttttaaaagaaggcctagagagacagcgcacttaacagtgaaaaatgagttaccagtatctgaacttcaggcatctgccagaggtttttttcaggaggtgtggagagaggagcattcctccccttgaggctgagcctacatacatggttgacgccgaaatggaggtcaggccacacgaagattgtctttaacaattggtatctgcatgaatctgtacctggtaaaccccatcactagctgtggctactctggacattttaggaatagatcagcatagtaaccataatagtactcatggctaccacttattgaggcttttctatatgatccagtaggctgcgtactttgaatatagtagatcatgtaatccccataacaaccttagcaagcaggtgctctttattgtattcatgttacgggtgggaaacgtaagctaagagaatttagccaacttgcttaagatcacccagctagcaaatggcagagctgggcctgggaccgggtacgtatggcttctgaccaacagcaaccatgtcatttctatgaacatatggacccaaggctcagaaggaccgagtcataaagtgtgaatggcatagaggccttttagtgctttcatactcaatatggccttttagctcccctttttctccctcttttttcaacccaagacctagtggagtactagagctgcttgtattctggttgttaatctttcaggaattttgcaagctgattgttaattaagtacagtcagtattaaaaatgatatacatttacaattaaataaattatatttaaagcaaaggtcaaaagtacttaaaactcatcacttcctaattatttcactactctttttattctctatgctcctggggttatttacatctatcacatctgtatgatgaacatactatataataatgtgctgcaccgcatcttccagctccacatttagtgacgtcatggtgattgcttgaaattagccatggtggaagtattcataccatggaaattagcaaatgctactagacagggatttttctccctagaaagccagttgttaagcacttaacagtataatcatccctcagtatccttgggggattggttccaggaatctcgtggacactaaaatctgaagatgctcaagtcccttatataaaacggcatagtatttgtatataacctacgcaatcctcccatatactttaaataatctctagagtacttataatacctaatacaatgtaaatgctatgtcaatagtttttatactgcattatttcttattgttgtattatttcttttttttttcctgaatattcttgattcacagttggtggaatccacaggtgtggaacatgtggatacagagggttgacttaataccactgcctagacattgctgatgagcacagcagggtgggagaggggactttggaaggagaagcaaggccctggaaggccgtactgacaagggcataaatgacagccaagccagcggaacagcaaattgttggggaaacacgaactcttctggagaagagactctgaggcttaagcagcttcaagagcattttctgccacagagcaccctctgctttctccccggacacttccctattgctgttagtgtggaaagttctatttggtggctttcatggaaaaattgggctccgcaaactcagcctattggctatcccaatccaaaaagcaaaaccagctctataaagctcaaatttcctgttacttgttcttacaggtcaccctccctacctctttcttacatgctggccaaaacctaaagaaatgttttactttgaaattagaaattggaaatatctaccattcaagagacacagcaagcagtggtgtcaaacaccacataagatgcattatcacaaaagtgggacccccgtaaagcatgaagctgagggacagaaaacataatgagccaaggaatgtcacatgaagaacagggccccgggccttactttcctacttggctacctcacttttttgcaacccagtaaggaccctgttcacaatccatagcctacccagaccaatactctttctaaatctggggcacagtttccactaggacaagagtcactggaaacttccagctaagtccattgaagcaggcagaatcttcaaggtcaatagtgcatcagttactctgatcccagtggtttcagtggaagggatggaagaagtgagggttgctgaagtttctacttggatgcatttctaagggaaaggggaagggatcatgggtgggaccccaaagagttaggctttgattgaggttcagctgcaaatagcatcatgagtggcgtctcctagtcagattgttaaatttcagatttttttgttcataagattttcttcaggaattggtgagttccccattgtgttcacctggaaaatagccagctgaagaaaaacttcactgaaaagaaatctgagagatctagtgtagataaacattaatttccccccaaatcaggtcatcacatgaactacctgggttagaatttgtcttttccaatattttctgaaagtatttcaccttggctactatactataaatactcctcaacctttttcagtcttttttttagggtattgagataagaaagagaaaggaaattgagaagcattttacttgccctgaattaatgtatatataattttctatgctttcttataatgttaaagacaataacttggacaaactcaaactgctacttcatctctgccctctcatagaaaatgtcattaaattgcatttgatattgtttccttcg

SEQ ID NO: 19084 - DNA, 5080 bp, Homo sapiens
  source 1..5080: mol_type = unassigned DNA
acatatttacatacatacacatatggtgagggagagaacgtgatgacgtgagactctccatggagagtaggaggtaataaagaaataaaacaggtgtctgaggagaggttctattagagaggggagaatagagagtaattatcgttcagacaggcaagagttctctgcaggtagcagcctgggaaagcgaactcgcgcaccctcttgggggacgggctcttttgctttctatttcttctcctgcagccagggtgcacacgtatttgaaacagaccgaatttcctcctcgatgtggcgtcaggttgacttttcgagactagcgggtatttctttttaatgactccaatgcctttttattattgctgttattgaggttgagggagaagagatcggtctaaattctggctgggtaagtggggggattctcggcgatgagaaacgggggacttagaagccggaggaaaatcagcagccccacatctccacttctccagtccgccctactctccacccgtgacctccagtggagaccccaggcggcagcatcagtatttgatcggcccttcgtcagcacgctgccagccctggccggctgggttcgccaggcatcacccgctcggctctgaagcggacgcctggccctgcaccgggctttggaaggaccctctctgcgctcgccccctccccagggtggctccgctttcgagcccgggcgcggtgcccaccatgcgcggctgcctgcggctcgcgctgctctgcgcgctgccctggctcctgctggcggcgtcgcccgggcacccggcgaaatcccccaggcagcccccggcaccgcgccgcgaccccttcgacgctgccaggggcgccgatttcgatcatgtctacagcggggtggtgaacctcagcaccgagaacatctactctttcaactacaccagccagcccgaccaggtgacagccgtgagggtgtatgtgaacagttcctctgagaatctcaactacccggtccttgttgtggttcgccagcagaaagaggtgctgtcctggcaggttcctctgctcttccaaggactataccagaggagctacaactatcaagaagtgagccgcaccttatgtccctcagaagcaaccaatgagacgggacccttgcagcaactgatatttgtagatgtcgcatccatggcacccctgggtgctcagtacaaactgctagttaccaagctgaagcacttccagctccggacaaatgttgcctttcactttactgccagcccctctcaacctcagtattttctatacaagtttcccaaagacgtggactcagttatcattaaagtggtgtctgaaatggcttatccatgttctgttgtctcagtccagaatatcatgtgcccggtgtatgatctcgaccacaatgtggaatttaatggtgtctatcagtccatgaccaagaaagctgccatcacgctacagaagaaggattttccaggcgagcagttcttcgtggtatttgtgataaagcctgaagattatgcctgtggaggatctttcttcatccaggaaaaggaaaaccagacctggaatctacagcgaaaaaagaaccttgaagtgaccattgtcccttccattaaagaatctgtttatgtgaaatccagtcttttcagtgtcttcatcttcctgtccttctacttgggatgccttcttgttgggtttgttcattatctgaggtttcagagaaaatccattgatggaagctttgggtccaatgatggctctggaaatatggtggcatctcatcccattgctgccagcacacccgaagggagcaattatgggacaatagatgagtcaagctccagtcctggaaggcagatgtcctcctccgatggtgggccaccgggccagtcagacacagacagctccgtggaggagagcgacttcgacaccatgccagacattgagagtgataaaaacatcatccggaccaagatgttcctttacctgtcagatttgtccaggaaggaccggagaattgtcagcaaaaaatataaaatttatttttggaacatcatcaccattgctgtgttttacgcgctgcccgtgatccagctggtcattacctatcagacagtggtaaatgtcactggcaaccaggacatctgttactacaacttcctctgtgctcaccccttgggcgtcctgagtgccttcaacaacattctcagcaatctgggccacgtgcttctgggcttcctcttcctgctgatagtcttgcgccgcgacatcctccatcggagagccctggaagccaaggacatctttgctgtggagtacgggattcccaaacactttggtctcttctacgctatgggcattgcattgatgatggaaggggtgctcagtgcttgctaccatgtctgccctaattattccaacttccaattcgacacctccttcatgtacatgatcgctggcctgtgcatgctgaagctctatcagacccgccacccagacatcaatgccagcgcctactctgcctatgcctcctttgctgtggtcatcatggtcaccgtccttggagtggtgtttggaaaaaatgacgtatggttctgggtcatcttctctgcaatccacgttctggcctcgctagccctcagcacccagatatattatatgggtcgtttcaagatagatttgggaattttccggcgggctgccatggtgttctacacagactgtatccagcagtgtagccgacctctatatatggatagaatggtgttgctggttgtggggaatctggttaactggtccttcgccctctttggattgatataccgccccagggactttgcttcctacatgctgggcatcttcatctgtaaccttttgctgtacctggccttttacatcatcatgaagctccgcagctctgaaaaggtcctcccagtcccgctcttctgcatcgtggccaccgctgtgatgtgggctgccgccctatattttttcttccagaatctcagcagctgggagggaactccggccgaatcccgggagaagaaccgcgagtgcattctgctggatttcttcgatgaccatgacatctggcacttcctctctgctactgctctgtttttctcattcttggttttgttaactttggatgatgaccttgatgtggttcggagagaccagatccctgtcttctgaacctccaacattaagagaggggagggagcgatcaatcttggtgctgtttcacaaaaattacagtgaccacagcaaagtaaccactgccagatgctccactcaccctctgtagagccaactctgcattcacacaggaaggagaggggctgcgggagatttaaacctgcaagaaaggaggcagaaggggagccatgttttgaggacagacgcaaacctgaggagctgagaaacacttgctccttccatctgcagctttgggagtgcaacagggataggcactgcatccaagtcaactcaccatcttggggtccctcccaccctcacggagacttgccagcaatggcagaatgctgctgcacacttccctccagttgtcaccctgcccagaaaggccagcagcttggacttcctgcccagaaactgtgttggcccccttcacacctctgcaacacctgctgctccagcaagaggatgtgattctttagaatatggcggggaggtgaccccaggccctgccctactgggatagatgttttaatggcaccagctagtcacctcccagaagaaactctgtatatttcccccaggtttctgatgccatcagaagggctcaggagtggggtttgtcacacattcctcttaacaagtaactgtcactgggaccgagtcctgggtgcttacatattccttcgtgtcttcatctcactgacctgtgtggacctcatcactctgactctgccttcttggaaaggccctgtcactccacagatgtctggccagcttcaaggcagaaggaaaaacaggaaaagctcttttaacagcagcaggaacaagagaaatgactaaccatactaaaagactggtaacagcagcagcagccagacaggcctcaccttaaggacttgggctgccagagcaaattcagcagagcttatttggcctcccattcacacagctcagttctgtgcccacatcacctttggggaagaaatcagcattctaatcagggacactacttcaggagtcctccacagcgagtccgtcatctgtcactttatgtagatcagggttctagacttcttccctgaggttctcagaagcagctctcaggatgaacgtattgtcctcttcccctcttcttgcaaagtgcacagctaatctaatgttgtctctcggttgcacctgacattctctccccagtaaggtgttggcaagctcagcatctgggttccactctcacactgtctggcagctctgtgtctgagaagttctacattgaccaggcccccttgttgcctggagtatgacgtaatcagaaaatagacgtataaatgtgcacatgcgtatgtatttgcttgtgaaattaaagtcacctcttgcctctgctttcctgatcattcgttagagaaatggatcaggcatttttttaaattattattctttctctaaactatttgcattgtgttcaaaaacccattttagaagtttgaacagcaagcttttcctgattttaaaaacacaaagttgctttcaatgaaatattttgtgatttttttaaagtccccaaatgtgtacttagccttctgttattccttattctttaagcagtgttggcttccattgaccatatgaaggccaccaattaaatggttgtgttaatccaacatgtaaaaaactttttggcagggcacagtggctcacgcctgtaatcccaacactttgggaggctgaggcaggaggatcacttgagcccaggagattgacgccgcagtgaactatgattgtgcccctgcactccagcctggatgacagagtgagaccccatctcttaaaaaataaaaaaaaataaaaatttgaacctgtttcacta

SEQ ID NO: 19085 - DNA, 1645 bp, Homo sapiens
  source 1..1645: mol_type = unassigned DNA
gtatttgaaacagaccgaatttcctcctcgatgtggcgtcaggttgacttttcgagactagcgggtatttctttttaatgactccaatgcctttttattattgctgttattgaggttgagggagaagagatcggtctaaattctggctgggtaagtggggggattctcggcgatgagaaacgggggacttagaagccggaggaaaatcagcagccccacatctccacttctccagtccgccctactctccacccgtgacctccagtggagaccccaggcggcagcatcagtatttgatcggcccttcgtcagcacgctgccagccctggccggctgggttcgccaggcatcacccgctcggctctgaagcggacgcctggccctgcaccgggctttggaaggaccctctctgcgctcgccccctccccagggtggctccgctttcgagcccgggcgcggtgcccaccatgcgcggctgcctgcggctcgcgctgctctgcgcgctgccctggctcctgctggcggcgtcgcccgggcacccggcgaaatcccccaggcagcccccggcaccgcgccgcgaccccttcgacgctgccaggggcgccgatttcgatcatgtctacagcggggtggtgaacctcagcaccgagaacatctactctttcaactacaccagccagcccgaccaggtgacagccgtgagggtgtatgtgaacagttcctctgagaatctcaactacccggtccttgttgtggttcgccagcagaaagaggtgctgtcctggcaggttcctctgctcttccaaggactataccagaggagctacaactatcaagaagtgagccgcaccttatgtccctcagaagcaaccaatgagacgggacccttgcagcaactgatatttgtagatgtcgcatccatggcacccctgggtgctcagtacaaactgctagttaccaagctgaagcacttccagctccggacaaatgttgcctttcactttactgccagcccctctcaacctcagtattttctatacaagtttcccaaagacgtggactcagttatcattaaagtggtgtctgaaatggcttatccatgttctgttgtctcagtccagaatatcatgtgcccggtgtatgatctcgaccacaatgtggaatttaatggtgtctatcagtccatgaccaagaaagctgccatcacgctacaggtgaggcattgcttctgtgggcattattgccaatggtaatgctcaatagatagtgtacttactgggccagcatccaaaagggatggccatccatgatgtgcctaggatctccttcctttctgattggtttaaaaactaatatgtctggccaggcgcagtggctcacacctgtaatcctagcactttgggaggccaaggcgagcggatcacctaaagtcaggagtttgagaccagcctggccaatatggcaaaaccctgtctccactaaaaatacaaaaattagctgggcttggtggtgcacacctgcaatcccagctactcaggaggctgaggcaggagagtctcttgaacccaagaggcagaggttgaagtgagccaagagcacagcactgcactccagcctgggcgacaacagcaaaactccattgaaa

SEQ ID NO: 19086 - DNA, 566 bp, Homo sapiens
  source 1..566: mol_type = unassigned DNA
cagcggggtggtgaacctcagcaccgagaacatctactctttcaactacaccagccagcccgaccaggtgacagccgtgagggtgtatgtgaacagttcctctgagaatctcaactacccggtccttgttgtggttcgccagcagaaagaggtgctgtcctggcaggttcctctgctcttccaaggactataccagaggagctacaactatcaagaagtgagccgcaccttatgtccctcagaagcaaccaatgagacgggacccttgcagcaactgatatttgtagatgtcgcatccatggcacccctgggtgctcagtacaaactgctagttaccaagctgaagcacttccagctccggtaagcgggactttctctgtttacctgtctgtgtttcctgtgcttgtggatgctcaattcatcttccatccttacagactggtactctggaaggaaattatccacttagcatatgattttagcacttcctgaactctcctgcccataactgagcagcagggccttaatctatacaaaagagtgggagtgcagaaggtaagagtggt

SEQ ID NO: 19087 - DNA, 648 bp, Homo sapiens
  source 1..648: mol_type = unassigned DNA
attttttttaaaccagaaaaggaaaaccagacctggaatctacagcgaaaaaagaaccttgaagtgaccattgtcccttccattaaagaatctgtttatgtgaaatccagtcttttcagtgtcttcatcttcctgtccttctacttgggatgccttcttgttgggtttgttcattatctgaggtttcagagaaaatccattgatggaagctttgggtccaatgatggctctggaaatatggtggcatctcatcccattgctgccagcacacccgaagggagcaattatgggacaataggtatgtcctaccaggtctgttcatgaaagtgtttcctaattctgcagagaatatgatagaaaggcattccagccactaataactgggaatgtgggcaaagcagctatcctatgagattgtcttttatttgtaagatgagttgcttggagatttggaagcttcctcccagctctaactttctccagttctgttgttctgtttcttggatctgctagccccacttgggcagaattccttcaatgtttgccatctaatactaaggccccctagggactttttcatatccagcccgggtttagggcatgaaagatgtgtcccagggagcctgacatcaattgaccagttgtttc

SEQ ID NO: 19088 - DNA, 704 bp, Homo sapiens
  source 1..704: mol_type = unassigned DNA
tcagcctcccaagtagctgggactacaggcacctgccatcacgcccagctaatttttgtatttttattagagacggggtttcaccatattggccaggctggtcttgaactcctgactttgtgatccgcctgccttggcctcccaaagtgctgggattacaggtgtgtgccaccgcacctggccccaaagacatgttttgaagagatcctagtagacaaatccgcaacaaaatctataaggaacaaatgtaaaatgctgaggttttcactgtcttaggagcatgtgtatgtgcttgtttgcaggtttcagagaaaatccattgatggaagctttgggtccaatgatggctctggaaatatggtggcatctcatcccattgctgccagcacacccgaagggagcaattatgggacaatagatgagtcaagctccagtcctggaaggcagatgtcctcctccgatggtgggccaccgggccagtcagacacagacagctccgtggaggagagcgacttcgacaccatgccagacattgagagtgataaaaacatcatccggaccaagatgttcctttacctgtcagatttgtccaggaaggaccggagaattgtcagcaaaaaatataaaatttatttttggaacatcatcaccattgctgtgttttacgcgctgcccgtgatccagctggtcattacctatcagac

SEQ ID NO: 19089 - DNA, 361 bp, Homo sapiens
  source 1..361: mol_type = unassigned DNA
ttttccccagtcatttaaaggtttgaaaactaatcttagttgaagagccatacagaaacaggtggcaggctagatttggcagatgggtcatagttttggtgactcctgtattagtgtaaaaagaaaatcaaacctaaaataatgtgccctgatgattcaagctacttagaatagtgttgttttgttttagcaactggacataaagtgtttgcctcttcactttttttaacaggctctggaaatatggtggcatctcatcccattgctgccagcacacccgaagggagcaattatgggacaatagatgagtcaagctccagtcctggaaggcagatgtcctcctccgatggtgggccaccgg

SEQ ID NO: 19090 - DNA, 1471 bp, Homo sapiens
  source 1..1471: mol_type = unassigned DNA
atctgaacagaagaaataaagcggaagatgagtcaagctccagtcctggaaggcagatgtcctcctccgatggtgggccaccgggccagtcagacacagacagctccgtggaggagagcgacttcgacaccatgccagacattgagagtgataaaaacatcatccggaccaagatgttcctttacctgtcagatttgtccaggaaggaccggagaattgtcagcaaaaaatataaaatttatttttggaacatcatcaccattgctgtgttttacgcgctgcccgtgatccagctggtcattacctatcagacatgccttcaacaacattctcagcaatctgggccacgtgcttctgggcttcctcttcctgctgatagtcttgcgccgcgacatcctccatcggagagccctggaagccaaggacatctttgctgtggagtacgggattcccaaacactttggtctcttctacgctatgggcattgcattgatgatggaaggggtgctcagtgcttgctaccatgtctgccctaattattccaacttccaattcgacacctccttcatgtacatgatcgctggcctgtgcatgctgaagctctatcagacccgccacccagacatcaatgccagcgcctactctgcctatgcctcctttgctgtggtcatcatggtcaccgtccttggagtggtgtttggaaaaaatgacgtatggttctgggtcatcttctctgcaatccacgttctggcctcgctagccctcagcacccagatatattatatgggtcgtttcaagatagatgtgtctgacacagcagatttgggaattttccggcgggctgccatggtgttctacacagactgtatccagcagtgtagccgacctctatatatggatagaatggtgttgctggttgtggggaatctggttaactggtccttcgccctctttggattgatataccgccccagggactttgcttcctacatgctgggcatcttcatctgtaaccttttgctgtacctggccttttacatcatcatgaagctccgcagctctgaaaaggtcctcccagtcccgctcttctgcatcgtggccaccgctgtgatgtgggctgccgccctatattttttcttccagaatctcagcagctgggagggaactccggccgaatcccgggagaagaaccgcgagtgcattctgctggatttcttcgatgaccatgacatctggcacttcctctctgctactgctctgtttttctcattcttggttttgttaactttggatgatgaccttgatgtggttcggagagaccagatccctgtcttctgaacctccaacattaagagaggggagggagcgatcaatcttggtgctgtttcacaaaaattacagtgaccacagcaaagtaaccactgccagatgctccactcaccctctgtagagccaactctgcattcacaca

SEQ ID NO: 19091 - DNA, 532 bp, Homo sapiens
  source 1..532: mol_type = unassigned DNA
gttcatattttaacatatgaaacatgaaatagaagtataatattatttttgtatccaaatagttaacagagcagatgcccttagattctaatatgtgttcagtcctgaagatagccaagttaaatataaaaacaggagaagaggaaaaataaaagtccattgagaaggaatagagagaaagaacaggtcttgtgaatgagaagttcatttggatcaacacagcatttcctagaatgagtctgcactgtgctttttgcagagacgaatgggctccgtaggctctccacggcttttgatggcagatgagttgtctctgtttcagatgagtcaagctccagtcctggaaggcagatgtcctcctccgatggtgggccaccgggccagtcagacacagacagctccgtggaggagagcgacttcgacaccatgccagacattgagagtgataaaaacatcatccggaccaagatgttcctttacctgtcagatttgtccaggaaggaccggagaattgtcagcaaaaaatataaaa

SEQ ID NO: 19092 - DNA, 733 bp, Homo sapiens
  source 1..733: mol_type = unassigned DNA
gtgtgttaatgatctaataatatttagtcaattgcatacttattatgcagtgagaaaaaggacttcatgaggtttgagcaccactgtttataatctaaatcttctctgcatactttgggggactgtcagaagatacacctggactgtggtttgggaaagttcttgacagagatggtgataaatagggaaagctgaacacacatctcctcgtgtctacctgcctcatgtttaccatttctacccagaggatgggacagctctatatcccctctgcagtaacctagaaaataagacatagtgtgacagtcctgaaaggccccaatgttcgcattctttcgtagtccttttatcataacaaaggaaatgcaattggatgaattccaccttggggctgcataagagggtacacagaatattcccattcaaagcaagatggtaacttttttgtaaaaaaagtgcctgtgctgtgtaaggtggcagataatggcccatctgtgcagaggagcactggttacattgtaaactagtgacagtgcatctccgtgagccctgtctgctctttgtgttcctgctggggctcagaggacggaggaaaaccacatttcctcttctcactcttgattttacaggtggtaaatgtcactggcaaccaggacatctgttactacaacttcctctgtgctcaccccttgggcgtcctgagtgccttcaacaacattctcagcaatctggg

SEQ ID NO: 19093 - DNA, 386 bp, Homo sapiens
  source 1..386: mol_type = unassigned DNA
accttgggccacttcagagtatttgtatttttgttgactaagccttctcaccatgcatttgtattatcagcagatttgggaattttccggcgggctgccatggtgttctacacagactgtatccagcagtgtagccgacctctatatatggatagaatggtgttgctggttgtggggaatctggttaactggtccttgtaagtagtcttatgaaaacatgtttttgcctttattaatgtcagtaacactgtggtttagctttccttgactgtcatttttacaaagaaatctgaaattaaggagaaggtaggactgcttgttctagagactcaaaaaaaggtagtaggacattctcgtgtagcaattgtagcctctcttaaaacact

SEQ ID NO: 19094 - DNA, 577 bp, Homo sapiens
  source 1..577: mol_type = unassigned DNA
atttttgctttggttgcctgtgcttttgaggtctttgtgtacaggtttttgtgtggatggatgttttcttggaagctaacttttcgaaccagacatctagtagcgtttttgtggctttctggacgttcaactctttgaacagttgaactgtgggaatcttgcccatgtcctgcctcaccttcctccagggaactccggccgaatcccgggagaagaaccgcgagtgcattctgctggatttcttcgatgaccatgacatctggcacttcctctctgctactgctctgtttttctcattcttggttttgttaactttggatgatgaccttgatgtggttcggagagaccagatccctgtcttctgaacctccaacattaagagaggggagggagcgatcaatcttggtgctgtttcacaaaaattacagtgaccacagcaaagtaaccactgccagatgctccactcaccctctgtagagccaactctgcattcacacaggaaggagaggggctgcgggagatttaaacctgcaagaaaggaggcagaaggggagccatgttttgaggacagacgcaa

SEQ ID NO: 19095 - DNA, 2572 bp, Homo sapiens
  source 1..2572: mol_type = unassigned DNA
agggtggctccgctttcgagcccgggcgcggtgcccaccatgcgcggctgcctgcggctcgcgctgctctgcgcgctgccctggctcctgctggcggcgtcgcccgggcacccggcgaaatcccccaggcagcccccggcaccgcgccgcgaccccttcgacgctgccaggggcgccgatttcgatcatgtctacagcggggtggtgaacctcagcaccgagaacatctactctttcaactacaccagccagcccgaccaggtgacagccgtgagggtgtatgtgaacagttcctctgagaatctcaactacccggtccttgttgtggttcgccagcagaaagaggtgctgtcctggcaggttcctctgctcttccaaggactataccagaggagctacaactatcaagaagtgagccgcaccttatgtccctcagaagcaaccaatgagacgggacccttgcagcaactgatatttgtagatgtcgcatccatggcacccctgggtgctcagtacaaactgctagttaccaagctgaagcacttccagctccggacaaatgttgcctttcactttactgccagcccctctcaacctcagtattttctatacaagtttcccaaagacgtggactcagttatcattaaagtggtgtctgaaatggcttatccatgttctgttgtctcagtccagaatatcatgtgcccggtgtatgatctcgaccacaatgtggaatttaatggtgtctatcagtccatgaccaagaaagctgccatcacgctacagaagaaggattttccaggcgagcagttcttcgtggtatttgtgataaagcctgaagattatgcctgtggaggatctttcttcatccaggaaaaggaaaaccagacctggaatctacagcgaaaaaagaaccttgaagtgaccattgtcccttccattaaagaatctgtttatgtgaaatccagtcttttcagtgtcttcatcttcctgtccttctacttgggatgccttcttgttgggtttgttcattatctgaggtttcagagaaaatccattgatggaagctttgggtccaatgatggctctggaaatatggtggcatctcatcccattgctgccagcacacccgaagggagcaattatgggacaatagatgagtcaagctccagtcctggaaggcagatgtcctcctccgatggtgggccaccgggccagtcagacacagacagctccgtggaggagagcgacttcgacaccatgccagacattgagagtgataaaaacatcatccggaccaagatgttcctttacctgtcagatttgtccaggaaggaccggagaattgtcagcaaaaaatataaaatttatttttggaacatcatcaccattgctgtgttttacgcgctgcccgtgatccagctggtcattacctatcagacagtggtaaatgtcactggcaaccaggacatctgttactacaacttcctctgtgctcaccccttgggcgtcctgagtgccttcaacaacattctcagcaatctgggccacgtgcttctgggcttcctcttcctgctgatagtcttgcgccgcgacatcctccatcggagagccctggaagccaaggacatctttgctgtggagtacgggattcccaaacactttggtctcttctacgctatgggcattgcattgatgatggaaggggtgctcagtgcttgctaccatgtctgccctaattattccaacttccaattcgacacctccttcatgtacatgatcgctggcctgtgcatgctgaagctctatcagacccgccacccagacatcaatgccagcgcctactctgcctatgcctcctttgctgtggtcatcatggtcaccgtccttggagtggtgtttggaaaaaatgacgtatggttctgggtcatcttctctgcaatccacgttctggcctcgctagccctcagcacccagatatattatatgggtcgtttcaagatagatgtgtctgacacagatttgggaattttccggcgggctgccatggtgttctacacagactgtatccagcagtgtagccgacctctatatatggatagaatggtgttgctggttgtggggaatctggttaactggtccttcgccctctttggattgatataccgccccagggactttgcttcctacatgctgggcatcttcatctgtaaccttttgctgtacctggccttttacatcatcatgaagctccgcagctctgaaaaggtcctcccagtcccgctcttctgcatcgtggccaccgctgtgatgtgggctgccgccctatattttttcttccagaatctcagcagctgggagggaactccggccgaatcccgggagaagaaccgcgagtgcattctgctggatttcttcgatgaccatgacatctggcacttcctctctgctactgctctgtttttctcattcttggttttgttaactttggatgatgaccttgatgtggttcggagagaccagatccctgtcttctgaacctccaacattaagagaggggagggagcgatca

SEQ ID NO: 19096 - DNA, 4220 bp, Homo sapiens
  source 1..4220: mol_type = unassigned DNA
ggaggtggtagagtgcagcttcaacatttgtgtggtctctttgctcaagccagatggcatgttccaccccacatggaagtaacagaagactacccagaaaatgtcatttctctctacctacaaggactccaacactctgcacctccctacggagcgtttctcccctgtgcgccggttctcagatggggctgcgagcatccaggccttcaaagctcacctggaaaaaatgggcaacaacagcagcatcaaacagctgcagcaggagtgtgagcagctgcagaagatgtacggggggcagattgatgaaagaaccctggagaagacccagcagcagcatatgttataccagcaggagcagcaccatcaaattctccagcaacaaattcaagactctatctgtcctcctcagccatctccacctcttcaggctgcatgtgaaaatcagccagccctccttacccatcagctccagaggggctgcatcttcttcccagtttcaaggcttaccttcccgcagtgcaatctttcagcagcaacctgagaactgttcctctcctcccaacgtggcactaacctgcttgggtatgcagcagcctgctcagtcacagcaggtcaccatccaagtccaagagcctgttgacatgctcagcaacatgccaggcacagctgcaggctccagtgggcgcggcatctccatcagccccagtgctggtcagatgcagatgcagcaccgtaccaacctgatggccaccctcagctatgggcaccgtcccttgtccaagcagctgagtgctgacagtgcagaggctcacagtgcacatcagcagccgccacactataccacgtcggcactacagcaggccctgctgtctcccacgccgccagactatacaagacaccagcaggtaccccacatccttcaaggactgctttctccccggcattcgctcaccggccactcggacatccggctgcccccaacagagtttgcacagctcattaaaaggcagcagcaacaacggcagcagcagcagcaacagcagcaacagcaagaataccaggaactgttcaggcacatgaaccaaggggatgcggggagtctggctcccagccttgggggacagagcatgacagagcgccaggctttatcttatcaaaatgctgactcttatcaccatcacaccagcccccagcatctgctacaaatcagggcacaagaatgtgtctcacaggcttcctcacccaccccgccccacgggtatgctcaccagccggcactgatgcattcagagagcatggaggaggactgctcgtgtgagggggccaaggatggcttccaagacagtaagagttcaagtacattgaccaaaggttgccatgacagccctctgctcttgagtaccggtggacctggggaccctgaatctttgctaggaactgtgagtcatgcccaagaattggggatacatccctatggtcatcagccaactgctgcattcagtaaaaataaggtgcccagcagagagcctgtcatagggaactgcatggatagaagttctccaggacaagcagtggagctgccggatcacaatgggctcgggtacccagcacgcccctccgtccatgagcaccacaggccccgggccctccagagacaccacacgatccagaacagcgacgatgcttatgtacagctggataacttgccaggaatgagtctcgtggctgggaaagcacttagctctgcccggatgtcggatgcagttctcagtcagtcttcgctcatgggcagccagcagtttcaggatggggaaaatgaggaatgtggggcaagcctgggaggtcatgagcacccagacctgagtgatggcagccagcatttaaactcctcttgctatccatctacgtgtattacagacattctgctcagctacaagcaccccgaagtctccttcagcatggagcaggcaggcgtgtaacaagaaacagagagttttgtgtacagcttgggaatgaaaaggttgattgtaaacccacagtatctagcagcgttgtgccaaattgcccttgtgtttctctccacccaaaatatcacagctgctttcctcacatttggttcatccgtgtgctgttcttttgggttctgagagggttttgccatgtttgcttgtatgaccaagtcaccaaggaaataaacaggaaggaaatccatgttctccatcttttgtgaaagtatatttgagttggtggttttttgttttgtttgggggtttgtgttttgttttgtttttggtatgttttcttccagaggtgatatactttcttttttttcttcctttcttttttttctttcgttccttttttgaaacaggagagcaaagcagttagagttcagaggccagcggcctcagggccactccctccctagccttcatcagcagagcaccctccatccccctgcattgctcttctgtgaaagcaaatactaaaggatgccatcctctggaatcctaatggcaggcaaagggagagaggaagggtgacggcttctggcacttagaaaacaaaaagaacaaaaaaagagaaacccccaagcctggaacgcagagaggtctttactgctgggatccacggaaaacatgtctgtcctagccaagatcatatgaagagtttggcacggaggctgagaatgacctggcatagatggtttgccagttaggatgtctcaatttgagcctttgcttttggtggataactcagctcccctcttgtaacctggaaagttggttgcctttatcatcctgctggttttatccatggactgaacacccaacagcagtgcactatgctttctatggcatctttcattctcattttatattgtgctataaaaaggattgtttctccatatatatattatatatgtgtgtatatatataatataatatatgtgtatatatatattatatatataatatataatataatatattatatatatattatatatataatatatatataaaatatatatatatatgctctcctctttcagcctctttgtcacagggaagaagtgtaggaggttgccttgggccctgcctctctcctaacctcctcttccccactgggtaccctcagcccctatattttaattcttgatcatgtagaaattgtttttggtaaatgttgatattattgttattatcattattaataaataaagagaaaaggaatttttgtttaaatgagaaatgtttaaccagattctgttctatttgaattgtgacttgcaccttttgttcaaagtatttcctttaggcattgtaattgtgaacagctcttacttgtgccagtgacagatgcagtggtctcctttccccagttgaagcagtgcatacgcagtagctattatttgtgttatctttatttctcttcattgttagaaaccaaagtcttctctgctggctggggctgagagagggtctgggttatctccttctgatcttcaaaacaagagagagaccttgaatacactgactcttccaccctttttttttctgggaaaggagagcaagaggtcccgagtcccctcctagtctttcatcctgaatttgcacagaggaaagcgggtgcccggcatggccatcctgatgttgctggcgggatccccatgcaccttgtccttctccactgatactggcagctcggctcctggacccaagatcccttgagtggaattctgcagtgcaagagcccttcgtgggagctgtcccatgtttccatggtccccagtctcccctccacttggtggggtcaccaactactcaccagaagggggcttaccaagaaagccctaaaaagctgttgacttatctgcgcttgttccaactcttatgcccccaacctgccctaccaccaccacgcgctcagcctgatgtgtttacatggtactgtatgtatgggagagcagactgcaccctccagcaacaacagatgaaagccagtgagcctactaaccgtgccatcttgcaaactacactttaaaaaaaactcattgctttgtattgtagtaaccaatatgtgcagtatacgttgaatgtatatgaacatactttcctatttctgttctttgaaaatgtcagaaatatttttttctttctcattttatgttgaactaaaaaggattaaaaaaaaaatctccagactcaagttgctaa

SEQ ID NO: 19097 - DNA, 6331 bp, Homo sapiens
  source 1..6331: mol_type = unassigned DNA
cggagctggcggggctgccggggccgggactgggggagccgggcccgcgggccgcctgctgcctccgcccgcgccggggtccccagccgcccccgctgccgtgtcccctgcggccggccagccgcgtcccccagccccggcctcccgcggacccatgcccgcccgtatcggctactacgagatcgaccgcaccatcggcaagggcaacttcgcggtggtcaagcgggccacgcacctcgtcaccaaggccaaggttgctatcaagatcatagataagacccagctggatgaagaaaacttgaagaagattttccgggaagttcaaattatgaagatgctttgccacccccatatcatcaggctctaccaggttatggagacagaacggatgatttatctggtgacagaatatgctagtggaggggaaatatttgaccacctggtggcccatggtagaatggcagaaaaggaggcacgtcggaagttcaaacagatcgtcacagctgtctatttttgtcactgtcggaacattgttcatcgtgatttaaaagctgaaaatttacttctggatgccaatctgaatatcaaaatagcagattttggtttcagtaacctcttcactcctgggcagctgctgaagacctggtgtggcagccctccctatgctgcacctgaactctttgaaggaaaagaatatgatgggcccaaagtggacatctggagccttggagttgtcctctacgtgcttgtgtgcggtgccctgccatttgatggaagcacactgcagaatctgcgggcccgcgtgctgagtggaaagttccgcatcccattttttatgtccacagaatgtgagcatttgatccgccatatgttggtgttagatcccaataagcgcctctccatggagcagatctgcaagcacaagtggatgaagctaggggacgccgatcccaactttgacaggttaatagctgaatgccaacaactaaaggaagaaagacaggtggaccccctgaatgaggatgtcctcttggccatggaggacatgggactggacaaagaacagacactgcagtcattaagatcagatgcctatgatcactatagtgcaatctacagcctgctgtgtgatcgacataagagacataaaaccctgcgtctcggagcacttcctagcatgccccgagccctggcctttcaagcaccagtcaatatccaggcggagcaggcaggtactgctatgaacatcagcgttccccaggtgcagctgatcaacccagagaaccaaattgtggagccggatgggacactgaatttggacagtgatgagggtgaagagccttcccctgaagcattggtgcgctatttgtcaatgaggaggcacacagtgggtgtggctgacccacgcacggaagttatggaagatctgcagaagctcctacctggctttcctggagtcaacccccaggctccattcctgcaggtggcccctaatgtgaacttcatgcacaacctgttgcctatgcaaaacttgcaaccaaccgggcaacttgagtacaaggagcagtctctcctacagccgcccacgctacagctgttgaatggaatgggcccccttggccggagggcatcagatggaggagccaacatccaactgcatgcccagcagctgctgaagcgcccacggggaccctctccgcttgtcaccatgacaccagcagtgccagcagttacccctgtggacgaggagagctcagacggggagccagaccaggaagctgtgcagaggtacttggcaaataggtccaaaagacatacactggccatgaccaaccctacagctgagatcccaccggacctacaacggcagctaggacagcagcctttccgttcccgggtctggcctcctcacctggtacctgatcagcatcgctctacctacaaggactccaacactctgcacctccctacggagcgtttctcccctgtgcgccggttctcagatggggctgcgagcatccaggccttcaaagctcacctggaaaaaatgggcaacaacagcagcatcaaacagctgcagcaggagtgtgagcagctgcagaagatgtacggggggcagattgatgaaagaaccctggagaagacccagcagcagcatatgttataccagcaggagcagcaccatcaaattctccagcaacaaattcaagactctatctgtcctcctcagccatctccacctcttcaggctgcatgtgaaaatcagccagccctccttacccatcagctccagaggttaaggattcagccttcaagcccaccccccaaccaccccaacaaccatctcttcaggcagcccagtaatagtcctccccccatgagcagtgccatgatccagcctcacggggctgcatcttcttcccagtttcaaggcttaccttcccgcagtgcaatctttcagcagcaacctgagaactgttcctctcctcccaacgtggcactaacctgcttgggtatgcagcagcctgctcagtcacagcaggtcaccatccaagtccaagagcctgttgacatgctcagcaacatgccaggcacagctgcaggctccagtgggcgcggcatctccatcagccccagtgctggtcagatgcagatgcagcaccgtaccaacctgatggccaccctcagctatgggcaccgtcccttgtccaagcagctgagtgctgacagtgcagaggctcacagcttgaacgtgaatcggttctcccctgctaactacgaccaggcgcatttacacccccatctgttttcggaccagtcccggggttcccccagcagctacagcccttcaacaggagtggggttctctccaacccaagccctgaaagtccctccacttgaccaattccccaccttccctcccagtgcacatcagcagccgccacactataccacgtcggcactacagcaggccctgctgtctcccacgccgccagactatacaagacaccagcaggtaccccacatccttcaaggactgctttctccccggcattcgctcaccggccactcggacatccggctgcccccaacagagtttgcacagctcattaaaaggcagcagcaacaacggcagcagcagcagcaacagcagcaacagcaagaataccaggaactgttcaggcacatgaaccaaggggatgcggggagtctggctcccagccttgggggacagagcatgacagagcgccaggctttatcttatcaaaatgctgactcttatcaccatcacaccagcccccagcatctgctacaaatcagggcacaagaatgtgtctcacaggcttcctcacccaccccgccccacgggtatgctcaccagccggcactgatgcattcagagagcatggaggaggactgctcgtgtgagggggccaaggatggcttccaagacagtaagagttcaagtacattgaccaaaggttgccatgacagccctctgctcttgagtaccggtggacctggggaccctgaatctttgctaggaactgtgagtcatgcccaagaattggggatacatccctatggtcatcagccaactgctgcattcagtaaaaataaggtgcccagcagagagcctgtcatagggaactgcatggatagaagttctccaggacaagcagtggagctgccggatcacaatgggctcgggtacccagcacgcccctccgtccatgagcaccacaggccccgggccctccagagacaccacacgatccagaacagcgacgatgcttatgtacagctggataacttgccaggaatgagtctcgtggctgggaaagcacttagctctgcccggatgtcggatgcagttctcagtcagtcttcgctcatgggcagccagcagtttcaggatggggaaaatgaggaatgtggggcaagcctgggaggtcatgagcacccagacctgagtgatggcagccagcatttaaactcctcttgctatccatctacgtgtattacagacattctgctcagctacaagcaccccgaagtctccttcagcatggagcaggcaggcgtgtaacaagaaacagagagttttgtgtacagcttgggaatgaaaaggttgattgtaaacccacagtatctagcagcgttgtgccaaattgcccttgtgtttctctccacccaaaatatcacagctgctttcctcacatttggttcatccgtgtgctgttcttttgggttctgagagggttttgccatgtttgcttgtatgaccaagtcaccaaggaaataaacaggaaggaaatccatgttctccatcttttgtgaaagtatatttgagttggtggttttttgttttgtttgggggtttgtgttttgttttgtttttggtatgttttcttccagaggtgatatactttcttttttttcttcctttcttttttttctttcgttccttttttgaaacaggagagcaaagcagttagagttcagaggccagcggcctcagggccactccctccctagccttcatcagcagagcaccctccatccccctgcattgctcttctgtgaaagcaaatactaaaggatgccatcctctggaatcctaatggcaggcaaagggagagaggaagggtgacggcttctggcacttagaaaacaaaaagaacaaaaaaagagaaacccccaagcctggaacgcagagaggtctttactgctgggatccacggaaaacatgtctgtcctagccaagatcatatgaagagtttggcacggaggctgagaatgacctggcatagatggtttgccagttaggatgtctcaatttgagcctttgcttttggtggataactcagctcccctcttgtaacctggaaagttggttgcctttatcatcctgctggttttatccatggactgaacacccaacagcagtgcactatgctttctatggcatctttcattctcattttatattgtgctataaaaaggattgtttctccatatatatattatatatgtgtgtatatatataatataatatatgtgtatatatatattatatatataatatataatataatatattatatatatattatatatataatatatatataaaatatatatatatatgctctcctctttcagcctctttgtcacagggaagaagtgtaggaggttgccttgggccctgcctctctcctaacctcctcttccccactgggtaccctcagcccctatattttaattcttgatcatgtagaaattgtttttggtaaatgttgatattattgttattatcattattaataaataaagagaaaaggaatttttgtttaaatgagaaatgtttaaccagattctgttctatttgaattgtgacttgcaccttttgttcaaagtatttcctttaggcattgtaattgtgaacagctcttacttgtgccagtgacagatgcagtggtctcctttccccagttgaagcagtgcatacgcagtagctattatttgtgttatctttatttctcttcattgttagaaaccaaagtcttctctgctggctggggctgagagagggtctgggttatctccttctgatcttcaaaacaagagagagaccttgaatacactgactcttccaccctttttttttctgggaaaggagagcaagaggtcccgagtcccctcctagtctttcatcctgaatttgcacagaggaaagcgggtgcccggcatggccatcctgatgttgctggcgggatccccatgcaccttgtccttctccactgatactggcagctcggctcctggacccaagatcccttgagtggaattctgcagtgcaagagcccttcgtgggagctgtcccatgtttccatggtccccagtctcccctccacttggtggggtcaccaactactcaccagaagggggcttaccaagaaagccctaaaaagctgttgacttatctgcgcttgttccaactcttatgcccccaacctgccctaccaccaccacgcgctcagcctgatgtgtttacatggtactgtatgtatgggagagcagactgcaccctccagcaacaacagatgaaagccagtgagcctactaaccgtgccatcttgcaaactacactttaaaaaaaactcattgctttgtattgtagtaaccaatatgtgcagtatacgttgaatgtatatgaacatactttcctatttctgttctttgaaaatgtcagaaatatttttttctttctcattttatgttgaactaaaaaggattaaaaaaaaaatctccagactcaagttgctaa

SEQ ID NO: 19098 - DNA, 6213 bp, Homo sapiens
  source 1..6213: mol_type = unassigned DNA
aacaagatggcggcggcggcggcgagcggagctggcggggctgccggggccgggactgggggagccgggcccgcgggccgcctgctgcctccgcccgcgccggggtccccagccgcccccgctgccgtgtcccctgcggccggccagccgcgtcccccagccccggcctcccgcggacccatgcccgcccgtatcggctactacgagatcgaccgcaccatcggcaagggcaacttcgcggtggtcaagcgggccacgcacctcgtcaccaaggccaaggttgctatcaagatcatagataagacccagctggatgaagaaaacttgaagaagattttccgggaagttcaaattatgaagatgctttgccacccccatatcatcaggctctaccaggttatggagacagaacggatgatttatctggtgacagaatatgctagtggaggggaaatatttgaccacctggtggcccatggtagaatggcagaaaaggaggcacgtcggaagttcaaacagatcgtcacagctgtctatttttgtcactgtcggaacattgttcatcgtgatttaaaagctgaaaatttacttctggatgccaatctgaatatcaaaatagcagattttggtttcagtaacctcttcactcctgggcagctgctgaagacctggtgtggcagccctccctatgctgcacctgaactctttgaaggaaaagaatatgatgggcccaaagtggacatctggagccttggagttgtcctctacgtgcttgtgtgcggtgccctgccatttgatggaagcacactgcagaatctgcgggcccgcgtgctgagtggaaagttccgcatcccattttttatgtccacagaatgtgagcatttgatccgccatatgttggtgttagatcccaataagcgcctctccatggagcagatctgcaagcacaagtggatgaagctaggggacgccgatcccaactttgacaggttaatagctgaatgccaacaactaaaggaagaaagacaggtggaccccctgaatgaggatgtcctcttggccatggaggacatgggactggacaaagaacagacactgcagtcattaagatcagatgcctatgatcactatagtgcaatctacagcctgctgtgtgatcgacataagagacataaaaccctgcgtctcggagcacttcctagcatgccccgagccctggcctttcaagcaccagtcaatatccaggcggagcaggcaggtactgctatgaacatcagcgttccccaggtgcagctgatcaacccagagaaccaaattgtggagccggatgggacactgaatttggacagtgatgagggtgaagagccttcccctgaagcattggtgcgctatttgtcaatgaggaggcacacagtgggtgtggctgacccacgcacggaagttatggaagatctgcagaagctcctacctggctttcctggagtcaacccccaggctccattcctgcaggtggcccctaatgtgaacttcatgcacaacctgttgcctatgcaaaacttgcaaccaaccgggcaacttgagtacaaggagcagtctctcctacagccgcccacgctacagctgttgaatggaatgggcccccttggccggagggcatcagatggaggagccaacatccaactgcatgcccagcagctgctgaagcgcccacggggaccctctccgcttgtcaccatgacaccagcagtgccagcagttacccctgtggacgaggagagctcagacggggagccagaccaggaagctgtgcagagctctacctacaaggactccaacactctgcacctccctacggagcgtttctcccctgtgcgccggttctcagatggggctgcgagcatccaggccttcaaagctcacctggaaaaaatgggcaacaacagcagcatcaaacagctgcagcaggagtgtgagcagctgcagaagatgtacggggggcagattgatgaaagaaccctggagaagacccagcagcagcatatgttataccagcaggagcagcaccatcaaattctccagcaacaaattcaagactctatctgtcctcctcagccatctccacctcttcaggctgcatgtgaaaatcagccagccctccttacccatcagctccagaggttaaggattcagccttcaagcccaccccccaaccaccccaacaaccatctcttcaggcagcccagtaatagtcctccccccatgagcagtgccatgatccagcctcacggggctgcatcttcttcccagtttcaaggcttaccttcccgcagtgcaatctttcagcagcaacctgagaactgttcctctcctcccaacgtggcactaacctgcttgggtatgcagcagcctgctcagtcacagcaggtcaccatccaagtccaagagcctgttgacatgctcagcaacatgccaggcacagctgcaggctccagtgggcgcggcatctccatcagccccagtgctggtcagatgcagatgcagcaccgtaccaacctgatggccaccctcagctatgggcaccgtcccttgtccaagcagctgagtgctgacagtgcagaggctcacagcttgaacgtgaatcggttctcccctgctaactacgaccaggcgcatttacacccccatctgttttcggaccagtcccggggttcccccagcagctacagcccttcaacaggagtggggttctctccaacccaagccctgaaagtccctccacttgaccaattccccaccttccctcccagtgcacatcagcagccgccacactataccacgtcggcactacagcaggccctgctgtctcccacgccgccagactatacaagacaccagcaggtaccccacatccttcaaggactgctttctccccggcattcgctcaccggccactcggacatccggctgcccccaacagagtttgcacagctcattaaaaggcagcagcaacaacggcagcagcagcagcaacagcagcaacagcaagaataccaggaactgttcaggcacatgaaccaaggggatgcggggagtctggctcccagccttgggggacagagcatgacagagcgccaggctttatcttatcaaaatgctgactcttatcaccatcacaccagcccccagcatctgctacaaatcagggcacaagaatgtgtctcacaggcttcctcacccaccccgccccacgggtatgctcaccagccggcactgatgcattcagagagcatggaggaggactgctcgtgtgagggggccaaggatggcttccaagacagtaagagttcaagtacattgaccaaaggttgccatgacagccctctgctcttgagtaccggtggacctggggaccctgaatctttgctaggaactgtgagtcatgcccaagaattggggatacatccctatggtcatcagccaactgctgcattcagtaaaaataaggtgcccagcagagagcctgtcatagggaactgcatggatagaagttctccaggacaagcagtggagctgccggatcacaatgggctcgggtacccagcacgcccctccgtccatgagcaccacaggccccgggccctccagagacaccacacgatccagaacagcgacgatgcttatgtacagctggataacttgccaggaatgagtctcgtggctgggaaagcacttagctctgcccggatgtcggatgcagttctcagtcagtcttcgctcatgggcagccagcagtttcaggatggggaaaatgaggaatgtggggcaagcctgggaggtcatgagcacccagacctgagtgatggcagccagcatttaaactcctcttgctatccatctacgtgtattacagacattctgctcagctacaagcaccccgaagtctccttcagcatggagcaggcaggcgtgtaacaagaaacagagagttttgtgtacagcttgggaatgaaaaggttgattgtaaacccacagtatctagcagcgttgtgccaaattgcccttgtgtttctctccacccaaaatatcacagctgctttcctcacatttggttcatccgtgtgctgttcttttgggttctgagagggttttgccatgtttgcttgtatgaccaagtcaccaaggaaataaacaggaaggaaatccatgttctccatcttttgtgaaagtatatttgagttggtggttttttgttttgtttgggggtttgtgttttgttttgtttttggtatgttttcttccagaggtgatatactttcttttttttcttcctttcttttttttctttcgttccttttttgaaacaggagagcaaagcagttagagttcagaggccagcggcctcagggccactccctccctagccttcatcagcagagcaccctccatccccctgcattgctcttctgtgaaagcaaatactaaaggatgccatcctctggaatcctaatggcaggcaaagggagagaggaagggtgacggcttctggcacttagaaaacaaaaagaacaaaaaaagagaaacccccaagcctggaacgcagagaggtctttactgctgggatccacggaaaacatgtctgtcctagccaagatcatatgaagagtttggcacggaggctgagaatgacctggcatagatggtttgccagttaggatgtctcaatttgagcctttgcttttggtggataactcagctcccctcttgtaacctggaaagttggttgcctttatcatcctgctggttttatccatggactgaacacccaacagcagtgcactatgctttctatggcatctttcattctcattttatattgtgctataaaaaggattgtttctccatatatatattatatatgtgtgtatatatataatataatatatgtgtatatatatattatatatataatatataatataatatattatatatatattatatatataatatatatataaaatatatatatatatgctctcctctttcagcctctttgtcacagggaagaagtgtaggaggttgccttgggccctgcctctctcctaacctcctcttccccactgggtaccctcagcccctatattttaattcttgatcatgtagaaattgtttttggtaaatgttgatattattgttattatcattattaataaataaagagaaaaggaatttttgtttaaatgagaaatgtttaaccagattctgttctatttgaattgtgacttgcaccttttgttcaaagtatttcctttaggcattgtaattgtgaacagctcttacttgtgccagtgacagatgcagtggtctcctttccccagttgaagcagtgcatacgcagtagctattatttgtgttatctttatttctcttcattgttagaaaccaaagtcttctctgctggctggggctgagagagggtctgggttatctccttctgatcttcaaaacaagagagagaccttgaatacactgactcttccaccctttttttttctgggaaaggagagcaagaggtcccgagtcccctcctagtctttcatcctgaatttgcacagaggaaagcgggtgcccggcatggccatcctgatgttgctggcgggatccccatgcaccttgtccttctccactgatactggcagctcggctcctggacccaagatcccttgagtggaattctgcagtgcaagagcccttcgtgggagctgtcccatgtttccatggtccccagtctcccctccacttggtggggtcaccaactactcaccagaagggggcttaccaagaaagccctaaaaagctgttgacttatctgcgcttgttccaactcttatgcccccaacctgccctaccaccaccacgcgctcagcctgatgtgtttacatggtactgtatgtatgggagagcagactgcaccctccagcaacaacagatgaaagccagtgagcctactaaccgtgccatcttgcaaactacactttaaaaaaaactcattgctttgtattgtagtaaccaatatgtgcagtatacgttgaatgtatatgaacatactttcctatttctgttctttgaaaatgtcagaaatatttttttctttctcattttatgttgaactaaaaaggattaaaaaaaaaatctccagactcaagttgctaa

SEQ ID NO: 19099 - DNA, 294 bp, Homo sapiens
  source 1..294: mol_type = unassigned DNA
gaacagcgacgatgcttatgtacagctggataacttgccaggaatgagtctcgtggctgggaaagcacttagctctgcccggatgtcggatgcagttctcagtcagtcttcgctcatgggcagccagcagtttcaggatggggaaaatgaggacattctgctcagctacaagcaccccgaagtctccttcagcatggagcaggcaggcgtgtaacaagaaacagagagagagcaaagcagttagagttcagaggccagcggcctcagggccactccctccctagccttcatcag

SEQ ID NO: 19100 - DNA, 3459 bp, Homo sapiens
  source 1..3459: mol_type = unassigned DNA
aattcatttgttttttgtgttgctgaaccaaatacatgttcgtgctcatttcattagctcactgctgggtcaagcctcaggtagagtctgaaacaaaagccatcattagcaaagacagggtaaaaggctttcacctgctgccagaactctctggatacctctgcacggtcattagattcctcctggtcccgcgctgtctgcattgtatttgaactcgcttgttaacctgcttcctgagctgtggttctgcttcagtcccaaatgaatcactggcaaggtagcacatcatttcatccaaagttcagtgtaatggcatctctgccctggacatgaaaccctgatcctttccatctgctactggaatgctgctgccttggcagtcttttatctgcttacctcagcccataaacatctctttctgatcatcaggtcacaagagtaggtgttagcttctaaccccgatgctgtcttaggcattccttatcaatagcttgttctttctttctgtaagattctggctgtgttccagttgagcagtggggtctttgaaggtaatccatatgattcctctttcattaggaggttgggtgagtgctgctgctctgagaagttgattttcacagtaggtgaccttatttgttgaccaggtacgtgcaggatctcaaggcccacattccttaagaatttgttgtctccatcccaggatcagaagtcttcattttcccccaccccaatcgccaccttctattttctgtcacagaacctatgagttctaggccagacctttgaccacaaaactgactgttgtttccctctggccatacggagatcattgctcagggaaaactttggctcaaatggtgaatttaaggtttctaaaggcactagatagacatatgattataaaagcaagagcttctgtacagtctggcctggaggatattgagaagcttttctctctggcctagtgtatttataagaactggatgtacttgatctcgggacctcaccaggcttggaaagtaagccaaccgaaggtaagtagaaatggaagatgtacacctggagccctctaaagggaagcaggctagggaaacgactgatgtctggaaatggcatgaaagtggcataatatgcagggctacctgggcagccagccgtctttatgttcatctggaacagcagtccctgtgtgatttggtcaaagcccctgagtcctagcctctaaccttctcttcccatatattcagctctacctacaaggactccaacactctgcacctccctacggagcgtttctcccctgtgcgccggttctcagatggggctgcgagcatccaggccttcaaagctcacctggaaaaaatgggcaacaacagcagcatcaaacagctgcagcaggagtgtgagcagctgcagaagatgtacggggggcagattgatgaaagaaccctggagaagacccagcagcagcatatgttataccagcaggagcagcaccatcaaattctccagcaacaaattcaagactctatctgtcctcctcagccatctccacctcttcaggctgcatgtgaaaatcagccagccctccttacccatcagctccagaggttaaggattcagccttcaagcccaccccccaaccaccccaacaaccatctcttcaggcagcccagtaatagtcctccccccatgagcagtgccatgatccagcctcacggggctgcatcttcttcccagtttcaaggcttaccttcccgcagtgcaatctttcagcagcaacctgagaactgttcctctcctcccaacgtggcactaacctgcttgggtatgcagcagcctgctcagtcacagcaggtcaccatccaagtccaagagcctgttgacatgctcagcaacatgccaggcacagctgcaggctccagtgggcgcggcatctccatcagccccagtgctggtcagatgcagatgcagcaccgtaccaacctgatggccaccctcagctatgggcaccgtcccttgtccaagcagctgagtgctgacagtgcagaggctcacagtgcacatcagcagccgccacactataccacgtcggcactacagcaggccctgctgtctcccacgccgccagactatacaagacaccagcaggtaccccacatccttcaaggactgctttctccccggcattcgctcaccggccactcggacatccggctgcccccaacagagtttgcacagctcattaaaaggcagcagcaacaacggcagcagcagcagcaacagcagcaacagcaagaataccaggaactgttcaggcacatgaaccaaggggatgcggggagtctggctcccagccttgggggacagagcatgacagagcgccaggctttatcttatcaaaatgctgactcttatcaccatcacaccagcccccagcatctgctacaaatcagggcacaagaatgtgtctcacaggcttcctcacccaccccgccccacgggtatgctcaccagccggcactgatgcattcagagagcatggaggaggactgctcgtgtgagggggccaaggatggcttccaagacagtaagagttcaagtacattgaccaaaggttgccatgacagccctctgctcttgagtaccggtggacctggggaccctgaatctttgctaggaactgtgagtcatgcccaagaattggggatacatccctatggtcatcagccaactgctgcattcagtaaaaataaggtgcccagcagagagcctgtcatagggaactgcatggatagaagttctccaggacaagcagtggagctgccggatcacaatgggctcgggtacccagcacgcccctccgtccatgagcaccacaggccccgggccctccagagacaccacacgatccagaacagcgacgatgcttatgtacagctggataacttgccaggaatgagtctcgtggctgggaaagcacttagctctgcccggatgtcggatgcagttctcagtcagtcttcgctcatgggcagccagcagtttcaggatggggaaaatgaggaatgtggggcaagcctgggaggtcatgagcacccagacctgagtgatggcagccagcatttaaactcctcttgctatccatctacgtgtattacagacattctgctcagctacaagcaccccgaagtctccttcagcatggagcaggcaggcgtgtaacaagaaacagagagttttgtgtacagcttgggaatgaaaaggttgattgtaaacccacagtatctagcagcgttgtgccaaattgcccttgtgtttctctccacccaaaatatcacagctgctttcctcacatttggttcatccgtgtgctgttcttttgggttctgagagggttttgccatgtttgcttgtatgaccaagtcaccaaggaaataaacaggaaggaaatcc

SEQ ID NO: 19101 - DNA, 3816 bp, Homo sapiens
  source 1..3816: mol_type = unassigned DNA
cgtcccccagccccggcctcccgcggacccatgcccgcccgtatcggctactacgagatcgaccgcaccatcggcaagggcaacttcgcggtggtcaagcgggccacgcacctcgtcaccaaggccaaggttgctatcaagatcatagataagacccagctggatgaagaaaacttgaagaagattttccgggaagttcaaattatgaagatgctttgccacccccatatcatcaggctctaccaggttatggagacagaacggatgatttatctggtgacagaatatgctagtggaggggaaatatttggaggatttggacatcagcaattctcattctgccccgagctgcctattgctgagtcctggagaagtgcagttaagagatgggggccccttcttctactcagcccccacttgtggaacttgatcagaccacctggtggcccatggtagaatggcagaaaaggaggcacgtcggaagttcaaacagatcgtcacagctgtctatttttgtcactgtcggaacattgttcatcgtgatttaaaagctgaaaatttacttctggatgccaatctgaatatcaaaatagcagattttggtttcagtaacctcttcactcctgggcagctgctgaagacctggtgtggcagccctccctatgctgcacctgaactctttgaaggaaaagaatatgatgggcccaaagtggacatctggagccttggagttgtcctctacgtgcttgtgtgcggtgccctgccatttgatggaagcacactgcagaatctgcgggcccgcgtgctgagtggaaagttccgcatcccattttttatgtccacagaatgtgagcatttgatccgccatatgttggtgttagatcccaataagcgcctctccatggagcagatctgcaagcacaagtggatgaagctaggggacgccgatcccaactttgacaggttaatagctgaatgccaacaactaaaggaagaaagacaggtggaccccctgaatgaggatgtcctcttggccatggaggacatgggactggacaaagaacagacactgcagtcattaagatcagatgcctatgatcactatagtgcaatctacagcctgctgtgtgatcgacataagagacataaaaccctgcgtctcggagcacttcctagcatgccccgagccctggcctttcaagcaccagtcaatatccaggcggagcaggcaggtactgctatgaacatcagcgttccccaggtgcagctgatcaacccagagaaccaaattgtggagccggatgggacactgaatttggacagtgatgagggtgaagagccttcccctgaagcattggtgcgctatttgtcaatgaggaggcacacagtgggtgtggctgacccacgcacggaagttatggaagatctgcagaagctcctacctggctttcctggagtcaacccccaggctccattcctgcaggtggcccctaatgtgaacttcatgcacaacctgttgcctatgcaaaacttgcaaccaaccgggcaacttgagtacaaggagcagtctctcctacagccgcccacgctacagctgttgaatggaatgggcccccttggccggagggcatcagatggaggagccaacatccaactgcatgcccagcagctgctgaagcgcccacggggaccctctccgcttgtcaccatgacaccagcagtgccagcagttacccctgtggacgaggagagctcagacggggagccagaccaggaagctgtgcagagctctacctacaaggactccaacactctgcacctccctacggagcgtttctcccctgtgcgccggttctcagatggggctgcgagcatccaggccttcaaagctcacctggaaaaaatgggcaacaacagcagcatcaaacagctgcagcaggagtgtgagcagctgcagaagatgtacggggggcagattgatgaaagaaccctggagaagacccagcagcagcatatgttataccagcaggagcagcaccatcaaattctccagcaacaaattcaagactctatctgtcctcctcagccatctccacctcttcaggctgcatgtgaaaatcagccagccctccttacccatcagctccagaggttaaggattcagccttcaagcccaccccccaaccaccccaacaaccatctcttcaggcagcccagtaatagtcctccccccatgagcagtgccatgatccagcctcacggggctgcatcttcttcccagtttcaaggcttaccttcccgcagtgcaatctttcagcagcaacctgagaactgttcctctcctcccaacgtggcactaacctgcttgggtatgcagcagcctgctcagtcacagcaggtcaccatccaagtccaagagcctgttgacatgctcagcaacatgccaggcacagctgcaggctccagtgggcgcggcatctccatcagccccagtgctggtcagatgcagatgcagcaccgtaccaacctgatggccaccctcagctatgggcaccgtcccttgtccaagcagctgagtgctgacagtgcagaggctcacagtgcacatcagcagccgccacactataccacgtcggcactacagcaggccctgctgtctcccacgccgccagactatacaagacaccagcaggtaccccacatccttcaaggactgctttctccccggcattcgctcaccggccactcggacatccggctgcccccaacagagtttgcacagctcattaaaaggcagcagcaacaacggcagcagcagcagcaacagcagcaacagcaagaataccaggaactgttcaggcacatgaaccaaggggatgcggggagtctggctcccagccttgggggacagagcatgacagagcgccaggctttatcttatcaaaatgctgactcttatcaccatcacaccagcccccagcatctgctacaaatcagggcacaagaatgtgtctcacaggcttcctcacccaccccgccccacgggtatgctcaccagccggcactgatgcattcagagagcatggaggaggactgctcgtgtgagggggccaaggatggcttccaagacagtaagagttcaagtacattgaccaaaggttgccatgacagccctctgctcttgagtaccggtggacctggggaccctgaatctttgctaggaactgtgagtcatgcccaagaattggggatacatccctatggtcatcagccaactgctgcattcagtaaaaataaggtgcccagcagagagcctgtcatagggaactgcatggatagaagttctccaggacaagcagtggagctgccggatcacaatgggctcgggtacccagcacgcccctccgtccatgagcaccacaggccccgggccctccagagacaccacacgatccagaacagcgacgatgcttatgtacagctggataacttgccaggaatgagtctcgtggctgggaaagcacttagctctgcccggatgtcggatgcagttctcagtcagtcttcgctcatgggcagccagcagtttcaggatggggaaaatgaggaatgtggggcaagcctgggaggtcatgagcacccagacctgagtgatggcagccagcatttaaactcctcttgctatccatctacgtgtattacagacattctgctcagctacaagcaccccgaagtctccttcagcatggagcaggcaggcgtgtaacaagaaacagagagttttgtgtacagcttgggaatgaaaaggttgattgt

SEQ ID NO: 19102 - DNA, 3858 bp, Homo sapiens
  source 1..3858: mol_type = unassigned DNA
ggaggtttcactgcacaacaagatggcggcggcggcggcgagcggagctggcggggctgccggggccgggactgggggagccgggcccgcgggccgcctgctgcctccgcccgcgccggggtccccagccgcccccgctgccgtgtcccctgcggccggccagccgcgtcccccagccccggcctcccgcggacccatgcccgcccgtatcggctactacgagatcgaccgcaccatcggcaagggcaacttcgcggtggtcaagcgggccacgcacctcgtcaccaaggccaaggttgctatcaagatcatagataagacccagctggatgaagaaaacttgaagaagattttccgggaagttcaaattatgaagatgctttgccacccccatatcatcaggctctaccaggttatggagacagaacggatgatttatctggtgacagaatatgctagtggaggggaaatatttgaccacctggtggcccatggtagaatggcagaaaaggaggcacgtcggaagttcaaacagatcgtcacagctgtctatttttgtcactgtcggaacattgttcatcgtgatttaaaagctgaaaatttacttctggatgccaatctgaatatcaaaatagcagattttggtttcagtaacctcttcactcctgggcagctgctgaagacctggtgtggcagccctccctatgctgcacctgaactctttgaaggaaaagaatatgatgggcccaaagtggacatctggagccttggagttgtcctctacgtgcttgtgtgcggtgccctgccatttgatggaagcacactgcagaatctgcgggcccgcgtgctgagtggaaagttccgcatcccattttttatgtccacagaatgtgagcatttgatccgccatatgttggtgttagatcccaataagcgcctctccatggagcagatctgcaagcacaagtggatgaagctaggggacgccgatcccaactttgacaggttaatagctgaatgccaacaactaaaggaagaaagacaggtggaccccctgaatgaggatgtcctcttggccatggaggacatgggactggacaaagaacagacactgcaggcggagcaggcaggtactgctatgaacatcagcgttccccaggtgcagctgatcaacccagagaaccaaattgtggagccggatgggacactgaatttggacagtgatgagggtgaagagccttcccctgaagcattggtgcgctatttgtcaatgaggaggcacacagtgggtgtggctgacccacgcacggaagttatggaagatctgcagaagctcctacctggctttcctggagtcaacccccaggctccattcctgcaggtggcccctaatgtgaacttcatgcacaacctgttgcctatgcaaaacttgcaaccaaccgggcaacttgagtacaaggagcagtctctcctacagccgcccacgctacagctgttgaatggaatgggcccccttggccggagggcatcagatggaggagccaacatccaactgcatgcccagcagctgctgaagcgcccacggggaccctctccgcttgtcaccatgacaccagcagtgccagcagttacccctgtggacgaggagagctcagacggggagccagaccaggaagctgtgcagaggtacttggcaaataggtccaaaagacatacactggccatgaccaaccctacagctgagatcccaccggacctacaacggcagctaggacagcagcctttccgttcccgggtctggcctcctcacctggtacctgatcagcatcgctctacctacaaggactccaacactctgcacctccctacggagcgtttctcccctgtgcgccggttctcagatggggctgcgagcatccaggccttcaaagctcacctggaaaaaatgggcaacaacagcagcatcaaacagctgcagcaggagtgtgagcagctgcagaagatgtacggggggcagattgatgaaagaaccctggagaagacccagcagcagcatatgttataccagcaggagcagcaccatcaaattctccagcaacaaattcaagactctatctgtcctcctcagccatctccacctcttcaggctgcatgtgaaaatcagccagccctccttacccatcagctccagaggttaaggattcagccttcaagcccaccccccaaccaccccaacaaccatctcttcaggcagcccagtaatagtcctccccccatgagcagtgccatgatccagcctcacggggctgcatcttcttcccagtttcaaggcttaccttcccgcagtgcaatctttcagcagcaacctgagaactgttcctctcctcccaacgtggcactaacctgcttgggtatgcagcagcctgctcagtcacagcaggtcaccatccaagtccaagagcctgttgacatgctcagcaacatgccaggcacagctgcaggctccagtgggcgcggcatctccatcagccccagtgctggtcagatgcagatgcagcaccgtaccaacctgatggccaccctcagctatgggcaccgtcccttgtccaagcagctgagtgctgacagtgcagaggctcacagtgcacatcagcagccgccacactataccacgtcggcactacagcaggccctgctgtctcccacgccgccagactatacaagacaccagcaggtaccccacatccttcaaggactgctttctccccggcattcgctcaccggccactcggacatccggctgcccccaacagagtttgcacagctcattaaaaggcagcagcaacaacggcagcagcagcagcaacagcagcaacagcaagaataccaggaactgttcaggcacatgaaccaaggggatgcggggagtctggctcccagccttgggggacagagcatgacagagcgccaggctttatcttatcaaaatgctgactcttatcaccatcacaccagcccccagcatctgctacaaatcagggcacaagaatgtgtctcacaggcttcctcacccaccccgccccacgggtatgctcaccagccggcactgatgcattcagagagcatggaggaggactgctcgtgtgagggggccaaggatggcttccaagacagtaagagttcaagtacattgaccaaaggttgccatgacagccctctgctcttgagtaccggtggacctggggaccctgaatctttgctaggaactgtgagtcatgcccaagaattggggatacatccctatggtcatcagccaactgctgcattcagtaaaaataaggtgcccagcagagagcctgtcatagggaactgcatggatagaagttctccaggacaagcagtggagctgccggatcacaatgggctcgggtacccagcacgcccctccgtccatgagcaccacaggccccgggccctccagagacaccacacgatccagaacagcgacgatgcttatgtacagctggataacttgccaggaatgagtctcgtggctgggaaagcacttagctctgcccggatgtcggatgcagttctcagtcagtcttcgctcatgggcagccagcagtttcaggatggggaaaatgaggaatgtggggcaagcctgggaggtcatgagcacccagacctgagtgatggcagccagcatttaaactcctcttgctatccatctacgtgtattacagacattctgctcagctacaagcaccccgaagtctccttcagcatggagcaggcaggcgtgtaacaagaaacagagagttttgtgtacagcttgggaatgaaaaggttgattgt

SEQ ID NO: 19103 - DNA, 2237 bp, Homo sapiens
  source 1..2237: mol_type = unassigned DNA
ggttaaggattcagccttcaagcccaccccccaaccaccccaacaaccatctcttcaggcagcccagtaatagtcctccccccatgagcagtgccatgatccagcctcacggggctgcatcttcttcccagtttcaaggcttaccttcccgcagtgcaatctttcagcagcaacctgagaactgttcctctcctcccaacgtggcactaacctgcttgggtatgcagcagcctgctcagtcacagcaggtcaccatccaagtccaagagcctgttgacatgctcagcaacatgccaggcacagctgcaggctccagtgggcgcggcatctccatcagccccagtgctggtcagatgcagatgcagcaccgtaccaacctgatggccaccctcagctatgggcaccgtcccttgtccaagcagctgagtgctgacagtgcagaggctcacagcttgaacgtgaatcggttctcccctgctaactacgaccaggcgcatttacacccccatctgttttcggaccagtcccggggttcccccagcagctacagcccttcaacaggagtggggttctctccaacccaagccctgaaagtccctccacttgaccaattccccaccttccctcccagtgcacatcagcagccgccacactataccacgtcggcactacagcaggccctgctgtctcccacgccgccagactatacaagacaccagcaggtaccccacatccttcaaggactgctttctccccggcattcgctcaccggccactcggacatccggctgcccccaacagagtttgcacagctcattaaaaggcagcagcaacaacggcagcagcagcagcaacagcagcaacagcaagaataccaggaactgttcaggcacatgaaccaaggggatgcggggagtctggctcccagccttgggggacagagcatgacagagcgccaggctttatcttatcaaaatgctgactcttatcaccatcacaccagcccccagcatctgctacaaatcagggcacaagaatgtgtctcacaggcttcctcacccaccccgccccacgggtatgctcaccagccggcactgatgcattcagagagcatggaggaggactgctcgtgtgagggggccaaggatggcttccaagacagtaagagttcaagtacattgaccaaaggttgccatgacagccctctgctcttgagtaccggtggacctggggaccctgaatctttgctaggaactgtgagtcatgcccaagaattggggatacatccctatggtcatcagccaactgctgcattcagtaaaaataaggtgcccagcagaggtaagtgtctcctcacagtggaagtcctgggccagtctgccctaatcaactgactcagtaatgttatcttttttcagctagtattctgtgttcctaagaaaaaaagaatttctgagcttcacgaccttcttggggagaagcatgtaggaagtgggtattggtgggcaaggggtccattttcaaaatcaaaggaccatgatacaaaattaacacttagtcaataagatagatgatccatttcccttattcataccacagtttcttggaatccagaaattcctgactgccatccaaacagctaactttaaacttgtgcaatagaaaaaaagtcagcccaacataatttagtgtaaatagtgtgggaacaagagtcagagcaccttaattctgctcttgcagctatcataaatacgataactttgtcatttaatccctctgattctgattttcctcatctgtgaagaaggtgttggaggaacaatggagtatcttacggtgtatctgtggagatgaaaacatgtatatatgtgtttgtttctacataatgtttgcatgagagagagaggcacattcagatcatctgaaatgtttgagttcagtgcataaatgtgaggtattattactctggtcgttttattagtgagctaaatgcagaatattacagcatcataagggcccccattatcatttcattttgtaccactttataattaatgagtatattcattatcattctgaaggagatcaggattgcaattagtaagttatacttagaaaatatagttccattagcatcacggcattcatcctagacaaaatcaggaatcttgcaatttaccactcctcaccattgccatccaagggaataaaaagcaatttatctgtaaactgtacaa

SEQ ID NO: 19104 - DNA, 665 bp, Homo sapiens
  source 1..665: mol_type = unassigned DNA
tctcatggtccgtcctccccactctgttcctggcaggagcagtctctcctacagccgcccacgctacagctgttgaatggaatgggcccccttggccggagggcatcagatggaggagccaacatccaactgcatgcccagcagctgctgaagcgcccacggggaccctctccgcttgtcaccatgacaccagcagtgccagcagttacccctgtggacgaggagagctcagacggggagccagaccaggaagctgtgcagaggtacttggcaaataggtccaaaagacatacactggccatgaccaaccctacagctgagatcccaccggacctacaacggcagctaggacagcagcctttccgttcccgggtctggcctcctcacctggtacctgatcagcatcggtgagtagccacatgagctgtgcgagctccttgaggctcatcggacaggcacccttctgattagtctcacagcgacggtgactagcatcgtggctttaaatagaagccagctgtcatcctgaactcacatcttctcagctccttgcagtaagcaatgcacagggcaaaggttttttactgcgccctggagcaatgcgagattcctctctcccattaccttgcagacctgtttattgtctgcatttgattcccatgatt

SEQ ID NO: 19105 - DNA, 3054 bp, Homo sapiens
  source 1..3054: mol_type = unassigned DNA
taagacccagctggatgaagaaaacttgaagaagattttccgggaagttcaaattatgaagatgctttgccacccccatatcatcaggctctaccaggttatggagacagaacggatgatttatctggtgacagaatatgctagtggaggggaaatatttgaccacctggtggcccatggtagaatggcagaaaaggaggcacgtcggaagttcaaacagatcgtcacagctgtctatttttgtcactgtcggaacattgttcatcgtgatttaaaagctgaaaatttacttctggatgccaatctgaatatcaaaatagcagattttggtttcagtaacctcttcactcctgggcagctgctgaagacctggtgtggcagccctccctatgctgcacctgaactctttgaaggaaaagaatatgatgggcccaaagtggacatctggagccttggagttgtcctctacgtgcttgtgtgcggtgccctgccatttgatggaagcacactgcagaatctgcgggcccgcgtgctgagtggaaagttccgcatcccattttttatgtccacagaatgtgagcatttgatccgccatatgttggtgttagatcccaataagcgcctctccatggagcagatctgcaagcacaagtggatgaagctaggggacgccgatcccaactttgacaggttaatagctgaatgccaacaactaaaggaagaaagacaggtggaccccctgaatgaggatgtcctcttggccatggaggacatgggactggacaaagaacagacactgcagtcattaagatcagatgcctatgatcactatagtgcaatctacagcctgctgtgtgatcgacataagagacataaaaccctgcgtctcggagcacttcctagcatgccccgagccctggcctttcaagcaccagtcaatatccaggcggagcaggcaggtactgctatgaacatcagcgttccccaggtgcagctgatcaacccagagaaccaaattgtggagccggatgggacactgaatttggacagtgatgagggtgaagagccttcccctgaagcattggtgcgctatttgtcaatgaggaggcacacagtgggtgtggctgacccacgcacggaagttatggaagatctgcagaagctcctacctggctttcctggagtcaacccccaggctccattcctgcaggtggcccctaatgtgaacttcatgcacaacctgttgcctatgcaaaacttgcaaccaaccgggcaacttgagtacaaggagcagtctctcctacagccgcccacgctacagctgttgaatggaatgggcccccttggccggagggcatcagatggaggagccaacatccaactgcatgcccagcagctgctgaagcgcccacggggaccctctccgcttgtcaccatgacaccagcagtgccagcagttacccctgtggacgaggagagctcagacggggagccagaccaggaagctgtgcagaggtaatgtgacatctggcagtgcttgcagaagcccctgggcaggctcccctgcaaccagcgaaaggtcacctctgcccaaggaggtggtagagtgcagcttcaacatttgtgtggtctctttgctcaagccagatggcatgttccaccccacatggaagtaacagaagactacccagaaaatgtcatttctgtaagcaccattggaagtcccctaagtgacagcaataaccataagaactttttctttcctccctccttcttccttgtcccctgccttcatattgcaactctgatagtattcacaaggcacaaagcctgctcgtacctgccaagaactgtttactgaaaaggaattggagatgtgggatgacagtgatcctagctagtctggccatggacctctggcatggacttttcctttccaggagaatgaatacctcttgtactgtttgctgtgtgcttcttccacccccttgtaccaacaaagagatattgaaaaagagaatatgggattcgggccagggacagatgcaaatatccattgtttacagaaccttgttgagagatgcctaactcacagagaacggcagtgaccatcaggcatgctgtactgttcatttggcctcagttccgttagccctggtccttagctccatgcatgcccccttgtgggagttgattttcttattatccggggagggggtttcaccagaatccagcatgtattttcccagaaatacaggtgttcttcaagattatatgttttttcctttgagggaagttgaaataaaatggttttcatgggcttttggggaactttgggtgtctttatccaatggttattaaaacattaatggcttactctttggcaagttcacataacactgattactctacagtctgttaactgattttagctgaaaggggcaagatagttaagaatgaaatgagaccattttttaagaacctgccagttgctggctaggactctcatcctatccccagtagctctgtgtgagagctgctattcagaaagcagctggtcctatgtggaaagaaaaccatggcaaacaggggtgttggcaggtgggccagctccttctacagcttggccaatagaaggaaaattctggtaacttttttttttccttgatgctgttgtttctatagtttgctgataagagggtatataaggttacaaatgggccctactgggtcatgaagaaatgagaaatcaggaaatttactgcctttctaccttaaaagagacagcaatattttatcttctttgtcttagactttccttcctccaggtctaccttctttcttctttagaccaacatttcaagggtataatgcccatcagttttgatgtaataaaaaaggtgtagtgcctcttttattcatgcctccagaagagcagcagcggtggaggaagtcatccaccagacaaagagggacaatatcttattgatggtattaactaagtgctgggtctgaaagatcttccgaataaaagccatcagtttgggaactctt

SEQ ID NO: 19106 - DNA, 267 bp, Homo sapiens
  source 1..267: mol_type = unassigned DNA
aagactcattatttctctctagtgttaaaggtatgcgtgtatatgtatgtactgctttccaggcggagcaggcaggtactgctatgaacatcagcgttccccaggtgcagctgatcaacccagagaaccaaattgtggagccggatgggacactgaatttggacagtgatgagggtgaagagccttcccctgaagcattggtgcgctatttgtcaatgaggaggcacacagtgggtgtggctgacccacgcacggaagttatggaag

SEQ ID NO: 19107 - DNA, 715 bp, Homo sapiens
  source 1..715: mol_type = unassigned DNA
gttgctatcaagatcatagataagacccagctggatgaagaaaacttgaagaagattttccgggaagttcaaattatgaagatgctttgccacccccatatcatcaggctctaccaggttatggagacagaacggatgatttatctggtgacagaatatgctagtggaggggaaatatttgaccacctggtggcccatggtagaatggcagaaaaggaggcacgtcggaagttcaaacagatcgtcacagctgtctatttttgtcactgtcggaacattgttcatcgtgatttaaaagctgaaaatttacttctggatgccaatctgaatatcaaaatagcagattttggtttcagtaacctcttcactcctgggcagctgctgaagacctggtgtggcagccctccctatgctgcacctgaactctttgaaggaaaagaatatgatgggcccaaagtggacatctggagccttggagttgtcctctacgtgcttgtgtgcggtgccctgccatttgatggaagcacactgcagaatctgcgggcccgcgtgctgagtggaaagttccgcatcccattttttatgtccacagatcattaatgattctgaagtacacttttggcagaggaacaggagcaaaagcttaatcatgtggttgcaacaaaaaaggaatagaaggaaaatagacgacacgctctttccagtttactataaa

SEQ ID NO: 19108 - DNA, 764 bp, Homo sapiens
  source 1..764: mol_type = unassigned DNA
ccccgctgccgtgtcccctgcggccggccagccgcgtcccccagccccggcctcccgcggacccatgcccgcccgtatcggctactacgagatcgaccgcaccatcggcaagggcaacttcgcggtggtcaagcgggccacgcacctcgtcaccaaggccaaggttgctatcaagatcatagataagacccagctggatgaagaaaacttgaagaagattttccgggaagttcaaattatgaagatgctttgccacccccatatcatcaggctctaccaggttatggagacagaacggatgatttatctggtgacagaatatgctagtggaggggaaatatttgaccacctggtggcccatggtagaatggcagaaaaggaggcacgtcggaagttcaaacagatcgtcacagctgtctatttttgtcactgtcggaacattgttcatcgtgatttaaaagctgaaaatttacttctggatgccaatctgaatatcaaaatagcaggtgaaaaatgttctaaaactgattgtggtcatcgtcgcacaactctgtgaatgcgctaaaagccgctgggcattacactttcaatgcgtgaattgtatgggatatggaatacaagaaatatgttatggccaggtgcagcggctcatgcctgtaatcccagcgcttcggaaggccgaggtgggaggatcatgtgagctcaggagttcgagaccagcctgggcaacacagcaagaccctgtctctattttattctatgtt

SEQ ID NO: 19109 - DNA, 521 bp, Homo sapiens
  source 1..521: mol_type = unassigned DNA
actgccggcaactttgtgagcgagttcagtgcgtgcgtgagcgagtgagcgaaaaggagagcgcgcggcggacgcgcccgggacgcgcggcggcaccgggaggccgggccgagcggtcttaaaacattttggaaaaagttgaagctctccttttctaccctcctgattctgtgcttctgttggagtgcatatcacttgatggcttctaagacaaatgctaaattcttgtcagattacgcaagtctcggtcttgtcacccagactagagtacagtggtacaatattggctcactgcaacctctgcctcctgggttcaagcgattcttgtgcctcagcctcccaagtagctgggattacaggccctccctatcctgaagacattagctgagagtctggcaccttttaaaggtctgatcatcaattgtctctctgggcggccacctatgagacttcatctgtgtggttataccttattggtgtggacgttgtctaaatttcggtagccatggcacaagaatata

SEQ ID NO: 19110 - DNA, 569 bp, Homo sapiens
  source 1..569: mol_type = unassigned DNA
actgccggcaactttgtgagcgagttcagtgcgtgcgtgagcgagtgagcgaaaaggagagcgcgcggcggacgcgcccgggacgcgcggcggcaccgggaggccgggccgagcggttttgagagattacctgaagttgcactcaaaagcaagatatactactaactttgaaatggaataaggatagatgcccaggtgcatgatttctgagtcatagggccctccctatcctgaagacattagctgagagtctggcaccttttaaaggtctgatcatcaattgtctctctgggcggccacctatgagacttcatctgtgtggtggacttacagtttctggctactactggtggaaaatgatgggctcagacaagagaaagcatgggattatggcaaccacagaatctcagtagtacaagttccattcagttttttctgaaagaaagccctctgttaaagtgaagcaaagaaactgttgtggattataacgtttagaagttccaatttttcagtgctttacaaataaagcatcatttaaccttttaaatgaaaaagattaagatctcatg

SEQ ID NO: 19111 - DNA, 903 bp, Homo sapiens
  source 1..903: mol_type = unassigned DNA
ttcagtgcgtgcgtgagcgagtgagcgaaaaggagagcgcgcggcggacgcgcccgggacgcgcggcggcaccgggaggccgggccgagcgaaatgtggtctcgctgtgttgcccagtactggcctcaagcgagcctcctacctcagccttccaaagtgttgggattataggcgtgagccactgcacctggcacagtcttaaaacattttggaaaaagttgaagctctccttttctaccctcctgattctgtgcttctgttggagtgcatatcacttgatggcttctaagacaaatgctaaattcttgtcagattacgcagttttgagagattacctgaagttgcactcaaaagcaagatatactactaactttgaaatggaataaggccctccctatcctgaagacattagctgagagtctggcaccttttaaaggtctgatcatcaattgtctctctgggcggccacctatgagacttcatctgtgtgctttataaatagcagtccagggcaacagtacttgataaaaaggttataccttattggtgtggacgttgtctaaatttcggtagccatggcacaagaatatagatgtggagaaagtttgggacctcaagagaaagagtggatgtctacagctgcacaaggaagggcaaaccagcagagctcctgggacctgctgaaggaggaaagatgcccgagagctgggcagaggaaaatccctcctgctttcaacaactatgcatttccaaatgtcgaaagagagattgcagagctcaacaacatgaatattttctggcttacctgccaatggtttttttctccccctaaaatgaaacaatatccattatctctagcgacatgtctattttaactttgtcactgttaacagtggttactgg

SEQ ID NO: 19112 - DNA, 576 bp, Homo sapiens
  source 1..576: mol_type = unassigned DNA
agtgcgtgcgtgagcgagtgagcgaaaaggagagcgcgcggcggacgcgcccgggacgcgcggcggcaccgggaggccgggccgagcggtcttaaaacattttggaaaaagttgaagctctccttttctaccctcctgattctgtgcttctgttggagtgcatatcacttgatggcttctaagacaaatgctaaattcttgtcagattacgcagttttgagagattacctgaagttgcactcaaaagcaagatatactactaactttgaaatggaataagaacataagagagcagctgcccatgccaaatagttacctcttttaaactcattctactggagcaaatggccctccctatcctgaagacattagctgagagtctggcaccttttaaaggtctgatcatcaattgtctctctgggcggccacctatgagacttcatctgtgtgctttataaatagcagtccagggcaacagtacttgataaaaaggttataccttattggtgtggacgttgtctaaatttcggtagccatggcacaagaatatagatgtggagaaagtttgggacctca

SEQ ID NO: 19113 - DNA, 591 bp, Homo sapiens
  source 1..591: mol_type = unassigned DNA
agtgcgtgcgtgagcgagtgagcgaaaaggagagcgcgcggcggacgcgcccgggacgcgcggcggcaccgggaggccgggccgagcggttttgagagattacctgaagttgcactcaaaagcaagatatactactaactttgaaatggaataagaacataagagagcagctgcccatgccaaatagttacctcttttaaactcattctactggagcaaatggccctccctatcctgaagacattagctgagagtctggcaccttttaaaggtctgatcatcaattgtctctctgggcggccacctatgagacttcatctgtgtgctttataaatagcagtccagggcaacagtacttgataaaaaggttataccttattggtgtggacgttgtctaaatttcggtagccatggcacaagaatatagatgtggagaaagtttgggacctcaagagaaagagtggatgtctacagctgcacaaggaagggcaaaccagcagagctcctgggacctgctgaaggaggaaagatgcccgagagctgggcagaggaaaatccctcctgctttcaacaactatgcatttccaaatg

SEQ ID NO: 19114 - DNA, 552 bp, Homo sapiens
  source 1..552: mol_type = unassigned DNA
agtgcgtgcgtgagcgagtgagcgaaaaggagagcgcgcggcggacgcgcccgggacgcgcggcggcaccgggaggccgggccgagcggtcttaaaacattttggaaaaagttgaagctctccttttctaccctcctgattctgtgcttctgttggagtgcatatcacttgatggcttctaagacaaatgctaaattcttgtcagattacgcagccctccctatcctgaagacattagctgagagtctggcaccttttaaaggtctgatcatcaattgtctctctgggcggccacctatgagacttcatctgtgtggttataccttattggtgtggacgttgtctaaatttcggtagccatggcacaagaatatagtggacttacagtttctggctactactggtggaaaatgatgggctcagacaagagaaagcatgggattatggcaaccacagaatctcagtagtacaagttccattcagttttttctgaaagaaagccctctgttaaagtgaagcaaagaaactgttgtggattataacgtttagaag

SEQ ID NO: 19115 - DNA, 379 bp, Homo sapiens
  source 1..379: mol_type = unassigned DNA
gccgagtccccggctggagggtccccggggagggccagggagagcgcgcggcggacgcgcccgggacgcgcggcggcaccgggaggccgggccgagcggttttgagagattacctgaagttgcactcaaaagcaagatatactactaactttgaaatggaataaggccctccctatcctgaagacattagctgagagtctggcaccttttaaaggtctgatcatcaattgtctctctgggcggccacctatgagacttcatctgtgtggttataccttattggtgtggacgttgtctaaatttcggtagccatggcacaagaatataagaaagcatgggattatggcaaccacagaatctcagtagtacaagttccatt

SEQ ID NO: 19116 - DNA, 744 bp, Homo sapiens
  source 1..744: mol_type = unassigned DNA
gcaccccagaacccgaatctgcacaactactgggcaggcgtctctgcgggaggccaggagacccgcgtcccggtccgggcggttgcgtccaccccgctgagctggtcgccacctggcgacccttcccctccagtcacctgggccctccctatcctgaagacattagctgagagtctggcaccttttaaaggtctgatcatcaattgtctctctgggcggccacctatgagacttcatctgtgtgctttataaatagcagtccagggcaacagtacttgataaaaaggttataccttattggtgtggacgttgtctaaatttcggtagccatggcacaagaatataagaaagcatgggattatggcaaccacagaatctcagtagtacaagttccattcagttttttctgaaagaaagccctctgttaaagtgaagcaaagaaactgttgtggattataacgtttagaagttccaatttttcagtgctttacaaataaagcatcatttaaccttttaaatgaaaaagattaagatctcatgcaactgttgtattttctggaagccattctccaaaagggaagtgcacatttaaaacacagatatgatggtccttgctgcagggatttaagtctacttgcttttacatcatgaccagcttgaaacggtcacagacagaaaggcctcttgccactgacagggcctctgttgttggcacagacggcacccccaaagtccacactgatg

SEQ ID NO: 19117 - DNA, 457 bp, Homo sapiens
  source 1..457: mol_type = unassigned DNA
agagattacctgaagttgcactcaaaagcaagatatactactaactttgaaatggaataaggtgagttggtggattagttccaaagtcacattgcagggaggaaatgtcactcaaactgtcattcttagaagacctgctatttggccaggcgtgagccaccatgcccggatgtattaatggtattttaataataactcttggttgataaacttaaacatgacagttttgagcaggcaccttaagttctgtatactaccgtgaggccaggcacttgtttagcttctgtgtcatacagctaccccttgtattttgttctttttttttttagtataataaatctatagttttattaacacagaaactgatagtgtggtatgaggtttacgtttaaacaaagttttcacagaaatctaacacatgcctaaaaagattttacaatctagctctagatgcaag

SEQ ID NO: 19118 - DNA, 1823 bp, Homo sapiens
  source 1..1823: mol_type = unassigned DNA
gtggatatttacaaatgcaccgttggattctttgtcgttcaagtgaatgttgactatttacaggccctccctatcctgaagacattagctgagagtctggcaccttttaaaggtctgatcatcaattgtctctctgggcggccacctatgagacttcatctgtgtggttataccttattggtgtggacgttgtctaaatttcggtagccatggcacaagaatatagatgtggagaaagtttgggacctcaagagaaagagtggatgtctacagctgcacaaggaagggcaaaccagcagagctcctgggacctgctgaaggaggaaagatgcccgagagctgggcagaggaaaatccctcctgctttcaacaactatgcatttccaaatgtcgaaagagagattgcagagctcaacaacatgaatattttctggcttacctgccaatggtttttttctccccctaaaatgaaacaatatccattatctctagcgacatgtctattttaactttgtcactgttaacagtggttactggtattccagtactttttcctaatgtgtatagtgttgttttgatttgtatgcctttgatgcttattatactcagaacagtagatgggccttttcttgtgcttgtgttctgtcaaagaatttttcttagttcaacatattctttctttaaaacttgttttaactgcagtgatgccagaaagtttcaaaaagacagttcctcactttttcttggcagcagttctggtgttagaaggtaataacacatagtgaaatcatgatttatttaaagtagaaattttgatttctacaacaaaaatcttgatttttaaccaccataaatttcctgtagtaatcccaagggatgctgtaaaaagaataaggtggggtaggggtgggagtggaaggggtggacaacttcctgaaagagaacataccccagtgcaatcttgaaggaggagtaagagttagaggagtaaagggtggataagaataaaacaggaggaggaaggaagagaattgaatggagttgtgttccagcaaaagttaccacttggcttcacctgaagtctcacgagaacccggtgcattcaagaaattttaactggtttcctttccctttgactggagctcagggttcagggagcatggtgggaagagtgtggagagattgggctgttaattagggagatttatcttgcacttaggaaattctgacattgcaaaaacagagaggctatctccttgaggatttaagcgaaggaggctaagactcgtgctaatatgcaccttataaacagtcttgaataggcaaagtgatcagtttttaaaataagcattattgcagacacacaagactatgttttaagatcaaacttacattctagttagaggatttattttactttgtcacaaaaatgaaaaggttggcaaaaaaaaaaaaagacttcctgccacaaggttttatctttgaacactttattggtttgcgttttgattaattttttttctagttaataagagtttaaatgatcaagttaatacatttgtgaggaaaatctcacttagaaatcagagatttttaagtttaggggattagattaaaaataattttatttgaaagttaggcataaaatgtatgtatatttgcatatgtgcatagtttttaaaaaaaactggaaggatgtggtatgcattaaagaaagatactttgtttgctcctgctttcatttctgttgacaagttgccagaattatttgtatagggcctctattttcggaaccatgatataaataaaggattcaaaatgtt

SEQ ID NO: 19119 - DNA, 5944 bp, Homo sapiens
  source 1..5944: mol_type = unassigned DNA
ggtgtggacgttgtctaaatttcggtagccatggcacaagaatataagaaagcatgggattatggcaaccacagaatctcagtagtacaagttccattcagttttttctgaaagaaagccctctgttaaagtgaagcaaagaaactgttgtggattataacgtttagaagttccaatttttcagtgctttacaaataaagcatcatttaaccttttaaatgaaaaagattaagatctcatgcaactgttgtattttctggaagccattctccaaaagggaagtgcacatttaaaacacagatatgatggtccttgctgcagggatttaagtctacttgcttttacatcatgaccagcttgaaacggtcacagacagaaaggcctcttgccactgacagggcctctgttgttggcacagacggcacccccaaagtccacactgatgatttctacatgcggcgcttccggtcccaaaatggcagcttaggatcatcagttatggctcctgtaggacccccccgaagtgaaggttctcaccatataacctcaacccccggagtcccaaaaatgggggtaagggcaaggattgcagattggcccccaagaaaggaaaacataaaagaatctagccgttcaagccaggaaatagaaacctcaagttgccttgatagcctgtcctccaaaagcagtcctgtgagtcagggaagttctgttagcctcaattccaatgactcagccatgctgaaaagcatacagaacacgctgaaaaacaagacaagaccgtcggagaacatggactccagatttctcatgcctgaagcctaccccagctcccccagaaaagctcttcgcagaatacgccagcgaagcaacagtgatatcaccataagtgaacttgatgtggatagctttgatgaatgtatctcacctacatacaagactggaccatcactgcacagggaatatggtagcacatcttcaattgataaacagggaacatctggagaaagcttttttgatttgttaaagggctacaaagatgacaaatctgatcgaggtccaactccaaccaagctcagtgactttctcattactggtggtggcaagggttctggtttctctttggatgtaatagacgggcctatctcacagagagagaacctcaggctttttaaggaaagggaaaaaccactcaagcgacgttcaaaatctgaaactggagactcatctatttttcgtaaattgcgcaatgccaaaggtgaagaacttgggaagtcatcagatcttgaagataaccgatcagaagactctgtcaggccctggacatgtccaaagtgctttgcccactatgatgtccagagtatattatttgatttgaatgaggcaattatgaacaggcacaatgttattaagaggagaaacaccaccactggagcttccgcagctgccgtggcatccttggtctctggacctctgtctcattcagccagttttagctccccaatgggcagcacagaggacctgaattccaaaggaagcctcagcatggaccagggagatgataaaagcaatgagcttgtaatgagctgtccatattttcggaatgagataggtggagaaggggagaggaaaatcagcctttcaaaatcaaattctggctcctttagtggatgtgaaagtgcctcctttgagtctacccttagttcccattgcacaaatgcaggagtggcagtacttgaagtgcccaaggagaacttggtgttgcacctagatagagtgaaaagatacatcgtggaacacgtagatctgggtgcatactattatagaaaatttttctaccagaaggaacactggaactattttggggctgatgagaatcttggtccagtggctgtgagcattcgaagggaaaaaccagatgaaatgaaagaaaatggatctccgtacaactaccgaataatttttagaactagtgagctcatgacactgagaggttcggtcctggaggacgccattccgtcgacagccaagcactcgacagccagaggcctgcctctcaaagaagtgctggagcacgtggttcctgagctcaatgtccagtgcctgcggttggccttcaacacacccaaggtcacagagcagctcatgaaactggatgaacaagggctgaactaccagcagaaagtaggcatcatgtactgcaaagctggacagagcactgaagaagagatgtacaacaatgagtcagctggcccagcctttgaagaatttcttcaactattgggagagcgagttcggctcaaaggatttgagaagtatcgagcacagcttgataccaaaactgactccactggaacccattctctgtacacaacatacaaagattatgaaattatgttccatgtttctaccatgctgccatacacacccaacaacaaacaacagctcctgaggaagcggcacattggaaatgatatcgtaacaattgttttccaagagcctggagcacagccattcagcccaaaaaacatccgatcccacttccagcacgttttcgtcatcgtcagggtgcacaatccgtgctctgacagtgtctgttatagtgtggctgttaccaggtccagagatgtgccttcctttgggcctcccattcctaaaggggtcactttccctaagtcaaatgtgttcagggacttccttttggcgaaagtgattaatgcagaaaatgctgctcataaatcggagaagtttcgggccatggcaactcggacccgccaggaatacctgaaagatctggcagaaaagaatgtcaccaacacccctatcgacccttctggcaagtttccgttcatctctctggcttccaagaagaaggaaaagtctaagccatatccaggagccgagctcagcagcatgggggccattgtatgggcagtccgggctgaagactacaacaaggccatggaactagactgccttttagggatctccaatgagttcattgtgctcattgaacaggaaacaaagagcgtggtcttcaattgttcctgtagagatgtgatagggtggacttcaactgacaccagcctcaaaatcttctatgaacgaggagaatgtgtttcagtgggtagttttattaacattgaggagatcaaagagattgtcaaaaggttgcagtttgtttcaaaaggctgtgaatcggtggagatgactctgcgaagaaatgggctaggacagcttggcttccatgtcaactatgagggcattgtggcggatgtggagccctacggttatgcctggcaggcagggctgaggcagggcagtcgcctggtggagatctgcaaggtggcggtagccactctgagccatgagcagatgatcgacctcctgagaacatctgtcacggtgaaggttgtcatcattcccccgcatgatgactgcaccccgcggaggagttgctctgaaacctaccgcatgccagtgatggagtacaaaatgaatgaaggtgtttcatacgaattcaagtttcccttccgaaataataacaagtggcagaggaacgccagcaaggggcctcattcacctcaagtcccgtcccaggtgcagagtcccatgacctcgcggctgaatgctggaaaaggagatgggaagatgcctcctccagaaagagccgccaacatccctcgaagcatctccagtgacgggcgcccactagagaggcggctgtctcctggttcggacatctatgtgacggtctcatccatggctttagcaagatcccagtgtcggaactctcctagcaacttgtcttcatccagtgatactggttctgtggggggcacttacaggcagaagtccatgcccgaagggtttggagtgagccgtagatccccagcctccattgacaggcagaacacccagtcagatattggtggcagcggaaaatccacgcctagctggcaaagaagtgaggatagcattgctgaccagatggagccaacatgccatctcccagcagtatcaaaggtactgccagctttccgagagagccccagtgggagattaatgcggcaggatccagtggttcatttgtctccaaacaaacaagggcattctgatagccactactcgagccactccagtagcaatactctctccagcaatgcgtcaagtgcccatagtgatgagaagtggtacgatggggaccgcacagaatccgaactcaacagctataactatctgcaaggcacctctgctgacagtggcattgacaccacctcttatggccccagccacggcagcacagcctcgctgggggctgccacatcgtcacctcgctcagggccaggcaaggagaaagtggcacccctatggcacagctccagtgaagtaatctccatggcagatcggactttggagacagagagccacggcctggaccggaaaacagagtcttccctgagcttagacatacacagcaagagccaagccggctcgacccctctgacaagggagaacagcaccttcagtataaacgatgctgcttcccacacaagtaccatgagctcccgacactctgccagcccagtggttttcaccagtgcccggagttcacctaaagaagagcttcatccagctgccccctcacagctcgcaccatccttctcctcctcttcctcctcctcctctggtcctaggagtttttaccctcgccagggcgctactagcaagtacctgattggatggaaaaaacccgaaggaaccataaactccgtgggatttatggacacgagaaagcgtcatcagagcgatggcaatgaaatagcccacaccaggctgcgtgcctcaaccagagacctccgggcatctcctaagccaacctccaagtccaccattgaagaagatctaaagaaactaattgatcttgaaagcccaactcctgaatcacagaagagttttaagttccacgcactctcctctcctcagtctcctttccccagcacccccacctcacggcgggccttgcacagaacactgtcggacgagagcatttacaatagccagagggagcactttttcacctccagggcgtcacttctggaccaagccctgcccaacgacgtcctcttcagtagcacgtacccttctctccccaagtcgctcccgttgaggaggccttcttacaccttaggaatgaaatcgctgcatggagagttctcagcctcggacagctccctcactgacatccaggagacccgcaggcagcctatgcccgaccctggcctgatgcccctgcctgacactgctgcagacttggattggtccaacctggtagatgctgccaaagcctatgaggtccagagagcctcattttttgctgctagtgatgaaaaccatcgccccttgagtgctgcatccaacagtgatcagctggaggaccaggctctggcccagatgaagccttacagcagcagtaaagactcctctcccactctggcttctaaagtggaccagctggaaggtatgctgaagatgcttcgggaagatttgaagaaggaaaaagaagacaaagctcaccttcaggcggaggtgcagcacctgcgagaggacaacctgaggctacaggaggagtcccagaacgcctcggacaagctgaagaagttcacagaatgggtcttcaacaccatagacatgagctagggaaggctgaggaggacaggagaagggcccagacactccctccagtgagtgtcctgcagcccttattccctccatagaaagcatcctcagagcaccttccctggcttcctactctgccccctttcggggagtgcacaacacaatagttgcagatcaacaatcatcacctgccttttgtagaaaagaaaaacaaaaaaagtaaataaaaattttaaacagtaaaataaaagtttaactgctaaaa

SEQ ID NO: 19120 - DNA, 7831 bp, Homo sapiens
  source 1..7831: mol_type = unassigned DNA
ggtgtggacgttgtctaaatttcggtagccatggcacaagaatataagaaagcatgggattatggcaaccacagaatctcagtagtacaagttccattcagttttttctgaaagaaagccctctgttaaagtgaagcaaagaaactgttgtggattataacgtttagaagttccaatttttcagtgctttacaaataaagcatcatttaaccttttaaatgaaaaagattaagatctcatgcaactgttgtattttctggaagccattctccaaaagggaagtgcacatttaaaacacagatatgatggtccttgctgcagggatttaagtctacttgcttttacatcatgaccagcttgaaacggtcacagacagaaaggcctcttgccactgacagggcctctgttgttggcacagacggcacccccaaagtccacactgatgatttctacatgcggcgcttccggtcccaaaatggcagcttaggatcatcagttatggctcctgtaggacccccccgaagtgaaggttctcaccatataacctcaacccccggagtcccaaaaatgggggtaagggcaaggattgcagattggcccccaagaaaggaaaacataaaagaatctagccgttcaagccaggaaatagaaacctcaagttgccttgatagcctgtcctccaaaagcagtcctgtgagtcagggaagttctgttagcctcaattccaatgactcagccatgctgaaaagcatacagaacacgctgaaaaacaagacaagaccgtcggagaacatggactccagatttctcatgcctgaagcctaccccagctcccccagaaaagctcttcgcagaatacgccagcgaagcaacagtgatatcaccataagtgaacttgatgtggatagctttgatgaatgtatctcacctacatacaagactggaccatcactgcacagggaatatggtagcacatcttcaattgataaacagggaacatctggagaaagcttttttgatttgttaaagggctacaaagatgacaaatctgatcgaggtccaactccaaccaagctcagtgactttctcattactggtggtggcaagggttctggtttctctttggatgtaatagacgggcctatctcacagagagagaacctcaggctttttaaggaaagggaaaaaccactcaagcgacgttcaaaatctgaaactggagactcatctatttttcgtaaattgcgcaatgccaaaggtgaagaacttgggaagtcatcagatcttgaagataaccgatcagaagactctgtcaggccctggacatgtccaaagtgctttgcccactatgatgtccagagtatattatttgatttgaatgaggcaattatgaacaggcacaatgttattaagaggagaaacaccaccactggagcttccgcagctgccgtggcatccttggtctctggacctctgtctcattcagccagttttagctccccaatgggcagcacagaggacctgaattccaaaggaagcctcagcatggaccagggagatgataaaagcaatgagcttgtaatgagctgtccatattttcggaatgagataggtggagaaggggagaggaaaatcagcctttcaaaatcaaattctggctcctttagtggatgtgaaagtgcctcctttgagtctacccttagttcccattgcacaaatgcaggagtggcagtacttgaagtgcccaaggagaacttggtgttgcacctagatagagtgaaaagatacatcgtggaacacgtagatctgggtgcatactattatagaaaatttttctaccagaaggaacactggaactattttggggctgatgagaatcttggtccagtggctgtgagcattcgaagggaaaaaccagatgaaatgaaagaaaatggatctccgtacaactaccgaataatttttagaactagtgagctcatgacactgagaggttcggtcctggaggacgccattccgtcgacagccaagcactcgacagccagaggcctgcctctcaaagaagtgctggagcacgtggttcctgagctcaatgtccagtgcctgcggttggccttcaacacacccaaggtcacagagcagctcatgaaactggatgaacaagggctgaactaccagcagaaagtaggcatcatgtactgcaaagctggacagagcactgaagaagagatgtacaacaatgagtcagctggcccagcctttgaagaatttcttcaactattgggagagcgagttcggctcaaaggatttgagaagtatcgagcacagcttgataccaaaactgactccactggaacccattctctgtacacaacatacaaagattatgaaattatgttccatgtttctaccatgctgccatacacacccaacaacaaacaacagctcctgaggaagcggcacattggaaatgatatcgtaacaattgttttccaagagcctggagcacagccattcagcccaaaaaacatccgatcccacttccagcacgttttcgtcatcgtcagggtgcacaatccgtgctctgacagtgtctgttatagtgtggctgttaccaggtccagagatgtgccttcctttgggcctcccattcctaaaggggtcactttccctaagtcaaatgtgttcagggacttccttttggcgaaagtgattaatgcagaaaatgctgctcataaatcggagaagtttcgggccatggcaactcggacccgccaggaatacctgaaagatctggcagaaaagaatgtcaccaacacccctatcgacccttctggcaagtttccgttcatctctctggcttccaagaagaaggaaaagtctaagccatatccaggagccgagctcagcagcatgggggccattgtatgggcagtccgggctgaagactacaacaaggccatggaactagactgccttttagggatctccaatgagttcattgtgctcattgaacaggaaacaaagagcgtggtcttcaattgttcctgtagagatgtgatagggtggacttcaactgacaccagcctcaaaatcttctatgaacgaggagaatgtgtttcagtgggtagttttattaacattgaggagatcaaagagattgtcaaaaggttgcagtttgtttcaaaaggctgtgaatcggtggagatgactctgcgaagaaatgggctaggacagcttggcttccatgtcaactatgagggcattgtggcggatgtggagccctacggttatgcctggcaggcagggctgaggcagggcagtcgcctggtggagatctgcaaggtggcggtagccactctgagccatgagcagatgatcgacctcctgagaacatctgtcacggtgaaggttgtcatcattcccccgcatgatgactgcaccccgcggaggagttgctctgaaacctaccgcatgccagtgatggagtacaaaatgaatgaaggtgtttcatacgaattcaagtttcccttccgaaataataacaagtggcagaggaacgccagcaaggggcctcattcacctcaagtcccgtcccaggtgcagagtcccatgacctcgcggctgaatgctggaaaaggagatgggaagatgcctcctccagaaagagccgccaacatccctcgaagcatctccagtgacgggcgcccactagagaggcggctgtctcctggttcggacatctatgtgacggtctcatccatggctttagcaagatcccagtgtcggaactctcctagcaacttgtcttcatccagtgatactggttctgtggggggcacttacaggcagaagtccatgcccgaagggtttggagtgagccgtagatccccagcctccattgacaggcagaacacccagtcagatattggtggcagcggaaaatccacgcctagctggcaaagaagtgaggatagcattgctgaccagatggcttacagttatagaggacctcaggatttcaattcttttgtcctcgagcagcatgaatatacagagccaacatgccatctcccagcagtatcaaaggtactgccagctttccgagagagccccagtgggagattaatgcggcaggatccagtggttcatttgtctccaaacaaacaagggcattctgatagccactactcgagccactccagtagcaatactctctccagcaatgcgtcaagtgcccatagtgatgagaagtggtacgatggggaccgcacagaatccgaactcaacagctataactatctgcaaggcacctctgctgacagtggcattgacaccacctcttatggccccagccacggcagcacagcctcgctgggggctgccacatcgtcacctcgctcagggccaggcaaggagaaagtggcacccctatggcacagctccagtgaagtaatctccatggcagatcggactttggagacagagagccacggcctggaccggaaaacagagtcttccctgagcttagacatacacagcaagagccaagccggctcgacccctctgacaagggagaacagcaccttcagtataaacgatgctgcttcccacacaagtaccatgagctcccgacactctgccagcccagtggttttcaccagtgcccggagttcacctaaagaagagcttcatccagctgccccctcacagctcgcaccatccttctcctcctcttcctcctcctcctctggtcctaggagtttttaccctcgccagggcgctactagcaagtacctgattggatggaaaaaacccgaaggaaccataaactccgtgggatttatggacacgagaaagcgtcatcagagcgatggcaatgaaatagcccacaccaggctgcgtgcctcaaccagagacctccgggcatctcctaagccaacctccaagtccaccattgaagaagatctaaagaaactaattgatcttgaaagcccaactcctgaatcacagaagagttttaagttccacgcactctcctctcctcagtctcctttccccagcacccccacctcacggcgggccttgcacagaacactgtcggacgagagcatttacaatagccagagggagcactttttcacctccagggcgtcacttctggaccaagccctgcccaacgacgtcctcttcagtagcacgtacccttctctccccaagtcgctcccgttgaggaggccttcttacaccttaggaatgaaatcgctgcatggagagttctcagcctcggacagctccctcactgacatccaggagacccgcaggcagcctatgcccgaccctggcctgatgcccctgcctgacactgctgcagacttggattggtccaacctggtagatgctgccaaagcctatgaggtccagagagcctcattttttgctgctagtgatgaaaaccatcgccccttgagtgctgcatccaacagtgatcagctggaggaccaggctctggcccagatgaagccttacagcagcagtaaagactcctctcccactctggcttctaaagtggaccagctggaaggtatgctgaagatgcttcgggaagatttgaagaaggaaaaagaagacaaagctcaccttcaggcggaggtgcagcacctgcgagaggacaacctgaggctacaggaggagtcccagaacgcctcggacaagctgaagaagttcacagaatgggtcttcaacaccatagacatgagctagggaaggctgaggaggacaggagaagggcccagacactccctccagtgagtgtcctgcagcccttattccctccatagaaagcatcctcagagcaccttccctggcttcctactctgccccctttcggggagtgcacaacacaatagttgcagatcaacaatcatcacctgccttttgtagaaaagaaaaacaaaaaaagtaaataaaaattttaaacagtaaaataaaagtttaactgctaaaatgtgaatgtctttatttttttgcacaatatctttatctgttatgtatttaagaagaaactgggccttggaccagggcgccccctggcccatccgcctctattcccatcagctttcttatcaacttcaggtaacccaagctttcccttgttattctaacaaatatcattattcctagaaaaagaatgtttttataacttgtttggggagtagagagggatatttccttaccttcttccctaaaatgcctggagagggagttgctttgagaaaatgcctacctcccttgaatgactcgtgcatgagctagtgctgtctgtacctgtcctccagagatcagcaggaccggagttaaatatttaacagcaagtctgtaaaccagagcagctctgacagtgcctgcaggccacaccccttctcagtcctgcattgtgaggtcatttcctgcttctccctttccccaggaagatggtcccacttgtgctgcaagactcttttttgtttggcttaattgagccccactaaattggaatcaatctctcttacagcttcctggctccaaacattaattgatttcagaattcccccaaactaaaaccttatctgtctgcattttgaatgcattttggtcaaaagtatacgttttaaagatttttaaagataaaaatgtggcacaactggtttttttagcttgctgaaaatgaccatatctctaaattaatctttctctccagagcaagacttcaccagtatttgtaactaggagaagctaacagtgaatgtttaattgtgaattttaatcattgcttgttaggaataatgactgtgatactagaatgggcttttgaaacctgcatgtcccagtgtgaaatttcagcacggcattttctgcatcctttcatggccatccaaaggattccgctgcagaaattattgatgtgctatttttgctgtcttgtgatgcaggctgctttgggcccctgggtcactcttccaaggctgctgtagagcacagagacatggggctggccagtgttgactgacctgaggagacccctttgtttgttgccttcataactgtcactaaaccgacccctctgccctttcagtggcaactctggtctaagggaacattcagcactctagcggcatctgattggaagttccctcacccaagtaatctcaattccttcctctctccatccctgaaagaaacaggatggattttcctctcttctccctgctacattcactaccagatttttatgctacagtttcattcttgattgtgatttctccatggaattttttttttctggtgacatttctatcatggaaataggaagatttcggagtgctttgtgaagatttcaattgtctgtctctttctctctttgacttgtatgaaggagattgtacattgcctgatatctctttgtaaatgagaaatattgctaacatccaagcattctgaagtcttgcttatccttctgagtttagttctcattttgttttacattttgtttggggacttggggcaagctatttattagagttttgcaacagagttcttgtttgaagcctctaaagactacctgtaaaattcaaagaataaaattcattttaaacgctcttttaaaacactttggtattattgcttgaggtttgcttatttgaaagaccacccaataactcattgaccctccttgcatccgaattttttcatcaagctttgttaacactaatgatgattcttgaaaatttctgtccttctcagaatgttaataaacttttttactctgtccacatgtcgatagagaattact

SEQ ID NO: 19121 - DNA, 6539 bp, Homo sapiens
  source 1..6539: mol_type = unassigned DNA
gagtcttctaaagtgatgctgtgtgctgcaagagaaatgaaagcgcctgccttggaggcaggaagccgactagggagatgcttaattatcgtggaagtaggtgcttgttaccattgagtggagagtgcagcaagtgcaggtcgtcctccggtgtcagagccgtgatttgtagacaatgccgccctgtcagctcagtgctggttcagcagcatctttccaaacatgtatttggcaagaatttaaaggccacctcttgtgtaatttgtggagtcttggaaaaggagcctctgcctttcttttcagaatgtacgcaaccatgcagaattttgtactcagaatctgtgtctcctgccttctgcctgacgtgctcatgaggaagtttgtttccatgcccgtcacctggaaggatgctaacagttctctgtaatctgttggggatatggagagggccacccagagctgtgttttgtttctgccgtcttcataaattagcactgatggggtggagtaggttgtactgcatgaggaaatgcaggcattttgttcattagtgagatacttctagcttttaagagtacaagaaactaaggagagcttgggaagaggtggtggtgaatgctggattcattctgcaatatcctcgtctcgagaaagcatgggattatggcaaccacagaatctcagtagtacaagttccattcagttttttctgaaagaaagccctctgttaaagtgaagcaaagaaactgttgtggattataacgtttagaagttccaatttttcagtgctttacaaataaagcatcatttaaccttttaaatgaaaaagattaagatctcatgcaactgttgtattttctggaagccattctccaaaagggaagtgcacatttaaaacacagatatgatggtccttgctgcagggatttaagtctacttgcttttacatcatgaccagcttgaaacggtcacagacagaaaggcctcttgccactgacagggcctctgttgttggcacagacggcacccccaaagtccacactgatgatttctacatgcggcgcttccggtcccaaaatggcagcttaggatcatcagttatggctcctgtaggacccccccgaagtgaaggttctcaccatataacctcaacccccggagtcccaaaaatgggggtaagggcaaggattgcagattggcccccaagaaaggaaaacataaaagaatctagccgttcaagccaggaaatagaaacctcaagttgccttgatagcctgtcctccaaaagcagtcctgtgagtcagggaagttctgttagcctcaattccaatgactcagccatgctgaaaagcatacagaacacgctgaaaaacaagacaagaccgtcggagaacatggactccagatttctcatgcctgaagcctaccccagctcccccagaaaagctcttcgcagaatacgccagcgaagcaacagtgatatcaccataagtgaacttgatgtggatagctttgatgaatgtatctcacctacatacaagactggaccatcactgcacagggaatatggtagcacatcttcaattgataaacagggaacatctggagaaagcttttttgatttgttaaagggctacaaagatgacaaatctgatcgaggtccaactccaaccaagctcagtgactttctcattactggtggtggcaagggttctggtttctctttggatgtaatagacgggcctatctcacagagagagaacctcaggctttttaaggaaagggaaaaaccactcaagcgacgttcaaaatctgaaactggagactcatctatttttcgtaaattgcgcaatgccaaaggtgaagaacttgggaagtcatcagatcttgaagataaccgatcagaagactctgtcaggccctggacatgtccaaagtgctttgcccactatgatgtccagagtatattatttgatttgaatgaggcaattatgaacaggcacaatgttattaagaggagaaacaccaccactggagcttccgcagctgccgtggcatccttggtctctggacctctgtctcattcagccagttttagctccccaatgggcagcacagaggacctgaattccaaaggaagcctcagcatggaccagggagatgataaaagcaatgagcttgtaatgagctgtccatattttcggaatgagataggtggagaaggggagaggaaaatcagcctttcaaaatcaaattctggctcctttagtggatgtgaaagtgcctcctttgagtctacccttagttcccattgcacaaatgcaggagtggcagtacttgaagtgcccaaggagaacttggtgttgcacctagatagagtgaaaagatacatcgtggaacacgtagatctgggtgcatactattatagaaaatttttctaccagaaggaacactggaactattttggggctgatgagaatcttggtccagtggctgtgagcattcgaagggaaaaaccagatgaaatgaaagaaaatggatctccgtacaactaccgaataatttttagaactagtgagctcatgacactgagaggttcggtcctggaggacgccattccgtcgacagccaagcactcgacagccagaggcctgcctctcaaagaagtgctggagcacgtggttcctgagctcaatgtccagtgcctgcggttggccttcaacacacccaaggtcacagagcagctcatgaaactggatgaacaagggctgaactaccagcagaaagtaggcatcatgtactgcaaagctggacagagcactgaagaagagatgtacaacaatgagtcagctggcccagcctttgaagaatttcttcaactattgggagagcgagttcggctcaaaggatttgagaagtatcgagcacagcttgataccaaaactgactccactggaacccattctctgtacacaacatacaaagattatgaaattatgttccatgtttctaccatgctgccatacacacccaacaacaaacaacagctcctgaggaagcggcacattggaaatgatatcgtaacaattgttttccaagagcctggagcacagccattcagcccaaaaaacatccgatcccacttccagcacgttttcgtcatcgtcagggtgcacaatccgtgctctgacagtgtctgttatagtgtggctgttaccaggtccagagatgtgccttcctttgggcctcccattcctaaaggggtcactttccctaagtcaaatgtgttcagggacttccttttggcgaaagtgattaatgcagaaaatgctgctcataaatcggagaagtttcgggccatggcaactcggacccgccaggaatacctgaaagatctggcagaaaagaatgtcaccaacacccctatcgacccttctggcaagtttccgttcatctctctggcttccaagaagaaggaaaagtctaagccatatccaggagccgagctcagcagcatgggggccattgtatgggcagtccgggctgaagactacaacaaggccatggaactagactgccttttagggatctccaatgagttcattgtgctcattgaacaggaaacaaagagcgtggtcttcaattgttcctgtagagatgtgatagggtggacttcaactgacaccagcctcaaaatcttctatgaacgaggagaatgtgtttcagtgggtagttttattaacattgaggagatcaaagagattgtcaaaaggttgcagtttgtttcaaaaggctgtgaatcggtggagatgactctgcgaagaaatgggctaggacagcttggcttccatgtcaactatgagggcattgtggcggatgtggagccctacggttatgcctggcaggcagggctgaggcagggcagtcgcctggtggagatctgcaaggtggcggtagccactctgagccatgagcagatgatcgacctcctgagaacatctgtcacggtgaaggttgtcatcattcccccgcatgatgactgcaccccgcggaggagttgctctgaaacctaccgcatgccagtgatggagtacaaaatgaatgaaggtgtttcatacgaattcaagtttcccttccgaaataataacaagtggcagaggaacgccagcaaggggcctcattcacctcaagtcccgtcccaggtgcagagtcccatgacctcgcggctgaatgctggaaaaggagatgggaagatgcctcctccagaaagagccgccaacatccctcgaagcatctccagtgacgggcgcccactagagaggcggctgtctcctggttcggacatctatgtgacggtctcatccatggctttagcaagatcccagtgtcggaactctcctagcaacttgtcttcatccagtgatactggttctgtggggggcacttacaggcagaagtccatgcccgaagggtttggagtgagccgtagatccccagcctccattgacaggcagaacacccagtcagatattggtggcagcggaaaatccacgcctagctggcaaagaagtgaggatagcattgctgaccagatggagccaacatgccatctcccagcagtatcaaaggtactgccagctttccgagagagccccagtgggagattaatgcggcaggatccagtggttcatttgtctccaaacaaacaagggcattctgatagccactactcgagccactccagtagcaatactctctccagcaatgcgtcaagtgcccatagtgatgagaagtggtacgatggggaccgcacagaatccgaactcaacagctataactatctgcaaggcacctctgctgacagtggcattgacaccacctcttatggccccagccacggcagcacagcctcgctgggggctgccacatcgtcacctcgctcagggccaggcaaggagaaagtggcacccctatggcacagctccagtgaagtaatctccatggcagatcggactttggagacagagagccacggcctggaccggaaaacagagtcttccctgagcttagacatacacagcaagagccaagccggctcgacccctctgacaagggagaacagcaccttcagtataaacgatgctgcttcccacacaagtaccatgagctcccgacactctgccagcccagtggttttcaccagtgcccggagttcacctaaagaagagcttcatccagctgccccctcacagctcgcaccatccttctcctcctcttcctcctcctcctctggtcctaggagtttttaccctcgccagggcgctactagcaagtacctgattggatggaaaaaacccgaaggaaccataaactccgtgggatttatggacacgagaaagcgtcatcagagcgatggcaatgaaatagcccacaccaggctgcgtgcctcaaccagagacctccgggcatctcctaagccaacctccaagtccaccattgaagaagatctaaagaaactaattgatcttgaaagcccaactcctgaatcacagaagagttttaagttccacgcactctcctctcctcagtctcctttccccagcacccccacctcacggcgggccttgcacagaacactgtcggacgagagcatttacaatagccagagggagcactttttcacctccagggcgtcacttctggaccaagccctgcccaacgacgtcctcttcagtagcacgtacccttctctccccaagtcgctcccgttgaggaggccttcttacaccttaggaatgaaatcgctgcatggagagttctcagcctcggacagctccctcactgacatccaggagacccgcaggcagcctatgcccgaccctggcctgatgcccctgcctgacactgctgcagacttggattggtccaacctggtagatgctgccaaagcctatgaggtccagagagcctcattttttgctgctagtgatgaaaaccatcgccccttgagtgctgcatccaacagtgatcagctggaggaccaggctctggcccagatgaagccttacagcagtaaagactcctctcccactctggcttctaaagtggaccagctggaaggtatgctgaagatgcttcgggaagatttgaagaaggaaaaagaagacaaagctcaccttcaggcggaggtgcagcacctgcgagaggacaacctgaggctacaggaggagtcccagaacgcctcggacaagctgaagaagttcacagaatgggtcttcaacaccatagacatgagctagggaaggctgaggaggacaggagaagggcccagacactccctccagtgagtgtcctgcagcccttattccctccatagaaagcatcctcagagcaccttccctggcttcctactctgccccctttcggggagtgcacaacacaatagttgcagatcaacaatcatcacctgccttttgtagaaaagaaaaacaaaaaaagtaaataaaaattttaaacagtaaaataaaagtttaactgct

SEQ ID NO: 19122 - DNA, 4129 bp, Homo sapiens
  source 1..4129: mol_type = unassigned DNA
attgtaaactttactggacacaactgatggaagctaaaatcagtgaatgactgtttcaggagaaatgggaggagaagcaggatttgcatgatctccagaacactggaactattttggggctgatgagaatcttggtccagtggctgtgagcattcgaagggaaaaaccagatgaaatgaaagaaaatggatctccgtacaactaccgaataatttttagaactagtgagctcatgacactgagaggttcggtcctggaggacgccattccgtcgacagccaagcactcgacagccagaggcctgcctctcaaagaagtgctggagcacgtggttcctgagctcaatgtccagtgcctgcggttggccttcaacacacccaaggtcacagagcagctcatgaaactggatgaacaagggctgaactaccagcagaaagtaggcatcatgtactgcaaagctggacagagcactgaagaagagatgtacaacaatgagtcagctggcccagcctttgaagaatttcttcaactattgggagagcgagttcggctcaaaggatttgagaagtatcgagcacagcttgataccaaaactgactccactggaacccattctctgtacacaacatacaaagattatgaaattatgttccatgtttctaccatgctgccatacacacccaacaacaaacaacagctcctgaggaagcggcacattggaaatgatatcgtaacaattgttttccaagagcctggagcacagccattcagcccaaaaaacatccgatcccacttccagcacgttttcgtcatcgtcagggtgcacaatccgtgctctgacagtgtctgttatagtgtggctgttaccaggtccagagatgtgccttcctttgggcctcccattcctaaaggggtcactttccctaagtcaaatgtgttcagggacttccttttggcgaaagtgattaatgcagaaaatgctgctcataaatcggagaagtttcgggccatggcaactcggacccgccaggaatacctgaaagatctggcagaaaagaatgtcaccaacacccctatcgacccttctggcaagtttccgttcatctctctggcttccaagaagaaggaaaagtctaagccatatccaggagccgagctcagcagcatgggggccattgtatgggcagtccgggctgaagactacaacaaggccatggaactagactgccttttagggatctccaatgagttcattgtgctcattgaacaggaaacaaagagcgtggtcttcaattgttcctgtagagatgtgatagggtggacttcaactgacaccagcctcaaaatcttctatgaacgaggagaatgtgtttcagtgggtagttttattaacattgaggagatcaaagagattgtcaaaaggttgcagtttgtttcaaaaggctgtgaatcggtggagatgactctgcgaagaaatgggctaggacagcttggcttccatgtcaactatgagggcattgtggcggatgtggagccctacggttatgcctggcaggcagggctgaggcagggcagtcgcctggtggagatctgcaaggtggcggtagccactctgagccatgagcagatgatcgacctcctgagaacatctgtcacggtgaaggttgtcatcattcccccgcatgatgactgcaccccgcggaggagttgctctgaaacctaccgcatgccagtgatggagtacaaaatgaatgaaggtgtttcatacgaattcaagtttcccttccgaaataataacaagtggcagaggaacgccagcaaggggcctcattcacctcaagtcccgtcccaggtgcagagtcccatgacctcgcggctgaatgctggaaaaggagatgggaagatgcctcctccagaaagagccgccaacatccctcgaagcatctccagtgacgggcgcccactagagaggcggctgtctcctggttcggacatctatgtgacggtctcatccatggctttagcaagatcccagtgtcggaactctcctagcaacttgtcttcatccagtgatactggttctgtggggggcacttacaggcagaagtccatgcccgaagggtttggagtgagccgtagatccccagcctccattgacaggcagaacacccagtcagatattggtggcagcggaaaatccacgcctagctggcaaagaagtgaggatagcattgctgaccagatggagccaacatgccatctcccagcagtatcaaaggtactgccagctttccgagagagccccagtgggagattaatgcggcaggatccagtggttcatttgtctccaaacaaacaagggcattctgatagccactactcgagccactccagtagcaatactctctccagcaatgcgtcaagtgcccatagtgatgagaagtggtacgatggggaccgcacagaatccgaactcaacagctataactatctgcaaggcacctctgctgacagtggcattgacaccacctcttatggccccagccacggcagcacagcctcgctgggggctgccacatcgtcacctcgctcagggccaggcaaggagaaagtggcacccctatggcacagctccagtgaagtaatctccatggcagatcggactttggagacagagagccacggcctggaccggaaaacagagtcttccctgagcttagacatacacagcaagagccaagccggctcgacccctctgacaagggagaacagcaccttcagtataaacgatgctgcttcccacacaagtaccatgagctcccgacactctgccagcccagtggttttcaccagtgcccggagttcacctaaagaagagcttcatccagctgccccctcacagctcgcaccatccttctcctcctcttcctcctcctcctctggtcctaggagtttttaccctcgccagggcgctactagcaagtacctgattggatggaaaaaacccgaaggaaccataaactccgtgggatttatggacacgagaaagcgtcatcagagcgatggcaatgaaatagcccacaccaggctgcgtgcctcaaccagagacctccgggcatctcctaagccaacctccaagtccaccattgaagaagatctaaagaaactaattgatcttgaaagcccaactcctgaatcacagaagagttttaagttccacgcactctcctctcctcagtctcctttccccagcacccccacctcacggcgggccttgcacagaacactgtcggacgagagcatttacaatagccagagggagcactttttcacctccagggcgtcacttctggaccaagccctgcccaacgacgtcctcttcagtagcacgtacccttctctccccaagtcgctcccgttgaggaggccttcttacaccttaggaatgaaatcgctgcatggagagttctcagcctcggacagctccctcactgacatccaggagacccgcaggcagcctatgcccgaccctggcctgatgcccctgcctgacactgctgcagacttggattggtccaacctggtagatgctgccaaagcctatgaggtccagagagcctcattttttgctgctagtgatgaaaaccatcgccccttgagtgctgcatccaacagtgatcagctggaggaccaggctctggcccagatgaagccttacagcagtaaagactcctctcccactctggcttctaaagtggaccagctggaaggtatgctgaagatgcttcgggaagatttgaagaaggaaaaagaagacaaagctcaccttcaggcggaggtgcagcacctgcgagaggacaacctgaggctacaggaggagtcccagaacgcctcggacaagctgaagaagttcacagaatgggtcttcaacaccatagacatgagctagggaaggctgaggaggacaggagaagggcccagacactccctccagtgagtgtcctgcagcccttattccctccatagaaagcatcctcagagcaccttccctggcttcctactctgccccctttcggggagtgcacaacacaatagttgcagatcaacaatcatcacctgccttttgtag

SEQ ID NO: 19123 - DNA, 785 bp, Homo sapiens
  source 1..785: mol_type = unassigned DNA
gaacactggaactattttggggctgatgagaatcttggtccagtggctgtgagcattcgaagggaaaaaccagatgaaatgaaagaaaatggatctccgtacaactaccgaataatttttagaactagtgagctcatgacactgagaggttcggtcctggaggacgccattccgtcgacagccaagcactcgacagccagaggcctgcctctcaaagaagtgctggagcacgtggttcctgagctcaatgtccagtgcctgcggttggccttcaacacacccaaggtcacagagcagctcatgaaactggatgaacaagggtggatctgcctatatttatatgcatcgtattacctgccttcacagctgaactaccagcagaaagtaggcatcatgtactgcaaagctggacagagcactgaagaagagatgtacaacaatgagtcagctggcccagcctttgaagaatttcttcaactattgggagagcgagttcggctcaaaggatttgagaagtatcgagcacagcttgataccaaaactgactccactggaacccattctctgtacacaacatacaaagattatgaaattatgttccatgtttctaccatgctgccatacacacccaacaacaaacaacagctcctgaggaagcggcacattggaaatgatatcgtaacaattgttttccaagagcctggagcacagccattcagcccaaaaaacatccgatcccacttccagcacgttttcgtcatcgtcagggtgcacaatccgtgctc

SEQ ID NO: 19124 - DNA, 1136 bp, Homo sapiens
  source 1..1136: mol_type = unassigned DNA
gagttgctctgaaacctaccgcatgccagtgatggagtacaaaatgaatgaaggtgtttcatacgaattcaagtttcccttccgaaataataacaagtggcagaggaacgccagcaaggggcctcattcacctcaagtcccgtcccaggtgcagagtcccatgacctcgcggctgaatgctggaaaaggagatgggaagatgcctcctccagaaagagccgccaacatccctcgaagcatctccagtgacgggcgcccactagagaggcggtttggagtgagccgtagatccccagcctccattgacaggcagaacacccagtcagatattggtggcagcggaaaatccacgcctagctggcaaagaagtgaggatagcattgctgaccagatggcttacagttatagaggacctcaggatttcaattcttttgtcctcgagcagcatgaatatacaggtaaaatatttccaaagtgtcatggtaagtaacacgtgattgcatccatgcctgtctaggtaatgtagaccaagctaggttagccacacttggcaatgaatgaatttcataaatttaattcatataatctaaatttttcccccaaaccaaaagttgattctgaactttgctgcgttgttcatggcctttggtttggtggtacttggctatgctaatgtgtatgacgtgacaagttgtcaccagctgcaagctttatccatcagccacttaagtttctgacctgctgtctatcaaatagactcttaacaagcttactgctgaaatgcagagtttgctggtcagtgaactgaaagatgcaatggcaagccatcttcatttgtcaccatgtgcttgtttctgcttagtgcctgcaccataatgtcctatgctgtattccagagccaacatgccatctcccagcagtatcaaaggtactgccagctttccgagagagccccagtgggagattaatgcggcaggatccagtggttcatttgtctccaaacaaacaagggcattctgatagccactactcgagccactccagtagcaatactctctccagcaatgcgtcaagtgcccatagtgatgagaagtggtacgatggggaccgcacagaatccgaactcaacagctata

SEQ ID NO: 19125 - DNA, 2106 bp, Homo sapiens
  source 1..2106: mol_type = unassigned DNA
cccaggactgccttcccctcatgggtaaggtccctgatgttgtctttgcctttgcggaaatcaccacaggtttggagtgagccgtagatccccagcctccattgacaggcagaacacccagtcagatattggtggcagcggaaaatccacgcctagctggcaaagaagtgaggatagcattgctgaccagatggagccaacatgccatctcccagcagtatcaaaggtactgccagctttccgagagagccccagtgggagattaatgcggcaggatccagtggttcatttgtctccaaacaaacaagggcattctgatagccactactcgagccactccagtagcaatactctctccagcaatgcgtcaagtgcccatagtgatgagaagtggtacgatggggaccgcacagaatccgaactcaacagctataactatctgcaaggcacctctgctgacagtggcattgacaccacctcttatggccccagccacggcagcacagcctcgctgggggctgccacatcgtcacctcgctcagggccaggcaaggagaaagtggcacccctatggcacagctccagtgaagtaatctccatggcagatcggactttggagacagagagccacggcctggaccggaaaacagagtcttccctgagcttagacatacacagcaagagccaagccggctcgacccctctgacaagggagaacagcaccttcagtataaacgatgctgcttcccacacaagtaccatgagctcccgacactctgccagcccagtggttttcaccagtgcccggagttcacctaaagaagagcttcatccagctgccccctcacagctcgcaccatccttctcctcctcttcctcctcctcctctggtcctaggagtttttaccctcgccagggcgctactagcaagtacctgattggatggaaaaaacccgaaggaaccataaactccgtgggatttatggacacgagaaagcgtcatcagagcgatggcaatgaaatagcccacaccaggctgcgtgcctcaaccagagacctccgggcatctcctaagccaacctccaagtccaccattgaagaagatctaaagaaactaattgatcttgaaagcccaactcctgaatcacagaagagttttaagttccacgcactctcctctcctcagtctcctttccccagcacccccacctcacggcgggccttgcacagaacactgtcggacgagagcatttacaatagccagagggagcactttttcacctccagggcgtcacttctggaccaagccctgcccaacgacgtcctcttcagtagcacgtacccttctctccccaagtcgctcccgttgaggaggccttcttacaccttaggaatgaaatcgctgcatggagagttctcagcctcggacagctccctcactgacatccaggagacccgcaggcagcctatgcccgaccctggcctgatgcccctgcctgacactgctgcagacttggattggtccaacctggtagatgctgccaaagcctatgaggtccagagagcctcattttttgctgctagtgatgaaaaccatcgccccttgagtgctgcatccaacagtgatcagctggaggaccaggctctggcccagatgaagccttacagcagcagtaaagactcctctcccactctggcttctaaagtggaccagctggaaggtatgctgaagatgcttcgggaagatttgaagaaggaaaaagaagacaaagctcaccttcaggcggaggtgcagcacctgcgagaggacaacctgaggctacaggaggagtcccagaacgcctcggacaagctgaagaagttcacagaatgggtcttcaacaccatagacatgagctagggaaggctgaggaggacaggagaagggcccagacactccctccagtgagtgtcctgcagcccttattccctccatagaaagcatcctcagagcaccttccctggcttcctactctgccccctttcggggagtgcacaacacaatagttgcagatcaacaatcatcacctgccttttgtagaaaagaaaaacaaaaaaagtaaataa

SEQ ID NO: 19126 - DNA, 574 bp, Homo sapiens
  source 1..574: mol_type = unassigned DNA
ggaccaagccctgcccaacgacgtcctcttcagtagcacgtacccttctctccccaagtcgctcccgttgaggaggccttcttacaccttaggaatgaaatcgctgcatggagagttctcagcctcggacagctccctcactgacatccaggagacccgcaggcagcctatgcccgaccctggcctgatgcccctgcctgacactgctgcagacttggattggtccaacctggtagatgctgccaaagcctatgaggtccagagagcctcattttttgctgctagtgatgaaaaccatcgccccttgagtgctgcatccaacagtgatcagctggaggaccaggctctggcccagatgaagccttacagcaggttggtcccagtgcaagggcagtactctgcaccttgtgtcacatctgccactgactgcatctgtggggagaagagatggaagccacacggagtagctgagtgaagctgatcactgcagggctagacactttacattttagtcagaacgctttgtaactgaatactgtagacataattaaactattcttgatgacttatacgg

SEQ ID NO: 19127 - DNA, 6690 bp, Homo sapiens
  source 1..6690: mol_type = unassigned DNA
actaggggtgggcattgtgtgtggctcccctgtggtagagaaggacatcggatgaacatgtgatctgtgtatccagctccaacccaaaaggtgaaggaaatactcatgaccagccagatgtcttaaggaatgcttttgaaaagaacagaggcgtacaacattattacgacaacagagaagcaagttggctttgaagaaactgtattctgaggatgttgtttgctttgggctaagaaaagaaaaaatacaactacagacaaagcctttatatctgcaagtattatggcgtggtcggtagcaatgtaattagatttacatcagtcttcctggtgagacttggaggctcttcctcggtagacatgagtgacccaaggcagtcacaagaagagaagcacaagctaggcagagcctcttcaaagttcaaggatccccctagaatcatgcagtcagatgattattttgctcggaaatttaaagccattaatggcaacatgggacccactacttctttaaatgcctcgaattccaatgagactggcggtggtggtccggctaatggtaccccagctgtgcccaagatgggtgtgagagcaagggtgtctgaatggcctcctaaaaaggactgttccaaggagctaacatgcaaggcactgtgggaaagccggtctcagaccagttatgaaagcatcacttctgtcctgcagaatgggcagagtgaccagagtgaaggtcagcaagatgaacagctcgatctggacttcgtggaggccaagtacacaatcggagacatctttgtccattccccccaaagaggacttcaccccataagacagaggagcaatagtgatgtcactatcagtgacattgatgccgaagatgtcttagaccaaaatgcagtcaaccccaacaccggggctgccctgcacagggagtatggaagtacttcatccatcgacaggcaaggcttatctggtgaaaacttttttgctatgctcagagggtaccgagtagaaaattatgaccacaaagcaatggtcccttttgggttccctgaatttttccgctgtgaccctgcaatctctccgagccttcatgcagcagcacagatttctaggggagaatttgtccgcatctcaggattagattatgtggacagtgccctcctgatggggagagacagggacaagcctttcaaacggaggttgaaatcagagtcggtggaaacatctctcttccgaaagcttcgaactgttaaaagtgagcacgaaactttcaagttcacgtctgagctggaggagagccgactggagaggggcattcgcccttggaattgtcagcgatgttttgcacattatgatgtccagagcattttgtttaatatcaacgaagccatggctacgagggctaatgtggggaaaaggaaaaacataaccactggggcatctgcagcatcccagactcagatgcctacgggccagacaggcaactgtgagtcccctttagggagcaaggaggacctcaactccaaagagaacctggatgccgatgagggtgatgggaaaagtaacgacctcgtccttagttgtccttactttagaaatgagactggaggggaaggcgacaggcggattgcgctctctcgagccaactcatcctctttcagttctggggaaagctgctctttcgaatcgtcactcagctctcactgcacaaatgcaggtgtctccgtcttggaagtgcccagagaaaaccagcctattcacagggagaaagtgaagcgctacatcatagaacacattgaccttggggcctattattaccgcaaattcttctatgggaaagagcaccaaaactactttggaatagatgaaaaccttggtccagtagcagtcagcatccggagagagaaggtggaagatgccaaggagaaagaaggatcccagttcaactacagggtggctttcaggacaagtgagcttacaacactgagaggagcaattttagaagatgctataccctctactgctaggcatggtaccgcacgaggactacctctcaaagaagttttggaatacgtcattccagagctgagcattcagtgtttgcgacaggcttccaactcacccaaggtctcagagcagctgctcaagcttgatgaacaagggctgagctttcagcacaagatcgggatcctttattgcaaagcaggccagagcacagaggaagagatgtataacaatgagacggcgggaccagcttttgaagaattccttgatcttctgggccagagagtccgactgaaaggatttagtaaatatcgagctcagctagacaataagactgattccacgggcacgcactctctctataccacatacaaagactacgaactcatgttccacgtgtcaaccctgcttccctacatgcccaacaacagacaacagctactgaggaaaaggcacataggaaatgacatcgtcaccatcgtcttccaggagcctggggcacttccttttactccaaaaagcatccggtctcactttcagcatgtctttgtcatagtcaaagtgcataatccatgtaccgaaaatgtgtgttatagtgttggagtttccagatcaaaagatgtgccaccatttggcccaccgattcccaaaggtgtaacttttccaaagtcagccgtgttccgggacttccttttagccaaagtaatcaatgcagaaaatgcagcccataaatcagaaaagtttcgagcaatggccactcgaacgaggcaggagtacttgaaagatctggcggagaactttgtcacaaccgccaccgtggatacctctgtgaagttcagcttcattacgctgggtgcgaagaaaaaggagaaggtaaagccaaggaaggatgcccacttgtttagcattggggccatcatgtggcacgtgatagcccgggacttcggccagtctgctgacattgaatgtcttctcgggatctccaatgagttcatcatgttgattgaaaaggattccaagaatgttgtattcaactgttcctgcagggatgtgattgggtggacatctggattagtgagtatcaaagtgttttacgaaagaggagaatgtgtcctcctgtcctcggtagacaactgtgctgaagacatcagggaaattgttcagcgattagtaatagtgacgagaggctgcgagactgtggaaatgaccctgaggaggaacgggctgggccagcttggcttccatgtgaattttgaaggaattgtcgcagatgtggaaccttttggctttgcctggaaggctggccttcgccaagggagccgcctcgtggagatctgcaaagtagccgtggccactctgacccacgagcagatgatcgacctgctccgtacttctgtgactgtgaaggtggtcatcatccagccccatgatgacggctcgccccgaagagggtgttcagagctctgccggatccctatggtggaatataaactcgacagcgagggcaccccctgcgagtataaaacccccttcaggaggaacaccacgtggcaccgggtgcccactcctgccctgcagcccctctctagagcttcccccatccccggcacgcccgaccggctgccgtgccaacagctgctccagcaggcccaggctgccattcctcgaagcacctccttcgaccggaagctgcccgatggcacgagaagctcacccagcaaccagtcatcctccagcgaccctggacccggcgggagcggaccctggagaccacaagtgggctacgacgggtgccagtcccctctactgctcgaacaccagggctcaggccctttggaatgtgacggagccagggagagggaagacaccatggaagcaagcaggcacccggaaaccaaatggcatggcccaccttccaaagtcctgggttcctataaagaaagagctctgcagaaagatggaagttgcaaagattcccccaataagctttctcacattggggataaaagttgctccagtcactccagcagcaacacgctctccagcaacacctccagcaacagtgacgacaagcactttgggtctggcgacctgatggaccccgaattactggggctgacctacatcaaaggggcctccaccgacagtggcatcgacacggccccctgcatgcctgccaccatcctcggccctgtgcacctggcaggcagcaggtccctgatccacagccgggccgagcagtgggctgatgctgccgacgtctctgggcctgacgacgagccagccaagttatattctgtgcatggctacgcgtccaccatctccgccggcagtgctgcggaaggcagcatgggcgatctcagtgagatatcctctcattccagtggttctcaccattcaggaagcccttcagctcactgttcaaaaagtagtgggtctctggattcatccaaagtctacatcgtgtctcacagcagcggacaacaggttcccgggtccatgtccaagccctaccacagacaaggggcagtgaacaaatatgtcatcggctggaagaaatcggagggcagcccaccgcccgaggagcctgaagtgactgaatgtcccgggatgtatagtgagatggatgtcatgtccacagcaactcagcatcagacagtggtgggagatgctgttgcagagactcaacatgttctgtctaaagaagattttctgaaattgatgcttcctgacagccccttagtggaggaggggcgaagaaagttttcgttctatgggaacctgtctccaaggaggtcgctttaccgcacgctgtctgacgagagcatctgcagcaacaggagggggtcctcctttggcagttcccggagttccgtgcttgaccaggccctgcccaacgacattctgttcagcaccaccccaccctaccacagcacgctgcctccgcgggcccaccccgcacccagcatggggagcctgagaaatgagttctggttctccgatgggtccttatcagataagtccaagtgcgcagatcctggcctgatgcccctcccggacacagccacagggttagattggacccacctcgtggatgctgcacgggcatttgaaggtcttgactcagatgaagaactggggctgctctgtcaccacacgtcctatctagaccagagggtggcatccttctgcaccctgacagatatgcagcatgggcaggacctggaaggggcccaagagctgcccttatgtgtagatccaggcagtggcaaagagttcatggacacaactggggagcgttctccatcaccactgaccgggaaagtcaatcagctggaattaattcttcgacaactccagaccgaccttcggaaggaaaaacaagacaaggccgttctccaagcagaagtgcagcacctgagacaggacaacatgagactgcaggaggagtcccagaccgcgacagctcagctgcggaaattcacagaatggtttttcaccaccatcgacaaaaaatcttagccaatccgcacctcatcaagggaccactgggaaatgccccttgtccctttgaagtcacaaacatgtggtttttctgtgtgctttcaaccaatcgtagatgtttttgctgttccattctgtgtagcaccattcaccacagcaggatagggagcctcgactctttctcggtaaccacggcagagagcagcgccgatgtgaagatgaatgaatgtaactcctggtgtgaagatgaatgtaaaccctggcgacagttgagacctttttcttttagactctgctaaaacagtgctctggcttgggcttacctcaagagggaagatagttgagttttatttcctgtatatcaggtgacctggtagagatgtaaagcaatttaccatagtttgggctttagtattgtaaaataaacatgagaacaaataatcagacatatactttaatgttaaaggtgctctatttttttggatgtacagtagttttatttccacagccacattaccatagcaataagaaaggaggcatagtacatagttggaaaagctttgtggggggattaaaaaaaaaaaaaagcactgttgtgtttaacactagttcagatgcagttaccttagagacttatttatttgcaggaacaaatggtgcctgaatattaacagtgttctgattaaaaacaaaaaaaagatacatatgccttgtaaatggctcaccgagtggtcagtagtcacttcaactcttagttcacttttgtatagttgctctgctggaaagaaatgagagtgaatctgcttactcactagaacttccctgtgtgctgtgagccagcggaaccacttgtacaatgccagatttgtttatctttgtacagaagctttgatgaagtgtcttgtatttaacacccttatttaagcttatttaaccttaaattgttaattttataaaatttggtttggcctgcactacgatgagggatggaggtagctgcaggctcagaagagactgagcttgcacagatcagaccgagaagcagggtgagagattctaacgactggatgctgctagtaacacattgtttgtattgctttaccatttttaactgttagatttgagatgaacatacattttgcttttttaataaatgtttaaaagaagtccacataagaaa

SEQ ID NO: 19128 - DNA, 2937 bp, Homo sapiens
  source 1..2937: mol_type = unassigned DNA
acttactgtcataggtcttattaaataggtatctatgtagtcagagcatgtttcatagaaatggagtgttcattaaactgaaacttcatacattgcctctgggcttttggggataggagtatgatacctcccaacttgaaattcccacagataggtgaggtcatagtcatcgggtgatacttaatgagcccatgtttttctttcattggatgtaaactatgctcgatagtgacgagaggctgcgagactgtggaaatgaccctgaggaggaacgggctgggccagcttggcttccatgtgaattttgaaggaattgtcgcagatgtggaaccttttggctttgcctggaaggctggccttcgccaagggagccgcctcgtggagatctgcaaagtagccgtggccactctgacccacgagcagatgatcgacctgctccgtacttctgtgactgtgaaggtggtcatcatccagccccatgatgacggctcgccccgaagagggtgttcagagctctgccggatccctatggtggaatataaactcgacagcgagggcaccccctgcgagtataaaacccccttcaggaggaacaccacgtggcaccgggtgcccactcctgccctgcagcccctctctagagcttcccccatccccggcacgcccgaccggctgccgtgccaacagctgctccagcaggcccaggctgccattcctcgaagcacctccttcgaccggaagctgcccgatggcacgagaagctcacccagcaaccagtcatcctccagcgaccctggacccggcgggagcggaccctggagaccacaagtgggctacgacgggtgccagtcccctctactgctcgaacaccagggctcaggccctttggaatgtgacggagccagggagagggaagacaccatggaagcaagcaggcacccggaaaccaaatggcatggcccaccttccaaagtcctgggttcctataaagaaagagctctgcagaaagatggaagttgcaaagattcccccaataagctttctcacattggggataaaagttgctccagtcactccagcagcaacacgctctccagcaacacctccagcaacagtgacgacaagcactttgggtctggcgacctgatggaccccgaattactggggctgacctacatcaaaggggcctccaccgacagtggcatcgacacggccccctgcatgcctgccaccatcctcggccctgtgcacctggcaggcagcaggtccctgatccacagccgggccgagcagtgggctgatgctgccgacgtctctgggcctgacgacgagccagccaagttatattctgtgcatggctacgcgtccaccatctccgccggcagtgctgcggaaggcagcatgggcgatctcagtgagatatcctctcattccagtggttctcaccattcaggaagcccttcagctcactgttcaaaaagtagtgggtctctggattcatccaaagtctacatcgtgtctcacagcagcggacaacaggttcccgggtccatgtccaagccctaccacagacaaggggcagtgaacaaatatgtcatcggctggaagaaatcggagggcagcccaccgcccgaggagcctgaagtgactgaatgtcccgggatgtatagtgagatggatgtcatgtccacagcaactcagcatcagacagtggtgggagatgctgttgcagagactcaacatgttctgtctaaagaagattttctgaaattgatgcttcctgacagccccttagtggaggaggggcgaagaaagttttcgttctatgggaacctgtctccaaggaggtcgctttaccgcacgctgtctgacgagagcatctgcagcaacaggagggggtcctcctttggcagttcccggagttccgtgcttgaccaggccctgcccaacgacattctgttcagcaccaccccaccctaccacagcacgctgcctccgcgggcccaccccgcacccagcatggggagcctgagaaatgagttctggttctccgatgggtccttatcagataagtccaagtgcgcagatcctggcctgatgcccctcccggacacagccacagggttagattggacccacctcgtggatgctgcacgggcatttgaagaccagagggtggcatccttctgcaccctgacagatatgcagcatgggcaggacctggaaggggcccaagagctgcccttatgtgtagatccaggcagtggcaaagagttcatggacacaactggggagcgttctccatcaccactgaccgggaaagtcaatcagctggaattaattcttcgacaactccagaccgaccttcggaaggaaaaacaagacaaggccgttctccaagcagaagtgcagcacctgagacaggacaacatgagactgcaggaggagtcccagaccgcgacagctcagctgcggaaattcacagaatggtttttcaccaccatcgacaaaaaatcttagccaatccgcacctcatcaagggaccactgggaaatgccccttgtccctttgaagtcacaaacatgtggtttttctgtgtgctttcaaccaatcgtagatgtttttgctgttccattctgtgtagcaccattcaccacagcaggatagggagcctcgactctttctcggtaaccacggcagagagcagcgccgatgtgaagatgaatgaatgtaactcctggtgtgaagatgaatgtaaaccctggcgacagttgagacctttttcttttagactctgctaaaacagtgctctggcttgggcttacctcaagagggaagatagttgagttttatttcctgtatatcaggtgacctggtagagatgtaaagcaatttaccatagtttgggctttagtattgtaaaataaacatgagaac

SEQ ID NO: 19129 - DNA, 511 bp, Homo sapiens
  source 1..511: mol_type = unassigned DNA
agcaccaaaactactttggaatagatgaaaaccttggtccagtagcagtcagcatccggagagagaaggtggaagatgccaaggagaaagaaggatcccagttcaactacagggtggctttcaggacaagtgagcttacaacactgagaggagcaattttagaagatgctataccctctactgctaggcatggtaccgcacgaggactacctctcaaagaagttttggaatacgtcattccagagctgagcattcagtgtttgcgacaggcttccaactcacccaaggtctcagagcagctgctcaagcttgatgaacaaggggtgtgtataatgtgagattgtatgtttgtgtgtgaatttgtgtctgtttctgaaagttttggagttttcccatccatctttcttgtaagatcatttattttaaatgccttagaacattttctctttagtttttcccaaatatgtttttatactagtttggaaacatgatgccattatagtataacaca

SEQ ID NO: 19130 - DNA, 416 bp, Homo sapiens
  source 1..416: mol_type = unassigned DNA
gggagggacagtggtgcccgtgttctgactgactctgggagggacagtggtgcccgtgttctgactgactgactctgggagggacagtggtgcccgtgttctgactgactctgggagggggcagtggtgcccgtgttctgactgactgactctgggaggggcagtggtgcccatgttctgactcactctgggctggtgcccgtgctgtgactgatgactgactctctggttttgtttctgtttagatgagttctggttctccgatgggtccttatcagataagtccaagtgcgcagatcctggcctgatgcccctcccggacacagccacagggttagattggacccacctcgtggatgctgcacgggcatttgaagaccagagggtggcatccttctgcaccctgacagatatgc

SEQ ID NO: 19131 - DNA, 507 bp, Homo sapiens
  source 1..507: mol_type = unassigned DNA
catttgggtcttccttgtctccattggataaaccaacttaaataatatatcttttgttttcctaccaactcgtatatctatagagtttctgcatctctttttaaatcagtaaagtcccagaatgggctttccactagatcagcaatatggacactttcccattctgacataatataatatatctgcttgctgggctctaagcacatgaaataattttttcgagtgaaaacttgaccaacaaaaatgctcgattgactctcttgaatctttctaattctatccttatttgctagggagcgttctccatcaccactgaccgggaaagtcaatcagctggaattaattcttcgacaactccagaccgaccttcggaaggaaaaacaagacaaggccgttctccaagcagaagtgcagcacctgagacaggacaacatgagactgcaggaggagtcccagaccgcgacagctcagctgcggaaattcacagaatggtttttcaccaccatc

SEQ ID NO: 19132 - DNA, 6555 bp, Homo sapiens
  source 1..6555: mol_type = unassigned DNA
cttttgaaaagaacagaggcgtacaacattattacgacaacagagaagcaagttggctttgaagaaactgtattctgaggatgttgtttgctttgggctaagaaaagaaaaaatacaactacagacaaagcctttatatctgcaagtattatggcgtggtcggtagcaatgtaattagatttacatcagtcttcctggtgagacttggaggctcttcctcggtagacatgagtgacccaaggcagtcacaagaagagaagcacaagctaggcagagcctcttcaaagttcaaggatccccctagaatcatgcagtcagatgattattttgctcggaaatttaaagccattaatggcaacatgggacccactacttctttaaatgcctcgaattccaatgagactggcggtggtggtccggctaatggtaccccagctgtgcccaagatgggtgtgagagcaagggtgtctgaatggcctcctaaaaaggactgttccaaggagctaacatgcaaggcactgtgggaaagccggtctcagaccagttatgaaagcatcacttctgtcctgcagaatgggcagagtgaccagagtgaaggtcagcaagatgaacagctcgatctggacttcgtggaggccaagtacacaatcggagacatctttgtccattccccccaaagaggacttcaccccataagacagaggagcaatagtgatgtcactatcagtgacattgatgccgaagatgtcttagaccaaaatgcagtcaaccccaacaccggggctgccctgcacagggagtatggaagtacttcatccatcgacaggcaaggcttatctggtgaaaacttttttgctatgctcagagggtaccgagtagaaaattatgaccacaaagcaatggtcccttttgggttccctgaatttttccgctgtgaccctgcaatctctccgagccttcatgcagcagcacagatttctaggggagaatttgtccgcatctcaggattagattatgtggacagtgccctcctgatggggagagacagggacaagcctttcaaacggaggttgaaatcagagtcggtggaaacatctctcttccgaaagcttcgaactgttaaaagtgagcacgaaactttcaagttcacgtctgagctggaggagagccgactggagaggggcattcgcccttggaattgtcagcgatgttttgcacattatgatgtccagagcattttgtttaatatcaacgaagccatggctacgagggctaatgtggggaaaaggaaaaacataaccactggggcatctgcagcatcccagactcagatgcctacgggccagacaggcaactgtgagtcccctttagggagcaaggaggacctcaactccaaagagaacctggatgccgatgagggtgatgggaaaagtaacgacctcgtccttagttgtccttactttagaaatgagactggaggggaaggcgacaggcggattgcgctctctcgagccaactcatcctctttcagttctggggaaagctgctctttcgaatcgtcactcagctctcactgcacaaatgcaggtgtctccgtcttggaagtgcccagagaaaaccagcctattcacagggagaaagtgaagcgctacatcatagaacacattgaccttggggcctattattaccgcaaattcttctatgggaaagagcaccaaaactactttggaatagatgaaaaccttggtccagtagcagtcagcatccggagagagaaggtggaagatgccaaggagaaagaaggatcccagttcaactacagggtggctttcaggacaagtgagcttacaacactgagaggagcaattttagaagatgctataccctctactgctaggcatggtaccgcacgaggactacctctcaaagaagttttggaatacgtcattccagagctgagcattcagtgtttgcgacaggcttccaactcacccaaggtctcagagcagctgctcaagcttgatgaacaagggctgagctttcagcacaagatcgggatcctttattgcaaagcaggccagagcacagaggaagagatgtataacaatgagacggcgggaccagcttttgaagaattccttgatcttctgggccagagagtccgactgaaaggatttagtaaatatcgagctcagctagacaataagactgattccacgggcacgcactctctctataccacatacaaagactacgaactcatgttccacgtgtcaaccctgcttccctacatgcccaacaacagacaacagctactgaggaaaaggcacataggaaatgacatcgtcaccatcgtcttccaggagcctggggcacttccttttactccaaaaagcatccggtctcactttcagcatgtctttgtcatagtcaaagtgcataatccatgtaccgaaaatgtgtgttatagtgttggagtttccagatcaaaagatgtgccaccatttggcccaccgattcccaaaggtgtaacttttccaaagtcagccgtgttccgggacttccttttagccaaagtaatcaatgcagaaaatgcagcccataaatcagaaaagtttcgagcaatggccactcgaacgaggcaggagtacttgaaagatctggcggagaactttgtcacaaccgccaccgtggatacctctgtgaagttcagcttcattacgctgggtgcgaagaaaaaggagaaggtaaagccaaggaaggatgcccacttgtttagcattggggccatcatgtggcacgtgatagcccgggacttcggccagtctgctgacattgaatgtcttctcgggatctccaatgagttcatcatgttgattgaaaaggattccaagaatgttgtattcaactgttcctgcagggatgtgattgggtggacatctggattagtgagtatcaaagtgttttacgaaagaggagaatgtgtcctcctgtcctcggtagacaactgtgctgaagacatcagggaaattgttcagcgattagtaatagtgacgagaggctgcgagactgtggaaatgaccctgaggaggaacgggctgggccagcttggcttccatgtgaattttgaaggaattgtcgcagatgtggaaccttttggctttgcctggaaggctggccttcgccaagggagccgcctcgtggagatctgcaaagtagccgtggccactctgacccacgagcagatgatcgacctgctccgtacttctgtgactgtgaaggtggtcatcatccagccccatgatgacggctcgccccgaagagggtgttcagagctctgccggatccctatggtggaatataaactcgacagcgagggcaccccctgcgagtataaaacccccttcaggaggaacaccacgtggcaccgggtgcccactcctgccctgcagcccctctctagagcttcccccatccccggcacgcccgaccggctgccgtgccaacagctgctccagcaggcccaggctgccattcctcgaagcacctccttcgaccggaagctgcccgatggcacgagaagctcacccagcaaccagtcatcctccagcgaccctggacccggcgggagcggaccctggagaccacaagtgggctacgacgggtgccagtcccctctactgctcgaacaccagggctcaggccctttggaatgtgacggagccagggagagggaagacaccatggaagcaagcaggcacccggaaaccaaatggcatggcccaccttccaaagtcctgggttcctataaagaaagagctctgcagaaagatggaagttgcaaagattcccccaataagctttctcacattggggataaaagttgctccagtcactccagcagcaacacgctctccagcaacacctccagcaacagtgacgacaagcactttgggtctggcgacctgatggaccccgaattactggggctgacctacatcaaaggggcctccaccgacagtggcatcgacacggccccctgcatgcctgccaccatcctcggccctgtgcacctggcaggcagcaggtccctgatccacagccgggccgagcagtgggctgatgctgccgacgtctctgggcctgacgacgagccagccaagttatattctgtgcatggctacgcgtccaccatctccgccggcagtgctgcggaaggcagcatgggcgatctcagtgagatatcctctcattccagtggttctcaccattcaggaagcccttcagctcactgttcaaaaagtagtgggtctctggattcatccaaagtctacatcgtgtctcacagcagcggacaacaggttcccgggtccatgtccaagccctaccacagacaaggggcagtgaacaaatatgtcatcggctggaagaaatcggagggcagcccaccgcccgaggagcctgaagtgactgaatgtcccgggatgtatagtgagatggatgtcatgtccacagcaactcagcatcagacagtggtgggagatgctgttgcagagactcaacatgttctgtctaaagaagattttctgaaattgatgcttcctgacagccccttagtggaggaggggcgaagaaagttttcgttctatgggaacctgtctccaaggaggtcgctttaccgcacgctgtctgacgagagcatctgcagcaacaggagggggtcctcctttggcagttcccggagttccgtgcttgaccaggccctgcccaacgacattctgttcagcaccaccccaccctaccacagcacgctgcctccgcgggcccaccccgcacccagcatggggagcctgagaaatgagttctggttctccgatgggtccttatcagataagtccaagtgcgcagatcctggcctgatgcccctcccggacacagccacagggttagattggacccacctcgtggatgctgcacgggcatttgaaggtcttgactcagatgaagaactggggctgctctgtcaccacacgtcctatctagaccagagggtggcatccttctgcaccctgacagatatgcagcatgggcaggacctggaaggggcccaagagctgcccttatgtgtagatccaggcagtggcaaagagttcatggacacaactggggagcgttctccatcaccactgaccgggaaagtcaatcagctggaattaattcttcgacaactccagaccgaccttcggaaggaaaaacaagacaaggccgttctccaagcagaagtgcagcacctgagacaggacaacatgagactgcaggaggagtcccagaccgcgacagctcagctgcggaaattcacagaatggtttttcaccaccatcgacaaaaaatcttagccaatccgcacctcatcaagggaccactgggaaatgccccttgtccctttgaagtcacaaacatgtggtttttctgtgtgctttcaaccaatcgtagatgtttttgctgttccattctgtgtagcaccattcaccacagcaggatagggagcctcgactctttctcggtaaccacggcagagagcagcgccgatgtgaagatgaatgaatgtaactcctggtgtgaagatgaatgtaaaccctggcgacagttgagacctttttcttttagactctgctaaaacagtgctctggcttgggcttacctcaagagggaagatagttgagttttatttcctgtatatcaggtgacctggtagagatgtaaagcaatttaccatagtttgggctttagtattgtaaaataaacatgagaacaaataatcagacatatactttaatgttaaaggtgctctatttttttggatgtacagtagttttatttccacagccacattaccatagcaataagaaaggaggcatagtacatagttggaaaagctttgtggggggattaaaaaaaaaaaaaagcactgttgtgtttaacactagttcagatgcagttaccttagagacttatttatttgcaggaacaaatggtgcctgaatattaacagtgttctgattaaaaacaaaaaaaagatacatatgccttgtaaatggctcaccgagtggtcagtagtcacttcaactcttagttcacttttgtatagttgctctgctggaaagaaatgagagtgaatctgcttactcactagaacttccctgtgtgctgtgagccagcggaaccacttgtacaatgccagatttgtttatctttgtacagaagctttgatgaagtgtcttgtatttaacacccttatttaagcttatttaaccttaaattgttaattttataaaatttggtttggcctgcactacgatgagggatggaggtagctgcaggctcagaagagactgagcttgcacagatcagaccgagaagcagggtgagagattctaacgactggatgctgctagtaacacattgtttgtattgctttaccatttttaactgttagatttgagatgaacatacattttgcttttttaataaatgtttaaaagaagtccacataag

SEQ ID NO: 19133 - DNA, 7987 bp, Homo sapiens
  source 1..7987: mol_type = unassigned DNA
cgcgaagcggcttggaagtgggcagcctggaagtcactcgggccaccggagctggcggcgtctccagcgagcggcgcggagctggacgccgcgatcgtggggcccgcgaggcgggcagccggggcgtccagatgcacagtctctgacatcagctctcctgggaccctccaagagcactagtgtctagaaggcactaaggcatggcgaggacaacatccttgctgcctccagctggcgggcgaccacagctactgcctgctctgcgctactgagccactcggtctggagcccccaggacagcacctgcttcctgaggttgtcctggctcagctgtgcacagcgatggtggagaactggactccacaggctcacaaccttcctgtcaggtttcagggcccagcatccttcatcctgggcctggctgccctgaacaatggctgagggctgggggaccccatagagtgacaccacagcgtacggggccagcagcactccagtgcccgtggactatgaccacctatcgggccatccccagcgatggtgtggacctggcagccagctgtggcgccagggtgggcgatgtcctccctgggccacacacaggggactacgctcccttgggattctgggcccagaatggcagcatgtcccagcctcttggcgagagcccggccaccgccaccgccaccgccaccgccaccacccgccccagccccaccactcccgcaatgcccaagatgggcgtgcgcgcaagggtggccgactggccgcccaagcgggaggccctgagagagcacagcaacccaagcccctcccaggacacagatggcacaaaggccaccaagatggcccattccatgaggagcatacagaacggacagccccccaccagcaccccggcttcctcagggtccaaagccttccaccgactctccaggagaaggtccaaagacgtggagttccaggacgggtggccccggtcccccggcagggccttcctcccccttcggcaccgcagcagcagcgagatcaccctcagcgagtgtgacgcggaggacgcgggggagccgcggggggcccggcacacgggggcgctgcccctcttccgcgagtacgggagcacctcgtccatcgacgtgcagggcatgcccgagcagagcttcttcgacatcctgaacgagttccgcagcgagcagcccgacgcccgagggtgccaggccctcaccgagctcctccgggcagatcctggcccacacctcatggggggcggcggcggagccaagggggactcccacaacgggcagcccgccaaggacagcctcctgccactgcagcccacgaaggagaaggagaaggcccggaagaaacctgcgcggggcctcggcggcggggacacggtggactcgtccatctttcggaagctaaggagcagcaaacccgagggggaggctgggcgttccccgggggaggccgacgagggccggagccccccggaagccagcaggccgtgggtgtgtcagaagagcttcgcccacttcgacgtgcagagcatgctgttcgacctcaacgaggcggccgccaacagggtgtcggtgtcgcagcggcggaacaccaccacgggtgcttcggccgcttccgccgcctcggccatggcctccctcacggcctcgcgggcccacagcctcggaggcctggacccggccttcaccagcacagaggacctaaactgcaaggagaacttggagcaggacctcggcgatgacaacagcaacgacctgctgctcagctgcccgcacttccgcaatgagatcgggggcgagtgtgagcgcaacgtgagcttctcccgggcttccgtgggctccccgagcagcggcgagggccacctggcagagcccgccctgagcgcctaccgcaccaacgccagcatctcggtgttggaagttcccaaggagcagcagcggacgcagagtcggccccggcagtacagcatcgagcatgtggacctgggcgcccgctactaccaggattacttcgtgggcaaagaacatgccaattacttcggcgtggatgagaagctggggccagtggctgtgagcattaagcgggagaagctggaagaccacaaggagcacggacctcagtaccagtacaggatcatcttccggacccgcgagctcatcaccctgcggggctccatcctggaagatgctacgcccacagccaccaagcatgggaccgggcggggcctgcccttgaaggatgccctggagtatgtcatccccgagctcaacatccactgcctgcggctggccctcaacacccccaaggtgacggagcaactgctgaagctcgatgagcaagggctctgccggaagcacaaggtgggcatcctctattgcaaggccggccagagctccgaggaggagatgtacaacaatgaggaggccggccccgcctttgaggagttcctctccctcatcggcgagaaggtctgcctgaagggcttcaccaagtacgctgcccagctggacgtcaagaccgactccacgggaacccactccctctacacgatgtaccaggactacgagatcatgttccatgtctccaccctgctcccttacacccccaacaacaggcagcagctgctacggaagaggcacataggaaatgacatcgtgacgatcatcttccaggagcctggcgcgctaccgttcacccccaagaacatccgctcccacttccagcacgtcttcatcattgtccgagtccacaacccctgcactgataacgtctgttacagtatggctgtgacccgatccaaagacgctcctcctttcggcccccccatccccagtggaaccacattccgcaaatccgacgtcttcagagacttcttgctggccaaggtgattaacgctgagaacgccgcgcacaagtccgacaagttccacaccatggccaccaggacccgccaggagtatctcaaggacctggccgaaaactgtgtctccaacacccccatcgactccaccggcaaattcaacctcatctccctgacctccaagaagaaggaaaagacaaaagcacgggctggcgctgagcagcacagtgcaggggccatcgcctggagggtggtggcccaggactacgcccagggggtggaaatcgactgcattttgggaatttccaatgagtttgtggtgctcctggacttacgcaccaaggaggtggtgttcaactgctactgcggggatgtcattggctggactccagactcctccacactcaaaatcttctatggacgaggagaccacatcttcctacaggcgacagagggttctgtggaggacataagggagatagtgcagagactgaaggtgatgaccagtggctgggagacggtggacatgacgcttcggcggaacgggctcgggcagctgggcttccacgtgaagtacgacggcacggtggccgaggttgaggactatgggttcgcctggcaggccggcctccggcagggcagccgactagtggagatctgcaaggtggccgtggtcacactgacccacgaccagatgatcgacctgctgcgcacctctgtcactgtgaaggtggtcatcatcccgccttttgaggacggcactccccggaggggttggccggagacctacgacatgaatacctcggagcccaagacggagcaggaaagcatcactcctgggggccggcccccctaccgcagcaatgctccctggcagtggagcgggcccgcatcccataactctctaccagcctccaagtgggccactccaaccactcccggccatgcccagtccctgagccggcccctgaagcagacccccatagtccccttccgggagtcccagccactgcacagcaagaggcctgtcagcttcccagaaaccccttacacagtatcaccagcaggggccgacagagtccctccctaccgacagccttctgggagcttctccacccccggttcggccacctacgtgagatacaagccatccccagaaaggtacacggctgccccacaccccctgctatctcttgatccccacttcagccacgatgggacgtccagcggcgactcctcttccggcggcctgaccagccaggagagcaccatggaacgccagaagccagagcctttgtggcatgtgcctgcccaggccaggctctcagccatagccggaagcagcgggaacaagcacccgtccaggcaggatgcagcaggcaaagattcccccaacaggcattccaaaggagaacctcaatactcaagtcattccagcagcaacaccctctccagcaacgcatccagcagccacagcgacgaccgctggttcgaccccctggaccccctggagccagagcaagaccccctctccaagggtggctctagtgacagcggcatcgacaccaccctctacacctccagccctagctgcatgtccctggccaaggctccacggcccgccaagccacacaagccccctggaagtatgggcctttgtggcgggggtcgcgaggccgctgggaggtcccaccacgcagacaggcggcgggaggtctcccctgcccccgcagttgccggccaaagcaagggctaccgaccgaagctgtactcctccggctccagcacccccacgggactggcggggggcagccgagacccaccgaggcagcccagtgacatgggctcgagggttggctaccccgctcaggtttacaaaactgccagtgcagagactcctcggccctcccagctggcccagcccagcccctttcagctctccgcctccgtccccaagtccttcttctccaagcagcctgtacgcaataagcacccaacagggtggaagagaacggaggagcccccaccacggccactccccttcagtgacccaaagaagcaggtggacacgaacaccaaaaatgtctttgggcaaccgaggttgagggcatccctccgagacctccggtcaccacggaagaactacaaatccaccatcgaggatgacctgaagaaactcatcatcatggacaacctggggccagagcaggagagagacacgggacagtcaccgcagaagggcctgcagcggacgctgtcggacgagagcctgtgcagcgggcgccgggagcccagcttcgccagccccgctggcctagagccagggctgcccagcgacgtgctcttcaccagcacctgcgccttcccgtccagcacgctgcctgcacgccgccagcaccagcacccccacccgcccgtcggccccggtgccacccctgccgccggcagcggctttcccgagaagaaatccaccatctcagcctcggagctctcgctggctgatgggcgggaccgccccctgcggcgcctggaccctgggctgatgcccctgcctgacacagctgctggcctcgagtggtccagcctggtgaacgcagccaaggcatacgaagtgcaaagagccgtctcactcttctctctgaacgacccggccctgagcccggacatcccgcctgcacacagtcctgtccacagccacctgagcctggagaggggacccccgacccccaggaccacccctaccatgagcgaggagccacccctggatctgacaggcaaggtgtaccagctggaggtgatgctgaaacagctgcacactgacctgcagaaggagaagcaggacaaggtggtgctccagtcagaggtggccagcctgcggcagaacaaccagcggctgcaggaggagtcgcaggccgccagcgagcagctgcgcaagtttgcggagatcttctgcagggagaagaaggagctctgaggtgggaggccgccgcccgccttcgctccttcccctcaggccgtggccctgctgcctctctccctccactcagctcccagctgccggtgtgaccaagatgacccatccagggccctccccatggacacggaaactccgatggcctcactagggctgtgagtcagggtcagcgcgcacagccctcatgccccagagggcgaagtggtctcaggcctccctccaagctgcccagctgtggtcccggtgagctgggctgtgcttacaccgctcccgggcctgccccgctgtccccatctagcctcttcctgggaccagcccttcgaagctgatggggacggagagaggagccagtctccagacgcctcggctccaggaggtcacacagcaggtttctgcaccacgcacaacaaagttgcggcttgtggggccgaggcccctgcatgaaaagtacagcgtgaaagcaaccctttcttccccacacccagagaggtgaggcccgcgtggacacagaccagggcgcctcggtccctagcacgtgagctccaaaaagcacgaacatgatcccctccctaaccccctcctcccaaaaagcagccaggagcactttcttagagtttaaattattttcttgggggcctgaggatagagagaggcaaggctagcctccagagccgatttatttgagagagaaactctatttggatctccaggacggtttatacgatctttttctatcagctcctcttccgccagaggccactgcacctgggctaggggtccacaggcccctccaccttccagctaaccaggccaggccggggcggtggagccaccacacagccgactctctcctcctcctcccggcacgacctggccctgaccagcagcctcggcctcttctgggttccaggaggggctcccgaagccctcaggacagggctggaggagaacagccttcatctcctcctctggtttttttttcctttgcaagtctcccagcccatctctccgagcagcggccaccagaccccctcaccatgctccccggggagcactgcaccccgcgaaccccactggacgctggttctctaaaggcaataaggggcggccatgccggtgtggtaccacgctgttcctccaggaaaccgtttctttttttccttctttaaaagcaaacagaaaaagatatatatatatatatatatatatttattttttcatgtagagttggcgccagaacaagcctgtatggccacagtctgtggattcatccccccaacctcaagctgaggaccaaggcgtgtcccctgtgggctgggggtcagtgggaggaccagagggatgaagtcagggcaggccggtgccctttttgggaggcaccaggcggggaggagttggcggagcaggtctggctgtgagccagcaccaggcaacccggcccttgtccagggacctctgctgccttctctctggggtcaggaacctcagaggagggggctctggggactgcataggacgcaggcactcggaggtgccggtgtggatgggtgggggtgagagaagagggttcttatcgcgtctcctgtgatcagcctctggccccctggaggaggaaacctcagcgctgcccctgcccccaccctcacccccaacaccaagagtgaggtgggcgtgccccaggcagcgtcctcagccctggccagctactgtgatgccatcttctcccccatccccttctctggggggcccacccgtcccccacccccaccccttagaccctcatcgggtccctttttttttttttttttcagttgtctcctcccatcttcagatcattcgaatcattttggggacttaatcatgtacatggacaagtgtaaattatgatttttggttttgttttctgttattttttaaggatttctgcaaaaacagatctatttaatttgaggttgatgttctatccaatggccgaagatagcagcaggttttttttttcatatgttgatttgtttcatttggattttttttttattattctttattgtcttttttttttccccatccctgtcttgagattttctggcatgtttctggaggtttcaaaggaaataaaggtttcatagaaatgg

SEQ ID NO: 19134 - DNA, 545 bp, Homo sapiens
  source 1..545: mol_type = unassigned DNA
gtgggcagcctggaagtcactcgggccaccggagctggcggcgtctccagcgagcggcgcggagctggacgccgcgatcgtggggcccgcgaggcgggcagccggggcgtccaggcgtgcaccccggcgctgtggtgaagagcttggaggcggggagcggtggattcgcgtcccggctgtgccactcgggagccgcgatctgggaaaaccgcgccgaacctcaatttcccctgcagtaaaacggagtaggagagcatcttggcggagactctgttgagataatataataaaacatttggcacataggaggcacttactacgtatttgggttattgttagctctccgaaaaatgaggtgaagatgttatcgattgcatagggtgaggattagttgagcgtgtgcatgtaaagaggtgagtccttagttagcacccaatgcaggctagctgctgttaaccgagattattttgttaagagcgttggtttggaaggcagagagaccccaggttcaaatttgaacatttaccagctgtgtgactttgggc

SEQ ID NO: 19135 - DNA, 608 bp, Homo sapiens
  source 1..608: mol_type = unassigned DNA
gaggccttttctttccctcccccaaagggaatgttggcaaaacagctttctttgggaacgcgcctgttcacgacgaccagccatctcctggggaactccggtggctggctggcgtgttcctgcggctgttgaataagtcgctgttaggagctggcacggcaggttcccgtttccgcattccaggcacccacagcgggctgggggcgggcaccactgaggtcggcctggagagccaaggcaggtggcctcgccctgggaggaccagggacaggaggagtccacctggggctcccctgacagccacctgcccactttgtgatcagagccgtgttcggggagtctttcagatgcacagtctctgacatcagctctcctgggaccctccaagagcactagtgtctagaaggcactaaggcatggcgaggacaacatccttgctgcctccagctggcgggcgaccacagctactgcctgctctgcgctactgagccactcggtctggagcccccaggacagcacctgcttcctgaggttgtcctggctcagctgtgcacagcgatggtggagaactggactccacaggctcacaaccttcctgtcaggtttca

SEQ ID NO: 19136 - DNA, 163 bp, Homo sapiens
  source 1..163: mol_type = unassigned DNA
cgcctgtaatcccagcactttgggaggccgagaacatgccaattacttcggcgtggatgagaagctggggccagtggctgtgagcattaagcgggagaagctggaagaccacaaggagcacggacctcagtaccagtacaggatcatcttccggacccgcgag

SEQ ID NO: 19137 - DNA, 785 bp, Homo sapiens
  source 1..785: mol_type = unassigned DNA
catcctggaagatgctacgcccacagccaccaagcatgggaccgggcggggcctgcccttgaaggatgccctggagtatgtcatccccgagctcaacatccactgcctgcggctggccctcaacacccccaaggtgacggagcaactgctgaagctcgatgagcaagggctctgccggaagcacaaggtgggcatcctctattgcaaggccggccagagctccgaggaggagatgtacaacaatgaggaggccggccccgcctttgaggagttcctctccctcatcggcgagaaggtctgcctgaagggcttcaccaagtacgctgcccagctggacgtcaagatagagacggggtttcaccatgttggccaggctggtctcgaactcctgacctcagatgatccacctgcctcagcctcccaaagtgctgggattataggtgtgaaccaccaggcctggccagtgtatttaatttttaagagtagattgaagtgaaagcaccaagttaaaaaccagcacagatggtacgtgggatatggcaaaaacccagaggttttggaaacatggtcctaactggcatttctgtttcagccgactccacgggaacccactccctctacacgatgtaccaggactacgagatcatgttccatgtctccaccctgctcccttacacccccaacaacaggcagcagctgctacggaagaggcacataggaaatgacatcgtgacgatcatcttccaggagcctggcgcgctaccgttcacccccaagaacatccg

SEQ ID NO: 19138 - DNA, 546 bp, Homo sapiens
  source 1..546: mol_type = unassigned DNA
ttgagtacctcctgtatgccaggcactgtgctgggtactgaggatacagcagttggccgtgaacaaaatccctgttctcatggagctgccacttcaatgggaagagacaagaaacaaaatgaagtggggaaagccatctctgctgagtgtcaataagtgttaagtaatggggacagaaaagcaaagatcagggagtgttgtggtggggtggatctgaataacgtagtcagcaaaggcctccctgggagggtgaggtttatgcaagaccagaagaggtgacgaaggaagccatgtggggactcaggaagaatgttcctagcagagggaacagcggtgcagaggcttcgaggaagtgtttctggccatggtgaggcctttgtcctttatcctgaatgagagggaaccacaggaagctgctacggaagaggcacataggaaatgacatcgtgacgatcatcttccaggagcctggcgcgctaccgttcacccccaagaacatccgctcccacttccagcacgtcttcatcattgtccgagtccacaacc

SEQ ID NO: 19139 - DNA, 374 bp, Homo sapiens
  source 1..374: mol_type = unassigned DNA
cctgtccccctctgttgccctttcccagctgctacggaagaggcacataggaaatgacatcgtgacgatcatcttccaggagcctggcgcgctaccgttcacccccaagaacatccgctcccacttccagcacgtcttcatcattgtccgagtccacaacccctgcactgataacgtctgttacagtatggctgtgacccgatccaaagacgctcctcctttcggcccccccatccccagtggaaccacattccgcaaatccgacgtcttcagagacttcttgctggccaaggtgattaacgctgagaacgccgcgcacaagtccgacaagttccacaccatggccaccaggacccgccaggagtatctcaagg

SEQ ID NO: 19140 - DNA, 568 bp, Homo sapiens
  source 1..568: mol_type = unassigned DNA
gactacgcccagggggtggaaatcgactgcattttgggaatttccaatgagtttgtggtgctcctggacttacgcaccaaggaggtggtgttcaactgctactgcggggatgtcattggctggactccagactcctccacactcaaaatcttctatggacgaggagaccacatcttcctacaggcgacagagggttctgtggaggacataagggagatagtgcagagactgaaggtgatgaccagtggctgggagacggtggacatgacgcttcggcggaacgggctcgggcagctgggcttccacgtgaagtacgacggcacggtggccgaggttgaggactatgggttcgcctggcaggccggcctccggcagggcagccgactagtggagatctgcaaggtggccgtggtcacactgacccacgaccagatgatcgacctgctgcgcacctctgtcactgtgaaggtggtcatcatcccgccttttgaggacggcactccccggaggtaagggcctccacctttcagccaggtggtgggtggcagctcccagatcgctggcatga

SEQ ID NO: 19141 - DNA, 407 bp, Homo sapiens
  source 1..407: mol_type = unassigned DNA
cgacagagggttctgtggaggacataagggagatagtgcagagactgaaggtgatgaccagtggctgggagacggtggacatgacgcttcggcggaacgggctcgggcagctgggcttccacgtgaagtacgacggcacggtggccgaggttgaggactatgggttcgcctggcaggccggcctccggcagggcagccgactagtggagatctgcaaggtggccgtggtcacactgacccacgaccagatgatcgacctgctgcgcacctctgtcactgtgaaggtggtcatcatcccgccttttgaggacggcactccccggagatggagtctcgctctgtcgcccaggctgaagtgcagtggcgtgatctcaactcactgcaacctccacctcccgggttcaagc

SEQ ID NO: 19142 - DNA, 584 bp, Homo sapiens
  source 1..584: mol_type = unassigned DNA
acaggcggcgggaggtctcccctgcccccgcagttgccggccaaagcaagggctaccgaccgaagctgtactcctccggctccagcacccccacgggactggcggggggcagccgagacccaccgaggcagcccagtgacatgggctcgagggttggctaccccgctcaggtttacaaaactgccagtgcagagactcctcggccctcccagctggcccagcccagcccctttcagctctccgcctccgtccccaagtccttcttctccaagcagcctgtacgcaataagcacccaacagggtggaagagaacggaggagcccccaccacggccactccccttcagtgacccaaagaagtaagtgcctggacgtccagcgaggcgcccgccagatccacaccagggcgtctccggggcggaaagagggtgatgccacatgctgtcattgcacagacgactgtgggccagtgtaccagtgtacacactggggctgcagctgcaagcaggacaggcgagaacccctcttggggagctggcattccatttggggtgaccaacaataagtagaataagagaagcacgc

SEQ ID NO: 19143 - DNA, 572 bp, Homo sapiens
  source 1..572: mol_type = unassigned DNA
gcgccaggagtccctgggatgcccttctggggacacagccctgaaagtgacatgggctcgagggttggctaccccgctcaggtttacaaaactgccagtgcagagactcctcggccctcccagctggcccagcccagcccctttcagctctccgcctccgtccccaagtccttcttctccaagcagcctgtacgcaataagcacccaacagggtggaagagaacggaggagcccccaccacggccactccccttcagtgacccaaagaagcaggtggacacgaacaccaaaaatgtctttgggcaaccgaggttgagggcatccctccgagacctccggtcaccacggaagaactacaaatccaccatcgaggatgacctgaagaaactcatcatcatggacaacctggggccagagcaggagagagacacgggatcaccgcagaagggcctgcagcggacgctgtcggacgagagcctgtgcagcgggcgccgggagcccagcttcgccagccccgctggcctagagccagggctgcccagcgacgtgctcttcaccagcacctgcgcctt

SEQ ID NO: 19144 - DNA, 811 bp, Homo sapiens
  source 1..811: mol_type = unassigned DNA
tgttggtcctgcccacaagggcaggtccttttgaccatctgtccattctcgtgcttcctgtgcctggacccgccaggtgctcagcaggtgtctgtagagtgggctctttgtatcctggaggtacgaagaaggggtcctccctgaagtcacatgcacggcccagcctcagggaaaacgcacacttaagggtgggcagccacccttcccctggcctggtgctcctaacaccccgtccacatccacagaggtgcccttggtgggtggagtgtgccgggtggagggctggcttcctgcttcccctcagagcttctcctcaggctttgctagaatgtcagggataagggggcctgtacccccaggctcctcagatgtgggccagaagccttccccaggggctttagggcctcaggctgaccttgtccctggtttttccagcgaggagccacccctggatctgacaggcaaggtgtaccagctggaggtgatgctgaaacagctgcacactgacctgcagaaggagaagcaggacaaggtggtgctccagtcagaggtggccagcctgcggcagaacaaccagcggctgcaggaggagtcgcaggccgccagcgagcagctgcgcaagtttgcggagatcttctgcagggagaagaaggagctctgaggtgggaggccgccgcccgccttcgctccttcccctcaggccgtggccctgctgcctctctccctccactcagctcccagctgccggtgtgaccaagatgacccatccagggccctccccatggacacggaaactccgatggcctcacta

SEQ ID NO: 19145 - DNA, 4570 bp, Homo sapiens
  source 1..4570: mol_type = unassigned DNA
ggcggcgcagccgcggcccatggagcccgccggcccggcccccggccgcctcgggccgctgctctgcctgctgctcgccgcgtcctgcgcctggtcaggagtggcgggtgaggaggagctgcaggtgattcagcctgacaagtccgtgttggttgcagctggagagacagccactctgcgctgcactgcgacctctctgatccctgtggggcccatccagtggttcagaggagctggaccaggccgggaattaatctacaatcaaaaagaaggccacttcccccgggtaacaactgtttcagacctcacaaagagaaacaacatggacttttccatccgcatcggtaacatcaccccagcagatgccggcacctactactgtgtgaagttccggaaagggagccccgatgacgtggagtttaagtctggagcaggcactgagctgtctgtgcgcgccaaaccctctgcccccgtggtatcgggccctgcggcgagggccacacctcagcacacagtgagcttcacctgcgagtcccacggcttctcacccagagacatcaccctgaaatggttcaaaaatgggaatgagctctcagacttccagaccaacgtggaccccgtaggagagagcgtgtcctacagcatccacagcacagccaaggtggtgctgacccgcgaggacgttcactctcaagtcatctgcgaggtggcccacgtcaccttgcagggggaccctcttcgtgggactgccaacttgtctgagaccatccgagttccacccaccttggaggttactcaacagcccgtgagggcagagaaccaggtgaatgtcacctgccaggtgaggaagttctacccccagagactacagctgacctggttggagaatggaaacgtgtcccggacagaaacggcctcaaccgttacagagaacaaggatggtacctacaactggatgagctggctcctggtgaatgtatctgcccacagggatgatgtgaagctcacctgccaggtggagcatgacgggcagccagcggtcagcaaaagccatgacctgaaggtctcagcccacccgaaggagcagggctcaaataccgccgctgagaacactggatctaatgaacggaacatctatattgtggtgggtgtggtgtgcaccttgctggtggccctactgatggcggccctctacctcgtccgaatcagacagaagaaagcccagggctccacttcttctacaaggttgcatgagcccgagaagaatgccagagaaataacacaggtacagtccttggacacaaatgatatcacatatgcagacctgaacctgcccaaggggaagaagcctgctccccaggctgcggagcccaacaaccacacggagtatgccagcattcagaccagcccgcagcccgcgtcggaggacaccctcacctatgctgacctggacatggtccacctcaaccggacccccaagcagccggcccccaagcctgagccgtccttctcagagtacgccagcgtccaggtcccgaggaagtgaatgggaccgtggtttgctctagcacccatctctacgcgctttcttgtcccacagggagccgccgtgatgagcacagccaacccagttcccggagggctggggcggtgcaggctctgggacccaggggccagggtggctcttctctccccacccctccttggctctccagcacttcctgggcagccacggccccctccccccacattgccacatacctggaggctgacgttgccaaaccagccagggaaccaacctgggaagtggccagaactgcctggggtccaagaactcttgtgcctccgtccatcaccatgtgggttttgaagaccctcgactgcctccccgatgctccgaagcctgatcttccagggtggggaggagaaaatcccacctcccctgacctccaccacctccaccaccaccaccaccaccaccaccaccactaccaccaccacccaactggggctagagtggggaagatttcccctttagatcaaactgccccttccatggaaaagctggaaaaaaactctggaacccatatccaggcttggtgaggttgctgccaacagtcctggcctcccccatccctaggctaaagagccatgagtcctggaggaggagaggacccctcccaaaggactggagacaaaaccctctgcttccttgggtccctccaagactccctggggcccaactgtgttgctccacccggacccatctctcccttctagacctgagcttgcccctccagctagcactaagcaacatctcgctgtggacgcctgtaaattactgagaaatgtgaaacgtgcaatcttgaaactgaggtgttagaaaacttgatctgtggtgttttgttttgttttttttcttaaaacaacagcaacgtgatcttggctgtctgtcatgtgttgaagtccatggttgggtcttgtgaagtctgaggtttaacagtttgttgtcctggagggattttcttacagcgaagacttgagttcctccaagtcccagaaccccaagaatgggcaagaaggatcaggtcagccactccctggagacacagccttctggctgggactgacttggccatgttctcagctgagccacgcggctggtagtgcagccttctgtgaccccgctgtggtaagtccagcctgcccagggctgctgagggctgcctcttgacagtgcagtcttatcgagacccaatgcctcagtctgctcatccgtaaagtggggatagtgaagatgacacccctccccaccacctctcataagcactttaggaacacacagagggtagggatagtggccctggccgtctatcctacccctttagtgaccgcccccatcccggctttctgagctgatccttgaagaagaaatcttccatttctgctctcaaaccctactgggatcaaactggaataaattgaagacagccagggggatggtgcagctgtgaagctcgggctgattccccctctgtcccagaaggttggccagagggtgtgacccagttaccctttaacccccacccttccagtcgggtgtgagggcctgaccgggcccagggcaagcagatgtcgcaagccctatttattcagtcttcactataactcttagagttgagacgctaatgttcatgactcctggccttgggatgcccaagggatttctggctcaggctgtaaaagtagctgagccatcctgcccattcctggaggtcctacaggtgaaactgcaggagctcagcatagacccagctctctgggggatggtcacctggtgatttcaatgatggcatccaggaattagctgagccaacagaccatgtggacagctttggccagagctcccgtgtggcatctgggagccacagtgacccagccacctggctcaggctagttccaaattccaaaagattggcttgtaaaccttcgtctccctctcttttacccagagacagcacatacgtgtgcacacgcatgcacacacacattcagtattttaaaagaatgttttcttggtgccattttcattttattttattttttaattcttggagggggaaataagggaataaggccaaggaagatgtatagctttagctttagcctggcaacctggagaatccacataccttgtgtattgaaccccaggaaaaggaagaggtcgaaccaaccctgcggaaggagcatggtttcaggagtttattttaagactgctgggaaggaaacaggccccattttgtatatagttgcaacttaaactttttggcttgcaaaatatttttgtaataaagatttctgggtaataatgagtccttccggtgttcagtattcttgtctttgtgagtgcgtcccggggccgcctcggggcctgcctgccctcctgccaaagcctggaagaggattgaatggaccccagggtttggaaacaacctacagcatttgagcccctcacgtaggttttagagacgtacaatttttgtttgccctggctcagaaggagccggtgtaaggttgagataaaattccatatagacaactgagtttggatctcggctctgctgctttgtagctgtgggagttcaaacagcacctctttgagacttgggccccgcgtcggcacaatggggcaggaatagtccctgccagggtgactgtgtggattcaaggaggttggaagcactgagcccacgcttggcactgggtaggccatcactgaggcttgtgtctttccttcctgccctgaccctgcatagctgagtctcgtggcctctcaccactgatgggatctcggacacccggctcaccctcctcctggggcctcactttccttccccaccaaatgcagacatctaatgcttgtcctgtaatatccttgccagatgactgatgtcaagtgctggtttatagtgggtgctcaataaatgttagtttcctttctatccctccattagatcattaatgatattagtgctaattatgtaataaagttaaggcataaatatgttaa

SEQ ID NO: 19146 - DNA, 3867 bp, Homo sapiens
  source 1..3867: mol_type = unassigned DNA
cgctcgcagagaagccgcggcccatggagcccgccggcccggcccccggccgcctcgggccgctgctctgcctgctgctcgccgcgtcctgcgcctggtcaggagtggcgggtgaggaggagctgcaggtgattcagcctgacaagtccgtgttggttgcagctggagagacagccactctgcgctgcactgcgacctctctgatccctgtggggcccatccagtggttcagaggagctggaccaggccgggaattaatctacaatcaaaaagaaggccacttcccccgggtaacaactgtttcagacctcacaaagagaaacaacatggacttttccatccgcatcggtaacatcaccccagcagatgccggcacctactactgtgtgaagttccggaaagggagccccgatgacgtggagtttaagtctggagcaggcactgagctgtctgtgcgcgccaaaccctctgcccccgtggtatcgggccctgcggcgagggccacacctcagcacacagtgagcttcacctgcgagtcccacggcttctcacccagagacatcaccctgaaatggttcaaaaatgggaatgagctctcagacttccagaccaacgtggaccccgtaggagagagcgtgtcctacagcatccacagcacagccaaggtggtgctgacccgcgaggacgttcactctcaagtcatctgcgaggtggcccacgtcaccttgcagggggaccctcttcgtgggactgccaacttgtctgagaccatccgagttccacccaccttggaggttactcaacagcccgtgagggcagagaaccaggtgaatgtcacctgccaggtgaggaagttctacccccagagactacagctgacctggttggagaatggaaacgtgtcccggacagaaacggcctcaaccgttacagagaacaaggatggtacctacaactggatgagctggctcctggtgaatgtatctgcccacagggatgatgtgaagctcacctgccaggtggagcatgacgggcagccagcggtcagcaaaagccatgacctgaaggtctcagcccacccgaaggagcagggctcaaataccgccgctgagaacactggatctaatgaacggaacatctatattgtggtgggtgtggtgtgcaccttgctggtggccctactgatggcggccctctacctcgtccgaatcagacagaagaaagcccagggctccacttcttctacaaggttgcatgagcccgagaagaatgccagagaaataacacaggacacaaatgatatcacatatgcagacctgaacctgcccaaggggaagaagcctgctccccaggctgcggagcccaacaaccacacggagtatgccagcattcagaccagcccgcagcccgcgtcggaggacaccctcacctatgctgacctggacatggtccacctcaaccggacccccaagcagccggcccccaagcctgagccgtccttctcagagtacgccagcgtccaggtcccgaggaagtgaatgggaccgtggtttgctctagcacccatctctacgcgctttcttgtcccacagggagccgccgtgatgagcacagccaacccagttcccggagggctggggcggtgcaggctctgggacccaggggccagggtggctcttctctccccacccctccttggctctccagcacttcctgggcagccacggccccctccccccacattgccacatacctggaggctgacgttgccaaaccagccagggaaccaacctgggaagtggccagaactgcctggggtccaagaactcttgtgcctccgtccatcaccatgtgggttttgaagaccctcgactgcctccccgatgctccgaagcctgatcttccagggtggggaggagaaaatcccacctcccctgacctccaccacctccaccaccaccaccaccaccaccaccaccactaccaccaccacccaactggggctagagtggggaagatttcccctttagatcaaactgccccttccatggaaaagctggaaaaaaactctggaacccatatccaggcttggtgaggttgctgccaacagtcctggcctcccccatccctaggctaaagagccatgagtcctggaggaggagaggacccctcccaaaggactggagacaaaaccctctgcttccttgggtccctccaagactccctggggcccaactgtgttgctccacccggacccatctctcccttctagacctgagcttgcccctccagctagcactaagcaacatctcgctgtggacgcctgtaaattactgagaaatgtgaaacgtgcaatcttgaaactgaggtgttagaaaacttgatctgtggtgttttgttttgttttttttcttaaaacaacagcaacgtgatcttggctgtctgtcatgtgttgaagtccatggttgggtcttgtgaagtctgaggtttaacagtttgttgtcctggagggattttcttacagcgaagacttgagttcctccaagtcccagaaccccaagaatgggcaagaaggatcaggtcagccactccctggagacacagccttctggctgggactgacttggccatgttctcagctgagccacgcggctggtagtgcagccttctgtgaccccgctgtggtaagtccagcctgcccagggctgctgagggctgcctcttgacagtgcagtcttatcgagacccaatgcctcagtctgctcatccgtaaagtggggatagtgaagatgacacccctccccaccacctctcataagcactttaggaacacacagagggtagggatagtggccctggccgtctatcctacccctttagtgaccgcccccatcccggctttctgagctgatccttgaagaagaaatcttccatttctgctctcaaaccctactgggatcaaactggaataaattgaagacagccagggggatggtgcagctgtgaagctcgggctgattccccctctgtcccagaaggttggccagagggtgtgacccagttaccctttaacccccacccttccagtcgggtgtgagggcctgaccgggcccagggcaagcagatgtcgcaagccctatttattcagtcttcactataactcttagagttgagacgctaatgttcatgactcctggccttgggatgcccaagggatttctggctcaggctgtaaaagtagctgagccatcctgcccattcctggaggtcctacaggtgaaactgcaggagctcagcatagacccagctctctgggggatggtcacctggtgatttcaatgatggcatccaggaattagctgagccaacagaccatgtggacagctttggccagagctcccgtgtggcatctgggagccacagtgacccagccacctggctcaggctagttccaaattccaaaagattggcttgtaaaccttcgtctccctctcttttacccagagacagcacatacgtgtgcacacgcatgcacacacacattcagtattttaaaagaatgttttcttggtgccattttcattttattttattttttaattcttggagggggaaataagggaataaggccaaggaagatgtatagctttagctttagcctggcaacctggagaatccacataccttgtgtattgaaccccaggaaaaggaagaggtcgaaccaaccctgcggaaggagcatggtttcaggagtttattttaagactgctgggaaggaaacaggccccattttgtatatagttgcaacttaaactttttggcttgcaaaatatttttgtaataaagatttctgggtaataatgagtc

SEQ ID NO: 19147 - DNA, 3996 bp, Homo sapiens
  source 1..3996: mol_type = unassigned DNA
gcggccgctccaggcgcccgttccggagtcggggggaggcccagccgggaggggggaagggggggagccttagtcatttccccgctccagcctgctcccgcccgagcgcgcactcacggccgctctccctcctcgctccgcagccgcggcccatggagcccgccggcccggcccccggccgcctcgggccgctgctctgcctgctgctcgccgcgtcctgcgcctggtcaggagtggcgggtgaggaggagctgcaggtgattcagcctgacaagtccgtgttggttgcagctggagagacagccactctgcgctgcactgcgacctctctgatccctgtggggcccatccagtggttcagaggagctggaccaggccgggaattaatctacaatcaaaaagaaggccacttcccccgggtaacaactgtttcagacctcacaaagagaaacaacatggacttttccatccgcatcggtaacatcaccccagcagatgccggcacctactactgtgtgaagttccggaaagggagccccgatgacgtggagtttaagtctggagcaggcactgagctgtctgtgcgcgccaaaccctctgcccccgtggtatcgggccctgcggcgagggccacacctcagcacacagtgagcttcacctgcgagtcccacggcttctcacccagagacatcaccctgaaatggttcaaaaatgggaatgagctctcagacttccagaccaacgtggaccccgtaggagagagcgtgtcctacagcatccacagcacagccaaggtggtgctgacccgcgaggacgttcactctcaagtcatctgcgaggtggcccacgtcaccttgcagggggaccctcttcgtgggactgccaacttgtctgagaccatccgagttccacccaccttggaggttactcaacagcccgtgagggcagagaaccaggtgaatgtcacctgccaggtgaggaagttctacccccagagactacagctgacctggttggagaatggaaacgtgtcccggacagaaacggcctcaaccgttacagagaacaaggatggtacctacaactggatgagctggctcctggtgaatgtatctgcccacagggatgatgtgaagctcacctgccaggtggagcatgacgggcagccagcggtcagcaaaagccatgacctgaaggtctcagcccacccgaaggagcagggctcaaataccgccgctgagaacactggatctaatgaacggaacatctatattgtggtgggtgtggtgtgcaccttgctggtggccctactgatggcggccctctacctcgtccgaatcagacagaagaaagcccagggctccacttcttctacaaggttgcatgagcccgagaagaatgccagagaaataacacaggacacaaatgatatcacatatgcagacctgaacctgcccaaggggaagaagcctgctccccaggctgcggagcccaacaaccacacggagtatgccagcattcagaccagcccgcagcccgcgtcggaggacaccctcacctatgctgacctggacatggtccacctcaaccggacccccaagcagccggcccccaagcctgagccgtccttctcagagtacgccagcgtccaggtcccgaggaagtgaatgggaccgtggtttgctctagcacccatctctacgcgctttcttgtcccacagggagccgccgtgatgagcacagccaacccagttcccggagggctggggcggtgcaggctctgggacccaggggccagggtggctcttctctccccacccctccttggctctccagcacttcctgggcagccacggccccctccccccacattgccacatacctggaggctgacgttgccaaaccagccagggaaccaacctgggaagtggccagaactgcctggggtccaagaactcttgtgcctccgtccatcaccatgtgggttttgaagaccctcgactgcctccccgatgctccgaagcctgatcttccagggtggggaggagaaaatcccacctcccctgacctccaccacctccaccaccaccaccaccaccaccaccaccactaccaccaccacccaactggggctagagtggggaagatttcccctttagatcaaactgccccttccatggaaaagctggaaaaaaactctggaacccatatccaggcttggtgaggttgctgccaacagtcctggcctcccccatccctaggctaaagagccatgagtcctggaggaggagaggacccctcccaaaggactggagacaaaaccctctgcttccttgggtccctccaagactccctggggcccaactgtgttgctccacccggacccatctctcccttctagacctgagcttgcccctccagctagcactaagcaacatctcgctgtggacgcctgtaaattactgagaaatgtgaaacgtgcaatcttgaaactgaggtgttagaaaacttgatctgtggtgttttgttttgttttttttcttaaaacaacagcaacgtgatcttggctgtctgtcatgtgttgaagtccatggttgggtcttgtgaagtctgaggtttaacagtttgttgtcctggagggattttcttacagcgaagacttgagttcctccaagtcccagaaccccaagaatgggcaagaaggatcaggtcagccactccctggagacacagccttctggctgggactgacttggccatgttctcagctgagccacgcggctggtagtgcagccttctgtgaccccgctgtggtaagtccagcctgcccagggctgctgagggctgcctcttgacagtgcagtcttatcgagacccaatgcctcagtctgctcatccgtaaagtggggatagtgaagatgacacccctccccaccacctctcataagcactttaggaacacacagagggtagggatagtggccctggccgtctatcctacccctttagtgaccgcccccatcccggctttctgagctgatccttgaagaagaaatcttccatttctgctctcaaaccctactgggatcaaactggaataaattgaagacagccagggggatggtgcagctgtgaagctcgggctgattccccctctgtcccagaaggttggccagagggtgtgacccagttaccctttaacccccacccttccagtcgggtgtgagggcctgaccgggcccagggcaagcagatgtcgcaagccctatttattcagtcttcactataactcttagagttgagacgctaatgttcatgactcctggccttgggatgcccaagggatttctggctcaggctgtaaaagtagctgagccatcctgcccattcctggaggtcctacaggtgaaactgcaggagctcagcatagacccagctctctgggggatggtcacctggtgatttcaatgatggcatccaggaattagctgagccaacagaccatgtggacagctttggccagagctcccgtgtggcatctgggagccacagtgacccagccacctggctcaggctagttccaaattccaaaagattggcttgtaaaccttcgtctccctctcttttacccagagacagcacatacgtgtgcacacgcatgcacacacacattcagtattttaaaagaatgttttcttggtgccattttcattttattttattttttaattcttggagggggaaataagggaataaggccaaggaagatgtatagctttagctttagcctggcaacctggagaatccacataccttgtgtattgaaccccaggaaaaggaagaggtcgaaccaaccctgcggaaggagcatggtttcaggagtttattttaagactgctgggaaggaaacaggccccattttgtatatagttgcaacttaaactttttggcttgcaaaatatttttgtaataaagatttctgggtaataatgagtc

SEQ ID NO: 19148 - DNA, 4201 bp, Homo sapiens
  source 1..4201: mol_type = unassigned DNA
tccggcccgcacccacccccaagaggggccttcagctttggggctcagaggcacgacctcctggggagggttaaaaggcagacgcccccccgccccccgcgcccccgcgccccgactccttcgccgcctccagcctctcgccagtgggaagcggggagcagccgcgcggccggagtccggaggcgaggggaggtcggccgcaacttccccggtccaccttaagaggacgatgtagccagctcgcagcgctgaccttagaaaaacaagtttgcgcaaagtggagcggggacccggcctctgggcagccccggcggcgcttccagtgccttccagccctcgcgggcggcgcagccgcggcccatggagcccgccggcccggcccccggccgcctcgggccgctgctctgcctgctgctcgccgcgtcctgcgcctggtcaggagtggcgggtgaggaggagctgcaggtgattcagcctgacaagtccgtgttggttgcagctggagagacagccactctgcgctgcactgcgacctctctgatccctgtggggcccatccagtggttcagaggagctggaccaggccgggaattaatctacaatcaaaaagaaggccacttcccccgggtaacaactgtttcagacctcacaaagagaaacaacatggacttttccatccgcatcggtaacatcaccccagcagatgccggcacctactactgtgtgaagttccggaaagggagccccgatgacgtggagtttaagtctggagcaggcactgagctgtctgtgcgcgccaaaccctctgcccccgtggtatcgggccctgcggcgagggccacacctcagcacacagtgagcttcacctgcgagtcccacggcttctcacccagagacatcaccctgaaatggttcaaaaatgggaatgagctctcagacttccagaccaacgtggaccccgtaggagagagcgtgtcctacagcatccacagcacagccaaggtggtgctgacccgcgaggacgttcactctcaagtcatctgcgaggtggcccacgtcaccttgcagggggaccctcttcgtgggactgccaacttgtctgagaccatccgagttccacccaccttggaggttactcaacagcccgtgagggcagagaaccaggtgaatgtcacctgccaggtgaggaagttctacccccagagactacagctgacctggttggagaatggaaacgtgtcccggacagaaacggcctcaaccgttacagagaacaaggatggtacctacaactggatgagctggctcctggtgaatgtatctgcccacagggatgatgtgaagctcacctgccaggtggagcatgacgggcagccagcggtcagcaaaagccatgacctgaaggtctcagcccacccgaaggagcagggctcaaataccgccgctgagaacactggatctaatgaacggaacatctatattgtggtgggtgtggtgtgcaccttgctggtggccctactgatggcggccctctacctcgtccgaatcagacagaagaaagcccagggctccacttcttctacaaggttgcatgagcccgagaagaatgccagagaaataacacaggacacaaatgatatcacatatgcagacctgaacctgcccaaggggaagaagcctgctccccaggctgcggagcccaacaaccacacggagtatgccagcattcagaccagcccgcagcccgcgtcggaggacaccctcacctatgctgacctggacatggtccacctcaaccggacccccaagcagccggcccccaagcctgagccgtccttctcagagtacgccagcgtccaggtcccgaggaagtgaatgggaccgtggtttgctctagcacccatctctacgcgctttcttgtcccacagggagccgccgtgatgagcacagccaacccagttcccggagggctggggcggtgcaggctctgggacccaggggccagggtggctcttctctccccacccctccttggctctccagcacttcctgggcagccacggccccctccccccacattgccacatacctggaggctgacgttgccaaaccagccagggaaccaacctgggaagtggccagaactgcctggggtccaagaactcttgtgcctccgtccatcaccatgtgggttttgaagaccctcgactgcctccccgatgctccgaagcctgatcttccagggtggggaggagaaaatcccacctcccctgacctccaccacctccaccaccaccaccaccaccaccaccaccactaccaccaccacccaactggggctagagtggggaagatttcccctttagatcaaactgccccttccatggaaaagctggaaaaaaactctggaacccatatccaggcttggtgaggttgctgccaacagtcctggcctcccccatccctaggctaaagagccatgagtcctggaggaggagaggacccctcccaaaggactggagacaaaaccctctgcttccttgggtccctccaagactccctggggcccaactgtgttgctccacccggacccatctctcccttctagacctgagcttgcccctccagctagcactaagcaacatctcgctgtggacgcctgtaaattactgagaaatgtgaaacgtgcaatcttgaaactgaggtgttagaaaacttgatctgtggtgttttgttttgttttttttcttaaaacaacagcaacgtgatcttggctgtctgtcatgtgttgaagtccatggttgggtcttgtgaagtctgaggtttaacagtttgttgtcctggagggattttcttacagcgaagacttgagttcctccaagtcccagaaccccaagaatgggcaagaaggatcaggtcagccactccctggagacacagccttctggctgggactgacttggccatgttctcagctgagccacgcggctggtagtgcagccttctgtgaccccgctgtggtaagtccagcctgcccagggctgctgagggctgcctcttgacagtgcagtcttatcgagacccaatgcctcagtctgctcatccgtaaagtggggatagtgaagatgacacccctccccaccacctctcataagcactttaggaacacacagagggtagggatagtggccctggccgtctatcctacccctttagtgaccgcccccatcccggctttctgagctgatccttgaagaagaaatcttccatttctgctctcaaaccctactgggatcaaactggaataaattgaagacagccagggggatggtgcagctgtgaagctcgggctgattccccctctgtcccagaaggttggccagagggtgtgacccagttaccctttaacccccacccttccagtcgggtgtgagggcctgaccgggcccagggcaagcagatgtcgcaagccctatttattcagtcttcactataactcttagagttgagacgctaatgttcatgactcctggccttgggatgcccaagggatttctggctcaggctgtaaaagtagctgagccatcctgcccattcctggaggtcctacaggtgaaactgcaggagctcagcatagacccagctctctgggggatggtcacctggtgatttcaatgatggcatccaggaattagctgagccaacagaccatgtggacagctttggccagagctcccgtgtggcatctgggagccacagtgacccagccacctggctcaggctagttccaaattccaaaagattggcttgtaaaccttcgtctccctctcttttacccagagacagcacatacgtgtgcacacgcatgcacacacacattcagtattttaaaagaatgttttcttggtgccattttcattttattttattttttaattcttggagggggaaataagggaataaggccaaggaagatgtatagctttagctttagcctggcaacctggagaatccacataccttgtgtattgaaccccaggaaaaggaagaggtcgaaccaaccctgcggaaggagcatggtttcaggagtttattttaagactgctgggaaggaaacaggccccattttgtatatagttgcaacttaaactttttggcttgcaaaatatttttgtaataaagatttctgggtaataatga

SEQ ID NO: 19149 - DNA, 6285 bp, Homo sapiens
  source 1..6285: mol_type = unassigned DNA
ggaaagaaagaggaaaagagtgcgagggagtgagggagggaggaaaataaacaacaaaaaatgtcctcttcctcccccaccgggcagatcgcaagtgcggcggacatcaagcaagagaatgggatggaaagcgcctcggaagggcaggaggcgcaccgagaagtggcggggggcgcggcggtagggctgagccccccggctccagccccttttcccctggagccgggggacgccgcgaccgctgccgccagggtgagcggagaggaaggggcagtggcggcggcggcggccggagcggcggcggatcaggtacaactccactcggaacttctgggcaggcaccaccacgccgccgccgccgccgcgcagaccccgctggccttctcgcccgaccacgtcgcctgcgtgtgcgaggcactgcagcaggggggcaacctggaccgcctggcccggttcctgtggtccctgccccagagcgacctgctacgtggcaacgagagcctgctgaaggcgcgggcgctcgtggccttccaccagggcatctaccccgagctctacagcatcctcgagagccacagcttcgagtcggccaaccacccgctgctgcagcagctctggtacaaggcgcgctacaccgaggccgagcgagcccgcggccggccgctgggagccgtagacaagtaccggctgcgcaggaaattccccctgccccgcaccatctgggacggcgaggagacggtgtattgtttcaaggagaagtcgcgcaacgcgctcaaggagctctacaagcagaatcgctacccttcgcccgccgagaagcggcacctggccaagatcaccggcctctccctcacccaggtcagcaactggttcaagaaccgccggcagcgcgacaggaacccctccgagacccagtccaaaagtgagtcagatggcaaccccagcactgaagatgaatccagcaagggacatgaggatttatctcctcacccactctccagttcatctgatggcatcaccaacctcagcctttccagtcatatggagccagtatatatgcaacaaattggaaatgctaagatatcattaagctcttctggagttctgttgaatggaagcttggtacctgcaagtacttcacctgtcttccttaatggaaattcttttattcagggacccagtggagttatccttaatggattaaatgtgggaaatacacaggcagtggcattgaacccaccaaaaatgtcatcaaacattgtgagcaatggtatatccatgactgacatactggggtctacttcccaggacgtgaaggaattcaaagtcctccagagttctgctaactcagcaaccaccacgtcctacagccccagtgtccctgtctcattcccaggcctgatacccagcactgaggtgaaaagagaaggcattcaaacagtggcttcccaagatggagggtctgtagtgacttttactacaccagtgcaaattaaccagtatggcattgtccagatccccaattccggagcaaacagccagttccttaatgggagcattggattctctccactgcagctgccccctgtgtcagtggcagcttcacaaggtaatatctcagtaagctcaagcacttcagatggaagcacatttacaagtgagtctaccacagtccagcaaggaaaggttttcttgagctctcttgctcccagtgcagtggtatacacggttcctaatacaggccagactataggatctgtgaaacaggaaggcttggaaaggagcctggtattttctcagttgatgcctgtcaatcagaatgcacaagtaaatgcaaacctgtcttctgaaaacatctcggggagtggcctgcatccactggcctcctcattagttaatgtatctccaactcacaatttttctctcagtccctctacactactaaatcccactgagctaaaccgcgacattgccgatagccaaccaatgtctgcaccggtggcaagcaaatctactgtgacatctgtcagcaacactaactatgcaactcttcagaactgctcccttattactggtcaagacctattgtcagtccctatgactcaggctgcccttggggaaatagttcctacagctgaagatcaggtaggtcacccctccccagcagtacatcaggattttgtccaagaacatcgtttggttctgcaatcggtagctaacatgaaagagaatttcttatcaaattctgagagcaaagcaacaagtagcttaatgatgctggactctaaatccaagtatgtcttagatggcatggttgatactgtctgtgaagacctggaaacagacaaaaaagagcttgccaagctccagactgtccagctggatgaagatatgcaagacttatgaactttatttcctcctcacctctttttggcatcagcggcaaatcttttcatgaagccccaaggacacaaaacattttcccatttaaaggaaaacactctagttttgcaagtatatgcatacaagagactttagattgatctgcatgaagatcacagttaagtatacaggagtagaactgcattattgcagcctttttgttcacttataaatttctcttttaaatagatggagacaaaggacaaggtgaaatgtatcaagtcaaagtgaatcatttagttgactctataattctaaggtcaaaatggaacttgatagttttttaaattaaaaaatgtatacacctaacatagaaaattaaagatagctgcagaccattagaaataatacaattgtttttgtttacttttactccatgggcattgaaaaggttaagaaacataaatggtacatatttttaaagttaagtagcatgcatatatatatgcacacacacctctttttcagcattttttgagaaagtcttgggtctcaaacacatttgtctcaacacatttccaaatgtgatttctaatagctcagtgtggctgagaaagtgcggaactccactaaaaactctgaaacttcagtataaatgtaaatatatcagttctataagcaggatttgagtaattacagtgaattttatttttaatgtatatgtttctcttcaggcgctatgaactgaaaaatatgttttcttactgtttaatttatttttattgtttgaacaggaagtgaacatagtcgtttccaacaaagttttactttttgtaggattttaaaaataatgatttttaccaggaatctattaaggtcaatattaataacactgaaacaggaaatctaactcccaatattggaattttggtactttttttcacatccttgttctttatttagcaactctgattcatttaaatatgttttttatagaattctatgtgcctttttacctcgtggcctttttattggtagtaaggtacagaagtgtcaacagaagcactgatggttcttttctactatctaacagggttaatttcaccacaaaattgctttaaatctgaagaacttaagtttcactaaataatatatatgacatttatcacacaaatggataaacaactaattattgttgatacttttcattacaaggaaaataagttataaataccatgtcaaattgattatacaggctatgaaaaccattttaaaggaaagaaaatatgtaaattctattgagcaaaattctgtcctgttgaaacttagttctaaaggttttgaatcagttgttacactctgacacatgactgttgtttgcactatattatcatgtcttctttaaaagtaaatatttttggtttctgtaagaagcttgtttaataatgttgtaagccgtggctatagttttatcaagactctgaacacaagatgtaacaatgcaaataaatttatgtagtgagtaaagttgctctctagtctctgaaaagcaaaaaaagtgagaaaataatttcttcagagataacttcaagttgttgaacataaaggtgttagatgttagcacatcttgctttttttttttttttgagatggagtctcgctctgttgcccaggctggagtgcagtggcacgatcttggctcactgcaagctctgcctcctgggttcacgccattctcctgcctcagcctcccgagtagctgggactacaggcacctgccaccatgcccggctaaatttttgtatttttagtagagacggggtttcaccgtgttagccaggatggtcttgatctcctgacctcgtgatctgcccgcctcggcctcccaaagtgctgggattataggcatgagccactgtgcctggccacatcttgcttttttttttatgatcagaacaaagggcccactctagttctctacatgtcaatcaatcaagcatgttgaataagggacatagaggatttaacttttgttatcataaatggaacttgcaggcatatatcaagaaccctatgaagaattcctctcccatcattttgataaagaactacatcatttttgatagaattggtgaatgttcctaaactgctgaagctacatgttttttgttttgttttacaaagtcaggtgtttgagagttcttttccactctactactactcatagagcttgttttttctttgggtgtgtgctgatcctgttactgagattaattacatggctctgcagtgtagtttacataaaaatgatgttttccacttgattgctgcagatatcaagagtttgttattttcaaatacccatccaacaagagagatggggaggtttttagttatatatgctatatatatatatataactggaaatgttttatatgttttccgaaaatacaataagcctctcttttattcagtgttcttcctcttttctcccttatgaaaaagaaaagatagcacaaaacttaagacttacctaggaaacccattcatattcccaccatgatgtaattataaccctacaattacttcaggtagctacacaatataccaggtaagaatcaatgcacagtataaagaacttattgttcttttctattctttcagttgaataagggccagttggtatgcagcccatgtatatgtgaatggagtaagataaaccccatgatctccttgcacagaattgcaaatgtcttttgccataccaagggccagactcagaacccttggagtcatgtggcagaatttccctcttacataaaccaatgcttgaaaatgctgcaaatgaccctctaatgatccctgaagatcaaaacaggggtaaatgactccctgcaaaacccaacccatgctgctggctgtgggatttttggtgtaagcctatctatgcactctatcagccagaatttggcatttagctcttagttaaatctagtaaaggacagtctattgtttaaagagaaggtgcatttgttcctcaatcaagcaagagcacctgtgttgtactgctttatatctcatgtatatttatagtaatgaaaagactttttaaattgtacacgtttcagtgcctttcttgtgttatgaaaggcaggtagatattatagccataggtaaaaatccatagttaaattgcacactgaccttaaatctctctgtgtatgcccttgtatcttgcatgttaaaagttggattattgggcatgtgtggcagcctgccctgctacatgctagacaagtgtgctttagtacatagccacaagttcttcattctttaaaatgttttgacagatcatctcataataaaaataattcaggaaaactatggggaaatagttacatttcacaaaagatattttaaactctttgtaaaacttagataatagagcctagcagttactttgtatctaattgatacattttatgttaatttaccaccatacattttattaatcaaaattgtatagcatgtgactcttttggctttcagagttctcaaaaatattattttgttgcatgtactgtatgtttagaggcaaccaattatatactcaatatggttttactgtgccttacacaaagagaaactctatacagaatgtatatcatggggtggggtaacagagtctttactgcactgttaggtgatggcacacagagcatgtcccagaacatttctgtgcttaattacccaaccaaagagatctgaagtatgtatgtcgtactgtaatgggggtttatgcctggacaattaagtgttttatttgttttctgaaatgatgtgaacttatttttctaaacactatgctaaataaactttatatttatacataccttgcattga

SEQ ID NO: 19150 - DNA, 2003 bp, Homo sapiens
  source 1..2003: mol_type = unassigned DNA
cttcccggctttcttttcctccaagtgctcgcaaacatggcgcttaccttccccaccagcctggtccggctgcccacctctccccgccccctacctcgctccccggccggcagagggcactggatggtgtttgttaaataggcccctttggcttcctttggattcaaaggcgactgcacataactgttcttgggttgaaagtgccttttcctacaacaaggacagccactttgttgaatgagagagttgtcagtctggtggagtagaagtttgggagcagtgagtcagatggcaaccccagcactgaagatgaatccagcaagggacatgaggatttatctcctcacccactctccagttcatctgatggcatcaccaacctcagcctttccagtcatatggagccagtatatatgcaacaaattggaaatgctaagatatcattaagctcttctggagttctgttgaatggaagcttggtacctgcaagtacttcacctgtcttccttaatggaaattcttttattcagggacccagtggagttatccttaatggattaaatgtgggaaatacacaggcagtggcattgaacccaccaaaaatgtcatcaaacattgtgagcaatggtatatccatgactgacatactggggtctacttcccaggacgtgaaggaattcaaagtcctccagagttctgctaactcagcaaccaccacgtcctacagccccagtgtccctgtctcattcccaggcctgatacccagcactgaggtgaaaagagaaggcattcaaacagtggcttcccaagatggagggtctgtagtgacttttactacaccagtgcaaattaaccagtatggcattgtccagatccccaattccggagcaaacagccagttccttaatgggagcattggattctctccactgcagctgccccctgtgtcagtggcagcttcacaaggtaatatctcagtaagctcaagcacttcagatggaagcacatttacaagtgagtctaccacagtccagcaaggaaaggttttcttgagctctcttgctcccagtgcagtggtatacacggttcctaatacaggccagactataggatctgtgaaacaggaaggcttggaaaggagcctggtattttctcagttgatgcctgtcaatcagaatgcacaagtaaatgcaaacctgtcttctgaaaacatctcggggagtggcctgcatccactggcctcctcattagttaatgtatctccaactcacaatttttctctcagtccctctacactactaaatcccactgagctaaaccgcgacattgccgatagccaaccaatgtctgcaccggtggcaagcaaatctactgtgacatctgtcagcaacactaactatgcaactcttcagaactgctcccttattactggtcaagacctattgtcagtccctatgactcaggctgcccttggggaaatagttcctacagctgaagatcaggtaggtcacccctccccagcagtacatcaggattttgtccaagaacatcgtttggttctgcaatcggtagctaacatgaaagagaatttcttatcaaattctgagagcaaagcaacaagtagcttaatgatgctggactctaaatccaagtatgtcttagatggcatggttgatactgtctgtgaagacctggaaacagacaaaaaagagcttgccaagctccagactgtccagctggatgaagatatgcaagacttatgaactttatttcctcctcacctctttttggcatcagcggcaaatcttttcatgaagccccaaggacacaaaacattttcccatttaaaggaaaacactctagttttgcaagtatatgcatacaagagactttagattgatctgcatgaagatcacagttaagtatacaggagtagaactgcattattgcagcctttttgttcacttataaatttctcttttaaatagatggagacaaaggac

SEQ ID NO: 19151 - DNA, 1573 bp, Homo sapiens
  source 1..1573: mol_type = unassigned DNA
atatagtatgcagcaaccggaggagtcacgttgggggaacggcagaaagcagctatccgtttacactactttgctctaacagctatcttaatgatcgcaagtgcggcggacatcaagcaagagaatgggatggaaagcgcctcggaagggcaggaggcgcaccgagaagtggcggggggcgcggcggtagggctgagccccccggctccagccccttttcccctggagccgggggacgccgcgaccgctgccgccagggtgagcggagaggaaggggcagtggcggcggcggcggccggagcggcggcggatcaggtacaactccactcggaacttctgggcaggcaccaccacgccgccgccgccgccgcgcagaccccgctggccttctcgcccgaccacgtcgcctgcgtgtgcgaggcactgcagcaggggggcaacctggaccgcctggcccggttcctgtggtccctgccccagagcgacctgctacgtggcaacgagagcctgctgaaggcgcgggcgctcgtggccttccaccagggcatctaccccgagctctacagcatcctcgagagccacagcttcgagtcggccaaccacccgctgctgcagcagctctggtacaaggcgcgctacaccgaggccgagcgagcccgcggccggccgctgggagccgtagacaagtaccggctgcgcaggaaattccccctgccccgcaccatctgggacggcgaggagacggtgtattgtttcaaggagaagtcgcgcaacgcgctcaaggagctctacaagcagaatcgctacccttcgcccgccgagaagcggcacctggccaagatcaccggcctctccctcacccaggtcagcaactggttcaagaaccgccggcagcgcgacaggaacccctccgagacccagtccaaaagtgagtcagatggcaaccccagcactgaagatgaatccagcaagggacatgaggatttatctcctcacccactctccagttcatctgatggcatcaccaacctcagcctttccagtcatatggagccagtatatatgcaacaaattggaaatgctaagatatcattaagctcttctggagttctgttgaatggaagcttggtacctgcaagtacttcacctgtcttccttaatggaaattcttttattcagggacccagtggagttatccttaatggattaaatgtgggaaatacacaggcagtggcattgaacccaccaaaaatgtcatcaaacattgtgagcaatggtatatccatgactgacatactggggtctacttcccaggacgtgaaggaattcaaagtcctccagagttctgctaactcagcaaccaccacgtcctacagccccagtgtccctgtctcattcccaggcctgatacccagcactgaggtgaaaagagaaggcattcaaacagtggcttcccaagatggagggtctgtagtgacttttactacaccagtgcaaattaaccagtatggcattgtccagatccccaattccggagcaaacagccagttccttaatgggagcattggattct

SEQ ID NO: 19152 - DNA, 3998 bp, Homo sapiens
  source 1..3998: mol_type = unassigned DNA
aggctctttcttctggggccgggaaaaccgaggaatacacatgcgcagttggacccctcaggcccttcgtgtcccttcccacccatctccccgccccggccctctgggcggggctgggccgacagtccagctgcagctcgctggagattcagtgacttccttgttgtgagccccggcccggcagtgtcccgactcgtagccccgctgttcttaatccgggccgctagcctgagtctaggtcgcagccgcagccccaccccgtcggtcaccttttcagcgcaggtcctttccccgcacgccctgcgctccctaacatgcccaaccccagcagcacctcctctccctaccccctccctgaggaaattaggaacctgttggcagatgttgaaacatttgtagcagatatactgaaaggagaaaatttatccaagaaagcaaaggaaaagagagaatcccttattaagaagataaaagatgtaaagtctatctatcttcaggaatttcaagacaaaggtgatgcagaagatggggaagaatatgatgacccttttgctgggcctccagacactatttcattagcctcagaacgatatgataaagacgatgaagccccctctgatggagcccagtttcctccaattgcagcacaagaccttccttttgttctaaaggctggctaccttgaaaaacgcagaaaagatcacagctttctgggatttgaatggcagaaacggtggtgtgctctcagtaaaacggtattctattattatggaagtgataaagacaaacaacagaaaggtgaatttgcaatagatggctacagtgtcagaatgaataacactctaagaaaggatggaaagaaagattgctgttttgaaatctctgctcctgataaacgtatatatcagtttacagcagcttctcccaaagatgctgaagaatgggtacagcagctgaaatttgtattgcaagatatggaatctgatattattcctgaggattatgatgagagaggagaattatatgatgatgttgatcatcctctaccaataagcaatccactaacaagcagtcaaccaatagatgatgaaatttatgaagaacttccagaagaagaagaggacagtgctccagtgaaagtggaagaacaaaggaagatgagtcaggatagtgtccatcacacctcaggggataagagcactgattatgctaatttttaccagggattgtgggattgtactggagctttttctgatgagttgtcatttaagcgtggtgatgtgatttacattcttagcaaggaatacaatagatatggctggtgggtaggagaaatgaagggagccattggcttggtgcctaaagcctacataatggagatgtatgatatttgagagtcctggaaaaggaaaattcttctgcttgtctgcaaatgctttggatttagaagcgtcatgaaagcacgagtgacagctcctaacctctccttgttttattaaacattacttatctttgactgttattttatgcagtcgctcattaaaatattcctctgatgtgaaattaaatgaaggatattaatgtaaattagatgcaaccagttaagttatacctgttgctattttgcaaagaaataattatagtttttatttacccatttgatttgtgtgaagaattcatcactattttatacgtaacatatagtctactatagcatagtatgctactattgctacttctggtgtgatttgtaatgtttcttaatcattggacatcaattatttttagagagtaatgtataatttcatagcattttaaatttagtgtatcatgcgagttttttttggtagatgctgaagaatgtggttgctaaacaaagaatgctaaagaatgttcaaactttatagataactttattgttattatttattttcacacatttaattcctattaagtacagccgcaagaaagaaaaaatgatgaagttgcaaatggcagtgtgctgtcacctgcaacagaagtgcgtaccagaagtatgactcatgcaaagcattttaccgtacaaatatcctggtgcgatgatgggcctggcaacattttctactgtacttttgtttaaatttaatgaaacaaaaaattcctaagaaataccaccctaccactaacaaaatggtataaagaatctcccagccaggccaacatggtgaaaccctgtctctactaaaaattagccaagtgtggtaatgttcacctgcagtcccagctacttgggaggccaaggcacgagaattgcttgaacaaggtaggcagaggttgcagtgagccaagatcgcgccactgcactccagcctgggcgacagagtgagactccatctcagaaaaaaaaaaaaaaaaaaacagaatctcagtgtattctcaaagtaaaaaggcataaccaagcactctcttatcttgccttattgctatactatttacatcccactgcagaacagcagatttgaggcttttctatatacttctcagagcactgaaaagaaaggaagggtttgcagaggagagtgtagaaatcccagtggtagcatgtaccaacaggtgagtagaaaggtagtgttagcctgacatttgagttatactctgtgctgcctgagcaagatttgtagaatcatataattaccttttcatgtatatttgaaatcagaggtgtttaaaatacctatgagataccaatgtagccttaacatatgtcaaaatgcattgctggttagataattatttggactacacataaactcctaatattgaatcattacctatcaggtattatctttatggaacttttcaatatctttgctttataaagattctaaacatgtatctgagctggtaatattttaaaatctccattatttgtgtaaaactgtttataagcagtgtttgagagggtctgctttaccattaccccctcaatatcatgatcatccaatctcaaatgtgaaaaaaaaaaagaaatttgattttagggattgtgagtaaacaagtttatatagagagacattgtgaagttaaagttttcagaagttacatttgtgcagttcttaccttttcctcatatagtgccattgaaatagactgaaattatcttggcaaaagttagacaaccaaagacgactttagtggactggttttcaaaacttgagcagctgaaaagcaaaagccgttgtttcccatgacaatgtagcctttgtggatttgggtttgtgctttgggttgaaaagaagtttttagtcctaggccagtagatggcagcagcttttcattgcagacaaaacctcttgaaacccttcccccatggcacaaactcgcccatgatggaaagcatctagatttctgcctccttttacagttaatccaggagagggagtcctttgccaactgatgaccaacagttccaagccagatagtctcgtgaacagtgacaatacagaaataaggtgttatttctgttcagatctccaccggcctttgttcttttaaaacttgaatataggtgggagacataagaaaggaaagaaaagacttaaaactggagtgacaggacaaataatcattactttcaattcatgactgctttatattcatttgatgaaatcatttgtatacaaaccagggagagttttctttacacccttgacaatatatcacatactcttcaagatcataataatatcattaatataaatttaaacaacatggcttgttagaaaatatgctaattgctatggtctcattatgtttgcttagcttttatttgtttttctgtgaacagttagagagctaatttttttcaaaggtgattgtaagtcatattttatatagcattttgcttgattatttgctctgtactgaatttgtactctattgccattagatcttacaataatgttccactctgcaaatttttaaggttcaaataaagtttaattgtttgcaaactgtta

SEQ ID NO: 19153 - DNA, 679 bp, Homo sapiens
  source 1..679: mol_type = unassigned DNA
attgaacgctagtaaattctaatttcccttctccttttccttttcccccacttcctctcccctctcccttcttcccatctctctctgtctcctttttgaccagtaacattttagagttgaaagctatgctaaaggagcccagtttcctccaattgcagcacaagaccttccttttgttctaaaggctggctaccttgaaaaacgcagaaaagatcacagctttctgggatttgaatggcagaaacggtggtgtgctctcagtaaaacggtattctattattatggaagtgataaagacaaacaacagaaaggtgaatttgcaatagatggctacagtgtcagaatgaataacactctaagaaaggatggaaagaaagattgctgttttgaaatctctgctcctgataaacgtatatatcagtttacagcagcttctcccaaagatgctgaagaatgggtacagcagctgaaatttgtattgcaagatatggaatctgatattattcctgaggattatgatgagagaggagaattatatgatgatgttgatcatcctctaccaataagcaatccactaacaagcagtcaaccaatagatgatgaaatttatgaagaacttccagaagaagaagaggacagtgctccagtgaaagtggaagaacaaaggaagatgagtcag

SEQ ID NO: 19154 - DNA, 955 bp, Homo sapiens
  source 1..955: mol_type = unassigned DNA
actgctccgcctgagaggaaccctggggtttaacgctgaagtgcgtttctcagagggcagagctggagcatctcgcagccctacaacttctttgcggcgcttggtctgtctttgcgttgcgagatcaggatcggtgtgttgctcagacaccggccgaacgccaccggcacgtctaggagtctcctgtgcctggaagaggctggtttcattcgattctaaaagaaacggatgttgaaacatttgtagcagatatactgaaaggagaaaatttatccaagaaagcaaaggaaaagagagaatcccttattaagaagataaaagatgtaaagtctatctatcttcaggaatttcaagacaaaggtgatgcagaagatggggaagaatatgatgacccttttgctgggcctccagacactatttcattagcctcagaacgatatgataaagacgatgaagccccctctgatggagcccagtttcctccaattgcagcacaagaccttccttttgttctaaaggctggctaccttgaaaaacgcagaaaagatcacagctttctgggatttgaatggcagaaacggtggtgtgctctcagtaaaacggtattctattattatggaagtgataaagacaaacaacagaaaggtgaatttgcaatagatggctacagtgtcagaatgaataacactctaagaaaggatggaaagaaagattgctgttttgaaatctctgctcctgataaacgtatatatcaggttgtagtttttatgttgccttgaaattaagttgataaaatgttttgatttcatttatagagacattaacatttgattaatactttccttgacatgttaacaataataaaaatactgatgtttaaatatattatgcattgaacattcatataagaggaaatttttaaaaatttcagattaattcacacactatcttcttg

SEQ ID NO: 19155 - DNA, 554 bp, Homo sapiens
  source 1..554: mol_type = unassigned DNA
aatgatgccaaacatccaaatagtatttgctgtgatgttgaaacatttgtagcagatatactgaaaggagaaaatttatccaagaaagcaaaggaaaagagagaatcccttattaagaagataaaagatgtaaagtctatctatcttcaggaatttcaagacaaaggtgatgcagaagatggggaagaatatgatgacccttttgctgggcctccagacactatttcattagcctcagaacgatatgataaagacgatgaagccccctctgatggagcccagtttcctccaattgcagcacaagaccttccttttgttctaaaggctggctaccttgaaaaacgcagaaaagatcacagctttctgggatttgaatggcagaaacggtggtgtgctctcagtaaaacggtattctattattatggaagtgataaagacaaacaacagaaaggtgaatttgcaatagatggctacagtgtcagaatgaataacactctaagaaaggatggaaagaaagattgctgttttgaaatctctgctcctgataaacgtat

SEQ ID NO: 19156 - DNA, 577 bp, Homo sapiens
  source 1..577: mol_type = unassigned DNA
aatttttctctgcttgttggacatgaagagagggagacaaaggctctcagaaagagaaagacgggctggtgaaggacaaactaaggaatttgattattcacttttccaagataaagtggcatggagtggggaaagaccattaaggaatgctgaacataaaggaatcctggggacctgaccctcagttaagacataagaatgacaaccaggagtgtgctcgatgttgaaacatttgtagcagatatactgaaaggagaaaatttatccaagaaagcaaaggaaaagagagaatcccttattaagaagataaaagatgtaaagtctatctatcttcaggaatttcaagacaaaggtgatgcagaagatggggaagaatatgatgacccttttgctgggcctccagacactatttcattagcctcagaacgatatgataaagacgatgaagccccctctgatggagcccagtttcctccaattgcagcacaagaccttccttttgttctaaaggctggctaccttgaaaaacgcagaaaagatcacagctttctgggatttgaatggcagaaacggtggt

SEQ ID NO: 19157 - DNA, 558 bp, Homo sapiens
  source 1..558: mol_type = unassigned DNA
agttaaaccctttcccgcgggcgcagagtgggcctcccacgcttctctcccgtggccagtatgcgtgagagtgtgagttgagcccctgcctccgaggaagaattctaaaaaccgggctaagggtcgagcgagggaggctgaccttttcttgttatcaaattactgcgtttccctgaattacgggcactcaggaatggtgaaatctacatattaaccgaggaacacgaccctcaaaggaagatgttgaaacatttgtagcagatatactgaaaggagaaaatttatccaagaaagcaaaggaaaagagagaatcccttattaagaagataaaagatgtaaagtctatctatcttcaggaatttcaagacaaaggtgatgcagaagatggggaagaatatgatgacccttttgctgggcctccagacactatttcattagcctcagaacgatatgataaagacgatgaagccccctctgatggagcccagtttcctccaattgcagcacaagaccttccttttgttctaaaggctggctaccttgaaaaacgcagaaaag

SEQ ID NO: 19158 - DNA, 585 bp, Homo sapiens
  source 1..585: mol_type = unassigned DNA
ttccttgttgtgagccccggcccggcagtgtcccgactcgtagccccgctgttcttaatccgggccgctagcctgagtctaggtcgcagccgcagccccaccccgtcggtcaccttttcagcgcaggtcctttccccgcacgccctgcgctccctaacatgcccaaccccagcagcacctcctctccctaccccctccctgaggaaattaggaacctgttggcagatgttgaaacatttgtagcagatatactgaaaggagaaaatttatccaagaaagcaaaggaaaagagagaatcccttattaagaagataaaagatgtaaagtctatctatcttcaggaatttcaagacaaaggtgatgcagaagatggggaagaatatgatgacccttttgctgggcctccagacactatttcattagcctcagaacgatatgataaagacgatgaagccccctctgatggttttaaaagaagaaattgagtccagagaggctcagtgacatgtttaaggtaaaaaaaaaaaaaaaaaaaggtatggaactgagatcacattacagacttctttaacctgtgccatggat

SEQ ID NO: 19159 - DNA, 513 bp, Homo sapiens
  source 1..513: mol_type = unassigned DNA
agactggcttcgcccggacgactggcggaagacgagacttcgttacctccgttcaatcggacaaagaaggccataatagtttaggacaagagaaaattccttgtgggttaaactgcggtgggactgactgttacgcagaaggcgtaatcgcaaaacttgtatacactctgtatcatggatacattattttctggaatcctgcagaaacgatcagcagttgtgatggcaccagtaccgaaaatggctgtaaggcgctccggacgctggatcagatgttgaaacatttgtagcagatatactgaaaggagaaaatttatccaagaaagcaaaggaaaagagagaatcccttattaagaagataaaagatgtaaagtctatctatcttcaggaatttcaagacaaaggtgatgcagaagatggggaagaatatgatgacccttttgctgggcctccagacactatttcattagcctcagaacgatatgataaagacgatgaagccccctctgatgg

SEQ ID NO: 19160 - DNA, 536 bp, Homo sapiens
  source 1..536: mol_type = unassigned DNA
ccttgttgtgagccccggcccggcagtgtcccgactcgtagccccgctgttcttaatccgggccgctagcctgagtctaggtcgcagccgcagccccaccccgtcggtcaccttttcagcgcaggtcctttccccgcacgccctgcgctccctaacatgcccaaccccagcagcacctcctctccctaccccctccctgaggaaattaggaacctgttggcagatgttgaaacatttgtagcagatatactgaaaggagaaaatttatccaagaaagcaaaggaaaagagagaatcccttattaagaagataaaagatgtaaagtctatctatcttcaggaatttcaagacaaagaaaaatatgctgctgtagtatgattaaaccttgagtttgttgcaatgtttgttactactgaaattataggaaggtgatgcagaagatggggaagaatatgatgacccttttgctgggcctccagacactatttcattagcctcagaacgatatgataaagacgatgaagccccctctgatg

SEQ ID NO: 19161 - DNA, 3332 bp, Homo sapiens
  source 1..3332: mol_type = unassigned DNA
atgatcccaaagagcctggtccaggcagcggaaacccagaggggtctctgcgagccaggagggaaaggaagagaggggagaagtggaggaaaaggggagacacgccccagaggagttggaacgcaggagggaaaggggaccatacccggtagcccgagggaaaaacgaggcgagaggggagaaggcgaccccgcgctgctacccgcggaagatttatggcgcctcccgggttccaaggacaggctgcgttcgtcgctgctgccaccgccgggacccccttcttctgactccgggcccggacccccctcctctcactcagggaaaaccgcgcagggacccaggaccctcaactgggccagaaagcaaagtgcaaggaccagcagcaacttgtgtgcctggagccttgcaatggctacgaagatggctgagattccttctagcccatatgagccgggacagcgaggcatgaaggatactcagagaggtgatgcccctcaaagaggaagcccagagccccgaatcctgcagttggcccgagtgggaaacgtatatctgaaggaggaaagctcaaggagtgggcgactggaagctaagaagtggatcccaacaaagttccttgagaacctctctgtcccacacgttgacctcggtggaaaccagctttggagcggcggcatggaggctctcaccactcagctggggccggggcgcgagggcagttcctcgcccaactccaagcaggagctgcagccgtactcgggctccagcgctctcaaacccaaccaggtgggcgagacgtcgctgtacggggtgcccattgtgtcgctggtcatcgacggccaggagcgcctatgcctggcgcagatctccaacaccctcctcaagaactacagctataatgagatccacaaccgccgcgtggccctgggcatcacgtgcgtgcagtgcacgccggtacagctggagattctgcgtcgggccggggccatgcccatctcgtcgcgccgctgcggcatgatcactaagcgagaggccgaacgcctgtgcaagtcgttcctgggcgagcacaaaccacccaagctgcccgagaacttcgccttcgatgtggtgcacgagtgcgcgtggggctcgcgtggtagcttcatccctgcgcgttacaacagctctcgtgccaagtgcatcaagtgcggctactgcagcatgtacttctcgcccaacaagttcatcttccactcgcaccgaacacccgacgccaagtacacgcagcccgatgccgccaacttcaactcctggcgtcgtcacctcaaactcagtgacaagtcggccacagacgaactgagccatgcttgggaggaccgcggacttggcctggcgactggagctagtggcccggcgggcccaggagggcccggtggcggcgccggcgtacgaagctacccggtgatcccggtgcccagcaaaggctttgggctcctgcaaaagctgcccccaccacttttcccccatccttacggcttccctacggccttcggcctatgccccaaaaaggacgacccggttttaggcgcgggcgagccaaagggcggctcctacgtgtcggccttccggccggtggtcaaggacaccgagagcatcgctaagctctacgggagcgcccgggaggcgtacggcgcggggcctgctcgggggccgggacccggcgctgggagcggcggctacgtgagcccggactttctgagcgagggcagctccagctacaattccgcctcgcccgacgtggacaccgcggacgagcccgaggtggacgtggaatccaaccgcttccccgacgacgaggacgcccaagaggagaccgagcccagcgcacccagcgcagggggcggcccagacgctggccggcccgcatttggggacttggcagccgaagacttggtgcggagacctgagaggagcccgccaagcggcggcggcggctacgagctgcgagagccttgcgggcccctaggaggccccgcgccggccaaggtgttcgcgcccgagagggatgagcacgtgaagagcgcggcggtggcgctggggcccgcggcctcctacgtctgcacccccgaggcccacgagccagataaggaagacaatcactcgcccgccgatgatttggaaacgaggaaatcctatccagaccaaaggagtatctcccagccaagtcctgcaaatacagacagaggcgaagatgggcttaccttggatgtcacaggaactcatttggtggagaaagatatcgagaacctggccagagaggaattgcaaaaactgctcctggaacaaatggagctccgcaagaagctggaacgggaatttcagagtctcaaagataattttcaggatcaaatgaagagggaattggcttatcgagaagaaatggtgcaacagctgcaaattgtcagagataccctgtgtaacgaactcgaccaggagcggaaggcgcgctatgccatccagcagaaattgaaagaagcccacgacgccctgcaccatttctcctgcaagatgctgacgccccgccactgcactggcaactgctccttcaagccaccgctgttgccctagggccggcctggccgcacccctgcgccctcaagccatgctgctccttgtaaatacccgctgctgcggtggccctgagcgaggaacaagccattcggacccgaccgatgtaaatacagccgcccgtccgcccgccttcctcccgggctccccggccttgcccgccccctcccgggcgtccctgtccagggccccggcttggtttccaagtgtaaataccgcctcgcgcctcaaatccccctaccccgtgtgaactctagggcatcggacctcaaggggttaactggacagacggggggcgggaggggagagcgccccctcccattgtatagccttgaacccgattgtgaatacaatgtagcaacttcgctggcgcctgccccgcactccccgtcccgtccacttctgaaactcctgttcctaatgacaaagtggctatgtgcaatggatataaatgtactgtgagtctctcggttcagtattaggttcactttaatttatttatgctgtaagttatttttgcttccttctcctggacccacttccagtcccgttttgcattcccctttggattttgctttggctattttttgttgtaacctcttgatgtaacagcactttaaaagggcgacaactgactcacgagatggcaaccacctggagcctgtttggggagaccaccctgtacccgtgactttcgtttttaataataataataataataataa

SEQ ID NO: 19162 - DNA, 3597 bp, Homo sapiens
  source 1..3597: mol_type = unassigned DNA
gcgccgtcacccggagagcccggcggatcccggactcccgcccgccgctcctcccgccgcgcacctccgctcaccgctcgcccggctccagccgccgccgcactgagcggcggcatggaggctctcaccactcagctggggccggggcgcgagggcagttcctcgcccaactccaagcaggagctgcagccgtactcgggctccagcgctctcaaacccaaccaggtgggcgagacgtcgctgtacggggtgcccattgtgtcgctggtcatcgacggccaggagcgcctatgcctggcgcagatctccaacaccctcctcaagaactacagctataatgagatccacaaccgccgcgtggccctgggcatcacgtgcgtgcagtgcacgccggtacagctggagattctgcgtcgggccggggccatgcccatctcgtcgcgccgctgcggcatgatcactaagcgagaggccgaacgcctgtgcaagtcgttcctgggcgagcacaaaccacccaagctgcccgagaacttcgccttcgatgtggtgcacgagtgcgcgtggggctcgcgtggtagcttcatccctgcgcgttacaacagctctcgtgccaagtgcatcaagtgcggctactgcagcatgtacttctcgcccaacaagttcatcttccactcgcaccgaacacccgacgccaagtacacgcagcccgatgccgccaacttcaactcctggcgtcgtcacctcaaactcagtgacaagtcggccacagacgaactgagccatgcttgggaggacgtcaaggccatgtttaatggcggcacgcgcaagcggaccttctccctacaaggaggcggcggaggcggtgccaatggcgggtcgggtgggcaggggaagggtggtgctggcggcggtggcggcggtggcccagggtgcggtgcagagatggccccaggcccgccgccccacaaaagcctgcgctgtggcgaagatgaggctgccgggcctccggggccacctccaccccacccgcagcgcggacttggcctggcgactggagctagtggcccggcgggcccaggagggcccggtggcggcgccggcgtacgaagctacccggtgatcccggtgcccagcaaaggctttgggctcctgcaaaagctgcccccaccacttttcccccatccttacggcttccctacggccttcggcctatgccccaaaaaggacgacccggttttaggcgcgggcgagccaaagggcggtcctggcactgggagcggcggcggcggcgcggggacaggcgggggtgcggggggcccgggagccagccacttgcccccgggggcaggggcgggcccgggcggcggcgccatgttctgggggcatcaaccctccggggcagccaaggacgcagcggcagtggctgcagcggccgccgccgccactgtgtacccgacgtttcccatgttctggccagcagcaggcagcctcccggtaccgtcctaccccgctgctcagagccaagccaaggccgtggcggcagccgtggcggcggcagcggcggcggcagcggcagctgctggcagcggtgccccagagcccctggacggtgccgagccagccaaagagagtggcctcggcgcggaggagcgctgcccgagcgctctgtcccgcgggcccctggacgaagacggcacggacgaggcgctgccaccgcccctggccccgttgcccccgccgcccccgccgcccgcacgcaaaggctcctacgtgtcggccttccggccggtggtcaaggacaccgagagcatcgctaagctctacgggagcgcccgggaggcgtacggcgcggggcctgctcgggggccgggacccggcgctgggagcggcggctacgtgagcccggactttctgagcgagggcagctccagctacaattccgcctcgcccgacgtggacaccgcggacgagcccgaggtggacgtggaatccaaccgcttccccgacgacgaggacgcccaagaggagaccgagcccagcgcacccagcgcagggggcggcccagacggtgaacagcccactggacccccttccgccacctcctctggcgcggacggtcccgcaaactctcccgacggcggcagcccccgcccccggcgccgcctcgggccacccccagctggccggcccgcatttggggacttggcagccgaagacttggtgcggagacctgagaggagcccgccaagcggcggcggcggctacgagctgcgagagccttgcgggcccctaggaggccccgcgccggccaaggtgttcgcgcccgagagggatgagcacgtgaagagcgcggcggtggcgctggggcccgcggcctcctacgtctgcacccccgaggcccacgagccagataaggaagacaatcactcgcccgccgatgatttggaaacgaggaaatcctatccagaccaaaggagtatctcccagccaagtcctgcaaatacagacagaggcgaagatgggcttaccttggatgtcacaggaactcatttggtggagaaagatatcgagaacctggccagagaggaattgcaaaaactgctcctggaacaaatggagctccgcaagaagctggaacgggaatttcagagtctcaaagataattttcaggatcaaatgaagagggaattggcttatcgagaagaaatggtgcaacagctgcaaattgtcagagataccctgtgtaacgaactcgaccaggagcggaaggcgcgctatgccatccagcagaaattgaaagaagcccacgacgccctgcaccatttctcctgcaagatgctgacgccccgccactgcactggcaactgctccttcaagccaccgctgttgccctagggccggcctggccgcacccctgcgccctcaagccatgctgctccttgtaaatacccgctgctgcggtggccctgagcgaggaacaagccattcggacccgaccgatgtaaatacagccgcccgtccgcccgccttcctcccgggctccccggccttgcccgccccctcccgggcgtccctgtccagggccccggcttggtttccaagtgtaaataccgcctcgcgcctcaaatccccctaccccgtgtgaactctagggcatcggacctcaaggggttaactggacagacggggggcgggaggggagagcgccccctcccattgtatagccttgaacccgattgtgaatacaatgtagcaacttcgctggcgcctgccccgcactccccgtcccgtccacttctgaaactcctgttcctaatgacaaagtggctatgtgcaatggatataaatgtactgtgagtctctcggttcagtattaggttcactttaatttatttatgctgtaagttatttttgcttccttctcctggacccacttccagtcccgttttgcattcccctttggattttgctttggctattttttgttgtaacctcttgatgtaacagcactttaaaagggcgacaactgactcacgagatggcaaccacctggagcctgtttggggagaccaccctgtacccgtgactttcgttttt

SEQ ID NO: 19163 - DNA, 3620 bp, Homo sapiens
  source 1..3620: mol_type = unassigned DNA
gggcttcaggacccgggccggcagcaccggctgcgagggttgccgaaggcgcacggatctgggcgctgaaaaagccaggatttggcaatggctttgctgtgtggccttgggagcggcggcatggaggctctcaccactcagctggggccggggcgcgagggcagttcctcgcccaactccaagcaggagctgcagccgtactcgggctccagcgctctcaaacccaaccaggtgggcgagacgtcgctgtacggggtgcccattgtgtcgctggtcatcgacggccaggagcgcctatgcctggcgcagatctccaacaccctcctcaagaactacagctataatgagatccacaaccgccgcgtggccctgggcatcacgtgcgtgcagtgcacgccggtacagctggagattctgcgtcgggccggggccatgcccatctcgtcgcgccgctgcggcatgatcactaagcgagaggccgaacgcctgtgcaagtcgttcctgggcgagcacaaaccacccaagctgcccgagaacttcgccttcgatgtggtgcacgagtgcgcgtggggctcgcgtggtagcttcatccctgcgcgttacaacagctctcgtgccaagtgcatcaagtgcggctactgcagcatgtacttctcgcccaacaagttcatcttccactcgcaccgaacacccgacgccaagtacacgcagcccgatgccgccaacttcaactcctggcgtcgtcacctcaaactcagtgacaagtcggccacagacgaactgagccatgcttgggaggacgtcaaggccatgtttaatggcggcacgcgcaagcggaccttctccctacaaggaggcggcggaggcggtgccaatggcgggtcgggtgggcaggggaagggtggtgctggcggcggtggcggcggtggcccagggtgcggtgcagagatggccccaggcccgccgccccacaaaagcctgcgctgtggcgaagatgaggctgccgggcctccggggccacctccaccccacccgcagcgcggacttggcctggcgactggagctagtggcccggcgggcccaggagggcccggtggcggcgccggcgtacgaagctacccggtgatcccggtgcccagcaaaggctttgggctcctgcaaaagctgcccccaccacttttcccccatccttacggcttccctacggccttcggcctatgccccaaaaaggacgacccggttttaggcgcgggcgagccaaagggcggtcctggcactgggagcggcggcggcggcgcggggacaggcgggggtgcggggggcccgggagccagccacttgcccccgggggcaggggcgggcccgggcggcggcgccatgttctgggggcatcaaccctccggggcagccaaggacgcagcggcagtggctgcagcggccgccgccgccactgtgtacccgacgtttcccatgttctggccagcagcaggcagcctcccggtaccgtcctaccccgctgctcagagccaagccaaggccgtggcggcagccgtggcggcggcagcggcggcggcagcggcagctgctggcagcggtgccccagagcccctggacggtgccgagccagccaaagagagtggcctcggcgcggaggagcgctgcccgagcgctctgtcccgcgggcccctggacgaagacggcacggacgaggcgctgccaccgcccctggccccgttgcccccgccgcccccgccgcccgcacgcaaaggctcctacgtgtcggccttccggccggtggtcaaggacaccgagagcatcgctaagctctacgggagcgcccgggaggcgtacggcgcggggcctgctcgggggccgggacccggcgctgggagcggcggctacgtgagcccggactttctgagcgagggcagctccagctacaattccgcctcgcccgacgtggacaccgcggacgagcccgaggtggacgtggaatccaaccgcttccccgacgacgaggacgcccaagaggagaccgagcccagcgcacccagcgcagggggcggcccagacggtgaacagcccactggacccccttccgccacctcctctggcgcggacggtcccgcaaactctcccgacggcggcagcccccgcccccggcgccgcctcgggccacccccagctggccggcccgcatttggggacttggcagccgaagacttggtgcggagacctgagaggagcccgccaagcggcggcggcggctacgagctgcgagagccttgcgggcccctaggaggccccgcgccggccaaggtgttcgcgcccgagagggatgagcacgtgaagagcgcggcggtggcgctggggcccgcggcctcctacgtctgcacccccgaggcccacgagccagataaggaagacaatcactcgcccgccgatgatttggaaacgaggaaatcctatccagaccaaaggagtatctcccagccaagtcctgcaaatacagacagaggcgaagatgggcttaccttggatgtcacaggaactcatttggtggagaaagatatcgagaacctggccagagaggaattgcaaaaactgctcctggaacaaatggagctccgcaagaagctggaacgggaatttcagagtctcaaagataattttcaggatcaaatgaagagggaattggcttatcgagaagaaatggtgcaacagctgcaaattgtcagagataccctgtgtaacgaactcgaccaggagcggaaggcgcgctatgccatccagcagaaattgaaagaagcccacgacgccctgcaccatttctcctgcaagatgctgacgccccgccactgcactggcaactgctccttcaagccaccgctgttgccctagggccggcctggccgcacccctgcgccctcaagccatgctgctccttgtaaatacccgctgctgcggtggccctgagcgaggaacaagccattcggacccgaccgatgtaaatacagccgcccgtccgcccgccttcctcccgggctccccggccttgcccgccccctcccgggcgtccctgtccagggccccggcttggtttccaagtgtaaataccgcctcgcgcctcaaatccccctaccccgtgtgaactctagggcatcggacctcaaggggttaactggacagacggggggcgggaggggagagcgccccctcccattgtatagccttgaacccgattgtgaatacaatgtagcaacttcgctggcgcctgccccgcactccccgtcccgtccacttctgaaactcctgttcctaatgacaaagtggctatgtgcaatggatataaatgtactgtgagtctctcggttcagtattaggttcactttaatttatttatgctgtaagttatttttgcttccttctcctggacccacttccagtcccgttttgcattcccctttggattttgctttggctattttttgttgtaacctcttgatgtaacagcactttaaaagggcgacaactgactcacgagatggcaaccacctggagcctgtttggggagaccaccctgtacccgtgactttcgtttttaataataataataataa

SEQ ID NO: 19164 - DNA, 3675 bp, Homo sapiens
  source 1..3675: mol_type = unassigned DNA
gctgcgagggttgccgaaggcgcacggatctgggcgctgaaaaagccaggatttggcaatggctttgctgtgtggccttgggcaagtcactctgcgtatctgggtttcacttccttcccaatccgaaaacgggattgggttccttgcagcccgggcattcctgaggagcggcggcatggaggctctcaccactcagctggggccggggcgcgagggcagttcctcgcccaactccaagcaggagctgcagccgtactcgggctccagcgctctcaaacccaaccaggtgggcgagacgtcgctgtacggggtgcccattgtgtcgctggtcatcgacggccaggagcgcctatgcctggcgcagatctccaacaccctcctcaagaactacagctataatgagatccacaaccgccgcgtggccctgggcatcacgtgcgtgcagtgcacgccggtacagctggagattctgcgtcgggccggggccatgcccatctcgtcgcgccgctgcggcatgatcactaagcgagaggccgaacgcctgtgcaagtcgttcctgggcgagcacaaaccacccaagctgcccgagaacttcgccttcgatgtggtgcacgagtgcgcgtggggctcgcgtggtagcttcatccctgcgcgttacaacagctctcgtgccaagtgcatcaagtgcggctactgcagcatgtacttctcgcccaacaagttcatcttccactcgcaccgaacacccgacgccaagtacacgcagcccgatgccgccaacttcaactcctggcgtcgtcacctcaaactcagtgacaagtcggccacagacgaactgagccatgcttgggaggacgtcaaggccatgtttaatggcggcacgcgcaagcggaccttctccctacaaggaggcggcggaggcggtgccaatggcgggtcgggtgggcaggggaagggtggtgctggcggcggtggcggcggtggcccagggtgcggtgcagagatggccccaggcccgccgccccacaaaagcctgcgctgtggcgaagatgaggctgccgggcctccggggccacctccaccccacccgcagcgcggacttggcctggcgactggagctagtggcccggcgggcccaggagggcccggtggcggcgccggcgtacgaagctacccggtgatcccggtgcccagcaaaggctttgggctcctgcaaaagctgcccccaccacttttcccccatccttacggcttccctacggccttcggcctatgccccaaaaaggacgacccggttttaggcgcgggcgagccaaagggcggtcctggcactgggagcggcggcggcggcgcggggacaggcgggggtgcggggggcccgggagccagccacttgcccccgggggcaggggcgggcccgggcggcggcgccatgttctgggggcatcaaccctccggggcagccaaggacgcagcggcagtggctgcagcggccgccgccgccactgtgtacccgacgtttcccatgttctggccagcagcaggcagcctcccggtaccgtcctaccccgctgctcagagccaagccaaggccgtggcggcagccgtggcggcggcagcggcggcggcagcggcagctgctggcagcggtgccccagagcccctggacggtgccgagccagccaaagagagtggcctcggcgcggaggagcgctgcccgagcgctctgtcccgcgggcccctggacgaagacggcacggacgaggcgctgccaccgcccctggccccgttgcccccgccgcccccgccgcccgcacgcaaaggctcctacgtgtcggccttccggccggtggtcaaggacaccgagagcatcgctaagctctacgggagcgcccgggaggcgtacggcgcggggcctgctcgggggccgggacccggcgctgggagcggcggctacgtgagcccggactttctgagcgagggcagctccagctacaattccgcctcgcccgacgtggacaccgcggacgagcccgaggtggacgtggaatccaaccgcttccccgacgacgaggacgcccaagaggagaccgagcccagcgcacccagcgcagggggcggcccagacggtgaacagcccactggacccccttccgccacctcctctggcgcggacggtcccgcaaactctcccgacggcggcagcccccgcccccggcgccgcctcgggccacccccagctggccggcccgcatttggggacttggcagccgaagacttggtgcggagacctgagaggagcccgccaagcggcggcggcggctacgagctgcgagagccttgcgggcccctaggaggccccgcgccggccaaggtgttcgcgcccgagagggatgagcacgtgaagagcgcggcggtggcgctggggcccgcggcctcctacgtctgcacccccgaggcccacgagccagataaggaagacaatcactcgcccgccgatgatttggaaacgaggaaatcctatccagaccaaaggagtatctcccagccaagtcctgcaaatacagacagaggcgaagatgggcttaccttggatgtcacaggaactcatttggtggagaaagatatcgagaacctggccagagaggaattgcaaaaactgctcctggaacaaatggagctccgcaagaagctggaacgggaatttcagagtctcaaagataattttcaggatcaaatgaagagggaattggcttatcgagaagaaatggtgcaacagctgcaaattgtcagagataccctgtgtaacgaactcgaccaggagcggaaggcgcgctatgccatccagcagaaattgaaagaagcccacgacgccctgcaccatttctcctgcaagatgctgacgccccgccactgcactggcaactgctccttcaagccaccgctgttgccctagggccggcctggccgcacccctgcgccctcaagccatgctgctccttgtaaatacccgctgctgcggtggccctgagcgaggaacaagccattcggacccgaccgatgtaaatacagccgcccgtccgcccgccttcctcccgggctccccggccttgcccgccccctcccgggcgtccctgtccagggccccggcttggtttccaagtgtaaataccgcctcgcgcctcaaatccccctaccccgtgtgaactctagggcatcggacctcaaggggttaactggacagacggggggcgggaggggagagcgccccctcccattgtatagccttgaacccgattgtgaatacaatgtagcaacttcgctggcgcctgccccgcactccccgtcccgtccacttctgaaactcctgttcctaatgacaaagtggctatgtgcaatggatataaatgtactgtgagtctctcggttcagtattaggttcactttaatttatttatgctgtaagttatttttgcttccttctcctggacccacttccagtcccgttttgcattcccctttggattttgctttggctattttttgttgtaacctcttgatgtaacagcactttaaaagggcgacaactgactcacgagatggcaaccacctggagcctgtttggggagaccaccctgtacccgtgactttcgtttttaataataataataataa

SEQ ID NO: 19165 - DNA, 3899 bp, Homo sapiens
  source 1..3899: mol_type = unassigned DNA
cgtacccacactttctgcggtggaggggacgccccgccgcaattcaggccgtcattctccccaggccggggtttgagcgccattcgctcgggccagagcccggatcttcgcgcggagcccgccagagtcccgcccgctggatacgaggacccgcttggatgcttcgcctccgagcgccctcggaagatgggccggcagccacacgcctaaagacacccagaggttaccagtgtccaaggcagacctgtagggctcggcccggggttctgcggcggagatggcttccagtccgctgccagggcccaacgacatcctgctggcgtcgccgtcgagcgccttccagcccgacacgctgagccagccgcggccagggcacgccaacctcaaacccaaccaggtgggccaggtgatcctctacggcattcccatcgtgtcgttggtgatcgacgggcaagagcgcctgtgcctggcgcagatctccaacactctgctcaagaacttcagctacaacgagatccacaaccgtcgcgtggcactgggcatcacgtgtgtgcagtgcacgccggtgcaactggagatcctgcggcgtgccggggccatgcccatctcatcgcgccgctgcggcatgatcaccaaacgcgaggccgagcgtctgtgcaagtcgttcctgggcgaaaacaggccgcccaagctgccagacaatttcgccttcgacgtgtcacacgagtgcgcctggggctgccgcggcagcttcattcccgcgcgctacaacagctcgcgcgccaagtgcatcaaatgcagctactgcaacatgtacttctcgcccaacaagttcattttccactcccaccgcacgcccgacgccaagtacactcagccagacgcagccaacttcaactcgtggcgccgtcatctcaagctcaccgacaagagtccccaggacgagctggtcttcgcctgggaggacgtcaaggccatgttcaacggcggcagccgcaagcgcgcactgccccagccgggcgcgcaccccgcctgccacccgctcagctctgtgaaggcggccgccgtggccgccgcggccgcggtggccggaggcgggggtctgctgggcccccacctgctgggtgcgcccccgccgccgccgccgccaccgccgcccttggcagagctggctggtgccccgcacgcccatcacaagcggccgcgcttcgacgacgacgacgactccttgcaggaggccgccgtagtggccgccgccagcctctcggccgcagccgccagcctctctgtggctgctgcttcgggcggcgcggggactggtgggggcggcgctgggggtggctgtgtggccggcgtgggcgtgggcgcgggcgcgggggcgggtgccggggcaggggccaaaggcccgcgcagctacccagtcatcccggtgcccagcaagggctcgttcgggggcgtcctgcagaagttcccgggctgcggcgggctcttcccgcacccctacaccttccctgccgcggccgccgccttcagcttgtgccataagaaagaggatgcgggtgccgccgctgaggccctggggggcgcgggcgcaggcggcgcgggcgcggcgcccaaggccggcttgtccggcctcttctggcccgcgggccgcaaggacgccttctatccgcccttctgcatgttctggccgccgcggacccctggcgggctcccggtgcccacctacctgcagcccccgcctcagccgccctcggcgctaggctgcgcgctaggcgaaagcccggccctgctgcgccaggccttcctggacctggctgagccaggcggtgctgctgggagcgccgaggccgcgcccccgccggggcagcccccgcaggtagtggccaacggcccgggctccggcccacctcctcctgccgggggcgccggctctcgcgacgcgctcttcgagtcgcccccgggcggcagcggcggggactgcagcgcgggctccacgccgcccgcggactctgtggcagctgccggggcaggggccgcggccgccgggtctggccccgcgggctcccgggttccggcgccccaccatccgcaccttctggaggggcgcaaagcgggcggtggcagctaccaccattccagcgccttccggccagtgggcggcaaggacgacgcggagagcctggccaagctgcacggggcgtcggcgggcgcgccccactcggcccagacgcatccccaccaccatcaccaccctcaccaccaccaccaccaccaccaccccccgcagccgccgtcgccgcttctgctgctgcccccgcagcccgacgagccgggttccgagcgccaccacccggccccgccgccgccgccgccgccgcccccgccgccccctctggcccagcacccgcaccaccgaggccttctgtctcccgggggaaccagctgctgctaccccagcgaggacagctccgaggacgaggacgacgaggaagaagagcaggaggtggacgtggagggccacaagccccccgagggcgaggaagaggaggaaggtcgagaccctgacgacgacgaggaagaggacgaggagacggaggtcctactcggcgaccccttagtcgggggcggccggttcctccagggccgagggccgtcggagaaggggagcagccgggaccgcgcgccggccgtcgcgggcgcgttcccgctcggcctgaactcctccaggctgctgcaggaagacgggaaactcggggaccccggctcggacctgcccccgcccccgccgccgcccctggccccccagaaggcgagtggcggcggcagcagcagcccgggcagcccagttcaccatccatcactggaggagcagccctcctacaaagatagtcagaaaactaaggaaaataaccaagtaattgtatctacaaaggatgacaacagcttttcagataagaacaaggagcatagctttttcatcacagactctgatgcttctggaggagatttttggagagaaagatcaggtgaacatacacaagaaaccaactcacctcattcactgaaaaaggatgtagaaaatatggggaaagaagaacttcagaaggttttatttgaacaaatagatttacggagacgactggaacaagaattccaggtgttaaaaggaaacacatctttcccagtattcaataattttcaggatcagatgaaaagggagctagcctaccgagaagaaatggtgcaacagttacaaattatcccctatgcagcaagtttgatcaggaaagaaaagcttggcgcccatctcagcaaaagctaaaaggtgcacagaactacttactcttgttctcttgtaagatacagcctgccatggagcacttctgacccgtgttaaagactgcagatcgaaagggcttgggaattaaatacaaaatcaggttcaggagaacctaaggacaagtgacctcaaaacagcatggacaaccatgtaaaatagactgtagcagccattcattagtggggggaggggggagccaaccagagcagtcaatgcttgttgcatcttttggtggaaccaaagttcgagtctttgtgtttttaaaggatagctgaacccagagcatgggaagtgctgttagccagttgggatgggaaatcagcggatggtcccaggcagtctcagtcctgcacacatggagaaagcaactctacaaaactgtcttctctttttgaagaagtgattcttggtggaagaaaacacaagacccatcctaggagtggggatagcgtttcaatggatgggaaggcaccagccgtacaaacctgcttttcatagcaaactggacagacttacatgtggccccttcctctctgtactttgcctgctgtatgaa

SEQ ID NO: 19166 - DNA, 891 bp, Homo sapiens
  source 1..891: mol_type = unassigned DNA
atggcttccagtccgctgccagggcccaacgacatcctgctggcgtcgccgtcgagcgccttccagcccgacacgctgagccagccgcggccagggcacgccaacctcaaacccaaccaggtgggccaggtgatcctctacggcattcccatcgtgtcgttggtgatcgacgggcaagagcgcctgtgcctggcgcagatctccaacactctgctcaagaacttcagctacaacgagatccacaaccgtcgcgtggcactgggcatcacgtgtgtgcagtgcacgccggtgcaactggagatcctgcggcgtgccggggccatgcccatctcatcgcgccgctgcggcatgatcaccaaacgcgaggccgagcgtctgtgcaagtcgttcctgggcgaaaacaggccgcccaagctgccagacaatttcgccttcgacgtgtcacacgagtgcgcctggggctgccgcggcagcttcattcccgcgcgctacaacagctcgcgcgccaagtgcatcaaatgcagctactgcaacatgtacttctcgcccaacaagttcattttccactcccaccgcacgcccgacgccaagtacactcagccagacgcagccaacttcaactcgtggcgccgtcatctcaagctcaccgacaagagtccccaggacgagctggtcttcgcctgggaggacgtcaaggccatgttcaacggcggcagccgcaagcgcgcactgccccagccgggcgcgcaccccgcctgccacccgctcagctctataagaacaaggagcatagctttttcatcacagactctgatgcttctggaggagatttttggagagaaagatcaggaggattatatgcgaataaatgaggacaacatttggttatga

SEQ ID NO: 19167 - DNA, 3048 bp, Homo sapiens
  source 1..3048: mol_type = unassigned DNA
atggcttccagtccgctgccagggcccaacgacatcctgctggcgtcgccgtcgagcgccttccagcccgacacgctgagccagccgcggccagggcacgccaacctcaaacccaaccaggtgggccaggtgatcctctacggcattcccatcgtgtcgttggtgatcgacgggcaagagcgcctgtgcctggcgcagatctccaacactctgctcaagaacttcagctacaacgagatccacaaccgtcgcgtggcactgggcatcacgtgtgtgcagtgcacgccggtgcaactggagatcctgcggcgtgccggggccatgcccatctcatcgcgccgctgcggcatgatcaccaaacgcgaggccgagcgtctgtgcaagtcgttcctgggcgaaaacaggccgcccaagctgccagacaatttcgccttcgacgtgtcacacgagtgcgcctggggctgccgcggcagcttcattcccgcgcgctacaacagctcgcgcgccaagtgcatcaaatgcagctactgcaacatgtacttctcgcccaacaagttcattttccactcccaccgcacgcccgacgccaagtacactcagccagacgcagccaacttcaactcgtggcgccgtcatctcaagctcaccgacaagagtccccaggacgagctggtcttcgcctgggaggacgtcaaggccatgttcaacggcggcagccgcaagcgcgcactgccccagccgggcgcgcaccccgcctgccacccgctcagctctgtgaaggcggccgccgtggccgccgcggccgcggtggccggaggcgggggtctgctgggcccccacctgctgggtgcgcccccgccgccgccgccgccaccgccgcccttggcagagctggctggtgccccgcacgcccatcacaagcggccgcgcttcgacgacgacgacgactccttgcaggaggccgccgtagtggccgccgccagcctctcggccgcagccgccagcctctctgtggctgctgcttcgggcggcgcggggactggtgggggcggcgctgggggtggctgtgtggccggcgtgggcgtgggcgcgggcgcgggggcgggtgccggggcaggggccaaaggcccgcgcagctacccagtcatcccggtgcccagcaagggctcgttcgggggcgtcctgcagaagttcccgggctgcggcgggctcttcccgcacccctacaccttccctgccgcggccgccgccttcagcttgtgccataagaaagaggatgcgggtgccgccgctgaggccctggggggcgcgggcgcaggcggcgcgggcgcggcgcccaaggccggcttgtccggcctcttctggcccgcgggccgcaaggacgccttctatccgcccttctgcatgttctggccgccgcggacccctggcgggctcccggtgcccacctacctgcagcccccgcctcagccgccctcggcgctaggctgcgcgctaggcgaaagcccggccctgctgcgccaggccttcctggacctggctgagccaggcggtgctgctgggagcgccgaggccgcgcccccgccggggcagcccccgcaggtagtggccaacggcccgggctccggcccacctcctcctgccgggggcgccggctctcgcgacgcgctcttcgagtcgcccccgggcggcagcggcggggactgcagcgcgggctccacgccgcccgcggactctgtggcagctgccggggcaggggccgcggccgccgggtctggccccgcgggctcccgggttccggcgccccaccatccgcaccttctggaggggcgcaaagcgggcggtggcagctaccaccattccagcgccttccggccagtgggcggcaaggacgacgcggagagcctggccaagctgcacggggcgtcggcgggcgcgccccactcggcccagacgcatccccaccaccatcaccaccctcaccaccaccaccaccaccaccaccccccgcagccgccgtcgccgcttctgctgctgcccccgcagcccgacgagccgggttccgagcgccaccacccggccccgccgccgccgccgccgccgcccccgccgccccctctggcccagcacccgcaccaccgaggccttctgtctcccgggggaaccagctgctgctaccccagcgaggacagctccgaggacgaggacgacgaggaagaagagcaggaggtggacgtggagggccacaagccccccgagggcgaggaagaggaggaaggtcgagaccctgacgacgacgaggaagaggacgaggagacggaggtcctactcggcgaccccttagtcgggggcggccggttcctccagggccgagggccgtcggagaaggggagcagccgggaccgcgcgccggccgtcgcgggcgcgttcccgctcggcctgaactcctccaggctgctgcaggaagacgggaaactcggggaccccggctcggacctgcccccgcccccgccgccgcccctggccccccagaaggcgagtggcggcggcagcagcagcccgggcagcccagttcaccatccatcactggaggagcagccctcctacaaagatagtcagaaaactaaggaaaataaccaagtaattgtatctacaaaggatgacaacagcttttcagataagaacaaggagcatagctttttcatcacagactctgatgcttctggaggagatttttggagagaaagatcaggtgaacatacacaagaaaccaactcacctcattcactgaaaaaggatgtagaaaatatggggaaagaagaacttcagaaggttttatttgaacaaatagatttacggagacgactggaacaagaattccaggtgttaaaaggaaacacatctttcccagtattcaataattttcaggatcagatgaaaagggagctagcctaccgagaagaaatggtgcaacagttacaaattatcccctatgcagcaagtttgatcaggaaagaaaagcttggcgcccatctcagcaaaagctaa

SEQ ID NO: 19168 - DNA, 6885 bp, Homo sapiens
  source 1..6885: mol_type = unassigned DNA
acactcgcgcgctcgctcggctgccggtggcctctgtggccgtccaggctagcggcggcccgcaggcggcggggagaaagactctctcacctggtcttgcggctgtggccaccgccggccaggggtgtggagggcgtgctgccggagacgtccgccgggctctgcagttccgccgggggtcgggcagctatggagccgcggcccacggcgccctcctccggcgccccgggactggccggggtcggggagacgccgtcagccgctgcgctggccgcagccagggtggaactgcccggcacggctgtgccctcggtgccggaggatgctgcgcccgcgagccgggacggcggcggggtccgcgatgagggccccgcggcggccggggacgggctgggcagacccttggggcccaccccgagccagagccgtttccaggtggacctggtttccgagaacgccgggcgggccgctgctgcggcggcggcggcggcggcggcagcggcggcggctggtgctggggcgggggccaagcagacccccgcggacggggaagccagcggcgagagcgagccggctaaaggcagcgaggaagccaagggccgcttccgcgtgaacttcgtggacccagctgcctcctcgtcggctgaagacagcctgtcagatgctgccggggtcggagtcgacgggcccaacgtgagcttccagaacggcggggacacggtgctgagcgagggcagcagcctgcactccggcggcggcggcggcagtgggcaccaccagcactactattatgatacccacaccaacacctactacctgcgcaccttcggccacaacaccatggacgctgtgcccaggatcgatcactaccggcacacagccgcgcagctgggcgagaagctgctccggcctagcctggcggagctccacgacgagctggaaaaggaaccttttgaggatggctttgcaaatggggaagaaagtactccaaccagagatgctgtggtcacgtatactgcagaaagtaaaggagtcgtgaagtttggctggatcaagggtgtattagtacgttgtatgttaaacatttggggtgtgatgcttttcattagattgtcatggattgtgggtcaagctggaataggtctatcagtccttgtaataatgatggccactgttgtgacaactatcacaggattgtctacttcagcaatagcaactaatggatttgtaagaggaggaggagcatattatttaatatctagaagtctagggccagaatttggtggtgcaattggtctaatcttcgcctttgccaacgctgttgcagttgctatgtatgtggttggatttgcagaaaccgtggtggagttgcttaaggaacattccatacttatgatagatgaaatcaatgatatccgaattattggagccattacagtcgtgattcttttaggtatctcagtagctggaatggagtgggaagcaaaagctcagattgttcttttggtgatcctacttcttgctattggtgatttcgtcataggaacatttatcccactggagagcaagaagccaaaagggttttttggttataaatctgaaatatttaatgagaactttgggcccgattttcgagaggaagagactttcttttctgtatttgccatcttttttcctgctgcaactggtattctggctggagcaaatatctcaggtgatcttgcagatcctcagtcagccatacccaaaggaacactcctagccattttaattactacattggtttacgtaggaattgcagtatctgtaggttcttgtgttgttcgagatgccactggaaacgttaatgacactatcgtaacagagctaacaaactgtacttctgcagcctgcaaattaaactttgatttttcatcttgtgaaagcagtccttgttcctatggcctaatgaacaacttccaggtaatgagtatggtgtcaggatttacaccactaatttctgcaggtatattttcagccactctttcttcagcattagcatccctagtgagtgctcccaaaatatttcaggctctatgtaaggacaacatctacccagctttccagatgtttgctaaaggttatgggaaaaataatgaacctcttcgtggctacatcttaacattcttaattgcacttggattcatcttaattgctgaactgaatgttattgcaccaattatctcaaacttcttccttgcatcatatgcattgatcaatttttcagtattccatgcatcacttgcaaaatctccaggatggcgtcctgcattcaaatactacaacatgtggatatcacttcttggagcaattctttgttgcatagtaatgttcgtcattaactggtgggctgcattgctaacatatgtgatagtccttgggctgtatatttatgttacctacaaaaaaccagatgtgaattggggatcctctacacaagccctgacttacctgaatgcactgcagcattcaattcgtctttctggagtggaagaccacgtgaaaaactttaggccacagtgtcttgttatgacaggtgctccaaactcacgtccagctttacttcatcttgttcatgatttcacaaaaaatgttggtttgatgatctgtggccatgtacatatgggtcctcgaagacaagccatgaaagagatgtccatcgatcaagccaaatatcagcgatggcttattaagaacaaaatgaaggcattttatgctccagtacatgcagatgacttgagagaaggtgcacagtatttgatgcaggctgctggtcttggtcgtatgaagccaaacacacttgtccttggatttaagaaagattggttgcaagcagatatgagggatgtggatatgtatataaacttatttcatgatgcttttgacatacaatatggagtagtggttattcgcctaaaagaaggtctggatatatctcatcttcaaggacaagaagaattattgtcatcacaagagaaatctcctggcaccaaggatgtggtagtaagtgtggaatatagtaaaaagtccgatttagatacttccaaaccactcagtgaaaaaccaattacacacaaagttgaggaagaggatggcaagactgcaactcaaccactgttgaaaaaagaatccaaaggccctattgtgcctttaaatgtagctgaccaaaagcttcttgaagctagtacacagtttcagaaaaaacaaggaaagaatactattgatgtctggtggctttttgatgatggaggtttgaccttattgataccttaccttctgacgaccaagaaaaaatggaaagactgtaagatcagagtattcattggtggaaagataaacagaatagaccatgaccggagagcgatggctactttgcttagcaagttccggatagacttttctgatatcatggttctaggagatatcaataccaaaccaaagaaagaaaatattatagcttttgaggaaatcattgagccatacagacttcatgaagatgataaagagcaagatattgcagataaaatgaaagaagatgaaccatggcgaataacagataatgagcttgaactttataagaccaagacataccggcagatcaggttaaatgagttattaaaggaacattcaagcacagctaatattattgtcatgagtctcccagttgcacgaaaaggtgctgtgtctagtgctctctacatggcatggttagaagctctatctaaggacctaccaccaatcctcctagttcgtgggaatcatcagagtgtccttaccttctattcataaatgttctatacagtggacagccctccagaatggtacttcagtgcctagtgtagtaactgaaatcttcaatgacacattaacatcacaatggcgaatggtgacttttctttcacgatttcattaatttgaaagcacacaggaaagttgctccattgataacgtgtatggagacttcggttttagtcaattccatatctcaatcttaatggtgattcttctctgttgaactgaagtttgtgagagtagttttcctttgctacttgaatagcaataaaagcgtgttaactttttgattgatgaaagaagtacaaaaagcctttagccttgaggtgccttctgaaattaaccaaatttcatccatatatcctcttttataaacttatagaatgtcaaactttgccttcaactgtttttatttctagtctcttccactttaaaacaaaatgaacactgcttgtcttcttccattgaccatttagtgttgagtactgtatgtgttttgttaattctataaaggtatctgttagatattaaaggtgagaattagggcaggttaatcaaaaatggggaaggggaaatggtaaccaaaaagtaaccccatggtaaggtttatatgagtatatgtgaatatagagctaggaaaaaaagcccccccaaatacctttttaacccctctgattggctattattactatatttattattatttattgaaaccttagggaagattgaagattcatcccatacttctatataccatgcttaaaaatcacgtcattctttaaacaaaaatactcaagatcatttatatttatttggagagaaaactgtcctaatttagaatttccctcaaatctgagggacttttaagaaatgctaacagatttttctggaggaaatttagacaaaacaatgtcatttagtagaatatttcagtatttaagtggaatttcagtatactgtactatcctttataagtcattaaaataatgtttcatcaaatggttaaatggaccactggtttcttagagaaatgtttttaggcttaattcattcaattgtcaagtacacttagtcttaatacactcaggtttgaacagattattctgaatattaaaatttaatccattcttaatattttaaaacttttgttaagaaaaactgccagtttgtgcttttgaaatgtctgttttgacatcatagtctagtaaaattttgacagtgcatatgtactgttactaaaagctttatatgaaattattaatgtgaagtttttcatttataattcaaggaaggatttcctgaaaacatttcaagggatttatgtctacatatttgtgtgtgtgtgtgtatatatatgtaatatgcatacacagatgcatatgtgtatatataatgaaatttatgttgctggtattttgcattttaaagtgatcaagattcattaggcaaactttggtttaagtaaacatatgttcaaaatcagattaacagatacaggtttcatagagaacaaaggtgatcatttgaagggcatgctgtaatttcacacaattttccagttcaaaaatggagaatacttcgcctaaaatactgttaagtgggttaattgatacaagtttctgtggtggaaaatttatgcaggttttcacgaatccttttttttttttttttttttttttgagacggagtcttgctctgttgccacgctggaatgcagtaacgtgatcttggctcactgcgacctccacctccccagttcaagcgattctcctgcctcagcctccctagtagctgggactacgggtgcacgccaccatgcccagctaatttttgtattttgagtagagacagggtttcaccgtgttggctaggatggtgtctatctcttgaccttgtgatccacccgcctcagcctcccagagtgctgggattacaggtgcgagccactgcgcctggctggttttcatgaatcttgatagacatctataacgttattattttcagtggtgtgcagcatttttgcttcatgagtatgacctaggtatagagatctgataacttgaattcagaatattaagaaaatgaagtaactgattttctaaaaaaaaaaaaaaaaaaaatttctacattataactcacagcattgttccattgcaggttttgcaatgtttgggggtaaagacagtagaaatattattcagtaaacaataatgtgtgaacttttaagatggataatagggcatggactgagtgctgctatcttgaaatgtgcacaggtacacttaccttttttttttttttttttaagtttttcccattcaggaaaacaacattgtgatctgtactacaggaaccaaatgtcatgcgtcatacatgtgggtataaagtacataaaatatatctaactattcataatgtggggtgggtaatactgtctgtgaaataatgtaagaagcttttcacttaaaaaaaatgcattactttcacttaacactagacaccaggtcgaaaattttcaaggttatagtacttatttcaacaattcttagagatgctagctagtgttgaagctaaaaatagctttatttatgctgaattgtgatttttttatgccaaattttttttagttctaatcattgatgatagcttggaaataaataattatgccatggcatttgacagttcattattcctataagaattaaattgagtttagagagaatggtggtgttgagctgattattaacagttactgaaatcaaatatttatttgttacattattccatttgtattttaggtttccttttacattctttttatatgcattctgacattacatattttttaagactatggaaataatttaaagatttaagctctggtggatgattatctgctaagtaagtctgaaaatgtaatattttgataatactgtaatatacctgtcacacaaatgcttttctaatgttttaaccttgagtattgcagttgctgctttgtacagaggttactgcaataaaggaagtggattcattaaacctatttaatgtcca

SEQ ID NO: 19169 - DNA, 4263 bp, Homo sapiens
  source 1..4263: mol_type = unassigned DNA
ggtggcctctgtggccgtccaggctagcggcggcccgcaggcggcggggagaaagactctctcacctggtcttgcggctgtggccaccgccggccaggggtgtggagggcgtgctgccggagacgtccgccgggctctgcagttccgccgggggtcgggcagctatggagccgcggcccacggcgccctcctccggcgccccgggactggccggggtcggggagacgccgtcagccgctgcgctggccgcagccagggtggaactgcccggcacggctgtgccctcggtgccggaggatgctgcgcccgcgagccgggacggcggcggggtccgcgatgagggccccgcggcggccggggacgggctgggcagacccttggggcccaccccgagccagagccgtttccaggtggacctggtttccgagaacgccgggcgggccgctgctgcggcggcggcggcggcggcggcagcggcggcggctggtgctggggcgggggccaagcagacccccgcggacggggaagccagcggcgagagcgagccggctaaaggcagcgaggaagccaagggccgcttccgcgtgaacttcgtggacccagctgcctcctcgtcggctgaagacagcctgtcagatgctgccggggtcggagtcgacgggcccaacgtgagcttccagaacggcggggacacggtgctgagcgagggcagcagcctgcactccggcggcggcggcggcagtgggcaccaccagcactactattatgatacccacaccaacacctactacctgcgcaccttcggccacaacaccatggacgctgtgcccaggatcgatcactaccggcacacagccgcgcagctgggcgagaagctgctccggcctagcctggcggagctccacgacgagctggaaaaggaaccttttgaggatggctttgcaaatggggaagaaagtactccaaccagagatgctgtggtcacgtatactgcagaaagtaaaggagtcgtgaagtttggctggatcaagggtgtattagtacgttgtatgttaaacatttggggtgtgatgcttttcattagattgtcatggattgtgggtcaagctggaataggtctatcagtccttgtaataatgatggccactgttgtgacaactatcacaggattgtctacttcagcaatagcaactaatggatttgtaagaggaggaggagcatattatttaatatctagaagtctagggccagaatttggtggtgcaattggtctaatcttcgcctttgccaacgctgttgcagttgctatgtatgtggttggatttgcagaaaccgtggtggagttgcttaaggaacattccatacttatgatagatgaaatcaatgatatccgaattattggagccattacagtcgtgattcttttaggtatctcagtagctggaatggagtgggaagcaaaagctcagattgttcttttggtgatcctacttcttgctattggtgatttcgtcataggaacatttatcccactggagagcaagaagccaaaagggttttttggttataaatctgaaatatttaatgagaactttgggcccgattttcgagaggaagagactttcttttctgtatttgccatcttttttcctgctgcaactggtattctggctggagcaaatatctcaggtgatcttgcagatcctcagtcagccatacccaaaggaacactcctagccattttaattactacattggtttacgtaggaattgcagtatctgtaggttcttgtgttgttcgagatgccactggaaacgttaatgacactatcgtaacagagctaacaaactgtacttctgcagcctgcaaattaaactttgatttttcatcttgtgaaagcagtccttgttcctatggcctaatgaacaacttccaggtaatgagtatggtgtcaggatttacaccactaatttctgcaggtatattttcagccactctttcttcagcattagcatccctagtgagtgctcccaaaatatttcaggctctatgtaaggacaacatctacccagctttccagatgtttgctaaaggttatgggaaaaataatgaacctcttcgtggctacatcttaacattcttaattgcacttggattcatcttaattgctgaactgaatgttattgcaccaattatctcaaacttcttccttgcatcatatgcattgatcaatttttcagtattccatgcatcacttgcaaaatctccaggatggcgtcctgcattcaaatactacaacatgtggatatcacttcttggagcaattctttgttgcatagtaatgttcgtcattaactggtgggctgcattgctaacatatgtgatagtccttgggctgtatatttatgttacctacaaaaaaccagatgtgaattggggatcctctacacaagccctgacttacctgaatgcactgcagcattcaattcgtctttctggagtggaagaccacgtgaaaaactttaggccacagtgtcttgttatgacaggtgctccaaactcacgtccagctttacttcatcttgttcatgatttcacaaaaaatgttggtttgatgatctgtggccatgtacatatgggtcctcgaagacaagccatgaaagagatgtccatcgatcaagccaaatatcagcgatggcttattaagaacaaaatgaaggcattttatgctccagtacatgcagatgacttgagagaaggtgcacagtatttgatgcaggctgctggtcttggtcgtatgaagccaaacacacttgtccttggatttaagaaagattggttgcaagcagatatgagggatgtggatatgtatataaacttatttcatgatgcttttgacatacaatatggagtagtggttattcgcctaaaagaaggtctggatatatctcatcttcaaggacaagaagaattattgtcatcacaagagaaatctcctggcaccaaggatgtggtagtaagtgtggaatatagtaaaaagtccgatttagatacttccaaaccactcagtgaaaaaccaattacacacaaagttgaggaagaggatggcaagactgcaactcaaccactgttgaaaaaagaatccaaaggccctattgtgcctttaaatgtagctgaccaaaagcttcttgaagctagtacacagtttcagaaaaaacaaggaaagaatactattgatgtctggtggctttttgatgatggaggtttgaccttattgataccttaccttctgacgaccaagaaaaaatggaaagactgtaagatcagagtattcattggtggaaagataaacagaatagaccatgaccggagagcgatggctactttgcttagcaagttccggatagacttttctgatatcatggttctaggagatatcaataccaaaccaaagaaagaaaatattatagcttttgaggaaatcattgagccatacagacttcatgaagatgataaagagcaagatattgcagataaaatgaaagaagatgaaccatggcgaataacagataatgagcttgaactttataagaccaagttttatgaaccatgctaaattcttatttccacatggtctaggaatgactgtcctgtttcatttcagacataccggcagatcaggttaaatgagttattaaaggaacattcaagcacagctaatattattgtcatgagtctcccagttgcacgaaaaggtgctgtgtctagtgctctctacatggcatggttagaagctctatctaaggacctaccaccaatcctcctagttcgtgggaatcatcagagtgtccttaccttctattcataaatgttctatacagtggacagccctccagaatggtacttcagtgcctagtgtagtaactgaaatcttcaatgacacattaacatcacaatggcgaatggtgacttttctttcacgatttcattaatttgaaagcacacaggaaagttgctccattgataacgtgtatggagacttcggttttagtcaattccatatctcaatcttaatggtgattcttctctgttgaactgaagtttgtgagagtagttttcctttgctacttgaatagcaataaaagcgtgttaactttttgattgatgaaagaagtacaaaaagcctttagccttgaggtgccttctgaaattaaccaaatttcatccatatatcctcttttataaacttatagaatgtcaaa

SEQ ID NO: 19170 - DNA, 5509 bp, Homo sapiens
  source 1..5509: mol_type = unassigned DNA
tctctcacctggtcttgcggctgtggccaccgccggccaggggtgtggagggcgtgctgccggagacgtccgccgggctctgcagttccgccgggggtcgggcagctatggagccgcggcccacggcgccctcctccggcgccccgggactggccggggtcggggagacgccgtcagccgctgcgctggccgcagccagggtggaactgcccggcacggctgtgccctcggtgccggaggatgctgcgcccgcgagccgggacggcggcggggtccgcgatgagggccccgcggcggccggggacgggctgggcagacccttggggcccaccccgagccagagccgtttccaggtggacctggtttccgagaacgccgggcgggccgctgctgcggcggcggcggcggcggcggcagcggcggcggctggtgctggggcgggggccaagcagacccccgcggacggggaagccagcggcgagagcgagccggctaaaggcagcgaggaagccaagggccgcttccgcgtgaacttcgtggacccagctgcctcctcgtcggctgaagacagcctgtcagatgctgccggggtcggagtcgacgggcccaacgtgagcttccagaacggcggggacacggtgctgagcgagggcagcagcctgcactccggcggcggcggcggcagtgggcaccaccagcactactattatgatacccacaccaacacctactacctgcgcaccttcggccacaacaccatggacgctgtgcccaggatcgatcactaccggcacacagccgcgcagctgggcgagaagctgctccggcctagcctggcggagctccacgacgagctggaaaaggaaccttttgaggatggctttgcaaatggggaagaaagtactccaaccagagatgctgtggtcacgtatactgcagaaagtaaaggagtcgtgaagtttggctggatcaagggtgtattagtacgttgtatgttaaacatttggggtgtgatgcttttcattagattgtcatggattgtgggtcaagctggaataggtctatcagtccttgtaataatgatggccactgttgtgacaactatcacaggattgtctacttcagcaatagcaactaatggatttgtaagaggaggaggagcatattatttaatatctagaagtctagggccagaatttggtggtgcaattggtctaatcttcgcctttgccaacgctgttgcagttgctatgtatgtggttggatttgcagaaaccgtggtggagttgcttaaggaacattccatacttatgatagatgaaatcaatgatatccgaattattggagccattacagtcgtgattcttttaggtatctcagtagctggaatggagtgggaagcaaaagctcagattgttcttttggtgatcctacttcttgctattggtgatttcgtcataggaacatttatcccactggagagcaagaagccaaaagggttttttggttataaatctgaaatatttaatgagaactttgggcccgattttcgagaggaagagactttcttttctgtatttgccatcttttttcctgctgcaactggtattctggctggagcaaatatctcaggtgatcttgcagatcctcagtcagccatacccaaaggaacactcctagccattttaattactacattggtttacgtaggaattgcagtatctgtaggttcttgtgttgttcgagatgccactggaaacgttaatgacactatcgtaacagagctaacaaactgtacttctgcagcctgcaaattaaactttgatttttcatcttgtgaaagcagtccttgttcctatggcctaatgaacaacttccaggtaatgagtatggtgtcaggatttacaccactaatttctgcaggtatattttcagccactctttcttcagcattagcatccctagtgagtgctcccaaaatatttcaggctctatgtaaggacaacatctacccagctttccagatgtttgctaaaggttatgggaaaaataatgaacctcttcgtggctacatcttaacattcttaattgcacttggattcatcttaattgctgaactgaatgttattgcaccaattatctcaaacttcttccttgcatcatatgcattgatcaatttttcagtattccatgcatcacttgcaaaatctccaggatggcgtcctgcattcaaatactacaacatgtggatatcacttcttggagcaattctttgttgcatagtaatgttcgtcattaactggtgggctgcattgctaacatatgtgatagtccttgggctgtatatttatgttacctacaaaaaaccagatgtgaattggggatcctctacacaagccctgacttacctgaatgcactgcagcattcaattcgtctttctggagtggaagaccacgtgaaaaactttaggccacagtgtcttgttatgacaggtgctccaaactcacgtccagctttacttcatcttgttcatgatttcacaaaaaatgttggtttgatgatctgtggccatgtacatatgggtcctcgaagacaagccatgaaagagatgtccatcgatcaagccaaatatcagcgatggcttattaagaacaaaatgaaggcattttatgctccagtacatgcagatgacttgagagaaggtgcacagtatttgatgcaggctgctggtcttggtcgtatgaagccaaacacacttgtccttggatttaagaaagattggttgcaagcagatatgagggatgtggatatgtatataaacttatttcatgatgcttttgacatacaatatggagtagtggttattcgcctaaaagaaggtctggatatatctcatcttcaaggacaagaagaattattgtcatcacaagagaaatctcctggcaccaaggatgtggtagtaagtgtggaatatagtaaaaagtccgatttagatacttccaaaccactcagtgaaaaaccaattacacacaaagaatccaaaggccctattgtgcctttaaatgtagctgaccaaaagcttcttgaagctagtacacagtttcagaaaaaacaaggaaagaatactattgatgtctggtggctttttgatgatggaggtttgaccttattgataccttaccttctgacgaccaagaaaaaatggaaagactgtaagatcagagtattcattggtggaaagataaacagaatagaccatgaccggagagcgatggctactttgcttagcaagttccggatagacttttctgatatcatggttctaggagatatcaataccaaaccaaagaaagaaaatattatagcttttgaggaaatcattgagccatacagacttcatgaagatgataaagagcaagatattgcagataaaatgaaagaagatgaaccatggcgaataacagataatgagcttgaactttataagaccaagacataccggcagatcaggttaaatgagttattaaaggaacattcaagcacagctaatattattgtcatgagtctcccagttgcacgaaaaggtgctgtgtctagtgctctctacatggcatggttagaagctctatctaaggacctaccaccaatcctcctagttcgtgggaatcatcagagtgtccttaccttctattcataaatgttctatacagtggacagccctccagaatggtacttcagtgcctagtgtagtaactgaaatcttcaatgacacattaacatcacaatggcgaatggtgacttttctttcacgatttcattaatttgaaagcacacaggaaagttgctccattgataacgtgtatggagacttcggttttagtcaattccatatctcaatcttaatggtgattcttctctgttgaactgaagtttgtgagagtagttttcctttgctacttgaatagcaataaaagcgtgttaactttttgattgatgaaagaagtacaaaaagcctttagccttgaggtgccttctgaaattaaccaaatttcatccatatatcctcttttataaacttatagaatgtcaaactttgccttcaactgtttttatttctagtctcttccactttaaaacaaaatgaacactgcttgtcttcttccattgaccatttagtgttgagtactgtatgtgttttgttaattctataaaggtatctgttagatattaaaggtgagaattagggcaggttaatcaaaaatggggaaggggaaatggtaaccaaaaagtaaccccatggtaaggtttatatgagtatatgtgaatatagagctaggaaaaaaagcccccccaaatacctttttaacccctctgattggctattattactatatttattattatttattgaaaccttagggaagattgaagattcatcccatacttctatataccatgcttaaaaatcacgtcattctttaaacaaaaatactcaagatcatttatatttatttggagagaaaactgtcctaatttagaatttccctcaaatctgagggacttttaagaaatgctaacagatttttctggaggaaatttagacaaaacaatgtcatttagtagaatatttcagtatttaagtggaatttcagtatactgtactatcctttataagtcattaaaataatgtttcatcaaatggttaaatggaccactggtttcttagagaaatgtttttaggcttaattcattcaattgtcaagtacacttagtcttaatacactcaggtttgaacagattattctgaatattaaaatttaatccattcttaatattttaaaacttttgttaagaaaaactgccagtttgtgcttttgaaatgtctgttttgacatcatagtctagtaaaattttgacagtgcatatgtactgttactaaaagctttatatgaaattattaatgtgaagtttttcatttataattcaaggaaggatttcctgaaaacatttcaagggatttatgtctacatatttgtgtgtgtgtgtgtatatatatgtaatatgcatacacagatgcatatgtgtatatataatgaaatttatgttgctggtattttgcattttaaagtgatcaagattcattaggcaaactttggtttaagtaaacatatgttcaaaatcagattaacagatacaggtttcatagagaacaaaggtgatcatttgaagggcatgctgtaatttcacacaattttccagttcaaaaatggagaatacttcgcctaaaatactgttaagtgggttaattgatacaagtttctgtggtggaaaatttatgcaggttttcacgaatccttttttttttttttttttttttttgagacggagtcttgctctgttgccacgctggaatgcagtaacgtgatcttggctcactgcgacctccacctccccagttcaagcgattctcctgcctcagcctccctagtagctgggactacgggtgca

SEQ ID NO: 19171 - DNA, 3653 bp, Homo sapiens
  source 1..3653: mol_type = unassigned DNA
cttaaaatcttgttgccagaaacacaaatttatctaattttgtttgtcttttcatcttaaattaggccacagtgtcttgttatgacaggtgctccaaactcacgtccagctttacttcatcttgttcatgatttcacaaaaaatgttggtttgatgatctgtggccatgtacatatgggtcctcgaagacaagccatgaaagagatgtccatcgatcaagccaaatatcagcgatggcttattaagaacaaaatgaaggcattttatgctccagtacatgcagatgacttgagagaaggtgcacagtatttgatgcaggctgctggtcttggtcgtatgaagccaaacacacttgtccttggatttaagaaagattggttgcaagcagatatgagggatgtggatatgtatataaacttatttcagtaagtatctttttaattcaataatttagttcatttagaaaatgttaattttgaaagcttgtcctaatttttggagactgtttctcatatagtctcttgtaatggaaatataagaacgaaaagaatcacacaaagcatctgggttttaaattgataatctattaacaattttttattgatctttatatgtctctttacatacatgcatatatatatatatacacacacacacacatatatgtatgtatatgtatatatgtatacactctggcttctcatttaagtttgtaaactttttcctatccctccagctgttgctgagcagagttcccaaatgtcagacccatcacctcctaaactatgtcattataatgtgctgaggaagagtgttttatcgctgtttaggcttgttccccttccaaacaaattttgcagttaatcatttggttcattcattaagttatttacatttcttttatttaaatgtacttatatgttttgtttttctaccactatgaagagttaagtttgagttcactgtaacttccgttttttgcgttgtctagtgcagcagtccccaacctttttggcaccagggaccagtttcatggaagacaatttttccacagacatgggtagtggtggggtctgtggtttcaggatgattcaagcgcattacatttattgtggactttatttatattattattacatattcaccgtaatgtagactcagtgggagtcctgagcttgtttttctccaactaggcagtcccgtctgggggtgatgggagacaattgacgatcatcaggcattaaattctcataaggagcgcacaacctagattcctcacatgcgcagttcataataaagtttgcactcctttgagcaattggtgccgctgctgatctgatgaggtgtacttcaggtggtaatgctcacctgcccatggctcaccttctgctgtgcagcccacccagttcctaacaagcctggctcattactggtccatgacccaggtattggggacccttggtatagtgcgttcttttttattctttgctactttgtctttctggttgtgttctgtttgtggattttgtggatgtttaatgtaatctaccacatactttttgtttaataacaataaaactttttttttgtttttgccagattttcttcttaatcttgaaaagtacttcttttcctactattctaagatttgcctaacctatttatcttgtttatactgaagataagcattccctctccactatgccatacttgatttgaggagtagtttttttctcatcctaagcactgatgaaatagaactgtctgcttcctcttataattgtcctttaaaaaaaacttttatttacaaagtagctttaagattaaagtttaagtcctattttctccatgaattttgatctgatcacccttttttctcactggagttacttccttactggaactcctgttgtatctttggctataaccacatatatttgcctgtctcacatatgatggttttattagtgacatttgaaaagtctttgaggaagcagctggatctcatactctactttttaaaggatctctttatatggattagtaatatatatgataaacaagatttaccaactaatcgttaaatgcttttagtaaaattaaaactgctgatgtgttgtatgttgttactactgctgagttttggttttattaatgtttttgtaagcaaaacctcattgtggctttctaattttgtattctgtgtatatagggattagggacagaaagattaatgtggtccatgagccatgaaaccctatgctttttccctctcaagacctaagaacagtgagatgacgtaattatcctaaaaaatagaaaaagtgacattttttacaaattctttcatacacctgtcacattattagttgtagttgctcataatggaacactggaaggggtctttctgactctgactttctagggattaaagtgagtgagtgttctgaaagttgagtattagtctaaacattattcctgtacattaggcagcagttaaagaataggtaaaatactgctttctggttttagaaccatgtaaattaatagcagtttcacagcagtgacactgctcattctttatcttgttgcacttccactgatgttttagctgtgatttttaaataccttgtgcaatttaagtatgctttatatattgtgtttttattaatagtatataagatctgaagctgcaaatcaatttttatagcttataacaaaaacatttatttgttttaatccacagtaaacttggggagctatattccctggctttaaagaaattgattttgatttagtcgatttattaaacaatttttaaaatgcttatagttattttttctctagtattaattatatctttcaagatacagctgagaaagattaacatgcctattaaatttatttctccagtgactttgttaactttagctcatcataggaatgtggccaaattgtctctccatgatttaaaaacaacaaaagaccttttataaccatatattatatcctgaacacattcttccatttgtcagtaagagtaataatttgactgttttattggattttagcctttttgatttcatatagctgtatcttaatatatcattgtttttaatatgtctacattgaatacttattacttgtgcaatgaaaaataataattaaagatgaaagttaagcctgttaccactttcagagaacaacgtgacgttttggaatttaaaattttttcagtagatttgagaaaaacttgggttaaaatgaagatttatgctcagaactgagattccagggtttaagtctggttttaaagctgtcttcaagattttaatgtattttctgtgtgtataggatgctctcatttctgtttttaaaaatgaaagggatcgctcctgtaatcccagcactttgggaagacaaggcaggtgggtcacgaggtcaggagttcaagaccagcctggccaatgtggtgaaaccctgtctctactaaaaatacaaaaattagccaggcgtgctggtgtgtgtctgtactcccagctactcgggaggctgaggcaggaggattgcttgaaaccgggaggcagaggttgtagtgagccaagattgcgccactgcactccagcctgggcaacagagcgagactctgtctc

SEQ ID NO: 19172 - DNA, 580 bp, Homo sapiens
  source 1..580: mol_type = unassigned DNA
ttaggccacagtgtcttgttatgacaggtgctccaaactcacgtccagctttacttcatcttgttcatgatttcacaaaaaatgttggtttgatgatctgtggccatgtacatatgggtcctcgaagacaagccatgaaagagatgtccatcgatcaagccaaatatcagcgatggcttattaagaacaaaatgaaggcattttatgctccagtacatgcagatgacttgagagaaggtgcacagtatttgatgcaggctgctggtcttggtcgtatgaagccaaacacacttgtccttggatttaagaaagattggttgcaagcagatatgagggatgtggatatgtatataaacttatttcatgatgcttttgacatacaatatggagtagtggttattcgcctaaaagaaggtctggatatatctcatcttcaaggacaaggtaaattttgttggcaataagttttttatttacaaaaatataaactactttgttagaaaattatattctcacaaactgggctcttcgttacttttaataattatgtatcgtggacttattgtatggcattttaaga

SEQ ID NO: 19173 - DNA, 555 bp, Homo sapiens
  source 1..555: mol_type = unassigned DNA
tcaaaaattacaatatttctcacagtcgtgctgcgtttgggagatacacagtcatgtcaacatacatgaattttatgagaaggagatagagaatccaaaggccctattgtgcctttaaatgtagctgaccaaaagcttcttgaagctagtacacagtttcagaaaaaacaaggaaagaatactattgatgtctggtggctttttgatgatggaggtttgaccttattgataccttaccttctgacgaccaagaaaaaatggaaagactgtaagatcagagtattcattggtggaaagataaacagaatagaccatgaccggagagcgatggctactttgcttagcaagttccggatagacttttctgatatcatggttctaggagatatcaataccaaaccaaagaaagaaaatattatagcttttgaggaaatcattgagccatacagacttcatgaagatgataaagagcaagatattgcagataaaatgaaagaagatgaaccatggcgaataacagataatgagcttgaactttataagaccaaggtattc

SEQ ID NO: 19174 - DNA, 489 bp, Homo sapiens
  source 1..489: mol_type = unassigned DNA
tagccatttataaagtatacttttattataaacaactgaaagtttatggtagatgccgtatacaattgtctgaattatctgtagtataaacatctgaatatacaaacattaggaaatgataggaattcagcaaaagggactttaatatttactttgcttacattttatattttgcttaatcctttagaatccaaaggccctattgtgcctttaaatgtagctgaccaaaagcttcttgaagctagtacacagtttcagaaaaaacaaggaaagaatactattgatgtctggtggctttttgatgatggaggtttgaccttattgataccttaccttctgacgaccaagaaaaaatggaaagactgtaagatcagagtattcattggtggaaagataaacagaatagaccatgaccggagagcgatggctactttgcttagcaagttccggatagacttttctgatatcatggttctaggagatatcaat

SEQ ID NO: 19175 - DNA, 3617 bp, Homo sapiens
  source 1..3617: mol_type = unassigned DNA
ggtggcctctgtggccgtccaggctagcggcggcccgcaggcggcggggagaaagactctctcacctggtcttgcggctgtggccaccgccggccaggggtgtggagggcgtgctgccggagacgtccgccgggctctgcagttccgccgggggtcgggcagctatggagccgcggcccacggcgccctcctccggcgccccgggactggccggggtcggggagacgccgtcagccgctgcgctggccgcagccagggtggaactgcccggcacggctgtgccctcggtgccggaggatgctgcgcccgcgagccgggacggcggcggggtccgcgatgagggccccgcggcggccggggacgggctgggcagacccttggggcccaccccgagccagagccgtttccaggtggacctggtttccgagaacgccgggcgggccgctgctgcggcggcggcggcggcggcggcagcggcggcggctggtgctggggcgggggccaagcagacccccgcggacggggaagccagcggcgagagcgagccggctaaaggcagcgaggaagccaagggccgcttccgcgtgaacttcgtggacccagctgcctcctcgtcggctgaagacagcctgtcagatgctgccggggtcggagtcgacgggcccaacgtgagcttccagaacggcggggacacggtgctgagcgagggcagcagcctgcactccggcggcggcggcggcagtgggcaccaccagcactactattatgatacccacaccaacacctactacctgcgcaccttcggccacaacaccatggacgctgtgcccaggatcgatcactaccggcacacagccgcgcagctgggcgagaagctgctccggcctagcctggcggagctccacgacgagctggaaaaggaaccttttgaggatggctttgcaaatggggaagaaagtactccaaccagagatgctgtggtcacgtatactgcagaaagtaaaggagtcgtgaagtttggctggatcaagggtgtattagtacgttgtatgttaaacatttggggtgtgatgcttttcattagattgtcatggattgtgggtcaagctggaataggtctatcagtccttgtaataatgatggccactgttgtgacaactatcacaggattgtctacttcagcaatagcaactaatggatttgtaagaggaggaggagcatattatttaatatctagaagtctagggccagaatttggtggtgcaattggtctaatcttcgcctttgccaacgctgttgcagttgctatgtatgtggttggatttgcagaaaccgtggtggagttgcttaaggaacattccatacttatgatagatgaaatcaatgatatccgaattattggagccattacagtcgtgattcttttaggtatctcagtagctggaatggagtgggaagcaaaagctcagattgttcttttggtgatcctacttcttgctattggtgatttcgtcataggaacatttatcccactggagagcaagaagccaaaagggttttttggttataaatctgaaatatttaatgagaactttgggcccgattttcgagaggaagagactttcttttctgtatttgccatcttttttcctgctgcaactggtattctggctggagcaaatatctcaggtgatcttgcagatcctcagtcagccatacccaaaggaacactcctagccattttaattactacattggtttacgtaggaattgcagtatctgtaggttcttgtgttgttcgagatgccactggaaacgttaatgacactatcgtaacagagctaacaaactgtacttctgcagcctgcaaattaaactttgatttttcatcttgtgaaagcagtccttgttcctatggcctaatgaacaacttccaggtaatgagtatggtgtcaggatttacaccactaatttctgcaggtatattttcagccactctttcttcagcattagcatccctagtgagtgctcccaaaatatttcaggctctatgtaaggacaacatctacccagctttccagatgtttgctaaaggttatgggaaaaataatgaacctcttcgtggctacatcttaacattcttaattgcacttggattcatcttaattgctgaactgaatgttattgcaccaattatctcaaacttcttccttgcatcatatgcattgatcaatttttcagtattccatgcatcacttgcaaaatctccaggatggcgtcctgcattcaaatactacaacatgtggatatcacttcttggagcaattctttgttgcatagtaatgttcgtcattaactggtgggctgcattgctaacatatgtgatagtccttgggctgtatatttatgttacctacaaaaaaccagatgtgaattggggatcctctacacaagccctgacttacctgaatgcactgcagcattcaattcgtctttctggagtggaagaccacgtgaaaaactttaggccacagtgtcttgttatgacaggtgctccaaactcacgtccagctttacttcatcttgttcatgatttcacaaaaaatgttggtttgatgatctgtggccatgtacatatgggtcctcgaagacaagccatgaaagagatgtccatcgatcaagccaaatatcagcgatggcttattaagaacaaaatgaaggcattttatgctccagtacatgcagatgacttgagagaaggtgcacagtatttgatgcaggctgctggtcttggtcgtatgaagccaaacacacttgtccttggatttaagaaagattggttgcaagcagatatgagggatgtggatatgtatataaacttatttcatgatgcttttgacatacaatatggagtagtggttattcgcctaaaagaaggtctggatatatctcatcttcaaggacaagaagaattattgtcatcacaagagaaatctcctggcaccaaggatgtggtagtaagtgtggaatatagtaaaaagtccgatttagatacttccaaaccactcagtgaaaaaccaattacacacaaagttgaggaagaggatggcaagactgcaactcaaccactgttgaaaaaagaatccaaaggccctattgtgcctttaaatgtagctgaccaaaagcttcttgaagctagtacacagtttcagaaaaaacaaggaaagaatactattgatgtctggtggctttttgatgatggaggtttgaccttattgataccttaccttctgacgaccaagaaaaaatggaaagactgtaagatcagagtattcattggtggaaagataaacagaatagaccatgaccggagagcgatggctactttgcttagcaagttccggatagacttttctgatatcatggttctaggagatatcaataccaaaccaaagaaagaaaatattatagcttttgaggaaatcattgagccatacagacttcatgaagatgataaagagcaagatattgcagataaaatgaaagaagatgaaccatggcgaataacagataatgagcttgaactttataagaccaagttttatgaaccatgctaa

SEQ ID NO: 19176 - DNA, 3119 bp, Homo sapiens
  source 1..3119: mol_type = unassigned DNA
ctggcccctccctggacacccaggcgacaatggcagaactgcccacaacagagacgcctggggacgccactttgtgcagcgggcgcttcaccatcagcacactgctgagcagtgatgagccctctccaccagctgcctatgacagcagccaccccagccacctgacccacagcagcaccttctgcatgcgcacctttggctacaacacgatcgatgtggtgcccacatatgagcactatgccaacagcacccagcctggtgagccccggaaggtccggcccacactggctgacctgcactccttcctcaaggaaggcagacacctgcatgccctggcctttgacagccggcccagccacgagatgactgatgggctggtggagggcgaggcaggcaccagcagcgagaagaaccccgaggagccagtgcgcttcggctgggtcaagggggtgatgattcgttgcatgctcaacatttggggcgtgatcctctacctgcggctgccctggattacggcccaggcaggcatcgtcctgacctggatcatcatcctgctgtcggtcacggtgacctccatcacaggcctctccatctcagccatctccaccaatggcaaggtcaagtcaggtggcacctacttcctcatctcccggagtctgggcccagagcttgggggctccatcggcctcattttcgctttcgccaatgccgtgggtgtggccatgcacacggtgggctttgcagagaccgtgcgggacctgctccaggagtatggggcacccatcgtggaccccattaacgacatccgcatcattgccgtggtctcggtcactgtgctgctggccatctccctggctggcatggagtgggagtccaaggcccaggtgctgttcttccttgtcatcatggtctcctttgccaactatttagtggggacgctgatccccccatctgaggacaaggcctccaaaggcttcttcagctaccgggcggacatttttgtccagaacttggtgcctgactggcggggtccagatggcaccttcttcggaatgttctccatcttcttcccctcggccacaggcatcctggcaggggccaacatatctggtgacctcaaggaccctgctatagccatccccaaggggaccctcatggccattttctggacgaccatttcctacctggccatctcagccaccattggctcctgcgtggtgcgtgatgcctctggggtcctgaatgacacagtgacccctggctggggtgcctgcgaggggctggcctgcagctatggctggaacttcaccgagtgcacccagcagcacagctgccactacggcctcatcaactattaccagaccatgagcatggtgtcaggcttcgcgcccctgatcacggctggcatcttcggggccaccctctcctctgccctggcctgccttgtctctgctgccaaagtcttccagtgcctttgcgaggaccagctgtacccactgatcggcttcttcggcaaaggctatggcaagaacaaggagcccgtgcgtggctacctgctggcctacgccatcgctgtggccttcatcatcatcgctgagctcaacaccatagcccccatcatttccaacttcttcctctgctcctatgccctcatcaacttcagctgcttccacgcctccatcaccaactcgcctgggtggagaccttcattccaatactacaacaagtgggcggcgctgtttggggctatcatctccgtggtcatcatgttcctcctcacctggtgggcggccctcatcgccattggcgtggtgctcttcctcctgctctatgtcatctacaagaagccagaggtaaattggggctcctcggtacaggctggctcctacaacctggccctcagctactcggtgggcctcaatgaggtggaagaccacatcaagaactaccgcccccagtgcctggtgctcacggggccccccaacttccgcccggccctggtggactttgtgggcaccttcacccggaacctcagcctgatgatctgtggccacgtgctcatcggaccccacaagcagaggatgcctgagctccagctcatcgccaacgggcacaccaagtggctgaacaagaggaagatcaaggccttctactcggatgtcattgccgaggacctccgcagaggcgtccagatcctcatgcaggccgcaggtctcgggagaatgaagcccaacattctggtggttgggttcaagaagaactggcagtcggctcacccggccacagtggaagactacattggcatcctccatgatgcctttgatttcaactatggcgtgtgtgtcatgaggatgcgggagggactcaacgtgtccaagatgatgcaggcgcacattaaccccgtgtttgacccagcggaggacgggaaggaagccagcgccagaggtgccaggccatcagtctctggcgctttggaccccaaggccctggtgaaggaggagcaggccaccaccatcttccagtcggagcagggcaagaagaccatagacatctactggctctttgacgatggaggcctcaccctcctcattccctatctccttggccgcaagaggaggtggagcaaatgcaagatccgtgtgttcgtaggcggccagattaacaggatggaccaggagagaaaggcgatcatttctctgctgagcaagttccgactgggattccatgaagtccacatcctccctgacatcaaccagaaccctcgggctgagcacaccaagaggtttgaggacatgattgcacccttccgtctgaatgatggcttcaaggatgaggccactgtcaacgagatgcggcgggactgcccctggaagatctcagatgaggagattacgaagaacagagtcaagtcccttcggcaggtgaggctgaatgagattgtgctggattactcccgagacgctgctctcatcgtcatcactttgcccatagggaggaaggggaagtgccccagctcgctgtacatggcctggctggagaccctgtcccaggacctcagacctccagtcatcctgatccgaggaaaccaggaaaacgtgctcaccttttactgccagtaa

SEQ ID NO: 19177 - DNA, 5567 bp, Homo sapiens
  source 1..5567: mol_type = unassigned DNA
ctggcccctccctggacacccaggcgacaatggcagaactgcccacaacagagacgcctggggacgccactttgtgcagcgggcgcttcaccatcagcacactgctgagcagtgatgagccctctccaccagctgcctatgacagcagccaccccagccacctgacccacagcagcaccttctgcatgcgcacctttggctacaacacgatcgatgtggtgcccacatatgagcactatgccaacagcacccagcctggtgagccccggaaggtccggcccacactggctgacctgcactccttcctcaagcaggaaggcagacacctgcatgccctggcctttgacagccggcccagccacgagatgactgatgggctggtggagggcgaggcaggcaccagcagcgagaagaaccccgaggagccagtgcgcttcggctgggtcaagggggtgatgattcgttgcatgctcaacatttggggcgtgatcctctacctgcggctgccctggattacggcccaggcaggcatcgtcctgacctggatcatcatcctgctgtcggtcacggtgacctccatcacaggcctctccatctcagccatctccaccaatggcaaggtcaagtcaggtggcacctacttcctcatctcccggagtctgggcccagagcttgggggctccatcggcctcattttcgctttcgccaatgccgtgggtgtggccatgcacacggtgggctttgcagagaccgtgcgggacctgctccaggagtatggggcacccatcgtggaccccattaacgacatccgcatcattgccgtggtctcggtcactgtgctgctggccatctccctggctggcatggagtgggagtccaaggcccaggtgctgttcttccttgtcatcatggtctcctttgccaactatttagtggggacgctgatccccccatctgaggacaaggcctccaaaggcttcttcagctaccgggcggacatttttgtccagaacttggtgcctgactggcggggtccagatggcaccttcttcggaatgttctccatcttcttcccctcggccacaggcatcctggcaggggccaacatatctggtgacctcaaggaccctgctatagccatccccaaggggaccctcatggccattttctggacgaccatttcctacctggccatctcagccaccattggctcctgcgtggtgcgtgatgcctctggggtcctgaatgacacagtgacccctggctggggtgcctgcgaggggctggcctgcagctatggctggaacttcaccgagtgcacccagcagcacagctgccactacggcctcatcaactattaccagaccatgagcatggtgtcaggcttcgcgcccctgatcacggctggcatcttcggggccaccctctcctctgccctggcctgccttgtctctgctgccaaagtcttccagtgcctttgcgaggaccagctgtacccactgatcggcttcttcggcaaaggctatggcaagaacaaggagcccgtgcgtggctacctgctggcctacgccatcgctgtggccttcatcatcatcgctgagctcaacaccatagcccccatcatttccaacttcttcctctgctcctatgccctcatcaacttcagctgcttccacgcctccatcaccaactcgcctgggtggagaccttcattccaatactacaacaagtgggcggcgctgtttggggctatcatctccgtggtcatcatgttcctcctcacctggtgggcggccctcatcgccattggcgtggtgctcttcctcctgctctatgtcatctacaagaagccagaggtaaattggggctcctcggtacaggctggctcctacaacctggccctcagctactcggtgggcctcaatgaggtggaagaccacatcaagaactaccgcccccagtgcctggtgctcacggggccccccaacttccgcccggccctggtggactttgtgggcaccttcacccggaacctcagcctgatgatctgtggccacgtgctcatcggaccccacaagcagaggatgcctgagctccagctcatcgccaacgggcacaccaagtggctgaacaagaggaagatcaaggccttctactcggatgtcattgccgaggacctccgcagaggcgtccagatcctcatgcaggccgcaggtctcgggagaatgaagcccaacattctggtggttgggttcaagaagaactggcagtcggctcacccggccacagtggaagactacattggcatcctccatgatgcctttgatttcaactatggcgtgtgtgtcatgaggatgcgggagggactcaacgtgtccaagatgatgcaggcgcacattaaccccgtgtttgacccagcggaggacgggaaggaagccagcgccagaggtgccaggccatcagtctctggcgctttggaccccaaggccctggtgaaggaggagcaggccaccaccatcttccagtcggagcagggcaagaagaccatagacatctactggctctttgacgatggaggcctcaccctcctcattccctatctccttggccgcaagaggaggtggagcaaatgcaagatccgtgtgttcgtaggcggccagattaacaggatggaccaggagagaaaggcgatcatttctctgctgagcaagttccgactgggattccatgaagtccacatcctccctgacatcaaccagaaccctcgggctgagcacaccaagaggtttgaggacatgattgcacccttccgtctgaatgatggcttcaaggatgaggccactgtcaacgagatgcggcgggactgcccctggaagatctcagatgaggagattacgaagaacagagtcaagtcccttcggcaggtgaggctgaatgagattgtgctggattactcccgagacgctgctctcatcgtcatcactttgcccatagggaggaaggggaagtgccccagctcgctgtacatggcctggctggagaccctgtcccaggacctcagacctccagtcatcctgatccgaggaaaccaggaaaacgtgctcaccttttactgccagtaactccaggctttgacatccctgtccacagctctgagtgtgtgggataagttggaacttgattgcctctagtccacagggatgagactcatgttctgttgcactttaagtggcagcatctgatgatctcaccgaaaaagatggtagatttccaaatctggctggactccacttccatgggacacattccctgggtcttgtgtttataggctagagaaatagcagatggagctgcaaggaaaactctctaaagcatcctattccttttaaaggatttcttttgattttgatgaccattaattaagagttcagtctttgatttgtatgcaaattggagtcccaatgctgggcgtgaatcttgacagtttctacagaccttcctgggtgaaagttcctaaatcatgccctgcttcctccaataggagaatgggagcctcacctgtaggacctacaggctctctaaggaatgcaggtctctctctgagcctccacagccaggcaaatacatatatatatattttttttttagatgaagttttttctcttgttgcccaggctagggtgtaatggcatgatctcaggtcactgcaacctcctcccgggttcaagcatttcttctgtctcagcctcccgaatagctgggattacaggcacctgccatcacacgagctaatttttgtatttttagtagagatggggtttcaccatgttgaccaggctggtgttgagctcctgacctcaggtgatccacccacctcggtctcccaaagtgctggggttacaggcctgagccactgcgcccggcccaggcaaatttcttgaaccacttctcactcccgtcactttcaataaggggtctttgatgtcttcactggttctttggacgagggacttttcgaacttttttggttgcaacacacagtaagaaatatacttcacactgagacttgcagcgcacacacacggaaacgaccaaaacaaaaatgtcacaaaacaatacttacccttccctgggggacgtcctccagtatgttctgttctgtttatttttcactgttggttgcaatccaataaaatgactttgggatccactcatgggtggggacccacacatttgaaaggcatggccacctttctgttgtgccttgcatttgtccacacacagggagtctggctgagctggggaaaggccacggctgggtgtcattgccattttcccagctcatctcaccgggaagaaaagcagattgacagaacacgtgaggaggggtattgatggcaggagagtcaaaaaagagttttaaagaaggggcaaggttgaaggagtctagtggcaagggtaagatttcaggcatggttaagaacagacgacaaggatgtcaggaatgaagatgtggagaggggtgtagagatggcaaggttggcaaggaacagataggcaggagcaggtccaagccaagcctagcccaagaccaggtgaaaggagaggggaggaggagccacctgcaagagatggaaagagcaggcggcagagggggctggcagggaggggctgttaagagtggggttggaggtgggagagaagctaggacaagggagatggagaaaggacctatacctggctcacggaaggccttcaggtcactacacgttgaacatccccagtgtttgagcccccaaagctagggtgcaagagcactgccatcgaatgccagtgggtgaggccaagtgagggtatttgcagctctagacataaccaagaagcgtaaaggtgagttgtttggtggtacgactgcctgtgccttcttccgatggcactggggtggctgaaggaacagacatctttgggtttcatcagcctcctccaagactgctgcagtgcctacactttagacttcagaaggagactaaagacttctagaatttagaaggagatctgaagtctcctttctggagttacaacccaaaggatgttagcatttctcaggtcatcccactgcaaagcccagaaggcttggggctcccaggctgctctgaagccccactgtctgaccgcctcagggcttgctacgagggactggggcacggccaagctgactaggaacagctctcgtgctcctgagggacctggaggatgggcctgcctcccagccattgagctggattctgggataattcttaactcgaaataaggggaagcatccatcagggaatgctggcctttctagagccacgtagaaaacaattttctggttcttcaaacctcaaagagtccttggtccaaaaaacagaatgttttggcttcgggtgtcaaaaaaaaaattttcacgatgtcagaaatagtatgtttttaacaatagtaatagctttgtaaaaaaataaaaagctttaacagcgaggccataaacaatgaaatgaataaaaacggtggtcattcagtcaacggaa

SEQ ID NO: 19178 - DNA, 4208 bp, Homo sapiens
  source 1..4208: mol_type = unassigned DNA
cccctccctggacacccaggcgacaatggcagaactgcccacaacagagacgcctggggacgccactttgtgcagcgggcgcttcaccatcagcacactgctgagcagtgatgagccctctccaccagctgcctatgacagcagccaccccagccacctgacccacagcagcaccttctgcatgcgcacctttggctacaacacgatcgatgtggtgcccacatatgagcactatgccaacagcacccagcctggtgagccccggaaggtccggcccacactggctgacctgcactccttcctcaagcaggaaggcagacacctgcatgccctggcctttgacagccggcccagccacgagatgactgatgggctggtggagggcgaggcaggcaccagcagcgagaagaaccccgaggagccagtgcgcttcggctgggtcaagggggtgatgattcgttgcatgctcaacatttggggcgtgatcctctacctgcggctgccctggattacggcccaggcaggcatcgtcctgacctggatcatcatcctgctgtcggtcacggtgacctccatcacaggcctctccatctcagccatctccaccaatggcaaggtcaagtcaggtggcacctacttcctcatctcccggagtctgggcccagagcttgggggctccatcggcctcattttcgctttcgccaatgccgtgggtgtggccatgcacacggtgggctttgcagagaccgtgcgggacctgctccaggagtatggggcacccatcgtggaccccattaacgacatccgcatcattgccgtggtctcggtcactgtgctgctggccatctccctggctggcatggagtgggagtccaaggcccaggtgctgttcttccttgtcatcatggtctcctttgccaactatttagtggggacgctgatccccccatctgaggacaaggcctccaaaggcttcttcagctaccgggcggacatttttgtccagaacttggtgcctgactggcggggtccagatggcaccttcttcggaatgttctccatcttcttcccctcggccacaggcatcctggcaggggccaacatatctggtgacctcaaggaccctgctatagccatccccaaggggaccctcatggccattttctggacgaccatttcctacctggccatctcagccaccattggctcctgcgtggtgcgtgatgcctctggggtcctgaatgacacagtgacccctggctggggtgcctgcgaggggctggcctgcagctatggctggaacttcaccgagtgcacccagcagcacagctgccactacggcctcatcaactattaccagaccatgagcatggtgtcaggcttcgcgcccctgatcacggctggcatcttcggggccaccctctcctctgccctggcctgccttgtctctgctgccaaagtcttccagtgcctttgcgaggaccagctgtacccactgatcggcttcttcggcaaaggctatggcaagaacaaggagcccgtgcgtggctacctgctggcctacgccatcgctgtggccttcatcatcatcgctgagctcaacaccatagcccccatcatttccaacttcttcctctgctcctatgccctcatcaacttcagctgcttccacgcctccatcaccaactcgcctgggtggagaccttcattccaatactacaacaagtgggcggcgctgtttggggctatcatctccgtggtcatcatgttcctcctcacctggtgggcggccctcatcgccattggcgtggtgctcttcctcctgctctatgtcatctacaagaagccagaggtaaattggggctcctcggtacaggctggctcctacaacctggccctcagctactcggtgggcctcaatgaggtggaagaccacatcaagaactaccgcccccagtgcctggtgctcacggggccccccaacttccgcccggccctggtggactttgtgggcaccttcacccggaacctcagcctgatgatctgtggccacgtgctcatcggaccccacaagcagaggatgcctgagctccagctcatcgccaacgggcacaccaagtggctgaacaagaggaagatcaaggccttctactcggatgtcattgccgaggacctccgcagaggcgtccagatcctcatgcaggccgcaggtctcgggagaatgaagcccaacattctggtggttgggttcaagaagaactggcagtcggctcacccggccacagtggaagactacattggcatcctccatgatgcctttgatttcaactatggcgtgtgtgtcatgaggatgcgggagggactcaacgtgtccaagatgatgcaggcgcacattaaccccgtgtttgacccagcggaggacgggaaggaagccagcgccagagtggaccccaaggccctggtgaaggaggagcaggccaccaccatcttccagtcggagcagggcaagaagaccatagacatctactggctctttgacgatggaggcctcaccctcctcattccctatctccttggccgcaagaggaggtggagcaaatgcaagatccgtgtgttcgtaggcggccagattaacaggatggaccaggagagaaaggcgatcatttctctgctgagcaagttccgactgggattccatgaagtccacatcctccctgacatcaaccagaaccctcgggctgagcacaccaagaggtttgaggacatgattgcacccttccgtctgaatgatggcttcaaggatgaggccactgtcaacgagatgcggcgggactgcccctggaagatctcagatgaggagattacgaagaacagagtcaagtcccttcggcaggtgaggctgaatgagattgtgctggattactcccgagacgctgctctcatcgtcatcactttgcccatagggaggaaggggaagtgccccagctcgctgtacatggcctggctggagaccctgtcccaggacctcagacctccagtcatcctgatccgaggaaaccaggaaaacgtgctcaccttttactgccagtaactccaggctttgacatccctgtccacagctctgagtgtgtgggataagttggaacttgattgcctctagtccacagggatgagactcatgttctgttgcactttaagtggcagcatctgatgatctcaccgaaaaagatggtagatttccaaatctggctggactccacttccatgggacacattccctgggtcttgtgtttataggctagagaaatagcagatggagctgcaaggaaaactctctaaagcatcctattccttttaaaggatttcttttgattttgatgaccattaattaagagttcagtctttgatttgtatgcaaattggagtcccaatgctgggcgtgaatcttgacagtttctacagaccttcctgggtgaaagttcctaaatcatgccctgcttcctccaataggagaatgggagcctcacctgtaggacctacaggctctctaaggaatgcaggtctctctctgagcctccacagccaggcaaatacatatatatatattttttttttagatgaagttttttctcttgttgcccaggctagggtgtaatggcatgatctcaggtcactgcaacctcctcccgggttcaagcatttcttctgtctcagcctcccgaatagctgggattacaggcacctgccatcacacgagctaatttttgtatttttagtagagatggggtttcaccatgttgaccaggctggtgttgagctcctgacctcaggtgatccacccacctcggtctcccaaagtgctggggttacaggcctgagccactgcgcccggcccaggcaaatttcttgaaccacttctcactcccgtcactttcaataaggggtctttgatgtcttcactggttctttggacgagggacttttcgaacttttttggttgcaacacacagtaagaaatatacttcacactgagacttgcagcgcacacacacggaaacgaccaaaacaaaaatgtcacaaaacaatacttacccttccctgggggacgtcctccagtatgttctgttctgtttatttttcactgttggttgcaatccaataaaatgactttgggatccactcatgggtggggacccacacatttgaaa

SEQ ID NO: 19179 - DNA, 4208 bp, Homo sapiens
  source 1..4208: mol_type = unassigned DNA
cccctccctggacacccaggcgacaatggcagaactgcccacaacagagacgcctggggacgccactttgtgcagcgggcgcttcaccatcagcacactgctgagcagtgatgagccctctccaccagctgcctatgacagcagccaccccagccacctgacccacagcagcaccttctgcatgcgcacctttggctacaacacgatcgatgtggtgcccacatatgagcactatgccaacagcacccagcctggtgagccccggaaggtccggcccacactggctgacctgcactccttcctcaaggaaggcagacacctgcatgccctggcctttgacagccggcccagccacgagatgactgatgggctggtggagggcgaggcaggcaccagcagcgagaagaaccccgaggagccagtgcgcttcggctgggtcaagggggtgatgattcgttgcatgctcaacatttggggcgtgatcctctacctgcggctgccctggattacggcccaggcaggcatcgtcctgacctggatcatcatcctgctgtcggtcacggtgacctccatcacaggcctctccatctcagccatctccaccaatggcaaggtcaagtcaggtggcacctacttcctcatctcccggagtctgggcccagagcttgggggctccatcggcctcattttcgctttcgccaatgccgtgggtgtggccatgcacacggtgggctttgcagagaccgtgcgggacctgctccaggagtatggggcacccatcgtggaccccattaacgacatccgcatcattgccgtggtctcggtcactgtgctgctggccatctccctggctggcatggagtgggagtccaaggcccaggtgctgttcttccttgtcatcatggtctcctttgccaactatttagtggggacgctgatccccccatctgaggacaaggcctccaaaggcttcttcagctaccgggcggacatttttgtccagaacttggtgcctgactggcggggtccagatggcaccttcttcggaatgttctccatcttcttcccctcggccacaggcatcctggcaggggccaacatatctggtgacctcaaggaccctgctatagccatccccaaggggaccctcatggccattttctggacgaccatttcctacctggccatctcagccaccattggctcctgcgtggtgcgtgatgcctctggggtcctgaatgacacagtgacccctggctggggtgcctgcgaggggctggcctgcagctatggctggaacttcaccgagtgcacccagcagcacagctgccactacggcctcatcaactattaccagaccatgagcatggtgtcaggcttcgcgcccctgatcacggctggcatcttcggggccaccctctcctctgccctggcctgccttgtctctgctgccaaagtcttccagtgcctttgcgaggaccagctgtacccactgatcggcttcttcggcaaaggctatggcaagaacaaggagcccgtgcgtggctacctgctggcctacgccatcgctgtggccttcatcatcatcgctgagctcaacaccatagcccccatcatttccaacttcttcctctgctcctatgccctcatcaacttcagctgcttccacgcctccatcaccaactcgcctgggtggagaccttcattccaatactacaacaagtgggcggcgctgtttggggctatcatctccgtggtcatcatgttcctcctcacctggtgggcggccctcatcgccattggcgtggtgctcttcctcctgctctatgtcatctacaagaagccagaggtaaattggggctcctcggtacaggctggctcctacaacctggccctcagctactcggtgggcctcaatgaggtggaagaccacatcaagaactaccgcccccagtgcctggtgctcacggggccccccaacttccgcccggccctggtggactttgtgggcaccttcacccggaacctcagcctgatgatctgtggccacgtgctcatcggaccccacaagcagaggatgcctgagctccagctcatcgccaacgggcacaccaagtggctgaacaagaggaagatcaaggccttctactcggatgtcattgccgaggacctccgcagaggcgtccagatcctcatgcaggccgcaggtctcgggagaatgaagcccaacattctggtggttgggttcaagaagaactggcagtcggctcacccggccacagtggaagactacattggcatcctccatgatgcctttgatttcaactatggcgtgtgtgtcatgaggatgcgggagggactcaacgtgtccaagatgatgcaggcgcacattaaccccgtgtttgacccagcggaggacgggaaggaagccagcgccagagtggaccccaaggccctggtgaaggaggagcaggccaccaccatcttccagtcggagcagggcaagaagaccatagacatctactggctctttgacgatggaggcctcaccctcctcattccctatctccttggccgcaagaggaggtggagcaaatgcaagatccgtgtgttcgtaggcggccagattaacaggatggaccaggagagaaaggcgatcatttctctgctgagcaagttccgactgggattccatgaagtccacatcctccctgacatcaaccagaaccctcgggctgagcacaccaagaggtttgaggacatgattgcacccttccgtctgaatgatggcttcaaggatgaggccactgtcaacgagatgcggcgggactgcccctggaagatctcagatgaggagattacgaagaacagagtcaagtcccttcggcaggtgaggctgaatgagattgtgctggattactcccgagacgctgctctcatcgtcatcactttgcccatagggaggaaggggaagtgccccagctcgctgtacatggcctggctggagaccctgtcccaggacctcagacctccagtcatcctgatccgaggaaaccaggaaaacgtgctcaccttttactgccagtaactccaggctttgacatccctgtccacagctctgagtgtgtgggataagttggaacttgattgcctctagtccacagggatgagactcatgttctgttgcactttaagtggcagcatctgatgatctcaccgaaaaagatggtagatttccaaatctggctggactccacttccatgggacacattccctgggtcttgtgtttataggctagagaaatagcagatggagctgcaaggaaaactctctaaagcatcctattccttttaaaggatttcttttgattttgatgaccattaattaagagttcagtctttgatttgtatgcaaattggagtcccaatgctgggcgtgaatcttgacagtttctacagaccttcctgggtgaaagttcctaaatcatgccctgcttcctccaataggagaatgggagcctcacctgtaggacctacaggctctctaaggaatgcaggtctctctctgagcctccacagccaggcaaatacatatatatatattttttttttagatgaagttttttctcttgttgcccaggctagggtgtaatggcatgatctcaggtcactgcaacctcctcccgggttcaagcatttcttctgtctcagcctcccgaatagctgggattacaggcacctgccatcacacgagctaatttttgtatttttagtagagatggggtttcaccatgttgaccaggctggtgttgagctcctgacctcaggtgatccacccacctcggtctcccaaagtgctggggttacaggcctgagccactgcgcccggcccaggcaaatttcttgaaccacttctcactcccgtcactttcaataaggggtctttgatgtcttcactggttctttggacgagggacttttcgaacttttttggttgcaacacacagtaagaaatatacttcacactgagacttgcagcgcacacacacggaaacgaccaaaacaaaaatgtcacaaaacaatacttacccttccctgggggacgtcctccagtatgttctgttctgtttatttttcactgttggttgcaatccaataaaatgactttgggatccactcatgggtggggacccacacatttgaaaggc

SEQ ID NO: 19180 - DNA, 745 bp, Homo sapiens
  source 1..745: mol_type = unassigned DNA
catggaagccactttgtaaatggcagtgtccgatgggtttcagcctgaaaatgggagctgtggcaacactgccagctccccgcagggacctggcacccctagaaatggggttatcgtctcagccggcctcaacccactttctcgtccccagcaccaagaggtttgaggacatgattgcacccttccgtctgaatgatggcttcaaggatgaggccactgtcaacgagatgcggcgggactgcccctggaagatctcagatgaggagattacgaagaacagagtcaagtcccttcggcaggtgaggctgaatgagattgtgctggattactcccgagacgctgctctcatcgtcatgtaagtagtgcccggctggtgggaggaccagtctgtccagagtcaggtgtctcagctctgggaaggggctcagcaggggcaccacggagggcccaagccttcccctaggaagcagaagggccaaagttcccataaacatagccctggcgattcttagcatgtggctgggcctgagcccgccccacacctgagctccagctggcaggggtcgagggcctcacgtgtcccaggcatcagtgacctccccttgccattgctttttcctgttggctgccttttcctaccaaattccacttggcaaagagggaacccagctctttcaagagggacatcaactcctggttgttcaggaattacttggccctccttggctatcggccattcccagct

SEQ ID NO: 19181 - DNA, 787 bp, Homo sapiens
  source 1..787: mol_type = unassigned DNA
cacatgaaaaaaagatgcccaggagaattcaaaaggcaccagcaccagttactcttcattgacaggacagagcactttgcccatagggaggaaggggaagtgccccagctcgctgtacatggcctggctggagaccctgtcccaggacctcagacctccagtcatcctgatccgaggaaaccaggaaaacgtgctcaccttttactgccagtaactccaggctttgacatccctgtccacagctctgagtgtgtgggataagttggaacttgattgcctctagtccacagggatgagactcatgttctgttgcactttaagtggcagcatctgatgatctcaccgaaaaagatggtagatttccaaatctggctggactccacttccatgggacacattccctgggtcttgtgtttataggctagagaaatagcagatggagctgcaaggaaaactctctaaagcatcctattccttttaaaggatttcttttgattttgatgaccattaattaagagttcagtctttgatttgtatgcaaattggagtcccaatgctgggcgtgaatcttgacagtttctacagaccttcctgggtgaaagttcctaaatcatgccctgcttcctccaataggagaatgggagcctcacctgtaggacctacaggctctctaaggaatgcaggtctctctctgagcctccacagccaggcaaatacatatatatatattttttttttagatgaagttttttctcttgttgcccaggctagggtgtaatggcatgat

SEQ ID NO: 19182 - DNA, 4765 bp, Homo sapiens
  source 1..4765: mol_type = unassigned DNA
cccggggggcgggcggaggaagtgagcgcagcggggaggaatgcgagcgggcggggcgtgtcggcccggggcggcggggacagcggcggggacagcggcgggcggctgggacggcgggtgcggcggggccgagcccgcacgatgcctcacttcaccgtggtgccagtggacgggccgaggcgcggcgactatgacaacctcgaggggctcagttgggtggactacggggagcgcgccgagctggatgactcggacggacatggcaaccacagagagagcagcccttttctttcccccttggaggcttccagaggaattgactactatgacaggaacctggcactgtttgaggaagagctggacatccgcccaaaggtatcgtctcttctgggaaagctcgtcagctacaccaacctcacccagggcgccaaagagcatgaggaggccgagagtggggagggcacccgccggagggcagccgaggcacccagcatgggcaccctcatgggggtgtacctgccctgcctgcagaatatctttggggttatcctcttcctgcggctgacctggatggtgggcacagcaggtgtgctacaggccctcctcatcgtgcttatctgctgctgttgtaccctgctgacggccatctccatgagtgccatcgccaccaacggtgtggttccagctgggggctcctatttcatgatctctcgttcactggggccagaatttggaggtgctgtgggcctgtgcttctacctgggaacaacattcgcagcagccatgtacatcctgggggccatcgagatcttgctgacctacattgccccaccagctgccattttttacccatcgggtgctcatgacacgtcgaatgccactttgaacaatatgcgtgtgtatgggaccattttcctgaccttcatgaccctggtggtgtttgtgggggtcaagtatgtgaacaaatttgcctcgctcttcctggcctgtgtgatcatctccatcctctccatctatgctgggggcataaagtctatatttgaccctcccgtgtttccggtatgcatgctgggcaacaggaccctgtcccgggaccagtttgacatctgtgccaagacagctgtagtggacaatgagacagtggccacccagctatggagtttcttctgccacagccccaaccttacgaccgactcctgtgacccctacttcatgctcaacaatgtgaccgagatccctggcatccccggggcagctgctggtgtgctccaggaaaacctgtggagcgcctacctggagaagggtgacatcgtggagaagcatgggctgccctccgcagatgccccgagcctgaaggagagcctgcctctgtacgtggtcgctgacatcgccacatccttcaccgtgctggtcggcatcttcttcccttctgtaacaggcatcatggctggctcaaaccgctctggggaccttcgtgacgcccagaagtctatccctgtggggaccattctggccatcattacaacttccctcgtgtacttcagcagtgtggttctctttggtgcctgcattgagggtgtggttctccgggacaagtatggcgatggtgtcagcaggaacttggtggtgggcacactggcctggccttcaccctgggtcatcgtcatcggctccttcttttcaacgtgtggcgctggcctccagagcctcacaggggcaccacgcctattgcaggccattgccaaggacaacatcatccccttcctccgggtgtttggccacgggaaggtgaatggtgaacccacatgggcactcctcctgacggcactcatcgccgagctgggcatcctcatcgcctccctcgacatggtggcccccatcttatccatgttctttctgatgtgctacctgttcgtgaacctcgcctgtgcggtgcagacactcctgaggacccccaactggcggccccggttcaagtactatcactgggcgctgtccttcctgggcatgagtctctgcctggcccttatgtttgtctcctcctggtactatgccctggtggccatgctcatcgccggcatgatctacaaatacatcgagtaccaaggggctgagaaggagtggggtgacgggatccgaggcctgtccctgagcgctgcccgctacgcgctgttgcggctggaggaggggcctcctcacaccaagaactggcggccgcagctgctggtgctgctgaagctggacgaggacctccacgtgaagtacccgcggctcctcaccttcgcctcccagctcaaggctggcaagggcctgaccattgttggttctgtcatccaggggagcttcttggagagctatggcgaggctcaggccgccgagcagaccatcaagaacatgatggaaattgagaaggtgaagggcttctgccaggtggtggtggccagcaaggtgcgggaggggctggcccacctcatccagtcctgtggcctgggaggcatgcggcataactccgtggtgctgggctggccctacggctggcgacagagcgaggacccccgtgcctggaagaccttcattgacaccgtgcgctgcactacggctgcccacctggccctgctcgtgcccaagaacatcgccttctaccccagcaaccacgagcgctacctggagggccacatagacgtgtggtggatcgtgcacgatggtggcatgctcatgcttctgcccttcctgctgcgccagcataaggtctggaggaagtgccggatgcgcatcttcacagtggcccagatggatgacaacagcatccagatgaagaaggacctggctgtctttctgtaccatctgcgccttgaggccgaggtggaggtggtggagatgcataacagtgacatctctgcatacacctacgagcggacgctgatgatggagcagcggtcgcagatgctgcggcagatgagactgaccaagactgagcgggagcgagaagcccagctggtcaaggatcggcactcggccctgcggctggagagcctgtactcggacgaggaagatgagtctgcagtgggggctgacaagatccagatgacgtggaccagggacaagtacatgactgagacctgggaccccagccatgcccctgacaatttccgggagctggtgcacattaagccggaccaatccaatgtgcggcgcatgcacactgctgtgaagctcaatgaagtcattgtcacgcgctcccacgacgcccgcctggttctcctaaacatgcctggcccacccaggaacagtgagggcgacgagaactacatggagttcctcgaggtgctgaccgagggccttgagcgggtgctgttggtgcgcggtggtggccgtgaagtcatcaccatctactcctgagcccagtgtcatcttgtggcctggagtcgaggtcttggccaggacataacaagctgtggtctggggtaacagcctcttcccagcacccacctgccagccctgcttgcctggccctgtcctggacccagctttgctaggtctccttggaaaccaggcctgggcctcaaaatggagatggatcccaggtcttgtgggaccctgggatgtttggggactttactatctagcaccccagtaggcctgtcctggccagagaagactggtaggggccgagtggggtttgaaggcagccggcccggcccagcccaggagcgctatttattgcatatttattgtttggatgtcaccatcagagacgaagggaagggtagccagggagggagtccagcccagctgcctgcaggaagatctggctcagtctactatgggcagggccccccaccaagctgagccgaatggagacagctgagctgaggcctgactttttcaataaaacattgtgtagttctgggcctcctgctgccccggctctgtttcccctggcgccaagagaagaaggcggaactgaacccaggcccagagccggctccctgaggctgtgcccctttccggcaatctctggccacaacccccactggccaggccgtccctcccactggccctagggcccctcccactcccacaccagataaggacagcccagtgccgctttctctggcagtaggcaccagggctggaatggggccgcccggctccccatggcagtgggtgacgctgctgctggggctgctgctccctcctgccgcccccttctggctcctcaatgtgctcttccccccgcacaccacgcccaaggctgagctcagtaaccacacacggcccgtcatcctcggtaagcccccaccaggcccctgatgcaccacgccagaccctggggagcctgggccccagcccctggcagctgacctggccaaagcccttctgccctgcataagccccgacataagtacctgccctggtgtggggaggggccaaaagcttgtcccttagaggaatgacgtcccttctcccaccacactgtgactctcagttgtctaacccagggggggcggagtgggggacggggtgtgcctgaggtcttggctggggcatcacaagctgtggtcagtcacagccacaccagactctgggccaagccccaccactccttccttggcccccacccaccaaggacaagatgcccagcccaggatcggtgagcaggagaggcccatccatgcccggcccctattaggcccagcccccatgcccccagacctatctgttcccaccttggactttggcaataaaggagcgccagactggg

SEQ ID NO: 19183 - DNA, 3620 bp, Homo sapiens
  source 1..3620: mol_type = unassigned DNA
acggcgggtgcggcggggccgagcccgcacgatgcctcacttcaccgtggtgccagtggacgggccgaggcgcggcgactatgacaacctcgaggggctcagttgggtggactacggggagcgcgccgagctggatgactcggacggaagagctggacatccgcccaaaggtatcgtctcttctgggaaagctcgtcagctacaccaacctcacccagggcgccaaagagcatgaggaggccgagagtggggagggcacccgccggagggcagccgaggcacccagcatgggcaccctcatgggggtgtacctgccctgcctgcagaatatctttggggttatcctcttcctgcggctgacctggatggtgggcacagcaggtgtgctacaggccctcctcatcgtgcttatctgctgctgttgtaccctgctgacggccatctccatgagtgccatcgccaccaacggtgtggttccagctgggggctcctatttcatgatctctcgttcactggggccagaatttggaggtgctgtgggcctgtgcttctacctgggaacaacattcgcagcagccatgtacatcctgggggccatcgagatcttgctgacctacattgccccaccagctgccattttttacccatcgggtgctcatgacacgtcgaatgccactttgaacaatatgcgtgtgtatgggaccattttcctgaccttcatgaccctggtggtgtttgtgggggtcaagtatgtgaacaaatttgcctcgctcttcctggcctgtgtgatcatctccatcctctccatctatgctgggggcataaagtctatatttgaccctcccgtgtttccggtatgcatgctgggcaacaggaccctgtcccgggaccagtttgacatctgtgccaagacagctgtagtggacaatgagacagtggccacccagctatggagtttcttctgccacagccccaaccttacgaccgactcctgtgacccctacttcatgctcaacaatgtgaccgagatccctggcatccccggggcagctgctggtgtgctccaggaaaacctgtggagcgcctacctggagaagggtgacatcgtggagaagcatgggctgccctccgcagatgccccgagcctgaaggagagcctgcctctgtacgtggtcgctgacatcgccacatccttcaccgtgctggtcggcatcttcttcccttctgtaacaggcatcatggctggctcaaaccgctctggggaccttcgtgacgcccagaagtctatccctgtggggaccattctggccatcattacaacttccctcgtgtacttcagcagtgtggttctctttggtgcctgcattgagggtgtggttctccgggacaagtatggcgatggtgtcagcaggaacttggtggtgggcacactggcctggccttcaccctgggtcatcgtcatcggctccttcttttcaacgtgtggcgctggcctccagagcctcacaggggcaccacgcctattgcaggccattgccaaggacaacatcatccccttcctccgggtgtttggccacgggaaggtgaatggtgaacccacatgggcactcctcctgacggcactcatcgccgagctgggcatcctcatcgcctccctcgacatggtggcccccatcttatccatgttctttctgatgtgctacctgttcgtgaacctcgcctgtgcggtgcagacactcctgaggacccccaactggcggccccggttcaagtactatcactgggcgctgtccttcctgggcatgagtctctgcctggcccttatgtttgtctcctcctggtactatgccctggtggccatgctcatcgccggcatgatctacaaatacatcgagtaccaaggggctgagaaggagtggggtgacgggatccgaggcctgtccctgagcgctgcccgctacgcgctgttgcggctggaggaggggcctcctcacaccaagaactggcggccgcagctgctggtgctgctgaagctggacgaggacctccacgtgaagtacccgcggctcctcaccttcgcctcccagctcaaggctggcaagggcctgaccattgttggttctgtcatccaggggagcttcttggagagctatggcgaggctcaggccgccgagcagaccatcaagaacatgatggaaattgagaaggtgaagggcttctgccaggtggtggtggccagcaaggtgcgggaggggctggcccacctcatccagtcctgtggcctgggaggcatgcggcataactccgtggtgctgggctggccctacggctggcgacagagcgaggacccccgtgcctggaagaccttcattgacaccgtgcgctgcactacggctgcccacctggccctgctcgtgcccaagaacatcgccttctaccccagcaaccacgagcgctacctggagggccacatagacgtgtggtggatcgtgcacgatggtggcatgctcatgcttctgcccttcctgctgcgccagcataaggtctggaggaagtgccggatgcgcatcttcacagtggcccagatggatgacaacagcatccagatgaagaaggacctggctgtctttctgtaccatctgcgccttgaggccgaggtggaggtggtggagatgcataacagtgacatctctgcatacacctacgagcggacgctgatgatggagcagcggtcgcagatgctgcggcagatgagactgaccaagactgagcgggagcgagaagcccagctggtcaaggatcggcactcggccctgcggctggagagcctgtactcggacgaggaagatgagtctgcagtgggggctgacaagatccagatgacgtggaccagggacaagtacatgactgagacctgggaccccagccatgcccctgacaatttccgggagctggtgcacattaagccggaccaatccaatgtgcggcgcatgcacactgctgtgaagctcaatgaagtcattgtcacgcgctcccacgacgcccgcctggttctcctaaacatgcctggcccacccaggaacagtgagggcgacgagaactacatggagttcctcgaggtgctgaccgagggccttgagcgggtgctgttggtgcgcggtggtggccgtgaagtcatcaccatctactcctgagcccagtgtcatcttgtggcctggagtcgaggtcttggccaggacataacaagctgtggtctggggtaacagcctcttcccagcacccacctgccagccctgcttgcctggccctgtcctggacccagctttgctaggtctccttggaaaccaggcctgggcctcaaaatggagatggatcccaggtcttgtgggaccctgggatgtttggggactttactatctagcaccccagtaggcctgtcctggccagagaagactggtaggggccgagtggggtttgaaggcagccggcccggcccagcccaggagcgctatttattgcatatttattgtttggatgtcaccatcagagacgaagggaagggtagccagggagggagtccagcccagctgcctgcaggaagatctggctcagtctactat

SEQ ID NO: 19184 - DNA, 3627 bp, Homo sapiens
  source 1..3627: mol_type = unassigned DNA
gagtcctgctagatccccgcaagctaggccagctcctcccactgcctcccttcctctttctcctcctcttactcctttccagccagaccttggctgtctacaggatgggggacaccctgagccccggacatggcaaccacagagagagcagcccttttctttcccccttggaggcttccagaggaattgactactatgacaggaacctggcactgtttgaggaagagctggacatccgcccaaaggtatcgtctcttctgggaaagctcgtcagctacaccaacctcacccagggcgccaaagagcatgaggaggccgagagtggggagggcacccgccggagggcagccgaggcacccagcatgggcaccctcatgggggtgtacctgccctgcctgcagaatatctttggggttatcctcttcctgcggctgacctggatggtgggcacagcaggtgtgctacaggccctcctcatcgtgcttatctgctgctgttgtaccctgctgacggccatctccatgagtgccatcgccaccaacggtgtggttccagctgggggctcctatttcatgatctctcgttcactggggccagaatttggaggtgctgtgggcctgtgcttctacctgggaacaacattcgcagcagccatgtacatcctgggggccatcgagatcttgctgacctacattgccccaccagctgccattttttacccatcgggtgctcatgacacgtcgaatgccactttgaacaatatgcgtgtgtatgggaccattttcctgaccttcatgaccctggtggtgtttgtgggggtcaagtatgtgaacaaatttgcctcgctcttcctggcctgtgtgatcatctccatcctctccatctatgctgggggcataaagtctatatttgaccctcccgtgtttccggtatgcatgctgggcaacaggaccctgtcccgggaccagtttgacatctgtgccaagacagctgtagtggacaatgagacagtggccacccagctatggagtttcttctgccacagccccaaccttacgaccgactcctgtgacccctacttcatgctcaacaatgtgaccgagatccctggcatccccggggcagctgctggtgtgctccaggaaaacctgtggagcgcctacctggagaagggtgacatcgtggagaagcatgggctgccctccgcagatgccccgagcctgaaggagagcctgcctctgtacgtggtcgctgacatcgccacatccttcaccgtgctggtcggcatcttcttcccttctgtaacaggcatcatggctggctcaaaccgctctggggaccttcgtgacgcccagaagtctatccctgtggggaccattctggccatcattacaacttccctcgtgtacttcagcagtgtggttctctttggtgcctgcattgagggtgtggttctccgggacaagtatggcgatggtgtcagcaggaacttggtggtgggcacactggcctggccttcaccctgggtcatcgtcatcggctccttcttttcaacgtgtggcgctggcctccagagcctcacaggggcaccacgcctattgcaggccattgccaaggacaacatcatccccttcctccgggtgtttggccacgggaaggtgaatggtgaacccacatgggcactcctcctgacggcactcatcgccgagctgggcatcctcatcgcctccctcgacatggtggcccccatcttatccatgttctttctgatgtgctacctgttcgtgaacctcgcctgtgcggtgcagacactcctgaggacccccaactggcggccccggttcaagtactatcactgggcgctgtccttcctgggcatgagtctctgcctggcccttatgtttgtctcctcctggtactatgccctggtggccatgctcatcgccggcatgatctacaaatacatcgagtaccaaggggctgagaaggagtggggtgacgggatccgaggcctgtccctgagcgctgcccgctacgcgctgttgcggctggaggaggggcctcctcacaccaagaactggcggccgcagctgctggtgctgctgaagctggacgaggacctccacgtgaagtacccgcggctcctcaccttcgcctcccagctcaaggctggcaagggcctgaccattgttggttctgtcatccaggggagcttcttggagagctatggcgaggctcaggccgccgagcagaccatcaagaacatgatggaaattgagaaggtgaagggcttctgccaggtggtggtggccagcaaggtgcgggaggggctggcccacctcatccagtcctgtggcctgggaggcatgcggcataactccgtggtgctgggctggccctacggctggcgacagagcgaggacccccgtgcctggaagaccttcattgacaccgtgcgctgcactacggctgcccacctggccctgctcgtgcccaagaacatcgccttctaccccagcaaccacgagcgctacctggagggccacatagacgtgtggtggatcgtgcacgatggtggcatgctcatgcttctgcccttcctgctgcgccagcataaggtctggaggaagtgccggatgcgcatcttcacagtggcccagatggatgacaacagcatccagatgaagaaggacctggctgtctttctgtaccatctgcgccttgaggccgaggtggaggtggtggagatgcataacagtgacatctctgcatacacctacgagcggacgctgatgatggagcagcggtcgcagatgctgcggcagatgagactgaccaagactgagcgggagcgagaagcccagctggtcaaggatcggcactcggccctgcggctggagagcctgtactcggacgaggaagatgagtctgcagtgggggctgacaagatccagatgacgtggaccagggacaagtacatgactgagacctgggaccccagccatgcccctgacaatttccgggagctggtgcacattaagccggaccaatccaatgtgcggcgcatgcacactgctgtgaagctcaatgaagtcattgtcacgcgctcccacgacgcccgcctggttctcctaaacatgcctggcccacccaggaacagtgagggcgacgagaactacatggagttcctcgaggtgctgaccgagggccttgagcgggtgctgttggtgcgcggtggtggccgtgaagtcatcaccatctactcctgagcccagtgtcatcttgtggcctggagtcgaggtcttggccaggacataacaagctgtggtctggggtaacagcctcttcccagcacccacctgccagccctgcttgcctggccctgtcctggacccagctttgctaggtctccttggaaaccaggcctgggcctcaaaatggagatggatcccaggtcttgtgggaccctgggatgtttggggactttactatctagcaccccagtaggcctgtcctggccagagaagactggtaggggccgagtggggtttgaaggcagccggcccggcccagcccaggagcgctatttattgcatatttattgtttggatgtcaccatcagagacg

SEQ ID NO: 19185 - DNA, 3768 bp, Homo sapiens
  source 1..3768: mol_type = unassigned DNA
atgcctcacttcaccgtggtgccagtggacgggccgaggcgcggcgactatgacaacctcgaggggctcagttgggtggactacggggagcgcgccgagctggatgactcggacggacatggcaaccacagagagagcagcccttttctttcccccttggaggcttccagaggaattgactactatgacaggaacctggcactgtttgaggaagagctggacatccgcccaaaggtatcgtctcttctgggaaagctcgtcagctacaccaacctcacccagggcgccaaagagcatgaggaggccgagagtggggagggcacccgccggagggcagccgaggcacccagcatgggcaccctcatgggggtgtacctgccctgcctgcagaatatctttggggttatcctcttcctgcggctgacctggatggtgggcacagcaggtgtgctacaggccctcctcatcgtgcttatctgctgctgttgtaccctgctgacggccatctccatgagtgccatcgccaccaacggtgtggttccagctgggggctcctatttcatgatctctcgttcactggggccagaatttggaggtgctgtgggcctgtgcttctacctgggaacaacattcgcagcagccatgtacatcctgggggccatcgagatcttgctgacctacattgccccaccagctgccattttttacccatcgggtgctcatgacacgtcgaatgccactttgaacaatatgcgtgtgtatgggaccattttcctgaccttcatgaccctggtggtgtttgtgggggtcaagtatgtgaacaaatttgcctcgctcttcctggcctgtgtgatcatctccatcctctccatctatgctgggggcataaagtctatatttgaccctcccgtgtttccggtatgcatgctgggcaacaggaccctgtcccgggaccagtttgacatctgtgccaagacagctgtagtggacaatgagacagtggccacccagctatggagtttcttctgccacagccccaaccttacgaccgactcctgtgacccctacttcatgctcaacaatgtgaccgagatccctggcatccccggggcagctgctggtgtgctccaggaaaacctgtggagcgcctacctggagaagggtgacatcgtggagaagcatgggctgccctccgcagatgccccgagcctgaaggagagcctgcctctgtacgtggtcgctgacatcgccacatccttcaccgtgctggtcggcatcttcttcccttctgtaacaggcatcatggctggctcaaaccgctctggggaccttcgtgacgcccagaagtctatccctgtggggaccattctggccatcattacaacttccctcgtgtacttcagcagtgtggttctctttggtgcctgcattgagggtgtggttctccgggacaagtatggcgatggtgtcagcaggaacttggtggtgggcacactggcctggccttcaccctgggtcatcgtcatcggctccttcttttcaacgtgtggcgctggcctccagagcctcacaggggcaccacgcctattgcaggccattgccaaggacaacatcatccccttcctccgggtgtttggccacgggaaggtgaatggtgaacccacatgggcactcctcctgacggcactcatcgccgagctgggcatcctcatcgcctccctcgacatggtggcccccatcttatccatgttctttctgatgtgctacctgttcgtgaacctcgcctgtgcggtgcagacactcctgaggacccccaactggcggccccggttcaagtactatcactgggcgctgtccttcctgggcatgagtctctgcctggcccttatgtttgtctcctcctggtactatgccctggtggccatgctcatcgccggcatgatctacaaatacatcgagtaccaaggggctgagaaggagtggggtgacgggatccgaggcctgtccctgagcgctgcccgctacgcgctgttgcggctggaggaggggcctcctcacaccaagaactggcggccgcagctgctggtgctgctgaagctggacgaggacctccacgtgaagtacccgcggctcctcaccttcgcctcccagctcaaggctggcaagggcctgaccattgttggttctgtcatccaggggagcttcttggagagctatggcgaggctcaggccgccgagcagaccatcaagaacatgatggaaattgagaaggtgaagggcttctgccaggtggtggtggccagcaaggtgcgggaggggctggcccacctcatccagtcctgtggcctgggaggcatgcggcataactccgtggtgctgggctggccctacggctggcgacagagcgaggacccccgtgcctggaagaccttcattgacaccgtgcgctgcactacggctgcccacctggccctgctcgtgcccaagaacatcgccttctaccccagcaaccacgagcgctacctggagggccacatagacgtgtggtggatcgtgcacgatggtggcatgctcatgcttctgcccttcctgctgcgccagcataaggtctggaggaagtgccggatgcgcatcttcacagtggcccagatggatgacaacagcatccagatgaagaaggacctggctgtctttctgtaccatctgcgccttgaggccgaggtggaggtggtggagatgcataacagtgacatctctgcatacacctacgagcggacgctgatgatggagcagcggtcgcagatgctgcggcagatgagactgaccaagactgagcgggagcgagaagcccagctggtcaaggatcggcactcggccctgcggctggagagcctgtactcggacgaggaagatgagtctgcagtgggggctgacaagatccagatgacgtggaccagggacaagtacatgactgagacctgggaccccagccatgcccctgacaatttccgggagctggtgcacattaagccggaccaatccaatgtgcggcgcatgcacactgctgtgaagctcaatgaagtcattgtcacgcgctcccacgacgcccgcctggttctcctaaacatgcctggcccacccaggaacagtgagggcgacgagaactgtatccctttgtggagaggcaggcagttgggaggtggatagcatgggaggtcaagccagcggcttctctcctgggcacccctgggtgggcatggcccaggtggcccgggttgcccgttgattctgttgttgcctccttgacttgaggccctgcagacatggagttcctcgaggtgctgaccgagggccttgagcgggtgctgttggtgcgcggtggtggccgtgaagtcatcaccatctactcctgagcccagtgtcatcttgtggcctggagtcgaggtcttggccaggacataacaagctgtggtctggggtaacagcctcttcccagcacccacctgccagccctgcttgcctggccctgtcctggacccagctttgctaggtctccttggaaaccaggcctgggcctcaaaatggagatggatcccaggtcttgtgggaccctgggatgtttggggactttactatctagcaccccagtaggcctgtcctggccagagaagactggtaggggccgagtggggtttgaaggcagccggcccggcccagcccaggagcgctatttattgcatatttattgtttggatgtcaccatcagag

SEQ ID NO: 19186 - DNA, 3761 bp, Homo sapiens
  source 1..3761: mol_type = unassigned DNA
atgcctcacttcaccgtggtgccagtggacgggccgaggcgcggcgactatgacaacctcgaggggctcagttgggtggactacggggagcgcgccgagctggatgactcggacggacatggcaaccacagagagagcagcccttttctttcccccttggaggcttccagaggaattgactactatgacaggaacctggcactgtttgaggaagagctggacatccgcccaaaggtatcgtctcttctgggaaagctcgtcagctacaccaacctcacccagggcgccaaagagcatgaggaggccgagagtggggagggcacccgccggagggcagccgaggcacccagcatgggcaccctcatgggggtgtacctgccctgcctgcagaatatctttggggttatcctcttcctgcggctgacctggatggtgggcacagcaggtgtgctacaggccctcctcatcgtgcttatctgctgctgttgtaccctgctgacggccatctccatgagtgccatcgccaccaacggtgtggttccagctgggggctcctatttcatgatctctcgttcactggggccagaatttggaggtgctgtgggcctgtgcttctacctgggaacaacattcgcagcagccatgtacatcctgggggccatcgagatcttgctgacctacattgccccaccagctgccattttttacccatcgggtgctcatgacacgtcgaatgccactttgaacaatatgcgtgtgtatgggaccattttcctgaccttcatgaccctggtggtgtttgtgggggtcaagtatgtgaacaaatttgcctcgctcttcctggcctgtgtgatcatctccatcctctccatctatgctgggggcataaagtctatatttgaccctcccgtgtttccggtatgcatgctgggcaacaggaccctgtcccgggaccagtttgacatctgtgccaagacagctgtagtggacaatgagacagtggccacccagctatggagtttcttctgccacagccccaaccttacgaccgactcctgtgacccctacttcatgctcaacaatgtgaccgagatccctggcatccccggggcagctgctggtgtgctccaggaaaacctgtggagcgcctacctggagaagggtgacatcgtggagaagcatgggctgccctccgcagatgccccgagcctgaaggagagcctgcctctgtacgtggtcgctgacatcgccacatccttcaccgtgctggtcggcatcttcttcccttctgtaacaggcatcatggctggctcaaaccgctctggggaccttcgtgacgcccagaagtctatccctgtggggaccattctggccatcattacaacttccctcgtgtacttcagcagtgtggttctctttggtgcctgcattgagggtgtggttctccgggacaagtatggcgatggtgtcagcaggaacttggtggtgggcacactggcctggccttcaccctgggtcatcgtcatcggctccttcttttcaacgtgtggcgctggcctccagagcctcacaggggcaccacgcctattgcaggccattgccaaggacaacatcatccccttcctccgggtgtttggccacgggaaggtgaatggtgaacccacatgggcactcctcctgacggcactcatcgccgagctgggcatcctcatcgcctccctcgacatggtggcccccatcttatccatgttctttctgatgtgctacctgttcgtgaacctcgcctgtgcggtgcagacactcctgaggacccccaactggcggccccggttcaagtactatcactgggcgctgtccttcctgggcatgagtctctgcctggcccttatgtttgtctcctcctggtactatgccctggtggccatgctcatcgccggcatgatctacaaatacatcgagtaccaaggggctgagaaggagtggggtgacgggatccgaggcctgtccctgagcgctgcccgctacgcgctgttgcggctggaggaggggcctcctcacaccaagaactggcggccgcagctgctggtgctgctgaagctggacgaggacctccacgtgaagtacccgcggctcctcaccttcgcctcccagctcaaggctggcaagggcctgaccattgttggttctgtcatccaggggagcttcttggagagctatggcgaggctcaggccgccgagcagaccatcaagaacatgatggaaattgagaaggtgaagggcttctgccaggtggtggtggccagcaaggtgcgggaggggctggcccacctcatccagtcctgtggcctgggaggcatgcggcataactccgtggtgctgggctggccctacggctggcgacagagcgaggacccccgtgcctggaagaccttcattgacaccgtgcgctgcactacggctgcccacctggccctgctcgtgcccaagaacatcgccttctaccccagcaaccacgagcgctacctggagggccacatagacgtgtggtggatcgtgcacgatggtggcatgctcatgcttctgcccttcctgctgcgccagcataaggtctggaggaagtgccggatgcgcatcttcacagtggcccagatggatgacaacagcatccagatgaagaaggacctggctgtctttctgtaccatctgcgccttgaggccgaggtggaggtggtggagatgcataacagtgacatctctgcatacacctacgagcggacgctgatgatggagcagcggtcgcagatgctgcggcagatgagactgaccaagactgagcgggagcgagaagcccagctggtcaaggatcggcactcggccctgcggctggagagcctgtactcggacgaggaagatgagtctgcagtgggggctgacaagatccagatgacgtggaccagggacaagtacatgactgagacctgggaccccagccatgcccctgacaatttccgggagctggtgcacattaagccgtgagtgcagcaaaaacagccccagcggcactggaatctaggggtggaggtggggtggggcagacaagtagtgttagatgggccaggggtggggaccctccttgcaggatggctcatggcgacctgtgactggctacactacgtgtagggaccaatccaatgtgcggcgcatgcacactgctgtgaagctcaatgaagtcattgtcacgcgctcccacgacgcccgcctggttctcctaaacatgcctggcccacccaggaacagtgagggcgacgagaactacatggagttcctcgaggtgctgaccgagggccttgagcgggtgctgttggtgcgcggtggtggccgtgaagtcatcaccatctactcctgagcccagtgtcatcttgtggcctggagtcgaggtcttggccaggacataacaagctgtggtctggggtaacagcctcttcccagcacccacctgccagccctgcttgcctggccctgtcctggacccagctttgctaggtctccttggaaaccaggcctgggcctcaaaatggagatggatcccaggtcttgtgggaccctgggatgtttggggactttactatctagcaccccagtaggcctgtcctggccagagaagactggtaggggccgagtggggtttgaaggcagccggcccggcccagcccaggagcgctatttattgcatatttattgtttggatgtcaccatcagag

SEQ ID NO: 19187 - DNA, 3525 bp, Homo sapiens
  source 1..3525: mol_type = unassigned DNA
agtgcatggtggggtagccagccggccacctttgggccatggcagccgaaggtgctgtgtgcggcttcgtctatctggagggcactgcctgggcggtccctgaggacaccgaacccttggcatcctgcacattgggacatggcaaccacagagagagcagcccttttctttcccccttggaggcttccagaggaattgactactatgacaggaacctggcactgtttgaggaagagctggacatccgcccaaaggtatcgtctcttctgggaaagctcgtcagctacaccaacctcacccagggcgccaaagagcatgaggaggccgagagtggggagggcacccgccggagggcagccgaggcacccagcatgggcaccctcatgggggtgtacctgccctgcctgcagaatatctttggggttatcctcttcctgcggctgacctggatggtgggcacagcaggtgtgctacaggccctcctcatcgtgcttatctgctgctgttgtaccctgctgacggccatctccatgagtgccatcgccaccaacggtgtggttccagctgggggctcctatttcatgatctctcgttcactggggccagaatttggaggtgctgtgggcctgtgcttctacctgggaacaacattcgcagcagccatgtacatcctgggggccatcgagatcttgctgacctacattgccccaccagctgccattttttacccatcgggtgctcatgacacgtcgaatgccactttgaacaatatgcgtgtgtatgggaccattttcctgaccttcatgaccctggtggtgtttgtgggggtcaagtatgtgaacaaatttgcctcgctcttcctggcctgtgtgatcatctccatcctctccatctatgctgggggcataaagtctatatttgaccctcccgtgtttccggtatgcatgctgggcaacaggaccctgtcccgggaccagtttgacatctgtgccaagacagctgtagtggacaatgagacagtggccacccagctatggagtttcttctgccacagccccaaccttacgaccgactcctgtgacccctacttcatgctcaacaatgtgaccgagatccctggcatccccggggcagctgctggtgtgctccaggaaaacctgtggagcgcctacctggagaagggtgacatcgtggagaagcatgggctgccctccgcagatgccccgagcctgaaggagagcctgcctctgtacgtggtcgctgacatcgccacatccttcaccgtgctggtcggcatcttcttcccttctgtaacaggcatcatggctggctcaaaccgctctggggaccttcgtgacgcccagaagtctatccctgtggggaccattctggccatcattacaacttccctcgtgtacttcagcagtgtggttctctttggtgcctgcattgagggtgtggttctccgggacaagtatggcgatggtgtcagcaggaacttggtggtgggcacactggcctggccttcaccctgggtcatcgtcatcggctccttcttttcaacgtgtggcgctggcctccagagcctcacaggggcaccacgcctattgcaggccattgccaaggacaacatcatccccttcctccgggtgtttggccacgggaaggtgaatggtgaacccacatgggcactcctcctgacggcactcatcgccgagctgggcatcctcatcgcctccctcgacatggtggcccccatcttatccatgttctttctgatgtgctacctgttcgtgaacctcgcctgtgcggtgcagacactcctgaggacccccaactggcggccccggttcaagtactatcactgggcgctgtccttcctgggcatgagtctctgcctggcccttatgtttgtctcctcctggtactatgccctggtggccatgctcatcgccggcatgatctacaaatacatcgagtaccaaggggctgagaaggagtggggtgacgggatccgaggcctgtccctgagcgctgcccgctacgcgctgttgcggctggaggaggggcctcctcacaccaagaactggcggccgcagctgctggtgctgctgaagctggacgaggacctccacgtgaagtacccgcggctcctcaccttcgcctcccagctcaaggctggcaagggcctgaccattgttggttctgtcatccaggggagcttcttggagagctatggcgaggctcaggccgccgagcagaccatcaagaacatgatggaaattgagaaggtgaagggcttctgccaggtggtggtggccagcaaggtgcgggaggggctggcccacctcatccagtcctgtggcctgggaggcatgcggcataactccgtggtgctgggctggccctacggctggcgacagagcgaggacccccgtgcctggaagaccttcattgacaccgtgcgctgcactacggctgcccacctggccctgctcgtgcccaagaacatcgccttctaccccagcaaccacgagcgctacctggagggccacatagacgtgtggtggatcgtgcacgatggtggcatgctcatgcttctgcccttcctgctgcgccagcataaggtctggaggaagtgccggatgcgcatcttcacagtggcccagatggatgacaacagcatccagatgaagaaggacctggctgtctttctgtaccatctgcgccttgaggccgaggtggaggtggtggagatgcataacagtgacatctctgcatacacctacgagcggacgctgatgatggagcagcggtcgcagatgctgcggcagatgagactgaccaagactgagcgggagcgagaagcccagctggtcaaggatcggcactcggccctgcggctggagagcctgtactcggacgaggaagatgagtctgcagtgggggctgacaagatccagatgacgtggaccagggacaagtacatgactgagacctgggaccccagccatgcccctgacaatttccgggagctggtgcacattaagccggaccaatccaatgtgcggcgcatgcacactgctgtgaagctcaatgaagtcattgtcacgcgctcccacgacgcccgcctggttctcctaaacatgcctggcccacccaggaacagtgagggcgacgagaactacatggagttcctcgaggtgctgaccgagggccttgagcgggtgctgttggtgcgcggtggtggccgtgaagtcatcaccatctactcctgagcccagtgtcatcttgtggcctggagtcgaggtcttggccaggacataacaagctgtggtctggggtaacagcctcttcccagcacccacctgccagccctgcttgcctggccctgtcctggacccagctttgctaggtctccttggaaaccaggcctgggcctcaaaatggagatggatcccaggtcttgtgggaccctgggatgtttggggactttactatctagcaccccagtaggcctgtcct

SEQ ID NO: 19188 - DNA, 406 bp, Homo sapiens
  source 1..406: mol_type = unassigned DNA
cccctgacaatttccgggagctggtgcacattaagccgatggctcatggcgacctgtgactggctacactacgtgtagggaccaatccaatgtgcggcgcatgcacactgctgtgaagctcaatgaagtcattgtcacgcgctcccacgacgcccgcctggttctcctaaacatgcctggcccacccaggaacagtgagggcgacgagaactacatggagttcctcgaggtgctgaccgagggccttgagcgggtgctgttggtgcgcggtggtggccgtgaagtcatcaccatctactcctgagcccagtgtcatcttgtggcctggagtcgaggtcttggccaggacataacaagctgtggtctggggtaacagcctcttcccagcacccacctgccagccctg

SEQ ID NO: 19189 - DNA, 588 bp, Homo sapiens
  source 1..588: mol_type = unassigned DNA
gccgcagctgctggtgctgctgaagctggacgaggacctccacgtgaagtacccgcggctcctcaccttcgcctcccagctcaaggctggcaagggcctgaccattgttggttctgtcatccaggggagcttcttggagagctatggcgaggctcaggccgccgagcagacaccgtgcgctgcactacggctgcccacctggccctgctcgtgcccaagaacatcgccttctaccccagcaaccacgagcgctacctggagggccacatagacgtgtggtggatcgtgcacgatggtggcatgctcatgcttctgcccttcctgctgcgccagcataaggtctggaggaagtgccggatgcgcatcttcacagtggcccagatggatgacaacagcatccagatgaagaaggacctggctgtctttctgtaccatctgcgccttgaggccgaggtggaggtggtggagatgcataacagtgacatctctgcatacacctacgagcggacgctgatgatggagcagcggtcgcagatgctgcggcagatgagactgaccaagactgagcgggagcgagaagcccagctg

SEQ ID NO: 19190 - DNA, 3649 bp, Homo sapiens
  source 1..3649: mol_type = unassigned DNA
atgcgagcgggcggggcgtgtcggcccggggcggcggggacagcggcggggacagcggcgggcggctgggacggcgggtgcggcggggccgagcccgcacgatgcctcacttcaccgtggtgccagtggacgggccgaggcgcggcgactatgacaacctcgaggggctcagttgggtggactacggggagcgcgccgagctggatgactcggacggacatggcaaccacagagagagcagcccttttctttcccccttggaggcttccagaggaattgactactatgacaggaacctggcactgtttgaggtagctgaggagccattttgggccacaggtttggcacacagaggctttagctaagcaggcaggctggacacgtgggcctcctctgtcttgctcttcctctcatctcctcttgtgttcctggttctcatggcagccgggctgcagttcccttggccctttcaactgaaactgcctttccagaggccactcacaatcccacccccattgctacctccagggtggttcacctctgacttccttacaacccctcagcaaggaaacgcccgcttaggatttcccaactcaggatttctcctcttccttccactcctggttcttctccaagtccatggttcttcgctctcccatggattcttccttgtctttcttggttgacccttccagctctgtccctctctagttccctgagtcctggtccatttgcagctttaggggatacgtctctggaaagattcccaaatatctgcctctgtacttgagttttatcttcttcagactcaagctgagcagtgagatctggatttaagacgtagtttaagctcctaaactctgacccatgcattcagccactgcatggctgagtaatggagactccttaatctgccttttttttctctttcttcattttgagatggagtctcactctgtcgccccaggctggagtgcagtgacgcgatctcagctcattgcaacctctgccttccaagctcagcgattctcctgcctcagcctcccgagtagctgggattacaggtgcccaccacatgcctggctaatttttgtgtttttagagacggggtttcaccgtgttggccaggctggtcttgaactcctgacttctagtgatcctcctgctcagcctctcaaagtgctggaattactgctgtgagccaccacatctggccgaggctccttaatctccacatgcccccaagggccctcgtcttcctttctcacaccaaagcaacttctccctgtgtgtaggtcagaaaggagctgacagagagggaaaagctaaatgtgggcaggaggcaggtagaagcacagcctcgagaaggctgcaggagcagggatcatcgcctagaccccggtggggctgggggacctgagctctgggaggcctcctgacctgggaaagcagcaaggttctgcggtgaaggccttggcccagccccgcctgaggatgggctggaggatcaggatcccatctccgcgattgatgaagagctggacatccgcccaaaggtatcgtctcttctgggaaagctcgtcagctacaccaacctcacccagggcgccaaagagcatgaggaggccgagagtggggagggcacccgccggagggcagccgaggcacccagcatgggcaccctcatgggggtgtacctgccctgcctgcagaatatctttggggttatcctcttcctgcggctgacctggatggtgggcacagcaggtgtgctacaggccctcctcatcgtgcttatctgctgctgttgtaccctgctgacggccatctccatgagtgccatcgccaccaacggtgtggttccagctgggggctcctatttcatgatctctcgttcactggggccagaatttggaggtgctgtgggcctgtgcttctacctgggaacaacattcgcagcagccatgtacatcctgggggccatcgagatcttgctgacctacattgccccaccagctgccattttttacccatcgggtgctcatgacacgtcgaatgccactttgaacaatatgcgtgtgtatgggaccattttcctgaccttcatgaccctggtggtgtttgtgggggtcaagtatgtgaacaaatttgcctcgctcttcctggcctgtgtgatcatctccatcctctccatctatgctgggggcataaagtctatatttgaccctcccgtgtttccggtatgcatgctgggcaacaggaccctgtcccgggaccagtttgacatctgtgccaagacagctgtagtggacaatgagacagtggccacccagctatggagtttcttctgccacagccccaaccttacgaccgactcctgtgacccctacttcatgctcaacaatgtgaccgagatccctggcatccccggggcagctgctggtgtgctccaggaaaacctgtggagcgcctacctggagaagggtgacatcgtggagaagcatgggctgccctccgcagatgccccgagcctgaaggagagcctgcctctgtacgtggtcgctgacatcgccacatccttcaccgtgctggtcggcatcttcttcccttctgtaacaggcatcatggctggctcaaaccgctctggggaccttcgtgacgcccagaagtctatccctgtggggaccattctggccatcattacaacttccctcgtgtgtatcctttcccaggcctggggcaggtggggcagaggacgggaagcgcttggcctgtgtacgttgccaggtcacatgcacagacaccccacacactcatatatagctccccttctcatgcacacatgcacatacacaccacgagactcccagctgtaggtgtcctggtagtctggctggggtgggggcacgtggtactattcagggacagtggggtggcagaggccgagttttccttgacgccgccgcagacttcagcagtgtggttctctttggtgcctgcattgagggtgtggttctccgggacaagtatggcgatggtgtcagcaggaacttggtggtgggcacactggcctggccttcaccctgggtcatcgtcatcggctccttcttttcaacgtgtggcgctggcctccagagcctcacaggggcaccacgcctattgcaggccattgccaaggacaacatcatccccttcctccgggtgtttggccacgggaaggtgaatggtgaacccacatgggcactcctcctgacggcactcatcgccgagctgggcatcctcatcgcctccctcgacatggtggcccccatcttatccatgttctttctgatgtgctacctgttcgtgaacctcgcctgtgcggtgcagacactcctgaggacccccaactggcggccccggttcaagtactatcactgggcgctgtccttcctgggcatgagtctctgcctggcccttatgtttgtctcctcctggtactatgccctggtggccatgctcatcgccggcatgatctacaaatacatcgagtaccaaggggctgagaaggagtggggtgacgggatccgaggcctgtccctgagcgctgcccgctacgcgctgttgcggctggaggaggggcctcctcacaccaagaactggcggccgc

SEQ ID NO: 19191 - DNA, 412 bp, Homo sapiens
  source 1..412: mol_type = unassigned DNA
gtttagggctcatccaaaggagagaggcctggtgaggtggaatcagggagactggtgacacccatagggatagacacaggggcggcctgagcccccaaggcgggccctgggggtgagggaggccaggctggggtctggggcccaaggtgtggaatgggggtgacaggacccagcttccttcctggtgcacacaggtgtttggccacgggaaggtgaatggtgaacccacatgggcactcctcctgacggcactcatcgccgagctgggcatcctcatcgcctccctcgacatggtggcccccatcttatccatgttctttctgatgtgctacctgttcgtgaacctcgcctgtgcggtgcagacactcctgaggacccccaactggcggccccggttcaagtactatcactg

SEQ ID NO: 19192 - DNA, 573 bp, Homo sapiens
  source 1..573: mol_type = unassigned DNA
cggctccttcttttcaacgtgtggcgctggcctccagagcctcacaggggcaccacgcctattgcaggccattgccaaggacaacatcatccccttcctccgggtgagcccctctgcactcccccatggcctggctgctcccaggccctcgcccggctggggagagagatagggaacacagatgcagcacgtcctgcccttattggcccccggggccaggcggccatccatgaggagctactgagaagtgccctgggcctggcactcacctgggcctggagctgcctggacccagaatcttcatggcctgtttagggctcatccaaaggagagaggcctggtgaggtggaatcagggagactgggcagggggatggggaaaggcttcctgaaccccagcacctccccgtggctgcgtctggtgttggaggtccagctgggagatgtggcaggctgcatggggagatgtggcctgacagggctcagcccacccctgcatttaggagcaagcctggcacctatgccaaagctataaggtgaccaatatgtccacacctccctgaggcccccagag

SEQ ID NO: 19193 - DNA, 847 bp, Homo sapiens
  source 1..847: mol_type = unassigned DNA
agtggcgggctctgggtgacggtggttcagccacctttgtctgtcgacttctagctgggcagctccttctctgtggtcagggtagccctgtggctgacgctgcagtcattgggctgaagctgttccctgagtccccaaagttgccctgcatctgcgcctctggctaggctgccccaaactacctggggtagtggggggcagctgtggtggtgacacagctacccctgcagaaaacctgtggagcgcctacctggagaagggtgacatcgtggagaagcatgggctgccctccgcagatgccccgagcctgaaggagagcctgcctctgtacgtggtcgctgacatcgccacatccttcaccgtgctggtcggcatcttcttcccttctgtaacaggcatcatggctggctcaaaccgctctggggaccttcgtgacgcccagaagtctatccctgtggggaccattctggccatcattacaacttccctcgtgtacttcagcagtgtggttctctttggtgcctgcattgagggtgtggttctccgggacaagtatggcgatggtgtcagcaggaacttggtggtgggcacactggcctggccttcaccctgggtcatcgtcatcggctccttcttttcaacgtgtggcgctggcctccagagcctcacaggggcaccacgcctattgcaggccattgccaaggacaacatcatccccttcctccgggtgtttggccacgggaaggtgaatggtgaacccacatgggcactcctcctgacggcactcatcgccgagctgggcatcctcatcgcctccctcgacatggtggcccccatcttatccatg

SEQ ID NO: 19194 - DNA, 515 bp, Homo sapiens
  source 1..515: mol_type = unassigned DNA
tctctgtggtcagggtagccctgtggctgacgctgcagtcattgggctgaagctgttccctgagtccccaaagttgccctgcatctgcgcctctggctaggctgccccaaactacctggggtagtggggggcagctgtggtggtgacacagctacccctgcagaaaacctgtggagcgcctacctggagaagggtgacatcgtggagaagcatgggctgccctccgcagatgccccgagcctgaaggagagcctgcctctgtacgtggtcgctgacatcgccacatccttcaccgtgctggtcggcatcttcttcccttctgtaacaggtatggcgatggtgtcagcaggaacttggtggtgggcacactggcctggccttcaccctgggtcatcgtcatcggctccttcttttcaacgtgtggcgctggcctccagagcctcacaggggcaccacgcctattgcaggccattgccaaggacaacatcatccccttcctccgggtgtttggccac

SEQ ID NO: 19195 - DNA, 633 bp, Homo sapiens
  source 1..633: mol_type = unassigned DNA
ctgccacagccccaaccttacgaccgactcctgtgacccctacttcatgctcaacaatgtgaccgagatccctggcatccccggggcagctgctggtgtgctccaggaaaacctgtggagcgcctacctggagaagggtgacatcgtggagaagcatgggctgccctccgcagatgccccgagcctgaaggagagcctgcctctgtacgtggtcgctgacatcgccacatccttcaccgtgctggtcggcatcttcttcccttctgtaacaggtgagccctgcctgcctacccacccagccctgtccccaatcccggggagcccctgagggagtctcatctgtttttggaggcatcatggctggctcaaaccgctctggggaccttcgtgacgcccagaagtctatccctgtggggaccattctggccatcattacaacttccctcgtgtacttcagcagtgtggttctctttggtgcctgcattgagggtgtggttctccgggacaagtatggcgatggtgtcagcaggaacttggtggtgggcacactggcctggccttcaccctgggtcatcgtcatcggctccttcttttcaacgtgtggcgctggcctccagagcctcacaggggcac

SEQ ID NO: 19196 - DNA, 868 bp, Homo sapiens
  source 1..868: mol_type = unassigned DNA
gacagcggcggggacagcggcgggcggctgggacggcgggtgcggcggggccgagcccgcacgatgcctcacttcaccgtggtgccagtggacgggccgaggcgcggcgactatgacaacctcgaggggctcagttgggtggactacggggagcgcgccgagctggatgactcggacgacctacattgccccaccagctgccattttttacccatcgggtgctcatgacacgtcgaatgccactttgaacaatatgcgtgtgtatgggaccattttcctgaccttcatgaccctggtggtgtttgtgggggtcaagtatgtgaacaaatttgcctcgctcttcctggcctgtgtgatcatctccatcctctccatctatgctgggggcataaagtctatatttgaccctcccgtgtttccggtatgcatgctgggcaacaggaccctgtcccgggaccagtttgacatctgtgccaagacagctgtagtggacaatgagacagtggccacccagctatggagtttcttctgccacagccccaaccttacgaccgactcctgtgacccctacttcatgctcaacaatgtgaccgagatccctggcatccccggggcagctgctggtgtgctccaggaaaacctgtggagcgcctacctggagaagggtgacatcgtggagaagcatgggctgccctccgcagatgccccgagcctgaaggagagcctgcctctgtacgtggtcgctgacatcgccacatccttcaccgtgctggtcggcatcttcttcccttctgtaacaggcatcatggctggctcaaaccgctctggggaccttcgtgacgcccagaagtctatccctgtggggacc

SEQ ID NO: 19197 - DNA, 891 bp, Homo sapiens
  source 1..891: mol_type = unassigned DNA
gtcttgcggggcccagcggctctgattccgtaccccccaccccaagggctggaggctggcagtaggcgtagtcagaggacgccacccgagccacgcgagggagaagagtggagatagacaagacatggcaaccacagagagagcagcccttttctttcccccttggaggcttccagaggaattgactactatgacaggaacctggcactgtttgaggaagagctggacatccgcccaaaggtatcgtctcttctgggaaagctcgtcagctacaccaacctcacccagggcgccaaagagcatgaggaggccgagagtggggagggcacccgccggagggcagccgaggcacccagcatgggcaccctcatgggggtgtacctgccctgcctgcagaatatctttggggttatcctcttcctgcggctgacctggatggtgggcacagcaggtgtgctacaggccctcctcatcgtgcttatctgctgctgttgtaccctgctgacggccatctccatgagtgccatcgccaccaacggtgtggttccagctgggggctcctatttcatgatctctcgttcactggggccagaatttggaggtgctgtgggcctgtgcttctacctgggaacaacattcgcagcagccatgtacatcctgggggccatcgagatcttgctgacctacattgccccaccagctgccattttttacccatcgggtgctcatgacacgtcgaatgccactttgaacaatatgcgtgtgtatgggaccattttcctgaccttcatgaccctggtggtgtttgtgggggtcaagtatgtgaacaaatttgcctcgctcttcctggcctgtgtgatcatctccatcctctccatctatgctgggggc

SEQ ID NO: 19198 - DNA, 1016 bp, Homo sapiens
  source 1..1016: mol_type = unassigned DNA
gaatccccagctgcctccaacaggagaggctgcagctagagggcccagggctgggacgggaccttcgcgggggtctggttcccagggtcgcggagaaatgggatgcagacgctggaaatgggaaggaggacatggcaaccacagagagagcagcccttttctttcccccttggaggcttccagaggaattgactactatgacaggaacctggcactgtttgaggtagctgaggagccattttgggccacaggaagagctggacatccgcccaaaggtatcgtctcttctgggaaagctcgtcagctacaccaacctcacccagggcgccaaagagcatgaggaggccgagagtggggagggcacccgccggagggcagccgaggcacccagcatgggcaccctcatgggggtgtacctgccctgcctgcagaatatctttggggttatcctcttcctgcggctgacctggatggtgggcacagcaggtgtgctacaggccctcctcatcgtgcttatctgctgctgttgtaccctgctgacggccatctccatgagtgccatcgccaccaacggtgtggttccagctgggggctcctatttcatgatctctcgttcactggggccagaatttggaggtgctgtgggcctgtgcttctacctgggaacaacattcgcagcagccatgtacatcctgggggccatcgagatcttgctgggtaagcagccacagaaccctgctggaggtcggcgctccctccacgagccccatgggagctctgtcagcctcagcttctcattccccagtgaactgccgtaccagtgggagaagagacctacattgccccaccagctgccattttttacccatcgggtgctcatgacacgtcgaatgccactttgaacaatatgcgtgtgtatgggaccattttcctgaccttcatgaccctggtggtgtttgtgggggtcaagtatgtgaacaaatttgcctcgctcttcctggcctgtgtgatcatct

SEQ ID NO: 19199 - DNA, 673 bp, Homo sapiens
  source 1..673: mol_type = unassigned DNA
ggggagcgcgccgagctggatgactcggacggacatggcaaccacagagagagcagcccttttctttcccccttggaggcttccagaggaattgactactatgacaggaacctggcactgtttgaggaagagctggacatccgcccaaaggtatcgtctcttctgggaaagctcgtcagctacaccaacctcacccagggcgccaaagagcatgaggaggccgagagtggggagggcacccgccggagggcagccgaggcacccagcatgggcaccctcatgggggtgtacctgccctgcctgcagaatatctttggggttatcctcttcctgcggctgacctggatggtgggcacagcaggtgtgctacaggccctcctcatcgtgcttatctgctgctgttgtaccctgctgacggccatctccatgagtgccatcgccaccaacggtgtggttccaggtcagtgagcgccacccaaggcctggtggaagagaaaaggacccagtatctgccttgacctacctgggaacccccatagcacacccctgccccaagcagttctgtagtgggctcccaatccctgatgccaggacagtgcccacgtaggagctttcctgcttgacagagttggagagtgccattgtggtttttgttaatataaaagcaatacca

SEQ ID NO: 19200 - DNA, 4670 bp, Homo sapiens
  source 1..4670: mol_type = unassigned DNA
cccggggggcgggcggaggaagtgagcgcagcggggaggaatgcgagcgggcggggcgtgtcggcccggggcggcggggacagcggcggggacagcggcgggcggctgggacggcgggtgcggcggggccgagcccgcacgatgcctcacttcaccgtggtgccagtggacgggccgaggcgcggcgactatgacaacctcgaggggctcagttgggtggactacggggagcgcgccgagctggatgactcggacggaagagctggacatccgcccaaaggtatcgtctcttctgggaaagctcgtcagctacaccaacctcacccagggcgccaaagagcatgaggaggccgagagtggggagggcacccgccggagggcagccgaggcacccagcatgggcaccctcatgggggtgtacctgccctgcctgcagaatatctttggggttatcctcttcctgcggctgacctggatggtgggcacagcaggtgtgctacaggccctcctcatcgtgcttatctgctgctgttgtaccctgctgacggccatctccatgagtgccatcgccaccaacggtgtggttccagctgggggctcctatttcatgatctctcgttcactggggccagaatttggaggtgctgtgggcctgtgcttctacctgggaacaacattcgcagcagccatgtacatcctgggggccatcgagatcttgctgacctacattgccccaccagctgccattttttacccatcgggtgctcatgacacgtcgaatgccactttgaacaatatgcgtgtgtatgggaccattttcctgaccttcatgaccctggtggtgtttgtgggggtcaagtatgtgaacaaatttgcctcgctcttcctggcctgtgtgatcatctccatcctctccatctatgctgggggcataaagtctatatttgaccctcccgtgtttccggtatgcatgctgggcaacaggaccctgtcccgggaccagtttgacatctgtgccaagacagctgtagtggacaatgagacagtggccacccagctatggagtttcttctgccacagccccaaccttacgaccgactcctgtgacccctacttcatgctcaacaatgtgaccgagatccctggcatccccggggcagctgctggtgtgctccaggaaaacctgtggagcgcctacctggagaagggtgacatcgtggagaagcatgggctgccctccgcagatgccccgagcctgaaggagagcctgcctctgtacgtggtcgctgacatcgccacatccttcaccgtgctggtcggcatcttcttcccttctgtaacaggcatcatggctggctcaaaccgctctggggaccttcgtgacgcccagaagtctatccctgtggggaccattctggccatcattacaacttccctcgtgtacttcagcagtgtggttctctttggtgcctgcattgagggtgtggttctccgggacaagtatggcgatggtgtcagcaggaacttggtggtgggcacactggcctggccttcaccctgggtcatcgtcatcggctccttcttttcaacgtgtggcgctggcctccagagcctcacaggggcaccacgcctattgcaggccattgccaaggacaacatcatccccttcctccgggtgtttggccacgggaaggtgaatggtgaacccacatgggcactcctcctgacggcactcatcgccgagctgggcatcctcatcgcctccctcgacatggtggcccccatcttatccatgttctttctgatgtgctacctgttcgtgaacctcgcctgtgcggtgcagacactcctgaggacccccaactggcggccccggttcaagtactatcactgggcgctgtccttcctgggcatgagtctctgcctggcccttatgtttgtctcctcctggtactatgccctggtggccatgctcatcgccggcatgatctacaaatacatcgagtaccaaggggctgagaaggagtggggtgacgggatccgaggcctgtccctgagcgctgcccgctacgcgctgttgcggctggaggaggggcctcctcacaccaagaactggcggccgcagctgctggtgctgctgaagctggacgaggacctccacgtgaagtacccgcggctcctcaccttcgcctcccagctcaaggctggcaagggcctgaccattgttggttctgtcatccaggggagcttcttggagagctatggcgaggctcaggccgccgagcagaccatcaagaacatgatggaaattgagaaggtgaagggcttctgccaggtggtggtggccagcaaggtgcgggaggggctggcccacctcatccagtcctgtggcctgggaggcatgcggcataactccgtggtgctgggctggccctacggctggcgacagagcgaggacccccgtgcctggaagaccttcattgacaccgtgcgctgcactacggctgcccacctggccctgctcgtgcccaagaacatcgccttctaccccagcaaccacgagcgctacctggagggccacatagacgtgtggtggatcgtgcacgatggtggcatgctcatgcttctgcccttcctgctgcgccagcataaggtctggaggaagtgccggatgcgcatcttcacagtggcccagatggatgacaacagcatccagatgaagaaggacctggctgtctttctgtaccatctgcgccttgaggccgaggtggaggtggtggagatgcataacagtgacatctctgcatacacctacgagcggacgctgatgatggagcagcggtcgcagatgctgcggcagatgagactgaccaagactgagcgggagcgagaagcccagctggtcaaggatcggcactcggccctgcggctggagagcctgtactcggacgaggaagatgagtctgcagtgggggctgacaagatccagatgacgtggaccagggacaagtacatgactgagacctgggaccccagccatgcccctgacaatttccgggagctggtgcacattaagccggaccaatccaatgtgcggcgcatgcacactgctgtgaagctcaatgaagtcattgtcacgcgctcccacgacgcccgcctggttctcctaaacatgcctggcccacccaggaacagtgagggcgacgagaactacatggagttcctcgaggtgctgaccgagggccttgagcgggtgctgttggtgcgcggtggtggccgtgaagtcatcaccatctactcctgagcccagtgtcatcttgtggcctggagtcgaggtcttggccaggacataacaagctgtggtctggggtaacagcctcttcccagcacccacctgccagccctgcttgcctggccctgtcctggacccagctttgctaggtctccttggaaaccaggcctgggcctcaaaatggagatggatcccaggtcttgtgggaccctgggatgtttggggactttactatctagcaccccagtaggcctgtcctggccagagaagactggtaggggccgagtggggtttgaaggcagccggcccggcccagcccaggagcgctatttattgcatatttattgtttggatgtcaccatcagagacgaagggaagggtagccagggagggagtccagcccagctgcctgcaggaagatctggctcagtctactatgggcagggccccccaccaagctgagccgaatggagacagctgagctgaggcctgactttttcaataaaacattgtgtagttctgggcctcctgctgccccggctctgtttcccctggcgccaagagaagaaggcggaactgaacccaggcccagagccggctccctgaggctgtgcccctttccggcaatctctggccacaacccccactggccaggccgtccctcccactggccctagggcccctcccactcccacaccagataaggacagcccagtgccgctttctctggcagtaggcaccagggctggaatggggccgcccggctccccatggcagtgggtgacgctgctgctggggctgctgctccctcctgccgcccccttctggctcctcaatgtgctcttccccccgcacaccacgcccaaggctgagctcagtaaccacacacggcccgtcatcctcggtaagcccccaccaggcccctgatgcaccacgccagaccctggggagcctgggccccagcccctggcagctgacctggccaaagcccttctgccctgcataagccccgacataagtacctgccctggtgtggggaggggccaaaagcttgtcccttagaggaatgacgtcccttctcccaccacactgtgactctcagttgtctaacccagggggggcggagtgggggacggggtgtgcctgaggtcttggctggggcatcacaagctgtggtcagtcacagccacaccagactctgggccaagccccaccactccttccttggcccccacccaccaaggacaagatgcccagcccaggatcggtgagcaggagaggcccatccatgcccggcccctattaggcccagcccccatgcccccagacctatctgttcccaccttggactttggcaataaaggagcgccagactggg

SEQ ID NO: 19201 - DNA, 3593 bp, Homo sapiens
  source 1..3593: mol_type = unassigned DNA
ctccctcctagagcctggttgcagccacttgtgcgatcccggaccttgccgcggccgcctggctcctttccgcgccatgagccgcaggttcacggtcacctcgctgccccccgcagggcccgccagaagccctgacccagagtcccgccggcattcggtcgcagacccccgccacctcccgggggaagacgtcaaaggtgatggcaaccccaaggaaagcagtcccttcatcaacagcaccgacacagagaagggaaaggagtatgatggcaagaacatggccttgtttgaggaggagatggacaccagccctatggtgtcctccttgctcagtggcctggccaactacaccaacctgccccagggaagtagggagcatgaagaggcagaaaacaatgagggtggaaaaaagaagccggtgcaggccccacgcatgggcaccttcatgggcgtgtacctgccgtgcctgcagaacatctttggcgtcatcctcttcctgcggctcacctgggtggtgggcattgcaggcatcatggagtccttctgcatggtgttcatctgctgctcctgtacgatgctcacggccatctccatgagtgcaattgcaacgaatggtgttgtgcctgctggtggctcctactacatgatttccaggtctctgggcccagagtttgggggtgccgtgggcctctgcttctacctgggcactacctttgcaggagccatgtacatcctgggcaccatcgaaatcctgctggcttacctcttcccagccatggccatcttcaaggcagaagatgccagtggggaggcagcagccatgctgaacaacatgcgtgtttacggcacctgtgtgctcacctgcatggccactgtggtgtttgtgggtgtcaagtatgtcaacaagtttgcccttgtcttcctgggttgtgtcatcctctccatcctggccatctatgctggggtcatcaagtctgccttcgacccacccaacttcccgatctgcctcctgggtaaccgcacgctgtctcgccatggctttgatgtctgtgccaagctggcttgggaaggaaatgagacggtgaccacacggctatggggccttttctgctcctctcgcttcctcaacgccacctgtgatgaatacttcacccgaaacaatgtcacagagatccagggcatccctggtgctgccagtggcctcatcaaagagaacctctggagctcctacctgaccaagggcgtgattgtggagaggagtgggatgacctcggtgggcctggccgatggcactcctatcgacatggaccacccttatgtcttcagtgatatgacctcctacttcaccctgctggttggcatctacttcccctcagtcacagggatcatggctggttctaaccgctctggggacctgagggatgcccagaagtcaatccccactggcaccatcctggccatcgccaccacctctgctgtctacatcagctccgttgttctgtttggggcctgcattgagggggtcgtcctgcgggacaagtttggcgaagctgtgaatggcaacctcgtggtgggcactctggcctggccatctccatgggtaattgtcatcggatccttcttctccacctgtggggctgggctgcagagcctcacgggggccccacgcctgctgcaggccatctcgagggatggcattgtgcccttcctgcaggtctttggccatggcaaggccaatggagagccgacctgggccctgctcctgactgcctgcatctgcgagattggcatcctcattgcatccctcgacgaggtggcccccatcctctctatgttcttcctgatgtgctacatgtttgtgaatctggcctgtgcagtgcagacgctgctgaggacacccaactggaggccacgctttcgatattaccactggaccctctccttcctgggcatgagcctctgcctggccctcatgttcatctgctcctggtattatgcactggtagccatgctcattgctggactcatctacaagtacattgagtaccgtggggcagagaaggagtggggcgatgggatacgaggtctgtctctcagtgcggctcgctatgccctcttacgcctggaggaagggcccccacacaccaagaactggaggccacagctgctggtgctggtgcgtgtggaccaagaccagaatgtggtgcacccccagctgctctcactgacctcccagctgaaggcggggaagggcctgaccatcgtgggctctgtccttgagggcacctttctggaaaatcatccacaggcccagcgggcagaagagtctatcaggcgcctgatggaggcagagaaggtgaagggcttctgccaggtggtgatctcctccaacttgcgtgatggcgtgtcccatctgatccagtccgggggcctcggggggctgcagcacaacactgtgcttgttggctggccccgcaactggcgccagaaggaagatcatcagacgtggaggaacttcattgagctggtccgggaaaccacagctggccacttagccctgctggtcaccaagaacgtttccatgtttcctgggaaccctgagcgcttctctgagggcagcatcgacgtttggtggattgtgcacgatggaggcatgctcatgctgctgcccttcctgctgcggcaccacaaggtctggcggaagtgcaagatgcgtatcttcactgtggcccagatggatgacaatagcatccagatgaagaaggatctgaccacatttctgtatcatttacgcatcactgcggaggtcgaggtggtggagatgcatgagagcgacatctcagcttacacctatgagaagacgttggtgatggagcagcgttcccagatcctcaaacagatgcatttaaccaagaatgagcgggagcgggagatccagagtatcacagatgagtcacgaggctcaatccggagaaagaatccagccaacacgcggctccgcctgaacgtcccagaagagacggctggtgacagtgaagagaagccagaggaggaggtgcagctgatccacgatcagagtgctcccagctgccccagcagctccccgtccccaggggaggagcctgagggggaaggggagacagatccggagaaggtgcatctcacctggaccaaggacaagtcggtggcagagaagaataagggccccagtcctgtctcctctgagggcatcaaggacttcttcagcatgaagccggagtgggagaacttgaaccagtccaacgtgcggcgcatgcacacggccgtgcggctgaacgaggtcatcgtgaagaaatcccgggacgccaagcttgttttgctcaacatgcctgggcctccccgcaaccgcaatggtgatgaaaactacatggagtttctcgaggtcctcacagagcacctggaccgggtgatgctggtccgcggcggcggccgcgaggtcatcaccatctactcctgagaaccaggacctgccacccgggcccgagcgcgcccggcccgcggctccggagccctcgccgcgccccccgccgctgtcaccgtttacatacagaccc

SEQ ID NO: 19202 - DNA, 401 bp, Homo sapiens
  source 1..401: mol_type = unassigned DNA
agagcctggttgcagccacttgtgcgatcccggaccttgccgcggccgcctggctcctttccgcgccatgagccgcaggttcacggtcacctcgctgccccccgcagggcccgccagaagccctgacccagagtcccgccggcattcggtcgcagacccccgccacctcccgggggaagacgtcaaagcaaatccaactgatccccacgtcttggccattcacctctgaaacttatcctgaatctggcagcatcggtcccccctctgtcatcatcgccctgctccaagcctcacatggccacgaccacatcctctccactggcctccctgcctccagtccttccctagccctcctccacagaagccccccatcacttgcaaaataaaggccaaagccttaa

SEQ ID NO: 19203 - DNA, 617 bp, Homo sapiens
  source 1..617: mol_type = unassigned DNA
agccacttgtgcgatcccggaccttgccgcggccgcctggctcctttccgcgccatgagccgcaggttcacggtcacctcgctgccccccgcagggcccgccagaagccctgacccagagtcccgccggcattcggtcgcagacccccgccacctcccgggggaagacgtcaaagtctcccctcagggggcactcatcaggggtcctctccctggctctgaggccctcgggtctggaaggaacaaggcgaatcggcttgtagtggccccagcgaggggaggaggaggaggaggaggaggaggaggaggaagaggaggaggaggaagaggaggaggaagaggaggaggaggagaaggaggaggagaagcctccccagaccgccaggggtcgctgccgagccgcagcaaatccaactgatccccacgtcttggccattcacctctgaaacttatcctgaatctggcagcatcggtcccccctctgtcatcatcgccctgctccaagcctcacatggccacgaccacatcctctccactggcctccctgcctccagtccttccctagccctcctccacagaagccccccatcacttgcaaaataaaggccaaagccttaa

SEQ ID NO: 19204 - DNA, 248 bp, Homo sapiens
  source 1..248: mol_type = unassigned DNA
ggttcacggtcacctcgctgccccccgcagggcccgccagaagccctgacccagagtcccgccggcattcggtcgcagacccccgccacctcccgggggaagacgtcaaaggagctaataatcagaggctgctgaggggcatggatatgactgcatccttgtctcttctatggaggcaagacgacttttataagttctatcaatgaagagagtcctaaactggagtaaagcaaactggatgctagacc

SEQ ID NO: 19205 - DNA, 411 bp, Homo sapiens
  source 1..411: mol_type = unassigned DNA
ggcattcggtcgcagacccccgccacctcccgggggaagacgtcaaagtggccccagcgaggggaggaggaggaggaggaggaggaggaggaggaagaggaggaggaggaagaggaggaggaagaggaggaggaggagaaggaggaggagaagcctccccagaccgccaggggtcgctgccgagccgcagcaaatccaactgatccccacgtcttggccattcacctctgaaacttatcctgaatctggcagcatcggtcccccctctgtcatcatcgccctgctccaagcctcacatggccacgaccacatcctctccactggcctccctgcctccagtccttccctagccctcctccacagaagccccccatcacttgcaaaataaaggccaaagccttaagtctgtca

SEQ ID NO: 19206 - DNA, 391 bp, Homo sapiens
  source 1..391: mol_type = unassigned DNA
ggttgggggcgtcttcctcgcgggccctgtgcagggtcttgtaatggaagttacacgcagggcacagagtataggggaggggaaagatccttctggccttcggtggagaagtagcatcctgggcgcgtgcacagtctcccctcagggggcactcatcaggggtcctctccctggctctgaggccctcgggtctggaaggaacaaggcgaatcggcttgtagtggccccagcgaggggaggaggaggaggaggaggaggaggaggaggaagaggaggaggaggaagaggaggaggaagaggaggaggaggagaaggaggaggagaagcctccccagaccgccaggggtcgctgccgagccgcagcaaatccaactgatccccacgtcttggc

SEQ ID NO: 19207 - DNA, 571 bp, Homo sapiens
  source 1..571: mol_type = unassigned DNA
agtttttgtgcaagggggccactagtcgggctctgcccgcccctcatcttctcttctctctccctcccgctctccccccaaaaccccgccagtggctcacgcctcctgcatacgggatgaggtgatggcaaccccaaggaaagcagtcccttcatcaacagcaccgacacagagaagggaaaggagtatgatggcaagaacatggccttgtttgaggaggagatggacaccagccctatggtgtcctccttgctcagtggcctggccaactacaccaacctgccccagggaagtagggagcatgaagaggcagaaaacaatgagggtggaaaaaagaagccggtgcaggccccacgcatgggcaccttcatgggcgtgtacctgccgtgcctgcagaacatctttggcgtcatcctcttcctgcggctcacctgggtggtgggcattgcaggcatcatggagtccttctgcatggtgttcatctgctgctcctgtacgatgctcacggccatctccatgagtgcaattgcaacgaatggtgttgtgcctgctggtggctcctactacatga

SEQ ID NO: 19208 - DNA, 1455 bp, Homo sapiens
  source 1..1455: mol_type = unassigned DNA
gtgtgcgagtgtgtgtgcgccgggcgggcgggcactgcagcttcttcctccgtggagcggagagcgagacagagctacagcgaacgagagagcggcgaaggcgggtagaggggcgcgggcgaggcggcgcagccatccccggaccaggggccgcgccgccaccatgctaaacaacctgacggactgcgaggacggcgatgggggagccaacccgggtgatggcaaccccaaggaaagcagtcccttcatcaacagcaccgacacagagaagggaaaggagtatgatggcaagaacatggccttgtttgaggaggagatggacaccagccctatggtgtcctccttgctcagtggcctggccaactacaccaacctgccccagggaagtagggagcatgaagaggcagaaaacaatgagggtggaaaaaagaagccggtgcaggccccacgcatgggcaccttcatgggcgtgtacctgccgtgcctgcagaacatctttggcgtcatcctcttcctgcggctcacctgggtggtgggcattgcaggcatcatggagtccttctgcatggtgttcatctgctgctcctgtacgatgctcacggccatctccatgagtgcaattgcaacgaatggtgttgtgcctggcttacctcttcccagccatggccatcttcaaggcagaagatgccagtggggaggcagcagccatgctgaacaacatgcgtgtttacggcacctgtgtgctcacctgcatggccactgtggtgtttgtgggtgtcaagtatgtcaacaagtttgcccttgtcttcctgggttgtgtcatcctctccatcctggccatctatgctggggtcatcaagtctgccttcgacccacccaacttcccgtgagtgctgctgctctgagcccaaggaatcgtcctcctacctccctggccctgtttcagagtctctgccaaactccccctccctgcccctcagaatctcagagtggtgtgggttgggagtagcttcccttgggagggaaaatctctcttagtttgggggcaatctcttcagagtgaggtaacttttctggaggagggaacaatttaccttgtaagagtcaacttcttgctggtagggtggacttaggaagaattaagtgggaatgagttccaaagcaatgaatgctgtctgtggtagggaaacctttcctgggtggggacaacctcctggaatgggacaatctcctagtgttggacaactcctccaggatgggaaaagacacagaagtctacagggtccagggactcagatccaagtccactccatccactgctcagaggtggagggcggcccccgagaccgctgtccacggtgctgaaacacagcattgcactaatgcggtgcttctccaccttggctgcttattagaatcacttggggagcttaagaaaaaaaaaaaaaagccaat

SEQ ID NO: 19209 - DNA, 1947 bp, Homo sapiens
  source 1..1947: mol_type = unassigned DNA
gtgtgcgagtgtgtgtgcgccgggcgggcgggcactgcagcttcttcctccgtggagcggagagcgagacagagctacagcgaacgagagagcggcgaaggcgggtagaggggcgcgggcgaggcggcgcagccatccccggaccaggggccgcgccgccaccatgctaaacaacctgacggactgcgaggacggcgatgggggagccaacccgggtgatggcaaccccaaggaaagcagtcccttcatcaacagcaccgacacagagaagggaaaggagtatgatggcaagaacatggccttgtttgaggtgggctgctagggctgttgggcccccacctacaattcattatcctgattcatcagctgctctctccctccctccctagggagcaataccctcgtctccacccctcccttgagtctaccttcttccttgagcctccccatccctccttctccctcctgggatttactccctctgctccctgccctctcctcatcctaccattcttacccctgttctcctcacctgttcctcctcctttcccatctcatcccaacctgaatagtttcgtgctccttgtccccatctcttcctctgcccttcgccacccagctcactccacttgctcccccagcctcctagcactgacaccctccctccataggaggagatggacaccagccctatggtgtcctccttgctcagtggcctggccaactacaccaacctgccccagggaagtagggagcatgaagaggcagaaaacaatgagggtggaaaaaagaagccggtgcaggccccacgcatgggcaccttcatgggcgtgtacctgccgtgcctgcagaacatctttggcgtcatcctcttcctgcggctcacctgggtggtgggcattgcaggcatcatggagtccttctgcatggtgttcatctgctgctcctgtacgatgctcacggccatctccatgagtgcaattgcaacgaatggtgttgtgcctgctggtggctcctactacatgatttccaggtctctgggcccagagtttgggggtgccgtgggcctctgcttctacctgggcactacctttgcaggagccatgtacatcctgggcaccatcgaaatcctgctggcttacctcttcccagccatggccatcttcaaggcagaagatgccagtggggaggcagcagccatgctgaacaacatgcgtgtttacggcacctgtgtgctcacctgcatggccactgtggtgtttgtgggtgtcaagtatgtcaacaagtttgcccttgtcttcctgggttgtgtcatcctctccatcctggccatctatgctggggtcatcaagtctgccttcgacccacccaacttcccgtgagtgctgctgctctgagcccaaggaatcgtcctcctacctccctggccctgtttcagagtctctgccaaactccccctccctgcccctcagaatctcagagtggtgtgggttgggagtagcttcccttgggagggaaaatctctcttagtttgggggcaatctcttcagagtgaggtaacttttctggaggagggaacaatttaccttgtaagagtcaacttcttgctggtagggtggacttaggaagaattaagtgggaatgagttccaaagcaatgaatgctgtctgtggtagggaaacctttcctgggtggggacaacctcctggaatgggacaatctcctagtgttggacaactcctccaggatgggaaaagacacagaagtctacagggtccagggactcagatccaagtccactccatccactgctcagaggtggagggcggcccccgagaccgctgtccacggtgctgaaacacagcattgcactaatgcggtgcttctccaccttggctgcttattagaatcacttggggagcttaagaaaaaaaaaaaaaagccaat

SEQ ID NO: 19210 - DNA, 1693 bp, Homo sapiens
  source 1..1693: mol_type = unassigned DNA
gtgtgcgagtgtgtgtgcgccgggcgggcgggcactgcagcttcttcctccgtggagcggagagcgagacagagctacagcgaacgagagagcggcgaaggcgggtagaggggcgcgggcgaggcggcgcagccatccccggaccaggggccgcgccgccaccatgctaaacaacctgacggactgcgaggacggcgatgggggagccaacccgggtgatggcaaccccaaggaaagcagtcccttcatcaacagcaccgacacagagaagggaaaggagtatgatggcaagaacatggccttgtttgaggaggagatggacaccagccctatggtgtcctccttgctcagtggcctggccaactacaccaacctgccccagggaagtagggagcatgaagaggcagaaaacaatgagggtggaaaaaagaagccggtgcaggccccacgcatgggcaccttcatgggcgtgtacctgccgtgcctgcagaacatctttggcgtcatcctcttcctgcggctcacctgggtggtgggcattgcaggcatcatggagtccttctgcatggtgttcatctgctgctcctgtacgatgctcacggccatctccatgagtgcaattgcaacgaatggtgttgtgcctgctggtggctcctactacatgatttccaggtctctgggcccagagtttgggggtgccgtgggcctctgcttctacctgggcactacctttgcaggagccatgtacatcctgggcaccatcgaaatcctgctgagtctcactctgttgcccaggctggagggcagtggtgcagtcactgacagcctcgacttcccaggttcaaatgatcccccccaccagttcagcctcccaagtagctggcttacctcttcccagccatggccatcttcaaggcagaagatgccagtggggaggcagcagccatgctgaacaacatgcgtgtttacggcacctgtgtgctcacctgcatggccactgtggtgtttgtgggtgtcaagtatgtcaacaagtttgcccttgtcttcctgggttgtgtcatcctctccatcctggccatctatgctggggtcatcaagtctgccttcgacccacccaacttcccgtgagtgctgctgctctgagcccaaggaatcgtcctcctacctccctggccctgtttcagagtctctgccaaactccccctccctgcccctcagaatctcagagtggtgtgggttgggagtagcttcccttgggagggaaaatctctcttagtttgggggcaatctcttcagagtgaggtaacttttctggaggagggaacaatttaccttgtaagagtcaacttcttgctggtagggtggacttaggaagaattaagtgggaatgagttccaaagcaatgaatgctgtctgtggtagggaaacctttcctgggtggggacaacctcctggaatgggacaatctcctagtgttggacaactcctccaggatgggaaaagacacagaagtctacagggtccagggactcagatccaagtccactccatccactgctcagaggtggagggcggcccccgagaccgctgtccacggtgctgaaacacagcattgcactaatgcggtgcttctccaccttggctgcttattagaatcacttggggagcttaagaaaaaaaaaaaaaagccaat

SEQ ID NO: 19211 - DNA, 1224 bp, Homo sapiens
  source 1..1224: mol_type = unassigned DNA
gtgtgcgagtgtgtgtgcgccgggcgggcgggcactgcagcttcttcctccgtggagcggagagcgagacagagctacagcgaacgagagagcggcgaaggcgggtagaggggcgcgggcgaggcggcgcagccatccccggaccaggggccgcgccgccaccatgctaaacaacctgacggactgcgaggacggcgatgggggagccaacccgggtgatggcaaccccaaggaaagcagtcccttcatcaacagcaccgacacagagaagggaaaggagtatgatggcaagaacatggccttgtttgaggaggagatggacaccagccctatggtgtcctccttgctcagtggcctggccaactacaccaacctgccccagggaagtagggagcatgaagaggcagaaaacaatgagggtggaaaaaagaagccggtgcaggccccacgcatgggcaccttcatgggcgtgtacctgccgtgcctgcagaacatctttggcgtcatcctcttcctgcggctcacctgggtggtgggcattgcaggcatcatggagtccttctgcatggtgttcatctgctgctcctgtacgatgctcacggccatctccatgagtgcaattgcaacgaatggtgttgtgcctgctggtggctcctactacatgatttccagattgtctggttggcaagagcaaagtttccgttgatgaaacagacatcccacaacaaaaacccaagttttctgtgctacatgtgcaatatttgttatgaatgttatcacaagtcattcatcaagttatctttataatcactgtagttagatgtttcatgtccattcaagtgacttttattctgagtgcaatatttcaatagccttgtagtgataactagtgttgcttttgttttagatgatctatgtgcagggcaatgcaatgaagttgaaaacccttgtaaataggagaggttgcaaaccaaatcaagagtatttattactattactgctattattattaggcctgcctttaattttcagtgtaagtgttcagtatgccgcatcctgcctcagtattgatcttgtgttctttgtgccaatatgaaaaggagagggttggttctttcctttattgttgaatgctcccatttaatgctttatggcttttactgtgttacttttttagactcccgtctgcacaaaatgcaataaaaataattttattataccctt

SEQ ID NO: 19212 - DNA, 2445 bp, Homo sapiens
  source 1..2445: mol_type = unassigned DNA
gtgtgcgagtgtgtgtgcgccgggcgggcgggcactgcagcttcttcctccgtggagcggagagcgagacagagctacagcgaacgagagagcggcgaaggcgggtagaggggcgcgggcgaggcggcgcagccatccccggaccaggggccgcgccgccaccatgctaaacaacctgacggactgcgaggacggcgatgggggagccaacccgggtgatggcaaccccaaggaaagcagtcccttcatcaacagcaccgacacagagaagggaaaggagtatgatggcaagaacatggccttgtttgaggaggagatggacaccagccctatggtgtcctccttgctcagtggcctggccaactacaccaacctgccccagggaagtagggagcatgaagaggcagaaaacaatgagggtggaaaaaagaagccggtgcaggccccacgcatgggcaccttcatgggcgtgtacctgccgtgcctgcagaacatctttggcgtcatcctcttcctgcggctcacctgggtggtgggcattgcaggcatcatggagtccttctgcatggtgttcatctgctgctcctgtacgatgctcacggccatctccatgagtgcaattgcaacgaatggtgttgtgcctgctggtggctcctactacatgatttccaggtctctgggcccagagtttgggggtgccgtgggcctctgcttctacctgggcactacctttgcaggagccatgtacatcctgggcaccatcgaaatcctgctgagacgcgagcaacctcttctcatcggctcttatgcaagttggggccaggataggggaggggtgctcctcaagaggaagaaaccgagaggcccgcgccccaccgaggaagccccgccccggtgccttcgctggggagcaggcgtctctcctcagtcggcttgtcgcctgctccccgtatcccatggctcctcgccaaagactgaaattgtggagctggagggcgccccctccccggagtttcctccctgggacaagtgagggaggagggggccgattctggtttaggggccggacccactgagaggccccagagccgcccgtgatgttcctcccccgtccccatctggcagctcctgtctcgcctgagggacccagccgccttctccgtgctctggggccgggcctcgctgcttagcagcggcctctagctccgtctcccggggacctgggcctgagggagggctggagtcgcacgcgctttgtccttagcgcctgtctgctctcctctaactaggacccagggcctttggcttccccagctcatccttggcccttccgctccaccagcctggtctgaggcgtgctctgtccttagagaaggcgcggtggccgggttcccttcccctagggcacattactaagggggtcaggcactgcatgctcgttccagcaccatctgggactgggtacagtacctccagccccagggccctgacctgcgcacctagcttgacatctcacgcacctcccagagctggcgccactgagtaatccggacctcaccacctcttttcctttgagcccaaggcagagctggagctggcgccacccagacagcgtcaggtgtggctggggtaggtttggaggtctgccagttacaccaagtcccctctgagattcgatcaggggactggatagattctttcaggtactcaatcaggaagctggaggtgttagacaccagccccctgcatccttcagtagacctccctctgaacaccacagccaggtcctgccttctgggggcctgaatattccagagctgatgtgatgggctgtgcagaagggggctgtatcaacatcaattagggaaccaaagttgcactatctgggcccagattgtctggttggcaagagcaaagtttccgttgatgaaacagacatcccacaacaaaaacccaagttttctgtgctacatgtgcaatatttgttatgaatgttatcacaagtcattcatcaagttatctttataatcactgtagttagatgtttcatgtccattcaagtgacttttattctgagtgcaatatttcaatagccttgtagtgataactagtgttgcttttgttttagatgatctatgtgcagggcaatgcaatgaagttgaaaacccttgtaaataggagaggttgcaaaccaaatcaagagtatttattactattactgctattattattaggcctgcctttaattttcagtgtaagtgttcagtatgccgcatcctgcctcagtattgatcttgtgttctttgtgccaatatgaaaaggagagggttggttctttcctttattgttgaatgctcccatttaatgctttatggcttttactgtgttacttttttagactcccgtctgcacaaaatgcaataaaaataattttattataccctt

SEQ ID NO: 19213 - DNA, 6061 bp, Homo sapiens
  source 1..6061: mol_type = unassigned DNA
gtgtgcgagtgtgtgtgcgccgggcgggcgggcactgcagcttcttcctccgtggagcggagagcgagacagagctacagcgaacgagagagcggcgaaggcgggtagaggggcgcgggcgaggcggcgcagccatccccggaccaggggccgcgccgccaccatgctaaacaacctgacggactgcgaggacggcgatgggggagccaacccgggtgatggcaaccccaaggaaagcagtcccttcatcaacagcaccgacacagagaagggaaaggagtatgatggcaagaacatggccttgtttgaggaggagatggacaccagccctatggtgtcctccttgctcagtggcctggccaactacaccaacctgccccagggaagtagggagcatgaagaggcagaaaacaatgagggtggaaaaaagaagccggtgcaggccccacgcatgggcaccttcatgggcgtgtacctgccgtgcctgcagaacatctttggcgtcatcctcttcctgcggctcacctgggtggtgggcattgcaggcatcatggagtccttctgcatggtgttcatctgctgctcctgtacgatgctcacggccatctccatgagtgcaattgcaacgaatggtgttgtgcctgctggtggctcctactacatgatttccaggtctctgggcccagagtttgggggtgccgtgggcctctgcttctacctgggcactacctttgcaggagccatgtacatcctgggcaccatcgaaatcctgctggcttacctcttcccagccatggccatcttcaaggcagaagatgccagtggggaggcagcagccatgctgaacaacatgcgtgtttacggcacctgtgtgctcacctgcatggccactgtggtgtttgtgggtgtcaagtatgtcaacaagtttgcccttgtcttcctgggttgtgtcatcctctccatcctggccatctatgctggggtcatcaagtctgccttcgacccacccaacttcccgatctgcctcctgggtaaccgcacgctgtctcgccatggctttgatgtctgtgccaagctggcttgggaaggaaatgagacggtgaccacacggctatggggccttttctgctcctctcgcttcctcaacgccacctgtgatgaatacttcacccgaaacaatgtcacagagatccagggcatccctggtgctgccagtggcctcatcaaagagaacctctggagctcctacctgaccaagggcgtgattgtggagaggagtgggatgacctcggtgggcctggccgatggcactcctatcgacatggaccacccttatgtcttcagtgatatgacctcctacttcaccctgctggttggcatctacttcccctcagtcacagggatcatggctggttctaaccgctctggggacctgagggatgcccagaagtcaatccccactggcaccatcctggccatcgccaccacctctgctgtctacatcagctccgttgttctgtttggggcctgcattgagggggtcgtcctgcgggacaagtttggcgaagctgtgaatggcaacctcgtggtgggcactctggcctggccatctccatgggtaattgtcatcggatccttcttctccacctgtggggctgggctgcagagcctcacgggggccccacgcctgctgcaggccatctcgagggatggcattgtgcccttcctgcaggtctttggccatggcaaggccaatggagagccgacctgggccctgctcctgactgcctgcatctgcgagattggcatcctcattgcatccctcgacgaggtggcccccatcctctctatgttcttcctgatgtgctacatgtttgtgaatctggcctgtgcagtgcagacgctgctgaggacacccaactggaggccacgctttcgatattaccactggaccctctccttcctgggcatgagcctctgcctggccctcatgttcatctgctcctggtattatgcactggtagccatgctcattgctggactcatctacaagtacattgagtaccgtggggcagagaaggagtggggcgatgggatacgaggtctgtctctcagtgcggctcgctatgccctcttacgcctggaggaagggcccccacacaccaagaactggaggccacagctgctggtgctggtgcgtgtggaccaagaccagaatgtggtgcacccccagctgctctcactgacctcccagctgaaggcggggaagggcctgaccatcgtgggctctgtccttgagggcacctttctggaaaatcatccacaggcccagcgggcagaagagtctatcaggcgcctgatggaggcagagaaggtgaagggcttctgccaggtggtgatctcctccaacttgcgtgatggcgtgtcccatctgatccagtccgggggcctcggggggctgcagcacaacactgtgcttgttggctggccccgcaactggcgccagaaggaagatcatcagacgtggaggaacttcattgagctggtccgggaaaccacagctggccacttagccctgctggtcaccaagaacgtttccatgtttcctgggaaccctgagcgcttctctgagggcagcatcgacgtttggtggattgtgcacgatggaggcatgctcatgctgctgcccttcctgctgcggcaccacaaggtctggcggaagtgcaagatgcgtatcttcactgtggcccagatggatgacaatagcatccagatgaagaaggatctgaccacatttctgtatcatttacgcatcactgcggaggtcgaggtggtggagatgcatgagagcgacatctcagcttacacctatgagaagacgttggtgatggagcagcgttcccagatcctcaaacagatgcatttaaccaagaatgagcgggagcgggagatccagagtatcacagatgagtcacgaggctcaatccggagaaagaatccagccaacacgcggctccgcctgaacgtcccagaagagacggctggtgacagtgaagagaagccagaggaggaggtgcagctgatccacgatcagagtgctcccagctgccccagcagctccccgtccccaggggaggagcctgagggggaaggggagacagatccggagaaggtgcatctcacctggaccaaggacaagtcggtggcagagaagaataagggccccagtcctgtctcctctgagggcatcaaggacttcttcagcatgaagccggagtgggagaacttgaaccagtccaacgtgcggcgcatgcacacggccgtgcggctgaacgaggtcatcgtgaagaaatcccgggacgccaagcttgttttgctcaacatgcctgggcctccccgcaaccgcaatggtgatgaaaactacatggagtttctcgaggtcctcacagagcacctggaccgggtgatgctggtccgcggcggcggccgcgaggtcatcaccatctactcctgagaaccaggacctgccacccgggcccgagcgcgcccggcccgcggctccggagccctcgccgcgccccccgccgctgtcaccgtttacatacagaccctgtgcccgtgtcctggccccttaccccgctgcctgaagcccggaggccacgcctgttggggctgattcggagagggcgccccgccgcgcagagaccagagctcctcagtgccagtttggcccctgggtcttcgctgccctttttctaagcccggcctcgtctcgccggaggagacgctgcaataaaggttgggagaaggcgcggaaaggagaggagctggggccttggggacccccaggtagtccatgcggcccattcctccccttcccactcccgccgcggtcctcgctctgcgctcctccggcgctgctccctggctcccggcggcccggaggcccgcggggtgggaaggccgcgcttgccgtctccgccgccccttctcgccgagccgtggggcgcgggcggccgagcctatacatagtgtacaggagacatcgcgtgtatttttaacgtccccatatttatgtgactagaagcgcaacagacttctcgccatagtcgagctctcccgctgggggcactgcggggaggcgaggcctcgggaagctgaattttccttgacgtccaagagtttgagagcgaaagtgctttaggcccaggcgggggtcgtggcctcgttccctcgacacctccgtcctgctctcgcctcttcgccctttccgcgcgcccttggcttcccaccctcctctccagtccttttccgagatgaggtgagacaagggtccaacttttcctggattcgcctcccagcggacgtgagcttccactgcggctgcagagacgcgagcaacctcttctcatcggctcttatgcaagttggggccaggataggggaggggtgctcctcaagaggaagaaaccgagaggcccgcgccccaccgaggaagccccgccccggtgccttcgctggggagcaggcgtctctcctcagtcggcttgtcgcctgctccccgtatcccatggctcctcgccaaagactgaaattgtggagctggagggcgccccctccccggagtttcctccctgggacaagtgagggaggagggggccgattctggtttaggggccggacccactgagaggccccagagccgcccgtgatgttcctcccccgtccccatctggcagctcctgtctcgcctgagggacccagccgccttctccgtgctctggggccgggcctcgctgcttagcagcggcctctagctccgtctcccggggacctgggcctgagggagggctggagtcgcacgcgctttgtccttagcgcctgtctgctctcctctaactaggacccagggcctttggcttccccagctcatccttggcccttccgctccaccagcctggtctgaggcgtgctctgtccttagagaaggcgcggtggccgggttcccttcccctagggcacattactaagggggtcaggcactgcatgctcgttccagcaccatctgggactgggtacagtacctccagccccagggccctgacctgcgcacctagcttgacatctcacgcacctcccagagctggcgccactgagtaatccggacctcaccacctcttttcctttgagcccaaggcagagctggagctggcgccacccagacagcgtcaggtgtggctggggtaggtttggaggtctgccagttacaccaagtcccctctgagattcgatcaggggactggatagattctttcaggtactcaatcaggaagctggaggtgttagacaccagccccctgcatccttcagtagacctccctctgaacaccacagccaggtcctgccttctgggggcctgaatattccagagctgatgtgatgggctgtgcagaagggggctgtatcaacatcaattagggaaccaaagttgcactatctgggcccagattgtctggttggcaagagcaaagtttccgttgatgaaacagacatcccacaacaaaaacccaagttttctgtgctacatgtgcaatatttgttatgaatgttatcacaagtcattcatcaagttatctttataatcactgtagttagatgtttcatgtccattcaagtgacttttattctgagtgcaatatttcaatagccttgtagtgataactagtgttgcttttgttttagatgatctatgtgcagggcaatgcaatgaagttgaaaacccttgtaaataggagaggttgcaaaccaaatcaagagtatttattactattactgctattattattaggcctgcctttaattttcagtgtaagtgttcagtatgccgcatcctgcctcagtattgatcttgtgttctttgtgccaatatgaaaaggagagggttggttctttcctttattgttgaatgctcccatttaatgctttatggcttttactgtgttacttttttagactcccgtctgcacaaaatgcaataaaaataattttattatacccttca

SEQ ID NO: 19214 - DNA, 583 bp, Homo sapiens
  source 1..583: mol_type = unassigned DNA
gtgcgagtgtgtgtgcgccgggcgggcgggcactgcagcttcttcctccgtggagcggagagcgagacagagctacagcgaacgagagagcggcgaaggcgggtagaggggcgcgggcgaggcggcgcagccatccccggaccaggggccgcgccgccaccatgctaaacaacctgacggactgcgaggacggcgatgggggagccaacccgggtgatggcaaccccaaggaaagcagtcccttcatcaacagcaccgacacagagaagggaaaggagtatgatggcaagaacatggccttgtttgagcctcctagcactgacaccctccctccataggaggagatggacaccagccctatggtgtcctccttgctcagtggcctggccaactacaccaacctgccccagggaagtagggagcatgaagaggcagaaaacaatgagggtggaaaaaagaagccggtgcaggccccacgcatgggcaccttcatgggcgtgtacctgccgtgcctgcagaacatctttggcgtcatcctcttcctgcggctcacctgggtggtgggcattgcaggcatcatgga

SEQ ID NO: 19215 - DNA, 1549 bp, Homo sapiens
  source 1..1549: mol_type = unassigned DNA
gtgcgccgggcgggcgggcactgcagcttcttcctccgtggagcggagagcgagacagagctacagcgaacgagagagcggcgaaggcgggtagaggggcgcgggcgaggcggcgcagccatccccggaccaggggccgcgccgccaccatgctaaacaacctgacggactgcgaggacggcgatgggggagccaacccgggtgatggcaaccccaaggaaagcagtcccttcatcaacagcaccgacacagagaagggaaaggagtatgatggcaagaacatggccttgtttgaggaggagatggacaccagccctatggtgtcctccttgctcagtggcctggccaactacaccaacctgccccagggaagtagggagcatgaagaggcagaaaacaatgagggtggaaaaaagaagccggtgcaggccccacgcatgggcaccttcatgggcgtgtacctgccgtgcctgcagaacatctttggcgtcatcctcttcctgcggctcacctgggtggtgggcattgcaggcatcatggagtccttctgcatggtgttcatctgctgctcctgtacgatgctcacggccatctccatgagtgcaattgcaacgaatggtgttgtgcctgctggtggctcctactacatgatttccaggtctctgggcccagagtttgggggtgccgtgggcctctgcttctacctgggcactacctttgcaggagccatgtacatcctgggcaccatcgaaatcctgctggcttacctcttcccagccatggccatcttcaaggcagaagatgccagtggggaggcagcagccatgctgaacaacatgcgtgtttacggcacctgtgtgctcacctgcatggccactgtggtgtttgtgggtgtcaagtatgtcaacaagtttgcccttgtcttcctgggttgtgtcatcctctccatcctggccatctatgctggggtcatcaagtctgccttcgacccacccaacttcccgtgagtgctgctgctctgagcccaaggaatcgtcctcctacctccctggccctgtttcagagtctctgccaaactccccctccctgcccctcagaatctcagagtggtgtgggttgggagtagcttcccttgggagggaaaatctctcttagtttgggggcaatctcttcagagtgaggtaacttttctggaggagggaacaatttaccttgtaagagtcaacttcttgctggtagggtggacttaggaagaattaagtgggaatgagttccaaagcaatgaatgctgtctgtggtagggaaacctttcctgggtggggacaacctcctggaatgggacaatctcctagtgttggacaactcctccaggatgggaaaagacacagaagtctacagggtccagggactcagatccaagtccactccatccactgctcagaggtggagggcggcccccgagaccgctgtccacggtgctgaaacacagcattgcactaatgcggtgcttctccaccttggctgcttattagaatcacttggggagctt

SEQ ID NO: 19216 - DNA, 1105 bp, Homo sapiens
  source 1..1105: mol_type = unassigned DNA
tcttcctccgtggagcggagagcgagacagagctacagcgaacgagagagcggcgaaggcgggtagaggggcgcgggcgaggcggcgcagccatccccggaccaggggccgcgccgccaccatgctaaacaacctgacggactgcgaggacggcgatgggggagccaacccgggtgatggcaaccccaaggaaagcagtcccttcatcaacagcaccgacacagagaagggaaaggagtatgatggcaagaacatggccttgtttgaggaggagatggacaccagccctatggtgtcctccttgctcagtggcctggccaactacaccaacctgccccagggaagtagggagcatgaagaggcagaaaacaatgagggtggaaaaaagaagccggtgcaggccccacgcatgggcaccttcatgggcgtgtacctgccgtgcctgcagaacatctttggcgtcatcctcttcctgcggctcacctgggtggtgggcattgcaggcatcatggagtccttctgcatggtgttcatctgctgctcctgtacgatgctcacggccatctccatgagtgcaattgcaacgaatggtgttgtgcctgctggtggctcctactacatgatttccaggtctttggccatggcaaggccaatggagagccgacctgggccctgctcctgactgcctgcatctgcgagattggcatcctcattgcatccctcgacgaggtggcccccatcctctctatgttcttcctgatgtgctacatgtttgtgaatctggcctgtgcagtgcagacgctgctgaggacacccaactggaggccacgctttcgatattaccactggaccctctccttcctgggcatgagcctctgcctggccctcatgttcatctgctcctggtattatgcactggtagccatgctcattgctggactcatctacaagtacattgagtaccgtggggcagagaaggagtggggcgatgggatacgaggtctgtctctcagtgcggctcgctatgccctcttacgcctggaggaagggcccccacacaccaagaactggaggccacagctgctggtgctggtgcgtgtggacc

SEQ ID NO: 19217 - DNA, 100 bp, Homo sapiens
  source 1..100: mol_type = unassigned DNA
ccgcgccgccaccatgctaaacaacctgacggactgcgaggacggcgatgggggagccaacccggatccctgacccctctcccttctcaggtgatggcaa

SEQ ID NO: 19218 - DNA, 100 bp, Homo sapiens
  source 1..100: mol_type = unassigned DNA
cacaagtgatgcagctcattgatggaaatgataaggacgatgctcacggccatctccatgagtgcaattgcaacgaatggtgttgtgcctgctggtggct

SEQ ID NO: 19219 - DNA, 100 bp, Homo sapiens
  source 1..100: mol_type = unassigned DNA
ttgagaagaaggacttggcaggagtagaagttggaacaggtccagggagcagctcagcagaagagaacctacgatgctcacggccatctccatgagtgca

SEQ ID NO: 19220 - DNA, 363 bp, Homo sapiens
  source 1..363: mol_type = unassigned DNA
ggagaggagtgggatgacctcggtgggcctggccgatggcactcctatcgacatggaccacccttatgtcttcagtgatatgacctcctacttcaccctgctggttggcatctacttcccctcagtcacagggatcatggctggttctaaccgctctggggacctgagggatgcccagaagtcaatccccactggcaccatcctggccatcgccaccacctctgctgtctgtatcctgcacagctgtgctgggaccaccctcgggggagggcaagagggagggcagctgaacttgctgccttacctgctggtgcaggaagggtggggagggggaggactgaaccgtggggattctcctttatc

SEQ ID NO: 19221 - DNA, 432 bp, Homo sapiens
  source 1..432: mol_type = unassigned DNA
ggcctggttttcagtatcaggaaattagagaattattttatcaaggaaaaaacaatggaacatttggggctctgcctcccctgtcacccttacagaacttagtcctgtggcaggcacacagttggttctgtagttggtatggagacctgccctggaaatccaggcagcactgctcacctggcatctcctgtccacatcattccaggtttggcgaagctgtgaatggcaacctcgtggtgggcactctggcctggccatctccatgggtaattgtcatcggatccttcttctccacctgtggggctgggctgcagagcctcacgggggccccacgcctgctgcaggccatctcgagggatggcattgtgcccttcctgcaggtctttggccatggcaaggccaatggagagccgacctgggccctgctcctga

SEQ ID NO: 19222 - DNA, 572 bp, Homo sapiens
  source 1..572: mol_type = unassigned DNA
aacatggcatggtcactgaccagtggactgaggactgacattggaccatagtgctaggcagagccttgctgtgccaaggttaacccttttgttgccagatgaggtctggggttctggagaggaggtggggcaggcagatcagtggtgcagtagctatttggtctcaaatcatagcaatattttaacaactggtacagttccagaaagtgcatcctggctgaacatcatctctggtgatagctctttgcagggcatgggtggtgactcccagcagagctggcaccaacctatgtcactccctagatccagagtatcacagatgagtcacgaggctcaatccggagaaagaatccagccaacacgcggctccgcctgaacgtcccagaagagacggctggtgacagtgaagagaagccagaggaggaggtgcagctgatccacgatcagagtgctcccagctgccccagcagctccccgtccccaggggaggagcctgagggggaaggggagacagatccggagaaggtgcatctcacctggaccaaggacaagtcggtggcagagaagaataa

SEQ ID NO: 19223 - DNA, 100 bp, Homo sapiens
  source 1..100: mol_type = unassigned DNA
atcccgggacgccaagcttgttttgctcaacatgcctgggcctccccgcaaccgcaatggtgatgaaaactagtttgagagcgaaagtgctttaggccca

SEQ ID NO: 19224 - DNA, 6166 bp, Homo sapiens
  source 1..6166: mol_type = unassigned DNA
gtgtgcgagtgtgtgtgcgccgggcgggcgggcactgcagcttcttcctccgtggagcggagagcgagacagagctacagcgaacgagagagcggcgaaggcgggtagaggggcgcgggcgaggcggcgcagccatccccggaccaggggccgcgccgccaccatgctaaacaacctgacggactgcgaggacggcgatgggggagccaacccgggtgatggcaaccccaaggaaagcagtcccttcatcaacagcaccgacacagagaagggaaaggagtatgatggcaagaacatggccttgtttgaggaggagatggacaccagccctatggtgtcctccttgctcagtggcctggccaactacaccaacctgccccagggaagtagggagcatgaagaggcagaaaacaatgagggtggaaaaaagaagccggtgcaggccccacgcatgggcaccttcatgggcgtgtacctgccgtgcctgcagaacatctttggcgtcatcctcttcctgcggctcacctgggtggtgggcattgcaggcatcatggagtccttctgcatggtgttcatctgctgctcctgtacgatgctcacggccatctccatgagtgcaattgcaacgaatggtgttgtgcctgctggtggctcctactacatgatttccaggtctctgggcccagagtttgggggtgccgtgggcctctgcttctacctgggcactacctttgcaggagccatgtacatcctgggcaccatcgaaatcctgctgagtctcactctgttgcccaggctggagggcagtggtgcagtcactgacagcctcgacttcccaggttcaaatgatcccccccaccagttcagcctcccaagtagctggcttacctcttcccagccatggccatcttcaaggcagaagatgccagtggggaggcagcagccatgctgaacaacatgcgtgtttacggcacctgtgtgctcacctgcatggccactgtggtgtttgtgggtgtcaagtatgtcaacaagtttgcccttgtcttcctgggttgtgtcatcctctccatcctggccatctatgctggggtcatcaagtctgccttcgacccacccaacttcccgatctgcctcctgggtaaccgcacgctgtctcgccatggctttgatgtctgtgccaagctggcttgggaaggaaatgagacggtgaccacacggctatggggccttttctgctcctctcgcttcctcaacgccacctgtgatgaatacttcacccgaaacaatgtcacagagatccagggcatccctggtgctgccagtggcctcatcaaagagaacctctggagctcctacctgaccaagggcgtgattgtggagaggagtgggatgacctcggtgggcctggccgatggcactcctatcgacatggaccacccttatgtcttcagtgatatgacctcctacttcaccctgctggttggcatctacttcccctcagtcacagggatcatggctggttctaaccgctctggggacctgagggatgcccagaagtcaatccccactggcaccatcctggccatcgccaccacctctgctgtctacatcagctccgttgttctgtttggggcctgcattgagggggtcgtcctgcgggacaagtttggcgaagctgtgaatggcaacctcgtggtgggcactctggcctggccatctccatgggtaattgtcatcggatccttcttctccacctgtggggctgggctgcagagcctcacgggggccccacgcctgctgcaggccatctcgagggatggcattgtgcccttcctgcaggtctttggccatggcaaggccaatggagagccgacctgggccctgctcctgactgcctgcatctgcgagattggcatcctcattgcatccctcgacgaggtggcccccatcctctctatgttcttcctgatgtgctacatgtttgtgaatctggcctgtgcagtgcagacgctgctgaggacacccaactggaggccacgctttcgatattaccactggaccctctccttcctgggcatgagcctctgcctggccctcatgttcatctgctcctggtattatgcactggtagccatgctcattgctggactcatctacaagtacattgagtaccgtggggcagagaaggagtggggcgatgggatacgaggtctgtctctcagtgcggctcgctatgccctcttacgcctggaggaagggcccccacacaccaagaactggaggccacagctgctggtgctggtgcgtgtggaccaagaccagaatgtggtgcacccccagctgctctcactgacctcccagctgaaggcggggaagggcctgaccatcgtgggctctgtccttgagggcacctttctggaaaatcatccacaggcccagcgggcagaagagtctatcaggcgcctgatggaggcagagaaggtgaagggcttctgccaggtggtgatctcctccaacttgcgtgatggcgtgtcccatctgatccagtccgggggcctcggggggctgcagcacaacactgtgcttgttggctggccccgcaactggcgccagaaggaagatcatcagacgtggaggaacttcattgagctggtccgggaaaccacagctggccacttagccctgctggtcaccaagaacgtttccatgtttcctgggaaccctgagcgcttctctgagggcagcatcgacgtttggtggattgtgcacgatggaggcatgctcatgctgctgcccttcctgctgcggcaccacaaggtctggcggaagtgcaagatgcgtatcttcactgtggcccagatggatgacaatagcatccagatgaagaaggatctgaccacatttctgtatcatttacgcatcactgcggaggtcgaggtggtggagatgcatgagagcgacatctcagcttacacctatgagaagacgttggtgatggagcagcgttcccagatcctcaaacagatgcatttaaccaagaatgagcgggagcgggagatccagagtatcacagatgagtcacgaggctcaatccggagaaagaatccagccaacacgcggctccgcctgaacgtcccagaagagacggctggtgacagtgaagagaagccagaggaggaggtgcagctgatccacgatcagagtgctcccagctgccccagcagctccccgtccccaggggaggagcctgagggggaaggggagacagatccggagaaggtgcatctcacctggaccaaggacaagtcggtggcagagaagaataagggccccagtcctgtctcctctgagggcatcaaggacttcttcagcatgaagccggagtgggagaacttgaaccagtccaacgtgcggcgcatgcacacggccgtgcggctgaacgaggtcatcgtgaagaaatcccgggacgccaagcttgttttgctcaacatgcctgggcctccccgcaaccgcaatggtgatgaaaactacatggagtttctcgaggtcctcacagagcacctggaccgggtgatgctggtccgcggcggcggccgcgaggtcatcaccatctactcctgagaaccaggacctgccacccgggcccgagcgcgcccggcccgcggctccggagccctcgccgcgccccccgccgctgtcaccgtttacatacagaccctgtgcccgtgtcctggccccttaccccgctgcctgaagcccggaggccacgcctgttggggctgattcggagagggcgccccgccgcgcagagaccagagctcctcagtgccagtttggcccctgggtcttcgctgccctttttctaagcccggcctcgtctcgccggaggagacgctgcaataaaggttgggagaaggcgcggaaaggagaggagctggggccttggggacccccaggtagtccatgcggcccattcctccccttcccactcccgccgcggtcctcgctctgcgctcctccggcgctgctccctggctcccggcggcccggaggcccgcggggtgggaaggccgcgcttgccgtctccgccgccccttctcgccgagccgtggggcgcgggcggccgagcctatacatagtgtacaggagacatcgcgtgtatttttaacgtccccatatttatgtgactagaagcgcaacagacttctcgccatagtcgagctctcccgctgggggcactgcggggaggcgaggcctcgggaagctgaattttccttgacgtccaagagtttgagagcgaaagtgctttaggcccaggcgggggtcgtggcctcgttccctcgacacctccgtcctgctctcgcctcttcgccctttccgcgcgcccttggcttcccaccctcctctccagtccttttccgagatgaggtgagacaagggtccaacttttcctggattcgcctcccagcggacgtgagcttccactgcggctgcagagacgcgagcaacctcttctcatcggctcttatgcaagttggggccaggataggggaggggtgctcctcaagaggaagaaaccgagaggcccgcgccccaccgaggaagccccgccccggtgccttcgctggggagcaggcgtctctcctcagtcggcttgtcgcctgctccccgtatcccatggctcctcgccaaagactgaaattgtggagctggagggcgccccctccccggagtttcctccctgggacaagtgagggaggagggggccgattctggtttaggggccggacccactgagaggccccagagccgcccgtgatgttcctcccccgtccccatctggcagctcctgtctcgcctgagggacccagccgccttctccgtgctctggggccgggcctcgctgcttagcagcggcctctagctccgtctcccggggacctgggcctgagggagggctggagtcgcacgcgctttgtccttagcgcctgtctgctctcctctaactaggacccagggcctttggcttccccagctcatccttggcccttccgctccaccagcctggtctgaggcgtgctctgtccttagagaaggcgcggtggccgggttcccttcccctagggcacattactaagggggtcaggcactgcatgctcgttccagcaccatctgggactgggtacagtacctccagccccagggccctgacctgcgcacctagcttgacatctcacgcacctcccagagctggcgccactgagtaatccggacctcaccacctcttttcctttgagcccaaggcagagctggagctggcgccacccagacagcgtcaggtgtggctggggtaggtttggaggtctgccagttacaccaagtcccctctgagattcgatcaggggactggatagattctttcaggtactcaatcaggaagctggaggtgttagacaccagccccctgcatccttcagtagacctccctctgaacaccacagccaggtcctgccttctgggggcctgaatattccagagctgatgtgatgggctgtgcagaagggggctgtatcaacatcaattagggaaccaaagttgcactatctgggcccagattgtctggttggcaagagcaaagtttccgttgatgaaacagacatcccacaacaaaaacccaagttttctgtgctacatgtgcaatatttgttatgaatgttatcacaagtcattcatcaagttatctttataatcactgtagttagatgtttcatgtccattcaagtgacttttattctgagtgcaatatttcaatagccttgtagtgataactagtgttgcttttgttttagatgatctatgtgcagggcaatgcaatgaagttgaaaacccttgtaaataggagaggttgcaaaccaaatcaagagtatttattactattactgctattattattaggcctgcctttaattttcagtgtaagtgttcagtatgccgcatcctgcctcagtattgatcttgtgttctttgtgccaatatgaaaaggagagggttggttctttcctttattgttgaatgctcccatttaatgctttatggcttttactgtgttacttttttagactcccgtctgcacaaaatgcaataaaaataattttattataccctt

SEQ ID NO: 19225 - DNA, 2955 bp, Homo sapiens
  source 1..2955: mol_type = unassigned DNA
gtgtgcgagtgtgtgtgcgccgggcgggcgggcactgcagcttcttcctccgtggagcggagagcgagacagagctacagcgaacgagagagcggcgaaggcgggtagaggggcgcgggcgaggcggcgcagccatccccggaccaggggccgcgccgccaccatgctaaacaacctgacggactgcgaggacggcgatgggggagccaacccgggtgatggcaaccccaaggaaagcagtcccttcatcaacagcaccgacacagagaagggaaaggagtatgatggcaagaacatggccttgtttgaggaggagatggacaccagccctatggtgtcctccttgctcagtggcctggccaactacaccaacctgccccagggaagtagggagcatgaagaggcagaaaacaatgagggtggaaaaaagaagccggtgcaggccccacgcatgggcaccttcatgggcgtgtacctgccgtgcctgcagaacatctttggcgtcatcctcttcctgcggctcacctgggtggtgggcattgcaggcatcatggagtccttctgcatggtgttcatctgctgctcctgtacgatgctcacggccatctccatgagtgcaattgcaacgaatggtgttgtgcctgctggtggctcctactacatgatttccaggtctctgggcccagagtttgggggtgccgtgggcctctgcttctacctgggcactacctttgcaggagccatgtacatcctgggcaccatcgaaatcctgctggcttacctcttcccagccatggccatcttcaaggcagaagatgccagtggggaggcagcagccatgctgaacaacatgcgtgtttacggcacctgtgtgctcacctgcatggccactgtggtgtttgtgggtgtcaagtatgtcaacaagtttgcccttgtcttcctgggttgtgtcatcctctccatcctggccatctatgctggggtcatcaagtctgccttcgacccacccaacttcccgatctgcctcctgggtaaccgcacgctgtctcgccatggctttgatgtctgtgccaagctggcttgggaaggaaatgagacggtgaccacacggctatggggccttttctgctcctctcgcttcctcaacgccacctgtgatgaatacttcacccgaaacaatgtcacagagatccagggcatccctggtgctgccagtggcctcatcaaagagaacctctggagctcctacctgaccaagggcgtgattgtggagaggagtgggatgacctcggtgggcctggccgatggcactcctatcgacatggaccacccttatgtcttcagtgatatgacctcctacttcaccctgctggttggcatctacttcccctcagtcacagggatcatggctggttctaaccgctctggggacctgagggatgcccagaagtcaatccccatatcccatggctcctcgccaaagactgaaattgtggagctggagggcgccccctccccggagtttcctccctgggacaagtgagggaggagggggccgattctggtttaggggccggacccactgagaggccccagagccgcccgtgatgttcctcccccgtccccatctggcagctcctgtctcgcctgagggacccagccgccttctccgtgctctggggccgggcctcgctgcttagcagcggcctctagctccgtctcccggggacctgggcctgagggagggctggagtcgcacgcgctttgtccttagcgcctgtctgctctcctctaactaggacccagggcctttggcttccccagctcatccttggcccttccgctccaccagcctggtctgaggcgtgctctgtccttagagaaggcgcggtggccgggttcccttcccctagggcacattactaagggggtcaggcactgcatgctcgttccagcaccatctgggactgggtacagtacctccagccccagggccctgacctgcgcacctagcttgacatctcacgcacctcccagagctggcgccactgagtaatccggacctcaccacctcttttcctttgagcccaaggcagagctggagctggcgccacccagacagcgtcaggtgtggctggggtaggtttggaggtctgccagttacaccaagtcccctctgagattcgatcaggggactggatagattctttcaggtactcaatcaggaagctggaggtgttagacaccagccccctgcatccttcagtagacctccctctgaacaccacagccaggtcctgccttctgggggcctgaatattccagagctgatgtgatgggctgtgcagaagggggctgtatcaacatcaattagggaaccaaagttgcactatctgggcccagattgtctggttggcaagagcaaagtttccgttgatgaaacagacatcccacaacaaaaacccaagttttctgtgctacatgtgcaatatttgttatgaatgttatcacaagtcattcatcaagttatctttataatcactgtagttagatgtttcatgtccattcaagtgacttttattctgagtgcaatatttcaatagccttgtagtgataactagtgttgcttttgttttagatgatctatgtgcagggcaatgcaatgaagttgaaaacccttgtaaataggagaggttgcaaaccaaatcaagagtatttattactattactgctattattattaggcctgcctttaattttcagtgtaagtgttcagtatgccgcatcctgcctcagtattgatcttgtgttctttgtgccaatatgaaaaggagagggttggttctttcctttattgttgaatgctcccatttaatgctttatggcttttactgtgttacttttttagactcccgtctgcacaaaatgcaataaaaataattttattataccctt

SEQ ID NO: 19226 - DNA, 2831 bp, Homo sapiens
  source 1..2831: mol_type = unassigned DNA
agttgccaggggagattgaaaagcagcctatgcgcagagctgcagctggagggcttgcggtgggacagcttccaggagagggtcccgcaggagaggaaggggcagccctggggaaggcgatgcgtggaggaggctgctcaccccattccccatctgggtgtctttcaggagtcatggccggcttcaacatggggggcgacctcagggagcctgccgccagcattcccctgggctccctggcagctgttggcatctcgtggtttctgtacatcatcttcgtcttcctcctgggcgccatctgcactcgagaggcccttcgctatgacttcctgatagcggaaaaggtatccctcatgggcttcctgttccttttgggcttatacatctcgtccctggcttcctgcatgggaggactttatggagctccccgcatcctgcagtgcattgcccaggagaaagtgatccctgcacttgcctgtctgggacaagggaaggggccaaacaaaacacccgtggctgccatctgcctgaccagcttggtgaccatggcctttgtttttgtgggtcaagtgaacgttctggcccccatcgtcaccatcaacttcatgctgacatacgttgcagtggactactcttacttctccctgtccatgtgttcctgcagcctgaccccggtgcctgagccggtgctcagggagggcgcagaaggcctccactgctctgagcacctgctcttagagaaagctcccagttacggctctgagggacctgcccaaagagtcttggagggcacgctactggaattcaccaaggacatggatcagctcctccagctaaccaggaagcttgagagtagccagcccaggcaaggagagggtaacaggaccccagaaagtcagaagaggaaaagcaagaaggccaccaagcagaccctacaagatagcttcctcttggacctcaaatcccctccttctttccctgtcgagatctctgacaggttgcccgctgcctcctgggaggggcaggagtcctgctggaacaagcagacttccaagagcgaagggactcagcctgagggaacatatggagagcaacttgttcctgagctgtgcaaccaatcagagtccagtggagaagatttcttcctgaagtccaggctccaagaacaagatgtctggagaagatccacttctttctatacccacatgtgcaacccctgggtctccctgttgggggctgttgggtcccttctcatcatgtttgtgatacagtgggtgtataccctggttaacatgggtgttgctgccatcgtgtatttctacattggccgggccagtccagggcttcaccttggatcagcctccaacttcagctttttccggtggatgaggtctctcttgctcccctcctgcaggagcttgcggtcccctcaggagcagatcatcttggcgccgtccctggctaaggttgacatggagatgactcagctcacccaggagaatgcagacttcgccactcgggatcgctaccaccactcctccctcgtgaaccgggagcagctgatgcctcactactagatgcagtgctgggaccttcctcttttggagctgtcccatgtacagtggacccaagctcaggaccttcgtggagctgcttctccaacctgagaaactcaagacccatcctcccgctgtcactttggacaatggaaatctacattttcttttccctttttttttttttttgagacagagtctcgccctgtcacccaggctggagtccagtggcacaatcttggctcactgcaacctctgcttcccgagttcaagcaattctcctgcctcagcctcctgagtagctgggattataggcatgcaccaccacacccagctattttttgtatttttactggagacagggtttcaccatgttggccaggctggtctcgaactcctgacctcgtgatccacccgtctcagcctcccaaagtactgggattacaggcgtgagccaccatgcctggccagaaatctatgttttcttagaacatgtggaagaaggaaaaagacaaaaaaggaaatctggattctgaggaccacgtctcacccagggtgacatcaggaatggtgctagcctctgcaacacgacacccagtctgaagagctctatacaggtactaagactagcaggggacaccaagactctgcacaaccagattgcttgtgcagagggccacaataagtgtatgttttatattttattgtattatttattcaaaaataaataatacactcacatgtttccacacccaaaagatatatagagtgaaaagtctccctccaatccttattctccacctgctcagttcctgtctaccctggcctagaggtaaccactattctcatccgtacatccagcatttctttatggatatacaagcaaatgggaatgtagagtctcacattctctctttatacacaaaagttagcacgttatacacatgttctgcaccttgcttttttcccttaacaatctatcttggagacatttcatatcaattcatatgccatttgttcatttttttcattgtataaatgtgttataatttatttcgccagttccacaatgatgagcatttggattctttccaatcttttgcaatgacaatcagctctgcagtgaataatcttgtacaaatgtgcaagcataaagtgtatctctaggataaattcccaaaagtggaattgcaggatcaaaaggtacatgcatttgtaaactattattgtttagtgagggtctttttaattaaagaattaacatgaattgcctaa

SEQ ID NO: 19227 - DNA, 3447 bp, Homo sapiens
  source 1..3447: mol_type = unassigned DNA
tccagagcagtctccctgtccagatcaccaggatccctgcttgctggagaatgacccagatgtcccaggtgcaggagctcttccatgaggcagcccagcaggatgccctggcccagccccagccctggtggaagacccagctgttcatgtgggagcctgtgctgtttgggacctgggatggtgtgttcacatcctgcatgatcaacatctttggggttgtgctcttcctgaggactggctggctggtgggaaacacaggagtgctcctgggcatgttcctggtgtccttcgtcatcctggtggccctcgtcacggtgctgtctggcattggcgtcggggagcgcagcagcatcggcagcggtggcgtctactccatgatctcctcggtcctgggtgggcagacgggaggcaccatcgggctgctctatgtgtttggacagtgtgttgcaggtgccatgtatatcaccggctttgctgaatccatctcggatttgctgggcctcgggaatatctgggctgtgcgaggaatttcagttgcggtgcttctggccttgctgggcattaacctcgcaggtgtcaaatggataatccgcctccagctgctgttgctgttcctgctggccgtgtccacactggactttgtggtgggttctttcacccacctggacccagaacatggtttcattggatattcacccgaactgctacagaacaacacgctgcccgattacagcccgggggaatcttttttcactgtctttggggttttcttcccagcggctacaggagtcatggccggcttcaacatggggggcgacctcagggagcctgccgccagcattcccctgggctccctggcagctgttggcatctcgtggtttctgtacatcatcttcgtcttcctcctgggcgccatctgcactcgagaggcccttcgctatgacttcctgatagcggaaaaggtatccctcatgggcttcctgttccttttgggcttatacatctcgtccctggcttcctgcatgggaggactttatggagctccccgcatcctgcagtgcattgcccaggagaaagtgatccctgcacttgcctgtctgggacaagggaaggggccaaacaaaacacccgtggctgccatctgcctgaccagcttggtgaccatggcctttgtttttgtgggtcaagtgaacgttctggcccccatcgtcaccatcaacttcatgctgacatacgttgcagtggactactcttacttctccctgtccatgtgttcctgcagcctgaccccggtgcctgagccggtgctcagggagggcgcagaaggcctccactgctctgagcacctgctcttagagaaagctcccagttacggctctgagggacctgcccaaagagtcttggagggcacgctactggaattcaccaaggacatggatcagctcctccagctaaccaggaagcttgagagtagccagcccaggcaaggagagggtaacaggaccccagaaagtcagaagaggaaaagcaagaaggccaccaagcagaccctacaagatagcttcctcttggacctcaaatcccctccttctttccctgtcgagatctctgacaggttgcccgctgcctcctgggaggggcaggagtcctgctggaacaagcagacttccaagagcgaagggactcagcctgagggaacatatggagagcaacttgttcctgagctgtgcaaccaatcagagtccagtggagaagatttcttcctgaagtccaggctccaagaacaagatgtctggagaagatccacttctttctatacccacatgtgcaacccctgggtctccctgttgggggctgttgggtcccttctcatcatgtttgtgatacagtgggtgtataccctggttaacatgggtgttgctgccatcgtgtatttctacattggccgggccagtccagggcttcaccttggatcagcctccaacttcagctttttccggtggatgaggtctctcttgctcccctcctgcaggagcttgcggtcccctcaggagcagatcatcttggcgccgtccctggctaaggttgacatggagatgactcagctcacccaggagaatgcagacttcgccactcgggatcgctaccaccactcctccctcgtgaaccgggagcagctgatgcctcactactagatgcagtgctgggaccttcctcttttggagctgtcccatgtacagtggacccaagctcaggaccttcgtggagctgcttctccaacctgagaaactcaagacccatcctcccgctgtcactttggacaatggaaatctacattttcttttccctttttttttttttttgagacagagtctcgccctgtcacccaggctggagtccagtggcacaatcttggctcactgcaacctctgcttcccgagttcaagcaattctcctgcctcagcctcctgagtagctgggattataggcatgcaccaccacacccagctattttttgtatttttactggagacagggtttcaccatgttggccaggctggtctcgaactcctgacctcgtgatccacccgtctcagcctcccaaagtactgggattacaggcgtgagccaccatgcctggccagaaatctatgttttcttagaacatgtggaagaaggaaaaagacaaaaaaggaaatctggattctgaggaccacgtctcacccagggtgacatcaggaatggtgctagcctctgcaacacgacacccagtctgaagagctctatacaggtactaagactagcaggggacaccaagactctgcacaaccagattgcttgtgcagagggccacaataagtgtatgttttatattttattgtattatttattcaaaaataaataatacactcacatgtttccacacccaaaagatatatagagtgaaaagtctccctccaatccttattctccacctgctcagttcctgtctaccctggcctagaggtaaccactattctcatccgtacatccagcatttctttatggatatacaagcaaatgggaatgtagagtctcacattctctctttatacacaaaagttagcacgttatacacatgttctgcaccttgcttttttcccttaacaatctatcttggagacatttcatatcaattcatatgccatttgttcatttttttcattgtataaatgtgttataatttatttcgccagttccacaatgatgagcatttggattctttccaatcttttgcaatgacaatcagctctgcagtgaataatcttgtacaaatgtgcaagcataaagtgtatctctaggataaattcccaaaagtggaattgcaggatcaaaaggtacatgcatttgtaaactattattgtttagtgagggtctttttaattaaagaattaacatgaattgcct

SEQ ID NO: 19228 - DNA, 3045 bp, Homo sapiens
  source 1..3045: mol_type = unassigned DNA
gcaggatgccctggcccagccccagccctggtggaagacccagctgttcatgtgggagcctgtgctgtttgggacctgggatggtgtgttcacatcctgcatgatcaacatctttggggttgtgctcttcctgaggactggctggctggtgggaaacacaggagtgctcctgggcatgttcctggtgtccttcgtcatcctggtggccctcgtcacggtgctgtctggcattggcgtcggggagcgcagcagcatcggcagcggtggcgtctactccatgatctcctcggtcctgggtgggcagacgggaggcaccatcgggctgctctatgtgtttggacaggtgccatgtatatcaccggctttgctgaatccatctcggatttgctgggcctcgggaatatctgggctgtgcgaggaatttcagttgcggtgcttctggccttgctgggcattaacctcgcaggtgtcaaatggataatccgcctccagctgctgttgctgttcctgctggccgtgtccacactggactttgtggtgggttctttcacccacctggacccagaacatggtttcattggatattcacccgaactgctacagaacaacacgctgcccgattacagcccgggggaatcttttttcactgtctttggggttttcttcccagcggctacaggagtcatggccggcttcaacatggggggcgacctcagggagcctgccgccagcattcccctgggctccctggcagctgttggcatctcgaagaagcttctctgcccttcattgggtggtttctgtacatcatcttcgtcttcctcctgggcgccatctgcactcgagaggcccttcgctatgacttcctgatagcggaaaaggtatccctcatgggcttcctgttccttttgggcttatacatctcgtccctggcttcctgcatgggaggactttatggagctccccgcatcctgcagtgcattgcccaggagaaagtgatccctgcacttgcctgtctgggacaagggaaggggccaaacaaaacacccgtggctgccatctgcctgaccagcttggtgaccatggcctttgtttttgtgggtcaagtgaacgttctggcccccatcgtcaccatcaacttcatgctgacatacgttgcagtggactactcttacttctccctgtccatgtgttcctgcagcctgaccccggtgcctgagccggtgctcagggagggcgcagaaggcctccactgctctgagcacctgctcttagagaaagctcccagttacggctctgagggacctgcccaaagagtcttggagggcacgctactggaattcaccaaggacatggatcagctcctccagctaaccaggaagcttgagagtagccagcccaggcaaggagagggtaacaggaccccagaaagtcagaagaggaaaagcaagaaggccaccaagcagaccctacaagatagcttcctcttggacctcaaatcccctccttctttccctgtcgagatctctgacaggttgcccgctgcctcctgggaggggcaggagtcctgctggaacaagcagacttccaagagcgaagggactcagcctgagggaacatatggagagcaacttgttcctgagctgtgcaaccaatcagagtccagtggagaagatttcttcctgaagtccaggctccaagaacaagatgtctggagaagatccacttctttctatacccacatgtgcaacccctgggtctccctgttgggggctgttgggtcccttctcatcatgtttgtgatacagtgggtgtataccctggttaacatgggtgttgctgccatcgtgtatttctacattggccgggccagtccagggcttcaccttggatcagcctccaacttcagctttttccggtggatgaggtctctcttgctcccctcctgcaggagcttgcggtcccctcaggagcagatcatcttggcgccgtccctggctaaggttgacatggagatgactcagctcacccaggagaatgcagacttcgccactcgggatcgctaccaccactcctccctcgtgaaccgggagcagctgatgcctcactactagatgcagtgctgggaccttcctcttttggagctgtcccatgtacagtggacccaagctcaggaccttcgtggagctgcttctccaacctgagaaactcaagacccatcctcccgctgtcactttggacaatggaaatctacattttcttttccctttttttttttttttgagacagagtctcgccctgtcacccaggctggagtccagtggcacaatcttggctcactgcaacctctgcttcccgagttcaagcaattctcctgcctcagcctcctgagtagctgggattataggcatgcaccaccacacccagctattttttgtatttttactggagacagggtttcaccatgttggccaggctggtctcgaactcctgacctcgtgatccacccgtctcagcctcccaaagtactgggattacaggcgtgagccaccatgcctggccagaaatctatgttttcttagaacatgtggaagaaggaaaaagacaaaaaaggaaatctggattctgaggaccacgtctcacccagggtgacatcaggaatggtgctagcctctgcaacacgacacccagtctgaagagctctatacaggtactaagactagcaggggacaccaagactctgcacaaccagattgcttgtgcagagggccacaataagtgtatgttttatattttattgtattatttattcaaaaataaataatacactcacatgtttccacacccaaaagatatatagagtgaaaagtctccctccaatccttattctccacctgctcagttcctgtctaccctggcctagaggtaaccactattctcatccgtacatccagcatttctttatggatatacaagcaaatgggaatgtagagtctcacattctctctttatacacaaaagttagcacgttatacacatgttctg

SEQ ID NO: 19229 - DNA, 1949 bp, Homo sapiens
  source 1..1949: mol_type = unassigned DNA
gcaagacgtgactttgcttctccttccccttctgccatgatttgtgatgcctcctcagccatgtggaactgagtcatggccggcttcaacatggggggcgacctcagggagcctgccgccagcattcccctgggctccctggcagctgttggcatctcgtggtttctgtacatcatcttcgtcttcctcctgggcgccatctgcactcgagaggcccttcgctatgacttcctgatagcggaaaaggtatccctcatgggcttcctgttccttttgggcttatacatctcgtccctggcttcctgcatgggaggactttatggagctccccgcatcctgcagtgcattgcccaggagaaagtgatccctgcacttgcctgtctgggacaagggaaggggccaaacaaaacacccgtggctgccatctgcctgaccagcttggtgaccatggcctttgtttttgtgggtcaagtgaacgttctggcccccatcgtcaccatcaacttcatgctgacatacgttgcagtggactactcttacttctccctgtccatgtgttcctgcagcctgaccccggtgcctgagccggtgctcagggagggcgcagaaggcctccactgctctgagcacctgctcttagagaaagctcccagttacggctctgagggacctgcccaaagagtcttggagggcacgctactggaattcaccaaggacatggatcagctcctccagctaaccaggaagcttgagagtagccagcccaggcaaggagagggtaacaggaccccagaaagtcagaagaggaaaagcaagaaggccaccaagcagaccctacaagatagcttcctcttggacctcaaatcccctccttctttccctgtcgagatctctgacaggttgcccgctgcctcctgggaggggcaggagtcctgctggaacaagcagacttccaagagcgaagggactcagcctgagggaacatatggagagcaacttgttcctgagctgtgcaaccaatcagagtccagtggagaaggagcttgcggtcccctcaggagcagatcatcttggcgccgtccctggctaaggttgacatggagatgactcagctcacccaggagaatgcagacttcgccactcgggatcgctaccaccactcctccctcgtgaaccgggagcagctgatgcctcactactagatgcagtgctgggaccttcctcttttggagctgtcccatgtacagtggacccaagctcaggaccttcgtggagctgcttctccaacctgagaaactcaagacccatcctcccgctgtcactttggacaatggaaatctacattttcttttccctttttttttttttttgagacagagtctcgccctgtcacccaggctggagtccagtggcacaatcttggctcactgcaacctctgcttcccgagttcaagcaattctcctgcctcagcctcctgagtagctgggattataggcatgcaccaccacacccagctattttttgtatttttactggagacagggtttcaccatgttggccaggctggtctcgaactcctgacctcgtgatccacccgtctcagcctcccaaagtactgggattacaggcgtgagccaccatgcctggccagaaatctatgttttcttagaacatgtggaagaaggaaaaagacaaaaaaggaaatctggattctgaggaccacgtctcacccagggtgacatcaggaatggtgctagcctctgcaacacgacacccagtctgaagagctctatacaggtactaagactagcaggggacaccaagactctgcacaaccagattgcttgtgcagagggccacaataagtgtatgttttatattttattgtattatttattcaaaaataaataatacactcacatgtttccacacccaaaagatatataga

SEQ ID NO: 19230 - DNA, 2989 bp, Homo sapiens
  source 1..2989: mol_type = unassigned DNA
agccacgtggcggcggggcggggaccgggcgggccgggcgctgggagctggctgtcccaggagcagagcagtctccctgtccagatcaccaggatccctgcttgctggagaatgacccagatgtcccaggtgcaggagctcttccatgaggcagcccagcaggatgccctggcccagccccagccctggtggaagacccagctgttcatgtgggagcctgtgctgtttgggacctgggatggtgtgttcacatcctgcatgatcaacatctttggggttgtgctcttcctgaggactggctggctggtgggaaacacaggagtgctcctgggcatgttcctggtgtccttcgtcatcctggtggccctcgtcacggtgctgtctggcattggcgtcggggagcgcagcagcatcggcagcggtggcgtctactccatgatctcctcggtcctgggtgggcagacgggaggcaccatcgggctgctctatgtgtttggacagtgtgttgcaggtgccatgtatatcaccggctttgctgaatccatctcggatttgctgggcctcgggaatatctgggctgtgcgaggaatttcagttgcggtgcttctggccttgctgggcattaacctcgcaggtgtcaaatggataatccgcctccagctgctgttgctgttcctgctggccgtgtccacactggactttgtggtgggttctttcacccacctggacccagaacatggtttcattggatattcacccgaactgctacagaacaacacgctgcccgattacagcccgggggaatcttttttcactgtctttggggttttcttcccagcggctacaggagtcatggccggcttcaacatggggggcgacctcagggagcctgccgccagcattcccctgggctccctggcagctgttggcatctcgtggtttctgtacatcatcttcgtcttcctcctgggcgccatctgcactcgagaggcccttcgctatgacttcctgatagcggaaaaggtatccctcatgggcttcctgttccttttgggcttatacatctcgtccctggcttcctgcatgggaggactttatggagctccccgcatcctgcagtgcattgcccaggagaaagtgatccctgcacttgcctgtctgggacaagggaaggggccaaacaaaacacccgtggctgccatctgcctgaccagcttggtgaccatggcctttgtttttgtgggtcaagtgaacgttctggcccccatcgtcaccatcaacttcatgctgacatacgttgcagtggactactcttacttctccctgtccatgtgttcctgcagcctgaccccggtgcctgagccggtgctcagggagggcgcagaaggcctccactgctctgagcacctgctcttagagaaagctcccagttacggctctgagggacctgcccaaagagtcttggagggcacgctactggaattcaccaaggacatggatcagctcctccagctaaccaggaagcttgagagtagccagcccaggcaaggagagggtaacaggaccccagaaagtcagaagaggaaaagcaagaaggccaccaagcagaccctacaagatagcttcctcttggacctcaaatcccctccttctttccctgtcgagatctctgacaggttgcccgctgcctcctgggaggggcaggagtcctgctggaacaagcagacttccaagagcgaagggactcagcctgagggaacatatggagagcaacttgttcctgagctgtgcaaccaatcagagtccagtggagaagatttcttcctgaagtccaggctccaagaacaagatgtctggagaagatccacttctttctatacccacatgtgcaacccctgggtctccctgttgggggctgttgggtcccttctcatcatgtttgtgatacagtgggtgtataccctggttaacatgggtgttgctgccatcgtgtatttctacattggccgggccagtccagggcttcaccttggatcagcctccaacttcagctttttccggtggatgaggtctctcttgctcccctcctgcaggagcttgcggtcccctcaggagcagatcatcttggcgccgtccctggctaaggttgacatggagatgactcagctcacccaggagaatgcagacttcgccactcgggatcgctaccaccactcctccctcgtgaaccgggagcagctgatgcctcactactagatgcagtgctgggaccttcctcttttggagctgtcccatgtacagtggacccaagctcaggaccttcgtggagctgcttctccaacctgagaaactcaagacccatcctcccgctgtcactttggacaatggaaatctacattttcttttccctttttttttttttttgagacagagtctcgccctgtcacccaggctggagtccagtggcacaatcttggctcactgcaacctctgcttcccgagttcaagcaattctcctgcctcagcctcctgagtagctgggattataggcatgcaccaccacacccagctattttttgtatttttactggagacagggtttcaccatgttggccaggctggtctcgaactcctgacctcgtgatccacccgtctcagcctcccaaagtactgggattacaggcgtgagccaccatgcctggccagaaatctatgttttcttagaacatgtggaagaaggaaaaagacaaaaaaggaaatctggattctgaggaccacgtctcacccagggtgacatcaggaatggtgctagcctctgcaacacgacacccagtctgaagagctctatacaggtactaagactagcaggggacaccaagactctgcacaaccagattgcttgtgcagagggccacaataagtgtatgttttatattttattgtattatttattcaaaaataaataatacactcacatgtttccacaccc

SEQ ID NO: 19231 - DNA, 1753 bp, Homo sapiens
  source 1..1753: mol_type = unassigned DNA
atcaatccagcactgtctagagattaggagctggtgatgcaagtgcctgtggcgaaaccaatgcatcgcgccgattataactgataagctcagccttcttgtgggagtcatggccggcttcaacatggggggcgacctcagggagcctgccgccagcattcccctgggctccctggcagctgttggcatctcgtggtttctgtacatcatcttcgtcttcctcctgggcgccatctgcactcgagaggcccttcgctatgacttcctgatagcggaaaaggtatccctcatgggcttcctgttccttttgggcttatacatctcgtccctggcttcctgcatgggaggactttatggagctccccgcatcctgcagtgcattgcccaggagaaagtgatccctgcacttgcctgtctgggacaagggaaggggccaaacaaaacacccgtggctgccatctgcctgaccagcttggtgaccatggcctttgtttttgtgggtcaagtgaacgttctggcccccatcgtcaccatcaacttcatgctgacatacgttgcagtggactactcttacttctccctgtccatgtgttcctgcagcctgaccccggtgcctgagccggtgctcagggagggcgcagaaggcctccactgctctgagcacctgctcttagagaaagctcccagttacggctctgagggacctgcccaaagagtcttggagggcacgctactggaattcaccaaggacatggatcagctcctccagctaaccaggaagcttgagagtagccagcccaggcaaggagagggtaacaggaccccagaaagtcagaagaggaaaagcaagaaggccaccaagcagaccctacaagatagcttcctcttggacctcaaatcccctccttctttccctgtcgagatctctgacaggttgcccgctgcctcctgggaggggcaggagtcctgctggaacaagcagacttccaagagcgaagggactcagcctgagggaacatatggagagcaacttgttcctgagctgtgcaaccaatcagagtccagtggagaagatttcttcctgaagtccaggctccaagaacaagatgtctggagaagatccacttctttctatacccacatgtgcaacccctgggtctccctgttgggggctgttgggtcccttctcatcatgtttgtgatacagtgggtgtataccctggttaacatgggtgttgctgccatcgtgtatttctacattggccgggccagtccagggcttcaccttggatcagcctccaacttcagctttttccggtggatgaggtctctcttgctcccctcctgcaggagcttgcggtcccctcaggagcagatcatcttggcgccgtccctggctaaggttgacatggagatgactcagctcacccaggagaatgcagacttcgccactcgggatcgctaccaccactcctccctcgtgaaccgggagcagctgatgcctcactactagatgcagtgctgggaccttcctcttttggagctgtcccatgtacagtggacccaagctcaggaccttcgtggagctgcttctccaacctgagaaactcaagacccatcctcccgctgtcactttggacaatggaaatctacattttcttttccctttttttttttttttgagacagagtctcgccctgtcacccaggctggagtccagtggcacaatcttggctcactgcaacctctgctt

SEQ ID NO: 19232 - DNA, 1070 bp, Homo sapiens
  source 1..1070: mol_type = unassigned DNA
ctgccatgcaagacgtgactttgcttctccttccccttctgccatgatttgtgatgcctcctcagccatgtggaactgagtcatggccggcttcaacatggggggcgacctcagggagcctgccgccagcattcccctgggctccctggcagctgttggcatctcgtggtttctgtacatcatcttcgtcttcctcctgggcgccatctgcactcgagaggcccttcgctatgacttcctgatagcggaaaaggtatccctcatgggcttcctgttccttttgggcttatacatctcgtccctggcttcctgcatgggaggactttatggagctccccgcatcctgcagtgcattgcccaggagaaagtgatccctgcacttgcctgtctgggacaagggatctctgacaggttgcccgctgcctcctgggaggggcaggagtcctgctggaacaagcagacttccaagagcgaagggactcagcctgagggaacatatggagagcaacttgttcctgagctgtgcaaccaatcagagtccagtggagaagatttcttcctgaagtccaggctccaagaacaagatgtctggagaagatccacttctttctatacccacatgtgcaacccctgggtctccctgttgggggctgttgggtcccttctcatcatgtttgtgatacagtgggtgtataccctggttaacatgggtgttgctgccatcgtgtatttctacattggccgggccagtccagggcttcaccttggatcagcctccaacttcagctttttccggtggatgaggtctctcttgctcccctcctgcaggagcttgcggtcccctcaggagcagatcatcttggcgccgtccctggctaaggttgacatggagatgactcagctcacccaggagaatgcagacttcgccactcgggatcgctaccaccactcctccctcgtgaaccgggagcagctgatgcctcactactagatgcagtgctgggaccttcctcttttggagctgtcccatgtacagtggacccaagctcaggaccttcgtggagctgctt

SEQ ID NO: 19233 - DNA, 567 bp, Homo sapiens
  source 1..567: mol_type = unassigned DNA
aagcagacttccaagagcgaagggactcagcctgagggaacatatggagagcaacttgttcctgagctgtgcaaccaatcagagtccagtggagaagatttcttcctgaagtccaggctccaagaacaagatgtctggagaagatccacttctttctatacccacatgtgcaacccctgggtctccctgttgggggctgttgggtcccttctcatcatgtttgtgatacagtgggtgtataccctggttaacatgggtgttgctgccatcgtgtatttctacattggccgggccagtccagggcttcaccttggtctgtgccaatttggagccagtaccagaatggatgagtgtccagagtcctgggaggtgccaagggtgtcccattcctggctgggcttgggcctggattgtggcatgggaacctaacaactgggcacctccgggagactcagatgttgctcctgcgtgcactccaccacactcggcccccagattcggctcatcagaagcttcctctaggctcatgtcctcttcccttcttatcctcagtcatcaagaacagag

SEQ ID NO: 19234 - DNA, 805 bp, Homo sapiens
  source 1..805: mol_type = unassigned DNA
cccatgtgcaaggatgacatgcaaattcgtgaagtgttccatatttttatatatatttaaaagtaaaaaaagaaacaaaacaatggtaccccttttttggtaagaaatatgccagaagagaaatagtacaaaaagtgtcctcccaagccagctggggaagcttcatgactggcctttctctcattctgatacaagttccctttggaaacagaaggttgagtgagggaattggatggggctgggtgaggtgagtcgggggcagctctgttctgctcttgggttttgcaggtggtttctgtacatcatcttcgtcttcctcctgggcgccatctgcactcgagaggcccttcgctatgacttcctgatagcggaaaaggtatccctcatgggcttcctgttccttttgggcttatacatctcgtccctggcttcctgcatgggaggactttatggagctccccgcatcctgcagtgcattgcccaggagaaagtgatccctgcacttgcctgtctgggacaagggaaggggccaaacaaaacacccgtggctgccatctgcctgaccagcttggtgaccatggcctttgtttttgtgggtcaagtgaacgttctggcccccatcgtcaccatcaacttcatgctgacatacgttgcagtggactactcttacttctccctgtccatgtgttcctgcagcctgaccccggtgcctgagccggtgctcagggagggcgcagaaggcctccactgctctgagcacctgctcttagagaaagctcccagttacggctctgagggacctgcc

SEQ ID NO: 19235 - DNA, 776 bp, Homo sapiens
  source 1..776: mol_type = unassigned DNA
attgtggttggccagtttgttctcaaagtgtggtctctgggaacgcatgcggaatccagatttctaggccccaccccaagcctactgaaccaggaactctgaggaggggcccagaagtttgtgtttagcaagccctgcagctgagtctggcagacgcttcatttgaggaccactgtgcaatccatatgaaatgtggtggtggattcagctgaaaccatggaatgaatgggggcgaggctggggatgtggaaactgtatcccagggatcagatctagacgactcagtggatgattgcatggggtgcaggtgggtgggtgctgggggggtagaaaggcacaggagcaggttctggcactggcgaatgaaaccgcttctcacacaggtatccctcatgggcttcctgttccttttgggcttatacatctcgtccctggcttcctgcatgggaggactttatggagctccccgcatcctgcagtgcattgcccaggagaaagtgatccctgcacttgcctgtctgggacaagggaaggggccaaacaaaacacccgtggctgccatctgcctgaccagcttggtgaccatggcctttgtttttgtgggtcaagtgaacgttctggcccccatcgtcaccatcaacttcatgctgacatacgttgcagtggactactcttacttctccctgtccatgtgttcctgcagcctgaccccggtgcctgagccggtgctcagggagggcgcagaaggcctccactgctctgagcacctgctctta

SEQ ID NO: 19236 - DNA, 561 bp, Homo sapiens
  source 1..561: mol_type = unassigned DNA
aggatgcttttggagctgggagggctttcctcctgagcctcctccaacccacaaaggagtcatggccggcttcaacatggggggcgacctcagggagcctgccgccagcattcccctgggctccctggcagctgttggcatctcgtggtttctgtacatcatcttcgtcttcctcctgggcgccatctgcactcgagaggcccttcgctatgacttcctgatagcggaaaaggtatccctcatgggcttcctgttccttttgggcttatacatctcgtccctggcttcctgcatgggaggactttatggagctccccgcatcctgcagtgcattgcccaggagaaagtgatccctgcacttgcctgtctgggacaagggaaggggccaaacaaaacacccgtggctgccatctgcctgaccagcttggtgaccatggcctttgtttttgtgggtcaagtgaacgttctggcccccatcgtcaccatcaacttcatgctgacatacgttgcagtggactactcttacttctccctgtccatgtgttcctgcagcctgacccc

SEQ ID NO: 19237 - DNA, 586 bp, Homo sapiens
  source 1..586: mol_type = unassigned DNA
aattagcctcctcaatgaaaaagaaagagggggaggaagaggaagagaaaagaagaagaaaaccctgaacatggtttcattggatattcacccgaactgctacagaacaacacgctgcccgattacagcccgggggaatcttttttcactgtctttggggttttcttcccagcggctacaggagtcatggccggcttcaacatggggggcgacctcagggagcctgccgccagcattcccctgggctccctggcagctgttggcatctcgtggtttctgtacatcatcttcgtcttcctcctgggcgccatctgcactcgagaggcccttcgctatgacttcctgatagcggaaaaggtatccctcatgggcttcctgttccttttgggcttatacatctcgtccctggcttcctgcatgggaggactttatggagctccccgcatcctgcagtgcattgcccaggagaaagtgatccctgcacttgcctgtctgggacaagggaaggggccaaacaaaacacccgtggctgccatctgcctgaccagcttggtgaccatggcctttgtttttgtgggtcaagtga

SEQ ID NO: 19238 - DNA, 576 bp, Homo sapiens
  source 1..576: mol_type = unassigned DNA
atgaaatcttgcaccgtctcacccgggacatgaaccctgctttgtccagtgtggccacaccgtacacaccgcctgccatcagtcacttagtacctggcttggttatcaggtcaactgtcaagtagcagagggcttgagctcgaggccaataatagccaagtgctatgtcacgatgcctgcatcatccgcctcacttctcgtcacgtaggcgttttatcatcttacatcatcacaagaagaagggtgcatacagcatgaacatggtttcattggatattcacccgaactgctacagaacaacacgctgcccgattacagcccgggggaatcttttttcactgtctttggggttttcttcccagcggctacaggtatccctcatgggcttcctgttccttttgggcttatacatctcgtccctggcttcctgcatgggaggactttatggagctccccgcatcctgcagtgcattgcccaggagaaagtgatccctgcacttgcctgtctgggacaagggaaggggccaaacaaaacacccgtggctgccatctgcctgaccagcttggtgaccatgg

SEQ ID NO: 19239 - DNA, 622 bp, Homo sapiens
  source 1..622: mol_type = unassigned DNA
ctgggatggtgtgttcacatcctgcatgatcaacatctttggggttgtgctcttcctgaggactggctggctggtgggaaacacaggagtgctcctgggcatgttcctggtgtccttcgtcatcctggtggccctcgtcacggtgctgtctggcattggcgtcggggagcgcagcagcatcggcagcggtggcgtctactccatgatctcctcggtcctgggtgggcagacgggaggcaccatcgggctgctctatgtgtttggacagaacatggtttcattggatattcacccgaactgctacagaacaacacgctgcccgattacagcccgggggaatcttttttcactgtctttggggttttcttcccagcggctacaggagtcatggccggcttcaacatggggggcgacctcagggagcctgccgccagcattcccctgggctccctggcagctgttggcatctcgtggtttctgtacatcatcttcgtcttcctcctgggcgccatctgcactcgagaggcccttcgctatgacttcctgatagcggaaaaggtatccctcatgggcttcctgttccttttgggcttatacatctcgtccctggcttcctgcatgg

SEQ ID NO: 19240 - DNA, 493 bp, Homo sapiens
  source 1..493: mol_type = unassigned DNA
cagggtaaagggtttcctgaagtttctacctgctctaagtttctacccttgaggctgattgactagtccagtgagatcaaggaaatgaaaggcatttcacacaccagcaggatgccctggcccagccccagccctggtggaagacccagctgttcatgtgggagcctgtgctgtttgggacctgggatggtgtgttcacatcctgcatgatcaacatctttggggttgtgctcttcctgaggactggctggctggtgggaaacacaggagtgctcctgggcatgttcctggtgtccttcgtcatcctggtggccctcgtcacggtgctgtctggcattggcgtcggggagcgcagcagcatcggcagcggtggcgtctactccatgatctcctcggtcctgggtgggcagacgggaggcaccatcgggctgctctatgtgtttggacagtgtgttgcaggtgccatgtatatcaccggctttgctgaatccat

SEQ ID NO: 19241 - DNA, 439 bp, Homo sapiens
  source 1..439: mol_type = unassigned DNA
cgcctcctcgccacctgggcccgagactcccggtgctggcgtggcaggggtgcccccgccgggacgggacagctgggacccgcgcagccgagccggggcagccacgtggcggcggggcggggaccgggcgggccgggcgctgggagctggctgtcccaggagcagagcagtctccctgtccagatcaccaggatccctgcttgctggagaatgacccagatgtcccaggtgcaggagctcttccatgaggcagcccagcagtgtgcagcacctcccaggacctcttgctcctgctctggtgacataagatgcctgcctcgcctttgccttccaccatgattgaaagtttcctgaggcctccctggaagcagaagctgctatgcttcccgtacagcctgtggaaccataagccaattaaacctcttttctttataaatta

SEQ ID NO: 19242 - DNA, 3435 bp, Homo sapiens
  source 1..3435: mol_type = unassigned DNA
agcgttggagtccaaagacgcctcccaccgccgccgggtggcagaattgggggcaggcgcgtcccacagaccccgaggggtggccccgccccagggccgcggggaggcgcccccgtgcggggcggagttgtcaccgccccctccccaatccccggggactgtggccccttcttaagcccgcggcgcctctagctgcccctcactcgtctcgcccgccagtctccctcccgcgcgatggcctcggcgctgagctatgtctccaagttcaagtccttcgtgatcttgttcgtcaccccgctcctgctgctgccactcgtcattctgatgcccgccaagtttgtcaggtgtgcctacgtcatcatcctcatggccatttactggtgcacagaagtcatccctctggctgtcacctctctcatgcctgtcttgcttttcccactcttccagattctggactccaggcaggtgtgtgtccagtacatgaaggacaccaacatgctgttcctgggcggcctcatcgtggccgtggctgtggagcgctggaacctgcacaagaggatcgccctgcgcacgctcctctgggtgggggccaagcctgcacggctgatgctgggcttcatgggcgtcacagccctcctgtccatgtggatcagtaacacggcaaccacggccatgatggtgcccatcgtggaggccatattgcagcagatggaagccacaagcgcagccaccgaggccggcctggagctggtggacaagggcaaggccaaggagctgccagggagtcaagtgatttttgaaggccccactctggggcagcaggaagaccaagagcggaagaggttgtgtaaggccatgaccctgtgcatctgctacgcggccagcatcgggggcaccgccaccctgaccgggacgggacccaacgtggtgctcctgggccagatgaacgagttgtttcctgacagcaaggacctcgtgaactttgcttcctggtttgcatttgcctttcccaacatgctggtgatgctgctgttcgcctggctgtggctccagtttgtttacatgagattcaattttaaaaagtcctggggctgcgggctagagagcaagaaaaacgagaaggctgccctcaaggtgctgcaggaggagtaccggaagctggggcccttgtccttcgcggagatcaacgtgctgatctgcttcttcctgctggtcatcctgtggttctcccgagaccccggcttcatgcccggctggctgactgttgcctgggtggagggtgagacaaagtatgtctccgatgccactgtggccatctttgtggccaccctgctattcattgtgccttcacagaagcccaagtttaacttccgcagccagactgaggaagaaaggaaaactccattttatccccctcccctgctggattggaaggtaacccaggagaaagtgccctggggcatcgtgctgctactagggggcggatttgctctggctaaaggatccgaggcctcggggctgtccgtgtggatggggaagcagatggagcccttgcacgcagtgcccccggcagccatcaccttgatcttgtccttgctcgttgccgtgttcactgagtgcacaagcaacgtggccaccaccaccttgttcctgcccatctttgcctccatgtctcgctccatcggcctcaatccgctgtacatcatgctgccctgtaccctgagtgcctcctttgccttcatgttgcctgtggccacccctccaaatgccatcgtgttcacctatgggcacctcaaggttgctgacatggtgaaaacaggagtcataatgaacataattggagtcttctgtgtgtttttggctgtcaacacctggggacgggccatatttgacttggatcatttccctgactgggctaatgtgacacatattgagacttaggaagagccacaagaccacacacacagcccttaccctcctcaggactaccgaaccttctggcacaccttgtacagagttttggggttcacaccccaaaatgacccaacgatgtccacacaccaccaaaacccagccaatgggccacctcttcctccaagcccagatgcagagatggtcatgggcagctggagggtaggctcagaaatgaagggaacccctcagtgggctgctggacccatctttcccaagccttgccattatctctgtgagggaggccaggtagccgagggatcaggatgcaggctgctgtacccgctctgcctcaagcatcccccacacagggctctggttttcactcgcttcgtcctagatagtttaaatgggaatcggatcccctggttgagagctaagacaaccacctaccagtgcccatgtcccttccagctcaccttgagcagcctcagatcatctctgtcactctggaagggacaccccagccagggacggaatgcctggtcttgagcaacctcccactgctggagtgcgagtgggaatcagagcctcctgaagcctctgggaactcctcctgtggccaccaccaaaggatgaggaatctgagttgccaacttcaggacgacacctggcttgccacccacagtgcaccacaggccaacctacgcccttcatcacttggttctgttttaatcgactggccccctgtcccacctctccagtgagcctccttcaactccttggtcccctgttgtctgggtcaacatttgccgagacgccttggctggcaccctctggggtcccccttttctcccaggcaggtcatcttttctgggagatgcttcccctgccatccccaaatagctaggatcacactccaagtatgggcagtgatggcgctctgggggccacagtgggctatctaggccctccctcacctgaggcccagagtggacacagctgttaatttccactggctatgccacttcagagtctttcatgccagcgtttgagctcctctgggtaaaatcttccctttgttgactggccttcacagccatggctggtgacaacagaggatcgttgagattgagcagcgcttggtgatctctcagcaaacaacccctgcccgtgggccaatctacttgaagttactcggacaaagaccccaaagtggggcaacaactccagagaggctgtgggaatcttcagaacccccctgtaagagacagacatgagagacaagcatcttctttcccccgcaagtccattttatttccttcttgtgctgctctggaagagaggcagtagcaaagagatgagctcctggatggcattttccagggcaggagaaagtatgagagcctcaggaaaccccatcaaggaccgagtatgtgtctggttccttgggtgggacgattcctgaccacactgtccagctcttgctctcattaaatgctctgtctcccgcggaaagctcca

SEQ ID NO: 19243 - DNA, 5398 bp, Homo sapiens
  source 1..5398: mol_type = unassigned DNA
cttataggaaaatcagtggctatggttttttttttttttttttttttttttttttttttgcatttccttctgtcatccattgcaaagacgtaccagcttcagggtagtatggaaagatccctggtctcgcagtcagaagacccgagttcaagatgtgggatctctgaacatggcccttcagttctttcttccgagagctgtgctgatggccaagtaagatgagggctatgaaaagcctctgtagactgcaaaatgagcatgggagaggctgtcattattctggaattgggagacagatttacagagggcctgaacacaggattgaaggtggtgaatttccattcggctgcctgggcgtctgcatgtataaaaagcaaacctaagtggtttttttctcctccaagtgaagatgaaagtgttaaaaatagcaaggaggtgaaagtgttcaaaatagcaaagtggcctgtctcctcttctcctaagcagactgtccaaacagacgcccagtagaaggagcaccttttgatactgggcacgtggtggtgatgcctcctctctcctagcacaggccgtggctttgtcatctccagccctaactgggagcaccgagggttccaaccaggcaaatgcaggccctaacgggctctttgaaaacgggcttttctagaaccaggaacctcaagtaaaaactcccccagctacctctaaggcccatcacactcctgtctcacgcccacctatgagaaaggaaaaggtgatggtcattgagctgggctgcagaggagtgtgaggtgcagacaccatgaggtacccacagccaggaaaacgaggatggtcggggagacgcgccagcgaagagctgggcccctgcgtgggacccctcagtggttcccagggggcgtgggacttgcgcagtcctttcagagggctgtttaccaacaggaaccgtaacattaaacctgctcagaccccttgactcagcaatttcatgtctgggaatatatcttaggaaaataatcagagatgcctaccaacatatgtgatgatgatgtatgacagaattattatacaaatatatccatagtaacagggggtttgctgaaataaattatcatatattcatataatatgacattatcaggccattaaaaatcacagtttcaaagagtaataaaatgggaacatgctcatagtatagttttttaaaattgcagatggtatatggctaaaaatgtctaataatgcaaagatgtatacagaccttaatcctctagcctcctccctagagatgacctctgttaatttctcaaatatttttctggatattttacacactcacacactttttttgagacagagtttcactcttgtcacccaggctggagtgcaatggtgtgatcttggctcactgcaacctccacctcccgggttcaagagattctcctgcctcagcctcccgagtagctgggattacaggtgcctgccaccttgcctggctaattttttgtatttttagtagagacggggtttcaccacattggtcaggctggtctcaaactcctgacctcaggtgatccgcctgccttggcctcccaaagtgctgggattacaggcgtgagccactgcgcccggccattcatcttaatttttaaaaaatctaaccatgaagccttggttatcttggagagctttcctgattagcacaaaaagaaaaaaaaatccaattctttacagctgcatactattccattatttgtatgtgtcatattttatttaaccatcctgctattagtgaccattgagttggcttcctgtgttttgccgttacatggttgcaacaaacatgtttgcatgtgtctgccctcatgtgcatgatacatgattgatttgatagattttaggaattacatcattcattcatacactcagcaaatatttaatgagtgcctactctctgataggtgctgttggatgtggctaaattttaaagtgtagaatttaaaaggtggctaccaaattccatgtgcaaaatgaccccacgcatgtataaaaacacacacatccacagatttatatgcgggagagaagatgtggtccctggcctctaggctctctcagtctgtggcaagacagacagacatgtgcacgcggcactgtaaggttgagcacagtctaagtactcagcatggtctctggcacatagtaggtgcccaagaaatacatgtcgaatgaattgagggggtaaggccttctagggcaggtggcctctgacctcagccttcagtgttccgtaggtggaattatctgccagagacgtggcaaaagggagaggaaccaagactgaggcacagaggttcaaacgtacccggcacattcagagaatccttttcagaatcacgtccccaagagcttctgtgttctgtacggtgatgttgcagtgctgtttttccgcagtctcgctccatcggcctcaatccgctgtacatcatgctgccctgtaccctgagtgcctcctttgccttcatgttgcctgtggccacccctccaaatgccatcgtgttcacctatgggcacctcaaggttgctgacatggtaacacagctgtttttatttactcccgtcggactataacgctgttgtcataagggatgccccatttatgaatgacagagtttcaaaacgatgtcatgtgacttgggaatgccacggaacatccagacctgtagccattgttgacatttataatgcagcttttcttctttttctgagatgatctcaagcctcacacactgttctttctctgaggtgggttatagactctcccacctggagaagcctgtgcaggcaccaggggagtccttggaaggggtgaaggtggggctgagggactcatatggccaaggatgaacttgacaaattagcaagaaccatgaagataggcagggcaggcttaggcagcagggggatgctaatgacagtcacagagatttgtaggggtgcctgaagaggtagaagcagggagagggagagagagagcactgcctgggagtagatgatgccttggaaacaaatgtagtcagaggaagaactcttcattagctctgtcacctttgctgggagaagggcagctttgcagctctgggctgggaaagaggcaagtgtttgagcccaagaggccagaaatgtacctgggaccaatcgggtgttcgttatctcagagcctctgctgggtatctcagggactccatgagcattttcaaaaaaaaaggtgggtcccagaaaccatggactgcaaacttgactccaatccccagtaaaatatctacaacagggtagtgaagcgatggttagtgaccatgagggaagcttgcagagcaggcatcagaaagagcctgaggaggtccacagggaagctggcacgtccttgtaggatagttaaggcactggggtgagcaatgaacctggactcacggaacactgggctctgtgaccgtttccctgaatggcctaagctgttgcctcctgtcacttctctgaggtcattttccaaatgcgcacgggcatagagaacccatccactctgcctacttcccagggatgccttgagcactgaggatacctgggggacatgaagtcgcactgtcctgggggtcgggacaccccagccagggacagagcatggcacagggacatcgaggcccagtgagccgaccctttgtcctcctctctgagagcactagtccccagcaggcctcagggtgctgactctgtctcttttccaggtgaaaacaggagtcataatgaacataattggagtcttctgtgtgtttttggctgtcaacacctggggacgggccatatttgacttggatcatttccctgactgggctaatgtgacacatattgagacttaggaagagccacaagaccacacacacagcccttaccctcctcaggactaccgaaccttctggcacaccttgtacagagttttggggttcacaccccaaaatgacccaacgatgtccacacaccaccaaaacccagccaatgggccacctcttcctccaagcccagatgcagagatggtcatgggcagctggagggtaggctcagaaatgaagggaacccctcagtgggctgctggacccatctttcccaagccttgccattatctctgtgagggaggccaggtagccgagggatcaggatgcaggctgctgtacccgctctgcctcaagcatcccccacacagggctctggttttcactcgcttcgtcctagatagtttaaatgggaatcggatcccctggttgagagctaagacaaccacctaccagtgcccatgtcccttccagctcaccttgagcagcctcagatcatctctgtcactctggaagggacaccccagccagggacggaatgcctggtcttgagcaacctcccactgctggagtgcgagtgggaatcagagcctcctgaagcctctgggaactcctcctgtggccaccaccaaaggatgaggaatctgagttgccaacttcaggacgacacctggcttgccacccacagtgcaccacaggccaacctacgcccttcatcacttggttctgttttaatcgactggccccctgtcccacctctccagtgagcctccttcaactccttggtcccctgttgtctgggtcaacatttgccgagacgccttggctggcaccctctggggtcccccttttctcccaggcaggtcatcttttctgggagatgcttcccctgccatccccaaatagctaggatcacactccaagtatgggcagtgatggcgctctgggggccacagtgggctatctaggccctccctcacctgaggcccagagtggacacagctgttaatttccactggctatgccacttcagagtctttcatgccagcgtttgagctcctctgggtaaaatcttccctttgttgactggccttcacagccatggctggtgacaacagaggatcgttgagattgagcagcgcttggtgatctctcagcaaacaacccctgcccgtgggccaatctacttgaagttactcggacaaagaccccaaagtggggcaacaactccagagaggctgtgggaatcttcagaacccccctgtaagagacagacatgagagacaagcatcttctttcccccgcaagtccattttatttccttcttgtgctgctctggaagagaggcagtagcaaagagatgagctcctggatggcattttccagggcaggagaaagtatgagagcctcaggaaaccccatcaaggaccgagtatgtgtctggttccttgggtgggacgattcctgaccacactgtccagctcttgctctcattaaatgctctgtctcccgcg

SEQ ID NO: 19244 - DNA, 3176 bp, Homo sapiens
  source 1..3176: mol_type = unassigned DNA
ctcactcgtctcgcccgccagtctccctcccgcgcgatggcctcggcgctgagctatgtctccaagttcaagtccttcgtgatcttgttcgtcaccccgctcctgctgctgccactcgtcattctgatgcccgccaagtttgtcaggtgtgcctacgtcatcatcctcatggccatttactggtgcacagaagtcatccctctggctgtcacctctctcatgcctgtcttgcttttcccactcttccagattctggactccaggcaggtgtgtgtccagtacatgaaggacaccaacatgctgttcctgggcggcctcatcgtggccgtggctgtggagcgctggaacctgcacaagaggatcgccctgcgcacgctcctctgggtgggggccaagcctgcacgtaacacggcaaccacggccatgatggtgcccatcgtggaggccatattgcagcagatggaagccacaagcgcagccaccgaggccggcctggagctggtggacaagggcaaggccaaggagctgccagggagtcaagtgatttttgaaggccccactctggggcagcaggaagaccaagagcggaagaggttgtgtaaggccatgaccctgtgcatctgctacgcggccagcatcgggggcaccgccaccctgaccgggacgggacccaacgtggtgctcctgggccagatgaacgagttgtttcctgacagcaaggacctcgtgaactttgcttcctggtttgcatttgcctttcccaacatgctggtgatgctgctgttcgcctggctgtggctccagtttgtttacatgagattcaattttaaaaagtcctggggctgcgggctagagagcaagaaaaacgagaaggctgccctcaaggtgctgcaggaggagtaccggaagctggggcccttgtccttcgcggagatcaacgtgctgatctgcttcttcctgctggtcatcctgtggttctcccgagaccccggcttcatgcccggctggctgactgttgcctgggtggagggtgagacaaagtatgtctccgatgccactgtggccatctttgtggccaccctgctattcattgtgccttcacagaagcccaagtttaacttccgcagccagactgaggaagaaaggaaaactccattttatccccctcccctgctggattggaaggtaacccaggagaaagtgccctggggcatcgtgctgctactagggggcggatttgctctggctaaaggatccgaggcctcggggctgtccgtgtggatggggaagcagatggagcccttgcacgcagtgcccccggcagccatcaccttgatcttgtccttgctcgttgccgtgttcactgagtgcacaagcaacgtggccaccaccaccttgttcctgcccatctttgcctccatgtctcgctccatcggcctcaatccgctgtacatcatgctgccctgtaccctgagtgcctcctttgccttcatgttgcctgtggccacccctccaaatgccatcgtgttcacctatgggcacctcaaggttgctgacatggtgaaaacaggagtcataatgaacataattggagtcttctgtgtgtttttggctgtcaacacctggggacgggccatatttgacttggatcatttccctgactgggctaatgtgacacatattgagacttaggaagagccacaagaccacacacacagcccttaccctcctcaggactaccgaaccttctggcacaccttgtacagagttttggggttcacaccccaaaatgacccaacgatgtccacacaccaccaaaacccagccaatgggccacctcttcctccaagcccagatgcagagatggtcatgggcagctggagggtaggctcagaaatgaagggaacccctcagtgggctgctggacccatctttcccaagccttgccattatctctgtgagggaggccaggtagccgagggatcaggatgcaggctgctgtacccgctctgcctcaagcatcccccacacagggctctggttttcactcgcttcgtcctagatagtttaaatgggaatcggatcccctggttgagagctaagacaaccacctaccagtgcccatgtcccttccagctcaccttgagcagcctcagatcatctctgtcactctggaagggacaccccagccagggacggaatgcctggtcttgagcaacctcccactgctggagtgcgagtgggaatcagagcctcctgaagcctctgggaactcctcctgtggccaccaccaaaggatgaggaatctgagttgccaacttcaggacgacacctggcttgccacccacagtgcaccacaggccaacctacgcccttcatcacttggttctgttttaatcgactggccccctgtcccacctctccagtgagcctccttcaactccttggtcccctgttgtctgggtcaacatttgccgagacgccttggctggcaccctctggggtcccccttttctcccaggcaggtcatcttttctgggagatgcttcccctgccatccccaaatagctaggatcacactccaagtatgggcagtgatggcgctctgggggccacagtgggctatctaggccctccctcacctgaggcccagagtggacacagctgttaatttccactggctatgccacttcagagtctttcatgccagcgtttgagctcctctgggtaaaatcttccctttgttgactggccttcacagccatggctggtgacaacagaggatcgttgagattgagcagcgcttggtgatctctcagcaaacaacccctgcccgtgggccaatctacttgaagttactcggacaaagaccccaaagtggggcaacaactccagagaggctgtgggaatcttcagaacccccctgtaagagacagacatgagagacaagcatcttctttcccccgcaagtccattttatttccttcttgtgctgctctggaagagaggcagtagcaaagagatgagctcctggatggcattttccagggcaggagaaagtatgagagcctcaggaaaccccatcaaggaccgagtatgtgtctggttccttgggtgggacgattcctgaccacactgtccagctcttgctctcattaaatgctctgtctcccgcg

SEQ ID NO: 19245 - DNA, 1738 bp, Homo sapiens
  source 1..1738: mol_type = unassigned DNA
actcgtctcgcccgccagtctccctcccgcgcgatggcctcggcgctgagctatgtctccaagttcaagtccttcgtgatcttgttcgtcaccccgctcctgctgctgccactcgtcattctgatgcccgccaaggtgtgtgtccagtacatgaaggacaccaacatgctgttcctgggcggcctcatcgtggccgtggctgtggagcgctggaacctgcacaagaggatcgccctgcgcacgctcctctgggtgggggccaagcctgcacggctgatgctgggcttcatgggcgtcacagccctcctgtccatgtggatcagtaacacggcaaccacggccatgatggtgcccatcgtggaggccatattgcagcagatggaagccacaagcgcagccaccgaggccggcctggagctggtggacaagggcaaggccaaggagctgccagggagtcaagtgatttttgaaggccccactctggggcagcaggaagaccaagagcggaagaggttgtgtaaggccatgaccctgtgcatctgctacgcggccagcatcgggggcaccgccaccctgaccgggacgggacccaacgtggtgctcctgggccagatgaacgagttgtttcctgacagcaaggacctcgtgaactttgcttcctggtttgcatttgcctttcccaacatgctggtgatgctgctgttcgcctggctgtggctccagtttgtttacatgagattcaattttaaaaagtcctggggctgcgggctagagagcaagaaaaacgagaaggctgccctcaaggtgctgcaggaggagtaccggaagctggggcccttgtccttcgcggagatcaacgtgctgatctgcttcttcctgctggtcatcctgtggttctcccgagaccccggcttcatgcccggctggctgactgttgcctgggtggagggtgagacaaagtatgtctccgatgccactgtggccatctttgtggccaccctgctattcattgtgccttcacagaagcccaagtttaacttccgcagccagactgaggaagaaaggaaaactccattttatccccctcccctgctggattggaaggtaacccaggagaaagtgccctggggcatcgtgctgctactagggggcggatttgctctggctaaaggatccgaggcctcggggctgtccgtgtggatggggaagcagatggagcccttgcacgcagtgcccccggcagccatcaccttgatcttgtccttgctcgttgccgtgttcactgagtgcacaagcaacgtggccaccaccaccttgttcctgcccatctttgcctccatgtctcgctccatcggcctcaatccgctgtacatcatgctgccctgtaccctgagtgcctcctttgccttcatgttgcctgtggccacccctccaaatgccatcgtgttcacctatgggcacctcaaggttgctgacatggtgaaaacaggagtcataatgaacataattggagtcttctgtgtgtttttggctgtcaacacctggggacgggccatatttgacttggatcatttccctgactgggctaatgtgacacatattgagacttaggaagagccacaagaccacacacacagcccttaccctcctcaggactaccgaaccttctggcacaccttgtacagagttttggggttcacaccccaaaatgacccaacgatgtccacacaccaccaaa

SEQ ID NO: 19246 - DNA, 1723 bp, Homo sapiens
  source 1..1723: mol_type = unassigned DNA
agctgcccctcactcgtctcgcccgccagtctccctcccgcgcgatggcctcggcgctgagctatgtctccaagttcaagtccttcgtgatcttgttcgtcaccccgctcctgctgctgccactcgtcattctgatgcccgccaagtttgtcaggtgtgcctacgtcatcatcctcatggccatttactggtgcacagaagtcatccctctggctgtcacctctctcatgcctgtcttgcttttcccactcttccagattctggactccaggcaggtgtgtgtccagtacatgaaggacaccaacatgctgttcctgggcggcctcatcgtggccgtggctgtggagcgctggaacctgcacaagaggatcgccctgcgcacgctcctctgggtgggggccaagcctgcacggctgatgctgggcttcatgggcgtcacagccctcctgtccatgtggatcagtaacacggcaaccacggccatgatggtgcccatcgtggaggccatattgcagcagatggaagccacaagcgcagccaccgaggccggcctggagctggtggacaagggcaaggccaaggagctgccagggagtcaagtgatttttgaaggccccactctggggcagcaggaagaccaagagcggaagaggttgtgtaaggccatgaccctgtgcatctgctacgcggccagcatcgggggcaccgccaccctgaccgggacgggacccaacgtggtgctcctgggccagatgaacgagttgtttcctgacagcaaggacctcgtgaactttgcttcctggtttgcatttgcctttcccaacatgctggtgatgctgctgttcgcctggctgtggctccagtttgtttacatgagattcaattttaaaaagtcctggggctgcgggctagagagcaagaaaaacgagaaggctgccctcaaggtgctgcaggaggagtaccggaagctggggcccttgtccttcgcggagatcaacgtgctgatctgcttcttcctgctggtcatcctgtggttctcccgagaccccggcttcatgcccggctggctgactgttgcctgggtggagggtgagacaaagtatgtctccgatgccactgtggccatctttgtggccaccctgctattcattgtgccttcacagaagcccaagtttaacttccgcagccagactgaggaagaaaggaaaactccattttatccccctcccctgctggattggaaggtaacccaggagaaagtgccctggggcatcgtgctgctactagggggcggatttgctctggctaaaggatccgaggcctcggggctgtccgtgtggatggggaagcagatggagcccttgcacgcagtgcccccggcagccatcaccttgatcttgtccttgctcgttgccgtgttcactgagtgcacaagcaacgtggccaccaccaccttgttcctgcccatctttgcctccatggtgaaaacaggagtcataatgaacataattggagtcttctgtgtgtttttggctgtcaacacctggggacgggccatatttgacttggatcatttccctgactgggctaatgtgacacatattgagacttaggaagagccacaagaccacacacacagcccttaccctcctcaggactaccgaaccttctggcacaccttgtacagagttttggggttcacaccccaaaatgacccaacgat

SEQ ID NO: 19247 - DNA, 419 bp, Homo sapiens
  source 1..419: mol_type = unassigned DNA
cccggcagccatcaccttgatcttgtccttgctcgttgccgtgttcactgagtgcacaagcaacgtggccaccaccaccttgttcctgcccatctttgcctccatgtctcgctccatcggcctcaatccgctgtacatcatgctgccctgtaccctgagtgcctcctttgccttcatgttgcctgtggccacccctccaaatgccatcgtgttcacctatgggcacctcaaggttgctgacatggtaacacagctgtttttatttactcccgtcggactataacgctgttgtcataagggatgccccatttatgaatgacagagtttcaaaacgatgtcatgtgacttgggaatgccacggaacatccagacctgtagccattgttgacatttataatgcagcttttcttctttttctg

SEQ ID NO: 19248 - DNA, 618 bp, Homo sapiens
  source 1..618: mol_type = unassigned DNA
gccctcaaggtgctgcaggaggagtaccggaagctggggcccttgtccttcgcggagatcaacgtgctgatctgcttcttcctgctggtcatcctgtggttctcccgagaccccggcttcatgcccggctggctgactgttgcctgggtggagggtgagacaaagtatgtctccgatgccactgtggccatctttgtggccaccctgctattcattgtgccttcacagaagcccaagtttaacttccgcagccagactgaggaagaaaggaaaactccattttatccccctcccctgctggattggaaggtaacccaggagaaagtgccctggggcatcgtgctgctactagggggcggatttgctctggctaaaggatccgaggcctcggggctgtccgtgtggatggggaagcagatggagcccttgcacgcagtgcccccggcagccatcaccttgatcttgtccttgctcgttgccgtgttcactgagtgcacaagcaacgtggccaccaccaccttgttcctgcccatctttgcctccatgacgtaccagcttcagggtagtatggaaagatccctggtctcgcagtcagaagacccgagttcaagatgtggg

SEQ ID NO: 19249 - DNA, 2506 bp, Homo sapiens
  source 1..2506: mol_type = unassigned DNA
tttagcatcaaatcaaaagccatcatattttctagaaatgagagaccccaggaaagtggacctcagggccctcagaattcttctgcttggctcccttgagtggccagcttgggtgggaggccactccagtgggtttcattctgcagcatgctggagagcttccacttccaaacccaagttcacacatgcttctgtatccttcctgccaccttgctcctctgagtatggtctccggttgtccaaggcactgcctgtcctgggagtcacctgtatgtgaggcacccttggtgccttgagatatcatgtagaagccttggttcttctcagacaactccattcatgcaaactctccccctcctcctagcctgggtcccgggctttgtttttttttgggtccataatgtctgcctgtgtggacagcagcttgggccctggtgcagaacagctcctaggtcccttcttcaggctcctacccctgcccctgctcctacccccaggtgaattaggagccctgaggaggagcctggctgcagcgaggcccacagactgagagtagctgagctccttctgtccctagccttggacagctggggcatgtagagccacagagcagagtcaggccctgccctgctcacagcccaaggagagagcagacatggaaacaggtgctttgaacccagcacagcgatgattagagtagggggaaggattgagaagggtcaggccagccccacctggtgcacacactgagagcgtggtcccagaggagggatgttgtttgagcaggctctgaaggaccatgaggagtcttcctgatagacagcagagaagggagcaggggttacaagcaaagggagtgtttcttctgaatactgtttgtgtgatagctccactgcagcatggaggggtcaaagtgtatgtgcggggcggaggggagatggcagggttggagtggcagccgggagaatagtcacactttcccaagctccctccccagctcaccctacccctactctgcttagcccttctgaacttctgagaggtgcaacagagtttgggggtgggtgggaatttcctagccagaagtgggaagctggggctgcctgcacataggggtattccagcacaccctagggcaagctcatattgagttggcaccatctggatgcctgggcttcccctgctagatggtggggcaggggtgctccttagaaccacgactggatctgaggcctcttggtaaccccagaagcaagcagagtagacatcagtcatgggtgtgggagaggcaggagggagagaggaatggaggaagcaaagaagggaaggagggagggaggggaggctctaaaaccgtcatccctattccaatatctgatcttgaattggcctcaacacctgtgcatccctgcaggggtggacccagtccccagttgcttcccagggagtacgggggtggggtggggattctctggctttcctccctgcccctcctctgcaggctgatgctgggcttcatgggcgtcacagccctcctgtccatgtggatcagtaacacggcaaccacggccatgatggtgcccatcgtggaggccatattgcagcagatggaagccacaagcgcagccaccgaggccggcctggagctggtggacaagggcaaggccaaggagctgccagggagtcaagtgatttttgaaggccccactctggggcagcaggaagaccaagagcggaagaggttgtgtaaggccatgaccctgtgcatctgctacgcggccagcatcgggggcaccgccaccctgaccgggacgggacccaacgtggtgctcctgggccagatgaacgagttgtttcctgacagcaaggacctcgtgaactttgcttcctggtttgcatttgcctttcccaacatgctggtgatgctgctgttcgcctggctgtggctccagtttgtttacatgagattcaattttaaaaagtcctggggctgcgggctagagagcaagaaaaacgagaaggctgccctcaaggtgctgcaggaggagtaccggaagctggggcccttgtccttcgcggagatcaacgtgctgatctgcttcttcctgctggtcatcctgtggttctcccgagaccccggcttcatgcccggctggctgactgttgcctgggtggagggtgagacaaagtaagtcttggattcaatagaaatcgctggcttagggccaggcgcgttggctcacacatgtaatcccagcactttgggaggctgaggtgggtgggtcacttgaggtcaggagatcgagaccatcctggccaacatggtgaaaccctgtctctactaaaaatacagaaaattagcgaggcatggtggcacatgcctgtagtcccagctacttgggagactgaggcaggagaatcacttgaacccaggaggcagaggttgcagtgagcccagatcgtgccactgcactccagcctgggcaacagagagagactccgtctc

SEQ ID NO: 19250 - DNA, 986 bp, Homo sapiens
  source 1..986: mol_type = unassigned DNA
tcgcccgccagtctccctcccgcgcgatggcctcggcgctgagctatgtctccaagttcaagtccttcgtgatcttgttcgtcaccccgctcctgctgctgccactcgtcattctgatgcccgccaagtttgtcaggtgtgcctacgtcatcatcctcatggccatttactggtgcacagaagtcatccctctggctgtcacctctctcatgcctgtcttgcttttcccactcttccagattctggactccaggtgtgtgtccagtacatgaaggacaccaacatgctgttcctgggcggcctcatcgtggccgtggctgtggagcgctggaacctgcacaagaggatcgccctgcgcacgctcctctgggtgggggccaagcctgcacggctgatgctgggcttcatgggcgtcacagccctcctgtccatgtggatcagtaacacggcaaccacggccatgatggtgcccatcgtggaggccatattgcagcagatggaagccacaagcgcagccaccgaggccggcctggagctggtggacaagggcaaggccaaggagctgccagggagtcaagtgatttttgaaggccccactctggggcagcaggaagaccaagagcggaagaggttgtgtaaggccatgaccctgtgcatctgctacgcggccagcatcgggggcaccgccaccctgaccgggacgggacccaacgtggtgctcctgggccagatgaacgagttgtttcctgacagcaaggacctcgtgaactttgcttcctggtttgcatttgcctttcccaacatgctggtgatgctgctgttcgcctggctgtggctccagtttgtttacatgagattcaattttaaaaagtcctggggctgcgggctagagagcaagaaaaacgagaaggctgccctcaaggtgctgcaggaggagtaccggaagctggggcccttgtccttcgcggagatcaacgtgctgatct

SEQ ID NO: 19251 - DNA, 538 bp, Homo sapiens
  source 1..538: mol_type = unassigned DNA
ctcactcgtctcgcccgccagtctccctcccgcgcgatggcctcggcgctgagctatgtctccaagttcaagtccttcgtgatcttgttcgtcaccccgctcctgctgctgccactcgtcattctgatgcccgccaagattctggactccaggcaggtgtgtgtccagtacatgaaggacaccaacatgctgttcctgggcggcctcatcgtggccgtggctgtggagcgctggaacctgcacaagaggatcgccctgcgcacgctcctctgggtgggggccaagcctgcacggctgatgctgggcttcatgggcgtcacagccctcctgtccatgtggatcagtaacacggcaaccacggccatgatggtgcccatcgtggaggccatattgcagcagatggaagccacaagcgcagccaccgaggccggcctggagctggtggacaagggcaaggccaaggagctgccagggagtcaagtgatttttgaaggccccactctggggcagcaggaagaccaagagcggaagaggttgt

SEQ ID NO: 19252 - DNA, 574 bp, Homo sapiens
  source 1..574: mol_type = unassigned DNA
ccctcactcgtctcgcccgccagtctccctcccgcgcgatggcctcggcgctgagctatgtctccaagttcaagtccttcgtgatcttgttcgtcaccccgctcctgctgctgccactcgtcattctgatgcccgccaaggtgtgcctacgtcatcatcctcatggccatttactggtgcacagaagtcatccctctggctgtcacctctctcatgcctgtcttgcttttcccactcttccagattctggactccaggcaggtgtgtgtccagtacatgaaggacaccaacatgctgttcctgggcggcctcatcgtggccgtggctgtggagcgctggaacctgcacaagaggatcgccctgcgcacgctcctctgggtgggggccaagcctgcacggctgatgctgggcttcatgggcgtcacagccctcctgtccatgtggatcagtaacacggcaaccacggccatgatggtgcccatcgtggaggccatattgcagcagatggaagccacaagcgcagccaccgaggccggcctggagctggtggacaagggcaaggccaaggagctgc

SEQ ID NO: 19253 - DNA, 547 bp, Homo sapiens
  source 1..547: mol_type = unassigned DNA
ctcactcgtctcgcccgccagtctccctcccgcgcgatggcctcggcgctgagctatgtctccaagttcaagtccttcgtgatcttgttcgtcaccccgctcctgctgctgccactcgtcattctgatgcccgccaagtttgtcaggtgtgcctacgtcatcatcctcatggccatttactggtgcacagaagtcatccctctggctgtcacctctctcatgcctgtcttgcttttcccactcttccagattctggactccaggcagggagacaccactcgagcctgcatccccactccaagctgtccctgaagtcagcatctggggactgggtggctctagtgtgtggcaagggacagtcctgatgaggccttcgtgccacgctccaggtgtgtgtccagtacatgaaggacaccaacatgctgttcctgggcggcctcatcgtggccgtggctgtggagcgctggaacctgcacaagaggatcgccctgcgcacgctcctctgggtgggggccaagcctgcacggctgatgctgggcttcatggg

SEQ ID NO: 19254 - DNA, 3971 bp, Homo sapiens
  source 1..3971: mol_type = unassigned DNA
acacagagcagagtggggctctgagtatataactgttaggtgcctccctccagcaccatctcctgagaagcactctcccttgtcgtggaggtgggcaaatctttatcagccactgccttctgctgccaggaagccagctagagtggtctttaaagaaaactgggcatctcctgctacttaaaatcaaaaactacctaaaataaagattatagagccagaggaagagatagccatggaggacagccccactatggttagagtggacagccccactatggttaggggtgaaaaccaggtttcgccatgtcaagggagaaggtgcttccccaaagctcttggctatgtcaccggtgacatgaaagaacttgccaaccagcttaaagacaaacccgtggtgctccagttcattgactggattctccggggcatatcccaagtggtgttcgtcaacaaccccgtcagtggaatcctgattctggtaggacttcttgttcagaacccctggtgggctctcactggctggctgggaacagtggtctccactctgatggccctcttgctcagccaggacaggtcattaatagcatctgggctctatggctacaatgccaccctggtgggagtactcatggctgtcttttcggacaagggagactatttctggtggctgttactccctgtatgtgctatgtccatgacttgcccaattttctcaagtgcattgaattccatgctcagcaaatgggacctccccgtcttcaccctccctttcaacatggcgttgtcaatgtacctttcagccacaggacattacaatccattctttccagccaaactggtcatacctataactacagctccaaatatctcctggtctgacctcagtgccctggagttgttgaaatctataccagtgggagttggtcagatctatggctgtgataatccatggacagggggcattttcctgggagccatcctactctcctccccactcatgtgcctgcatgctgccataggatcattgctgggcatagcagcgggactcagtctttcagccccatttgaggacatctactttggactctggggtttcaacagctctctggcctgcattgcaatgggaggaatgttcatggcgctcacctggcaaacccacctcctggctcttggctgtgccctgttcacggcctatcttggagtcggcatggcaaactttatggctgaggttggattgccagcttgtacctggcccttctgtttggccacgctattgttcctcatcatgaccacaaaaaattccaacatctacaagatgcccctcagtaaagttacttatcctgaagaaaaccgcatcttctacctgcaagccaagaaaagaatggtggaaagccctttgtgagaacaagccccatttgcagccatggtcacgagtcatttctgcctgactgctccagctaacttccagggtctcagcaaactgctgtttttcacgagtatcaactttcatactgacgcgtctgtaatctgttcttatgctcattttgtattttcctttcaactccaggaatatccttgagcatatgagagtcacatccaggtgatgtgctctggtatggaatttgaaaccccaatggggccttggcactaagactggaatgtatataaagtcaaagtgctccaacagaaggaggaagtgaaaacaaactattagtatttattgatattcttggtgtttagctggctcgatgatgttaacagtattaaaaattaaaccccataaaccaactaagccttatggaattcacagtcacaaaatcgaagttaatccagaattctgtgataagcagcttggctttttttttaaatcaatgcaagttacacattatagccagaatctgtatcacagaggtgcaagctgacagcagagctcagtccccacttcctgcaaacaatggcctgcaccctatcccttgtgtgtgtgacattctctcatgggacaatgttggggtttttcagactgacaggactgcaagagggagaaaggaattttgtcaatcaaaattattctgtattgcaacttttctcagagattgcaaaggattttttaggtagagattatttttccttatgaaaaatgatctgttttaaatgagataaaataggagaagttcctggcttaacctgttcttacatattaaagaaaagttacttactgtatttatgaaatactcagcttaggcatttttactttaacccctaaattgattttgtaaatgccacaaatgcatagaattgttaccaacctccaaagggctctttaaaatcatattttttattcatttgaggatgtcttataaagactgaaggcaaaggtcagattgcttacgggtgttatttttataagttgttgaattccttaatttaaaaaagctcattattttttgcacactcacaatattctctctcagaaatcaatggcatttgaaccaccaaaaagaaataaagggctgagtgcggtggctcacgcctgtaatcccagcactttggggagcccaggcgggcagattgcttgaacccaggagttcaagaccagcctgggcagcatggtgaaaccctgtatctacaaaaaatacaaaaattagccaggcatggtggtgggtgcctgtagttccagctacttgggaggctgaggtgggaaaatgacttgagcccaggaggaggaggctgcagtgagctaagattgcaccactgcactccaacctgggcgacaagagtgaaactgtgtctctcaaaaaaaaaaaaaaacaaacaaaaacaaaaacaaaacaaaacaaaacaaaacaaaacaggtaaggattcccctgttttcctctctttaattttaaagttatcagttccgtaaagtctctgtaaccaaacatactgaagacagcaacagaagtcacgttcagggactggctcacacctgtaatcccagcactttgggagatggaggtaaaaggatctcttgagcccaggagttcaagaccagcttgggcaacatagcaagactccatctcttaaaaaataaaaatagtaacattagccaggtgtagcagcacacatctgcagcagctactcaggaggctgaggtggaaagatcgcttgtgcacagaagttcgaggctgcagtgagctatatgatcatgtcactgcactccagcctgtgtgaccgagcaagaccctatctcaaaaaaattaattaattaattaattaattaatttaaaaaggaagtcatgttcatttactttccacttcagtgtgtatcgtgtagtattttggaggttggaaagtgaaacgtaggaatcctgaagattttttccacttctagtttgcagtgctcagtgcacaatatacattttgctgaatgaataaacagaaatagggaagtaaacctacaaatattttagggagaagctcacttcttccttttctcaggaaaccaagcaagcaaacatatcgttccaattttaaaacccagtgaccaaagcctttggaactatgaatttgcaactgtcataggtttatggatattgctgtggagaagctcaattttcagtgtttgaactgaaccctttcttgttagggaacgtgtgaaagaagaattgtggggaaaaaaaagcaagcataaccaaagatcatcagcagtgaagaatctaggctgtggctgagagaaccagaggcctctaaaatggacccgagtcgatcttcagaacagggatctaccatgcaggagcttcttgtgctcacacaaatctgtaaatgggaacattgtacattgtcgaatttaaatgatattaattttctcaagctatttttgttactattttcctaaaattgaatatttgcagggagcacttatactttttcctaatgtctgtataacaaatttctatgcaagtacatgaataaattatgctcacagctca

SEQ ID NO: 19255 - DNA, 572 bp, Homo sapiens
  source 1..572: mol_type = unassigned DNA
agtatataactgttaggtgcctccctccagcaccatctcctgagaagcactctcccttgtcgtggaggtgggcaaatctttatcagccactgccttctgctgccaggaagccagctagagtggtctttaaagaaaactgggcatctcctgctacttaaaatcaaaaactacctaaaataaagattatatcttctcaactagactgaactccttaagtgcaagaaatacacgcttagtaaatgtttgttggaccagacactgcaccttatgaaattaaagaccagaacattctcatggtagcattacagacactgatggcaaagacaaacccgtggtgctccagttcattgactggattctccggggcatatcccaagtggtgttcgtcaacaaccccgtcagtggaatcctgattctggtaggacttcttgttcagaacccctggtgggctctcactggctggctgggaacagtggtctccactctgatggccctcttgctcagccaggacaggtcattaatagcatctgggctctatggctacaatgccaccctggtgggagtactcatgg

SEQ ID NO: 19256 - DNA, 2371 bp, Homo sapiens
  source 1..2371: mol_type = unassigned DNA
gcaccatctcctgagaagcactctcccttgtcgtggaggtgggcaaatctttatcagccactgccttctgctgccaggaagccagctagagtggtctttaaagaaaactgggcatctcctgctacttaaaatcaaaaactacctaaaataaagattataaaaaagtaaggatgaatggacggtctttgattggcggcgctggtgacgcccgtcatggtcctgtttggaaggacccttttggaactaaagctggtgacgcagcgcgcagaggcatcgcccggctaagcttggccctggcagatgggtcgcaggaacaggtcattaatagcatctgggctctatggctacaatgccaccctggtgggagtactcatggctgtcttttcggacaagggagactatttctggtggctgttactccctgtatgtgctatgtccatgacttgcccaattttctcaagtgcattgaattccatgctcagcaaatgggacctccccgtcttcaccctccctttcaacatggcgttgtcaatgtacctttcagccacaggacattacaatccattctttccagccaaactggtcatacctataactacagctccaaatatctcctggtctgacctcagtgccctggagttgttgaaatctataccagtgggagttggtcagatctatggctgtgataatccatggacagggggcattttcctgggagccatcctactctcctccccactcatgtgcctgcatgctgccataggatcattgctgggcatagcagcgggactcagtctttcagccccatttgaggacatctactttggactctggggtttcaacagctctctggcctgcattgcaatgggaggaatgttcatggcgctcacctggcaaacccacctcctggctcttggctgtgccctgttcacggcctatcttggagtcggcatggcaaactttatggctgaggttggattgccagcttgtacctggcccttctgtttggccacgctattgttcctcatcatgaccacaaaaaattccaacatctacaagatgcccctcagtaaagttacttatcctgaagaaaaccgcatcttctacctgcaagccaagaaaagaatggtggaaagccctttgtgagaacaagccccatttgcagccatggtcacgagtcatttctgcctgactgctccagctaacttccagggtctcagcaaactgctgtttttcacgagtatcaactttcatactgacgcgtctgtaatctgttcttatgctcattttgtattttcctttcaactccaggaatatccttgagcatatgagagtcacatccaggtgatgtgctctggtatggaatttgaaaccccaatggggccttggcactaagactggaatgtatataaagtcaaagtgctccaacagaaggaggaagtgaaaacaaactattagtatttattgatattcttggtgtttagctggctcgatgatgttaacagtattaaaaattaaaccccataaaccaactaagccttatggaattcacagtcacaaaatcgaagttaatccagaattctgtgataagcagcttggctttttttttaaatcaatgcaagttacacattatagccagaatctgtatcacagaggtgcaagctgacagcagagctcagtccccacttcctgcaaacaatggcctgcaccctatcccttgtgtgtgtgacattctctcatgggacaatgttggggtttttcagactgacaggactgcaagagggagaaaggaattttgtcaatcaaaattattctgtattgcaacttttctcagagattgcaaaggattttttaggtagagattatttttccttatgaaaaatgatctgttttaaatgagataaaataggagaagttcctggcttaacctgttcttacatattaaagaaaagttacttactgtatttatgaaatactcagcttaggcatttttactttaacccctaaattgattttgtaaatgccacaaatgcatagaattgttaccaacctccaaagggctctttaaaatcatattttttattcatttgaggatgtcttataaagactgaaggcaaaggtcagattgcttacgggtgttatttttataagttgttgaattccttaatttaaaaaagctcattattttttgcacactcacaatattctctctcagaaatcaatggcatttgaaccaccaaaaagaaataaagggctgagtgcggtggctcacgcctgtaatcccagcactttggggagcccaggcgggcagattgcttgaacccaggagttcaagaccagcctgggcagcatggtgaaaccctgtatctac

SEQ ID NO: 19257 - DNA, 569 bp, Homo sapiens
  source 1..569: mol_type = unassigned DNA
atctcctgagaagcactctcccttgtcgtggaggtgggcaaatctttatcagccactgccttctgctgccaggaagccagctagagtggtctttaaagaaaactgggcatctcctgctacttaaaatcaaaaactacctaaaataaagattatagacccttttggaactaaagctggtgacgcagcgcgcagaggcatcgcccggctaagcttggccctggcagatgggtcgcaggaacaggagccagaggaagagatagccatggaggacagccccactatggttagagtggacagccccactatggttaggggtgaaaaccaggtttcgccatgtcaagggagaaggtgcttccccaaagctcttggctatgtcaccggtgacatgaaagaacttgccaaccagcttaaagacaaacccgtggtgctccagttcattgactggattctccggggcatatcccaagtggtgttcgtcaacaaccccgtcagtggaatcctgattctggtaggacttcttgttcagaacccctggtgggctctcactggctggctgggaacagtggtct

SEQ ID NO: 19258 - DNA, 652 bp, Homo sapiens
  source 1..652: mol_type = unassigned DNA
atctcctgagaagcactctcccttgtcgtggaggtgggcaaatctttatcagccactgccttctgctgccaggaagccagctagagtggtgtcattaatagcatctgggctctatggctacaatgccaccctggtgggagtactcatggctgtcttttcggacaagggagactatttctggtggctgttactccctgtatgtgctatgtccatgacttgcccaattttctcaagtgcattgaattccatgctcagcaaatgggacctccccgtcttcaccctccctttcaacatggcgttgtcaatgtacctttcagccacaggacattacaatccattctttccagccaaactggtcatacctataactacagctccaaatatctcctggtctgacctcagtgccctggagttgttgaaatctataccagtgggagttggtcagatctatggctgtgataatccatggacagggggcattttcctgggagccatcctactctcctccccactcatgtgcctgcatgctgccataggatcattgctgggcatagcagcgggactcagtctttcagccccatttgaggacatctactttggactctggggtttcaacagctctctggcctgcattgcaatgggaggaatgttc

SEQ ID NO: 19259 - DNA, 1554 bp, Homo sapiens
  source 1..1554: mol_type = unassigned DNA
atctcctgagaagcactctcccttgtcgtggaggtgggcaaatctttatcagccactgccttctgctgccaggaagccagctagagtggtctttaaagaaaactgggcatctcctgctacttaaaatcaaaaactacctaaaataaagattataaaaaagtaaggatgaatggacggtctttgattggcggcgctggtgacgcccgtcatggtcctgtttggaaggacccttttggaactaaagctggtgacgcagcgcgcagaggcatcgcccggctaagcttggccctggcagatgggtcgcaggaacaggagccagaggaagagatagccatggaggacagccccactatggttagagtggacagccccactatggttaggggtgaaaaccaggtttcgccatgtcaagggagaaggtgcttccccaaagctcttggctatgtcaccggtgacatgaaagaacttgccaaccagcttaaagacaaacccgtggtgctccagttcattgactggattctccggggcatatcccaagtggtgttcgtcaacaaccccgtcagtggaatcctgattctggtaggacttcttgttcagaacccctggtgggctctcactggctggctgggaacagtggtctccactctgatggccctcttgctcagccaggacaggtcattaatagcatctgggctctatggctacaatgccaccctggtgggagtactcatggctgtcttttcggacaagggagactatttctggtggctgttactccctgtatgtgctatgtccatgacttgcccaattttctcaagtgcattgaattccatgctcagcaaatgggacctccccgtcttcaccctccctttcaacatggcgttgtcaatgtacctttcagccacaggacattacaatccattctttccagccaaactggtcatacctataactacagctccaaatatctcctggtctgacctcagtgccctggagttgttgaaatctataccagtgggagttggtcagatctatggctgtgataatccatggacagggggcattttcctgggagccatcctactctcctccccactcatgtgcctgcatgctgccataggatcattgctgggcatagcagcgggactcagtctttcagccccatttgaggacatctactttggactctggggtttcaacagctctctggcctgcattgcaatgggaggaatgttcatggcgctcacctggcaaacccacctcctggctcttggctgtgccctgttcacggcctatcttggagtcggcatggcaaactttatggctgaggttggattgccagcttgtacctggcccttctgtttggccacgctattgttcctcatcatgaccacaaaaaattccaacatctacaagatgcccctcagtaaagttacttatcctgaagaaaaccgcatcttctacctgcaagccaagaaaagaatggtggaaagccctttgtgagaacaagccccatttgcagccatggtcacgagtcatttctgcctgactgct

SEQ ID NO: 19260 - DNA, 1048 bp, Homo sapiens
  source 1..1048: mol_type = unassigned DNA
atctcctgagaagcactctcccttgtcgtggaggtgggcaaatctttatcagccactgccttctgctgccaggaagccagctagagtggtctttaaagaaaactgggcatctcctgctacttaaaatcaaaaactacctaaaataaagattatagtcattaatagcatctgggctctatggctacaatgccaccctggtgggagtactcatggctgtcttttcggacaagggagactatttctggtggctgttactccctgtatgtgctatgtccatgacttgcccaattttctcaagtgcattgaattccatgctcagcaaatgggacctccccgtcttcaccctccctttcaacatggcgttgtcaatgtacctttcagccacaggacattacaatccattctttccagccaaactggtcatacctataactacagctccaaatatctcctggtctgacctcagtgccctggagttgttgaaatctataccagtgggagttggtcagatctatggctgtgataatccatggacagggggcattttcctgggagccatcctactctcctccccactcatgtgcctgcatgctgccataggatcattgctgggcatagcagcgggactcagtctttcagccccatttgaggacatctactttggactctggggtttcaacagctctctggcctgcattgcaatgggaggaatgttcatggcgctcacctggcaaacccacctcctggctcttggctgtgccctgttcacggcctatcttggagtcggcatggcaaactttatggctgaggttggattgccagcttgtacctggcccttctgtttggccacgctattgttcctcatcatgaccacaaaaaattccaacatctacaagatgcccctcagtaaagttacttatcctgaagaaaaccgcatcttctacctgcaagccaagaaaagaatggtggaaagccctttgtgagaacaagccccatttgcagccatggtcacgagtcatttctgcctgactgctccagctaacttcca

SEQ ID NO: 19261 - DNA, 1390 bp, Homo sapiens
  source 1..1390: mol_type = unassigned DNA
atctcctgagaagcactctcccttgtcgtggaggtgggcaaatctttatcagccactgccttctgctgccaggaagccagctagagtggtctttaaagaaaactgggcatctcctgctacttaaaatcaaaaactacctaaaataaagattataacaaacccgtggtgctccagttcattgactggattctccggggcatatcccaagtggtgttcgtcaacaaccccgtcagtggaatcctgattctggtaggacttcttgttcagaacccctggtgggctctcactggctggctgggaacagtggtctccactctgatggccctcttgctcagccaggacaggtcattaatagcatctgggctctatggctacaatgccaccctggtgggagtactcatggctgtcttttcggacaagggagactatttctggtggctgttactccctgtatgtgctatgtccatgacttgcccaattttctcaagtgcattgaattccatgctcagcaaatgggacctccccgtcttcaccctccctttcaacatggcgttgtcaatgtacctttcagccacaggacattacaatccattctttccagccaaactggtcatacctataactacagctccaaatatctcctggtctgacctcagtgccctggagttgttgaaatctataccagtgggagttggtcagatctatggctgtgataatccatggacagggggcattttcctgggagccatcctactctcctccccactcatgtgcctgcatgctgccataggatcattgctgggcatagcagcgggactcagtctttcagccccatttgaggacatctactttggactctggggtttcaacagctctctggcctgcattgcaatgggaggaatgttcatggcgctcacctggcaaacccacctcctggctcttggctgtgccctgttcacggcctatcttggagtcggcatggcaaactttatggctgaggttggattgccagcttgtacctggcccttctgtttggccacgctattgttcctcatcatgaccacaaaaaattccaacatctacaagatgcccctcagtaaagttacttatcctgaagaaaaccgcatcttctacctgcaagccaagaaaagaatggtggaaagccctttgtgagaacaagccccatttgcagccatggtcacgagtcatttctgcctgactgctccagctaacttccagggtctcagcaaactgctgtttttcacgagtatcaactttcatactgacgcgtctgtaatctgttcttatgctcattttgtattttcctttcaactccaggaatatccttgagcatatgagagtcacatccaggtgatgtgctctggtatgg

SEQ ID NO: 19262 - DNA, 1682 bp, Homo sapiens
  source 1..1682: mol_type = unassigned DNA
gcactctcccttgtcgtggaggtgggcaaatctttatcagccactgccttctgctgccaggaagccagctagagtggtctttaaagaaaactgggcatctcctgctacttaaaatcaaaaactacctaaaataaagattataaaaaagtaaggatgaatggacggtctttgattggcggcgctggtgacgcccgtcatggtcctgtttggaaggacccttttggaactaaagctggtgacgcagcgcgcagaggcatcgcccggctaagcttggccctggcagatgggtcgcaggaacaggagccagaggaagagatagccatggaggacagccccactatggttagagtggacagccccactatggttaggggtgaaaaccaggtttcgccatgtcaagggagaaggtgcttccccaaagctcttggctatgtcaccggtgacatgaaagaacttgccaaccagcttaaagacaaacccgtggtgctccagttcattgactggattctccggggcatatcccaagtggtgttcgtcaacaaccccgtcagtggaatcctgattctggtaggacttcttgttcagaacccctggtgggctctcactggctggctgggaacagtggtctccactctgatggccctcttgctcagccaggacaggtcattaatagcatctgggctctatggctacaatgccaccctggtgggagtactcatggctgtcttttcggacaagggagactatttctggtggctgttactccctgtatgtgctatgtccatgacttgttgttgaaatctataccagtgggagttggtcagatctatggctgtgataatccatggacagggggcattttcctgggagccatcctactctcctccccactcatgtgcctgcatgctgccataggatcattgctgggcatagcagcgggactcagtctttcagccccatttgaggacatctactttggactctggggtttcaacagctctctggcctgcattgcaatgggaggaatgttcatggcgctcacctggcaaacccacctcctggctcttggctgtgccctgttcacggcctatcttggagtcggcatggcaaactttatggctgaggttggattgccagcttgtacctggcccttctgtttggccacgctattgttcctcatcatgaccacaaaaaattccaacatctacaagatgcccctcagtaaagttacttatcctgaagaaaaccgcatcttctacctgcaagccaagaaaagaatggtggaaagccctttgtgagaacaagccccatttgcagccatggtcacgagtcatttctgcctgactgctccagctaacttccagggtctcagcaaactgctgtttttcacgagtatcaactttcatactgacgcgtctgtaatctgttcttatgctcattttgtattttcctttcaactccaggaatatccttgagcatatgagagtcacatccaggtgatgtgctctggtatggaatttgaaaccccaatggggccttggcactaagactggaatgtatataaagtcaaagtgctccaacagaaggaggaagtgaaaacaaactattagtatttattgatattcttggtgtttagctggctcgatgatgttaacagtattaaaaattaaaccccataaacc

SEQ ID NO: 19263 - DNA, 552 bp, Homo sapiens
  source 1..552: mol_type = unassigned DNA
aagtgttttaaccaggacacaggaatatctgacagcattttctttgtttccaattacagctttaaagaaaactgggcatctcctgctacttaaaatcaaaaactacctaaaataaagattatagagccagaggaagagatagccatggaggacagccccactatggttagagtggacagccccactatggttaggggtgaaaaccaggtttcgccatgtcaagggagaaggtgcttccccaaagctcttggctatgtcaccggtgacatgaaagaacttgccaaccagcttaaagacaaacccgtggtgctccagttcattgactggattctccggggcatatcccaagtggtgttcgtcaacaaccccgtcagtggaatcctgattctggtaggacttcttgttcagaacccctggtgggctctcactggctggctgggaacagtggtctccactctgatggccctcttgctcagccaggacaggtcattaatagcatctgggctctatggctacaatgccaccctggtgggagtactcatggctgtcttt

SEQ ID NO: 19264 - DNA, 2264 bp, Homo sapiens
  source 1..2264: mol_type = unassigned DNA
atgcttacaaagcgtggctagtatcttattacagaaaacagagcccacatcatgcatccttcttctcacatttcataaacaaggccaagggaaactgctgtggggcaacctgttgctttggtgttggtccccaagatgcagccctcacaatctgcccccaaacgtgtcagaacatgaaccccctcctccccctctggaagaagcaacctcagatccaacagcagagacacgcagcagaacaaaatctgggcattggtccctgtgtaggatggcttcccgttattttttttttaagcaaagtaaatgaacatcaaatttccatagtcagctgctgtctttctgcccactgagagctctttggtgaaggcaaagtcctccttcttcattagcggtctcccatgtggggccacatcttccctcaccaggaacccagtgggcgcgctccagcccccctcagcttgccttttgcgtggtcattagagctagggcacacgtcatgctgattcacatatttttgccctttgtcatgtattgagaaaaagtaaggatgaatggacggtctttgattggcggcgctggtgacgcccgtcatggtcctgtttggaaggacccttttggaactaaagctggtgacgcagcgcgcagaggcatcgcccggctaagcttggccctggcagatgggtcgcaggaacaggagccagaggaagagatagccatggaggacagccccactatggttagagtggacagccccactatggttaggggtgaaaaccaggtttcgccatgtcaagggagaaggtgcttccccaaagctcttggctatgtcaccggtgacatgaaagaacttgccaaccagcttaaagacaaacccgtggtgctccagttcattgactggattctccggggcatatcccaagtggtgttcgtcaacaaccccgtcagtggaatcctgattctggtaggacttcttgttcagaacccctggtgggctctcactggctggctgggaacagtggtctccactctgatggccctcttgctcagccaggacaggtcattaatagcatctgggctctatggctacaatgccaccctggtgggagtactcatggctgtcttttcggacaagggagactatttctggtggctgttactccctgtatgtgctatgtccatgacttgcccaattttctcaagtgcattgaattccatgctcagcaaatgggacctccccgtcttcaccctccctttcaacatggcgttgtcaatgtacctttcagccacaggacattacaatccattctttccagccaaactggtcatacctataactacagctccaaatatctcctggtctgacctcagtgccctggagttgttgaaatctataccagtgggagttggtcagatctatggctgtgataatccatggacagggggcattttcctgggagccatcctactctcctccccactcatgtgcctgcatgctgccataggatcattgctgggcatagcagcgggactcagtctttcagccccatttgaggacatctactttggactctggggtttcaacagctctctggcctgcattgcaatgggaggaatgttcatggcgctcacctggcaaacccacctcctggctcttggctgtgccctgttcacggcctatcttggagtcggcatggcaaactttatggctgaggttggattgccagcttgtacctggcccttctgtttggccacgctattgttcctcatcatgaccacaaaaaattccaacatctacaagatgcccctcagtaaagttacttatcctgaagaaaaccgcatcttctacctgcaagccaagaaaagaatggtggaaagccctttgtgagaacaagccccatttgcagccatggtcacgagtcatttctgcctgactgctccagctaacttccagggtctcagcaaactgctgtttttcacgagtatcaactttcatactgacgcgtctgtaatctgttcttatgctcattttgtattttcctttcaactccaggaatatccttgagcatatgagagtcacatccaggtgatgtgctctggtatggaatttgaaaccccaatggggccttggcactaagactggaatgtatataaagtcaaagtgctccaacagaaggaggaagtgaaaacaaactattagtatttattgatattcttggtgtttagctggctcgatgatgttaacagtattaaaaattaaaccccat

SEQ ID NO: 19265 - DNA, 602 bp, Homo sapiens
  source 1..602: mol_type = unassigned DNA
gtctttctgcccactgagagctctttggtgaaggcaaagtcctccttcttcattagcggtctcccatgtggggccacatcttccctcaccaggaacccagtgggcgcgctccagcccccctcagcttgccttttgcgtggtcattagagctagggcacacgtcatgctgattcacatatttttgccctttgtcatgtattgagaaaaagtaaggatgaatggacggtctttgattggcggcgctggtgacgcccgtcatggtcctgtttggaaggacccttttggaactaaagctggtgacgcagcgcgcagaggcatcgcccggctaagcttggccctggcagatgggtcgcaggaacaggagccagaggaagagatagccatggaggacagccccactatggttagagtggacagccccactatggttaggggtgaaaaccaggtttcgccatgtcaagggagaaggtgcttccccaaagctcttggctatgtcaccggtgacatgaaagaacttgccaaccagcttaaagacaaacccgtggtgctccagttcattgactggattctccggggcatatcccaagtggtgttcgtcaaca

SEQ ID NO: 19266 - DNA, 557 bp, Homo sapiens
  source 1..557: mol_type = unassigned DNA
atcgcccggctaagcttggccctggcagatgggtcgcaggaacagacaaacccgtggtgctccagttcattgactggattctccggggcatatcccaagtggtgttcgtcaacaaccccgtcagtggaatcctgattctggtaggacttcttgttcagaacccctggtgggctctcactggctggctgggaacagtggtctccactctgatggccctcttgctcagccaggacaggtcattaatagcatctgggctctatggctacaatgccaccctggtgggagtactcatggctgtcttttcggacaagggagactatttctggtggctgttactccctgtatgtgctatgtccatgacttgcccaattttctcaagtgcattgaattccatgctcagcaaatgggacctccccgtcttcaccctccctttcaacatggcgttgtcaatgtacctttcagccacaggacattacaatccattctttccagccaaactggtcatacctataactacagctccaaatatctcctggtctgacctcagtgccctggag

SEQ ID NO: 19267 - DNA, 595 bp, Homo sapiens
  source 1..595: mol_type = unassigned DNA
atcgcccggctaagcttggccctggcagatgggtcgcaggaacaggagccagaggaagagatagccatggaggacagccccactatggttagagtggacagccccactatggttaggggtgaaaaccaggtttcgccatgtcaagggagaaggtgcttccccaaagctcttggctatgtcaccggtgacatgaaagaacttgccaaccagcttaaagacaaacccgtggtgctccagttcattgactggattctccggggcatatcccaagtggtgttcgtcaacaaccccgtcagtggaatcctgattctggtaggacttcttgttcagaacccctggtgggctctcactggctggctgggaacagtggtctccactctgatggccctcttgctcagccaggacaggtcattaatagcatctgggctctatggctacaatgccaccctggtgggagtactcatggctgtcttttcggacaagggagactatttctggtggctgttactccctgtatgtgctatgtccatgacttgttgttgaaatctataccagtgggagttggtcagatctatggctgtgataatccatggac

SEQ ID NO: 19268 - DNA, 2846 bp, Homo sapiens
  source 1..2846: mol_type = unassigned DNA
atttgttagctatggtaaatggaacaatgatggggccagaaatatccatgaggaccatttgatcacagcctggcaacacagagaagacaggctggtttctctatgtgggctttcagtgtttctttggtagtgtcttatgtggctgtggcttcaacattccacaattatgccttccagggtctgatgattttggcgtttccctgcttcccaattgacctggctgtgctgttggctgttcttgcacactcaaggtggttttgccattggcttcctccctcagcctgcctctgggattatgccactgctattcttttttatctaccatcagcacaatgaaatcatcatttttgtcttcaaggtaccaaattctggtgatattggtgctttcttgcagctacttatcatgagaagtgaatggtctcatagtgaacacagtcatggttatagtgttcatacgttccagagacatgtttcctataattatgccctgcacatttttctatcatacaatccttagattacagctctttggttttcaacagctttgtccaattccatctttcccagtttctctaccttgatgaaatatccttcttgcctggttttacatatttaaataacaaattccaaaagtaaagagtatctgaggcagtcacatgacataaggacaaattcaagccatcttggacttgcagagggtggggagaccgtgtcaacacacacaattttaaaaatttcttccctttcaatcttttaaaaacaaaactttttataaaataaaaatgtaatttaaaaaggctacctgtcttggcaagtagctgatcagcctgcattggtgagcaggccattccataacctggtttcttgctccttaattgacagcatggagctaacgtacttaatttcagctctttctacgtgatttgactcattctgttaacattaactgtttttcagtcttctcaactagactgaactccttaagtgcaagaaatacacgcttagtaaatgtttgttggaccagacactgcaccttatgaaattaaagaccagaacattctcatggtagcattacagacactgatggcaaaggtactgtgggatttgggtttggctaataagctctgtggtggtgtttcagaaggaaaatggtgctctcttagttctatggaacatagtggtccagatcttctactgtaaccaggcccaaagctggctaatctggagggctctgccttagggatacttataagctctgtccttccctcaaggagccagaggaagagatagccatggaggacagccccactatggttagagtggacagccccactatggttaggggtgaaaaccaggtttcgccatgtcaagggagaaggtgcttccccaaagctcttggctatgtcaccggtgacatgaaagaacttgccaaccagcttaaagacaaacccgtggtgctccagttcattgactggattctccggggcatatcccaagtggtgttcgtcaacaaccccgtcagtggaatcctgattctggtaggacttcttgttcagaacccctggtgggctctcactggctggctgggaacagtggtctccactctgatggccctcttgctcagccaggacaggtcattaatagcatctgggctctatggctacaatgccaccctggtgggagtactcatggctgtcttttcggacaagggagactatttctggtggctgttactccctgtatgtgctatgtccatgacttgcccaattttctcaagtgcattgaattccatgctcagcaaatgggacctccccgtcttcaccctccctttcaacatggcgttgtcaatgtacctttcagccacaggacattacaatccattctttccagccaaactggtcatacctataactacagctccaaatatctcctggtctgacctcagtgccctggagttgttgaaatctataccagtgggagttggtcagatctatggctgtgataatccatggacagggggcattttcctgggagccatcctactctcctccccactcatgtgcctgcatgctgccataggatcattgctgggcatagcagcgggactcagtctttcagccccatttgaggacatctactttggactctggggtttcaacagctctctggcctgcattgcaatgggaggaatgttcatggcgctcacctggcaaacccacctcctggctcttggctgtgccctgttcacggcctatcttggagtcggcatggcaaactttatggctgaggttggattgccagcttgtacctggcccttctgtttggccacgctattgttcctcatcatgaccacaaaaaattccaacatctacaagatgcccctcagtaaagttacttatcctgaagaaaaccgcatcttctacctgcaagccaagaaaagaatggtggaaagccctttgtgagaacaagccccatttgcagccatggtcacgagtcatttctgcctgactgctccagctaacttccagggtctcagcaaactgctgtttttcacgagtatcaactttcatactgacgcgtctgtaatctgttcttatgctcattttgtattttcctttcaactccaggaatatccttgagcatatgagagtcacatccaggtgatgtgctctggtatggaatttgaaaccccaatggggccttggcactaagactggaatgtatataaagtcaaagtgctccaacagaaggaggaagtgaaaacaaactattagtatttattgatattcttggtgtttagctggctcgatgatgttaacagtattaaaaattaaaccccataaacc

SEQ ID NO: 19269 - DNA, 1022 bp, Homo sapiens
  source 1..1022: mol_type = unassigned DNA
atggaggacagccccactatggttagagtggacagccccactatggttaggggtgaaaaccaggtttcgccatgtcaagggagaaggtgcttccccaaagctcttggctatgtcaccggtgacatgaaagaacttgccaaccagcttaaagacaaacccgtggtgctccagttcattgactggattctccggggcatatcccaagtggtgttcgtcaacaaccccgtcagtggaatcctgattctggtaggacttcttgttcagaacccctggtgggctctcactggctggctgggaacagtggtctccactctgatggccctcttgctcagccaggacaggtcattaatagcatctgggctctatggctacaatgccaccctggtgggagtactcatggctgtcttttcggacaagggagactatttctggtggctgttactccctgtatgtgctatgtccatgacttgcccaattttctcaagtgcattgaattccatgctcagcaaatgggacctccccgtcttcaccctccctttcaacatggcgttgtcaatgtacctttcagccacaggacattacaatccattctttccagccaaactggtcatacctataactacagctccaaatatctcctggtctgacctcagtgccctggaggactcagtctttcagccccatttgaggacatctactttggactctggggtttcaacagctctctggcctgcattgcaatgggaggaatgttcatggcgctcacctggcaaacccacctcctggctcttggctgtgccctgttcacggcctatcttggagtcggcatggcaaactttatggctgaggttggattgccagcttgtacctggcccttctgtttggccacgctattgttcctcatcatgaccacaaaaaattccaacatctacaagatgcccctcagtaaagttacttatcctgaagaaaaccgcatcttctacctgcaagccaagaaaagaatggtggaaagccctttgtga

SEQ ID NO: 19270 - DNA, 779 bp, Homo sapiens
  source 1..779: mol_type = unassigned DNA
ctctcactggctggctgggaacagtggtctccactctgatggccctcttgctcagccaggacaggtcattaatagcatctgggctctatggctacaatgccaccctggtgggagtactcatggctgtcttttcggacaagggagactatttctggtggctgttactccctgtatgtgctatgtccatgacttgcccaattttctcaagtgcattgaattccatgctcagcaaatgggacctccccgtcttcaccctccctttcaacatggcgttgtcaatgtacctttcagccacaggacattacaatccattctttccagccaaactggtcatacctataactacagctccaaatatctcctggtctgacctcagtgccctggagccctgttcacggcctatcttggagtcggcatggcaaactttatggctgagggaacgtgtgaaagaagaattgtggggaaaaaaaagcaagcataaccaaagatcatcagcagtgaagaatctaggctgtggctgagagaaccagaggcctctaaaatggacccgagtcgatcttcagaacagggatctaccatgcaggagcttcttgtgctcacacaaatctgtaaatgggaacattgtacattgtcgaatttaaatgatattaattttctcaagctatttttgttactattttcctaaaattgaatatttgcagggagcacttatactttttcctaatgtctgtataacaaatttctatgcaagtacatgaataaattatgctcacagctca

SEQ ID NO: 19271 - DNA, 565 bp, Homo sapiens
  source 1..565: mol_type = unassigned DNA
gtttttgtacgatgcttacgtagactttgaaatacatttccaaatataatctcattttttaatatgaatatgatctggaagttactagtgttatttatgtgcaagtgcaaccaaagctcacccaggaaatgtccgtgctgtgtctcttgccccacaggtcattaatagcatctgggctctatggctacaatgccaccctggtgggagtactcatggctgtcttttcggacaagggagactatttctggtggctgttactccctgtatgtgctatgtccatgacttgcccaattttctcaagtgcattgaattccatgctcagcaaatgggacctccccgtcttcaccctccctttcaacatggcgttgtcaatgtacctttcagccacaggacattacaatccattctttccagccaaactggtcatacctataactacagctccaaatatctcctggtctgacctcagtgccctggagttgttgaaatctataccagtgggagttggtcagatctatggctgtgataatccatggacagggggcattttcctgggagccatcct

SEQ ID NO: 19272 - DNA, 577 bp, Homo sapiens
  source 1..577: mol_type = unassigned DNA
gccacaggacattacaatccattctttccagccaaactggtcatacctataactacagctccaaatatctcctggtctgacctcagtgccctggagttgttgaaatctataccagtgggagttggtcagatctatggctgtgataatccatggacagggggcattttcctgggagccatcctactctcctccccactcatgtgcctgcatgctgccataggatcattgctgggcatagcagcgggactcagtctttcagccccatttgaggacatctactttggactctggggtttcaacagctctctggcctgcattgcaatgggaggaatgttcatggcgctcacctggcaaacccacctcctggctcttggctgtggtgagtctcccacgcccctgggggagggctgctcatgactacaggatctcaatcaaggataagcagtaaaaacggactgcatgaaaaatcagggccagggttctggcttgagcccacttgctgtctaagtgtgtgaacaggacaagtgacgtcccctctctgagagcattaaaatcacctctgcctacctctctgatg

SEQ ID NO: 19273 - DNA, 554 bp, Homo sapiens
  source 1..554: mol_type = unassigned DNA
agttctgacccctcctgtcttaacaggactcagtctttcagccccatttgaggacatctactttggactctggggtttcaacagctctctggcctgcattgcaatgggaggaatgttcatggcgctcacctggcaaacccacctcctggctcttggctgtgccctgttcacggcctatcttggagtcggcatggcaaactttatggctgaggttggattgccagcttgtacctggcccttctgtttggccacgctattgttcctcatcatgaccacaaaaaattccaacatctacaagatgcccctcagtaaagttacttatcctgaagaaaaccgcatcttctacctgcaagccaagaaaagaatggtggaaagccctttgtgagaacaagccccatttgcagccatggtcacgagtcatttctgcctgactgctccagctaacttccagggtctcagcaaactgctgtttttcacgagtatcaactttcatactgacgcgtctgtaatctgttcttatgctcattttgtattttcctttcaactccaggaat

SEQ ID NO: 19274 - DNA, 3823 bp, Homo sapiens
  source 1..3823: mol_type = unassigned DNA
acacagagcagagtggggctctgagtatataactgttaggtgcctccctccagcaccatctcctgagaagcactctcccttgtcgtggaggtgggcaaatctttatcagccactgccttctgctgccaggaagccagctagagtggtctttaaagaaaactgggcatctcctgctacttaaaatcaaaaactacctaaaataaagattatagagccagaggaagagatagccatggaggacagccccactatggttagagtggacagccccactatggttaggggtgaaaaccaggtttcgccatgtcaagggagaaggtgcttccccaaagctcttggctatgtcaccggtgacatgaaagaacttgccaaccagcttaaagacaaacccgtggtgctccagttcattgactggattctccggggcatatcccaagtggtgttcgtcaacaaccccgtcagtggaatcctgattctggtaggacttcttgttcagaacccctggtgggctctcactggctggctgggaacagtggtctccactctgatggccctcttgctcagccaggacaggtcattaatagcatctgggctctatggctacaatgccaccctggtgggagtactcatggctgtcttttcggacaagggagactatttctggtggctgttactccctgtatgtgctatgtccatgacttgcccaattttctcaagtgcattgaattccatgctcagcaaatgggacctccccgtcttcaccctccctttcaacatggcgttgtcaatgtacctttcagccacaggacattacaatccattctttccagccaaactggtcatacctataactacagctccaaatatctcctggtctgacctcagtgccctggaggactcagtctttcagccccatttgaggacatctactttggactctggggtttcaacagctctctggcctgcattgcaatgggaggaatgttcatggcgctcacctggcaaacccacctcctggctcttggctgtgccctgttcacggcctatcttggagtcggcatggcaaactttatggctgaggttggattgccagcttgtacctggcccttctgtttggccacgctattgttcctcatcatgaccacaaaaaattccaacatctacaagatgcccctcagtaaagttacttatcctgaagaaaaccgcatcttctacctgcaagccaagaaaagaatggtggaaagccctttgtgagaacaagccccatttgcagccatggtcacgagtcatttctgcctgactgctccagctaacttccagggtctcagcaaactgctgtttttcacgagtatcaactttcatactgacgcgtctgtaatctgttcttatgctcattttgtattttcctttcaactccaggaatatccttgagcatatgagagtcacatccaggtgatgtgctctggtatggaatttgaaaccccaatggggccttggcactaagactggaatgtatataaagtcaaagtgctccaacagaaggaggaagtgaaaacaaactattagtatttattgatattcttggtgtttagctggctcgatgatgttaacagtattaaaaattaaaccccataaaccaactaagccttatggaattcacagtcacaaaatcgaagttaatccagaattctgtgataagcagcttggctttttttttaaatcaatgcaagttacacattatagccagaatctgtatcacagaggtgcaagctgacagcagagctcagtccccacttcctgcaaacaatggcctgcaccctatcccttgtgtgtgtgacattctctcatgggacaatgttggggtttttcagactgacaggactgcaagagggagaaaggaattttgtcaatcaaaattattctgtattgcaacttttctcagagattgcaaaggattttttaggtagagattatttttccttatgaaaaatgatctgttttaaatgagataaaataggagaagttcctggcttaacctgttcttacatattaaagaaaagttacttactgtatttatgaaatactcagcttaggcatttttactttaacccctaaattgattttgtaaatgccacaaatgcatagaattgttaccaacctccaaagggctctttaaaatcatattttttattcatttgaggatgtcttataaagactgaaggcaaaggtcagattgcttacgggtgttatttttataagttgttgaattccttaatttaaaaaagctcattattttttgcacactcacaatattctctctcagaaatcaatggcatttgaaccaccaaaaagaaataaagggctgagtgcggtggctcacgcctgtaatcccagcactttggggagcccaggcgggcagattgcttgaacccaggagttcaagaccagcctgggcagcatggtgaaaccctgtatctacaaaaaatacaaaaattagccaggcatggtggtgggtgcctgtagttccagctacttgggaggctgaggtgggaaaatgacttgagcccaggaggaggaggctgcagtgagctaagattgcaccactgcactccaacctgggcgacaagagtgaaactgtgtctctcaaaaaaaaaaaaaaacaaacaaaaacaaaaacaaaacaaaacaaaacaaaacaaaacaggtaaggattcccctgttttcctctctttaattttaaagttatcagttccgtaaagtctctgtaaccaaacatactgaagacagcaacagaagtcacgttcagggactggctcacacctgtaatcccagcactttgggagatggaggtaaaaggatctcttgagcccaggagttcaagaccagcttgggcaacatagcaagactccatctcttaaaaaataaaaatagtaacattagccaggtgtagcagcacacatctgcagcagctactcaggaggctgaggtggaaagatcgcttgtgcacagaagttcgaggctgcagtgagctatatgatcatgtcactgcactccagcctgtgtgaccgagcaagaccctatctcaaaaaaattaattaattaattaattaattaatttaaaaaggaagtcatgttcatttactttccacttcagtgtgtatcgtgtagtattttggaggttggaaagtgaaacgtaggaatcctgaagattttttccacttctagtttgcagtgctcagtgcacaatatacattttgctgaatgaataaacagaaatagggaagtaaacctacaaatattttagggagaagctcacttcttccttttctcaggaaaccaagcaagcaaacatatcgttccaattttaaaacccagtgaccaaagcctttggaactatgaatttgcaactgtcataggtttatggatattgctgtggagaagctcaattttcagtgtttgaactgaaccctttcttgttagggaacgtgtgaaagaagaattgtggggaaaaaaaagcaagcataaccaaagatcatcagcagtgaagaatctaggctgtggctgagagaaccagaggcctctaaaatggacccgagtcgatcttcagaacagggatctaccatgcaggagcttcttgtgctcacacaaatctgtaaatgggaacattgtacattgtcgaatttaaatgatattaattttctcaagctatttttgttactattttcctaaaattgaatatttgcagggagcacttatactttttcctaatgtctgtataacaaatttctatgcaagtacatgaataaattatgctcacagctca

SEQ ID NO: 19275 - DNA, 3540 bp, Homo sapiens
  source 1..3540: mol_type = unassigned DNA
gtaagctgcctccatcatcctaaaaaacgaccatgctgaaagagctcctctgtatttcttggcagaccctttccagttttcatcctgggtgtttctgaacaggaacatatctcattgaagtatttgcacctctacctacagacaaggaaaaggcttggagcacctccattcattgtgccaacaggacctgaatgaccgattgtttcttgcttactacttgtggtcaactaagtagagattcataagacctttatagaaccactgacaacactgtgaccaaggaaacttccatcgatagaagagtggctgtgacccgaaggaatgtctgacccccacagcagtcctctcctgccagagccactttccagcagatacaaactctacgaggcagagtttaccagcccgagctggccctcgacatccccggatactcacccagctctgcccctcctggaaatgcctgaagaaaaggatctccggtcttccaatgaagacagtcacattgtgaagatcgaaaagctcaatgaaaggagtaaaaggaaagacgacggggtggcccatcgggactcagcaggccaaaggtgcatctgcctctccaaagcagtgggctacctcacgggcgacatgaaggagtacaggatctggctgaaagacaagcaccttgccctccagttcatagactgggtcctgagagggaccgctcaggtgatgttcatcaacaatcctctcagcggcctcatcatcttcatagggctgctgatccagaatccctggtggacaatcactgggggcctggggacagtggtctcgaccttaacagctctcgccttgggccaagacaggtctgccattgcctcaggactccatgggtacaacgggatgctggtgggactgctgatggccgtgttctcggagaagttagactactactggtggcttctgtttcctgtgaccttcacagccatgtcctgcccagttctttctagtgccttgaattccatcttcagcaagtgggacctcccggtcttcactctgcccttcaacattgcagtcaccttgtaccttgcagccacaggccactacaacctcttcttccccacaacactggtagagcctgtgtcttcagtgcccaatatcacctggacagagatggaaatgcccctgctgttacaagccatccctgttggggtcggccaggtgtatggctgtgacaatccctggacaggcggcgtgttcctggtggctctgttcatctcctcgccactcatctgcttgcatgcagccattggctcaatcgtggggctgctagcagccctgtcagtggccacacccttcgagaccatctacacaggcctctggagctacaactgcgtcctctcctgcatcgccatcggaggcatgttctatgccctcacctggcagactcacctgctggccctcatctgtgccctgttctgtgcatacatggaagcagccatctccaacatcatgtcagtggtgggcgtgccaccaggcacctgggccttctgccttgccaccatcatcttcctgctcctgacgacaaacaacccagccatcttcagactcccactcagcaaagtcacctaccccgaggccaaccgcatctactacctgacagtgaaaagcggtgaagaagagaaggcccccagcggaggcggtggggagcatccacccacagcaggcccaaaggtggaggagggctcggaggctgtgctctccaagcacaggagtgtatttcacatcgagtggtcatccattcggaggaggagcaaagtgtttggaaaaggcgaacaccaggaaagacaaaacaaagacccatttccctatcgataccggaagcccacagtcgagctgcttgatctggacaccatggaggagagctctgagataaaagtggaaacaaacatttccaagacatcctggattcggagttccatggctgccagtgggaaaagggtcagcaaagccctcagctacatcacaggagagatgaaggagtgtggagagggacttaaagacaagtccccagtgttccagttctttgactgggtcctccgaggcacatctcaagtgatgtttgtgaacaaccccctcagcggcatcctcatcatcctcggcctcttcatccagaacccctggtgggcgatctcaggctgcctgggtaccatcatgtccaccttgacagccctcatcctgagtcaggacaagtcggccatcgctgcaggatttcacggctacaatggggtgctggtggggctgctgatggccgtgttctcagacaaaggtgactactactggtggctgttgctacccgtcatcatcatgtccatgtcttgccccatcctctccagtgccctgggtaccatcttcagcaagtgggacctcccagtcttcacactgcccttcaatatcactgtgactttgtacctggcagccacgggccactacaaccttttcttccccacaacgctgctgcagcctgcatccgccatgcccaacatcacctggtcagaggtccaagtgcccttgcttttgagagccatccccgttggaattggccaagtgtacggctgtgataacccctggactggaggcatcttcctcatagctctgttcatatcctcacctctcatttgcttgcatgcagcaattggatccaccatggggatgctagcagcactcactattgcgacgccctttgactccatctacttcggcctgtgtggcttcaacagcaccctcgcatgcatagcgataggaggcatgttctacgtcatcacctggcagacgcacctcctcgccatcgcctgcgcactgtttgctgcctacctgggtgctgccctggctaacatgttatctgtgtttggattgccgccctgcacttggcccttctgtctctcagctctcaccttcctgctcctgacgaccaataaccccgccatctacaagctcccgctcagcaaagtcacctacccagaggccaaccgcatctactacctgtcccaggagagaaacagaagggcatcaatcataacaaagtatcaggcctacgatgtctcctaagtttccctgtctaaaacacatcagtgtaaattcaggcttcagcacgccgtccagatccccaggataagagaccacttagccttccctttggtctgttctgtgactctctccccaaacacaaagaagcgtgtatgtagtcaccattccagaacctctcttttctaagatgcacaacacttatcaaagatatgtttagtttagactttatacccttagctttcccataagagctccctttgtggggaacttgccctcttctgcgaaataagcctcatccttaaagagaagtcaccggccgggcacggtggctcacgcctgtaatcccagcactttgggaggccgaggcgggtggatcacgaggtcaggagatcgagaccatcctggcgaacatggtgagaccccatctctactaaaaatacaaaaaattagccaggcatggtggcgggcacctgtagt

SEQ ID NO: 19276 - DNA, 4746 bp, Homo sapiens
  source 1..4746: mol_type = unassigned DNA
ttttttttttttttttgagacacagtttgctctgtcacccaggctggagtacattggcactatcttggctcactgcaacctccacctcccaggttcaagagattcttctgtctcagcctcccagtagctaggactacaagtgtgtgccaccacaccctgctaatttttgtatttttagtagagacagggtttcaccacattggccaggctggtctcgaacttctgacgtcaagtgatccacccgactcggcctctcaaagtgctgggattacaggcgtgggccgccgcacccggccatttgcttttgattttactggctcataggtggaagggacttgccttgcctcagatgaaactttggactttgactttcaagttaatactggaataagttaagactttgggggactgttgctaaggcacaattttgttttgaaatgtataaagaacataatatctgggaggggccaggggcagaatgatatggtttggctctgtgtccacacctgaatatcatctcaaattgtaatcccagtaatccccatatgttgagggcaggacccagggcaaggtgactggatcatgggagcggtttcccccatgctgttctcgtgatagtgagtgaattctcacaagatctgatggttttataagtgtttggcaagttcctgctccacaccatctctctcttctgccgccatttgagaaggtccaagtttgcttccccttcgccttccaccatgactgtaagtttcctgaggcctccccagcaatgtggaagttccatcgatagaagagtggctgtgacccgaaggaatgtctgacccccacagcagtcctctcctgccagagccactttccagcagatacaaactctacgaggcagagtttaccagcccgagctggccctcgacatccccggatactcacccagctctgcccctcctggaaatgcctgaagaaaaggatctccggtcttccaatgaagacagtcacattgtgaagatcgaaaagctcaatgaaaggagtaaaaggaaagacgacggggtggcccatcgggactcagcaggccaaaggtgcatctgcctctccaaagcagtgggctacctcacgggcgacatgaaggagtacaggatctggctgaaagacaagcaccttgccctccagttcatagactgggtcctgagagggaccgctcaggtgatgttcatcaacaatcctctcagcggcctcatcatcttcatagggctgctgatccagaatccctggtggacaatcactgggggcctggggacagtggtctcgaccttaacagctctcgccttgggccaagacaggtctgccattgcctcaggactccatgggtacaacgggatgctggtgggactgctgatggccgtgttctcggagaagttagactactactggtggcttctgtttcctgtgaccttcacagccatgtcctgcccagttctttctagtgccttgaattccatcttcagcaagtgggacctcccggtcttcactctgcccttcaacattgcagtcaccttgtaccttgcagccacaggccactacaacctcttcttccccacaacactggtagagcctgtgtcttcagtgcccaatatcacctggacagagatggaaatgcccctgctgttacaagccatccctgttggggtcggccaggtgtatggctgtgacaatccctggacaggcggcgtgttcctggtggctctgttcatctcctcgccactcatctgcttgcatgcagccattggctcaatcgtggggctgctagcagccctgtcagtggccacacccttcgagaccatctacacaggcctctggagctacaactgcgtcctctcctgcatcgccatcggaggcatgttctatgccctcacctggcagactcacctgctggccctcatctgtgccctgttctgtgcatacatggaagcagccatctccaacatcatgtcagtggtgggcgtgccaccaggcacctgggccttctgccttgccaccatcatcttcctgctcctgacgacaaacaacccagccatcttcagactcccactcagcaaagtcacctaccccgaggccaaccgcatctactacctgacagtgaaaagcggtgaagaagagaaggcccccagcggaggcggtggggagcatccacccacagcaggcccaaaggtggaggagggctcggaggctgtgctctccaagcacaggagtgtatttcacatcgagtggtcatccattcggaggaggagcaaagtgtttggaaaaggcgaacaccaggaaagacaaaacaaagacccatttccctatcgataccggaagcccacagtcgagctgcttgatctggacaccatggaggagagctctgagataaaagtggaaacaaacatttccaagacatcctggattcggagttccatggctgccagtgggaaaagggtcagcaaagccctcagctacatcacaggagagatgaaggagtgtggagagggacttaaagacaagtccccagtgttccagttctttgactgggtcctccgaggcacatctcaagtgatgtttgtgaacaaccccctcagcggcatcctcatcatcctcggcctcttcatccagaacccctggtgggcgatctcaggctgcctgggtaccatcatgtccaccttgacagccctcatcctgagtcaggacaagtcggccatcgctgcaggatttcacggctacaatggggtgctggtggggctgctgatggccgtgttctcagacaaaggtgactactactggtggctgttgctacccgtcatcatcatgtccatgtcttgccccatcctctccagtgccctgggtaccatcttcagcaagtgggacctcccagtcttcacactgcccttcaatatcactgtgactttgtacctggcagccacgggccactacaaccttttcttccccacaacgctgctgcagcctgcatccgccatgcccaacatcacctggtcagaggtccaagtgcccttgcttttgagagccatccccgttggaattggccaagtgtacggctgtgataacccctggactggaggcatcttcctcatagctctgttcatatcctcacctctcatttgcttgcatgcagcaattggatccaccatggggatgctagcagcactcactattgcgacgccctttgactccatctacttcggcctgtgtggcttcaacagcaccctcgcatgcatagcgataggaggcatgttctacgtcatcacctggcagacgcacctcctcgccatcgcctgcgcactgtttgctgcctacctgggtgctgccctggctaacatgttatctgtgtttggattgccgccctgcacttggcccttctgtctctcagctctcaccttcctgctcctgacgaccaataaccccgccatctacaagctcccgctcagcaaagtcacctacccagaggccaaccgcatctactacctgtcccaggagagaaacagaagggcatcaatcataacaaagtatcaggcctacgatgtctcctaagtttccctgtctaaaacacatcagtgtaaattcaggcttcagcacgccgtccagatccccaggataagagaccacttagccttccctttggtctgttctgtgactctctccccaaacacaaagaagcgtgtatgtagtcaccattccagaacctctcttttctaagatgcacaacacttatcaaagatatgtttagtttagactttatacccttagctttcccataagagctccctttgtggggaacttgccctcttctgcgaaataagcctcatccttaaagagaagtcaccggccgggcacggtggctcacgcctgtaatcccagcactttgggaggccgaggcgggtggatcacgaggtcaggagatcgagaccatcctggcgaacatggtgagaccccatctctactaaaaatacaaaaaattagccaggcatggtggcgggcacctgtagtcccagctacttgggaggctgaggcaggagaatggcgtgaacccgggaggtggagcttgcagtgagccaagatcacgccactgcactccagcctgggcaacggagtgagactctgtctcaaaaaaaaaaaaaaggggaagtcaccaagaaagggatagaggtcagtgacatggtcatcacacaactcggtcatttaatatggcaaaacacaataccaagaactgtgcattagcccggaaggcaagagggttggttctgccccagctctgctgctaatgagcccctaccaggttgagcaagtctttccccactctccacctccatttcttaatcagtttcatgacagggaaggatttgaaagtcctttccacctcagaagtgttgattattctctctctcctataatctgatgaaatcagcatgacaacaagtaatttaagtaaaggacagaagggttacccaagaagaggcaggaaaatgttaacgttctataaagttttattcttgagtcataggaaaatgctctccagacgtggggttaggaacctaaattcactgaaaatgccaatgtgctttcctttacattacagaaatatttctggaagtgtcagatgaaaactgatctttatcaacactcaaatcatattataaacaaatgtgtttccctttgtaatattcataatcatactgtcattaaactgtttaagtttgc

SEQ ID NO: 19277 - DNA, 1729 bp, Homo sapiens
  source 1..1729: mol_type = unassigned DNA
atctctctcttctgccgccatttgagaaggtccaagtttgcttccccttcgccttccaccatgacttccatcgatagaagagtggctgtgacccgaaggaatgtctgacccccacagcagtcctctcctgccagagccactttccagcagatacaaactctacgaggcagagtttaccagcccgagctggccctcgacatccccggatactcacccagctctgcccctcctggaaatgcctgaagaaaaggatctccggtcttccaatgaagacagtcacattgtgaagatcgaaaagctcaatgaaaggagtaaaaggaaagacgacggggtggcccatcgggactcagcaggccaaaggtgcatctgcctctccaaagcagtgggctacctcacgggcgacatgaaggagtacaggatctggctgaaagacaagcaccttgccctccagttcatagactgggtcctgagagggaccgctcaggtgatgttcatcaacaatcctctcagcggcctcatcatcttcatagggctgctgatccagaatccctggtggacaatcactgggggcctggggacagtggtctcgaccttaacagctctcgccttgggccaagacaggtctgccattgcctcaggactccatgggtacaacgggatgctggtgggactgctgatggccgtgttctcggagaagttagactactactggtggcttctgtttcctgtgaccttcacagccatgtcctggatggagacggattttaactggagtaagagtggatgctggaagcatctgctacaataatccacaattgtctgctacaaaaccccacagagatgacagtgtttagattagagtgatatccatgaacatgccacaggccactacaacctcttcttccccacaacactggtagagcctgtgtcttcagtgcccaatatcacctggacagagatggaaatgcccctgctgttacaagccatccctgttggggtcggccaggtgtatggctgtgacaatccctggacaggcggcgtgttcctggtggctctgttcatctcctcgccactcatctgcttgcatgcagccattggctcaatcgtggggctgctagcagccctgtcagtggccacacccttcgagaccatctacacaggcctctggagctacaactgcgtcctctcctgcatcgccatcggaggcatgttctatgccctcacctggcagactcacctgctggccctcatctgtgccctgttctgtgcatacatggaagcagccatctccaacatcatgtcagtggtgggcgtgccaccaggcacctgggccttctgccttgccaccatcatcttcctgctcctgacgacaaacaacccagccatcttcagactcccactcagcaaagtcacctaccccgaggccaaccgcatctactacctgacagtgaaaagcggtgaagaagagaaggcccccagcggtgaatagccatgttcggggaagaaacgctctttgcctgacctgatgtcctctccctgtgttctctgctctggttcaatcagttgcagcactcaccttctttgcctctccttgcacctgtgtagaaccaagcacacctgtaactttctttccctgaagctgattttcattctctgccagaatctccataactatctattgtgcgacattaagggatgttggtattacagtaaaatttccggagttagc

SEQ ID NO: 19278 - DNA, 5673 bp, Homo sapiens
  source 1..5673: mol_type = unassigned DNA
attatatgcgtgaaccaccgcgcctgaccatggaatcagtttttcaatctgtgctcgaggtgttgtgttcttaactatcttctactcctttgcaaagataatctttcttaaacatagactttctaatcagttctctagcattgtttcattctgtctttggcatgttttcactttgctgtgctgtacttttacacattctttttaactatagcttcctgctttgctctggatcaggaagctattgaagctgacacccacagagttaaactgagttgctgaagccaccagctccccctcccagtccttcttttcagagtaggctggcagctgtcctaactgcctactaaagccaaatgcttgaggagagagagagagtaaggagccagccatgaatcctttccagaaaaatgagtccaaggaaactcttttttcacctgtctccattgaagaggtaccacctcgaccacctagccctccaaagaagccatctccgacaatctgtggctccaactatccactgagcattgccttcattgtggtgaatgaattctgcgagcgcttttcctattatggaatgaaagctgtgctgatcctgtatttcctgtatttcctgcactggaatgaagatacctccacatctatataccatgccttcagcagcctctgttattttactcccatcctgggagcagccattgctgactcgtggttgggaaaattcaagacaatcatctatctctccttggtgtatgtgcttggccatgtgatcaagtccttgggtgccttaccaatactgggaggacaagtggtacacacagtcctatcattgatcggcctgagtctaatagctttggggacaggaggcatcaaaccctgtgtggcagcttttggtggagaccagtttgaagaaaaacatgcagaggaacggactagatacttctcagtcttctacctgtccatcaatgcagggagcttgatttctacatttatcacacccatgctgagaggagatgtgcaatgttttggagaagactgctatgcattggcttttggagttccaggactgctcatggtaattgcacttgttgtgtttgcaatgggaagcaaaatatacaataaaccaccccctgaaggaaacatagtggctcaagttttcaaatgtatctggtttgctatttccaatcgtttcaagaaccgttctggagacattccaaagcgacagcactggctagactgggcggctgagaaatatccaaagcagctcattatggatgtaaaggcactgaccagggtactattcctttatatcccattgcccatgttctgggctcttttggatcagcagggttcacgatggactttgcaagccatcaggatgaataggaatttggggttttttgtgcttcagccggaccagatgcaggttctaaatccccttctggttcttatcttcatcccgttgtttgactttgtcatttatcgtctggtctccaagtgtggaattaacttctcatcacttaggaaaatggctgttggtatgatcctagcatgcctggcatttgcagttgcggcagctgtagagataaaaataaatgaaatggccccagcccagccaggtccccaggaggttttcctacaagtcttgaatctggcagatgatgaggtgaaggtgacagtggtgggaaatgaaaacaattctctgttgatagagtccatcaaatcctttcagaaaacaccacactattccaaactgcacctgaaaacaaaaagccaggattttcacttccacctgaaatatcacaatttgtctctctacactgagcattctgtgcaggagaagaactggtacagtcttgtcattcgtgaagatgggaacagtatctccagcatgatggtaaaggatacagaaagcagaacaaccaatgggatgacaaccgtgaggtttgttaacactttgcataaagatgtcaacatctccctgagtacagatacctctctcaatgttggtgaagactatggtgtgtctgcttatagaactgtgcaaagaggagaataccctgcagtgcactgtagaacagaagataagaacttttctctgaatttgggtcttctagactttggtgcagcatatctgtttgttattactaataacaccaatcagggtcttcaggcctggaagattgaagacattccagccaacaaaatgtccattgcgtggcagctaccacaatatgccctggttacagctggggaggtcatgttctctgtcacaggtcttgagttttcttattctcaggctccctctagcatgaaatctgtgctccaggcagcttggctattgacaattgcagttgggaatatcatcgtgcttgttgtggcacagttcagtggcctggtacagtgggccgaattcattttgttttcctgcctcctgctggtgatctgcctgatcttctccatcatgggctactactatgttcctgtaaagacagaggatatgcggggtccagcagataagcacattcctcacatccaggggaacatgatcaaactagagaccaagaagacaaaactctgatgactccctagattctgtcctgaccccaattcctggccctgtcttgaagcattttttttcttctactggattagacaagagagatagcagcatatcagagctgatctcctccacctttctccaatgacagaagttccaggactggttttccagtacatctttaaacaaggccccagagactctatgtctgcccgtccatcagtgaactcattaaaacttgtgcagtgttgctggagctggcctggtgtctccaaatgaccatgaaaatacacacgtataatggagatcattctctgtgggtatgcaaagttatgggaattcctttataggtaactgccatttaggactgatggccctaatttttgaggtgctgatttagaggcaaaattgcagaataacaaagaaatggtatttcaagtttttttttttataagcaatgtaattatgctattcacaggggcctcaagaattggtatgtatgatgtgatctggtccagccagggcctggcttgtcagctctctaggtttgatatgactttagtaaatttgtcaatatagatggtaggaagcagaatgccattttattaaaacacaggagaagttatatctctctgattatgatagtattttatttacttatccaaaccctcctttctcagtatggatagatcatggaaaccagattagagatagtaagcattagtaaacattgttctggagaacaggaacaggtgtaagttgtagaaatcctgaagagccagtcattcttttacagagtacattcttcttagcctctatggcgctggtctatgcccttcagtgaacagttgtataaacaataattataatttgcaaccttgtcttgtcaaccttgctgatccagctttttcttattattacaccttgtcttgcttattgcagcaaatattcaataacaacaatgtttctataagtccaacttcctttattaatgtttccatttagcctcaaaaatatcaaagtagttcctttttgatgttgttttcctgatttacttttcccataagttttaaataccatttctgccttgaagcctagaaattttctttttattcaaaaaaagttacattaatgctctaggtttgaggttctaaaatggaaatgtcaatagaggagcatggtcctatgtgaggttcctatcaaaatttgtgggagtagggatggtagagcatgagggttttgtttgtgtatgtgtatggtcatgaaaaaaaattgagaaacattacctcatacacaatgaatgaatcagaggacagacacgggaatggcacgactgtgcagtgtgttactaggaaaaaagttcagaatcactgttctagagagcttcatttccattggttttaaaacattattctcatgtagaacagtgttgggtctcatactgttaatgttaatacgtaacaatgttcatgttaacaggcacctgttaatattaacagataatgttactgttaacaggtaagagaaattgctctaagtgcccaaactttatatacttcagttttaatgacaagcatttcagaaatataagagcggcagccagaccaaccagtttttccagatatcttgatgtgaacctgaccctactcctttagaagacagcctgttcatttttaaatagctttaacccaaactgttctatgaccattgtttcaagagacattaacacagttctgtaaatagaagtgtctatggacaaataagtttgggaaatgtggcatactgtatccttttcttaacatttgcatattaaagactctgagatatcctgcagtaaagacacaagataccttgtttaaattaacatgtacgctgcagaacattggtttggaaaaaactgttgagcagttcttccttgtaagtgctgagcttcctctctgaaacctcctaccattgttttttttcccctgtagctaacaagaataagtataacagccggccaggcacagtggctcatgcctgtaatcccagcactttgggaggctgagacaggtggatcacctgaggtcaggagttcgagaccagcctggccaacatggtgaaaccgtgtctctactaaaagtacaaaaattagccaggtgtgatggcaggtgcctgtaatcccagctactcgggaggctgaagcagaagaattgcttgaacccgggaggcagaggttgcaatgagccgagatcacgccatcacactctagcctgggggacaagagtgagacttcatctaaaaaaaaaaagaaaagaatatgtataccccctttttcatgtggcagatgtttagctatttggggagaactttcatggctcttccctaatcatcaagtattcaaggtaaagattctcggttcctgtaatggttcctcaccaggcataatttgtccttttaccatcctactttctgtcttctgaaaaacattctttatctgaaatacagcaattaatattaagatatcttaatatgaagtgcctggagtcaaatataacattccaaagtagtctgactggaagaactagcacctgcctttcttcaaacaatgcacttctgttaatgcagtgtaaggtaacatgagttgtttttggaaactacatcataatgtgggcttacattctagcacttatcacttaatgacagggatacatttgaggaatgcattgttaggcaattttgtcattatgcaaacatcatagagtgtacttacacaaacctatggtatagcctactacacatctaagttatatggtatagactgtttctccagctatatggtgtagactgtttctcctaggctacaaacctgcacagcatgttactgtattaaatgctgtaggcaattgtaacacaatggtatttttatacttaaacatatctaaacatagaaacggtacaaaaaactttacacattatatagatgtatcaaattattcatatgtgctctgaaaatgtctatatctgttatgtatcaattttttaaaaagtgaatgacataattcatttgaaaaaatgtggacacacaaattggaaaagaggtataaatgcagtattataatctaatgggaccacca

SEQ ID NO: 19279 - DNA, 2379 bp, Homo sapiens
  source 1..2379: mol_type = unassigned DNA
aaatgcttgaggagagagagagagtaaggagccagccatgaatcctttccagaaaaatgagtccaaggaaactcttttttcacctgtctccattgaagaggtaccacctcgaccacctagccctccaaagaagccatctccgacaatctgtggctccaactatccactgagcattgccttcattgtggtgaatgaattctgcgagcgcttttcctattatggaatgaaagctgtgctgatcctgtatttcctgtatttcctgcactggaatgaagatacctccacatctatataccatgccttcagcagcctctgttattttactcccatcctgggagcagccattgctgactcgtggttgggaaaattcaaagtcctatcattgatcggcctgagtctaatagctttggggacaggaggcatcaaaccctgtgtggcagcttttggtggagaccagtttgaagaaaaacatgcagaggaacggactagatacttctcagtcttctacctgtccatcaatgcagggagcttgatttctacatttatcacacccatgctgagaggagatgtgcaatgttttggagaagactgctatgcattggcttttggagttccaggactgctcatggtaattgcacttgttgtgtttgcaatgggaagcaaaatatacaataaaccaccccctgaaggaaacatagtggctcaagttttcaaatgtatctggtttgctatttccaatcgtttcaagaaccgttctggagacattccaaagcgacagcactggctagactgggcggctgagaaatatccaaagcagctcattatggatgtaaaggcactgaccagggtactattcctttatatcccattgcccatgttctgggctcttttggatcagcagggttcacgatggactttgcaagccatcaggatgaataggaatttggggttttttgtgcttcagccggaccagatgcaggttctaaatccccttctggttcttatcttcatcccgttgtttgactttgtcatttatcgtctggtctccaagtgtggaattaacttctcatcacttaggaaaatggctgttggtatgatcctagcatgcctggcatttgcagttgcggcagctgtagagataaaaataaatgaaatggccccagcccagccaggtccccaggaggttttcctacaagtcttgaatctggcagatgatgaggtgaaggtgacagtggtgggaaatgaaaacaattctctgttgatagagtccatcaaatcctttcagaaaacaccacactattccaaactgcacctgaaaacaaaaagccaggattttcacttccacctgaaatatcacaatttgtctctctacactgagcattctgtgcaggagaagaactggtacagtcttgtcattcgtgaagatgggaacagtatctccagcatgatggtaaaggatacagaaagcagaacaaccaatgggatgacaaccgtgaggtttgttaacactttgcataaagatgtcaacatctccctgagtacagatacctctctcaatgttggtgaagactatggtgtgtctgcttatagaactgtgcaaagaggagaataccctgcagtgcactgtagaacagaagataagaacttttctctgaatttgggtcttctagactttggtgcagcatatctgtttgttattactaataacaccaatcagggtcttcaggcctggaagattgaagacattccagccaacaaaatgtccattgcgtggcagctaccacaatatgccctggttacagctggggaggtcatgttctctgtcacaggtcttgagttttcttattctcaggctccctctagcatgaaatctgtgctccaggcagcttggctattgacaattgcagttgggaatatcatcgtgcttgttgtggcacagttcagtggcctggtacagtgggccgaattcattttgttttcctgcctcctgctggtgatctgcctgatcttctccatcatgggctactactatgttcctgtaaagacagaggatatgcggggtccagcagataagcacattcctcacatccaggggaacatgatcaaactagagaccaagaagacaaaactctgatgactccctagattctgtcctgaccccaattcctggccctgtcttgaagcattttttttcttctactggattagacaagagagatagcagcatatcagagctgatctcctccacctttctccaatgacagaagttccaggactggttttccagtacatctttaaacaaggccccagagactctatgtctgcccgtccatcagtgaactcattaaaacttgtgcagtgttgctggagctggcctgg

SEQ ID NO: 19280 - DNA, 572 bp, Homo sapiens
  source 1..572: mol_type = unassigned DNA
agattgcataattctcaagctgtgagctgcaaagacaatctgtggctccaactatccactgagcattgccttcattgtggtgaatgaattctgcgagcgcttttcctattatggaatgaaagctgtgctgatcctgtatttcctgtatttcctgcactggaatgaagatacctccacatctatataccatgccttcagcagcctctgttattttactcccatcctgggagcagccattgctgactcgtggttgggaaaattcaagacaatcatctatctctccttggtgtatgtgcttggccatgtgatcaagtccttgggtgccttaccaatactgggaggacaagtggtacacacagtcctatcattgatcggcctgagtctaatagctttggggacaggaggcatcaaaccctgtgtggcagcttttggtggagaccagtttgaagaaaaacatgcagaggaacggactagatacttctcagtcttctacctgtccatcaatgcagggagcttgatttctacatttatcacacccatgctgagaggagatgtgcaatgttttggagaag

SEQ ID NO: 19281 - DNA, 546 bp, Homo sapiens
  source 1..546: mol_type = unassigned DNA
attaatattagaatagctatatacaggatacggtagtggcactgaagacaggaagattatttttaacctatgaaaagggaggaaaagaatgctaaagctgctctggagtttgaaaggcagaggaacggactagatacttctcagtcttctacctgtccatcaatgcagggagcttgatttctacatttatcacacccatgctgagaggagatgtgcaatgttttggagaagactgctatgcattggcttttggagttccaggactgctcatggtaattgcacttgttgtgtttgcaatgggaagcaaaatatacaataaaccaccccctgaaggaaacatagtggctcaagttttcaaatgtatctggtttgctatttccaatcgtttcaagaaccgttctggagacattccaaagcgacagcactggctagactgggcggctgagaaatatccaaagcagctcattatggatgtaaaggcactgaccagggtactattcctttatatcccattgcccatgttctgggctcttttggatcagcagg

SEQ ID NO: 19282 - DNA, 299 bp, Homo sapiens
  source 1..299: mol_type = unassigned DNA
gaacagtctaatgcagtctttaataataggctacagagtttggatttcatcctttagagtctaaagtttagatataattgtttctcctttccaccacagatcacttaggaaaatggctgttggtatgatcctagcatgcctggcatttgcagttgcggcagctgtagagataaaaataaatgaaatggccccagcccagccaggtccccaggaggttttcctacaagtcttgaatctggcagatgatgaggtgaaggtgacagtggtgggaaatgaaaacaattctctgttgatagagt

SEQ ID NO: 19283 - DNA, 586 bp, Homo sapiens
  source 1..586: mol_type = unassigned DNA
ttttcagagggagaaaactatgtctacttggctagtggactaggctgtcagaaacaactgagatatgtgttgccattgtatctgaaggattatttgttggtgattctgacatgtgttctttgctctaaggaaatggccccagcccagccaggtccccaggaggttttcctacaagtcttgaatctggcagatgatgaggtgaaggtgacagtggtgggaaatgaaaacaattctctgttgatagagtccatcaaatcctttcagaaaacaccacactattccaaactgcacctgaaaacaaaaagccaggattttcacttccacctgaaatatcacaatttgtctctctacactgagcattctgtgcaggagaagaactggtacagtcttgtcattcgtgaagatgggaacagtatctccagcatgatggtaaaggatacagaaagcagaacaaccaatgggatgacaaccgtgaggtttgttaacactttgcataaagatgtcaacatctccctgagtacagatacctctctcaatgttggtgaagactatggtgtgtctgcttatagaactgtgcaaagaggag

SEQ ID NO: 19284 - DNA, 562 bp, Homo sapiens
  source 1..562: mol_type = unassigned DNA
ttttgaaaagctggaattgtgtagaaatgctcaatttcctgaaaatggctgaagaatgaaaatacaaaaaggatggatataagatcgtagaatgctgtagttagaaatatttacttgagactactgacaagtccatttccattttctctttccctaagaacaccaatcagggtcttcaggcctggaagattgaagacattccagccaacaaaatgtccattgcgtggcagctaccacaatatgccctggttacagctggggaggtcatgttctctgtcacaggtcttgagttttcttattctcaggctccctctagcatgaaatctgtgctccaggcagcttggctattgacaattgcagttgggaatatcatcgtgcttgttgtggcacagttcagtggcctggtacagtgggccgaattcattttgttttcctgcctcctgctggtgatctgcctgatcttctccatcatgggctactactatgttcctgtaaagacagaggatatgcggggtccagcagataagcacattcctcacatccaggggaacatgatcaaact

SEQ ID NO: 19285 - DNA, 2508 bp, Homo sapiens
  source 1..2508: mol_type = unassigned DNA
gcggccgcctgcgcgctggccgcctgcgcgctgccagcccgcccgcccgccaggggctccgccgccctcgcctcggcctcgttagcccgccaggagccccgcagctcctccgggagcccgctggtaactcgcgtccctcgcgcttctccggcgcctgaggggcccgcctcgggccatggtgctctcccaggaggagccggactccgcgcggggcacgagcgaggcgcagccgctcggccccgcgcccacgggggccgctccgccgcccggcccgggaccctcggacagccccgaggcggctgtcgagaaggtggaggtggagctggcggggccggcgaccgcggagccccatgagccccccgaaccccccgagggcggctggggctggctggtgatgctggcggccatgtggtgcaacgggtcggtgttcggcatccagaacgcttgcggggtgctcttcgtgtccatgctggaaaccttcggctccaaagacgatgacaagatggtctttaagacagcatgggtaggttctctctccatggggatgattttcttttgctgcccaatagtcagcgtcttcacagacctatttggttgtcggaaaacagctgtcgtgggtgctgctgttggatttgttgggctcatgtccagttcttttgtaagttccatcgagcctctgtaccttacctatggaatcatatttgcctgcggctgctcctttgcataccagccttcattggtcattttgggacactatttcaagaagcgccttggactggtgaatggcattgtcactgctggcagcagtgtcttcacaatcctgctgcctttgctcttaagggttctgattgacagcgtgggcctcttttacacattgagggtgctctgcatcttcatgtttgttctctttctggctggctttacttaccgacctcttgctaccagtaccaaagataaagagagtggaggtagcggatcctccctcttttccaggaaaaagttcagtcctccaaaaaaaattttcaattttgccatcttcaaggtgacagcttatgcagtgtgggcagttggaataccacttgcactttttggatactttgtgccttatgttcacttgatgaaacatgtaaatgaaagatttcaagatgaaaaaaataaagaggttgttctcatgtgcattggcgtcacttcaggagttggacgactgctctttggccggattgcagattatgtgcctggtgtgaagaaggtttatctacaggtactctcctttttcttcattggtctgatgtccatgatgattcctctgtgtagcatctttggggccctcattgctgtgtgcctcatcatgggtctcttcgatggatgcttcatttccattatggctcccatagcctttgagttagttggtgcccaggatgtctcccaagcaattggatttctgctcggattcatgtctatacccatgactgttggcccacccattgcagggttacttcgtgacaaactgggctcctatgatgtggcattctacctcgctggagtccctccccttattggaggtgctgtgctttgttttatcccgtggatccatagtaagaagcaaagagagatcagtaaaaccactggaaaagaaaagatggagaaaatgttggaaaaccagaactctctgctgtcaagttcatctggaatgttcaagaaagaatctgactctattatttaatatcttacatacctccaccagactggacttgctttttgaattttaagcaagtttcctttccttttatacaaattgcaaatttcatatttttttaatcacatcctaggaatagcacaataattgggaaatagaacccttatcactagaagaaccattttctgccactaaatatctctgatgtttccatgagtctgagggcagagactctggtatatgaaaacgtctgaaagtcacatattgtgaaaatttgaagctatctcagtaaaaagcagctttggaaactgtgaatgatctttagcttgtacaaatgtttaaaaatacctcaggctatactgaaagggttgcagtttggttaggagtggaaatattttgtttgttaatgatgtcttcagttctggtacctctgttttactttcttatgctctttggaaactttttgcaaaatttaagcctgggttctagataataccagatctacctaaacctcaagtctatgttaaagttgctttcctgctgttaaataagctatgatattaagatattctgacttgctccagtgtcaagggaccttctgggagcaggtgctaacatagtgttcagaatcaatatgtgagatgaaaaggatcccctccaggaggatcctgagctgttcagaaatcatttaagtttacagcgttgttccctttgcgtttgcagtgcgttttactcaagtagccagaaacaccccacgtttctgaatttgtttaaactgtaacaataaagtaaaatagaatgcatgaaagata

SEQ ID NO: 19286 - DNA, 646 bp, Homo sapiens
  source 1..646: mol_type = unassigned DNA
catgggtaggttctctctccatggggatgattttcttttgctgcccaatagtcagcgtcttcacagacctatttggttgtcggaaaacagctgtcgtgggtgctgctgttggatttgttgggctcatgtccagttcttttgtaagttccatcgagcctctgtaccttacctatggaatcatatttgcctgcggctgctcctttgcataccagccttcattggtcattttgggacactatttcaagaagcgccttggactggtgaatggcattgtcactgctggcagcagtgtcttcacaatcctgctgcctttgctcttaagggttctgattgacagcgtgggcctcttttacacattgagggtgctctgcatcttcatgtttgttctctttctggctggctttacttaccgacctcttgctaccagtaccaaagataaagagagtggaggtagcggatcctccctcttttccaggaaaaagttcagtcctccaaaaaaaattttcaattttgccatcttcaaggtgacagcttatgcagtgtgggcagttggaataccacttgcactttttggatactttgtgccttatgttcacttggtgagtatgctccttcactgatcatgaatattactatttaataaaga

SEQ ID NO: 19287 - DNA, 734 bp, Homo sapiens
  source 1..734: mol_type = unassigned DNA
catgggtaggttctctctccatggggatgattttcttttgctgcccaatagtcagcgtcttcacagacctatttggttgtcggaaaacagctgtcgtgggtgctgctgttggatttgttgggctcatgtccagttcttttgtaagaataaggatccccaacccctgtgccacagactggtacgggtccatggcctgttaggaattgggctgcacagcaggaggtgagctgtggttccatcgagcctctgtaccttacctatggaatcatatttgcctgcggctgctcctttgcataccagccttcattggtcattttgggacactatttcaagaagcgccttggactggtgaatggcattgtcactgctggcagcagtgtcttcacaatcctgctgcctttgctcttaagggttctgattgacagcgtgggcctcttttacacattgagggtgctctgcatcttcatgtttgttctctttctggctggctttacttaccgacctcttgctaccagtaccaaagataaagagagtggaggtagcggatcctccctcttttccaggaaaaagttcagtcctccaaaaaaaattttcaattttgccatcttcaaggtgacagcttatgcagtgtgggcagttggaataccacttgcactttttggatactttgtgccttatgttcacttggtgagtatgctccttcactgatcatgaatattactatttaataaaga

SEQ ID NO: 19288 - DNA, 912 bp, Homo sapiens
  source 1..912: mol_type = unassigned DNA
catgggtaggttctctctccatggggatgattttcttttgctgcccaatagtcagcgtcttcacagacctatttggttgtcggaaaacagctgtcgtgggtgctgctgttggatttgttgggctcatgtccagttcttttgtaagttccatcgagcctctgtaccttacctatggaatcatatttgcctgcggctgctcctttgcataccagccttcattggtcattttgggacactatttcaagaagcgccttggactggtgaatggcattgtcactgctggcagcagtgtcttcacaatcctgctgcctttgctcttaagggttctgattgacagcgtgggcctcttttacacattgagggtgctctgcatcttcatgtttgttctctttctggctggctttacttaccgacctcttgctaccagtaccaaagataaagagagtggaggtagcggatcctccctcttttccaggaaaaagttcagtcctccaaaaaaaattttcaattttgccatcttcaaggtgacagcttatgcagtgtgggcagttggaataccacttgcactttttggatactttgtgccttatgttcacttggcaaaattcagctttgttatactgaaatacgaataattaatgtctagactggggttggtgcctcacgcctgtaatcccaccactttggggggctgatgcaggagttcaagaccagcgtgggcaacataaggagacttcatccctacctggggaaggaaaaaaaaaaaagaaggaagaagcagtgtctaaagtatctgcccctggcaacgtttgttcaaaagtgttcattatgtttcttccttttttcttttgtggctgaaaatgtatttacaattcaccgtaaatgataaaaatggcattggcacacatattt

SEQ ID NO: 19289 - DNA, 10051 bp, Homo sapiens
  source 1..10051: mol_type = unassigned DNA
ttccatcgagcctctgtaccttacctatggaatcatatttgcctgcggctgctcctttgcataccagccttcattggtcattttgggacactatttcaagaagcgccttggactggtgaatggcattgtcactgctggcagcagtgtcttcacaatcctgctgcctttgctcttaagggttctgattgacagcgtgggcctcttttacacattgagggtgctctgcatcttcatgtttgttctctttctggctggctttacttaccgacctcttgctaccagtaccaaagataaagagagtggaggtagcggatcctccctcttttccaggaaaaagttcagtcctccaaaaaaaattttcaattttgccatcttcaaggtgacagcttatgcagtgtgggcagttggaataccacttgcactttttggatactttgtgccttatgttcacttgatctcaacatctgctgcaatttgactgttcagatgaaacatgtaaatgaaagatttcaagatgaaaaaaataaagaggttgttctcatgtgcattggcgtcacttcaggagttggacgactgctctttggccggattgcagattatgtgcctggtgtgaagaaggtttatctacaggtactctcctttttcttcattggtctgatgtccatgatgattcctctgtgtagcatctttggggccctcattgctgtgtgcctcatcatgggtctcttcgatggatgcttcatttccattatggctcccatagcctttgagttagttggtgcccaggatgtctcccaagcaattggatttctgctcggattcatgtctatacccatgactgttggcccacccattgcagggttacttcgtgacaaactgggctcctatgatgtggcattctacctcgctggagtccctccccttattggaggtgctgtgctttgttttatcccgtggatccatagtaagaagcaaagagagatcagtaaaaccactggaaaagaaaagatggagaaaatgttggaaaaccagaactctctgctgtcaagttcatctggaatgttcaagaaagaatctgactctattatttaatatcttacatacctccaccagactggacttgctttttgaattttaagcaagtttcctttccttttatacaaattgcaaatttcatatttttttaatcacatcctaggaatagcacaataattgggaaatagaacccttatcactagaagaaccattttctgccactaaatatctctgatgtttccatgagtctgagggcagagactctggtatatgaaaacgtctgaaagtcacatattgtgaaaatttgaagctatctcagtaaaaagcagctttggaaactgtgaatgatctttagcttgtacaaatgtttaaaaatacctcaggctatactgaaagggttgcagtttggttaggagtggaaatattttgtttgttaatgatgtcttcagttctggtacctctgttttactttcttatgctctttggaaactttttgcaaaatttaagcctgggttctagataataccagatctacctaaacctcaagtctatgttaaagttgctttcctgctgttaaataagctatgatattaagatattctgacttgctccagtgtcaagggaccttctgggagcaggtgctaacatagtgttcagaatcaatatgtgagatgaaaaggatcccctccaggaggatcctgagctgttcagaaatcatttaagtttacagcgttgttccctttgcgtttgcagtgcgttttactcaagtagccagaaacaccccacgtttctgaatttgtttaaactgtaacaataaagtaaaatagaatgcatgaaagatattctggcgattgtaacttagaatttttctgacttctggatttgttggcactagaacctgatatttaaagtcttactgagcagctatcaagtggcagttacaggcacaaattggtggaggctggaggatggggaggggagcaaaaccctttatatttgtgaagaaaatatctgtagctgatagaaataattgcttaaattggtttatgaaattaatgagtctgaaaaggttaaaagcacttataaaaagaaccaagtcctacatttccagaactttctggcaaaaatttgcactcatattatttatcctatgaacattcccattgtttttttttgctatttatatacagattatcataagaaagctctcagtttgaggacccaaaataaaaccaaagtcatgccatgacccatactcatttacaaaaacaagaacactttcctctatccctaaaattatgctttagtacttgaggcctttaaaagttagtgcttttgattgtgaagacattcagcaacttactttgtcatacatgcagttgcaccttaccacttctaatagtgtcatatttcatattcaggggacttagataatttgcctgtggatggttcttttgcaggaaaaaaaatctacattttgaccatactaccctttcatgtccttattataagcttttagaaaatgatttcattcagtcatgtccagttatataaaacgttactttctcatttttgagaagttcaacaaaacatactactaagaccaatcatcaaacccactattataaatgttaattttggctgggtaaggtggcttgcgcctataatcccagcactttgggaggctgaggagggaagattgcttgagcccaggagtttgagaccagcctgggcaacatagcaagatcctgtctctactaaaaataaaaaaaaaaattaggccaagcatagtggctcatgcctgtaatcctagcactttggtagtccaaggcagggggatcacttgagcccagaagttcaagaccagcttgggtaacataatgagaccctgtgtctacaaaaaatttaaaaattagccaggcatgatggtgcccacctgtagccccagctactcagaggctgaggtagtggaaggattgcttgagccttgagatggaggctgcagtgagctatgccactgtactctagcctgttcaactgagcagaaccctgtctgtaaaagaaaatcaaaaacaaaaaataaatgttaaattttgttttaagttttagcacagactcccctcaaaacaccttctccccaattttacagaaagtaatttaaaaatgaaaactttactctgtaaagacctctacagtgtttttcttttcaaaatttggctgattttaggaaaaaagtgatcatctgaaactaaaagaaattgcttggttagtttccatattaaaacagcagtgacaagtatatataacttagatctcagcatatgtgtttgtatattaaacttcacatatgtagttttcagtttaatggaatgaatcaaactggatctataacactgaaaaagttctattgtaatagactcatacggagaatactctgctataataatataaaattaagaagaaaaagtataaacgtaagatgctaaattccataaatgcatatttagtactatgttttttgtgggaaaagttctaaaagtttaaaatgcacaaagaaaatgaaaaatactaatataaaaatttgtgctttaatctagtcaaactaaatcctttctaatttctgaatgaagtgttactgctgcaataaagtgacctgataagcctaaattttttgtgttcaatccagacacttttctgagagtctgaaaagaatacagagtcagaactctgtttttatctcctcatcctgtttttgataagactcagaaaattctcaaattcgaaaggttctggcatttgaggccaaaaaaagcatgaaagggagtaacattcctttttatagatactctagattggatactattgtaacagatggccaagaaacttccagaaacattttggttaaattttattgcaatggatattgctgggatccatccatttaagcagtaatataccacccagattattgatactttatgcaagatgtgttcatctctttgatcatatttacaatgcttactccatagccctgctacaagacttaaaatttccactgaaaattgcatagttcttgtattaagattcaaattctggctgggcgcagtggctcacgcttgtaatcccagcactttgggaggctgaggcaggcggattgcctgagctcaggagttcgcaaccagcctgggaaacacggtgaagctccatctctactaaaatacaaaaaaattagccaggcgtgtcggcatgcacctgtagtcccagctactcgggaagctgaggcaggagaagaatccaggaggcagaggttgcagtgaggcgagattgcgccactgcactccagcctgggcgacagagcgagactccatctcaaaaaaaaaaaaaaaaagtaaaagtacacacagtttaaaagtaaacatgtttacttcggataattctaatccttttagctgcatttaagaatattttaatttatacgaatgttacttgaaattggcctatgtccagatgacttttgatgttaaatcaatggaaaactgaatagaaaatatgacacgagatcggggagggggaaggcaacctatagcatgggtggctctgaggagttcctgctggtgcactttcatgccctttcttatgtaccttttgtcttactcttcttacattattcttatcctcatcattttttcatttccctttacttcctcctatccttcaaaaacctcctgaagagtccattaacatccatgcttagttccactggttgcatggctgtatttcctactgatccctgtagtttcactgaatggatccccacccaatttcgtgtatcctggtgaatggctttctctcagccttcgacttagttctaatgatctacattgaatttaaattacatgactgaaatatttaagggaagaaataaatttcatacaaattagtatcttttatgctaacatttaaaactgtatttaaatttttaaggtaaatgctttggggaaaaaaaaaaccattgccaagtctttagcatattttcagagagcgtaattttttactttgatttccagtttcactaaggtttcattaaatcttagttccgagagcccagcatgaagggtgactgggaatgtagtgtgcctctctgatgcagttcctaatgattgttcttcagggaccttccttaggttaggttacattttctggtgaatggtgttagagtaaattcccagagtttagagatacaagtagaaatgcataagctaattagctccaattttataatatgtaaacaatttaaacaagtatttaaaactttttaggaagtctctaacactgaaaaaaaggtcattgttgctggtataaacattaaggagcaacttttacattaggtcaaagattgttgcttttccagtgtgttgtcttaaaaatagaaggaaataaaactattaccttctttttacatctatatgtttttataatttgaaaggcaagtagtatcttggtgaataagaaatgcatcatccataacaatttaattaactcttaaaaagaccagctttttgtcttgttatgaaaacaaaacgcaatttgtcattcataatggtaatgtggaataagaatacatcgtagaaggaagacttgctactttactgacttaatcattagttctaaggccatgtgtggcggctcacgcctgtaatcccagcactttgggagtccaaggcggtaggatcaccagagcccagggttcaagactcagcctgggcaacatagtgagatttcgtctctacaaaaaaaatttagccagcttggtggcacatgcctgtagtcccagctactcaggaggctgaggcaagaggattgcttgagcatagcaggtcaagtctgcagtgagctgtggttgcaccactgcactccagcctgggtgacaaaatgagaccttgtctacaaaaaggaaaaaaaaatttgttctgctctactatacatgctgacttttgttgatagcttggtctaaaaagactgtctagagctgaatttaagaatggttctggagcaaataataacaaggtagacaagcaggccctgggctcactataatttcatagccacgacctgtttattattagttggcagagattaatgctttgtgttataaatatactatagaacaataggtcacgattctcaagaacaaagccgaatgctcgcagttaagtgtgaagcttgcataagtgtcggaaccacaattatggacccaccatcaatgtgcattttatcagatgactcctcctgagacagtaaagactcctggaaaattcatgacatctttgaatcactcagaaaaatcttgaaactcaggacgtagtttacttagcttgccttttttaaaattatcaaattttaaatcgtaaactttgtcttcacttccacacgttcaaggacacctcttttaaagttcagtgttccatactaaaggggtgtaatcttgctttctggggaaataaaattccccatggtactatattcctgacagatataaaataacatgaggctacctcatttttgaaatagatttcaatatttttattagtaagttggaaagacagtaggaacaaaatgaaacctttctaagtacttgatgacacccacttgatcatgacaattcatctacctccgctttccgtgtccagctgaaagcccagctgagtcaactcctgcttcatcagaagggagctaatggtgattctgggattaaaaagcaaggggggtgcaaattgttagtggggtcaaaatatcagtaaaatttcttaagtgctttgttctgataaacggatgtaaaagtaacaaaaaaggaataacaactaatatggcctgtggatctgacaaagaaaaacctgaagaaattcagaatctagatacacttagattctaaattagacacactcagattctaatgaacacttagaatgcttcgccagtggcttttcaagttacactggaagcttgattatgaaaaagttttgttttcattggcaagagggtagatgatcagtgatgacagattgtacagctgtgcccaaacctgacaacttacacattaaactcctgtaagagacactccttcctagtagaacaaggactgggacaatgaatttttgactcactggagttttttaaaatgctgttcttgagtgtggcaatagtgtaggagttaacccagtctacccaaagaagttgctttgcctttcaatatgagtgctataaaaagagtattttggagttcaatgtccctaaacatgtatgcgataggaactaccaatataaaataacacttagaactcaaattagattggtaatactattttggagcctgtgatgtatgacttttattctttactagatatttttcagtatccgtcattagaagagtcagtttgttaaatattttaaatgtgtaaacacaaaacctttctactgtgatcttccctaatgagtcaaagtatctttcataattcagtctatattgaaatgttatttcaggaatggagggtttgttattaatagtgctgggccgggcacggtgactcatgcctgtaatcccagcactttgggaggccgagacaggcgaatcacctgaggtcagatgttggagaccagcctgaccaacatggagaaaccccatctctaccaaaaatacaaaattagccgggcgtggtggctccatgctgtaatcccagctactcgggaggctgaggcaggagaattgcttgaacccaggaggtggaggttgcagtgagccaagattgcaccatagcactccagcctgggcaacaagagcaaaactctgtctcaaaaaaaaaaaaaaaaaaaatagtgctgcattttgaccctggactatgaacagactgtatagttggtgcctcttttttttctaccaaagattattagatcaagattggtgctatacttcatgttcctttcaaaattatttttcttttaaaaatattaatatacaacacaatagaaaatgtatacagccagcaacgttatgcatgttgcatgttatatacatgactgaggaaaaaagctcacctatacagtgattattgagttccagtatctagttagaggtatgcaatttttgttaacatataagactttaaattacgaaactcacaagaaaatgatcaccaaatgagaatgttctaatgaacacaacctcccaaggtaataattttaaagaaaaagtcccttgtcaatgtttctagcacaaagtgagggatttaaatatattctgtaactttgaggcaatgtgaaaaagttatatataatagcttcctattgagctggcttatgtagacatttggacatttgaaactatttcgcaactttcaggctaaaatcagagttttgagagtcatcaatcttaaaacatggataatgagttatttgcacagttatatttttataattatttgaaatttatcactgaaagtatcattgtttgtctttcagatttaacataaacaataagtactgcggctgggtcactgtcagcaaatctcaggtctatgatttatcaagggctctcagcaccatcgttggtctgattgtgtaacacctaagtaaaataacatatgggtctccttggccaggcgccgtggctcacacctgtaatcccagcactttgggaggccaaggcaggcggattgcttgaggccaggagttcgagacatacgggtctctttaatgttctgtaggtaggattcagatgaattgagaatgacaggtttctttttctttctttgtttcttttttttttttttttttgagatggagtcttgctctattgccaggctccatatagtggcgcgatctcagctcactgcaacctccgcctcccgggctcaagtgattctcgtgcctcagtcttctgagtagctgggactacaggtgcccactaccacaccggctaatttttgtatttttggtagagatggagtttcaccatgttggccagactggccttaagtgatccacctgcctcagcctccccaagtgctggaattacaggcatgagccaccatgcccggctagagaatgacaggtttcagttgaattcttctcttttaaaagaccctgacttaactgtattttatgaggattttataaatgtaaattaagaagacaatacacactctcattttcctaattagaaagactatgcattcacaatccagtacactggatttgctctggtaactaatgataacacttttctacgttaacatgagttatatttggcagagagaatggaagcttgctaatcagaagttacattagggtgagattaaacatcactctaataataacttctgatgtaacttaatgtggtttgagatgtgtaagattgtagaggcattgcacaatgcttgataaaagttgcattttgcttttgttcttccaccagtttattttagccttaaagttatagctacaacaaattgaaccctgtagttattactgaaagagagtgtggatattttaagtatctcctagtataatatgacattgttcatgtggacttattttaatgtttatttgaaaattaattttttaattattttgtatattttgagttagaaaaacacactttatcttagacaccaaagccaaattattccaagtgtatgctatacaccgcagtgcagctctgcttctctcccaacctaccctggggccatttttggcacaatagttgttcaaatgtagatcactatgctgaatgctcatgctggatttgaccagtatgcagtattttagtactttttaaaaaatgtatgcttctttttgaagactataatttacaatttttttaataatgtgcaatttaatatagataaccaaaatctttttaatgaaaagatctttacaattgcttggaggataagattattttactgtggaaaaatgtgatactcttagtaaatgcaataaaaactttttagcaaattcc

SEQ ID NO: 19290 - DNA, 1231 bp, Homo sapiens
  source 1..1231: mol_type = unassigned DNA
agtcgggggtgcggggctgtgacctagaggcttcagtgtcgatccccgaggtgttcgcgcgcgccagctgtcctcgcggccgcctgcgcgctggccgcctgcgcgctgccagcccgcccgcccgccaggggctccgccgccctcgcctcggcctcgttagcccgccaggagccccgcagctcctccgggagcccgctggtaactcgcgtccctcgcgcttctccggcgcctgaggggcccgcctcgggccatggtgctctcccaggaggagccggactccgcgcggggcacgagcgaggcgcagccgctcggccccgcgcccacgggggccgctccgccgcccggcccgggaccctcggacagccccgaggcggctgtcgagaaggtggaggtggagctggcggggccggcgaccgcggagccccatgagccccccgaaccccccgagggcggctggggctggctggtgatgctggcggccatgtggtgcaacgggtcggtgttcggcatccagaacgcttgcggggtgctcttcgtgtccatgctggaaaccttcggctccaaagacgatgacaagatggtctttaagacagcatgggtaggttctctctccatggggatgattttcttttgctgcccaatagtcagcgtcttcacagacctatttggttgtcggaaaacagctgtcgtgggtgctgctgttggatttgttgggctcatgtccagttcttttgtaagttccatcgagcctctgtaccttacctatggaatcatatttgcctgcggctgctcctttgcataccagccttcattggtcattttgggacactatttcaagaagcgccttggactggtgaatggcattgtcactgctggcagcagtgtcttcacaatcctgctgcctttgctcttaagggttctgattgacagcgtgggcctcttttacacattgagggtgctctgcatcttcatgtttgttctctttctggctggctttacttaccgacctcttgctaccagtaccaaagataaagagagtggaggtagcggatcctccctcttttccaggaaaaagttcagtcctccaaaaaattttcaattttgccatcttcaaggtgacagcttatgcagtgtgggcagttggaataccacttgcactttttggatactttgtgccttatgttcacttggtgagtatgctccttcactgatcatgaatattactatttaa

SEQ ID NO: 19291 - DNA, 3616 bp, Homo sapiens
  source 1..3616: mol_type = unassigned DNA
ttacctcccagaattagacaattgcaaagagcttagaatatttatttgaaaggaatgaggatcctgcactcttcctccctcagtaagtaaatgccagtccctaggaagagagaaccaaaatgtctaccggaccagatgtcaaggctacagtgggggacatttccagtgatggcaatttaaacgtggctcaagaggaatgctccaggaaaggtttttgttcagtccgacatgggctggccctcatcttgcagctctgtaatttttcaatttacacccaacaaatgaacttgagcattgccatcccagctatggtgaacaacacagccccacctagccagcccaatgcttccacagaacggccctccactgactcccagggctactggaatgaaactctaaaagaatttaaagcaatggcccctgcatatgactggagtcctgaaatccagggaatcatcctcagctccctcaactatggctcattcttggctccaatccccagtggctatgtggctggaatatttggagccaagtatgtggttggtgctggcttgtttatttcctcattcctgaccctcttcattccactggcagctaatgcgggagtggccttgctcattgtcctccggattgtacaaggcatagcccaggttatggtattaactggtcagtattcaatttgggtcaaatgggctcccccactggaaaggagtcaactcaccaccattgctggatcagggtcaatgctggggtccttcattgttctacttgctggtggtctcctctgccagaccataggatggccttacgtcttctatatctttggaggaattggctgtgcttgttgtcctctctggtttcctctcatttatgatgatcctgtgaatcatccctttatcagtgctggtgagaagagatacattgtgtgttcattggctcagcaggactgttcaccaggctggtctcttcccattagggctatgatcaaatccttaccactctgggccattttagtctcttatttctgtgaatactggcttttttataccattatggcgtacacaccaacgtacatcagctcggtacttcaagccaacctcagagatagtgggatcctgtctgccttgccgtttgttgttggatgtatctgcattatccttggaggtctactggcagactttcttctctccagaaaaatcctcagactcatcaccatcaggaaactcttcactgccattggggttctcttcccatccgtgatcctcgtgtccctgccctgggtcagatccagccacagcatgaccatgaccttcttggtgctgtcttctgccatcagcagcttctgtgaatcaggagcccttgttaacttcttggatattgctcctcggtacactggctttctcaaaggactattgcaagtctttgcacacatagctggagccatctctcctactgctgctggatttttcatcagtcaggattcagagtttggttggagaaatgtcttcttgctttcagctgctgttaacatatcgggcctggttttctacctcatctttggccgagcagatgtgcaggactgggctaaagagcagacattcacccacctctgagcaaaccgagagatgtgctagatcctggtgcttagttcatcattgttttccctcacagacatttctctttcatgcctgcttgactgataagccattagctagaccctgactatgtaacgctaaagattttaccatgcctggaaattttacaggggaagaaaacacgctagttatttaactgcaagctactaaaagcataggtgtgttgagatttctgtgttctccactcttccactgttatcctagtaaaagcatcaggggctggggacaatttctttccaaagcaaaagaggaagccagaccttgggaccgagaactgagaatcacaagggagttgcgcccaacatgcagaacatgaatcctctgagctgtcctcaaaagaaagccccaaacaacagaaagcatagtgttttccattgttggtgaaaaatgtcaaggaggaaagaacaataatgattccatcatgataagaggaatgaacgtgtctgcaactaatgggagcaagatagtacactttaactctttcagacaacttgcattctgtggatgccagctttggaatcagagccgcctctggaatacctgtgcttccagagttagcttttggacagttaccttctttctggccatcttgacttctgccccacatctgctttttggctttgtgcagatctttaacatgttagtgaacagacattgcccagtgtctcttctagcccctccaacagttcttcatgtagcactgcttttggacagtgacccatgatatctgccttcgtttgcccctctgactgttggaatcccacgcaccattcagtaggattcaattcaatgtggaaccattcaacattcacctcattaacctaaaatgtctcccaaagatgtatgtaagacacacactgccctaacctcactccaaatgtctggagaaatgtgtgtagtgcttttgttaaagcccctatatgggcagcatggaggatcataagatagcaaaaccatttcaacactaaatgaatattaatgtacacacaccttgtgtggatggcagaaatcaaatcatacacagtattaaggagttcagtgtctcgggagggcagataactttaatcaaagtatcacacaagtgaatatgtaataacaactgtagaaataatgagtggttacatgggttatgagagtggatgataagtgcactaatctgagtgtaaggaagggccacccctgcaaagtttcagctgagctgggatctgaaggataatagttaactgttgtgggagactgagaggagaatattttaggaagaaagaacagcataagcaaaagtttcatggcaggagggagaaattagctatggccagagtatagagaataagggaagtatgatttgtgaggagactgtagaagaattaaggtcaggagcacacaggatgatgtaggcccagtgaagtgcgttggtctttattttgaaatcagtaggaagtgtcctggttttcaaaggcactctgcatgagagattaggttggagtaggagcttacagtgtagtccaggagagaacaatggcccctggcatgaggcaatagacatggtgagaggtgaatggattatttgatttaggtggattatttgatttagggaataaacctgacgggtcctattactaagtgagagagtgaaagatgtccagagtaactcctgagttttggtttgctattatattaatggggatgcctctaacacagacagcaacacagatagcaattatatccaagtgtagacaacaagaaggaaaatggacacatgactctggatttctcttgtgagacctgggctccatttacaaacgtataaatcatcttgatataggtagtgattacaatttttgcatggatgagtcatccatgggtgaaagtggcataagaaaaggaagcttgggaataagccttaaagaattccagtatttaatggtcagctggaggatgattagcagaaagaaagaaagaaa

SEQ ID NO: 19292 - DNA, 3699 bp, Homo sapiens
  source 1..3699: mol_type = unassigned DNA
ttacctcccagaattagacaattgcaaagagcttagaatatttatttgaaaggaatgaggatcctgcactcttcctccctcagtaagtaaatgccagtccctaggaagagagaaccaaaatgtctaccggaccagatgtcaaggctacagtgggggacatttccagtgatggcaatttaaacgtggctcaagaggaatgctccaggaaagggatagtggatgaattcttcccgctgttgtcaaactaatgtatatggactcaaccacagggatatccccagagctcctatggaacactagcaaattttgtgtttttgttcagtccgacatgggctggccctcatcttgcagctctgtaatttttcaatttacacccaacaaatgaacttgagcattgccatcccagctatggtgaacaacacagccccacctagccagcccaatgcttccacagaacggccctccactgactcccagggctactggaatgaaactctaaaagaatttaaagcaatggcccctgcatatgactggagtcctgaaatccagggaatcatcctcagctccctcaactatggctcattcttggctccaatccccagtggctatgtggctggaatatttggagccaagtatgtggttggtgctggcttgtttatttcctcattcctgaccctcttcattccactggcagctaatgcgggagtggccttgctcattgtcctccggattgtacaaggcatagcccaggttatggtattaactggtcagtattcaatttgggtcaaatgggctcccccactggaaaggagtcaactcaccaccattgctggatcagggtcaatgctggggtccttcattgttctacttgctggtggtctcctctgccagaccataggatggccttacgtcttctatatctttggaggaattggctgtgcttgttgtcctctctggtttcctctcatttatgatgatcctgtgaatcatccctttatcagtgctggtgagaagagatacattgtgtgttcattggctcagcaggactgttcaccaggctggtctcttcccattagggctatgatcaaatccttaccactctgggccattttagtctcttatttctgtgaatactggcttttttataccattatggcgtacacaccaacgtacatcagctcggtacttcaagccaacctcagagatagtgggatcctgtctgccttgccgtttgttgttggatgtatctgcattatccttggaggtctactggcagactttcttctctccagaaaaatcctcagactcatcaccatcaggaaactcttcactgccattggggttctcttcccatccgtgatcctcgtgtccctgccctgggtcagatccagccacagcatgaccatgaccttcttggtgctgtcttctgccatcagcagcttctgtgaatcaggagcccttgttaacttcttggatattgctcctcggtacactggctttctcaaaggactattgcaagtctttgcacacatagctggagccatctctcctactgctgctggatttttcatcagtcaggattcagagtttggttggagaaatgtcttcttgctttcagctgctgttaacatatcgggcctggttttctacctcatctttggccgagcagatgtgcaggactgggctaaagagcagacattcacccacctctgagcaaaccgagagatgtgctagatcctggtgcttagttcatcattgttttccctcacagacatttctctttcatgcctgcttgactgataagccattagctagaccctgactatgtaacgctaaagattttaccatgcctggaaattttacaggggaagaaaacacgctagttatttaactgcaagctactaaaagcataggtgtgttgagatttctgtgttctccactcttccactgttatcctagtaaaagcatcaggggctggggacaatttctttccaaagcaaaagaggaagccagaccttgggaccgagaactgagaatcacaagggagttgcgcccaacatgcagaacatgaatcctctgagctgtcctcaaaagaaagccccaaacaacagaaagcatagtgttttccattgttggtgaaaaatgtcaaggaggaaagaacaataatgattccatcatgataagaggaatgaacgtgtctgcaactaatgggagcaagatagtacactttaactctttcagacaacttgcattctgtggatgccagctttggaatcagagccgcctctggaatacctgtgcttccagagttagcttttggacagttaccttctttctggccatcttgacttctgccccacatctgctttttggctttgtgcagatctttaacatgttagtgaacagacattgcccagtgtctcttctagcccctccaacagttcttcatgtagcactgcttttggacagtgacccatgatatctgccttcgtttgcccctctgactgttggaatcccacgcaccattcagtaggattcaattcaatgtggaaccattcaacattcacctcattaacctaaaatgtctcccaaagatgtatgtaagacacacactgccctaacctcactccaaatgtctggagaaatgtgtgtagtgcttttgttaaagcccctatatgggcagcatggaggatcataagatagcaaaaccatttcaacactaaatgaatattaatgtacacacaccttgtgtggatggcagaaatcaaatcatacacagtattaaggagttcagtgtctcgggagggcagataactttaatcaaagtatcacacaagtgaatatgtaataacaactgtagaaataatgagtggttacatgggttatgagagtggatgataagtgcactaatctgagtgtaaggaagggccacccctgcaaagtttcagctgagctgggatctgaaggataatagttaactgttgtgggagactgagaggagaatattttaggaagaaagaacagcataagcaaaagtttcatggcaggagggagaaattagctatggccagagtatagagaataagggaagtatgatttgtgaggagactgtagaagaattaaggtcaggagcacacaggatgatgtaggcccagtgaagtgcgttggtctttattttgaaatcagtaggaagtgtcctggttttcaaaggcactctgcatgagagattaggttggagtaggagcttacagtgtagtccaggagagaacaatggcccctggcatgaggcaatagacatggtgagaggtgaatggattatttgatttaggtggattatttgatttagggaataaacctgacgggtcctattactaagtgagagagtgaaagatgtccagagtaactcctgagttttggtttgctattatattaatggggatgcctctaacacagacagcaacacagatagcaattatatccaagtgtagacaacaagaaggaaaatggacacatgactctggatttctcttgtgagacctgggctccatttacaaacgtataaatcatcttgatataggtagtgattacaatttttgcatggatgagtcatccatgggtgaaagtggcataagaaaaggaagcttgggaataagccttaaagaattccagtatttaatggtcagctggaggatgattagc

SEQ ID NO: 19293 - DNA, 2331 bp, Homo sapiens
  source 1..2331: mol_type = unassigned DNA
tcagtaagtaaatgccagtccctaggaagagagaaccaaaatgtctaccggaccagatgtcaaggctacagtgggggacatttccagtgatggcaatttaaacgtggctcaagaggaatgctccaggaaagggatagtggatgaattcttcccgctgttgtcaaactaatgtatatggactcaaccacagggatatccccagagctcctatggaacactagcaaattttgtgtttttgttcagtccgacatgggctggccctcatcttgcagctctgtaatttttcaatttacacccaacaaatgaacttgagcattgccatcccagctatggtgaacaacacagccccacctagccagcccaatgcttccacagaacggccctccactgactcccagggctactggaatgaaactctaaaagaatttaaagcaatggactgttcaccaggctggtctcttcccattagggctatgatcaaatccttaccactctgggccattttagtctcttatttctgtgaatactggcttttttataccattatggcgtacacaccaacgtacatcagctcggtacttcaagccaacctcagagatagtgggatcctgtctgccttgccgtttgttgttggatgtatctgcattatccttggaggtctactggcagactttcttctctccagaaaaatcctcagactcatcaccatcaggaaactcttcactgccattggtaagggagagactggacacaggggtgaacgtgggaagctcagagcagccttcagtttactctgtgtttgtcctcctaccccaggggttctcttcccatccgtgatcctcgtgtccctgccctgggtcagatccagccacagcatgaccatgaccttcttggtgctgtcttctgccatcagcagcttctgtgaatcaggagcccttgttaacttcttggatattgctcctcggtagggacctcttttgcctcatcctttcagacactcaattcaagtctagcagccctaaatctactctgatgtgaaagtaaaatgtggcaggtacaacaggttgcaggaaatgtcagcaccagctctacatcctacatctaaataattcctggaagagactcaaagctggtggaccattgtgaacttagtttttctgggcgtgaacaagaggagtcagtggccatgctcagagtcaactgagggagactcacacaaacctctctctgttgaggaatgcagcacttgcctaaggcggaatcactgaaagaaatcttgagattctatagggtatgctcatgaaaatctttaatgaaggcaaaggacacaggactgcaggagaaatatctgtctctgatacagtaaaaacagttgactgagacttccaaacatagctcccagggtgctgtcccagtcaacaggacatccttcatcttcagataatgaaccaccaagaaatgtgagagatgcccttgtcacaggggagccgacgtctcatctggtgaggggtcttttatacccacggagggtataaaagttacaagatcagactcaacagcagaagccaaaacaacaacaacaacaacaacaacaacaacaacaacaacaacaaaaaccttacaaaccaggtgcagaccatcaatctgaccatcttgcataaacaatgttgacaagttaatagaggttacccccttgggagtaccagtccctagcacaggattatactaatcattggtcagtacatttcattcaggtttcaccaaggcttacacaattccagtcatctccagaggtacactggctttctcaaaggactattgcaagtctttgcacacatagctggagccatctctcctactgctgctggatttttcatcagtcaggattcagagtttggttggagaaatgtcttcttgctttcagctgctgttaacatatcgggcctggttttctacctcatctttggccgagcagatgtgcaggactgggctaaagagcagacattcacccacctctgagcaaaccgagagatgtgctagatcctggtgcttagttcatcattgttttccctcacagacatttctctttcatgcctgcttgactgataagccattagctagaccctgactatgtaacgctaaagattttaccatgcctggaaattttacaggggaagaaaacacgctagttatttaactgcaagctactaaaagcataggtgtgttgagatttctgtgttctccactcttccactgttatcctagtaaaagcatcaggggctggggacaatttctttccaaagcaaaagaggaagccagaccttgggaccg

SEQ ID NO: 19294 - DNA, 2973 bp, Homo sapiens
  source 1..2973: mol_type = unassigned DNA
tgtgacagcccccgggccgcctgcacttgcagcctccttccccccgagcggagctgcggggccggccgggccggggctggaccccgggaacccggacgcggccgcccgggcccgcgggcggggggatcggcgggggggacccgcggggtgaccggcggcaggagccgccaccatggagttccgccaggaggagtttcggaagctagcgggtcgtgctctcgggaagctgcaccgccttctggagaagcggcaggaaggcgcggagacgctggagctgagtgcggatgggcgcccggtgaccacgcagacccgggacccgccggtggtggactgcacctgcttcggcctccctcgccgctacattatcgccatcatgagtggtctgggcttctgcatcagctttggcatccgctgcaacctgggcgtggccatcgtctccatggtcaataacagcacgacccaccgcgggggccacgtggtggtgcagaaagcccagttcagctgggatccagagactgtcggcctcatacacggctcctttttctggggctacattgtcactcagattccaggaggatttatctgtcaaaaatttgcagccaacagagttttcggctttgctattgtggcaacatccactctaaacatgctgatcccctcagctgcccgcgtccactatggctgtgtcatcttcgtgaggatcctgcaggggttggtagagggggtcacataccccgcctgccatgggatctggagcaaatgggccccacccttagaacggagtcgcctggcgacgacagccttttgtggttcctatgctggggcggtggtcgcgatgcccctcgccggggtccttgtgcagtactcaggatggagctctgttttctacgtctacggcagcttcgggatcttctggtacctgttctggctgctcgtctcctacgagtcccccgcgctgcaccccagcatctcggaggaggagcgcaagtacatcgaggacgccatcggagagagcgcgaaactcatgaaccccctcacgaagtttagcactccctggcggcgcttcttcacgtctatgccagtctatgccatcatcgtggccaacttctgccgcagctggacgttctacctgctgctcatctcccagcccgcctacttcgaagaagtgttcggcttcgagatcagcaaggtaggcctggtgtccgcgctgccccacctggtcatgaccatcatcgtgcccatcggcggccagatcgcggacttcctgcggagccgccgcatcatgtccaccaccaacgtgcgcaagttgatgaactgcggaggcttcggcatggaagccacgctgctgttggtggtcggctactcgcactccaagggcgtggccatctccttcctggtcctagccgtgggcttcagcggcttcgccatctctgggttcaacgtgaaccacctggacatagccccgcgctacgccagcatcctcatgggcatctccaacggcgtgggcacactgtcgggcatggtgtgccccatcatcgtgggggccatgactaagcacaagactcgggaggagtggcagtacgtgttcctaattgcctccctggtgcactatggaggtgtcatcttctacggggtctttgcttctggagagaagcagccgtgggcagagcctgaggagatgagcgaggagaagtgtggcttcgttggccatgaccagctggctggcagtgacgacagcgaaatggaggatgaggctgagcccccgggggcaccccctgcacccccgccctcctatggggccacacacagcacatttcagccccccaggcccccaccccctgtccgggactactgaccatgtgcctcccactgaatggcagtttccaggacctccattccactcatctctggcctgagtgacagtgtcaaggaaccctgctcctctctgtcctgcctcaggcctaagaagcactctcccttgttcccagtgctgtcaaatcctctttccttcccaattgcctctcaggggtagtgaagctgcagactgacagtttcaaggatacccaaattcccctaaaggttccctctccacccgttctgcctcagtggtttcaaatctctcctttcagggctttatttgaatggacagttcgacctcttactctctcttgtggttttgaggcacccacaccccccgctttcctttatctccagggactctcaggctaacctttgagatcactcagctcccatctcctttcagaaaaattcaaggtcctcctctagaagtttcaaatctctcccaactctgttctgcatcttccagattggtttaaccaattactcgtccccgccattccagggattgattctcaccagcgtttctgatggaaaatggcggtttcaagtccccgattccgtgcccacttcacatctcccctaccagcagattctgcgaaagcaccaaatttctcaagaccctcttctccctagcttagcataatgtctggggaaacaaccaaaatcgcaattttaacaatatgcctctctacccccgtgcactttttctgacatggttttcaggtctaaatagtggctgctccagtccatgaactcaaaggtttgaagctaccaccattgaactcccccatggtggtttcatgatgccccctccccaattcctcgcactttattctcctgggtggtttcgaactaccctgtttctcagtggccatttgttgtgtccctcaggggcttaatgactcaaaatctgggatccttcccctctcagacacccctctttcagcttagaatttggggaacctatagagaagtcacagaatcccatgaaagggaatggggcaggagccaggggtgttttttcccagtgcagggttgtgtctttgtgtctctgtctctgtgactgtaaatcctgccctgccccactcccaataaaagctttggtgtataggc

SEQ ID NO: 19295 - DNA, 2237 bp, Homo sapiens
  source 1..2237: mol_type = unassigned DNA
gaactcagagcgcggacagatcccagaggagcagagaaataacacaatggggagactatggggtcgcagctggcactggcgggccttctggagaagcggcaggaaggcgcggagacgctggagctgagtgcggatgggcgcccggtgaccacgcagacccgggacccgccggtggtggactgcacctgcttcggcctccctcgccgctacattatcgccatcatgagtggtctgggcttctgcatcagctttggcatccgctgcaacctgggcgtggccatcgtctccatggtcaataacagcacgacccaccgcgggggccacgtggtggtgcagaaagcccagttcagctgggatccagagactgtcggcctcatacacggctcctttttctggggctacattgtcactcagattccaggaggatttatctgtcaaaaatttgcagccaacagagttttcggctttgctattgtggcaacatccactctaaacatgctgatcccctcagctgcccgcgtccactatggctgtgtcatcttcgtgaggatcctgcaggggttggtagagggggtcacataccccgcctgccatgggatctggagcaaatgggccccacccttagaacggagtcgcctggcgacgacagccttttgtggttcctatgctggggcggtggtcgcgatgcccctcgccggggtccttgtgcagtactcaggatggagctctgttttctacgtctacggcagcttcgggatcttctggtacctgttctggctgctcgtctcctacgagtcccccgcgctgcaccccagcatctcggaggaggagcgcaagtacatcgaggacgccatcggagagagcgcgaaactcatgaaccccctcacgaagtttagcactccctggcggcgcttcttcacgtctatgccagtctatgccatcatcgtggccaacttctgccgcagctggacgttctacctgctgctcatctcccagcccgcctacttcgaagaagtgttcggcttcgagatcagcaaggtaggcctggtgtccgcgctgccccacctggtcatgaccatcatcgtgcccatcggcggccagatcgcggacttcctgcggagccgccgcatcatgtccaccaccaacgtgcgcaagttgatgaactgcggaggcttcggcatggaagccacgctgctgttggtggtcggctactcgcactccaagggcgtggccatctccttcctggtcctagccgtgggcttcagcggcttcgccatctctgggttcaacgtgaaccacctggacatagccccgcgctacgccagcatcctcatgggcatctccaacggcgtgggcacactgtcgggcatggtgtgccccatcatcgtgggggccatgactaagcacaagactcgggaggagtggcagtacgtgttcctaattgcctccctggtgcactatggaggtgtcatcttctacggggtctttgcttctggagagaagcagccgtgggcagagcctgaggagatgagcgaggagaagtgtggcttcgttggccatgaccagctggctggcagtgacgacagcgaaatggaggatgaggctgagcccccgggggcaccccctgcacccccgccctcctatggggccacacacagcacatttcagccccccaggcccccaccccctgtccgggactactgaccatgtgcctcccactgaatggcagtttccaggacctccattccactcatctctggcctgagtgacagtgtcaaggaaccctgctcctctctgtcctgcctcaggcctaagaagcactctcccttgttcccagtgctgtcaaatcctctttccttcccaattgcctctcaggggtagtgaagctgcagactgacagtttcaaggatacccaaattcccctaaaggttccctctccacccgttctgcctcagtggtttcaaatctctcctttcagggctttatttgaatggacagttcgacctcttactctctcttgtggttttgaggcacccacaccccccgctttcctttatctccagggactctcaggctaacctttgagatcactcagctcccatctcctttcagaaaaattcaaggtcctcctctagaagtttcaaatctctcccaactctgttctgcatcttccagattggtttaaccaattactcgtccccgccattccagggattgattctcaccagcgtttctga

SEQ ID NO: 19296 - DNA, 2024 bp, Homo sapiens
  source 1..2024: mol_type = unassigned DNA
cagtcccatctcaggttcctccctgaatgtgatccttttttgaaaccctgccactgcctacgtcccactgcatgtgttgtgtcccttatctaaagacccacagggtctcccaggctacggtgcagtggggccattgctctgtcgcccaagctggagtgcagtggcaccatcactgcagcctcgaactcctgggctcaagtgactctcctgcctcagccttctgagcagctgggactacaggcgtgcgccggcatacccagctaacatttttatttttatctttgtagagacaaggtctcactatgttgcccaggctggtctcggactcctgggctcaagcgatcctcctgccttggcctcccagtcctgggagtacaggcgtgagccaccgtgccctgtcctttctcctattttaatttcagcataggccttgcccctgcatcagaaaagagtcctgatttgtgcctttgtcctacctgaagttcctccccttgctcccttccaatctggtccgcccccttggctgcttcgtgtccccgcctggaccctgtgcaggtcactccgcaaacgctcataagctggatataagtggagagagtcatcatcatacatgggcccctaggctttcatggaggcaaggaagcaggcaaagcaaggcgtctaggtggtgatggactctgttgttaaggcagcataggccctagcaacgtggaagagcggagtttgtagactttaattgacagaaagatagtgtgagctttgattggcaggcttttggaggtgggaggggttcctcgttgctgataggtcgagacgctaagtctgtgggtgctgattggtggagcggcagagcctggacagggcggctgatttaatgtacattttggcccgcagaaagcccagttcagctgggatccagagactgtcggcctcatacacggctcctttttctggggctacattgtcactcagattccaggaggatttatctgtcaaaaatttgcagccaacagttttcggctttgctattgtggcaacatccactctaaacatgctgatcccctcagctgcccgcgtccactatggctgtgtcatcttcgtgaggatcctgcaggggttggtagagggggtcacataccccgcctgccatgggatctggagcaaatgggccccacccttagaacggagtcgcctggcgacgacagccttttgtggttcctatgctggggcggtggtcgcgatgcccctcgccggggtccttgtgcagtactcaggatggagctctgttttctacgtctacggcagcttcgggatcttctggtacctgttctggctgctcgtctcctacgagtcccccgcgctgcaccccagcatctcggaggaggagcgcaagtacatcgaggacgccatcggagagagcgcgaaactcatgaaccccctcacgaagtttagcactccctggcggcgcttcttcacgtctatgccagtctatgccatcatcgtggccaacttctgccgcagctggacgttctacctgctgctcatctcccagcccgcctacttcgaagaagtgttcggcttcgagatcagcaaggtaggcctggtgtccgcgctgccccacctggtcatgaccatcatcgtgcccatcggcggccagatcgcggacttcctgcggagccgccgcatcatgtccaccaccaacgtgcgcaagttgatgaactgcggaggcttcggcatggaagccacgctgctgttggtggtcggctactcgcactccaagggcgtggccatctccttcctggtcctagccgtgggcttcagcggcttcgccatctctgggttcaacgtgaaccacctggacatagccccgcgctacgccagcatcctcatgggcatctccaacggcgtgggcacactgtcgggcatggtgtgccccatcatcgtgggggccatgactaagcacaagactcgggaggagtggcagtacgtgttcctaattgcctccctggtgcactatggaggtg

SEQ ID NO: 19297 - DNA, 553 bp, Homo sapiens
  source 1..553: mol_type = unassigned DNA
tctggagcaaatgggccccacccttagaacggagtcgcctggcgacgacagccttttgtggttcctatgctggggcggtggtcgcgatgcccctcgccggggtccttgtgcagtactcaggatggagctctgttttctacgtctacggcagcttcgggatcttctggtacctgttctggctgctcgtctcctacgagtcccccgcgctgcaccccagcatctcggaggaggagcgcaagtacatcgaggacgccatcggagagagcgcgaaactcatgaaccccctcacgaactacactgtggtccctgaagggacgcggagaagccctcagccccgctccccgtcttagcggccctcccctcgcccccacagaagtttagcactccctggcggcgcttcttcacgtctatgccagtctatgccatcatcgtggccaacttctgccgcagctggacgttctacctgctgctcatctcccagcccgcctacttcgaagaagtgttcggcttcgagatcagcaaggtaggcctggtgtccgcgctgccccacctg

SEQ ID NO: 19298 - DNA, 2785 bp, Homo sapiens
  source 1..2785: mol_type = unassigned DNA
attctggatctctgttctcatctctctgcatctatgttctatctcctgggtttctgtccccgcctctctttgggactctgtctgcttccttctctaggtttccatctcttccctctctgggtctctgtccccctatttctaggtctctctccccctctctctgggtctctgtctccctctctctgggtctctgtcatcctctgtgtctctgacccctccatctctgggtctctgtccccctctctatctgggtctctgttcctctctctctgggtctctgtctccctttctctctgggtctctgtccccctctttctgggtctctggcccgctatgtctctgggtctctgtcccgctgtatctctgggtctctgtccccctctctctctgggtctctgctcccctgttattctctctccctctctctgggtctctgtccccctctctatctgggtctctgttcctctctctctgggtctctgtctccctttctctctgggtctctgtccccctctttctgggtctctgtcccactatgtctctgggtctctgtccccctgtatctctgggtctctgtccccttctctctctgggtctctgctcccttgttattctctctccctctctctgggtctctgtctcttcctctctagatctctgtccccctttcactggatctctctcccttcttctgtctgtgaccccctctctctgggcctctgtacaactccccccatctctgtcaccctctttttgggtctttctccacctgtctgaaggcacctctctctctctgcagcctctctctgggtttgaggcagccctccaaataccctcttcgtcatcacagacttgattctggatccagaacgggcgggggcgagagtcacgctggggaatgagccaatccccctaccagggccatctgtcccctgccaggacaccacccgccactccccctccctaccccctaggctggcagcctggactcaaggttccctagggatgcctgggacgggctgctggattcccagggtcctggacatctccccaccccctagcaaacgtggctgagaagcatctgttcttttgacacctttgctgaagcatctccttagcaccttttgcttcctcgaatagactcttatccgggagaggcggctggagagtctttgggcctcggagtgggggcacaggctcttgaatcccaaagggttgtctggggtctaagtctcctgagttgaaggatttgacagagctgggagagggggactgaagaccgtcaatgtgaagaaggagggggctgggggcctgaattcccggtctgagggagatggaggatttctggatcaggggggcgaagggagccagggacctggactcttggtgaaggaggaggtgcgggcttagaattctggatgttgaaaagcaggttttgccctggatcctggtcttgggggtgagggggctgggggcctggacttccgagtctctggctcttgctgtcccgcagccttctggagaagcggcaggaaggcgcggagacgctggagctgagtgcggatgggcgcccggtgaccacgcagacccgggacccgccggtggtggactgcacctgcttcggcctccctcgccgctacattatcgccatcatgagtggtctgggcttctgcatcagctttggcatccgctgcaacctgggcgtggccatcgtctccatggtcaataacagcacgacccaccgcgggggccacgtggtggtgcagaaagcccagttcagctgggatccagagactgtcggcctcatacacggctcctttttctggggctacattgtcactcagattccaggaggatttatctgtcaaaaatttgcagccaacagagttttcggctttgctattgtggcaacatccactctaaacatgctgatcccctcagctgcccgcgtccactatggctgtgtcatcttcgtgaggatcctgcaggggttggtagagggggtcacataccccgcctgccatgggatctggagcaaatgggccccacccttagaacggagtcgcctggcgacgacagccttttgtggttcctatgctggggcggtggtcgcgatgcccctcgccggggtccttgtgcagtactcaggatggagctctgttttctacgtctacggcagcttcgggatcttctggtacctgttctggctgctcgtctcctacgagtcccccgcgctgcaccccagcatctcggaggaggagcgcaagtacatcgaggacgccatcggagagagcgcgaaactcatgaaccccctcacggtccgggaccaaatcttcggggaaggggcggggagagatagcaagccacgaacctgcacagcgtgtagatcagggacggttcctgcagactctagaggagacgggactggaacgcaaagagaggggctagaacctaggaggcgggttgcaacccgcggaggacgagattctcaggtgctgggggcagggttaggtcgggagttgagcaggattagaaccactgacagggcatagttaaagccagcagagaagggattagaatgtgggggttttgcttagaccttgagttgaggctgtattttgggagcatttttgataaaaagagactcctagggcaggctcagtggcttccgcctgcaatcccaacactttgggggtggaggctgcaggatcgcttgagcccaggagttccagaccagcttgggcaacatggcgaaacccccgtctctactcaaaatacaaaatac

SEQ ID NO: 19299 - DNA, 3572 bp, Homo sapiens
  source 1..3572: mol_type = unassigned DNA
agctgcgcctgtggtccctctggtgggtcttcaactcggccggctactacctggtggtctactacgtgcacatcctgtggaacgaggtggaccccaccaccaacagtgcgcgggtctacaacggcgcggcagatgctgcctccacgctgctgggcgccatcacgtccttcgccgcgggcttcgtgaagatccgctgggcgcgctggtccaagctgctcatcgcgggcgtcacggccacgcaggcggggctggtcttccttctggcgcacacgcgccacccgagcagcatctggctgtgctatgcggccttcgtgctgttccgcggctcctaccagttcctcgtgcccatcgccacctttcagattgcatcttctctgtctaaagagctctgtgccctggtcttcggggtcaacacgttctttgccaccatcgtcaagaccatcatcactttcattgtctcggacgtgcggggcctgggcctcccggtccgcaagcaggccttaaggatgtcccggcccagactcggcctctgcctgcctggtcccttcccaccccagagtgcagccccagcaagagcaggtatggcggcctcctctgcagaggaccctggcagcgagaggggaccctggcggcgagcggggaccgtggcggcgagaggggaccctggcggcgagaggggaccgtggcggcgagaggggaccctggcggcgagaggggaccctggcggcgagaggggaccgtggtggcgagagggaaccctggcggcaaaaccgagaatgcagtgggtcactcgggccacggctccctgaggacaggaactggccccggccccacctcatcccacgctggagtcgtgcacagacgtccctcgggaggagtgaagaggccaccgggtctgcgtctcaggtaaaaaggtgactgaaaatgccccaccctgctgacatcagggagacaaagctcttggctcaaaagacagcagagtggacacctttgggctgagcgggagaacccccagcatggagggcttggagggcatggagggcatggagggcatagagggcatggagggcatggcccaggcccatggatgccctgctgagaatccacaggggcctgttgtatgtgtgtatatgggtgcacatgtgtgcatatatgtgtattggtgtgtatgcatgtgtatatgtatgtgtgcatgagtatacatgtgcagtgtgtatgcccatcatggaatgggccagggagggctcatagtcatgtatgtggatacacatgtggatacgtgcacatgtatgagtgtatgtatatacctgtatgggtgtgcacgtggacaggctcgtatatgcatgaatacatgtgtatatgtgcacctatgtggagtgtatgggcatgtgtacacacatgagcacgtgtggatgtgtgtgtgcgtgtatgtgtgcgcgtgtgtatgggcatgtatgtgcatagatgcatgtgtatatgtgcacacatgtatgagtacggccatatatgtgcatgcatgtttgggcacacgtgtgcgtgtgtggacatgtatgactgtgcatgggtatggcatgaccagtgctgtgtggccacatggcagggctgcttataagtggcctctgggaggagctgcaggaccccaggctgtggccaggccattcccaggtcctggtctcccagccacccagtccgccccttgagagacactcaccctcatgccaaatccaaggctggcatctcccggctcccctttctctcctttcaatccgttcatcccggggcgaccctggggcggagcacagggggtggggactgctgggcactgatgattaccagacaccttcccgcagggtgcctgccgttagccccacgccaggcccggccggcccacgctcagcctcacacgttcccagctctcaggctaccccggcccttctcacccctttcctgcacaaggacccttttgggaggaggtgactgagcctagcacacacaggcccactgccctgtctgcctccagggcttcctcctgggtactggcccctcgtggggtactgccagccacatccaggacaagagctgcgctcaggcagggccggttcttgggggaggacagtgggtgcggcggccgtccactcccctctgggcatgtcacccccgtgggcctgggctgctccccacctgccagaccccatctgccgcccccactggagaccccaggtcctcaccggccgtccaggaaagccaatctctcccttgtaccccggccgtccgtatggaccctgcaagaggaagggggccaggcttagtggggcagaccctggcccttgaccacgagttggggggtcctggggaaggggaggggccatgcagagcacagcaccctgggccacccatcagctcggaggagcccactgcagcctcacgccgacacctgccccacacgctttaaaactgcactagggagatgagccctgggccgcacagcacaagctcagcagccgcgggcgaccgtgtccttgggggccgtcatgcccgagctcagtgcagagaaagccagggaccgacttaccgggggtcctcggaagcccggctctccctgagcaaaaaaacaagaagacagggttaggtggcagcttgtgccccacctggcagcctctctgagggcccctgtggcgaaggcacggttaggtggcggcttgtgccccacctgatagcctccctaagggccgctgtggtccctttgggtgcactgggccgtccccaaggcgcaggcagccctggggaggacaggagccactggtgaggggagggtcgggtttggggtttgcgtccaggttggtgcgtgcatgcatgccccgggaccctgaagcaggggtggagggtggagggtggagggcatgtgccacgcagtgtcctggttgccacaggccccagctccaatgcacagctgggtgggatagtggagctctcactgggcctggggatcctgtgtctgaggcccaccccaaacaccccggagggctcactgctccctctgaaagtgggagagccggtggcccacactccaaagatccaggcttctccccaggaccctccccgagggcttttctgggcggctgcctgctgggggtggggacgcaggcacaggccccttgaggaactgactccgggccctgcccacagcatcagggcccccaggaagaggctggaggggcagccagaaacctgctgaggctgagctggtacagcctgggctcctgcaccccacaggccaggccccagggaggcgcgagctcagagctgcagcccactgagaacctcccctcagcagggtgggctcaggggtagggagaggacgaggggcagggagaggacgaggggccggcggaaccgccgacatgggtgcgagaaaggaggggccaccagggccaggcctggatggtagagccctgcttgggagaggctcgtgcatcaggagccagaccctcaggaagaccctccccaggctgtctccacagccccaggagcccccacgcctgccggaaggaggctgcccggccctcaccttg

SEQ ID NO: 19300 - DNA, 2029 bp, Homo sapiens
  source 1..2029: mol_type = unassigned DNA
actcctcgcagtcctcaatggaggtttctgtaagttcttcacgagtctcctggctcttccctcagagcagctgcctctagattacaactgccaagtgctgttggtggcagaagccctacctccccactccgaagcagctcctgcaggaaacctgggccttgtgtggctggggaactcccaggactcctgccacgcagggggacccgagggcagcttgggcaggcccctcgcggccgggggcggattcgctcggctacacctgaccggagagacaggcacagcgtcaccttcgtcccctccggagctgcacgtggcctgagcaggatggtgccctccagcccagcggtggagaagcaggtgcccgtggaacctgggcctgaccccgagctccggtcctggcggcacctcgtgtgctacctttgcttctacggcttcatggcgcagatacggccaggggagagcttcatcaccccctacctcctggggcccgacaagaacttcacgcgggagcaggtcacgaacgagatcacgccggtgctgtcgtactcctacctggccgtgctggtgcccgtgttcctgctcaccgactacctgcgctacacgccggtgctgctgctgcaggggctcagcttcgtgtcggtgtggctgctgctgctgctgggccactcggtggcgcacatgcagctcatggagctcttctacagcgtcaccatggccgcgcgcatcgcctattcctcctacatcttctctctcgtgcggcccgcgcgctaccagcgtgtggccggctactcgcgcgctgcggtgctgctgggcgtgttcaccagctccgtgctgggccagctgctggtcactgtgggccgagtctccttctccacgctcaactacatctcgctggccttcctcaccttcagcgtggtcctcgccctcttcctgaagcgccccaagcgcagcctcttcttcaaccgcgacgaccgggggcggtgcgaaacctcggcttcggagctggagcgcatgaatcctggcccaggcgggaagctgggacacgccctgcgggtggcctgtggggactcagtgctggcgcggatgctgcgggagctgggggacagcctgcggcggccgcagctgcgcctgtggtccctctggtgggtcttcaactcggccggctactacctggtggtctactacgtgcacatcctgtggaacgaggtggaccccaccaccaacagtgcgcgggtctacaacggcgcggcagatgctgcctccacgctgctgggcgccatcacgtccttcgccgcgggcttcgtgaagatccgctgggcgcgctggtccaagctgctcatcgcgggcgtcacggccacgcaggcggggctggtcttccttctggcgcacacgcgccacccgagcagcatctggctgtgctatgcggccttcgtgctgttccgcggctcctaccagttcctcgtgcccatcgccacctttcagattgcatcttctctgtctaaagagctctgtgccctggtcttcggggtcaacacgttctttgccaccatcgtcaagaccatcatcactttcattgtctcggacgtgcggggcctgggcctcccggtccgcaagcaggccttaaggatgtcccggcccagactcggcctctgcctgcctggtcccttcccaccccagagtgcagccccagcaagagcaggtatggcggcctcctctgcagaggaccctggcagcgagaggggaccctggcggcgagcggggaccgtggcggcgagaggggaccctggcggcgagaggggaccgtggcggcgagaggggaccctggcggcgagaggggaccctggcggcgagaggggaccgtggtggcgagagggaaccctggcggtgagaggggaccctggcggcgagaggggaccgtggcggcgagaggggaccctggtggtgaaaggcgcccgaggctagcctggctctctgggcttctgctctgccagcccccagacatcctcaaacagtggttttctcacatttt

SEQ ID NO: 19301 - DNA, 646 bp, Homo sapiens
  source 1..646: mol_type = unassigned DNA
gggagcagccacccagcgggatgtacaggaccttgggggcccccaaccccacagggaggtcacccaccttcatttcagcctccaactgaagaaagtcaaacggaaactgccctgcaagagagagacaggcggggtctcgctgaggtggtgtctgacagcgccgggttccctctgcagcccccagcactggactcggtggtggtttttctagactgcccttccatctggtgacttcggtacattgacttactcatcctgagagttcacctgcagatccacttgtggggcttacgtgggagacgtgctgagaaaagagcaacgcgcttctttcctcccagcgtcctgcccttcccatctctcctctgcctcctcccagggtgggcaggcagctgtgtcttggccctgacttgagggtccctccaccctctccaagggtgaagctgtggcagttccaggtggctccttccagaccacggaggagccctttgctgaaatccctgcttgttgctgcttctctccttttcctcagtcccggcagaggtgcaggaatgttgttcgcctttgcaaagaattaactttggatttttggactttcttgatccttgctatttttatatataaaacatacgcaatttctcttcactca

SEQ ID NO: 19302 - DNA, 1435 bp, Homo sapiens
  source 1..1435: mol_type = unassigned DNA
cttctctgtctctgtggaaaagccatctcaggttggcggcagacacattgtcatcagaggggagcagcggctctggtcctcggagctggttcctctctcccaccctaagggcagccctccatggtcctgtctgtccttctgaagtgtgtccatcctgacctgcgggtcctcagctgctcccacacttgtgccagcccggaggggactggtcccggtcaccgcggacgtgctggccttgaacgaatgactcgggttgatgttgccggatctcaggggtggctgtgactgacagaggaccttgttgcacctcgtggctgctttgttcacccgcagggcggcctgtgggcaccccggggttccccttcagtcccaaggagggtaaggatatgggtttcctaggagacagccaatgactgccctgcatctggagccagcctgtccatgggcagtgcacagatgacagccctccctcactgccctgtgtgctggctaccgcatgtcctgtgccagcctcagcctctttgatgtggccgtgttccatcctggcgctcagctggacaagtgctggctgagccacgtcccagccaggggcatgagatgggggccctggatgggaggctgccagaccccaactcatgggtcccttgaatctcccagcttggactcggccagggtggagctgtctgctttggatgtatcatctcatggctcatttgggaggccagccccaggctgctgtgcttggtgttggaggacaggccggagctgggggtcacagtgcgcctctgagcttgggaacctgcttcagcctggggttgctgtggagaatggcccagagctgagcagaaggggctccccctagccccagggacctgagcctccctcccatctaccgcagggcgagcacacaccctggaggagcccagatggccttgtgctgagtgtggcctcagctcccattgcctcacggggcctgtctgctaacaggtctgggttttgtgcacagaacggtgctgctaggtgggagatgaagtcagcacctgctggggcgagcacggcttcccaaagcaggaaatcctggagaaatcgagccgtggtctgatcaggccaagaggttgcacagggcatgatactgcaccctgcctgacccagctgggctcacaggtcaggggagagttggggcaggtgaatgtcagcatcaggcttctgttttaaacttttaaaaaaatacactctttggcttccttttatttcttgaggattacatgaaacgtgaactatacaggaaagtatggcagccaggtcctggggccaggggctggccggccgctccctgcccacggtgggggcttcctccgagccgccggtcctctccggccatccgcatccaggcggtggctacttggaggcagtcatgaagctgttctcaatgcag

SEQ ID NO: 19303 - DNA, 600 bp, Homo sapiens
  source 1..600: mol_type = unassigned DNA
cctgaggctgcagatgagacttgtccccagctggctgtccatcctcctggtgtcagcaagctgggtttgcagtgtcttccaagcgacggtgttcagaatgtgaaccagtgactctcgggcgcccctgtgaatgaagaactgcatgtggcttctctgtctctgtggaaaagccatctcaggttggcggcagacacattgtcatcagaggggagcagcggctctggtcctcggagctggttcctctctcccaccctaagggcagccctccatggtcctgtctgtccttctgaagtgtgtccatcctgacctgcgggtcctcagctgctcccacacttgtgccagcccggaggggactggtcccggtcaccgcggacgtgctggccttgaacgaatgactcgggttgatgttgccggatctcaggggtggctgtgactgacagaggaccttgttgcacctcgtggctgctttgttcacccgcagggcggcctgtgggcaccccggggttccccttcagtcccaaggaggggcgagcacacaccctggaggagcccagatggccttgtgctgagtgtggcctcagctcccattgcctcacgggg

SEQ ID NO: 19304 - DNA, 3811 bp, Homo sapiens
  source 1..3811: mol_type = unassigned DNA
agccgcgcgcccgccgcgccgccttgtgggcgctgtagtcccggagtccgcgtgcgcggggccgggtccgggagccccagggcagccgccccgccgagtcgcaggcacagcgtcaccttcgtcccctccggagctgcacgtggcctgagcaggatggtgccctccagcccagcggtggagaagcaggtgcccgtggaacctgggcctgaccccgagctccggtcctggcggcacctcgtgtgctacctttgcttctacggcttcatggcgcagatacggccaggggagagcttcatcaccccctacctcctggggcccgacaagaacttcacgcgggagcaggtcacgaacgagatcacgccggtgctgtcgtactcctacctggccgtgctggtgcccgtgttcctgctcaccgactacctgcgctacacgccggtgctgctgctgcaggggctcagcttcgtgtcggtgtggctgctgctgctgctgggccactcggtggcgcacatgcagctcatggagctcttctacagcgtcaccatggccgcgcgcatcgcctattcctcctacatcttctctctcgtgcggcccgcgcgctaccagcgtgtggccggctactcgcgcgctgcggtgctgctgggcgtgttcaccagctccgtgctgggccagctgctggtcactgtgggccgagtctccttctccacgctcaactacatctcgctggccttcctcaccttcagcgtggtcctcgccctcttcctgaagcgccccaagcgcagcctcttcttcaaccgcgacgaccgggggcggtgcgaaacctcggcttcggagctggagcgcatgaatcctggcccaggcgggaagctgggacacgccctgcgggtggcctgtggggactcagtgctggcgcggatgctgcgggagctgggggacagcctgcggcggccgcagctgcgcctgtggtccctctggtgggtcttcaactcggccggctactacctggtggtctactacgtgcacatcctgtggaacgaggtggaccccaccaccaacagtgcgcgggtctacaacggcgcggcagatgctgcctccacgctgctgggcgccatcacgtccttcgccgcgggcttcgtgaagatccgctgggcgcgctggtccaagctgctcatcgcgggcgtcacggccacgcaggcggggctggtcttccttctggcgcacacgcgccacccgagcagcatctggctgtgctatgcggccttcgtgctgttccgcggctcctaccagttcctcgtgcccatcgccacctttcagattgcatcttctctgtctaaagagctctgtgccctggtcttcggggtcaacacgttctttgccaccatcgtcaagaccatcatcactttcattgtctcggacgtgcggggcctgggcctcccggtccgcaagcagttccagttatactccgtgtacttcctgatcctgtccatcatctacttcttgggggccatgctggatggcctgcggcactgccagcggggccaccacccgcggcagcccccggcccagggcctgaggagtgccgcggaggagaaggcagcacaggcactgagcgtgcaggacaagggcctcggaggcctgcagccagcccagagcccgccgctttccccagaagacagcctgggggctgtggggccagcctccctggagcagagacagagcgacccatacctggcccaggccccggccccgcaggcagctgaattcctgagcccagtgacaaccccttccccctgcactctgtgctccgcccaagcctcaggccctgaggctgcagatgagacttgtccccagctggctgtccatcctcctggtgtcagcaagctgggtttgcagtgtcttccaagcgacggtgttcagaatgtgaaccagtgactctcgggcgcccctgtggtaactttgcaggcggccctcagtgcatccccacgacccctgcctcgagggccgcctgccttagcaatgggggcctccgcttatcctgctagcaggccccctaggattccccctgccctgtgccgcactctggcggtggccacagcgtgctggcgacactcagggcagctgcctggccatgctgtccctgcactgtgccccgcgggctttgttgctggaagaggtgggtggtgggcttctgcgtccaccaggcctcactggctcatgccccttggggggcttgagacaaatcctttctgccccccagggctagtgaagtggcctcttggataccagctcaggggacactggccccacaggagttgtgagccctctagggcagggtgggagccgggaccctcaggtgtagctgagctgtgacattgctggtcatccttggtgctcttgcttttttgaaagatgctttttttttttttaactgacgtagaatgaagaactgcatgtggcttctctgtctctgtggaaaagccatctcaggttggcggcagacacattgtcatcagaggggagcagcggctctggtcctcggagctggttcctctctcccaccctaagggcagccctccatggtcctgtctgtccttctgaagtgtgtccatcctgacctgcgggtcctcagctgctcccacacttgtgccagcccggaggggactggtcccggtcaccgcggacgtgctggccttggtatgtgccaggcttgcctgggctgggcagccttgggggggctgcctttgtggtgggcgctggggaagtacgtcccagcggcctcagggtctaaggagcgctagtgccttgcccacaggtgcgggaccatctgatgtgatgtgaatactcttcccacatacattaaacacacttaagtgagtgtgcgcagggcttctgattcagggccggcctggcctgggggttgagggtcagcagtcagtgaggaggccaggagaggcgtcccagccttctcccgcctccagcccacgcagggccttggtgcccatgagctgagcacccccacaaccctagtcaacggccctatcctgtggggcctctgccacatctcagcggccccaggtgaatggctggctgctcagcacggagagctggggagagaatctctggctggggaggggctgctggagctgctggacccaggggtctcccgaggtggctcaggggagcaggcatcttggggtaccctgggttgaggcagaggctgcacgtggaagatggcccgagtcagtggatggtgccagtcagacagggccatggtcccaggtgcatccaggggctctgtcatggccaccctggggaccctgcttgggggggggtctgcaccagccatttcctgggctcgtagatctagcaggatgtgatgggtggaggtgggctgggcctgtgccatgggctagagcgtcactggggaggcccacaccgccatcagaatcctcctcccagcgcctccccaacctgagggcctgctccctccgcagcctgctcactgcacccactgcctgcctgcctctgagtcctgcactcacccgtccaccaggacagggatggctgtcaggatgtagtgttgctgggagcaagtcaggtcctgctgtgaggagagacctaagagtgttggtgtgtgtccacacacccgtgcatgcctgtgtacctgtgcacactatggatgctcctgcacacctgtgtacaactgcacgcctgtgtatggccatgcatgcataccccatgtaaccgtgcgtgcctgtgcacactcgggatctgccagtggggcagtccagggataaaagactcctgagaactc

SEQ ID NO: 19305 - DNA, 1884 bp, Homo sapiens
  source 1..1884: mol_type = unassigned DNA
agccgcgcgcccgccgcgccgccttgtgggcgctgtagtcccggagtccgcgtgcgcggggccgggtccgggagccccagggcagccgccccgccgagtcgcaggcacagcgtcaccttcgtcccctccggagctgcacgtggcctgagcaggatggtgccctccagcccagcggtggagaagcaggtgcccgtggaacctgggcctgaccccgagctccggtcctggcggcacctcgtgtgctacctttgcttctacggcttcatggcgcagatacggccaggggagagcttcatcaccccctacctcctggggcccgacaagaacttcacgcgggagcaggtcacgaacgagatcacgccggtgctgtcgtactcctacctggccgtgctggtgcccgtgttcctgctcaccgactacctgcgctacacgccggtgctgctgctgcaggggctcagcttcgtgtcggtgtggctgctgctgctgctgggccactcggtggcgcacatgcagctcatggagctcttctacagcgtcaccatggccgcgcgcatcgcctattcctcctacatcttctctctcgtgcggcccgcgcgctaccagcgtgtggccggctactcgcgcgctgcggtgctgctgggcgtgttcaccagctccgtgctgggccagctgctggtcactgtgggccgagtctccttctccacgctcaactacatctcgctggccttcctcaccttcagcgtggtcctcgccctcttcctgaagcgccccaagcgcagcctcttcttcaaccgcgacgaccgggggcggtgcgaaacctcggcttcggagctggagcgcatgaatcctggcccaggcgggaagctgggacacgccctgcgggtggcctgtggggactcagtgctggcgcggatgctgcgggagctgggggacagcctgcggcggccgcagctgcgcctgtggtccctctggtgggtcttcaactcggccggctactacctggtggtctactacgtgcacatcctgtggaacgaggtggaccccaccaccaacagtgcgcgggtctacaacggcgcggcagatgctgcctccacgctgctgggcgccatcacgtccttcgccgcgggcttcgtgaagatccgctgggcgcgctggtccaagctgctcatcgcgggcgtcacggccacgcaggcggggctggtcttccttctggcgcacacgcgccacccgagcagcatctggctgtgctatgcggccttcgtgctgttccgcggctcctaccagttcctcgtgcccatcgccacctttcagattgcatcttctctgtctaaagagctctgtgccctggtcttcggggtcaacacgttctttgccaccatcgtcaagaccatcatcactttcattgtctcggacgtgcggggcctgggcctcccggtccgcaagcagaatgaagaactgcatgtggcttctctgtctctgtggaaaagccatctcaggttggcggcagacacattgtcatcagaggggagcagcggctctggtcctcggagctggttcctctctcccaccctaagggcagccctccatggtcctgtctgtccttctgaagtgtgtccatcctgacctgcgggtcctcagctgctcccacacttgtgccagcccggaggggactggtcccggtcaccgcggacgtgctggccttggtatgtgccaggcttgcctgggctgggcagccttgggggggctgcctttgtggtgggcgctggggaagtacgtcccagcggcctcagggtctaaggagcgctagtgccttgcccacaggtgcgggaccatctgatgtgatgtgaatactcttcccacatacattaaacacacttaagtgag

SEQ ID NO: 19306 - DNA, 1896 bp, Homo sapiens
  source 1..1896: mol_type = unassigned DNA
ggccgttgaggaggtgcagggagaggagcgggagggctctgggtggctgccaagggggagctctgcgctcagaccctcaactaagaccaggaggtgcctgatgaggccccagcctgcagagccagctcctggtggaagaggaaatgaggcatgctccattcattcggaggtcacgaacgagatcacgccggtgctgtcgtactcctacctggccgtgctggtgcccgtgttcctgctcaccgactacctgcgctacacgccggtgctgctgctgcaggggctcagcttcgtgtcggtgtggctgctgctgctgctgggccactcggtggcgcacatgcagctcatggagctcttctacagcgtcaccatggccgcgcgcatcgcctattcctcctacatcttctctctcgtgcggcccgcgcgctaccagcgtgtggccggctactcgcgcgctgcggtgctgctgggcgtgttcaccagctccgtgctgggccagctgctggtcactgtgggccgagtctccttctccacgctcaactacatctcgctggccttcctcaccttcagcgtggtcctcgccctcttcctgaagcgccccaagcgcagcctcttcttcaaccgcgacgaccgggggcggtgcgaaacctcggcttcggagctggagcgcatgaatcctggcccaggcgggaagctgggacacgccctgcgggtggcctgtggggactcagtgctggcgcggatgctgcgggagctgggggacagcctgcggcggccgcagctgcgcctgtggtccctctggtgggtcttcaactcggccggctactacctggtggtctactacgtgcacatcctgtggaacgaggtggaccccaccaccaacagtgcgcgggtctacaacggcgcggcagatgctgcctccacgctgctgggcgccatcacgtccttcgccgcgggcttcgtgaagatccgctgggcgcgctggtccaagctgctcatcgcgggcgtcacggccacgcaggcggggctggtcttccttctggcgcacacgcgccacccgagcagcatctggctgtgctatgcggccttcgtgctgttccgcggctcctaccagttcctcgtgcccatcgccacctttcagattgcatcttctctgtctaaagagctctgtgccctggtcttcggggtcaacacgttctttgccaccatcgtcaagaccatcatcactttcattgtctcggacgtgcggggcctgggcctcccggtccgcaagcagttccagttatactccgtgtacttcctgatcctgtccatcatctacttcttgggggccatgctggatggcctgcggcactgccagcggggccaccacccgcggcagcccccggcccagggcctgaggagtgccgcggaggagaaggcagcacaggcactgagcgtgcaggacaagggcctcggaggcctgcagccagcccagagcccgccgctttccccagaagacagcctgggggctgtggggccagcctccctggagcagagacagagcgacccatacctggcccaggccccggccccgcaggcagctgaattcctgagcccagtgacaaccccttccccctgcactctgtgctccgcccaagcctcaggccctgaggctgcagatgagacttgtccccagctggctgtccatcctcctggtgtcagcaagctgggtttgcagtgtcttccaagcgacggtgttcagaatgtgaaccagtgactctcgggcgcccctgtggtaactttgcaggcggccctcagtgcatccccacgacccctgcctcgagggccgcctgccttagcaatgggggcctccgcttatcctgctagcaggccccctaggattccccctgccctgtg

SEQ ID NO: 19307 - DNA, 648 bp, Homo sapiens
  source 1..648: mol_type = unassigned DNA
gtggatccggcgttcgcgcccaggcacgtgttgcttcgggacgggccagccggcacagcgtcaccttcgtcccctccggagctgcacgtggcctgagcaggatggtgccctccagcccagcggtggagaagcaggtgcccgtggaacctgggcctgaccccgagctccggtcctggcggcacctcgtgtgctacctttgcttctacggcttcatggcgcagatacggccaggggagagcttcatcaccccctacctcctggggcccgacaagaacttcacgcgggagcaggtcacgaacgagatcacgccggtgctgtcgtactcctacctggccgtgctggtgcccgtgttcctgctcaccgactacctgcgctacacgccggtgctgctgctgcaggggctcagcttcgtgtcggtgtggctgctgctgctgctgggccactcggtggcgcacatgcagctcatggagctcttctacagcgtcaccatggccgcgcgcatcgcctattcctcctacatcttctctctcgtgcggcccgcgcgctaccagcgtgtggccggctactcgcgcgctgcggtgctgctgggcgtgttcaccagctccgtgctgggccagctgctggtcactgtgggccgagtctccttct

SEQ ID NO: 19308 - DNA, 777 bp, Homo sapiens
  source 1..777: mol_type = unassigned DNA
tcctcaatggaggtttctgtaagttcttcacgagtctcctggctcttccctcagagcagctgcctctagattacaactgccaagtgctgttggtggcagaagccctacctccccactccgaagcagctcctgcaggaaacctgggccttgtgtggctggggaactcccaggactcctgccacgcagggggacccgagggcagcttgggcaggcccctcgcggccgggggcggattcgctcggctacacctgaccggagagacaggcacagcgtcaccttcgtcccctccggagctgcacgtggcctgagcaggatggtgccctccagcccagcggtggagaagcaggtgcccgtggaacctgggcctgaccccgagctccggtcctggcggcacctcgtgtgctacctttgcttctacggcttcatggcgcagatacggccaggggagagcttcatcaccccctacctcctggggcccgacaagaacttcacgcgggagcaggtcacgaacgagatcacgccggtgctgtcgtactcctacctggccgtgctggtgcccgtgttcctgctcaccgactacctgcgctacacgccggtgctgctgctgcaggggctcagcttcgtgtcggtgtggctgctgctgctgctgggccactcggtggcgcacatgcagctcatggagctcttctacagcgtcaccatggccgcgcgcatcgcctattcctcctacatcttctctctcgtgcggcccgcgcgctaccagcgtgtggccggcta

SEQ ID NO: 19309 - DNA, 708 bp, Homo sapiens
  source 1..708: mol_type = unassigned DNA
gaagcaggtgcccgtggaacctgggcctgaccccgagctccggtcctggcggcacctcgtgtgctacctttgcttctacggcttcatggcgcagatacggccaggggagagcttcatcaccccctacctcctggggcccgacaagaacttcacgcgggagcaggcgaggacagggtcttgccctggctccggctgtcggtggcggggctggggctggagcggcggagccatctccttgacccctcatgaaatgccttctgctcctggccagtccgtccctctccctgccacccactgaccagatggcatctctgctcttagtggagggccactgtccaccgccaaggttatttataggggtgagcattatgtgtggcgtttcccttaaaataacaaaataagaaaagtctctagagcaaaaatgtttaaatcccatctgcctgccctctcatgttgtacattaacggattaaaaagtagattccagaaattaagccattccaccaggccttggatatcatcagagggacgatgggtgcaggtgctctgcgcacctgccacttggtggggcccccgatctcagcccctctggctgcaggagaggcccggggagagcttcatcacgccctccctcctggggcccgacaagaacttcacgcgggagcaggcacgtgggcgccggggtgcaggggcagccaccagtaggtgg

SEQ ID NO: 19310 - DNA, 580 bp, Homo sapiens
  source 1..580: mol_type = unassigned DNA
agtcctcaatggaggtttctgtaagttcttcacgagtctcctggctcttccctcagagcagctgcctctagattacaactgccaagtgctgttggtggcagaagccctacctccccactccgaagcagctcctgcaggaaacctgggccttgtgtggctggggaactcccaggactcctgccacgcagggggacccgagggcagcttgggcaggcccctcgcggccgggggcggattcgctcggctacacctgaccggagagacagcagggccaggttctgcccacccgtggagaaggccagtacaggggagagagccagggctcccacaaagcagggggtccctccaggcacagcgtcaccttcgtcccctccggagctgcacgtggcctgagcaggatggtgccctccagcccagcggtggagaagcaggtgcccgtggaacctgggcctgaccccgagctccggtcctggcggcacctcgtgtgctacctttgcttctacggcttcatggcgcagatacggccaggggagagcttcatcaccccctacctcctggggcccgacaagaacttcacgcg

SEQ ID NO: 19311 - DNA, 3671 bp, Homo sapiens
  source 1..3671: mol_type = unassigned DNA
ggcagagggtgggccttaggacgggtctcccttaaactgggcgatcaggcagcgaccctagaggcgtctgtagggtaaagctgggggttctgtagccggaggcggcggcgagtccagaacgtcctggccttacagggagaaggcgtcactcgcggttacaagtgcctgaccctcactccagttggcggaggaggagaaggaaggggccgggccgggtcccctcccctcgcgccccggatggatgtgcccggcccggtgtctcggcgggcggcggcggcggcggccactgtgctcctgcggaccgctcgggtccgtcgcgaatgctggttcttgccgaccgcgctgctctgcgcctacggcttcttcgccagcctcaggccgtccgagcccttcctgaccccgtacctgctggggccggacaagaacctgaccgagagggaggtcttcaatgaaatttatccagtatggacttactcttacctggtgctactgtttcctgtgttccttgccacagactacctccgttataaacctgttgttctactgcaggggctcagccttattgttacatggtttatgctgctctatgcccagggactgctggccattcaatttctagaatttttttatggcatcgccacagccactgaaattgcctattactcttatatctacagtgtggtggacctgggcatgtaccagaaagtcacaagttactgtcgaagtgccactttggtgggctttacagtgggctctgtcctagggcaaatccttgtctcagtggcaggctggtcgctgttcagcctgaatgtcatctctcttacctgtgtttcagtggcttttgctgtggcctggtttttacctatgccacagaagagcctcttctttcaccacattccttctacctgccagagagtgaatggcatcaaggtacaaaatggtggcattgttactgacaccccagcttctaaccaccttcctggctgggaggacattgagtcaaaaatccctctaaatatggaggagcctcccgtggaggaaccggaacccaagccagaccgtctccttgtattgaaagtactatggaatgatttcctgatgtgctactcctctcgccctcttctctgctggtctgtgtggtgggccctctctacctgtggctattttcaagttgtgaactacacacagggcctgtgggagaaagtgatgccttctcgctatgctgctatctataatggtggcgtggaggccgtttcaaccttactgggtgctgttgctgtgtttgcagttggttatataaaaatatcctggtcaacttggggagaaatgacattatctctcttttctctcctgattgctgctgcagtgtatatcatggacactgtgggtaacatttgggtgtgctatgcatcctatgttgtcttcagaatcatctacatgttactcatcacgatagcaacttttcaaattgctgcaaacctcagcatggaacgctatgccctagtatttggtgtaaataccttcattgccctggcactgcagacgctgctcactctaattgtggtagatgccagtggccttggattagaaattaccactcagtttttgatctatgccagttattttgcactcatcgctgtggttttcctggccagtggtgcagtcagtgttatgaagaaatgtagaaagctggaagatccacaatcaagttctcaagtaaccacttcataatatactgctgaagggcttcttcttatagcaagaactctgcacagcaactgcctggatgtgtttgattttttaaagcgtagacatatatttatgaatgtgcatttcttgacttcacagcagccacttgactaataccttgtgttccgggaataacatgatactattcagaggagccagaagtaaagtttatttcatggattatttatgagagctaatttaaggatgactttttttctgattcaaaagtgaacttgattttaaaaaccagtcaagagcaatcaaagcagcacatggtgttgtatacttcattagcaagtgagtttggtgttttataggtcacatatgtctgtatctacttagccagatgcttggcctggtgggaccagggctccacagaggccacaaaatgttgcaagtcatgatggatggaaatatgttctaacagcatctgcctctattcaatttaattcttatttctgtgttactcatgtacattggtctttctacatagttattctatcactggcaatatttgttctggtttagtgttctgtattttaaggtgtacgtatcatttctaattttaagttattttaaaaaaattcatcatatgaatgttcttggttcccattgtgacgattatttatttctgtaaaatttgtttagaagtacgtttttgcattattcatatgcttcccagagaagctcatttagttagaaaataaggcaagttttgaagcctgctaaatgaagagacttaagaaagcttaaggtacgcttgcttgtctttaaatcttcaatatgaaggactattaattccaagattaaaagttcatatataggctaaagatgtaactaggccatttgtatttgtattcccttttatttccaaaataaaatgaaaaatctttttttaataatttcatccctatttatagtttttatattaatttgtttttcttatccaagtaaagatgtcaataggaattgcattagtccaaggcctttttcataaactgagcctcttttcaattatttcaatgggacaggaactaggatagatgtgattcctgcatttttttaccttaaatctgcctttgtttctaaaggtagatcatcttgaatatttgcttaaaattgctagtgatttcattaccaagttacttgaaaaaatgttctatatgcatttaattctgaaatcagtctaccaaggggctgctagtatatgtcagacatgaaaactattttaaagctgactttgttgccttatcttgaaaagaatctagataggtgcttttaactggggtattaacttttttagaatgacacagctgaacagtgttaataatagtgtgtcaagattgcaaagtcgacatactcatttggtttaagcaggaatcctagaagcaaatggatggggataagaataggtcattttctattcaccatcctttactattaagggaaaggaaaagaacactagctaaggaagggaaagggaagtgatatcataaaagtagcaaccttcattttacattctgtctgtttttctttttttgctttgttttgtttgtgctaatttgggaattgtgtactccgaaacaagtagaaaagtgctgtttgagggattttattaaatctttttttaatggaatgtggtacaaattgttcatgttaccaaagcaatatttccctggaatttaattcaaagtttgtggcatacaacctgagccttttcttatataagacaagaatatgttcacatcttggtatgtggccatatttatagaatgctgaactcaatgtgcaagttgtactgtatgcagttttgtaaataagtgaaaataatttgttgtactttttattcaattctgtatagattataaaattatttttattaaataaatattttacagtatattttctctttttaatcaaaa

SEQ ID NO: 19312 - DNA, 2976 bp, Homo sapiens
  source 1..2976: mol_type = unassigned DNA
gggtaaagctgggggttctgtagccggaggcggcggcgagtccagaacgtcctggccttacagggagaaggcgtcactcgcggttacaagtgcctgaccctcactccagttggcggaggaggagaaggaaggggccgggccgggtcccctcccctcgcgccccggatggatgtgcccggcccggtgtctcggcgggcggcggcggcggcggccactgtgctcctgcggaccgctcgggtccgtcgcgaatgctggttcttgccgaccgcgctgctctgcgcctacggcttcttcgccagcctcaggccgtccgagcccttcctgaccccgtacctgctggggccggacaagaacctgaccgagagggaggaacccaagccagaccgtctccttgtattgaaagtactatggaatgatttcctgatgtgctactcctctcgccctcttctctgctggtctgtgtggtgggccctctctacctgtggctattttcaagttgtgaactacacacagggcctgtgggagaaagtgatgccttctcgctatgctgctatctataatggtggcgtggaggccgtttcaaccttactgggtgctgttgctgtgtttgcagttggttatataaaaatatcctggtcaacttggggagaaatgacattatctctcttttctctcctgattgctgctgcagtgtatatcatggacactgtgggtaacatttgggtgtgctatgcatcctatgttgtcttcagaatcatctacatgttactcatcacgatagcaacttttcaaattgctgcaaacctcagcatggaacgctatgccctagtatttggtgtaaataccttcattgccctggcactgcagacgctgctcactctaattgtggtagatgccagtggccttggattagaaattaccactcagtttttgatctatgccagttattttgcactcatcgctgtggttttcctggccagtggtgcagtcagtgttatgaagaaatgtagaaagctggaagatccacaatcaagttctcaagtaaccacttcataatatactgctgaagggcttcttcttatagcaagaactctgcacagcaactgcctggatgtgtttgattttttaaagcgtagacatatatttatgaatgtgcatttcttgacttcacagcagccacttgactaataccttgtgttccgggaataacatgatactattcagaggagccagaagtaaagtttatttcatggattatttatgagagctaatttaaggatgactttttttctgattcaaaagtgaacttgattttaaaaaccagtcaagagcaatcaaagcagcacatggtgttgtatacttcattagcaagtgagtttggtgttttataggtcacatatgtctgtatctacttagccagatgcttggcctggtgggaccagggctccacagaggccacaaaatgttgcaagtcatgatggatggaaatatgttctaacagcatctgcctctattcaatttaattcttatttctgtgttactcatgtacattggtctttctacatagttattctatcactggcaatatttgttctggtttagtgttctgtattttaaggtgtacgtatcatttctaattttaagttattttaaaaaaattcatcatatgaatgttcttggttcccattgtgacgattatttatttctgtaaaatttgtttagaagtacgtttttgcattattcatatgcttcccagagaagctcatttagttagaaaataaggcaagttttgaagcctgctaaatgaagagacttaagaaagcttaaggtacgcttgcttgtctttaaatcttcaatatgaaggactattaattccaagattaaaagttcatatataggctaaagatgtaactaggccatttgtatttgtattcccttttatttccaaaataaaatgaaaaatctttttttaataatttcatccctatttatagtttttatattaatttgtttttcttatccaagtaaagatgtcaataggaattgcattagtccaaggcctttttcataaactgagcctcttttcaattatttcaatgggacaggaactaggatagatgtgattcctgcatttttttaccttaaatctgcctttgtttctaaaggtagatcatcttgaatatttgcttaaaattgctagtgatttcattaccaagttacttgaaaaaatgttctatatgcatttaattctgaaatcagtctaccaaggggctgctagtatatgtcagacatgaaaactattttaaagctgactttgttgccttatcttgaaaagaatctagataggtgcttttaactggggtattaacttttttagaatgacacagctgaacagtgttaataatagtgtgtcaagattgcaaagtcgacatactcatttggtttaagcaggaatcctagaagcaaatggatggggataagaataggtcattttctattcaccatcctttactattaagggaaaggaaaagaacactagctaaggaagggaaagggaagtgatatcataaaagtagcaaccttcattttacattctgtctgtttttctttttttgctttgttttgtttgtgctaatttgggaattgtgtactccgaaacaagtagaaaagtgctgtttgagggattttattaaatctttttttaatggaatgtggtacaaattgttcatgttaccaaagcaatatttccctggaatttaattcaaagtttgtggcatacaacctgagccttttcttatataagacaagaatatgttcacatcttggtatgtggccatatttatagaatgctgaactcaatgtgcaagttgtactgtatgcagttttgtaaataagtgaaaataatttgttgtactttttattcaattctgtatagattataaaattatttttattaaataaatattttacagtata

SEQ ID NO: 19313 - DNA, 3722 bp, Homo sapiens
  source 1..3722: mol_type = unassigned DNA
ggaggagccgggcgcgcctgccacgcaaaactaccgggctggcagggcggcgggcgcggtgcgcgatcccgggtggcggcggcaacggcggtggtgacggcggcgactgcagcggccggctctcacctctcccctgtgcacccgcatctcgccgcgccgccgagcagccagcagtccccgggtcgcccagcccacgcgcgcacggccgagcccagcgcacaatagcggcgacagccatggggaaaccggcgaggaaaggatgcgagtggaagcgcttcctgaagaataactgggtgttgctgtccaccgtggccgcggtggtgctaggcattaccacaggagtcttggttcgagaacacagcaacctctcaactctagagaaattctactttgcttttcctggagaaattctaatgcggatgctgaaactcatcattttgccattaattatatccagcatgattacaggtgttgctgcactggattccaacgtatccggaaaaattggtctgcgcgctgtcgtgtattatttctgtaccactctcattgctgttattctaggtattgtgctggtggtgagcatcaagcctggtgtcacccagaaagtgggtgaaattgcgaggacaggcagcacccctgaagtcagtacggtggatgccatgttagatctcatcaggaatatgttccctgagaatcttgtccaggcctgttttcagcagtacaaaactaagcgtgaagaagtgaagcctcccagcgatccagagatgaacatgacagaagagtccttcacagctgtcatgacaactgcaatttccaagaacaaaacaaaggaatacaaaattgttggcatgtattcagatggcataaacgtcctgggcttgattgtcttttgccttgtctttggacttgtcattggaaaaatgggagaaaagggacaaattctggtggatttcttcaatgctttgagtgatgcaaccatgaaaatcgttcagatcatcatgtgttatatgccactaggtattttgttcctgattgctgggaagatcatagaagttgaagactgggaaatattccgcaagctgggcctttacatggccacagtcctgactgggcttgcaatccactccattgtaattctcccgctgatatatttcatagtcgtacgaaagaaccctttccgatttgccatgggaatggcccaggctctcctgacagctctcatgatctcttccagttcagcaacactgcctgtcaccttccgctgtgctgaagaaaataaccaggtggacaagaggatcactcgattcgtgttacccgttggtgcaacaatcaacatggatgggactgcgctctatgaagcagtggcagcggtgtttattgcacagttgaatgacctggacttgggcattgggcagatcatcaccatcagtatcacggccacatctgccagcatcggagctgctggcgtgccccaggctggcctggtgaccatggtgattgtgctgagtgccgtgggcctgcccgccgaggatgtcaccctgatcattgctgtcgactggctcctggaccggttcaggaccatggtcaacgtccttggtgatgcttttgggacgggcattgtggaaaagctctccaagaaggagctggagcagatggatgtttcatctgaagtcaacattgtgaatccctttgccttggaatccacaatccttgacaacgaagactcagacaccaagaagtcttatgtcaatggaggctttgcagtagacaagtctgacaccatctcattcacccagacctcacagttctagggcccctggctgcagatgactggaaacaaggaaggacatttccgtgagagtcatctcaaacactgcttaaggaaaagagaaacactaatggccaagtgtacatttgatttgatatacagacctccagattattttctatatttggattcacagcctttgcgctctgggttttgggatttgggtgtggggtaagttgaagggaaatcaatttaaaggaaagttctattatctgggttttagaaattctataagagacaaagtttggaagtacataaagtaataactgttagaattaggtaatggatatgaaagagaaaatgctttctcatgcatagacaagtgttttgggtttttaaaaaaaatattctgtcattggttacaaatttttactcaggctttctattggcatggatttcctttgacctctcacttttttataaattataatgcatctaaaccacctgtccccagttaatgtgccaaaatgtcaatttttaacttatctccagccaatttcaaagaaaacagaccagcatagttctgcaataacagttttaagatgggcatagggtttggaagaaagggagaaggattcttttttcaatgtactgtattgggacgctggtaactgttaacccagtgttcagcatagagctatatatatatatatatgtatatatttattattttcatataatttgccagacagagatcagaattgaaccgtcaatgtgaaataaagagttctccttgtacttgaataataaccacgattccaacccaggtctgctttggggcttatcagaactcctttctaaggagcactagaatgagaaatcatgttgttcgatcgtttcacatctgtatatcagctctaaagcagagatgtattatggtgatactccaaggtggcatagccattcatttacaacttccagatttgagctgcctggagggaatccatatcagctctgcataagattatatacaaagctgtcactcacaaaaggctggatgtgctttcatccaactggaaggctttattcttccaagttcattcatactcaaagaggccagtactttgccatccttgcacttctgttatcagggcccaaataacagtggcaagctaccaactaagttgtattttaataaagattccatgggttgaacaagccacgttgcagaaaaagagcttcccctaacctgggttgttgcagagtaaatcccacgacataagctggtatcagtggttcgggggaaatagttccattctatgactcttgtctcctcctccaggaggactgttctaactagtaatcttggccctattcattacatcctctgcttgtcattctgctaatttatgaagatagtttattatagtctgtacttcagttctcatcttgtaaataatgcttaacataaacttgtacttacactgaaatccaaaatagtcatgtttctgcagtattctgtagccaacttaaacctgtgctttcatgtttaagaaatgagaaattgtgccaaagatagcagaagagtagataagtgctcagtattgacgacctacatctgaaatctacaacataatgatactgaattgttatgtaaacatcataaatagtaaataatgattcaatgtgaattttaaaatgcaaatattgctattgtttataggaaataaatctaaatataaatgaaattgaatcagtaatttatcttgggctaaatggttctaccccttactaggttgccccaattagtggcactagttggcagagctgttcatgagctgccagttatcattttggagtcagtttgaaaccagcctcttaacacactgctgttaactcataaaagagaagagtgttccatttcagtctcaataaacacttccctcattctttc

SEQ ID NO: 19314 - DNA, 484 bp, Homo sapiens
  source 1..484: mol_type = unassigned DNA
ctgaaacctccaatgacagcttgccgaaagatgattcagttgtttctcaacttggcccattccccacgtccaagtccaattggagaacggcttttgactccgtttatatgagcatctttgatagagagcaaaggtttctggcaaggcgggatgcctgccttccacctctaatccagctgtccttgacactccagacagccctttcaaatctgggcaacacttagtcatcttactggtagccaaggaccatttgaagtgagatctaacaatatgatcgtgttgctgcactggattccaacgtatccggaaaaattggtctgcgcgctgtcgtgtattatttctgtaccactctcattgctgttattctaggtattgtgctggtggtgagcatcaagcctggtgtcacccagaaagtgggtgaaattgcgaggacaggcagcacccctgaagtcagtacggtggatgccatgttagatctcatcag

SEQ ID NO: 19315 - DNA, 726 bp, Homo sapiens
  source 1..726: mol_type = unassigned DNA
tttcttcaatgctttgagtgatgcaaccatgaaaatcgttcagatcatcatgtgttatatgccactaggtattttgttcctgattgctgggaagatcatagaagttgaagactgggaaatattccgcaagctgggcctttacatggccacagtcctgactgggcttgcaatccactccattgtaattctcccgctgatatatttcatagtcgtacgaaagaaccctttccgatttgccatgggaatggcccaggctctcctgacagctctcatgatctcttccagttcagcaacactgcctgtcaccttccgctgtgctgaagaaaataaccaggtggacaagaggatcactcgattcgtgttacccgttggtgcaacaatcaacatggatgggactgcgctctatgaagcagtggcagcggtgtttattgcacagttgaatgacctggacttgggcattgggcagatcatcaccatcagggaccggttcaggaccatggtcaacgtccttggtgatgcttttgggacgggcattgtggaaaagctctccaagaaggagctggagcagatggatgtttcatctgaagtcaacattgtgaatccctttgccttggaatccacaatccttgacaacgaagactcagacaccaagaagtcttatgtcaatggaggctttgcagtagacaagtctgacaccatctcattcacccagacctcacagttcta

SEQ ID NO: 19316 - DNA, 766 bp, Homo sapiens
  source 1..766: mol_type = unassigned DNA
ccataccgcagacagctgcctggcgggcgacccagccccatcctgatggccccaggacacaagcccaggagcgccccggtgcgcgcggttccgcggcccaggggcgccgggtttggtggcacagcgagccccctttctctagcgaaacctgtttccctccaatcttgtggttgcagctttccgtacgtatgcaaccgattataaagtcgtgacccagaacagcagctctggaaatgtaacccatgaaaagatccccataggcactgagatagaagggatgaacattttaggattggtcctgtttgctctggtgttaggagtggccttaaagaaactaggctccgaaggagaagacctcatccgtttcttcaattccctcaacgaggcgacgatggtgctggtgtcctggattatgtggatggagtacagcggcgcgatctcggctccctgcaacctctaccttctgggttcaagtgattctcctgcctcagcctcccgagaagctgggattacaggcgtccgccaccatacccagctaattttttttttttttagtagagacggggtttcaccatgttggccaagctggtctcaaactcctgacctcaggtgatctacctgcctcagcctcccaaactgctggaattacaggtacgtacctgtgggcatcatgttccttgttggaagcaagatcgtggaaatgaaagacatcatcgtgctggtgaccagcctggggaaatacatcttcgcatctatattgggccat

SEQ ID NO: 19317 - DNA, 461 bp, Homo sapiens
  source 1..461: mol_type = unassigned DNA
agctgcctggcgggcgacccagccccatcctgatggccccaggacacaagcccaggagcgccccggtgcgcgcggttccgcggcccaggggcgccgggtttggtggcacagcgagccccctttctctagcgaaacctgtttccctccaatcttgtggttgcagctttccgtacgtatgcaaccgattataaagtcgtgacccagaacagcagctctggaaatgtaacccatgaaaagatccccataggcactgagatagaagggatgaacattttaggattggtcctgtttgctctggtgttaggagtggccttaaagaaactaggctccgaaggagaagacctcatccgtttcttcaattccctcaacgaggcgacgatggtgctggtgtcctggattatgtgctcagcgacccttccctctatgatgaagtgcattgaagagaacaatggtgtggacaa

SEQ ID NO: 19318 - DNA, 1217 bp, Homo sapiens
  source 1..1217: mol_type = unassigned DNA
agctgcctggcgggcgacccagccccatcctgatggccccaggacacaagcccaggagcgccccggtgcgcgcggttccgcggcccaggggcgccgggtttggtggcacagcgagccccctttctctagcgaaacctgtttccctccaatcttgtggttgcagctttccgtacgtatgcaaccgattataaagtcgtgacccagaacagcagctctggaaatgtaacccatgaaaagatccccataggcactgagatagaagggatgaacattttaggattggtcctgtttgctctggtgttaggagtggccttaaagaaactaggctccgaaggagaagacctcatccgtttcttcaattccctcaacgaggcgacgatggtgctggtgtcctggattatgtgctcagcgacccttccctctatgatgaagtgcattgaagagaacaatggtgtggacaagaggatcagcaggtttattctccccatcggggccaccgtgaacatggacggagcagccatcttccagtgtgtggccgcggtgttcattgcgcaactcaacaacgtagagctcaacgcaggacagattttcaccattctagtgactgccacagcgtccagtgttggagcagcaggcgtgccagctggaggggtcctcaccattgccattatcctggaggccattgggctgcctactcatgacctgcctctgatcctggctgtggactggattgtggaccggaccaccacggtggtgaatgtggaaggggatgccctgggtgcaggcattctccaccacctgaatcagaaggcaacaaagaaaggcgagcaggaacttgctgaggtgaaagtggaagccatccccaactgcaagtctgaggaggagacatcgcccctggtgacacaccagaaccccgctggccccgtggccagtgccccagaactggaatccaaggagtcggttctgtgatggggctgggctttgggcttgcctgccagcagtgatgtcccaccctgttcacccagccgccagtcatggacacagggcactgcccttgccaacttttaccctcccaagcaatgctttggcccagtcgctggcctgaggcttacctctcggcactggcattgggctccccagccggaactggttaccaaggacaaggacactctgacattcggcttgatccatgtccaggtgcaactgtgtgtacacca

SEQ ID NO: 19319 - DNA, 4561 bp, Homo sapiens
  source 1..4561: mol_type = unassigned DNA
ctccagccggcggctgctccagggaggctgggcgcgatcctctccgcccgcggctccaacccgcactctgcgcctctcctcgcctttctcgcacctgctcctgcgccaggcccggagacccccggggcggcttcccagaacctgcggagcacaactggccgaccgacccattcattgggaaccccgtcttttgccagagcccacgtcccctgccacctctagctcggagcggcgtgtagcgccatggagaagagcaacgagaccaacggctaccttgacagcgctcaggcggggcctgcggccgggcccggagctccggggaccgcggcgggacgcgcacggcgttgcgcgggcttcctgcggcgccaagcgctggtgctgctcaccgtgtccggggtgctggcgggcgcgggcctgggcgcggcgttgcgcgggctcagcctgagccgcacgcaggtcacctacctggccttccccggcgagatgctgctccgcatgctgcgcatgatcatcctgccgctggtggtctgcagcctggtgtcgggcgccgcctcgctcgatgccagctgcctcgggcgtctgggcggcatcgctgtcgcctactttggcctcaccacactgagtgcctcggcgctcgccgtggccttggcgttcatcatcaagccaggatccggtgcgcagacccttcagtccagcgacctggggctggaggactcggggcctcctcctgtccccaaagagacggtggactctttcctcgacctggccagaaacctgtttccctccaatcttgtggttgcagctttccgtacgtatgcaaccgattataaagtcgtgacccagaacagcagctctggaaatgtaacccatgaaaagatccccataggcactgagatagaagggatgaacattttaggattggtcctgtttgctctggtgttaggagtggccttaaagaaactaggctccgaaggagaagacctcatccgtttcttcaattccctcaacgaggcgacgatggtgctggtgtcctggattatgtggtacgtacctgtgggcatcatgttccttgttggaagcaagatcgtggaaatgaaagacatcatcgtgctggtgaccagcctggggaaatacatcttcgcatctatattgggccatgttattcatggaggaattgttctgccacttatttattttgttttcacacgaaaaaacccattcagattcctcctgggcctcctcgccccatttgcgacagcatttgctacctgctccagctcagcgacccttccctctatgatgaagtgcattgaagagaacaatggtgtggacaagaggatcagcaggtttattctccccatcggggccaccgtgaacatggacggagcagccatcttccagtgtgtggccgcggtgttcattgcgcaactcaacaacgtagagctcaacgcaggacagattttcaccattctagtgactgccacagcgtccagtgttggagcagcaggcgtgccagctggaggggtcctcaccattgccattatcctggaggccattgggctgcctactcatgacctgcctctgatcctggctgtggactggattgtggaccggaccaccacggtggtgaatgtggaaggggatgccctgggtgcaggcattctccaccacctgaatcagaaggcaacaaagaaaggcgagcaggaacttgctgaggtgaaagtggaagccatccccaactgcaagtctgaggaggagacatcgcccctggtgacacaccagaaccccgctggccccgtggccagtgccccagaactggaatccaaggagtcggttctgtgatggggctgggctttgggcttgcctgccagcagtgatgtcccaccctgttcacccagccgccagtcatggacacagggcactgcccttgccaacttttaccctcccaagcaatgctttggcccagtcgctggcctgaggcttacctctcggcactggcattgggctccccagccggaactggttaccaaggacaaggacactctgacattcggcttgatccatgtccaggtgcaactgtgtgtacaccagggatctgtttggaaacaaccccttgagctgccaggctcaagaaatcatggactcacagggtcctgtgtggttacatcttggaaaaaatgcagatgtatttcactctccccggtcagctctgcatcaggtgttttctgagcaaaccaagggggtttatagtcatctgtcgcattgcctcgagttgcagtaattgaaaaaatgctcaaattcttagccatggctggcctttgctgagctgggactcaggtgtttaaagagtttgtgctatagctaggtgtggatagcttctgatccctgggttctgggagactgcaggtgccgcacattgtcaagttagaaatactccaggtgggtgttagcactgtggtggtctctggtccacagccttaggtaaacaacttagattctgaggtcaaagaaaaaaggagagggaatgcagccttgtgggggagaagcggggcagagggttctctaatctaatcaggacaggacaggtttcacatacaattgtcccagttcgcatcccagccctggggcacttttctgcttccttccagaggcctgggcctctgataacactttggctttttctccattcacgctgatttggcaaaaggccagagatgggcctccttccctggggaggtgtgatgtagttatcacattcaggacccttgttgatttatcatctattatttgaattcaactggacactctgtaaaatgctgcactgcagcaaaaacaaaaccaccaccaccccagagaaaaccatgtactaattggagtggggtacccccattcacaggttcccaggtcccctggctttggctgatttcaaaatatagagccctttcttgccagtacatccaagtttaaaattatcagcgaaatggtccatgtttttccaattacctgctgacacggttctaagctaagtgaaggggaagatctgagagcgtgctgtttgtggctgttgatgcatattcgtgatgtaacaggtcctggggcctcactttaccccatttgtaaaatggggctaatgtcacctgcctcttacctacctcagagggatttggtgaagcaaactgttaatcttcgaaaacgaccatttcacttcttggatatcaagtgctaacccagtatgttcttcttttttatgtaagggacagctttctccacagagtcctttctgctggtgaggacagcatttctgagcagggctttgttctctatgtgcattaggacttttatcatgcccttgttctgtgtgtagttacttgacagcatcaaatgccgcctcttcctaatgtccttcaagttttcatgaactagcaaccccaccttccaccatggttctgggcgcctgattttgctgtgactcccagacccagccactgtttctgccaccctgtaacaggccattaaagctccccagtgttcagcctccttcactcccttgttttccctgttgctatgtgtcacctgggccctacagacaggggcacacgcttatggatgtgtgtaccattgagatgagaatgggtagatggaacggagaccatcaagccacacccccttcttaaaactggggacatgagcctgagcagaaagggtgaagaagagccatgggacacagagttgacccagccagggggaaagcccagctctctttaaaccagctaagccattccagtctcctgtgaagccaaaagggaccaggaaccgtgcaaaggaaactggaaacttttccccgctgggtagagcatgttgctgatactcttctgttttcaagggaaacaatcacattgtttgattccaaatggtaaatgaacactcactattcttcaggcttcagtaaatctttttttcttccttcatatatatatacacaacacacacacacatatgtatatctatacacacatgtgtgttgtgtatatgcatgtgtgtgtgtgcgtgtgtgtatagttttagctccaagccaagcaagtttgtgtttggatagaggggaacttaactattaactacaagttgtatgtctgtggtatcttgattttcccatttctaaagatgaatttcacaaagccataaagcgtgaaattagagctggacttaagactcattggccgaccatcctgtgtcctggcctggccctgcagtaagaagcgtgtctgggtctggagaagggtgcttccgagagtgtgcaggtggcccttccccttggaggcgagaagagagaatgtgctgtctatcttcctggttttcagtccacagagtcggtagaccaggggttacgtgactggggaaaatctcacatctccttgtctgaaaacatttcccctgctgttctctttctaacatgttgtggtaaatctgttcagatactgctcatctgactgttttgtacatgtgacaattgccttaaaacctagcacagtcctcagaaatgaataccgtgtttccactggaa

SEQ ID NO: 19320 - DNA, 5789 bp, Homo sapiens
  source 1..5789: mol_type = unassigned DNA
atacattgctgcataacaaactactacacatttaacagcttaaacagcttaaaatctcacatatttactatcctacagtctctctggggtcaggaatcttgggacagtttagttaggtcctctgcttcagagtctcttacaaggctgcaatcggaggtgttggtcagggctaggttcttacccacaggtccacctggggagagattcacctctgaggtcatgttgttgttggcagaattcagttccttgaagtttggactgggagcctcagttggctcttggctggagaccacctgcagtttctagtctcgtgggcctttctaacatagcagcttgcttcatcaaagtatgcaagcagaagacaataagaagagtcagctagcacaatggaagctacaaccttatgtaaccaaatcgtggatgtgacatcccatcacctttgctgcatttgttcattagaagcaagtcataggtccacccagactaaagggattacccaaaggtgtgaataccaggaggccatcttagactctgcctgccacagctgggttgcagccagacctgcctacctctgaaacccaatgcactgcaaatagttgcctggagatcctggtgagcaacccagcttcttacagaagtaagaattagtggataagtttgacacaaattgttaagaatgatccagagtcttttgctcttctagacttactcttcttgcaggaagtgagaacaaatggactgtcagctggaatagaatttcttgtatatcaagaccagcatcctacacagagccctcagtaaaactatttgcatgaacagattttgggctccatcagctcgattgccctacttttataacaaatgtttataatatccttaattctaagatgaaatccataaataaaatgtccctgcccacataatttcaaaatatcaatatgatgtaactgtaatatacaaaaggaaaataattataacaaaaacaatgtgtctcaatatatacatgctctaaaataaagtggttgaatgcttactcctgaactcagaatcactgctaatgaaatagttataaatgcagactgttacttgacactgggtgtggaattagggactcagattctacaatttgcactggtggtgtgattttccaggaagacaaataatatttggaaacattctgaacaaagcaaaacaaaaaccaccccataatttacaaggagttacacttctggaaaattcagcgtatgttcaaattgtgaaaaacagaaccttgttttggaattagtttagtcttgagtaattatagataaggtttttatctacacgtatgtcatgcaagacattggagggccttgagataattcattatacaggactctactgcatttaacaggacaaatgtgtgggacctggcatttctccctacacactccccccaattggggaatgcctcaattttgcaacaacaaaaacgcccttggatttcactagtgagcagtgacacttgacattgcaaaccactgcaatggtgcctaacctctaggtgagaggaaagcaatgcagttatagacttggttggacaccattaagttcagatatcaaggagtaccatgagagagatggaaatgaaaatcagtggcttcaaagtatctactgtggcccagcagcgcaggcacagttagggtgcttaaatcaagcaaaaggtgcagtgtcagctaggggtggagagagaacactgtgttagggttttagaagtggacatctcaaagcagatactttgcacactgaattttaagaatactgatgaagacaggtaccatggctcacgcctgtagtcccaacactttgggaggctgaggcaggaggatcacttgagcccaaaagttcaaggctgcagtgagctgcaatcacaccactgcactccagcctgggcaacagggacctcatctctaaaaaattgttttaaaagaatactgacagaatgctttcttttccaacagaaacctgtttccctccaatcttgtggttgcagctttccgtacgtatgcaaccgattataaagtcgtgacccagaacagcagctctggaaatgtaacccatgaaaagatccccataggcactgagatagaagggatgaacattttaggattggtcctgtttgctctggtgttaggagtggccttaaagaaactaggctccgaaggagaagacctcatccgtttcttcaattccctcaacgaggcgacgatggtgctggtgtcctggattatgtggtacgtacctgtgggcatcatgttccttgttggaagcaagatcgtggaaatgaaagacatcatcgtgctggtgaccagcctggggaaatacatcttcgcatctatattgggccatgttattcatggaggaattgttctgccacttatttattttgttttcacacgaaaaaacccattcagattcctcctgggcctcctcgccccatttgcgacagcatttgctacctgctccagctcagcgacccttccctctatgatgaagtgcattgaagagaacaatggtgtggacaagaggatcagcaggtttattctccccatcggggccaccgtgaacatggacggagcagccatcttccagtgtgtggccgcggtgttcattgcgcaactcaacaacgtagagctcaacgcaggacagattttcaccattctagtgactgccacagcgtccagtgttggagcagcaggcgtgccagctggaggggtcctcaccattgccattatcctggaggccattgggctgcctactcatgacctgcctctgatcctggctgtggactggattgtggaccggaccaccacggtggtgaatgtggaaggggatgccctgggtgcaggcattctccaccacctgaatcagaaggcaacaaagaaaggcgagcaggaacttgctgaggtgaaagtggaagccatccccaactgcaagtctgaggaggagacatcgcccctggtgacacaccagaaccccgctggccccgtggccagtgccccagaactggaatccaaggagtcggttctgtgatggggctgggctttgggcttgcctgccagcagtgatgtcccaccctgttcacccagccgccagtcatggacacagggcactgcccttgccaacttttaccctcccaagcaatgctttggcccagtcgctggcctgaggcttacctctcggcactggcattgggctccccagccggaactggttaccaaggacaaggacactctgacattcggcttgatccatgtccaggtgcaactgtgtgtacaccagggatctgtttggaaacaaccccttgagctgccaggctcaagaaatcatggactcacagggtcctgtgtggttacatcttggaaaaaatgcagatgtatttcactctccccggtcagctctgcatcaggtgttttctgagcaaaccaagggggtttatagtcatctgtcgcattgcctcgagttgcagtaattgaaaaaatgctcaaattcttagccatggctggcctttgctgagctgggactcaggtgtttaaagagtttgtgctatagctaggtgtggatagcttctgatccctgggttctgggagactgcaggtgccgcacattgtcaagttagaaatactccaggtgggtgttagcactgtggtggtctctggtccacagccttaggtaaacaacttagattctgaggtcaaagaaaaaaggagagggaatgcagccttgtgggggagaagcggggcagagggttctctaatctaatcaggacaggacaggtttcacatacaattgtcccagttcgcatcccagccctggggcacttttctgcttccttccagaggcctgggcctctgataacactttggctttttctccattcacgctgatttggcaaaaggccagagatgggcctccttccctggggaggtgtgatgtagttatcacattcaggacccttgttgatttatcatctattatttgaattcaactggacactctgtaaaatgctgcactgcagcaaaaacaaaaccaccaccaccccagagaaaaccatgtactaattggagtggggtacccccattcacaggttcccaggtcccctggctttggctgatttcaaaatatagagccctttcttgccagtacatccaagtttaaaattatcagcgaaatggtccatgtttttccaattacctgctgacacggttctaagctaagtgaaggggaagatctgagagcgtgctgtttgtggctgttgatgcatattcgtgatgtaacaggtcctggggcctcactttaccccatttgtaaaatggggctaatgtcacctgcctcttacctacctcagagggatttggtgaagcaaactgttaatcttcgaaaacgaccatttcacttcttggatatcaagtgctaacccagtatgttcttcttttttatgtaagggacagctttctccacagagtcctttctgctggtgaggacagcatttctgagcagggctttgttctctatgtgcattaggacttttatcatgcccttgttctgtgtgtagttacttgacagcatcaaatgccgcctcttcctaatgtccttcaagttttcatgaactagcaaccccaccttccaccatggttctgggcgcctgattttgctgtgactcccagacccagccactgtttctgccaccctgtaacaggccattaaagctccccagtgttcagcctccttcactcccttgttttccctgttgctatgtgtcacctgggccctacagacaggggcacacgcttatggatgtgtgtaccattgagatgagaatgggtagatggaacggagaccatcaagccacacccccttcttaaaactggggacatgagcctgagcagaaagggtgaagaagagccatgggacacagagttgacccagccagggggaaagcccagctctctttaaaccagctaagccattccagtctcctgtgaagccaaaagggaccaggaaccgtgcaaaggaaactggaaacttttccccgctgggtagagcatgttgctgatactcttctgttttcaagggaaacaatcacattgtttgattccaaatggtaaatgaacactcactattcttcaggcttcagtaaatctttttttcttccttcatatatatatacacaacacacacacacatatgtatatctatacacacatgtgtgttgtgtatatgcatgtgtgtgtgtgcgtgtgtgtatagttttagctccaagccaagcaagtttgtgtttggatagaggggaacttaactattaactacaagttgtatgtctgtggtatcttgattttcccatttctaaagatgaatttcacaaagccataaagcgtgaaattagagctggacttaagactcattggccgaccatcctgtgtcctggcctggccctgcagtaagaagcgtgtctgggtctggagaagggtgcttccgagagtgtgcaggtggcccttccccttggaggcgagaagagagaatgtgctgtctatcttcctggttttcagtccacagagtcggtagaccaggggttacgtgactggggaaaatctcacatctccttgtctgaaaacatttcccctgctgttctctttctaacatgttgtggtaaatctgttcagatactgctcatctgactgttttgtacatgtgacaattgccttaaaacctagcacagtcctcagaaatgaataccgtgtttccactgg

SEQ ID NO: 19321 - DNA, 1794 bp, Homo sapiens
  source 1..1794: mol_type = unassigned DNA
actggcatcctgactccttgagaaagagcccatctagcatccttctcgccgttgcttccagcaacatggcccttcttccagctttaggatgtcctaagcgcttccagctgtccaggtcacactctgtcgcatgtcgatagaccatgagcagccatggcaacagcctgttcctgcgggagagcggccagcggctgggccgggtgggctggctgcagcggctgcaggaaagcctgcagcagagagcactgcgcacgcgcctgcgcctgcagaccatgaccctcgagcacgtgctgcgcttcctgcgccgaaacgccttcattctgctgacggtcagcgccgtggtcattggggtcagcctggcctttgccctgcgcccatatcagctcacctaccgccagatcaagtacttctcttttcctggagagcttctgatgaggatgctgcagatgctggtgttacctctcattgtctccagcctggtcacagaaatatgtttccaccaaaccttgtggaggcctgcttcaaacagttcaagacgcagtacagcacgagggtggtaaccaggaccatggtgaggacagagaacgggtctgagccgggtgcctccatgcctcctccattctcagtggagaacggaaccagcttcctggaaaatgtcactcgggccttgggtaccctgcaggagatgctgagctttgaggagactgtacccgtgcctggctccgccaatggcatcaacgccctgggcctcgtggtcttctctgtggcctttgggctggtcattggtggcatgaaacacaagggcagagtcctcagggacttcttcgacagcctcaatgaggctattatgaggctggtgggcatcattatctggtatgcacctgtgggcatcctgttcctgattgctgggaagattctggagatggaagacatggccgtcctggggggtcagctgggcatgtacaccctgaccgtcatcgtgggcctgttcctccatgccggcattgtccttcccctcatctacttcctcgtcactcaccggaaccccttccccttcattgggggcatgctacaagccctcatcaccgctatgggcacgtcttccagctcggcaacgctgcccatcaccttccgctgcctggaggagggcctgggtgtggaccgccgcatcaccaggttcgtcctgcccgtgggcgccacggtcaacatggatggcactgccctctacgaggccctggctgccatcttcattgctcaagttaacaactacgagctcaacctgggtcagatcacaaccatcagcatcacggccacagcagccagtgttggggctgctggcatcccccaggcgggtctggtcaccatggtcattgtgcttacgtcggtcggcttgcccacggaagacatcacgctcatcattgccgtggactggttccttgaccggcttcgcacaatgaccaacgtactgggggactcaattggagcggccgtcatcgagcacttgtctcagcgggagctggagcttcaggaagctgagcttaccctccccagcctggggaaaccctacaagtccctcatggcacaggagaagggggcatcccggggacggggaggcaacgagagtgctatgtgaggggcctccagctctgcccccccagagaggagggaagggggctggggaggggagtcctggtgacacatctgttgcccaactgaccgtgggctgaacacacgttctgcttgactcatttaggggggagggaaaagtgaaataaaggagcaggaatgaaaggt

SEQ ID NO: 19322 - DNA, 1719 bp, Homo sapiens
  source 1..1719: mol_type = unassigned DNA
gatagaccatgagcagccatggcaacagcctgttcctgcgggagagcggccagcggctgggccgggtgggctggctgcagcggctgcaggaaagcctgcagcagagagcactgcgcacgcgcctgcgcctgcagaccatgaccctcgagcacgtgctgcgcttcctgcgccgaaacgccttcattctgctgacggtcagcgccgtggtcattggggtcagcctggcctttgccctgcgcccatatcagctcacctaccgccagatcaagtacttctcttttcctggagagcttctgatgaggatgctgcagatgctggtgttacctctcattgtctccagcctggtcacaggtatggcatccctggacaacaaggccacggggcggatggggatgcgggcagctgtgtactacatggtgaccaccatcatcgcggtcttcatcggcatcctcatggtcaccatcatccatcccgggaagggctccaaggaggggctgcaccgggagggccggatcgagaccatccccacagctgatgccttcatggacctgatcagaaatatgtttccaccaaaccttgtggaggcctgcttcaaacagttcaagacgcagtacagcacgagggtggtaaccaggaccatggtgaggacagagaacgggtctgagccgggtgcctccatgcctcctccattctcagtggagaacggaaccagcttcctggaaaatgtcactcgggccttgggtaccctgcaggagatgctgagctttgaggagactgtacccgtgcctggctccgccaatggcatcaacgccctgggcctcgtggtcttctctgtggcctttgggctggtcattggtggcatgaaacacaagggcagagtcctcagggacttcttcgacagcctcaatgaggctattatgaggctggtgggcatcattatctggtatgcacctgtgggcatcctgttcctgattgctgggaagattctggagatggaagacatggccgtcctggggggtcagctgggcatgtacaccctgaccgtcatcgtgggcctgttcctccatgccggcattgtccttcccctcatctacttcctcgtcactcaccggaaccccttccccttcattgggggcatgctacaagccctcatcaccgctatgggcacgtcttccagctcggcaacgctgcccatcaccttccgctgcctggaggagggcctgggtgtggaccgccgcatcaccaggttcgtcctgcccgtgggcgccacggtcaacatggatggcactgccctctacgaggccctggctgccatcttcattgctcaagttaacaactacgagctcaacctgggtcagatcacaaccatcagcatcacggccacagcagccagtgttggggctgctggcatcccccaggcgggtctggtcaccatggtcattgtgcttacgtcggtcggcttgcccacggaagacatcacgctcatcattgccgtggactggttccttgaccggcttcgcacaatgaccaacgtactgggggactcaattggagcggccgtcatcgagcacttgtctcagcgggagctggagcttcaggaagctgagcttaccctccccagcctggggaaaccctacaagtccctcatggcacaggagaagggggcatcccggggacggggaggcaacgagagtgctatgtgaggggcctccagctctg

SEQ ID NO: 19323 - DNA, 1735 bp, Homo sapiens
  source 1..1735: mol_type = unassigned DNA
agaagcagcattgtggtttcaggagatgggtccatttggagcaggatcctaagtggggcttggcattgggaatttggattagctctagaggacgcaggatctggaaaatcagggcagatttcccatcccttggatatggtggggagttgaggagggcaaggaagatcccagaaaagccagtggcagcaaaacacaaaggccagggacctacgtactggtaaaactgagacctccaagaaacctgcagctcgacctggttgaattcagatagaccatgagcagccatggcaacagcctgttcctgcgggagagcggccagcggctgggccgggtgggctggctgcagcggctgcaggaaagcctgcagcagagagcactgcgcacgcgcctgcgcctgcagaccatgaccctcgagcacgtgctgcgcttcctgcgccgaaacgccttcattctgctgacggtcagcgccgtggtcattggggtcagcctggcctttgccctgcgcccatatcagctcacctaccgccagatcaagtacttctcttttcctggagagcttctgatgaggatgctgcagatgctggtgttacctctcattgtctccagcctggtcacaggtatggcatccctggacaacaaggccacggggcggatggggatgcgggcagctgtgtactacatggtgaccaccatcatcgcggtcttcatcggcatcctcatggtcaccatcatccatcccgggaagggctccaaggaggggctgcaccgggagggccggatcgagaccatccccacagctgatgccttcatggacctgatcagaaatatgtttccaccaaaccttgtggaggcctgcttcaaacagttcaagacgcagtacagcacgagggtggtaaccaggaccatggtgaggacagagaacgggtctgagccgggtgcctccatgcctcctccattctcagtggagaacggaaccagcttcctggaaaatgtcactcgggccttgggtaccctgcaggagatgctgagctttgaggagactgtacccgtgcctggctccgccaatggcatcaacgccctgggcctcgtggtcttctctgtggcctttgggctggtcattggtggcatgaaacacaagggcagagtcctcagggacttcttcgacagcctcaatgaggctattatgaggctggtgggcatcattatctgctcggcaacgctgcccatcaccttccgctgcctggaggagggcctgggtgtggaccgccgcatcaccaggttcgtcctgcccgtgggcgccacggtcaacatggatggcactgccctctacgaggccctggctgccatcttcattgctcaagttaacaactacgagctcaacctgggtcagatcacaaccatcagcatcacggccacagcagccagtgttggggctgctggcatcccccaggcgggtctggtcaccatggtcattgtgcttacgtcggtcggcttgcccacggaagacatcacgctcatcattgccgtggactggttccttgaccggcttcgcacaatgaccaacgtactgggggactcaattggagcggccgtcatcgagcacttgtctcagcgggagctggagcttcaggaagctgagcttaccctccccagcctggggaaaccctacaagtccctcatggcacaggagaagggggcatcccggggacggggaggcaacgagagtgctatgtga

SEQ ID NO: 19324 - DNA, 2987 bp, Homo sapiens
  source 1..2987: mol_type = unassigned DNA
gcatagcgcgtcccggctccgcgccggtgcctccacggtccggtccccgcgccggtgctgcacagtccctggcgggtccccgcggccccggccgggcgcttcgccgggctccggctcctgcatccgggcgcagcgcgcaggccgaggcgcgggcaggccgcccccgccgctccggacgccgggatgtaagaggctccgagaagcagcccacacatctcatcagatctaagtgtctagaggtcgggagaaccaagtgggaaagacccaccctcacccctcaccctgtagaaactgggaacactagaagggacattttctgagcaggaaacccaagagacagggttttacgctgtcacccaagttggagtgcagtggtacgatcatagctcattgcagcctcaaactcctgggttcaagcgatcctcctgctttagcctcttgagtggctaggactacaggcacaggccaccgtgcctggctaatttttaatttttaaaaaagagacagggtctggctatgttgcccaggctggccatgaactcctgggctcaagcggttctccagccttcacctcccaaagtgttgggattgcaggcatgagccactgcgtctggcccacagatgctaagtgctgtctgctcttctccaggggtcagcaaattttttcagcaaatggcccaagagtaaacattttgagctttgtggcccgtacaatctctgtcccaacaactcaactcaggcattgtagcttgaaagcagctgtagacaataggtaatgcatgagtgtggctgtgtgccaataaaactttatttacaaaaacaagcagtaggctgaatttgactagcagaccatagtttgtcaataccgtattatgtcttgtaaggaagagaaaggaaccggacaaaactctagcctcgggagttttcctgactgttcagatcttagctgaatgatctcccttggtatctacaggcaacttcctgctgtggcttagggactggaaacataatatcccagagggattccctgtgtagtctgtggttcactctttgggattttttttttttttttttttcacagcaaggagaagcagcattgtggtttcaggagatgggtccatttggagcaggatcctaagtggggcttggcattgggaatttggattagctctagaggacgcaggatctggaaaatcagggcagatttcccatcccttggatatggtggggagttgaggagggcaaggaagatcccagaaaagccagtggcagcaaaacacaaaggccagggacctacgtactggtaaaactgagacctccaagaaacctgcagctcgacctggttgaattcagatagaccatgagcagccatggcaacagcctgttcctgcgggagagcggccagcggctgggccgggtgggctggctgcagcggctgcaggaaagcctgcagcagagagcactgcgcacgcgcctgcgcctgcagaccatgaccctcgagcacgtgctgcgcttcctgcgccgaaacgccttcattctgctgacggtcagcgccgtggtcattggggtcagcctggcctttgccctgcgcccatatcagctcacctaccgccagatcaagtacttctcttttcctggagagcttctgatgaggatgctgcagatgctggtgttacctctcattgtctccagcctggtcacaggtatggcatccctggacaacaaggccacggggcggatggggatgcgggcagctgtgtactacatggtgaccaccatcatcgcggtcttcatcggcatcctcatggtcaccatcatccatcccgggaagggctccaaggaggggctgcaccgggagggccggatcgagaccatccccacagctgatgccttcatggacctgatcagaaatatgtttccaccaaaccttgtggaggcctgcttcaaacagttcaagacgcagtacagcacgagggtggtaaccaggaccatggtgaggacagagaacgggtctgagccgggtgcctccatgcctcctccattctcagtggagaacggaaccagcttcctggaaaatgtcactcgggccttgggtaccctgcaggagatgctgagctttgaggagactgtacccgtgcctggctccgccaatggcatcaacgccctgggcctcgtggtcttctctgtggcctttgggctggtcattggtggcatgaaacacaagggcagagtcctcagggacttcttcgacagcctcaatgaggctattatgaggctggtgggcatcattatctggtgagtcctggtctgtgcccacgggatggtggagccagagctgggaagtcaggctgtggggaagctgccgaagggcttgctggggacttttggtcattcatttacgtattgggtgattcacttacccactcaccaactcattcattcatgtctttctgggatgatttcatcactagttgacttccttgttcatctgttcattcattcattcttctatgcattggttagttcatggaatatctcactctttcattcattcatgtccttctgcaatgattcattcactgctttgttcatctgttcattcactcattcttctatgcattgatgaaatcactcattcagtgatttattcatctatactcatgcttcaatgcattgatttactcatttcctcatgcatttattcattcatctatgcattggttaaatcactggccaactcactaactcattcattcattcacacttttctgcaatgatttgttcacttgttcactcccttgcttatctgttcattcactcattcttcaatacattgaccaagccattcactgacatttattcagctacatttattctttcatgcattggtttctggatttatttggtcattcatttatttattttgcaaaattaatgtatttttaattgacaaataaaaactgtatatattttcatgtgcaacataa

SEQ ID NO: 19325 - DNA, 2420 bp, Homo sapiens
  source 1..2420: mol_type = unassigned DNA
cttcgcgctggcacggagcatttccagcctcacgcgctttaattttctcagctttaattttctgtggggtcggccaagccatcttccttgtttagcggaggaagccaggctcagagagggagaggagttggcccaagggcacacagcagccaagtggccaaggccggaaggtgcacccgcaaggagaagggggcagcggagccctctccctggctgttgttactgggacactagagccgcgccttccccaggcctccgccgaggctgctggagcgggtcccgcggtgccagggcctgttccccgcgctccgccagggatgctggggcctccgagggctccggaggcggtttagggggcgggggcgcggaggcgcggctccgagcagggggcgggggctggatgccggagaggccactcacccccgcccacccccagtccccctcccttcgcaagcacgctgtcccccttctcccacacggctgcggagcctgggctgggcgcgggggaggcggagggcatcgcggaggggatcccgccccctcccccggccgctcggtgcccccacacccacgtgagcgcagggccggcccggatccctcccgcagcatagcgcgtcccggctccgcgccggtgcctccacggtccggtccccgcgccggtgctgcacagtccctggcgggtccccgcggccccggccgggcgcttcgccgggctccggctcctgcatccgggcgcagcgcgcaggccgaggcgcgggcaggccgcccccgccgctccggacgccgatagaccatgagcagccatggcaacagcctgttcctgcgggagagcggccagcggctgggccgggtgggctggctgcagcggctgcaggaaagcctgcagcagagagcactgcgcacgcgcctgcgcctgcagaccatgaccctcgagcacgtgctgcgcttcctgcgccgaaacgccttcattctgctgacggtcagcgccgtggtcattggggtcagcctggcctttgccctgcgcccatatcagctcacctaccgccagatcaagtacttctcttttcctggagagcttctgatgaggatgctgcagatgctggtgttacctctcattgtctccagcctggtcacaggtatggcatccctggacaacaaggccacggggcggatggggatgcgggcagctgtgtactacatggtgaccaccatcatcgcggtcttcatcggcatcctcatggtcaccatcatccatcccgggaagggctccaaggaggggctgcaccgggagggccggatcgagaccatccccacagctgatgccttcatggacctgatcagaaatatgtttccaccaaaccttgtggaggcctgcttcaaacagttcaagacgcagtacagcacgagggtggtaaccaggaccatggtgaggacagagaacgggtctgagccgggtgcctccatgcctcctccattctcagtggagaacggaaccagcttcctggaaaatgtcactcgggccttgggtaccctgcaggagatgctgagctttgaggagactgtacccgtgcctggctccgccaatggcatcaacgccctgggcctcgtggtcttctctgtggcctttgggctggtcattggtggcatgaaacacaagggcagagtcctcagggacttcttcgacagcctcaatgaggctattatgaggctggtgggcatcattatctggtgagtcctggtctgtgcccacgggatggtggagccagagctgggaagtcaggctgtggggaagctgccgaagggcttgctggggacttttggtcattcatttacgtattgggtgattcacttacccactcaccaactcattcattcatgtctttctgggatgatttcatcactagttgacttccttgttcatctgttcattcattcattcttctatgcattggttagttcatggaatatctcactctttcattcattcatgtccttctgcaatgattcattcactgctttgttcatctgttcattcactcattcttctatgcattgatgaaatcactcattcagtgatttattcatctatactcatgcttcaatgcattgatttactcatttcctcatgcatttattcattcatctatgcattggttaaatcactggccaactcactaactcattcattcattcacacttttctgcaatgatttgttcacttgttcactcccttgcttatctgttcattcactcattcttcaatacattgaccaagccattcactgacatttattcagctacatttattctttcatgcattggtttctggatttatttggtcattcatttatttattttgcaaaattaatgtatttttaattgacaaataaaaactgtatatattttcatgtgcaacataa

SEQ ID NO: 19326 - DNA, 3264 bp, Homo sapiens
  source 1..3264: mol_type = unassigned DNA
aatatagaataaatgatcattaaccatagtccctctacggtgctgcagaacaccagaactcattctttctatctagctgtagttttgtatctgttaaccaacctctccccatcctctcctcccgcctacccttcccagcctctaatacaattctactatttccctgatgttttcatctctttcaaaatcagaagacagaaacaagcatttaggtgaaagaatgttataatgtagaatattaacatattcattttaatttttaatttttttagggtgggtgcggtgtctcatgcctacaatcccagcacttttggaggctgaggtgggaggatcacttgagcccaggagttggaggctgcagtgagctgcactcctgcctggttgacagagcgacattctgtctcaggtcttgaactcctgggctcaggtgatcctccccactcagccacccaagtagctgggattacaggcatgagccacagcagctggctcaatttttaaaattgaggggaattcacataacacaaaagcaaccatttgaaaacatataattcaatagcatctagtattttcattatgttgtgcaataattgtcacctctatctcgttctgaaataacatatttttctttatatgaatgcagttgtgaaatagaattttaatgtaggcttttttttaatgaaggaaggggtgcacaaagagaaaagttcctcaggcccatgaaaatcacaatttctgagccgccctgtacacgtgaggtgtttagttggtagacagatgggcaagttttaatttttatatgcattttatttaatgttgatgaaaaatataattcacatttcaagtaggggtctaaagtttccattttagatacatttttaattttaattttaaaagtatttatttatttttattttgagacagagtctcactctgtcgtccaggctggagtgctgtggtgcgatctcggttcactgcaacctccacctcctggattcaagtgattctcttgcctcagcctcccgagtagttgggactacaggcacctgccaccacgcctgggtaatttttgtatttttagtagaggcggtgtttcactgtgttggccaggctggtctcgaactcctgagctcaagtgatctgcccgcttcggcctcccaaagtgctgggattataggcgtgagccaccacgcctggttcggtactgttttttaggtaagtgaataaggacacatggatatggccaaatataaagaggagacgcaaaagcctgcagtttgggaaacatcagtacagtgcctgccaccccagaggggctcatgaacatcacactgtggccaagaatcattatcatttcattcccaagggactccccgctctcctgactccccgctctccctgttgctcacctgggcattcaggcagaatagctgcatttactgggcacctgctgtttgccaggcacctgctgattttgtccttgtgaaaagcctccaggctggacacaaaaccgtcctaatttgggggactagcctccgggtgctttgtctagggctccgtatgcagctggcacttcacaaaggcttgttaatttcccttgagccactggggcagcccccagaggcttgtgatgatctcagtgaaataagagtgggctggagtcagggtgtgtcaaaaaggtccattatttttgtggtttcctcctcttcccagccattctcaggaatgattctggagacttgacgttttcctgccaagacctgtccttagaaccgggcacatcgcaacagacttaccttccccctcccctgccattttgtttttagttatatttttatttacttgttgttcttagagacagggctgtgctctgtcactcaggctggagtgcagtggtgcagtcacagctcactgcagcctcaaacttctgggctcaagcgatcctcttgccttggccttagaaagtgttgggattacaggtgtgggccactgcgcctggcctttgtgcttttttggaggggtggaggtctcactatcttgctcaggctgggaagatcatagatcactgtaaccttgaactcttgggctcaagtgatcctcctgcctcagcctcccaaatatttaggactaccacccctagctgcccaggccagtcttgaactcctgggcgcaagtgattctcctgcctctgcctcccaaagtgctgggattacaggcgtgagccaaaacacccagccacccccgccttctgagagtcctcaggaagcgctcattacccttcgcagccttcgccatctgcccacgccggccttctgtcctggccctcaccagccccaggcttctctgtttcccgcagatagaccatgagcagccatggcaacagcctgttcctgcgggagagcggccagcggctgggccgggtgggctggctgcagcggctgcaggaaagcctgcagcagagagcactgcgcacgcgcctgcgcctgcagaccatgaccctcgagcacgtgctgcgcttcctgcgccgaaacgccttcattctgctgacggtcagcgccgtggtcattggggtcagcctggcctttgccctgcgcccatatcagctcacctaccgccagatcaagtacttctcttttcctggagagcttctgatgaggatgctgcagatgctggtgttacctctcattgtctccagcctggtcacaggtatggcatccctggacaacaaggccacggggcggatggggatgcgggcagctgtgtactacatggtgaccaccatcatcgcggtcttcatcggcatcctcatggtcaccatcatccatcccgggaagggctccaaggaggggctgcaccgggagggccggatcgagaccatccccacagctgatgccttcatggacctgatcagaaatatgtttccaccaaaccttgtggaggcctgcttcaaacaggtcagggggaagtacacagtttgatcaaggagattcggagggtggtgggagcttggggctgaagggatggtccaagggcaagaggcgggaggaagggcctgacagagcaatgggcaggggttcttgaggagtctaggagaaaggatgtattttccatggtgatctgggggggttagggagaagcacttaggtccgagaatggtggatcaggcttgtaatcccagcacttagggaggccaaggtgggaggatcacttgaggccaaaagttcaagaccagcctgggcaacagaatgagactctctgtctttc

SEQ ID NO: 19327 - DNA, 695 bp, Homo sapiens
  source 1..695: mol_type = unassigned DNA
gcgcagggccggcccggatccctcccgcagcatagcgcgtcccggctccgcgccggtgcctccacggtccggtccccgcgccggtgctgcacagtccctggcgggtccccgcggccccggccgggcgcttcgccgggctccggctcctgcatccgggcgcagcgcgcaggccgaggcgcgggcaggccgcccccgccgctccggacgccgaccatgagcagccatggcaacagcctgttcctgcgggagagcggccagcggctgggccgggtgggctggctgcagcggctgcaggaaagcctgcagcagagagcactgcgcacgcgcctgcgcctgcagaccatgaccctcgagcacgtgctgcgcttcctgcgccgaaacgccttcattctgctgacggtcagcgccgtggtcattggggtcagcctggcctttgccctgcgcccatatcagctcacctaccgccagatcaagtacttctcttttcctggagagcttctgatgaggatgctgcagatgctggtgttacctctcattgtctccagcctggtcacaggtatggcatccctggacaacaaggccacggggcggatggggatgcgggcagctgtgtactacatggtgaccaccatcatcgcggtcttcatcggcatcctcatggtcaccatcatccatcccgggaagggctccaagga

SEQ ID NO: 19328 - DNA, 592 bp, Homo sapiens
  source 1..592: mol_type = unassigned DNA
gctttggaacttggcctaagtgcactggcatcctgactccttgagaaagagcccatctagcatccttctcgccgttgcttccagcaacatggcccttcttccagctttaggatgtcctaagcgcttccagctgtccaggtcacactctgtcgcatgtcgatagaccatgagcagccatggcaacagcctgttcctgcgggagagcggccagcggctgggccgggtgggctggctgcagcggctgcaggaaagcctgcagcagagagcactgcgcacgcgcctgcgcctgcagaccatgaccctcgagcacgtgctgcgcttcctgcgccgaaacgccttcattctgctgacggtcagcgccgtggtcattggggtcagcctggcctttgccctgcgcccatatcagctcacctaccgccagatcaagtacttctcttttcctggagagcttctgatgaggatgctgcagatgctggtgttacctctcattgtctccagcctggtcacaggtatggcatccctggacaacaaggccacggggcggatggggatgcgggcagctgtgtactacatggtgaccaccatcatcgcg

SEQ ID NO: 19329 - DNA, 424 bp, Homo sapiens
  source 1..424: mol_type = unassigned DNA
gtccacctcatgcccgatgttcttgcagttgaggccccagctgaggttcttgtgcgtggcgagcagctcgtccaggttcttttccagatagaccatgagcagccatggcaacagcctgttcctgcgggagagcggccagcggctgggccgggtgggctggctgcagcggctgcaggaaagcctgcagcagagagcactgcgcacgcgcctgcgcctgcagaccatgaccctcgagcacgtgctgcgcttcctgcgccgaaacgccttcattctgctgacggtcagcgccgtggtcattggggtcagcctggcctttgccctgcgcccatatcagctcacctaccgccagatcaagtacttctcttttcctggagagcttctgatgaggatgctgcagatgctggtgttacctctcattgtctcc

SEQ ID NO: 19330 - DNA, 566 bp, Homo sapiens
  source 1..566: mol_type = unassigned DNA
acattttctgagcaggaaacccaagagacagggttttacgctgtcacccaagttggagtgcagtgcaaggagaagcagcattgtggtttcaggagatgggtccatttggagcaggatcctaagtggggcttggcattgggaatttggattagctctagaggacgcaggatctggaaaatcagggcagatttcccatcccttggatatggtggggagttgaggagggcaaggaagatcccagaaaagccagtggcagcaaaacacaaaggccagggacctacgtactggtaaaactgagacctccaagaaacctgcagctcgacctggttgaattcagatagaccatgagcagccatggcaacagcctgttcctgcgggagagcggccagcggctgggccgggtgggctggctgcagcggctgcaggaaagcctgcagcagagagcactgcgcacgcgcctgcgcctgcagaccatgaccctcgagcacgtgctgcgcttcctgcgccgaaacgccttcattctgctgacggtcagcgccgtggtcattggtgagctctgcctcttg

SEQ ID NO: 19331 - DNA, 493 bp, Homo sapiens
  source 1..493: mol_type = unassigned DNA
gcgcgtcccggctccgcgccggtgcctccacggtccggtccccgcgccggtgctgcacagtccctggcgggtccccgcggccccggccgggcgcttcgccgggctccggctcctgcatccgggcgcagcgcgcaggccgaggcgcgggcaggccgcccccgccgctccggacgccggtgagtggggactccgcggctcggcgcggggactcggtgtggctgcggcgcggaggttgcgggcaggtgggggatccgaggcgctggggtcaggcgtgtggggcgctccctgcgcccacgtccccacttctccgccgccctttgtctctgagctcctgcttgccccttagagccgttgccaccgcttttctcctggtcgttctgatagaccatgagcagccatggcaacagcctgttcctgcgggagagcggccagcggctgggccgggtgggctggctgcagcggctgcaggaaagcctgcagcagagagcactgc

SEQ ID NO: 19332 - DNA, 3381 bp, Homo sapiens
  source 1..3381: mol_type = unassigned DNA
gcttcggggccggcgcgaggcgcggcggggtcacgcgggtcgctgcgcgggctataagtaggggccggcggggtgctccgctggagtgatggctgccggcgctctctgcgtggttcttcttctcggccgctgaaacccccgcggctgcttcctgggaaggtcgtgagtcccgctgagctgtccccggtgccgccgacccgggccgtgtgcccgtggctccagccgctgtcgcctcgatctcctcgtctcccgctccgccctcccttttccctggatgaacttgcgtcctttctcttctccgccatggaattctgctccgtgcttttagccctcctgagccaaagaaaccccagacaacagatgcccatacgcagcgtatagcagtaactccccagctcggtttctgtgccgtagtttacagtatttaattttatataatatatattatttattatagcatttttgatacctcatattctgtttacacatcttgaaaggcgctcagtagttctcttactaaacaaccactactccagagaatggcaacgctgattaccagtactacagctgctaccgccgcttctggtcctttggtggactacctatggatgctcatcctgggcttcattattgcatttgtcttggcattctccgtgggagccaatgatgtagcaaattcttttggtacagctgtgggctcaggtgtagtgaccctgaagcaagcctgcatcctagctagcatctttgaaacagtgggctctgtcttactgggggccaaagtgagcgaaaccatccggaagggcttgattgacgtggagatgtacaactcgactcaagggctgctgatggccggctcagtcagtgctatgtttggttctgctgtgtggcaactcgtggcttcgtttttgaagctccctatttctggaacccattgtattgttggtgcaactattggtttctccctcgtggcaaaggggcaggagggtgtcaagtggtctgaactgataaaaattgtgatgtcttggttcgtgtccccactgctttctggaattatgtctggaattttattcttcctggttcgtgcattcatcctccataaggcagatccagttcctaatggtttgcgagctttgccagttttctatgcctgcacagttggaataaacctcttttccatcatgtatactggagcaccgttgctgggctttgacaaacttcctctgtggggtaccatcctcatctcggtgggatgtgcagttttctgtgcccttatcgtctggttctttgtatgtcccaggatgaagagaaaaattgaacgagaaataaagtgtagtccttctgaaagccccttaatggaaaaaaagaatagcttgaaagaagaccatgaagaaacaaagttgtctgttggtgatattgaaaacaagcatcctgtttctgaggtagggcctgccactgtgcccctccaggctgtggtggaggagagaacagtctcattcaaacttggagatttggaggaagctccagagagagagaggcttcccagcgtggacttgaaagaggaaaccagcatagatagcaccgtgaatggtgcagtgcagttgcctaatgggaaccttgtccagttcagtcaagccgtcagcaaccaaataaactccagtggccactaccagtatcacaccgtgcataaggattccggcctgtacaaagagctactccataaattacatcttgccaaggtgggagattgcatgggagactccggtgacaaacccttaaggcgcaataatagctatacttcctataccatggcaatatgtggcatgcctctggattcattccgtgccaaagaaggtgaacagaagggcgaagaaatggagaagctgacatggcctaatgcagactccaagaagcgaattcgaatggacagttacaccagttactgcaatgctgtgtctgaccttcactcagcatctgagatagacatgagtgtcaaggcagagatgggtctaggtgacagaaaaggaagtaatggctctctagaagaatggtatgaccaggataagcctgaagtctctctcctcttccagttcctgcagatccttacagcctgctttgggtcattcgcccatggtggcaatgacgtaagcaatgccattgggcctctggttgctttatatttggtttatgacacaggagatgtttcttcaaaagtggcaacaccaatatggcttctactctatggtggtgttggtatctgtgttggtctgtgggtttggggaagaagagttatccagaccatggggaaggatctgacaccgatcacaccctctagtggcttcagtattgaactggcatctgccctcactgtggtgattgcatcaaatattggccttcccatcagtacaacacattgtaaagtgggctctgttgtgtctgttggctggctccggtccaagaaggctgttgactggcgtctctttcgtaacatttttatggcctggtttgtcacagtccccatttctggagttatcagtgctgccatcatggcaatcttcagatatgtcatcctcagaatgtgaagctgtttgagattaaaatttgtgtcaatgtttgggaccatcttaggtattcctgctcccctgaagaatgattacagtgttaacagaagactgacaagagtctttttatttgggagccagaggagggaagtgttacttgtgctataactgcttttgtgctaaatatgaattgtctcaaaattagctgtgtaaaatagcccgggttccactggctcctgctgaggtcccctttccttctgggctgtgaattcctgtacatatttctctactttttgtatcaggcttcaattccattatgttttaatgttgtctctgaagatgacttgtgatttttttttcttttttttaaaccatgaagagccgtttgacagagcatgctctgcgttgttggtttcaccagcttctgccctcacatgcacagggatttaacaacaaaaatataactacaacttcccttgtagtctcttatataagtagagtccttggtactctgccctcctgtcagtagtggcaggatctattggcatattcgggagcttcttagagggatgaggttctttgaacacagtgaaaatttaaattagtaacttttttgcaagcagtttattgactgttattgctaagaagaagtaagaaagaaaaagcctgttggcaatcttggttatttctttaagatttctggcagtgtgggatggatgaatgaagtggaatgtgaactttgggcaagttaagtgggacagccttccatgttcatttgtctacctcttaactgaataaaaaagcctacagtttttagaaaatt

SEQ ID NO: 19333 - DNA, 668 bp, Homo sapiens
  source 1..668: mol_type = unassigned DNA
ctgaactgataaaaattgtgatgtcttggttcgtgtccccactgctttctggaattatgtctggaattttattcttcctggttcgtgcattcatcctccataaggcagatccagttcctaatggtttgcgagctttgccagttttctatgcctgcacagttggaataaacctcttttccatcatgtatactggagcaccgtggctgaaatctcctagaaggtggctggcctgcgcccatttcagaaggctgcaggctagtgtacgctgagttaacctagatagtttttcaaccaaagagacctgctcagattctaaatcactacagacctttcctctttagtcttcacaggatccactgataatatgatcatctccttccctttctcctgtctatgctaaaaatgctggaattaatactgacctcaactactgaagtcattagttatatctgatcttcagtaatcagtcatttaggactggtttgctggatattctcatttttctctcccaaatggagatactattgtttctaagtactaaacttccatgaatctgcttgaatgagaagagttgggatgtttaccacctgctctaagtgcacttggaagaagaaattcatgcagctaagaggaaaaataatttgtgagaatataaaggttgaaatgtt

SEQ ID NO: 19334 - DNA, 692 bp, Homo sapiens
  source 1..692: mol_type = unassigned DNA
gatattttttcttaatgtgttctattccagtgatgtcttggttcgtgtccccactgctttctggaattatgtctggaattttattcttcctggttcgtgcattcatcctccataaggcagatccagttcctaatggtttgcgagctttgccagttttctatgcctgcacagttggaataaacctcttttccatcatgtatactggagcaccgttgctgggctttgacaaacttcctctgtggggtaccatcctcatctcggtgggatgtgcagttttctgtgcccttatcgtctggttctttgtatgtcccaggatgaagagaaaaattgaacgagaaataaagtgtagtccttctgaaagccccttaatggaaaaaaagaatagcttgaaagaagaccatgaagaaacaaagttgtctgttggtgatattgaaaacaagcatcctgtttctgaggtagggcctgccactgtgcccctccaggctgtggtggaggagagaacagtctcattcaaacttggagatttggaggaagctccagagagagagaggcttcccagcgtggacttgaaagaggaaaccagcatagatagcaccgtgaatggtgcagtgcagttgcctaatgggaaccttgtccagttcagtcaagccgtcagcaaccaaataaactccagtggccactaccagtatcac

SEQ ID NO: 19335 - DNA, 638 bp, Homo sapiens
  source 1..638: mol_type = unassigned DNA
tttattcttcctggttcgtgcattcatcctccataaggcagatccagttcctaatggtttgcgagctttgccagttttctatgcctgcacagttggaataaacctcttttccatcatgtatactggagcaccgttgctgggctttgacaaacttcctctgtggggtaccatcctcatctcggtgggatgtgcagttttctgtgcccttatcgtctggttctttgtatgtcccaggatgaagagaaaaattgaacggcctgccactgtgcccctccaggctgtggtggaggagagaacagtctcattcaaacttggagatttggaggaagctccagagagagagaggcttcccagcgtggacttgaaagaggaaaccagcatagatagcaccgtgaatggtgcagtgcagttgcctaatgggaaccttgtccagttcagtcaagccgtcagcaaccaaataaactccagtggccactaccagtatcacaccgtgcataaggattccggcctgtacaaagagctactccataaattacatcttgccaaggtgggagattgcatgggagactccggtgacaaacccttaaggcgcaataatagctatacttcctataccatggcaatatgtggcatgcctc

SEQ ID NO: 19336 - DNA, 574 bp, Homo sapiens
  source 1..574: mol_type = unassigned DNA
tattcttcctggttcgtgcattcatcctccataaggcagatccagttcctaatggtttgcgagctttgccagttttctatgcctgcacagttggaataaacctcttttccatcatgtatactggagcaccgtggctgaaatctcctagaaggtggctggcctgcgcccatttcagaaggctgcaggctagttgctgggctttgacaaacttcctctgtggggtaccatcctcatctcggtgggatgtgcagttttctgtgcccttatcgtctggttctttgtatgtcccaggatgaagagaaaaattgaacgagaaataaagtgtagtccttctgaaagccccttaatggaaaaaaagaatagcttgaaagaagaccatgaagaaacaaagttgtctgttggtgatattgaaaacaagcatcctgtttctgaggtagggcctgccactgtgcccctccaggctgtggtggaggagagaacagtctcattcaaacttggagatttggaggaagctccagagagagagaggcttcccagcgtggacttgaaagaggaaaccagcatagatagcacc

SEQ ID NO: 19337 - DNA, 584 bp, Homo sapiens
  source 1..584: mol_type = unassigned DNA
cgtgcattcatcctccataaggcagatccagttcctaatggtttgcgagctttgccagttttctatgcctgcacagttggaataaacctcttttccatcatgtatactggagcaccgttgctgggctttgacaaacttcctctgtggggtaccatcctcatctcggtgggatgtgcagttttctgtgcccttatcgtctggttctttgtatgtcccaggatgaagagaaaaattgaacgctgtggtggaggagagaacagtctcattcaaacttggagatttggaggaagctccagagagagagaggcttcccagcgtggacttgaaagaggaaaccagcatagatagcaccgtgaatggtgcagtgcagttgcctaatgggaaccttgtccagttcagtcaagccgtcagcaaccaaataaactccagtggccactaccagtatcacaccgtgcataaggattccggcctgtacaaagagctactccataaattacatcttgccaaggtgggagattgcatgggagactccggtgacaaacccttaaggcgcaataatagctatacttcctataccatggcaa

SEQ ID NO: 19338 - DNA, 738 bp, Homo sapiens
  source 1..738: mol_type = unassigned DNA
ttatgtcatgcttattccttgaccctccccacccaaatggtgcccccccttccatcactctcctcttacccttctttatttctcttcacagcatttgtcagtactttacattattccatactagaaggcagatccagttcctaatggtttgcgagctttgccagttttctatgcctgcacagttggaataaacctcttttccatcatgtatactggagcaccgttgctgggctttgacaaacttcctctgtggggtaccatcctcatctcggtgggatgtgcagttttctgtgcccttatcgtctggttctttgtatgtcccaggatgaagagaaaaattgaacgagaaataaagtgtagtccttctgaaagccccttaatggaaaaaaagaatagcttgaaagaagaccatgaagaaacaaagttgtctgttggtgatattgaaaacaagcatcctgtttctgaggtagggcctgccactgtgcccctccaggctgtggtggaggagagaacagtctcattcaaacttggagatttggaggaagctccagagagagagaggcttcccagcgtggacttgaaagaggaaaccagcatagatagcaccgtgaatggtgcagtgcagttgcctaatgggaaccttgtccagttcagtcaagccgtcagcaaccaaataaactccagtggccactaccagtatcacaccgtgcataaggattccggcctgtacaaagagct

SEQ ID NO: 19339 - DNA, 613 bp, Homo sapiens
  source 1..613: mol_type = unassigned DNA
agtctgcatgttgtatttttagtctttgaagatatgaagtcaggtaagcaacatcctaacatagtctatttcttgacatctcttacaaacgtagagtatagcctatcctcaggtgtgtgctgaagtttatattagggcttttgggtaccttagaatgtgggtattgcaatctttattcaggatgttatcagtcactggtacagttagtcttgttattaaaagaaaaaagaaaaaaaaacaggtagaagttggaattagccttcgtaggaagaattccagatgcaaatgcaggaaaaactctgttgtccttggaaactactctggagagagttattggcactataattcccaaacctaccctgttaaaagattctgtggaaatgggttaacctttataccttttaagatattgatcttaatgatgttttacaggcagatccagttcctaatggtttgcgagctttgccagttttctatgcctgcacagttggaataaacctcttttccatcatgtatactggagcaccgtggctgaaatctcctagaaggtggctggcctgcgcccatttcagaaggctgcaggctagtgtacgctgagttaacctagatagtt

SEQ ID NO: 19340 - DNA, 3202 bp, Homo sapiens
  source 1..3202: mol_type = unassigned DNA
cactttgcttgaattggtggactgaaatttgagagaatcctcttttgaaaagaatagaattgggtacagttcagatttttagtttcagcttatcagccccatggttgagctactttcccctacagaatgagtcagcagggagctaagaagggttcttatatctgtaaagggttgtaaaaataaaaacaaaacaacaatgtgctacagaagcccgtaaaacctaaaatatttacagaaaaattttgggacccctgacatagggtgttctgcattgctggttgttcccaagtgagagttgctggcaaatgataaagcaggcaggaaaaatgttcctgaatgttaattgaagttcacatacattcttgttttgagatgagttttttgggggtggaggaaaggagacgtggaacaaagtagtatggccacaaccaaaccaaaaaagaccccccttttttttcctaggagaaataaagtgtagtccttctgaaagccccttaatggaaaaaaagaatagcttgaaagaagaccatgaagaaacaaagttgtctgttggtgatattgaaaacaagcatcctgtttctgaggtagggcctgccactgtgcccctccaggctgtggtggaggagagaacagtctcattcaaacttggagatttggaggaagctccagagagagagaggcttcccagcgtggacttgaaagaggaaaccagcatagatagcaccgtgaatggtgagttggaattcctggtttcacttttgttacctgcagtggtgaggaggcttattgttttggatttgatgctttttgtattgaatgtcaccttggtgatcttgactaggtgcagtgcagttgcctaatgggaaccttgtccagttcagtcaagccgtcagcaaccaaataaactccagtggccactaccagtatcacaccgtgcataaggattccggcctgtacaaagagctactccataaattacatcttgccaaggtgggagattgcatgggagactccggtgacaaacccttaaggcgcaataatagctatacttcctataccatggcaatatgtggcatgcctctggattcattccgtgccaaagaaggtgaacagaagggcgaagaaatggagaagctgacatggcctaatgcagactccaagaagcgaattcgaatggacagttacaccagttactgcaatgctgtgtctgaccttcactcagcatctgagatagacatgagtgtcaaggcagagatgggtctaggtgacagaaaaggaagtaatggctctctagaagaatggtatgaccaggataagcctgaagtctctctcctcttccagttcctgcagatccttacagcctgctttgggtcattcgcccatggtggcaatgacgtaagcaatgccattgggcctctggttgctttatatttggtttatgacacaggagatgtttcttcaaaagtggcaacaccaatatggcttctactctatggtggtgttggtatctgtgttggtctgtgggtttggggaagaagagttatccagaccatggggaaggatctgacaccgatcacaccctctaggtaagtaggtggagcaggttctacaaatgtcagtactcatttttttcagagatataacactgtcgagtgctaacacaaatctctaaagtaaccaagtttgtataagttcatgatgttcttattgtcattgttctttttagattttacttgtctggcccttaaacattttggtcagacattttacccatttagctctggtggtctctgaagaaaatgacttttctgagaaagctgtgtatgctaagagcggatagttatgtatacttgccttttatttgtcttgggagctaagactcaatgtttaccaaactcttcaaaataaaagtgcaaattttatttaatagtgggattccagaaaaacgtaaaactggaagcctttgaataaggaaactgggcatctgtggcctgatttaaataaagtagatcttaggggttatagcaaataaagatgtcagtggaggttttgtgactgagtagaacaaagcaggactgtgttaacttgaggtgtagtgttagcttctcaaaaaagtcaaactcacttcctgacaagaatccttttgtgtctgtagtggcttcagtattgaactggcatctgccctcactgtggtgattgcatcaaatattggccttcccatcagtacaacacattgtaaagtgggctctgttgtgtctgttggctggctccggtccaagaaggctgttgactggcgtctctttcgtaacatttttatggcctggtttgtcacagtccccatttctggagttatcagtgctgccatcatggcaatcttcagatatgtcatcctcagaatgtgaagctgtttgagattaaaatttgtgtcaatgtttgggaccatcttaggtattcctgctcccctgaagaatgattacagtgttaacagaagactgacaagagtctttttatttgggagccagaggagggaagtgttacttgtgctataactgcttttgtgctaaatatgaattgtctcaaaattagctgtgtaaaatagcccgggttccactggctcctgctgaggtcccctttccttctgggctgtgaattcctgtacatatttctctactttttgtatcaggcttcaattccattatgttttaatgttgtctctgaagatgacttgtgatttttttttcttttttttaaaccatgaagagccgtttgacagagcatgctctgcgttgttggtttcaccagcttctgccctcacatgcacagggatttaacaacaaaaatataactacaacttcccttgtagtctcttatataagtagagtccttggtactctgccctcctgtcagtagtggcaggatctattggcatattcgggagcttcttagagggatgaggttctttgaacacagtgaaaatttaaattagtaacttttttgcaagcagtttattgactgttattgctaagaagaagtaagaaagaaaaagcctgttggcaatcttggttatttctttaagatttctggcagtgtgggatggatgaatgaagtggaatgtgaactttgggcaagttaagtgggacagccttccatgttcatttgtctacctcttaactgaataaaaaagcctacagtttttagaaaa

SEQ ID NO: 19341 - DNA, 4720 bp, Homo sapiens
  source 1..4720: mol_type = unassigned DNA
gccgccagcgcttccatccccgccccggcgggtccaagccggtgccgggcgcccaggggttgccgcgctgggcgggagggcagcgcctgagagggcggtggggtggcggggttcctgcgcgcggcccgccatggaggtggaggaggcgttccaggcggtgggggagatgggcatctaccagatgtacttgtgcttcctgctggccgtgctgctgcagctctacgtggccacggaggccatcctcattgcactggttggggccacgccatcctaccactgggacctggcagagctcctgccaaatcagagccacggtaaccagtcagctggtgaagaccaggcctttggggactggctcctgacagccaacggcagtgagatccataagcacgtgcatttcagcagcagcttcacctccatcgcctcggagtggtttttaattgccaacagatcctacaaagtcagtgcagcaagctcttttttcttcagtggtgtatttgttggagttatctcttttggtcagctttcagatcgcttcggaaggaaaaaagtctatctcacaggttttgctcttgacatcttatttgcaattgcaaatggattttccccctcatatgagttctttgcagtaactcgcttcctggtgggcatgatgaatggagggatgtcgctggtggcctttgtcttgcttaatgaatgtgtgggcaccgcctactgggcacttgcaggatcgattggcggcctgttctttgcagttggcattgcccaatatgccctgttaggatacttcatccgctcctggaggaccctagccattctggttaacctgcagggaacggtggtctttctcttatctttattcattcctgaatcacctcgttggttatactcccagggtcgactgagtgaggctgaagaggcgctgtacctcattgccaagaggaaccgcaaactcaagtgcacgttctcactaacacacccagccaacaggagctgcagggagactggaagtttcctggatctctttcgttaccgggtcctgttaggacacactttgatcctgatgttcatctggtttgtgtgcagcttggtgtattatggcctaactctgagtgcgggtgatctaggtggaagtatttatgccaacctggccctgtctggcctcatagagattccatcttaccctctctgtatctacttgattaaccaaaaatggtttggtcggaagcgaacattatcagcatttctgtgcctaggaggactggcttgtcttattgtaatgtttcttccagaaaagaaagacacaggtgtgtttgcagtggtgaacagccattccttgtccttgctggggaagctgaccatcagtgctgcctttaacattgtttatatctacacctctgagctttaccctacagtcatcaggaatgttgggcttggaacttgttccatgttctcccgagttggtgggattattgctcccttcatcccctcactgaaatatgtgcaatggtctttaccattcattgtcttcggagccacgggtctgacctccggcctcctgagtttgttattgccggagacccttaacagtccgctgctagaaacattctccgaccttcaggtgtattcgtatcgcaggctgggagaagaagcattatctttacaggctttggacccccaacagtgtgtggacaaggagagctctttagggagtgagagtgaggaagaggaagaattttatgatgcagatgaagagactcagatgatcaagtgaagagccccagattccccctaagaagcaaaggatcgtcttttatgcctctggctaaggcaggttcttccatgactcctaagagagttgtaaaaatagaggcttggcttgaatgtacatagatggtacctggcatggactgatgtttttaggcacagaagttggagaagagatttcatgaaagacaacatcactgcattgagagaatagttgttaatttgtttagaatttaagttctactcagaatcataacatctggcagaacagcccaaacccacattccaaagtggtaggctcatttgtttctagagatttcatcatgtcgcttttccttcatcatgatctaaataaaggcagatatgtaaaatttctcaccattttggtggggtaagataagctattattaagatttaatccttataccatgttggacatttgcccctatcagttgctcctcaggaatcttctggtacaggttaacatcagcattttcattttgtgtccagggaaaagcacccagaggtcatctgtgtgtcccgagaccctccagctttttcttagctgatgaaatatgagtcctcagcttggttcccagcctgctgattgacttgggctgctggtgccttgagtcccacagatgattcattaggaaaagccagatataccaaagcggtttactcagagtcaggggtgtagctctggctgcctgtcagctcccttggatactatattgtatgatttcttcctttcccactaatatgcacatccagaaaaatttccatctgagattctagtacttcaaaatcatgcatagtaaatgagaaagctttaagtagagggcagttaaacagtgacatgttgagcacctggaggaaaaaaaaggtgcagtttttaataagagagaaaatgaaattatctttgataaatttttgtttgttttgctttcagcattgtgccatgagggatttggacaatatttaagaacttcttgtcctagatcagccccaatctgtttaatcaaaatggaaggttcagtaatttcatgggaaaccttggtttttcattaagtgctaccaactttcaagtgaatcttgtatttgatttcctaaaatcatgtcttgaaaacatgttttctcatgaaacttgaatactatctcaaataggaatataaacctggagtcaacaagcttaggcagcattgatttaggtcactttcccagtgaggaaaatttctgtgttttcagaatttccatttctactaacctcttggagaaaaagaaattgaattagaggtaaatagaagacgtcactgtggctgcttctggaagtgctggaagcatcaccccaattggctccaaatactgtcatgttttcttgcacactgacttctggtttccactgtatcagtatgtacctttgtaattgttatttttatgtcttttatgcccttgattattagttgggctcttcataaacagaggccatctctactactgtttatttttccctgctgtgcccagaacattggcgtagacacagtaagaacctagtaaatattactgtttctagccatcagggagattgtggaactcctcccagtataatttttacaaactccaagcaaatctgacccaaactcccaaattgtcaagtcctgcttaactttctctggaaaatagaccccttctcaacatcagaataggaagagaggaagaacttacaaagacacttaaaagttattcttaaatggtggttgggcatttaaaacagtgaactaacatatatataatttttgattagttggagctttctttgtattataagagtaatatatctcattacagaaaatttggaaactataaatttagaaacgtatcacccatacgtccaacatcgaaagaaaaccagtgttatgactttgttccatttgaagactaattgggagtccatctctctattggcactgggttcgattgcctctggctaatagagttcaattagttctatccctgggtttcctttcttagctatggggtggaagataggagggggagatctacaatttgaatatgtgttacttaataaggctaggctggccatcagttgcttatttcagatgtgtcactaaattttccttctagatggtccttgagcaaaacttaataattactgttttttatttccactgcctttataaaatcaaaattttctccttttgataaaaactgttgaatactattgatgtagagaatgtgtatatgtgtatatttgcattgattaaattattggaaaacttttcattgacaggtaatgtattttggttgtgcggatggtttgtaaaaagtatcctgtttttttaattctattcaaaattaaaaattttttttcctaaaataaagcaagaaaaataaatgtaagatatataagaaaccccagagtttccagggtgaaagttcacattagcagcttgtccaaaatatttacacctcacaaatattttgaaagaaaccatgttgaaattttctgattttgtgagttacaaccacagcccagtaaaaccaatacttgttatttggctactttcaagcaatgcagatattctttagtatttaaaaatgagcaaataaacaaaatgaggcaaataaatgaagaaaatgagtttctgagacactgtttaggtaaccataaatcagacagatatttttatggtgggcaaattgatgaagatacttttagtaggtgatttatattcataacaaatacatattgaaataattgtcactactgtatcagaattaaaaaccagcttcacattaggacttctccatacaaatgctttatcattggttcttaaattggaaaaatatctataaatgattacatttttaagctaaataaaatgcagatattttggcttcttgtgaatgtaataaagaatcataaaacata

SEQ ID NO: 19342 - DNA, 1230 bp, Homo sapiens
  source 1..1230: mol_type = unassigned DNA
gcgcgcggcccgccatggaggtggaggaggcgttccaggcggtgggggagatgggcatctaccagatgtacttgtgcttcctgctggccgtgctgctgcagctctacgtggccacggaggccatcctcattgcactggttggggccacgccatcctaccactgggacctggcagagctcctgccaaatcagagccacggtaaccagtcagctggtgaagaccaggcctttggggactggctcctgacagccaacggcagtgagatccataagcacgtgcatttcagcagcagcttcacctccatcgcctcggagtggtttttaattgccaacagatcctacaaagtcagtgcagcaagctcttttttcttcagtggtgtatttgttggagttatctcttttggtcagctttcagatcgcttcggaaggaaaaaagtctatctcacaggttttgctcttgacatcttatttgcaattgcaaatggattttccccctcatatgagttctttgcagtaactcgcttcctggtgggcatgatgaatggagggatgtcgctggtggcctttgtcttgcttaatgaatgtgtgggcaccgcctactgggcacttgcaggatcgattggcggcctgttctttgcagttggcattgcccaatatgccctgttaggatacttcatccgctcctggaggaccctagccattctggttaacctgcagggaacggtggtctttctcttatctttggtcgactgagtgaggctgaagaggcgctgtacctcattgccaagaggaaccgcaaactcaagtgcacgttctcactaacacacccagccaacaggagctgcagggagactggaagtttcctggatctctttcgttaccgggtcctgttaggacacactttgatcctgatgttcatctggtaattatactaaggcgtgttctgttgctctttaactaaggttgctcgagcttctcttgatatcctgctccttcttcagggtacagggaattttacctcttttgttagcttgaggttgttttctcaacagcaagtctcctgatccttagcgcctggttttctgcttgcgcagccccgtctttctcaagtagcagatgatagtgcctgatgggcaggtccactgagcttgagtaagtagacatcagaagcacatctttgcttttgaggtatttatcataaatatttaagccttcctgccccttcccctgc

SEQ ID NO: 19343 - DNA, 490 bp, Homo sapiens
  source 1..490: mol_type = unassigned DNA
gcataataaatgttgaggcttggaggcatggagattaagaaaaccgttgaaagccaaacctgacaacacaacataggagctgctaatttgaggttctacccattcaaaagcaaatacttacaaagtttgtgtgcagcttggtgtattatggcctaactctgagtgcgggtgatctaggtggaagtatttatgccaacctggccctgtctggcctcatagagattccatcttaccctctctgtatctacttgattaaccaaaaatggtttggtcggaagcgaacattatcagcatttctgtgcctaggaggactggcttgtcttattgtaatgtttcttccagaaaagaaaggtatgcctttcaaatttctacaagggttttgaacagtactttcattacaatgaatcataatatagtggagagatgaccatatggcatgcttcatttctgtgattgcatattgtttagcaattgtgtgggatataatggg

SEQ ID NO: 19344 - DNA, 6641 bp, Homo sapiens
  source 1..6641: mol_type = unassigned DNA
ggaggcgcccgaagtcggagaaatacagcgcggccaccccgggagcagcagcctttgcccgcaccgccgcccgcagggccctgaaccgccggcaagggcgcgggccgggcgcggcgccggctcctcctcctgccgcgtccggcgcggagcagcggagagcggcgggctcggcagccggcgcccgggccgcggaactgatgagccgcggcggctgagggcccggccggcctctgcccgcctctgcccggcgcccgagcggggccgcagcgcccggggcgcggggtccggcgggtgacatgggggcggcctgacgcacccggagccgccgagcgctctctctcgagccgcgggccctcctcggcggcagcggctgcaggcgcctggcccggcgcgctgtgcccggggcgcccgcggagcctccgccgcgctctatgcgcctctgcgggagccgcgggcccgggccatggccatagaccggcggcgcgaggcggcgggcggcgggcctgggcggcagccggccccggccgaggagaacggctccctgccgcccggggacgcggcggcctcggcgcccctcgggggacgcgcgggccccggcggcggcgcggagatccagccgctgcccccactgcatcctggaggcggcccgcacccgagctgctgctccgcggctgcggccccgagcctcttgttgctggactatgacgggtcggtgctgcccttcctcgggggcctgggcgggggctatcagaagaccctcgtgctgctcacctggatcccggcgctgttcatcggcttcagccagttctcggactcgttcctcctggaccagcccaacttctggtgccgcggggccggcaaaggcaccgagctggcaggggtcaccaccacaggccggggcggggacatgggcaactggaccagcctccccaccacccccttcgccactgccccctgggaggctgcgggcaaccggagcaacagcagcggcgcggacggaggcgacacaccacccctgccatcccctccggacaagggggacaacgcctccaactgtgactgccgcgcatgggactacggcatccgcgccggcctcgtccagaacgtggtcagcaagtgggatcttgtgtgtgataatgcctggaaggtccatatcgctaagttctccttactggttggattaatctttggctacctaataactggatgcattgctgactgggtcggccggcggcctgtgctgctgttttccatcatcttcattctgatctttggactgactgtggcactgtcagtgaatgtgacaatgttcagcacactcaggttctttgaaggattttgcctggctggaatcattctcaccttgtatgctttacgaatagagctgtgcccccctggaaaacggttcatgattacgatggtggcgagcttcgtggccatggcgggccagttcctcatgcctgggctagccgccctgtgccgggattggcaggtgctgcaggccctcatcatctgccccttcctgctcatgctgctctactggtcgatattccccgagtccctccggtggctaatggccacccagcagtttgagtctgcaaagaggctgatcctccacttcacacagaagaatcgcatgaaccctgagggcgacatcaagggtgtgataccagagctggagaaagagctttcccggaggcccaagaaggtctgcatcgtgaaggtggtggggacacggaacctgtggaagaacattgtggtcctgtgtgtgaactcgctgacggggtacgggatccaccactgctttgccaggagcatgatgggccacgaggtgaaggtgccgctcctggagaacttctatgctgactactataccacggccagcatcgcgctggtgtcctgcctggccatgtgcgtggtggtccgattcctcgggcgcaggggagggctgctgctcttcatgatcctcaccgccctggcctcactcctgcagctcggcctcctcaacctgattggaaagtacagccagcacccagactcagaactgcagctgaagttggccgtagggatgagtgacagcgtcaaggacaaattttccatcgcgttttccatcgtgggcatgtttgcctcccatgcggtggggagcctcagcgtgttcttctgtgcggagatcaccccgacggtgataaggtgtggcgggctggggctggtgctggccagcgcgggcttcggcatgctgacggcacccatcatcgagctgcacaaccagaaaggctacttcctgcaccacatcatctttgcctgctgcacgctcatctgcatcatctgcatcctcctgctgcccgagagcagggaccagaacctgcctgagaacatttctaacggggagcactacacgcgccagccgctgctgccgcacaagaagggggagcagccactgctgctcaccaacgccgagctcaaggactactcgggcctccacgatgccgcagccgcgggtgacacactgcccgagggtgccacggccaacggcatgaaggccatgtagcccggcctgcggaacccggggctccagggtctggggcagcttgggcacaggtttacagaccagggaccgaacacgcagccaggggtgggaaagctgcctcagccaagctgagcctctcaactggtgtggggaaatcctgtctttccaaaagtccaaggagcgcgggtcggaggagacaaactctttggaaataaccctttcaagactttcttttctgccgttaaatgtgtgtatttattttggtcatttttacgagaagcactttattccctctccctctcactgatcacaaatggaatcacctccctgggcagcgagacgcagttgctctgggaagatgccacagtgaccagggccatggccggtccctctggggagatgggacacggctcctggcagcacccaggagccccccaggctgcctgcctgcgtgcagaggcaggagaggaccgtggagcgtttccgggactgcattttagacggagtgaaatgtacatgaatttggcttttgctagagtctgtgtatggttttttaaggtcctttttccctttctgtttgtaaggtaagagcttctgttcgtgtgcagggaaagcagctcacagacgccgttaaaaccagcttcatctttccttcaggatcatccttttgtacttgatgctggaagctcttggagaaaaagcttaaacatttcaccagaaatcttaattgagcagcagtcatatcgccacagctttgtgagtacacagctaacagatgcgtcgagacctgagatgtgctcgtttttattcctcctctcccagattggctccagcagaaaagtccctcgtgcacaggcagctcttgtgccggcactacttgaaaacatggctactttctaagctacaaaccattagaaaataactcaaaaagatggcagaggcaaatccacagaaggggggctgccctccacacacacacgcccgtcacccacaccttgagcacacaccatgaagatcaccagcttggatggccgtcacctcagacatcactccagggagcacccgcaggagctgggccccctcacgcctgccttcctgggccagcttcctgcttgcagtcactcgcatagcacagaggtggggcttcgggcagggagcggagattcctcataggtgagtccaaatgacctccagcctctcgaaggcatcaagacaaattgaaagaaagcaataactcaccaaagctcaacgctgcccctgcctcgacctccatgggtctcttcgtgttcctcgtttcaccccagaaagtggaggtttcctcttggcattttcggaggaaacttgtaggacacccaaggcgactaagagacagcctccttggcaagggcaggcaccactttgtagcaacttgggcaccagcttttctggacagcctggcttcttactggcattgtccaactcatcccttctcgaagcatgtctttgccatgggctgtgtccttccagggaaattgtggtctcgggcctgggtgagacaatgaagtgacttccaaccgacagttgctagaattcacagggcagaaaaggggttgaccttctccccttctggctttccacccggcctgctgcttgctgtcgccactcatgtctcctccacatgcggtccacacatcagtaagggcctggagatgtgtaaagacacagcaaggggcaagcagactcttggccacgtgtttccagtggctggaccacgccgacacctgggatcttgagatacccaggaagggaggctgtctggccagcctctccctgcctccacttgctccacgtccagctcctcaccttccctcttttttaaagtcacatttccatgtttcaacattagtttgcattcacctttacaaaggcctttctttagatctgtgcagcctttgcgtgccaaacttgtgaaattccttttaccttttttggagtacttgctataaagccacctgtcaacaaacccccattatgtacagaataggacctatccagtagccaggccagtaggcagttggggaaggtgggaaggatccagcgaggcccctgagcctgcacctggacaggtgtacgtctgcacccatcaccctcagcaccaggccaccctgcagtccacttactgtactgtgttgtggaaggatatgctaagtgatgaaagttgcgagcagtctcactggtcgtgtaaacttttttttttttttggaaattgaagctgtagagtgctgcccgaaatctctaggaagttggtggcaagggacagcactcacactcttctggtcatgatctctgatctccacctcaaatgacaataaaaaactggtccaacgaagacactgctcagcacttcagccatcaggactaatccatcgatgactggaaaagaggctagctttgaggaaaacagcctgggctcttgggagcagagtccagtgggtgtgaggctgacttgccgacggtcggcaggtaatggctctcagccggcgaggcggtcccacagctctcctcccagggcagcctgaggaggaggaggccgggtgcctgtttggtggcagcttcagcctagggatacctgaagctgttgagcaacacctttatgaaatgttgccagagcagcaacacttccctgtgggcacagccccgggaaatccggtaccaagtgagcaaggtggcaggacccacccaagcctgatacgcatctgggcccgccgggctcagcaggggaggctgctacggctgcccacttcccagcaccgtctgtcacgcttgaacccctctgtgctgttcccttcctggctaatagggagacccttcgcaggcacccactgtttcaacttgaccctcccaccccctgctactctcctccacacacccctccgttccgctagcctaccctgtcagcctttcaataaaagttatgcacaaatgtgaacacctgagatggagctgaacatttcttcactttgttctttttctgaagtcaaactcttatcaaatgccctaaaattattaccacccaagagaaacaggaaaaaggttacatgtttttgtttactgagagtaagatcacctgcatctggaagacgggctggtaaattggtttggctacagaacagaaagaaaacaaaaacaaacctcgtaagggaagtatcacactcagacaccaccgcttcctagagccaaatgagcaatcccaaactgcaagtgccataagtgggcctgtgaggtcacaccgcccggcccgaggtatcgcatgtgcgggggaggtccacactacagctgtcctctcgtctagaaggcaccacctcgctttcatgtcccgtgtgttttggaaaagcagtatggtgtgtcatgtctagcggcgaacacttccctccctgtccttgaggttgtaatataaaaactgtgtttctgtacgtgtgggtgggaattctctgacggtgctcgttcatagcacaagcttacgctgagttctgaactgtcgttcacagctgcgtgtctgcatggtgtcgcatctgttgtacctttggggaaaatttgtatgtaaatgtacagaaataaaaacgttgccccattaacagatttcctctggaatgtcttccctacctcacctgatggtatccaccgaagggcatttcactaccattaatggtgagtaataaaatcctccgtgttcattcagacctcactgcgtcactactttgaacgcctctgtaagctgtgtcttcactcgccccgaggtgggtggagggaggcctctcactctgcttcgagtcctggtcttaaaggtagtcagaggcagaggctggattaaacacacactgtttaccaagtgccactctcagaccacctgagagacgggggccatcagtaaaattaagaggaatttttttcccttgttcgtgtatgttctgctgatccgtggcctgaaggttcctagagacgtcaagaaatgaatatcttacactgtgattctgtgaggaaagactggtaacccaaaactctcttctctaatgtattttttaacgaaaatgacaatatttctttaataaagtatttataccaaactcttctctcc

SEQ ID NO: 19345 - DNA, 5658 bp, Homo sapiens
  source 1..5658: mol_type = unassigned DNA
atggccatagaccggcggcgcgaggcggcgggcggcgggcctgggcggcagccggccccggccgaggagaacggctccctgccgcccggggacgcggcggcctcggcgcccctcgggggacgcgcgggccccggcggcggcgcggagatccagccgctgcccccactgcatcctggaggcggcccgcacccgagctgctgctccgcggctgcggccccgagcctcttgttgctggactatgacgggtcggtgctgcccttcctcgggggcctgggcgggggctatcagaagaccctcgtgctgctcacctggatcccggcgctgttcatcggcttcagccagttctcggactcgttcctcctggaccagcccaacttctggtgccgcggggccggcaaaggcaccgagctggcaggggtcaccaccacaggccggggcggggacatgggcaactggaccagcctccccaccacccccttcgccactgccccctgggaggctgcgggcaaccggagcaacagcagcggcgcggacggaggcgacacaccacccctgccatcccctccggacaagggggacaacgcctccaactgtgactgccgcgcatgggactacggcatccgcgccggcctcgtccagaacgtggtcagcaagtgggatcttgtgtgtgataatgcctggaaggtccatatcgctaagttctccttactggttggattaatctttggctacctaataactggatgcattgctgactgggtcggccggcggcctgtgctgctgttttccatcatcttcattctgatctttggactgactgtggcactgtcagtgaatgtgacaatgttcagcacactcaggttctttgaaggattttgcctggctggaatcattctcaccttgtatgctttacgaatagagctgtgcccccctggaaaacggttcatgattacgatggtggcgagcttcgtggccatggcgggccagttcctcatgcctgggctagccgccctgtgccgggattggcaggtgctgcaggccctcatcatctgccccttcctgctcatgctgctctactggtcgatattccccgagtccctccggtggctaatggccacccagcagtttgagtctgcaaagaggctgatcctccacttcacacagaagaatcgcatgaaccctgagggcgacatcaagggtgtgataccagagctggagaaagagctttcccggaggcccaagaaggtctgcatcgtgaaggtggtggggacacggaacctgtggaagaacattgtggtcctgtgtgtgaactcgctgacggggtacgggatccaccactgctttgccaggagcatgatgggccacgaggtgaaggtgccgctcctggagaacttctatgctgactactataccacggccagcatcgcgctggtgtcctgcctggccatgtgcgtggtggtccgattcctcgggcgcaggggagggctgctgctcttcatgatcctcaccgccctggcctcactcctgcagctcggcctcctcaacctgattggaaagtacagccagcacccagactcagggatgagtgacagcgtcaaggacaaattttccatcgcgttttccatcgtgggcatgtttgcctcccatgcggtggggagcctcagcgtgttcttctgtgcggagatcaccccgacggtgataaggtgtggcgggctggggctggtgctggccagcgcgggcttcggcatgctgacggcacccatcatcgagctgcacaaccagaaaggctacttcctgcaccacatcatctttgcctgctgcacgctcatctgcatcatctgcatcctcctgctgcccgagagcagggaccagaacctgcctgagaacatttctaacggggagcactacacgcgccagccgctgctgccgcacaagaagggggagcagccactgctgctcaccaacgccgagctcaaggactactcgggcctccacgatgccgcagccgcgggtgacacactgcccgagggtgccacggccaacggcatgaaggccatgtagcccggcctgcggaacccggggctccagggtctggggcagcttgggcacaggtttacagaccagggaccgaacacgcagccaggggtgggaaagctgcctcagccaagctgagcctctcaactggtgtggggaaatcctgtctttccaaaagtccaaggagcgcgggtcggaggagacaaactctttggaaataaccctttcaagactttcttttctgccgttaaatgtgtgtatttattttggtcatttttacgagaagcactttattccctctccctctcactgatcacaaatggaatcacctccctgggcagcgagacgcagttgctctgggaagatgccacagtgaccagggccatggccggtccctctggggagatgggacacggctcctggcagcacccaggagccccccaggctgcctgcctgcgtgcagaggcaggagaggaccgtggagcgtttccgggactgcattttagacggagtgaaatgtacatgaatttggcttttgctagagtctgtgtatggttttttaaggtcctttttccctttctgtttgtaaggtaagagcttctgttcgtgtgcagggaaagcagctcacagacgccgttaaaaccagcttcatctttccttcaggatcatccttttgtacttgatgctggaagctcttggagaaaaagcttaaacatttcaccagaaatcttaattgagcagcagtcatatcgccacagctttgtgagtacacagctaacagatgcgtcgagacctgagatgtgctcgtttttattcctcctctcccagattggctccagcagaaaagtccctcgtgcacaggcagctcttgtgccggcactacttgaaaacatggctactttctaagctacaaaccattagaaaataactcaaaaagatggcagaggcaaatccacagaaggggggctgccctccacacacacacgcccgtcacccacaccttgagcacacaccatgaagatcaccagcttggatggccgtcacctcagacatcactccagggagcacccgcaggagctgggccccctcacgcctgccttcctgggccagcttcctgcttgcagtcactcgcatagcacagaggtggggcttcgggcagggagcggagattcctcataggtgagtccaaatgacctccagcctctcgaaggcatcaagacaaattgaaagaaagcaataactcaccaaagctcaacgctgcccctgcctcgacctccatgggtctcttcgtgttcctcgtttcaccccagaaagtggaggtttcctcttggcattttcggaggaaacttgtaggacacccaaggcgactaagagacagcctccttggcaagggcaggcaccactttgtagcaacttgggcaccagcttttctggacagcctggcttcttactggcattgtccaactcatcccttctcgaagcatgtctttgccatgggctgtgtccttccagggaaattgtggtctcgggcctgggtgagacaatgaagtgacttccaaccgacagttgctagaattcacagggcagaaaaggggttgaccttctccccttctggctttccacccggcctgctgcttgctgtcgccactcatgtctcctccacatgcggtccacacatcagtaagggcctggagatgtgtaaagacacagcaaggggcaagcagactcttggccacgtgtttccagtggctggaccacgccgacacctgggatcttgagatacccaggaagggaggctgtctggccagcctctccctgcctccacttgctccacgtccagctcctcaccttccctcttttttaaagtcacatttccatgtttcaacattagtttgcattcacctttacaaaggcctttctttagatctgtgcagcctttgcgtgccaaacttgtgaaattccttttaccttttttggagtacttgctataaagccacctgtcaacaaacccccattatgtacagaataggacctatccagtagccaggccagtaggcagttggggaaggtgggaaggatccagcgaggcccctgagcctgcacctggacaggtgtacgtctgcacccatcaccctcagcaccaggccaccctgcagtccacttactgtactgtgttgtggaaggatatgctaagtgatgaaagttgcgagcagtctcactggtcgtgtaaacttttttttttttttggaaattgaagctgtagagtgctgcccgaaatctctaggaagttggtggcaagggacagcactcacactcttctggtcatgatctctgatctccacctcaaatgacaataaaaaactggtccaacgaagacactgctcagcacttcagccatcaggactaatccatcgatgactggaaaagaggctagctttgaggaaaacagcctgggctcttgggagcagagtccagtgggtgtgaggctgacttgccgacggtcggcaggtaatggctctcagccggcgaggcggtcccacagctctcctcccagggcagcctgaggaggaggaggccgggtgcctgtttggtggcagcttcagcctagggatacctgaagctgttgagcaacacctttatgaaatgttgccagagcagcaacacttccctgtgggcacagccccgggaaatccggtaccaagtgagcaaggtggcaggacccacccaagcctgatacgcatctgggcccgccgggctcagcaggggaggctgctacggctgcccacttcccagcaccgtctgtcacgcttgaacccctctgtgctgttcccttcctggctaatagggagacccttcgcaggcacccactgtttcaacttgaccctcccaccccctgctactctcctccacacacccctccgttccgctagcctaccctgtcagcctttcaataaaagttatgcacaaatgtgaacacctgagatggagctgaacatttcttcactttgttctttttctgaagtcaaactcttatcaaatgccctaaaattattaccacccaagagaaacaggaaaaaggttacatgtttttgtttactgagagtaagatcacctgcatctggaagacgggctggtaaattggtttggctacagaacagaaagaaaacaaaaacaaacctcgtaagggaagtatcacactcagacaccaccgcttcctagagccaaatgagcaatcccaaactgcaagtgccataagtgggcctgtgaggtcacaccgcccggcccgaggtatcgcatgtgcgggggaggtccacactacagctgtcctctcgtctagaaggcaccacctcgctttcatgtcccgtgtgttttggaaaagcagtatggtgtgtcatgtctagcggcgaacacttccctccctgtccttgaggttgtaatataaaaactgtgtttctgtacgtgtgggtgggaattctctgacggtgctcgttcatagcacaagcttacgctgagttctgaactgtcgttcacagctgcgtgtctgcatggtgtcgcatctgttgtacctttggggaaaatttgtatgtaaatgtacagaaataaaaacgttgccccattaacaga

SEQ ID NO: 19346 - DNA, 2555 bp, Homo sapiens
  source 1..2555: mol_type = unassigned DNA
cttggtggggtgaggacgaccgggatgagtcgtctgagaagcactttgaggggggaggagctgaaggccacacctggaagggcgatttattccttgggcgctgccaggtgtctgccgccttcacccagaaaccgatgatgttcggagccagtgggatcttgtgtgtgataatgcctggaaggtccatatcgctaagttctccttactggttggattaatctttggctacctaataactggatgcattgctgactgggtcggccggcggcctgtgctgctgttttccatcatcttcattctgatctttggactgactgtggcactgtcagtgaatgtgacaatgttcagcacactcaggttctttgaaggattttgcctggctggaatcattctcaccttgtatgctttacgaatagagctgtgcccccctggaaaacggttcatgattacgatggtggcgagcttcgtggccatggcgggccagttcctcatgcctgggctagccgccctgtgccgggattggcaggtgctgcaggccctcatcatctgccccttcctgctcatgctgctctactggtcgtattacctgtggctgctttctggctattcacagagttgagtggatgcagcaggatattccccgagtccctccggtggctaatggccacccagcagtttgagtctgcaaagaggctgatcctccacttcacacagaagaatcgcatgaaccctgagggcgacatcaagggtgtgataccagagctggagaaagagctttcccggaggcccaagaaggtctgcatcgtgaaggtggtggggacacggaacctgtggaagaacattgtggtcctgtgtgtgaactcgctgacggggtacgggatccaccactgctttgccaggagcatgatgggccacgaggtgaaggtgccgctcctggagaacttctatgctgactactataccacggccagcatcgcgctggtgtcctgcctggccatgtgcgtggtggtccgattcctcgggcgcaggggagggctgctgctcttcatgatcctcaccgccctggcctcactcctgcagctcggcctcctcaacctgattggaaagtacagccagcacccagactcagggatgagtgacagcgtcaaggacaaattttccatcgcgttttccatcgtgggcatgtttgcctcccatgcggtggggagcctcagcgtgttcttctgtgcggagatcaccccgacggtgataaggtgtggcgggctggggctggtgctggccagcgcgggcttcggcatgctgacggcacccatcatcgagctgcacaaccagaaaggctacttcctgcaccacatcatctttgcctgctgcacgctcatctgcatcatctgcatcctcctgctgcccgagagcagggaccagaacctgcctgagaacatttctaacggggagcactacacgcgccagccgctgctgccgcacaagaagggggagcagccactgctgctcaccaacgccgagctcaaggactactcgggcctccacgatgccgcagccgcgggtgacacactgcccgagggtgccacggccaacggcatgaaggccatgtagcccggcctgcggaacccggggctccagggtctggggcagcttgggcacaggtttacagaccagggaccgaacacgcagccaggggtgggaaagctgcctcagccaagctgagcctctcaactggtgtggggaaatcctgtctttccaaaagtccaaggagcgcgggtcggaggagacaaactctttggaaataaccctttcaagactttcttttctgccgttaaatgtaagagcttctgttcgtgtgcagggaaagcagctcacagacgccgttaaaaccagcttcatctttccttcaggatcatccttttgtacttgatgctggaagctcttggagaaaaagcttaaacatttcaccagaaatcttaattgagcagcagtcatatcgccacagctttgtgagtacacagctaacagatgcgtcgagacctgagatgtgctcgtttttattcctcctctcccagattggctccagcagaaaagtccctcgtgcacaggcagctcttgtgccggcactacttgaaaacatggctactttctaagctacaaaccattagaaaataactcaaaaagatggcagaggcaaatccacagaaggggggctgccctccacacacacacgcccgtcacccacaccttgagcacacaccatgaagatcaccagcttggatggccgtcacctcagacatcactccagggagcacccgcaggagctgggccccctcacgcctgccttcctgggccagcttcctgcttgcagtcactcgcatagcacagaggtggggcttcgggcagggagcggagattcctcataggtgagtccaaatgacctccagcctctcgaaggcatcaagacaaattgaaagaaagcaataactcaccaaagctcaacgctgcccctgcctcgacctccatgggtctcttcgtgttcctcgtttcacccc

SEQ ID NO: 19347 - DNA, 2883 bp, Homo sapiens
  source 1..2883: mol_type = unassigned DNA
aaacagcccccaccctggaagcctcaggtgccttccttcctccccttggtggggtgaggacgaccgggatgagtcgtctgagaagcactttgaggggggaggagctgaaggccacacctggaagggcgatttattccttgggcgctgccaggtgtctgccgccttcacccagaaaccgatgatgttcggagccagtgggatcttgtgtgtgataatgcctggaaggtccatatcgctaagttctccttactggttggattaatctttggctacctaataactggatgcattgctgactgggtcggccggcggcctgtgctgctgttttccatcatcttcattctgatctttggactgactgtggcactgtcagtgaatgtgacaatgttcagcacactcaggttctttgaaggattttgcctggctggaatcattctcaccttgtatgctttacgaatagagctgtgcccccctggaaaacggttcatgattacgatggtggcgagcttcgtggccatggcgggccagttcctcatgcctgggctagccgccctgtgccgggattggcaggtgctgcaggccctcatcatctgccccttcctgctcatgctgctctactggtcgatattccccgagtccctccggtggctaatggccacccagcagtttgagtctgcaaagaggctgatcctccacttcacacagaagaatcgcatgaaccctgagggcgacatcaagggtgtgataccagagctggagaaagagctttcccggaggcccaagaaggtctgcatcgtgaaggtggtggggacacggaacctgtggaagaacattgtggtcctgtgtgtgaactcgctgacggggtacgggatccaccactgctttgccaggagcatgatgggccacgaggtgaaggtgccgctcctggagaacttctatgctgactactataccacggccagcatcgcgctggtgtcctgcctggccatgtgcgtggtggtccgattcctcgggcgcaggggagggctgctgctcttcatgatcctcaccgccctggcctcactcctgcagctcggcctcctcaacctgattggaaagtacagccagcacccagactcagggatgagtgacagcgtcaaggacaaattttccatcgcgttttccatcgtgggcatgtttgcctcccatgcggtggggagcctcagcgtgttcttctgtgcggagatcaccccgacggtgataaggtgtggcgggctggggctggtgctggccagcgcgggcttcggcatgctgacggcacccatcatcgagctgcacaaccagaaaggctacttcctgcaccacatcatctttgcctgctgcacgctcatctgcatcatctgcatcctcctgctgcccgagagcagggaccagaacctgcctgagaacatttctaacggggagcactacacgcgccagccgctgctgccgcacaagaagggggagcagccactgctgctcaccaacgccgagctcaaggactactcgggcctccacgatgccgcagccgcgggtgacacactgcccgagggtgccacggccaacggcatgaaggccatgtagcccggcctgcggaacccggggctccagggtctggggcagcttgggcacaggtttacagaccagggaccgaacacgcagccaggggtgggaaagctgcctcagccaagctgagcctctcaactggtgtggggaaatcctgtctttccaaaagtccaaggagcgcgggtcggaggagacaaactctttggaaataaccctttcaagactttcttttctgccgttaaatgtgtgtatttattttggtcatttttacgagaagcactttattccctctccctctcactgatcacaaatggaatcacctccctgggcagcgagacgcagttgctctgggaagatgccacagtgaccagggccatggccggtccctctggggagatgggacacggctcctggcagcacccaggagccccccaggctgcctgcctgcgtgcagaggcaggagaggaccgtggagcgtttccgggactgcattttagacggagtgaaatgtacatgaatttggcttttgctagagtctgtgtatggttttttaaggtcctttttccctttctgtttgtaaggtaagagcttctgttcgtgtgcagggaaagcagctcacagacgccgttaaaaccagcttcatctttccttcaggatcatccttttgtacttgatgctggaagctcttggagaaaaagcttaaacatttcaccagaaatcttaattgagcagcagtcatatcgccacagctttgtgagtacacagctaacagatgcgtcgagacctgagatgtgctcgtttttattcctcctctcccagattggctccagcagaaaagtccctcgtgcacaggcagctcttgtgccggcactacttgaaaacatggctactttctaagctacaaaccattagaaaataactcaaaaagatggcagaggcaaatccacagaaggggggctgccctccacacacacacgcccgtcacccacaccttgagcacacaccatgaagatcaccagcttggatggccgtcacctcagacatcactccagggagcacccgcaggagctgggccccctcacgcctgccttcctgggccagcttcctgcttgcagtcactcgcatagcacagaggtggggcttcgggcagggagcggagattcctcataggtgagtccaaatgacctccagcctctcgaaggcatcaagacaaattgaaagaaagcaataactcaccaaagctcaacgctgcccctgcctcgacctccatgggtctcttcgtgttcctcgtttcacccc

SEQ ID NO: 19348 - DNA, 2043 bp, Homo sapiens
  source 1..2043: mol_type = unassigned DNA
gccttccttcctccccttggtggggtgaggacgaccgggatgagtcgtctgagaagcactttgaggggggaggagctgaaggccacacctggaagggcgatttattccttgggcgctgccaggtgtctgccgccttcacccagaaaccgatgatgttcggagccaggcttcttcaaagtctcacagccagcctaccctcaaagcctgagtgattgtggaaggagccagcgttcactcagcagaggaacagagctttcctgccgcaggctctcagtgaagatccagggagcagaggcgtgggcaaggagcactgggctcagatgcaggagaaccggtttgaaccctagcactaccgcctctacactgaggaaccttggggattactcagccccctggaacctaatttccaagtgggatcttgtgtgtgataatgcctggaaggtccatatcgctaagttctccttactggttggattaatctttggctacctaataactggatgcattgctgactgggtcggccggcggcctgtgctgctgttttccatcatcttcattctgatctttggactgactgtggcactgtcagtgaatgtgacaatgttcagcacactcaggttctttgaaggattttgcctggctggaatcattctcaccttgtatgctttacgaatagagctgtgcccccctggaaaacggttcatgattacgatggtggcgagcttcgtggccatggcgggccagttcctcatgcctgggctagccgccctgtgccgggattggcaggtgctgcaggccctcatcatctgccccttcctgctcatgctgctctactggtcgatattccccgagtccctccggtggctaatggccacccagcagtttgagtctgcaaagaggctgatcctccacttcacacagaagaatcgcatgaaccctgagggcgacatcaagggtgtgataccagagctggagaaagagctttcccggaggcccaagaaggtctgcatcgtgaaggtggtggggacacggaacctgtggaagaacattgtggtcctgtgtgtgaactcgctgacggggtacgggatccaccactgctttgccaggagcatgatgggccacgaggtgaaggtgccgctcctggagaacttctatgctgactactataccacggccagcatcgcgctggtgtcctgcctggccatgtgcgtggtggtccgattcctcgggcgcaggggagggctgctgctcttcatgatcctcaccgccctggcctcactcctgcagctcggcctcctcaacctgattggaaagtacagccagcacccagactcagggatgagtgacagcgtcaaggacaaattttccatcgcgttttccatcgtgggcatgtttgcctcccatgcggtggggagcctcagcgtgttcttctgtgcggagatcaccccgacggtgataaggtgtggcgggctggggctggtgctggccagcgcgggcttcggcatgctgacggcacccatcatcgagctgcacaaccagaaaggctacttcctgcaccacatcatctttgcctgctgcacgctcatctgcatcatctgcatcctcctgctgcccgagagcagggaccagaacctgcctgagaacatttctaacggggagcactacacgcgccagccgctgctgccgcacaagaagggggagcagccactgctgctcaccaacgccgagctcaaggactactcgggcctccacgatgccgcagccgcgggtgacacactgcccgagggtgccacggccaacggcatgaaggccatgtagcccggcctgcggaacccggggctccagggtctggggcagcttgggcacaggtttacagaccagggaccgaacacgcagccaggggtgggaaagctgcctcagccaagctgagcctctcaactggtgtggggaaatcctgtctttccaaaagtccaaggagcgcgggtcggaggagacaaactctttggaaataaccctttcaagactttcttttctgccgttaaa

SEQ ID NO: 19349 - DNA, 622 bp, Homo sapiens
  source 1..622: mol_type = unassigned DNA
gcttggtccccagagggaattgcatacccatccatgccgcaagctggacactgggaaggagctgtgctgtgcagccccaggcctccctcccaccctggcctggcttcctctcttccctcaccaccttcttctgaccttcccccagggatgagtgacagcgtcaaggacaaattttccatcgcgttttccatcgtgggcatgtttgcctcccatgcggtggggagcctcagcgtgttcttctgtgcggagatcaccccgacggtgataagatgcagaccgaggcttcgggaagtgaagctggtgggcgggggccaggattctagcccaggctcatgggctccagaactcctgctcccagccacggcactcgcacctttgtggcagcaaaagtctgttctgtagctcactttgggctggctctttttatgtgggtttactcaaggcttggaggctaatggctgatgccccagtcttgacaatcatctaatggaataaacattaacgaagaccctgtaccagaaggcatctccttcctcgagaaatgcacagacggcgccctacccaggtgtggcgggctggggctggtgctggccagcgcgggcttcggcatgctgacggcacc

SEQ ID NO: 19350 - DNA, 1574 bp, Homo sapiens
  source 1..1574: mol_type = unassigned DNA
aacagcagcggcgcggacggaggcgacacaccacccctgccatcccctccggacaagggggacaacgcctccaactgtgactgccgcgcatgggactacggcatccgcgccggcctcgtccagaacgtggtcagcaagtgggatcttgtgtgtgataatgcctggaaggtccatatcgctaagttctccttactggttggattaatctttggctacctaataactggatgcattgctgactgggtcggccggcggcctgtgctgctgttttccatcatcttcattctgatctttggactgactgtggcactgtcagtgaatgtgacaatgttcagcacactcaggttctttgaaggattttgcctggctggaatcattctcaccttgtatgctttacgaatagagctgtgcccccctggaaaacggttcatgattacgatggtggcgagcttcgtggccatggcgggccagttcctcatgcctgggctagccgccctgtgccgggattggcaggtgctgcaggccctcatcatctgccccttcctgctcatgctgctctactggtcgatattccccgagtccctccggtggctaatggccacccagcagtttgagtctgcaaagaggctgatcctccacttcacacagaagaatcgcatgaaccctgagggcgacatcaagggtgtgataccagagctggagaaagagctttcccggaggcccaagaaggtctgcatcgtgaaggtggtggggacacggaacctgtggaagaacattgtggtcctgtgtgtgaactcgctgacggggtacgggatccaccactgctttgccaggagcatgatgggccacgaggtgaaggtgccgctcctggagaacttctatgctgactactataccacggccagcatcgcgctggtgtcctgcctggccatgtgcgtggtggtccgattcctcgggcgcaggggagggctgctgctcttcatgatcctcaccgccctggcctcactcctgcagctcggcctcctcaacctgattggaaagtacagccagcacccagactcagggatgagtgacagcgtcaaggacaaattttccatcgcgttttccatcgtgggcatgtttgcctcccatgcggtggggagcctcagcgtgttcttctgtgcggagatcaccccgacggtgataaggtgcgtcatgggagacaccccaggggacgccggcttctcggaaatcaaagacgagtccctggctccaggctggtgtgggattaaccagcgtcagctctgtctctggctctggacacatcagcttcgtggttcatagctgaggtggctgttggacccaaccccgaggcgcccaagaggcagtgagaacctggccctggggtcctgtccaggcagcagcaggaggaagggggaacagggagctactctgggcccaggaaatatgtcagtgtctgagcgtctggcaagggggggagtgcagcggatcacttatgccgcacttccaccagaacctgtgctgccaactctgctaagagacctcacggcacagctagtgcaaaatgtttcaca

SEQ ID NO: 19351 - DNA, 1221 bp, Homo sapiens
  source 1..1221: mol_type = unassigned DNA
atcttcgtccagggccgcagtggctccggtgcacttagagtcaccctggggaactttcagaaatgcctgtaggaccccagcatccatcgtttaaaagaagttctctggacactttccacgggtgttgtcagcagcaggaaactggagctctcccgtgggacacagacaccaagcgctggaggccggagctgaactgggatcttgtgtgtgataatgcctggaaggtccatatcgctaagttctccttactggttggattaatctttggctacctaataactggatgcattgctgactgggtcggccggcggcctgtgctgctgttttccatcatcttcattctgatctttggactgactgtggcactgtcagtgaatgtgacaatgttcagcacactcaggttctttgaaggattttgcctggctggaatcattctcaccttgtatgctttacgaatagagctgtgcccccctggaaaacggttcatgattacgatggtggcgagcttcgtggccatggcgggccagttcctcatgcctgggctagccgccctgtgccgggattggcaggtgctgcaggccctcatcatctgccccttcctgctcatgctgctctactggtcgatattccccgagtccctccggtggctaatggccacccagcagtttgagtctgcaaagaggctgatcctccacttcacacagaagaatcgcatgaaccctgagggcgacatcaagggtgtgataccagagctggagaaagagctttcccggaggcccaagaaggtctgcatcgtgaaggtggtggggacacggaacctgtggaagaacattgtggtcctgtgtgtgaactcgctgacggggtacgggatccaccactgctttgccaggagcatgatgggccacgaggtgaaggtgccgctcctggagaacttctatgctgactactataccacggccagcatcgcgctggtgtcctgcctggccatgtgcgtggtggtccgattcctcgggcgcaggggagggctgctgctcttcatgatcctcaccgccctggcctcactcctgcagctcggcctcctcaacctgattggaaagtacagccagcacccagactcagggatgagtgacagcgtcaaggacaaattttccatcgcgttttccatcgtgggcatgtttgcctcccatgcggtggggagcctcagcgtgttcttctgtgcgg

SEQ ID NO: 19352 - DNA, 542 bp, Homo sapiens
  source 1..542: mol_type = unassigned DNA
gttggagcctcaacgcgcccgtaaaacactggcacaccacatagggcacttgtggtgggcagcagatgaaaacaatttcagtcgttggaatagagctgtgcccccctggaaaacggttcatgattacgatggtggcgagcttcgtggccatggcgggccagttcctcatgcctgggctagccgccctgtgccgggattggcaggatattccccgagtccctccggtggctaatggccacccagcagtttgagtctgcaaagaggctgatcctccacttcacacagaagaatcgcatgaaccctgagggcgacatcaagggtgtgataccagagctggagaaagagctttcccggaggcccaagaaggtctgcatcgtgaaggtggtggggacacggaacctgtggaagaacattgtggtcctgtgtgtgaactcgctgacggggtacgggatccaccactgctttgccaggagcatgatgggccacgaggtgaaggtgccgctcctggagaacttctatgctgactactataccacggccag

SEQ ID NO: 19353 - DNA, 561 bp, Homo sapiens
  source 1..561: mol_type = unassigned DNA
aattgctcccaggagctgtgaaacagcaacatcctcaggctggcagaactgctgatacctcaagtgccctgttgttcttttggtggctgctgggcagtggaaggggcacgatcccctctgcagcggctgttctctggaggagctgagactgcctgtatgaggtgaatagagctgtgcccccctggaaaacggttcatgattacgatggtggcgagcttcgtggccatggcgggccagttcctcatgcctgggctagccgccctgtgccgggattggcaggtgctgcaggccctcatcatctgccccttcctgctcatgctgctctactggtcgatattccccgagtccctccggtggctaatggccacccagcagtttgagtctgcaaagaggctgatcctccacttcacacagaagaatcgcatgaaccctgagggcgacatcaagggtgtgataccagagctggagaaagagctttcccggaggcccaagaaggtctgcatcgtgaaggtggtggggacacggaacctgtggaagaacattgtggtcctgtgtgtgaac

SEQ ID NO: 19354 - DNA, 730 bp, Homo sapiens
  source 1..730: mol_type = unassigned DNA
ccgtaaaacactggcacaccacatagggcacttgtggtgggcagcagatgaaaacaatttcagtcgttggaatagagctgtgcccccctggaaaacggttcatgattacgatggtggcgagcttcgtggccatggcgggccagttcctcatgcctgggctagccgccctgtgccgggattggcaggtgctgcaggccctcatcatctgccccttcctgctcatgctgctctactggtcgtgagtacactctgcacagcgccctgggctggtgcgactgcacatgcttcctgaaggcccggccccgggcaggacacacaatccccacacttcccactagttgcagcttgtggttctgtctgagaaggttttcctctctttttaaaaaattttattgtttaaactttctgtcttggaaaactgttcaaatatacacaaaaatagaagagtggaatgagcccatcacccagctccaaaaatctgcaaatgcactggccagtctggctcaccccttcttgctacccaccccacggggttattctgacatgaatttttatgaatggattgcagggaggtggaggtcttgtgttaggaggggggatttggagatattaaaggagtgatttacaaaagtccccctatctcttctaggcgaggggtgggcaaccttcagcctgtgggccacatcaggcccactgtctgtttttgtaaataaagttttattggaacaca

SEQ ID NO: 19355 - DNA, 1574 bp, Homo sapiens
  source 1..1574: mol_type = unassigned DNA
atggccatagaccggcggcgcgaggcggcgggcggcgggcctgggcggcagccggccccggccgaggagaacggctccctgccgcccggggacgcggcggcctcggcgcccctcgggggacgcgcgggccccggcggcggcgcggagatccagccgctgcccccactgcatcctggaggcggcccgcacccgagctgctgctccgcggctgcggccccgagcctcttgttgctggactatgacgggtcggtgctgcccttcctcgggggcctgggcgggggctatcagaagaccctcgtgctgctcacctggatcccggcgctgttcatcggcttcagccagttctcggactcgttcctcctggaccagcccaacttctggtgccgcggggccggcaaaggcaccgagctggcaggggtcaccaccacaggccggggcggggacatgggcaactggaccagcctccccaccacccccttcgccactgccccctgggaggctgcgggcaaccggagcaacagcagcggcgcggacggaggcgacacaccacccctgccatcccctccggacaagggggacaacgcctccaactgtgactgccgcgcatgggactacggcatccgcgccggcctcgtccagaacgtggtcagcaagtgggatcttgtgtgtgataatgcctggaaggtccatatcgctaagttctccttactggttggattaatctttggctacctaataactggatgcattgctgactgggtcggccggcggcctgtgctgctgttttccatcatcttcattctgatctttggactgactgtggcactgtcagtgaatgtgacaatgttcagcacactcaggttctttgaaggattttgcctggctggaatcattctcaccttgtatgctttacgaatagagctgtgcccccctggaaaacggttcatgattacgatggtggcgagcttcgtggccatggcgggccagttcctcatgcctgggctagccgccctgtgccgggattggcaggtgctgcaggccctcatcatctgccccttcctgctcatgctgctctactggtcgtgagtacactctgcacagcgccctgggctggtgcgactgcacatgcttcctgaaggcccggccccgggcaggacacacaatccccacacttcccactagttgcagcttgtggttctgtctgagaaggttttcctctctttttaaaaaattttattgtttaaactttctgtcttggaaaactgttcaaatatacacaaaaatagaagagtggaatgagcccatcacccagctccaaaaatctgcaaatgcactggccagtctggctcaccccttcttgctacccaccccacggggttattctgacatgaatttttatgaatggattgcagggaggtggaggtcttgtgttaggaggggggatttggagatattaaaggagtgatttacaaaagtccccctatctcttctaggcgaggggtgggcaaccttcagcctgtgggccacatcaggcccactgtctgtttttgtaaataaagttttattggaacaca

SEQ ID NO: 19356 - DNA, 2201 bp, Homo sapiens
  source 1..2201: mol_type = unassigned DNA
cgccttcagcctgtttcccaggaacggtccccggcttcgcgccccaatttctaacagcctgcctgtcccccgggaacgttctaacatccttggggagcgccccagctacaagacactgtcctgagaacgctgtcatcacccgtagttgcaagtttcggagcggcagtgggaagcatgcgggactacgacgaggtgatcgccttcctgggcgagtgggggcccttccagcgcctcatcttcttcctgctcagcgccagcatcatccccaatggcttcaatggtatgtcagtcgtgttcctggcggggaccccggagcaccgctgtcgagtgccggacgccgcgaacctgagcagcgcctggcgcaacaacagtgtcccgctgcggctgcgggacggccgcgaggtgccccacagctgcagccgctaccggctcgccaccatcgccaacttctcggcgctcgggctggagccggggcgcgacgtggacctggggcagctggagcaggagagctgcctggatggctgggagttcagccaggacgtctacctgtccaccgtcgtgaccgagtggaatctggtgtgtgaggacaactggaaggtgcccctcaccacctccctgttcttcgtaggcgtgctcctcggctccttcgtgtccgggcagctgtcagacaggtttggcaggaagaacgttctcttcgcaaccatggctgtacagactggcttcagcttcctgcagattttctccatcagctgggagatgttcactgtgttatttgtcatcgtgggcatgggccagatctccaactatgtggtagccttcatactaggaacagaaattcttggcaagtcagttcgtattatattctctacattaggagtgtgcacattttttgcagttggctatatgctgctgccactgtttgcttacttcatcagagactggcggatgctgctgctggcgctgacggtgccgggagtgctgtgtgtcccgctgtggtggttcattcctgaatctccccgatggctgatatcccagagaagatttagagaggctgaagatatcatccaaaaagctgcaaaaatgaacaacatagctgtaccagcagtgatatttgattctgtggaggagctaaatcccctgaagcagcagaaagctttcattctggacctgttcaggactcggaatattgccataatgaccattatgtctttgctgctatggatgctgacctcagtgggttactttgctctgtctctggatgctcctaatttacatggagatgcctacctgaactgtttcctctctgccttgattgaaattccagcttacattacagcctggctgctattgcgaaccctgcccaggcgttatatcatagctgcagtactgttctggggaggaggtgtgcttctcttcattcaactggtacctgtggattattacttcttatccattggtctggtcatgctgggaaaatttgggatcacctctgctttctccatgctgtatgtcttcactgctgagctctacccaaccctggtcaggaacatggcggtgggggtcacatccacggcctccagagtgggcagcatcattgccccctactttgtttacctcggtgcttacaacagaatgctgccctacatcgtcatgggtagtctgactgtcctgattggaatcctcaccctttttttccctgaaagtttgggaatgactcttccagaaaccttagagcagatgcagaaagtgaaatggttcagatctgggaaaaaaacaagagactcaatggagacagaagaaaatcccaaggttctaataactgcattctgaaaaaatatctaccccatttggtgaagtgaaaaacagaaaaataagaccctgtggagaaattcgttgttcccactgaaatggactgactgtaacgattgacaccaaaatgaaccttgctatcaagaaatgctcgtcatacagtaaactctggatgattcttccagataatgtccttgctttacaaaccaaccatttctagagagtctccttactcattaattcaatgaaatggattggtaagatgtcttgaaaacatgttagtcaaggactggtaaaatacatataaagattaacactcatttccaatcatacaaatactatccaaataaaaataacatcattgtattaacgcaaatattaggtgacaacaa

SEQ ID NO: 19357 - DNA, 564 bp, Homo sapiens
  source 1..564: mol_type = unassigned DNA
tccctggccacagacttctggaggcatcaggaggtgtactgccgtaccatatacttgtgaggtttggggtcctttcctgaggccccagtttctctaagacagcagatggcctcctgaggctcattgggtgcaaggaagcacagaaggcgaaaccccagctggaagccctggccctcagggacctctctgagcacaggtggaatctggtgtgtgaggacaactggaaggtgcccctcaccacctccctgttcttcgtaggcgtgctcctcggctccttcgtgtccgggcagctgtcagacaggtttggcaggaagaacgttctcttcgcaaccatggctgtacagactggcttcagcttcctgcagattttctccatcagctgggagatgttcactgtgttatttgtcatcgtgggcatgggccagatctccaactatgtggtagccttcatactaggccacttctctatagcatgggcagatccccaacaaaaggcagagccattgccattggtcacatctccgccccaggtgtagtgaaccaagggcagactctgtggaaagg

SEQ ID NO: 19358 - DNA, 463 bp, Homo sapiens
  source 1..463: mol_type = unassigned DNA
gaacagaaattcttggcaagtcagttcgtattatattctctacattaggagtgtgcacattttttgcagttggctatatgctgctgccactgtttgcttacttcatcagagactggcggatgctgctgctggcgctgacggtgccgggagtgctgtgtgtcccgctgtggtggagctggtccatgaatgctcctggctgtgggcatactgtaccagggacaggacttgccccagacagaggccagcctgggaccagcactgacaagctgagtgctccccctgaacatttaccagtggtcttaccattttcctataaaagaaaatagctttcttctgaacatcccatccttgcaggttcattcctgaatctccccgatggctgatatcccagagaagatttagagaggctgaagatatcatccaaaaagctgcaaaaatgaacaacatagctgtaccagcagtg

SEQ ID NO: 19359 - DNA, 1778 bp, Homo sapiens
  source 1..1778: mol_type = unassigned DNA
agctcccggagcaacccagctgcggaggcaacggcagtgctgctcctccagcgaaggacagcaggcaggcagacagacagaggtcctgggactggaaggcctcagcccccagccactgggctgggcctggcccaatggcctttaatgacctcctgcagcaggtggggggtgtcggccgcttccagcagatccaggtcaccctggtggtcctccccctgctcctgatggcttctcacaacaccctgcagaacttcactgctgccatccctacccaccactgccgcccgcctgccgatgccaacctcagcaagaacggggggctggaggtctggctgccccgggacaggcaggggcagcctgagtcctgcctccgcttcacctccccgcagtggggactgccctttctcaatggcacagaagccaatggcacaggggccacagagccctgcaccgatggctggatctatgacaacagcaccttcccatctaccatcgtgactgagggccctacgccagctggcccagtccttgtacatggtgggggtgctgctcggagccatggtgttcggctaccttgcagacaggctaggccgccggaaggtactcatcttgaactacctgcagacagctgtgtcagggacctgcgcagccttcgcacccaacttccccatctactgcgccttccggctcctctcgggcatggctctggctggcatctccctcaactgcatgacactgaatgtggagtggatgcccattcacacacgggcctgcgtgggcaccttgattggctatgtctacagcctgggccagttcctcctggctggtgtggcctacgctgtgccccactggcgccacctgcagctactggtctctgcgcctttttttgccttcttcatctactcctggttcttcattgagtcggcccgctggcactcctcctccgggaggctggacctcaccctgagggccctgcagagagtcgcccggatcaatgggaagcgggaagaaggagccaaattgagtatggaggtactccgggccagtctgcagaaggagctgaccatgggcaaaggccaggcatcggccatggagctgctgcgctgccccaccctccgccacctcttcctctgcctctccatgctgtggtttgccactagctttgcatactatgggctggtcatggacctgcagggctttggagtcagcatctacctaatccaggtgatctttggtgctgtggacctgcctgccaagcttgtgggcttccttgtcatcaactccctgggtcgccggcctgcccagatggctgcactgctgctggcaggcatctgcatcctgctcaatggggtgataccccaggaccagtccattgtccgaacctctcttgctgtgctggggaagggttgtctggctgcctccttcaactgcatcttcctgtatactggggaactgtatcccacaatgatccggcagacaggcatgggaatgggcagcaccatggcccgagtgggcagcatcgtgagcccactggtgagcatgactgccgagctctacccctccatgcctctcttcatctacggtgctgttcctgtggccgccagcgctgtcactgtcctcctgccagagaccctgggccagccactgccagacacggtgcaggacctggagagcaggtggaaagagaaactggggcagcagcaacaggaacagcagatggtcccactccaagcctcctgaggactgagaaggagcagagggtggagaggaggagccct

SEQ ID NO: 19360 - DNA, 2143 bp, Homo sapiens
  source 1..2143: mol_type = unassigned DNA
caagggtcaggtctccagcagaccctgaaagctgagctgccctgacccccaaagtgaggagaagctgcaagggaaaagggagggacagatcagggagaccggggaagaaggaggagcagccaaggaggctgctgtccccccacagagcagctcggactcagctcccggagcaacccagctgcggaggcaacggcagtgctgctcctccagcgaaggacagcaggcaggcagacagacagaggtcctgggactggaaggcctcagcccccagccactgggctgggcctggcccaatggcctttaatgacctcctgcagcaggtggggggtgtcggccgcttccagcagatccaggtcaccctggtggtcctccccctgctcctgatggcttctcacaacaccctgcagaacttcactgctgccatccctacccaccactgccgcccgcctgccgatgccaacctcagcaagaacggggggctggaggtctggctgccccgggacaggcaggggcagcctgagtcctgcctccgcttcacctccccgcagtggggactgccctttctcaatggcacagaagccaatggcacaggggccacagagccctgcaccgatggctggatctatgacaacagcaccttcccatctaccatcgtgactgagtgggaccttgtgtgctctcacagggccctacgccagctggcccagtccttgtacatggtgggggtgctgctcggagccatggtgttcggctaccttgcagacaggctaggccgccggaaggtactcatcttgaactacctgcagacagctgtgtcagggacctgcgcagccttcgcacccaacttccccatctactgcgccttccggctcctctcgggcatggctctggctggcatctccctcaactgcatgacactgaatgtggagtggatgcccattcacacacgggcctgcgtgggcaccttgattggctatgtctacagcctgggccagttcctcctggctggtgtggcctacgctgtgccccactggcgccacctgcagctactggtctctgcgcctttttttgccttcttcatctactcctggttcttcattgagtcggcccgctggcactcctcctccgggaggctggacctcaccctgagggccctgcagagagtcgcccggatcaatgggaagcgggaagaaggagccaaattgagtatggaggtactccgggccagtctgcagaaggagctgaccatgggcaaaggccaggcatcggccatggagctgctgcgctgccccaccctccgccacctcttcctctgcctctccatgctgtggtttgccactagctttgcatactatgggctggtcatggacctgcagggctttggagtcagcatctacctaatccaggtgatctttggtgctgtggacctgcctgccaagcttgtgggcttccttgtcatcaactccctgggtcgccggcctgcccagatggctgcactgctgctggcaggcatctgcatcctgctcaatggggtgataccccaggaccagtccattgtccgaacctctcttgctgtgctggggaagggttgtctggctgcctccttcaactgcatcttcctgtatactggggaactgtatcccacaatgatccggcagacaggcatgggaatgggcagcaccatggcccgagtgggcagcatcgtgagcccactggtgagcatgactgccgagctctacccctccatgcctctcttcatctacggtgctgttcctgtggccgccagcgctgtcactgtcctcctgccagagaccctgggccagccactgccagacacggtgcaggacctggagagcaggaaagggaaacagacgcgacagcaacaagagcaccagaagtatatggtcccactgcaggcctcagcacaagagaagaatggactctgaggactgagaaggggccttacagaaccctaaagggagggaaggtcctacaggtctccggccacccacacaaggaggaggaagaggaaatggtgacccaagtgtgggggttgtggttcaggaaagcatcttcccaggggtccacctccctttataaaccccaccagaaccacatcattaaaaggtttgactgcgcacca

SEQ ID NO: 19361 - DNA, 2151 bp, Homo sapiens
  source 1..2151: mol_type = unassigned DNA
gaaagctgagctgccctgacccccaaagtgaggagaagctgcaagggaaaagggagggacagatcagggagaccggggaagaaggaggagcagccaaggaggctgctgtccccccacagagcagctcggactcagctcccggagcaacccagctgcggaggcaacggcagtgctgctcctccagcgaaggacagcaggcaggcagacagacagaggtcctgggactggaaggcctcagcccccagccactgggctgggcctggcccaatggcctttaatgacctcctgcagcaggtggggggtgtcggccgcttccagcagatccaggtcaccctggtggtcctccccctgctcctgatggcttctcacaacaccctgcagaacttcactgctgccatccctacccaccactgccgcccgcctgccgatgccaacctcagcaagaacggggggctggaggtctggctgccccgggacaggcaggggcagcctgagtcctgcctccgcttcacctccccgcagtggggactgccctttctcaatggcacagaagccaatggcacaggggccacagagccctgcaccgatggctggatctatgacaacagcaccttcccatctaccatcgtgactgagtgggaccttgtgtgctctcacagggccctacgccagctggcccagtccttgtacatggtgggggtgctgctcggagccatggtgttcggctaccttgcagacaggctaggccgccggaaggtactcatcttgaactacctgcagacagctgtgtcagggacctgcgcagccttcgcacccaacttccccatctactgcgccttccggctcctctcgggcatggctctggctggcatctccctcaactgcatgacactgaatgtggagtggatgcccattcacacacgggcctgcgtgggcaccttgattggctatgtctacagcctgggccagttcctcctggctggtgtggcctacgctgtgccccactggcgccacctgcagctactggtctctgcgcctttttttgccttcttcatctactcctggttcttcattgagtcggcccgctggcactcctcctccgggaggctggacctcaccctgagggccctgcagagagtcgcccggatcaatgggaagcgggaagaaggagccaaattgagtatggaggtactccgggccagtctgcagaaggagctgaccatgggcaaaggccaggcatcggccatggagctgctgcgctgccccaccctccgccacctcttcctctgcctctccatgctgtggtttgccactagctttgcatactatgggctggtcatggacctgcagggctttggagtcagcatctacctaatccaggtgatctttggtgctgtggacctgcctgccaagcttgtgggcttccttgtcatcaactccctgggtcgccggcctgcccagatggctgcactgctgctggcaggcatctgcatcctgctcaatggggtgataccccaggaccagtccattgtccgaacctctcttgctgtgctggggaagggttgtctggctgcctccttcaactgcatcttcctgtatactggggaactgtatcccacaatgatccggcagacaggcatgggaatgggcagcaccatggcccgagtgggcagcatcgtgagcccactggtgagcatgactgccgagctctacccctccatgcctctcttcatctacggtgctgttcctgtggccgccagcgctgtcactgtcctcctgccagagaccctgggccagccactgccagacacggtgcaggacctggagagcaggtgggcccccactcagaaagaagcagggatatatcccaggaaagggaaacagacgcgacagcaacaagagcaccagaagtatatggtcccactgcaggcctcagcacaagagaagaatggactctgaggactgagaaggggccttacagaaccctaaagggagggaaggtcctacaggtctccggccacccacacaaggaggaggaagaggaaatggtgacccaagtgtgggggttgtggttcaggaaagcatcttcccaggggtccacctccctttataaaccccaccagaaccacatcattaaaaggtttgactgcg

SEQ ID NO: 19362 - DNA, 1521 bp, Homo sapiens
  source 1..1521: mol_type = unassigned DNA
atggcctttaatgacctcctgcagcaggtggggggtgtcggccgcttccagcagatccaggtcaccctggtggtcctccccctgctcctgatggcttctcacaacaccctgcagaacttcactgctgccatccctacccaccactgccgcccgcctgccgatgccaacctcagcaagaacggggggctggaggtctggctgccccgggacaggcaggggcagcctgagtcctgcctccgcttcacctccccgcagtggggactgccctttctcaatggcacagaagccaatggcacaggggccacagagccctgcaccgatggctggatctatgacaacagcaccttcccatctaccatcgtgactgagtgggaccttgtgtgctctcacagggccctacgccagctggcccagtccttgtacatggtgggggtgctgctcggagccatggtgttcggctaccttgcagacaggctaggccgccggaaggtactcatcttgaactacctgcagacagctgtgtcagggacctgcgcagccttcgcacccaacttccccatctactgcgccttccggctcctctcgggcatggctctggctggcatctccctcaactgcatgacactgaatgtggagtggatgcccattcacacacgggcctgcgtgggcaccttgattggctatgtctacagcctgggccagttcctcctggctggtgtggcctacgctgtgccccactggcgccacctgcagctactggtctctgcgcctttttttgccttcttcatctactcctggttcttcattgagtcggcccgctggcactcctcctccgggaggctggacctcaccctgagggccctgcagagagtcgcccggatcaatgggaagcgggaagaaggagccaaattgagtatggaggtactccgggccagtctgcagaaggagctgaccatgggcaaaggccaggcatcggccatggagctgctgcgctgccccaccctccgccacctcttcctctgcctctccatgctgtggtttgccactagctttgcatactatgggctggtcatggacctgcagggctttggagtcagcatctacctaatccaggtgatctttggtgctgtggacctgcctgccaagcttgtgggcttccttgtcatcaactccctgggtcgccggcctgcccagatggctgcactgctgctggcaggcatctgcatcctgctcaatggggtgataccccaggaccagtccattgtccgaacctctcttgctgtgctggggaagggttgtctggctgcctccttcaactgcatcttcctgtatactggggaactgtatcccacaatgatccgcgctgtcactgtcctcctgccagagaccctgggccagccactgccagacacggtgcaggacctggagagcaggaaagggaaacagacgcgacagcaacaagagcaccagaagtatatggtcccactgcaggcctcagcacaagagaagaatggactctga

SEQ ID NO: 19363 - DNA, 1560 bp, Homo sapiens
  source 1..1560: mol_type = unassigned DNA
atggcctttaatgacctcctgcagcaggtggggggtgtcggccgcttccagcagatccaggtcaccctggtggtcctccccctgctcctgatggcttctcacaacaccctgcagaacttcactgctgccatccctacccaccactgccgcccgcctgccgatgccaacctcagcaagaacggggggctggaggtctggctgccccgggacaggcaggggcagcctgagtcctgcctccgcttcacctccccgcagtggggactgccctttctcaatggcacagaagccaatggcacaggggccacagagccctgcaccgatggctggatctatgacaacagcaccttcccatctaccatcgtgactgagtgggaccttgtgtgctctcacagggccctacgccagctggcccagtccttgtacatggtgggggtgctgctcggagccatggtgttcggctaccttgcagacaggctaggccgccggaaggtactcatcttgaactacctgcagacagctgtgtcagggacctgcgcagccttcgcacccaacttccccatctactgcgccttccggctcctctcgggcatggctctggctggcatctccctcaactgcatgacactgaatgtggagtggatgcccattcacacacgggcctgcgtgggcaccttgattggctatgtctacagcctgggccagttcctcctggctggtgtggcctacgctgtgccccactggcgccacctgcagctactggtctctgcgcctttttttgccttcttcatctactcctggttcttcattgagtcggcccgctggcactcctcctccgggaggctggacctcaccctgagggccctgcagagagtcgcccggatcaatgggaagcgggaagaaggagccaaattgagtatggaggtactccgggccagtctgcagaaggagctgaccatgggcaaaggccaggcatcggccatggagctgctgcgctgccccaccctccgccacctcttcctctgcctctccatgctgtggtttgccactagctttgcatactatgggctggtcatggacctgcagggctttggagtcagcatctacctaatccaggtgatctttggtgctgtggacctgcctgccaagcttgtgggcttccttgtcatcaactccctgggtcgccggcctgcccagatggctgcactgctgctggcaggcatctgcatcctgctcaatggggtgataccccaggaccagtccattgtccgaacctctcttgctgtgctggggaagggttgtctggctgcctccttcaactgcatcttcctgtatactggggaactgtatcccacaatgatccgcgctgtcactgtcctcctgccagagaccctgggccagccactgccagacacggtgcaggacctggagagcaggtgggcccccactcagaaagaagcagggatatatcccaggaaagggaaacagacgcgacagcaacaagagcaccagaagtatatggtcccactgcaggcctcagcacaagagaagaatggactctga

SEQ ID NO: 19364 - DNA, 768 bp, Homo sapiens
  source 1..768: mol_type = unassigned DNA
agctgggctcagggtgtctaggtgggagcttggcattgccagccggcgctggtttgaggatctacagcaccagcctcatacttcagaggtcctcaaaaggccccagcccaggcatcatccagggctaggccgccggaaggtactcatcttgaactacctgcagacagctgtgtcagggacctgcgcagccttcgcacccaacttccccatctactgcgccttccggctcctctcgggcatggctctggctggcatctccctcaactgcatgacactgaatgtggagtggatgcccattcacacacgggcctgcgtgggcaccttgattggctatgtctacagcctgggccagttcctcctggctggtgtggcctacgctgtgccccactggcgccacctgcagctactggtctctgcgcctttttttgccttcttcatctactcctggttcttcattgagtcggcccgctggcactcctcctccgggaggctggacctcaccctgagggccctgcagagagtcgcccggatcaatgggaagcgggaagaaggagccaaattgagtatggaggtactccgggccagtctgcagaaggagctgaccatgggcaaaggccaggcatcggccatggagctgctgcgctgccccaccctccgccacctcttcctctgcctctccatgctgtggtttgccactagctttgcatactatgggctggtcatggacctgcagggctttggagtcagcatctacctaatccaggtgat

SEQ ID NO: 19365 - DNA, 7578 bp, Homo sapiens
  source 1..7578: mol_type = unassigned DNA
atactgaggacttaccctggacctgacactctgctaggtacacaatctcattcaataccacttgcaagtaagtgacactattattcccattttacagatcaggaaactgaggcagaacaaggaaagtcacttgccactggagaagcagtggttaagagcatgagtttggaaacagacacacctaggtttgagtcctatcgccttgagcctcagctgtggcatctgtaaaatggggatgatgaacttagggtcagcatcagaacagcaggaagacccaacggagggcgatatcaacagcatccgtggggaggatgtcagtagccgtggggatgcagaagctggtgccccttcacgcggaggtgcctgggacctagcagaacactaatctggtgcttggactcctcccacagatgtggaatgggtgcctacccggatgcgggccatcatgtcgacagcactcgggtactgctacacctttggccagttcattctgcccggcctggcctacgccatcccccagtggcgttggctgcagttaactgtgtccattcccttcttcgtcttcttcctatcatcctggtggacaccagagtccatacgctggttggtcttgtctggaaagtcctcgaaggccctgaagatactccggcgggtggctgtcttcaatggcaagaaggaagagggagaaaggctcagcttggaggtaggggctgaggactatagtctgggagcagaacccctgtgctccactcttgggctggcccctccccttgcctctgttcccctggctcacagcctataccacatctgattccctgagctcctctagaggcaccacgcctgcatctccctctcttcgtcctgcccactagctggtcattaatggcacccctccccctcctctgcccgaaggagctcaaactcaacctgcagaaggagatctccttggccaaggccaagtacaccgcaagtgacctgttccggatacccatgctgcgccgcatgaccttctgtctttccctggcctggtaacccccctctccctgcccacaccctgccaaggaaggggtgatagacaaggcctccagtaggctcacttaagggcaaggcctagggcatctgaaagagaagtcagagaatcccctctcctgggccaccacagcccagccccaaccccagaaatctgctgcattcctgccccacacccaggtccagccatcagggtctgcttccctctggggtcacaatgccccacccctcacccacaggacaaatgttccaggccccttccccagctcacatccctgccgctcagtgtccccatgctctccctctctgtcactgcccccctctgggtcagctctgccctctggaaccccacagagcaaggctagaccaatgggtttcagactcgaagacaaaaattatgtttatctcaagttttctcctctgtctgactttctcctgctccctgaaagccctttctgtgacctggtttctgcttcccatcctggccatttctttgtgaataggattcaatttgtccaggaacccttcaaagggatcccacagttcagagagaggaagggaaacatctgacccaggcatacagctcaatgctcacctcgccagtctggatgttaaactgctgcccaaccaggagagatcatttactgcctcctttggtctccgagattccctccagtcctgatcttctctagagtcagttattggcacctttgccaccacaccctggaccatgcccacgtcagacatgaccagtcaatcacagcactttctccctgagcccagacacgatctcagaaacctcaaaaggacactcaagcagcccctatcatcagttgcagttggcacaagaagtgaagctattcatcatcctggtgacccaatgaccagcatggggagtggcctctgcctggctgcaggtgctaaccaatccttctctgcctctcaggtttgctaccggttttgcctactatagtttggctatgggtgtggaagaatttggagtcaacctctacatcctccagatcatctttggtggggtcgatgtcccagccaagttcatcaccatcctctccttaagctacctgggccggcataccactcaggccgctgccctgctcctggcaggaggggccatcttggctctcacctttgtgcccttgggtgagagactggggctaccccagaaccctctggaagaggctgccaggttgggtgccagggacttcactgctggctctgcctctaagtcactgtgttaccttgagcaggtccctgcactctctggggctcagggtctctcttctagaaaataacgcaattgggctagatgacatgaaagctcctttccagatctgacttggactgggcaaaaagtatggtggtatctggatagtgtgaaaatttttgaggtattgagagtgtcctgagtgacatcactgtagagataagctgagatggtaaaacgacagagctcatgctcaagaaagaccccacaacctactccatcatgaccttggaaaagctacgtttattttatatgggtgttagttggttgataacacctatacccttccaaaagaacttgaggtattttaagacaagaacaagaacatatacaacaaaatataaatggaaatagaggatcagaggcaggggaaaacacaaacatagcaggacacaggcatgcaaagcattactcagctttaagtttggatctgagcttcttggaagccaaagcaaaaagggagacaagatcagctaaggagtgagaactcttaggtgctcctgaactccaaggcccaccacattttcttccctctgcagacttgcagaccgtgaggacagtattggctgtgtttgggaagggatgcctatccagctccttcagctgcctcttcctctacacaagtgaattataccccacagtcatcaggtaggtgctggacctggggccaggcccagccagaggacacaggtcaggtgggactgtggcattgtcctgtcctctacccaggggagccatcctttatgaaccccacacacaggctaccaatccctactctgaaccctcgcaggcaaacaggtatgggcgtaagtaacctgtggacccgcgtgggaagcatggtgtccccgctggtgaaaatcacgggtgaggtacagcccttcatccccaatatcatctacgggatcaccgccctcctcgggggcagtgctgccctcttcctgcctgagaccctgaatcagcccttgccagagactatcgaagacctggaaaactggtcagtcactgcctctggccccatcagtgctcctccctggggaagcaggtctgggcccagggcttttccttagctctctgtccctaggtccctgcgggcaaagaagccaaagcaggagccagaggtggaaaaggcctcccagaggatccctctacagcctcacggaccaggcctgggctccagctgaggacaacggaaccccctttccctgccctccagagactgatcctagccaggcaccttaggagtatagggaggccccatataggtccatcctcctaggatgaagccttctgagagcttggtgaaggtgtctccatcaccaccaccagagcctcctgcccagccctggccagttcaaaggttcagccatccctgcccttgttctccctgcaacccaggccctgccattcttctgtctagcccttccccactggccaccttcccccactgtcccggtcctcttcccctgaggtcccctgatatcccctggctcagtcctaacaagactgagtcttaacaagatgagaagtcctccccttcttgcctcccacacttttctttgatgggaggtttcaataaacagcgataagaactctagccatgatgttcaggaatgggggtgggatgggagctggccaccgtgtggacacgtgagcatgcacatctgtccatccacacttcatgtacgacaggcctgtgtacaggcaccacaggtacatgcaagctggactgatgtgaacatgagcaagcacatgtgagtgctctgaggtgtgtacaccacgcctgtgcatgaaaatacatgtgtgtgtctacacgtcccagcatgcatatgagcagatgactgaccaagcccagagtggctgcagacagaagccagagcccctccaatcctgatttctttcccctgatcaccccaaatctctgatctatgtctcagccccatgcccagcagatagtttttctcgtgttaactgagaaaactgcaatggtagctgaccgctgtcaatatcagaaaactgcaatggtagctgaccgctgtcaatatctgctgccatgttcccggttccctccagccacagcagaacagccaatccctccaccagcagccatccctttccctctggggtctctgcccattccctctgtcttggctgccgcccatcaccagttaaacaagcttaggcttctcccaacttaacaaaaatcaacacaaacacatgccaggatgttgtatctccttccaagggccacactggctctttctccccttcgaagccagacttcataaaggagctgtctgcctcccctgtatccaccttctagcctcatacatctcccccactgcactccggctcctaccccttccctccctggaaccgctttcaccaaggacgctcatcccctccctgtgctggatccataagtcactcttcagccctcctcttactggccttttggcaaatttggtcctactggtcactctcttcttccttagtttctgagaggccacgtgtttgcagctcccccccacacactggctactccttctcaggcccctctgcggtatcctataaatgctgcagtgttcactttgcctatcctgcccccaccccttttctaaggatctgcatccccggaatctgccaactgaacagttccataatctgccatctctggtggtgaccaactagaccacagggcactccagatccaaatctcatttatcacatactctctcctgggctaggatttgagatcttaagaggttcttatccatctctttgtccttgccctgggaaggcaggttagcatgaggctaggctggcccagatgcagatagagcagagaaagccagttgcagcaagagaataaggcagacacacagagaaaaagagaacaagagaccacatgggcccagataaaaagagctggtgaggcgacttccactggttcttaatgaattccaggtctcggttcctcatcagccctggatgcgctttttaccccggggttctattaaatatccctgaattctccaaataaattcccctttctgtttaagctaacttgatgggctgctccttgtaaccaaagagctccaaaagcagctcctctcgctctaccatctcttcaacactgatttgccccaggaatctttcctaggaactcttcctgtaacattcttccccagcactgtccagtggaaatagaatgcaagccacatatgtaactccaaatcatctagtagccatttttaaaaagctaaaagaaaacaggtgaaattaattttgaatatattatgtacataatataataatatttgacccactatattcaaatattgcatttcaggattaatcaatattaacattattaattagatattttataaccttaaattcagactaagtcttcaaattctggtgtgtatgttccactagcagcatatttcagtttggactagctcaattcaagcactcagtagtggctactggctaccaccttggacaactcagacatactgcagggctttaattatcagccacagagctaattactctcaaatctgtatttagatatttgagagacagcttaataaatgtgaaagggatggtattgtacccctgcgtcaaccttctggtgacttcccactgggataaaatctaaagtctttcacaaggcctgccatgaccaggcccaacctgcctcaacagctttggtttttaacactctacctcgtacccagaaatccagcctcaactgatctttttcagatcctagactgcccctgctcttcaccatgcccagcacttggcttctccccatccaactctacagcacttggctcatgccaactcatccttaaggcctagcttggatggattcctctgaaaagccttctgtgaccacccctcaactgccccagagcctgggttgagcaccctgcttatcagacaatgaactgtgatcacagttgtgtcttagtgggtgtttccctggaagcagactcaagacaagaatttaagtccaagtaccatagattatttggcaggagatcctagaaagcacaagtaggggagttaggcggtaagtcagggaagagaatcaagaggcaagaggaaagagaatgagaagggaagaaggttctcccatcctagcccatctgtcatccagccatgtgggaagctgctgggactggccatttatgatcatgttggatgcaggactccccccttgccaacctgtagataacctggggctggcgcctaggaccagccttgtgctacactgccccctgagatctggcccttatgctgagagtgctatggggttggatggggagaagccacctagtttctatcttggaacctggtttctacctatagagtttctactgtggagcctaggatcagctgacaacagagccagcaatgcttccccttagtttgactgggtctcgacctggagggagaaggactaggctcagggaggaatactgaccccactatgcccccatctttcagttgtccggaattccgagtggctgccaggatgtcctggccatgactattcctgtgcttcagggtgcttattgcaaggacacacatgaagggaagggaagacacccaagaaaatactttccaggtacatggtcaggacttatggtgaactgagatgttgttcaggacaaactggccactcacaagacccgttcttcttgcaatccccaaatccccattctggattcctccttctctccattgctgcttattcctctacaaccccagctccgcttgctttttctactccctcccttctgtctctaagcagggactccacctggctcggtacatggagatccaatatggagcaccacttttgggcagagtcctcatgctgcgtcaactcataggtcactggcctcatgtccagcctttatatggaagtctttggatgaatttctaatttctgcaccatccgtcagccaggatagtcaggccacaaggcacaaagctcacagtgtatctcagaattccttactcagaatgttgcgaggggcctggcagacacttggaatctgctggaccctccccaagtcaatcgtttcaaacccatgcttaggacatgtgatctaagtaagagtgttttatatgatctgtaaattatgtatttgaaaaatctcacaaaagaataaaaacaaaaatcacaggtagtcccacactttaaatcccaattataaaatggaataaagttatacaaaatcagg

SEQ ID NO: 19366 - DNA, 2178 bp, Homo sapiens
  source 1..2178: mol_type = unassigned DNA
agcttgttagagctgagctgccctactacagcagctgccggcccctaggacagagcagggacctcaactacactgatcaccagccccatcggatccagacccggccaccagctctggctcgtcttgccccagtgccatgaccttctcggagatcctggaccgtgtgggaagcatgggccatttccagttcctgcatgtagccatactgggcctcccgatcctcaacatggccaaccacaacctgctgcagatcttcacagccgccacccctgtccaccactgtcgcccgccccacaatgcctccacagggccttgggtgctccccatgggcccaaatgggaagcctgagaggtgcctccgttttgtacatccgcccaatgccagcctgcccaatgacacccagagggccatggagccatgcctggatggctgggtctacaacagcaccaaggactccattgtgacagagtgggacttggtgtgcaactccaacaaactgaaggagatggcccagtctatcttcatggcaggtatactgattggagggctcgtgcttggagacctgtctgacaggtttggccgcaggcccatcctgacctgcagctacctgctgctggcagccagcggctccggtgcagccttcagccccaccttccccatctacatggtcttccgcttcctgtgtggctttggcatctcaggcattaccctgagcaccgtcatcttgaatgtggaatgggtgcctacccggatgcgggccatcatgtcgacagcactcgggtactgctacacctttggccagttcattctgcccggcctggcctacgccatcccccagtggcgttggctgcagttaactgtgtccattcccttcttcgtcttcttcctatcatcctggtggacaccagagtccatacgctggttggtcttgtctggaaagtcctcgaaggccctgaagatactccggcgggtggctgtcttcaatggcaagaaggaagagggagaaaggctcagcttggaggagctcaaactcaacctgcagaaggagatctccttggccaaggccaagtacaccgcaagtgacctgttccggatacccatgctgcgccgcatgaccttctgtctttccctggcctggtttgctaccggttttgcctactatagtttggctatgggtgtggaagaatttggagtcaacctctacatcctccagatcatctttggtggggtcgatgtcccagccaagttcatcaccatcctctccttaagctacctgggccggcataccactcaggccgctgccctgctcctggcaggaggggccatcttggctctcacctttgtgcccttggacttgcagaccgtgaggacagtattggctgtgtttgggaagggatgcctatccagctccttcagctgcctcttcctctacacaagtgaattataccccacagtcatcaggcaaacaggtatgggcgtaagtaacctgtggacccgcgtgggaagcatggtgtccccgctggtgaaaatcacgggtgaggtacagcccttcatccccaatatcatctacgggatcaccgccctcctcgggggcagtgctgccctcttcctgcctgagaccctgaatcagcccttgccagagactatcgaagacctggaaaactggtccctgcgggcaaagaagccaaagcaggagccagaggtggaaaaggcctcccagaggatccctctacagcctcacggaccaggcctgggctccagctgaggacaacggaaccccctttccctgccctccagagactgatcctagccaggcaccttaggagtatagggaggccccatataggtccatcctcctaggatgaagccttctgagagcttggtgaaggtgtctccatcaccaccaccagagcctcctgcccagccctggccagttcaaaggttcagccatccctgcccttgttctccctgcaacccaggccctgccattcttctgtctagcccttccccactggccaccttcccccactgtcccggtcctcttcccctgaggtcccctgatatcccctggctcagtcctaacaagactgagtcttaacaagatgagaagtcctccccttcttgcctcccacacttttctttgatgggaggtttcaataaacagcgataagaactcta

SEQ ID NO: 19367 - DNA, 2491 bp, Homo sapiens
  source 1..2491: mol_type = unassigned DNA
tgttccaggccccttccccagctcacatccctgccgctcagtgtccccatgctctccctctctgtcactgcccccctctgggtcagctctgccctctggaaccccacagagcaaggctagaccaatgggtttcagactcgaagacaaaaattatgtttatctcaagttttctcctctgtctgactttctcctgctccctgaaagccctttctgtgacctggtttctgcttcccatcctggccatttctttgtgaataggattcaatttgtccaggaacccttcaaagggatcccacagttcagagagaggaagggaaacatctgacccaggcatacagctcaatgctcacctcgccagtctggatgttaaactgctgcccaaccaggagagatcatttactgcctcctttggtctccgagattccctccagtcctgatcttctctagagtcagttattggcacctttgccaccacaccctggaccatgcccacgtcagacatgaccagtcaatcacagcactttctccctgagcccagacacgatctcagaaacctcaaaaggacactcaagcagcccctatcatcagttgcagttggcacaagaagtgaagctattcatcatcctggtgacccaatgaccagcatggggagtggcctctgcctggctgcaggtgctaaccaatccttctctgcctctcaggtttgctaccggttttgcctactatagtttggctatgggtgtggaagaatttggagtcaacctctacatcctccagatcatctttggtggggtcgatgtcccagccaagttcatcaccatcctctccttaagctacctgggccggcataccactcaggccgctgccctgctcctggcaggaggggccatcttggctctcacctttgtgcccttgggtgagagactggggctaccccagaaccctctggaagaggctgccaggttgggtgccagggacttcactgctggctctgcctctaagtcactgtgttaccttgagcaggtccctgcactctctggggctcagggtctctcttctagaaaataacgcaattgggctagatgacatgaaagctcctttccagatctgacttggactgggcaaaaagtatggtggtatctggatagtgtgaaaatttttgaggtattgagagtgtcctgagtgacatcactgtagagataagctgagatggtaaaacgacagagctcatgctcaagaaagaccccacaacctactccatcatgaccttggaaaagctacgtttattttatatgggtgttagttggttgataacacctatacccttccaaaagaacttgaggtattttaagacaagaacaagaacatatacaacaaaatataaatggaaatagaggatcagaggcaggggaaaacacaaacatagcaggacacaggcatgcaaagcattactcagctttaagtttggatctgagcttcttggaagccaaagcaaaaagggagacaagatcagctaaggagtgagaactcttaggtgctcctgaactccaaggcccaccacattttcttccctctgcagacttgcagaccgtgaggacagtattggctgtgtttgggaagggatgcctatccagctccttcagctgcctcttcctctacacaagtgaattataccccacagtcatcaggcaaacaggtatgggcgtaagtaacctgtggacccgcgtgggaagcatggtgtccccgctggtgaaaatcacgggtgaggtacagcccttcatccccaatatcatctacgggatcaccgccctcctcgggggcagtgctgccctcttcctgcctgagaccctgaatcagcccttgccagagactatcgaagacctggaaaactggtcagtcactgcctctggccccatcagtgctcctccctggggaagcaggtctgggcccagggcttttccttagctctctgtccctaggtccctgcgggcaaagaagccaaagcaggagccagaggtggaaaaggcctcccagaggatccctctacagcctcacggaccaggcctgggctccagctgaggacaacggaaccccctttccctgccctccagagactgatcctagccaggcaccttaggagtatagggaggccccatataggtccatcctcctaggatgaagccttctgagagcttggtgaaggtgtctccatcaccaccaccagagcctcctgcccagccctggccagttcaaaggttcagccatccctgcccttgttctccctgcaacccaggccctgccattcttctgtctagcccttccccactggccaccttcccccactgtcccggtcctcttcccctgaggtcccctgatatcccctggctcagtcctaacaagactgagtcttaacaagatgagaagtcctccccttcttgcctcccacacttttctttgatgggaggtttcaataaacagcgataagaactct

SEQ ID NO: 19368 - DNA, 1622 bp, Homo sapiens
  source 1..1622: mol_type = unassigned DNA
actacagcagctgccggcccctaggacagagcagggacctcaactacactgatcaccagccccatcggatccagacccggccaccagcctgcccaatgacacccagagggccatggagccatgcctggatggctgggtctacaacagcaccaaggactccattgtgacagagtgggacttggtgtgcaactccaacaaactgaaggagatggcccagtctatcttcatggcaggtatactgattggagggctcgtgcttggagacctgtctgacaggtttggccgcaggcccatcctgacctgcagctacctgctgctggcagccagcggctccggtgcagccttcagccccaccttccccatctacatggtcttccgcttcctgtgtggctttggcatctcaggcattaccctgagcaccgtcatcttgaatgtggaatgggtgcctacccggatgcgggccatcatgtcgacagcactcgggtactgctacacctttggccagttcattctgcccggcctggcctacgccatcccccagtggcgttggctgcagttaactgtgtccattcccttcttcgtcttcttcctatcatcctggtggacaccagagtccatacgctggttggtcttgtctggaaagtcctcgaaggccctgaagatactccggcgggtggctgtcttcaatggcaagaaggaagagggagaaaggctcagcttggaggagctcaaactcaacctgcagaaggagatctccttggccaaggccaagtacaccgcaagtgacctgttccggatacccatgctgcgccgcatgaccttctgtctttccctggcctggtttgctaccggttttgcctactatagtttggctatgggtgtggaagaatttggagtcaacctctacatcctccagatcatctttggtggggtcgatgtcccagccaagttcatcaccatcctctccttaagctacctgggccggcataccactcaggccgctgccctgctcctggcaggaggggccatcttggctctcacctttgtgcccttggacttgcagaccgtgaggacagtattggctgtgtttgggaagggatgcctatccagctccttcagctgcctcttcctctacacaagtgaattataccccacagtcatcaggcaaacaggtatgggcgtaagtaacctgtggacccgcgtgggaagcatggtgtccccgctggtgaaaatcacgggtgaggtacagcccttcatccccaatatcatctacgggatcaccgccctcctcgggggcagtgctgccctcttcctgcctgagaccctgaatcagcccttgccagagactatcgaagacctggaaaactggtccctgcgggcaaagaagccaaagcaggagccagaggtggaaaaggcctcccagaggatccctctacagcctcacggaccaggcctgggctccagctgaggacaacggaaccccctttccctgccctccagagactgatcctagccaggcaccttaggagtatagggaggccccatataggtccatcctcctaggatgaagccttctgagagcttggtgaaggtgtctccatcaccaccaccagagcctcctg

SEQ ID NO: 19369 - DNA, 1387 bp, Homo sapiens
  source 1..1387: mol_type = unassigned DNA
agcagctgccggcccctaggacagagcagggacctcaactacactgatcaccagccccatcggatccagacccggccaccagtgggacttggtgtgcaactccaacaaactgaaggagatggcccagtctatcttcatggcaggtatactgattggagggctcgtgcttggagacctgtctgacaggtttggccgcaggcccatcctgacctgcagctacctgctgctggcagccagcggctccggtgcagccttcagccccaccttccccatctacatggtcttccgcttcctgtgtggctttggcatctcaggcattaccctgagcaccgtcatcttgaatgtggaatgggtgcctacccggatgcgggccatcatgtcgacagcactcgggtactgctacacctttggccagttcattctgcccggcctggcctacgccatcccccagtggcgttggctgcagttaactgtgtccattcccttcttcgtcttcttcctatcatcctggtggacaccagagtccatacgctggttggtcttgtctggaaagtcctcgaaggccctgaagatactccggcgggtggctgtcttcaatggcaagaaggaagagggagaaaggctcagcttggaggagctcaaactcaacctgcagaaggagatctccttggccaaggccaagtacaccgcaagtgacctgttccggatacccatgctgcgccgcatgaccttctgtctttccctggcctggtttgctaccggttttgcctactatagtttggctatgggtgtggaagaatttggagtcaacctctacatcctccagatcatctttggtggggtcgatgtcccagccaagttcatcaccatcctctccttaagctacctgggccggcataccactcaggccgctgccctgctcctggcaggaggggccatcttggctctcacctttgtgcccttggacttgcagaccgtgaggacagtattggctgtgtttgggaagggatgcctatccagctccttcagctgcctcttcctctacacaagtgaattataccccacagtcatcaggcaaacaggtatgggcgtaagtaacctgtggacccgcgtgggaagcatggtgtccccgctggtgaaaatcacgggtgaggtacagcccttcatccccaatatcatctacgggatcaccgccctcctcgggggcagtgctgccctcttcctgcctgagaccctgaatcagcccttgccagagactatcgaagacctggaaaactggtccctgcgggcaaagaagccaaagcaggagccagaggtggaaaaggcctcccagaggatccctctacagcctcacggaccaggcctgggctccagctgaggacaacgg

SEQ ID NO: 19370 - DNA, 1716 bp, Homo sapiens
  source 1..1716: mol_type = unassigned DNA
atgaccttctcggagatcctggaccgtgtgggaagcatgggccatttccagttcctgcatgtagccatactgggcctcccgatcctcaacatggccaaccacaacctgctgcagatcttcacagccgccacccctgtccaccactgtcgcccgccccacaatgcctccacagggccttgggtgctccccatgggcccaaatgggaagcctgagaggtgcctccgttttgtacatccgcccaatgccagcctgcccaatgacacccagagggccatggagccatgcctggatggctgggtctacaacagcaccaaggactccattgtgacagagtgggacttggtgtgcaactccaacaaactgaaggagatggcccagtctatcttcatggcaggtatactgattggagggctcgtgcttggagacctgtctgacaggtttggccgcaggcccatcctgacctgcagctacctgctgctggcagccagcggctccggtgcagccttcagccccaccttccccatctacatggtcttccgcttcctgtgtggctttggcatctcaggcattaccctgagcaccgtcatcttgaatgtggaatgggtgcctacccggatgcgggccatcatgtcgacagcactcgggtactgctacacctttggccagttcattctgcccggcctggcctacgccatcccccagtggcgttggctgcagttaactgtgtccattcccttcttcgtcttcttcctatcatcctggtggacaccagagtccatacgctggttggtcttgtctggaaagtcctcgaaggccctgaagatactccggcgggtggctgtcttcaatggcaagaaggaagagggagaaaggctcagcttggaggagctcaaactcaacctgcagaaggagatctccttggccaaggccaagtacaccgcaagtgacctgttccggatacccatgctgcgccgcatgaccttctgtctttccctggcctggtttgctaccggttttgcctactatagtttggctatgggtgtggaagaatttggagtcaacctctacatcctccagatcatctttggtggggtcgatgtcccagccaagttcatcaccatcctctccttaagctacctgggccggcataccactcaggccgctgccctgctcctggcaggaggggccatcttggctctcacctttgtgcccttggacttgcagaccgtgaggacagtattggctgtgtttgggaagggatgcctatccagctccttcagctgcctcttcctctacacaagtgaattataccccacagtcatcaggcaaacaggtatgggcgtaagtaacctgtggacccgcgtgggaagcatggtgtccccgctggtgaaaatcacgggtgaggtacagcccttcatccccaatatcatctacgggatcaccgccctcctcgggggcagtgctgccctcttcctgcctgagaccctgaatcagcccttgccagagactatcgaagacctggaaaactggtcagtcactgcctctggccccatcagtgctcctccctggggaagcaggtctgggcccagggcttttccttagctctctgtccctaggtccctgcgggcaaagaagccaaagcaggagccagaggtggaaaaggcctcccagaggatccctctacagcctcacggaccaggcctgggctccagctga

SEQ ID NO: 19371 - DNA, 1744 bp, Homo sapiens
  source 1..1744: mol_type = unassigned DNA
agcttgttagagctgagctgccctactacagcagctgccggcccctaggacagagcagggacctcaactacactgatcaccagccccatcggatccagacccggccaccagtgccatgaccttctcggagatcctggaccgtgtgggaagcatgggccatttccagttcctgcatgtagccatactgggcctcccgatcctcaacatggccaaccacaacctgctgcagatcttcacagccgccacccctgtccaccactgtcgcccgccccacaatgcctccacagggccttgggtgctccccatgggcccaaatgggaagcctgagaggtgcctccgttttgtacatccgcccaatgccagcctgcccaatgacacccagagggccatggagccatgcctggatggctgggtctacaacagcaccaaggactccattgtgacagagtgggacttggtgtgcaactccaacaaactgaaggagatggcccagtctatcttcatggcaggtatactgattggagggctcgtgcttggagacctgtctgacaggtttggccgcaggcccatcctgacctgcagctacctgctgctggcagccagcggctccggtgcagccttcagccccaccttccccatctacatggtcttccgcttcctgtgtggctttggcatctcaggcattaccctgagcaccgtcatcttgaatgtggaatgggtgcctacccggatgcgggccatcatgtcgacagcactcgggtactgctacacctttggccagttcattctgcccggcctggcctacgccatcccccagtggcgttggctgcagttaactgtgtccattcccttcttcgtcttcttcctatcatcctggtggacaccagagtccatacgctggttggtcttgtctggaaagtcctcgaaggccctgaagatactccggcgggtggctgtcttcaatggcaagaaggaagagggagaaaggctcagcttggaggagctcaaactcaacctgcagaaggagatctccttggccaaggccaagtacaccgcaagtgacctgttccggatacccatgctgcgccgcatgaccttctgtctttccctggcctggtttgctaccggttttgcctactatagtttggctatgggtgtggaagaatttggagtcaacctctacatcctccagatcatctttggtggggtcgatgtcccagccaagttcatcaccatcctctccttaagctacctgggccggcataccactcaggccgctgccctgctcctggcaggaggggccatcttggctctcacctttgtgcccttggacttgcagaccgtgaggacagtattggctgtgtttgggaagggatgcctatccagctccttcagctgcctcttcctctacacaagtgaattataccccacagtcatcaggcaaacaggtatgggcgtaagtaacctgtggacccgcgtgggaagcatggtgtccccgctggtgaaaatcacgggtgaggtacagcccttcatccccaatatcatctacgggatcaccgccctcctcgggggcagtgctgccctcttcctgcctgagaccctgaatcagcccttgccagagactatcgaagacctggaaaactggtccctgcgggcaaagaagccaaagcaggagccagaggtggaaaaggcctcccagaggatccctctacagcctcacggaccaggcctgggctccagctga

SEQ ID NO: 19372 - DNA, 543 bp, Homo sapiens
  source 1..543: mol_type = unassigned DNA
agacaaacccaaggagctccgagccgggctgaaaaaggaaacggtccttgggagtgggacttggtgtgcaactccaacaaactgaaggagatggcccagtctatcttcatggcaggtatactgattggagggctcgtgcttggagacctgtctgacaggtttggccgcaggcccatcctgacctgcagctacctgctgctggcagccagcggctccggtgcagccttcagccccaccttccccatctacatggtcttccgcttcctgtgtggctttggcatctcaggcattaccctgagcaccgtcatcttgaatgtggaatgggtgcctacccggatgcgggccatcatgtcgacagcactcgggtactgctacacctttggccagttcattctgcccggcctggcctacgccatcccccagtggcgttggctgcagttaactgtgtccattcccttcttcgtcttcttcctatcatcctggtggacaccagagtccatacgctggttggtcttgtctggaaagtcctcgaaggccctgaag

SEQ ID NO: 19373 - DNA, 648 bp, Homo sapiens
  source 1..648: mol_type = unassigned DNA
cagacaaacccaaggagctccgagccgggctgaaaaaggaaacggtccttgggaggtaggggcaaagtcagggcgctgggagaggaagcccacatgtatgaggccacaggctgagcatggctgagcaggctgtctacactgagttaggctagccctacctttctcttgtgcagtgggacttggtgtgcaactccaacaaactgaaggagatggcccagtctatcttcatggcaggtatactgattggagggctcgtgcttggagacctgtctgacaggtttggccgcaggcccatcctgacctgcagctacctgctgctggcagccagcggctccggtgcagccttcagccccaccttccccatctacatggtcttccgcttcctgtgtggctttggcatctcaggcattaccctgagcaccgtcatcttgaatgtggaatgggtgcctacccggatgcgggccatcatgtcgacagcactcgggtactgctacacctttggccagttcattctgcccggcctggcctacgccatcccccagtggcgttggctgcagttaactgtgtccattcccttcttcgtcttcttcctatcatcctggtggacaccagagtccatacgctggttggtcttgtctggaaagtcct

SEQ ID NO: 19374 - DNA, 521 bp, Homo sapiens
  source 1..521: mol_type = unassigned DNA
agcttgttagagctgagctgccctactacagcagctgccggcccctaggacagagcagggacctcaactacactgatcaccagccccatcggatccagacccggccaccagctctggctcgtcttgccccagtgccatgaccttctcggagatcctggaccgtgtgggaagcatgggccatttccagttcctgcatgtagccatactgggcctcccgatcctcaacatggccaaccacaacctgctgcagatcttcacagccgccacccctgtccaccactgtcgcccgccccacaatgcctccacagggccttgggtgctccccatgggcccaaatgggaagcctgagaggtgcctccgttttgtacatccgcccaatgccagcctgcccaatgacacccagagggccatggagccatgcctggatggctgggtctacaacagcaccaaggactccattgtgacagaggtatgcctgggcaaaccctctccctccacttacccacgtacccccataccct

SEQ ID NO: 19375 - DNA, 3929 bp, Homo sapiens
  source 1..3929: mol_type = unassigned DNA
gcgacgaggagggcgacgacgaggagacgggcagcggcgaggaggaggaagaggaggcggaggcggcggccgggtgggagcgcagcgaggacgcgcggctgctgcgcgcagggctgcctcctgccgctgtccccgccgcggccgcccgcgacaggagcggccgccgcccgccgaggccgccgcccggccgcccgaggatgcggccgtccggcgacgaggaccgcgcgcgtcgccgccgccgccgccgccgccggagggaccttctgctgagccagctctgcttcctggcctcggtggcgctgctgctctggtcgctgtcgagcctgcgagagcagaaggagcttgacctcatggacctcgtaggggaagacagaaagtggatgatggcgaggaagctgatgcaggtgaacgacactctgacttccgaagatgccggactccggaacagcaagaactgcaccgaaccagccctgcatgaattccccaatgacatcttcacaaacgaggatagaagacaaggtgcggtggtcctccatgtgctctgtgccatatacatgttctatgcgctggccattgtgtgtgatgacttcttcgtcccttccttggaaaagatctgtgagcgcctgcacctcagtgaagatgtggctggggccacattcatggcagcgggaagttcggccccagagctgttcacatcggtcataggggtcttcatcaccaaaggcgatgtgggagttggcaccatcgtgggctcagcggtattcaacatcctgtgcatcattggtgtctgtgggctctttgctgggcaggttgtggctctttcctcctggtgcctgctgagggattctatttactacacgctgtctgtgatcgcgctcatcgtgtttatttatgatgaaaaagtttcctggtgggagtctttagtccttgtgctgatgtatcttatctacattgtcatcatgaaatataacgcttgcatacatcagtgctttgagaggaggacaaaaggtgccgggaacatggtcaacggattggccaacaatgctgaaattgatgacagcagcaactgcgacgcaactgtggtgctacttaagaaagcaaatttccaccgcaaagcatcagtgatcatggtagacgagctgctgtcagcctacccacaccagctttccttctctgaggctggccttcgaatcatgataaccagccactttccccccaagacccggctctccatggccagtcgcatgttgatcaatgagagacaaagattgataaacagcagggcttataccaacggggaatctgaggtggccatcaaaatcccaattaagcacaccgtggagaatgggacagggcccagcagtgccccagacaggggcgtgaatgggacacggagggacgatgttgtggctgaggctggcaacgaaacagagaatgaaaatgaggacaatgagaatgatgaggaggaagaggaggacgaggatgatgatgaaggaccgtacacaccattcgacaccccctcgggtaaactggaaacagtgaaatgggcgttcacctggccgctgagtttcgtcttatacttcactgtacccaactgcaacaagccgcgctgggagaaatggttcatggtgacgtttgcttcctccacgctgtggatcgcagccttctcctacatgatggtgtggatggtcacaatcattggttacaccctggggattcctgacgtcatcatggggatcaccttcctggctgctgggaccagcgtgcctgactgcatggccagcctcattgtggccagacaagggatgggggacatggctgtgtccaactccattgggagcaacgtgtttgacatcctgattggcctcggtctcccctgggctctgcagaccctggctgtggattacggatcctacatccggctgaatagcagggggctgatctactccgtaggcttgctcctggcctctgtttttgtcacggtgttcggcgtccacctgaacaagtggcagctggacaagaagctgggctgtgggtgcctcctcctgtatggtgtgttcctgtgcttctccatcatgactgagttcaacgtgttcacctttgtgaacctgcccatgtgcggggaccactgagccgccgggtgcccacagaggctcagctccttcttttctgtgcaatacgagacccggccgcaccccgagtcacacaggcccccggggccacggcgttcgtctctcctgtgctgtcctcaggcctccgctcctgttttggtggcccaggctctcccctgacccatcctcgctcccccacctccttgggtcatgcccacccaccctttcctgcctcctccgtgtgaagacatccaacatccacgtgacttttccagctccatttttgaacagtgactgagattctagaaaaactggctgctaactggcctgagccaggcaacactgattccaatccctcctccttttttaagttatttgatggaagactcacctaatttgtgacctgagactgttgaagaaatagagaggagggggcccgttgattacagagagcatttgggattttgtttggtttggagatgatgcctaggttactgggtttggggggattgttttcttttgggggccttccccttttactccttttcttccagagatcaagagcttctcttgcatcttcttccactgggctctggattaatcaattacccaaaggctgcacctgccgtgttgtctgggcttgcatcccagatgtgttggagtatgcatggatgtagtgctttttagaggagccactgggcaaggccaccaagaacaaatgcatgacattttatagccaaggacgcctcgctaaagtcttatgggcgtcccctggggttgggggggcacaaggttttggaggaagaagacaacttccctcattccatcatcaccatctctttctcactaggttctttctagttttcaagcaatagttctagcctgccttggacaagggggccccagttaaacaaactacccatccatgagctgccaggcagtcaaaaacagaagcttccccgacttgtgagtccctgagatgtgctcttgttgtttggcatttggggtgacagggagtgacccagaggccaccactgcttttcatgcaggagttacagacactggtttcttggaaaatggagagaagcgcactttgcacagacgtcgtcaattaagtcccaatttgccacttggtattgagtacactggaccctgaccactggctcttgggcaaacgtccttcctcacggggcgcctccgccaagccggcccagctgcacccctcccttcctggagggatggccagggaaggagaaaacagagaactgacacctttgaaaccacagaatgtgttacatgcagactcgctcaagggcataagttattgtgaacgtttttgccaatcactgctcaacagccctgctagattttgtatgatgctgaattattatgcagactaattccacccagttgagacacaccatgcttgttcacttgtatttattgaaactgtggattcttgcccgtgctgtcccttgtatttactttaagcactgatcacttatcattcattcggtatggttttccctgtcccttgtacacattctggtatgaatttgtaaaaataacctgctacaaattggttgaatgtttctgtctgtggtgcgaaccagcattaacggatggggcacgtgcccaactgaggaacaggagaagaaatcaccaatttgggctctcagagctaagacacacttattgattctgttgcacattttgcactggtttatggcgattgttttcttggacggatagtgtaaaataaacttctctgttctctatccttcccagagcagagtgcattactttctcccctggaaa

SEQ ID NO: 19376 - DNA, 3694 bp, Homo sapiens
  source 1..3694: mol_type = unassigned DNA
atgcggccgtccggcgacgaggaccgcgcgcgtcgccgccgccgccgccgccgccggagggaccttctgctgagccagctctgcttcctggcctcggtggcgctgctgctctggtcgctgtcgagcctgcgagagcagaaggagcttgacctcatggacctcgtaggggaagacagaaagtggatgatggcgaggaagctgatgcaggtgaacgacactctgacttccgaagatgccggactccggaacagcaagaactgcaccgaaccggccctgcatgaattccccaatgacatcttcacaaacgaggatagaagacaaggtgcggtggtcctccatgtgctctgtgccatatacatgttctatgcgctggccattgtgtgtgatgacttcttcgtcccttccttggaaaagatctgtgagcgcctgcacctcagtgaagatgtggctggggccacattcatggcagcgggaagttcggccccagagctgttcacatcggtcataggggtcttcatcaccaaaggcgatgtgggagttggcaccatcgtgggctcagcggtattcaacatcctgtgcatcattggtgtctgtgggctctttgctgggcaggttgtggctctttcctcctggtgcctgctgagggattctatttactacacgctgtctgtgatcgcgctcatcgtgtttatttatgatgaaaaagtttcctggtgggagtctttagtccttgtgctgatgtatcttatctacattgtcatcatgaaatataacgcttgcatacatcagtgctttgagaggaggacaaaaggtgccgggaacatggtcaacggattggccaacaatgctgaaattgatgacagcagcaactgcgacgcaactgtggtgctacttaagaaagcaaatttccaccgcaaagcatcagtgatcatggtagacgagctgctgtcagcctacccacaccagctttccttctctgaggctggccttcgaatcatgataaccagccactttccccccaagacccggctctccatggccagtcgcatgttgatcaatgagagacaaagattgataaacagcagggcttataccaacggggaatctgaggtggccatcaaaatcccaattaagcacaccgtggagaatgggacagggcccagcagtgccccagacaggggcgtgaatgggacacggagggacgatgttgtggctgaggctggcaacgaaacagagaatgaaaatgaggacaatgagaatgatgaggaggaagaggaggacgaggatgatgatgaaggaccgtacacaccattcgacaccccctcgggtaaactggaaacagtgaaatgggcgttcacctggccgctgagtttcgtcttatacttcactgtacccaactgcaacaagccgcgctgggagaaatggttcatggtgacgtttgcttcctccacgctgtggatcgcagccttctcctacatgatggtgtggatggtcacaatcattggttacaccctggggattcctgacgtcatcatggggatcaccttcctggctgctgggaccagcgtgcctgactgcatggccagcctcattgtggccagacaagggatgggggacatggctgtgtccaactccattgggagcaacgtgtttgacatcctgattggcctcggtctcccctgggctctgcagaccctggctgtggattacggatcctacatccggctgaatagcagggggctgatctactccgtaggcttgctcctggcctctgtttttgtcacggtgttcggcgtccacctgaacaagtggcagctggacaagaagctgggctgtgggtgcctcctcctgtatggtgtgttcctgtgcttctccatcatgactgagttcaacgtgttcacctttgtgaacctgcccatgtgcggggaccactgagccgccgggtgcccacagaggctcagctccttcttttctgtgcaatacgagacccggccgcaccccgagtcacacaggcccccggggccacggcgttcgtctctcctgtgctgtcctcaggcctccgctcctgttttggtggcccaggctctcccctgacccatcctcgctcccccacctccttgggtcatgcccacccaccctttcctgcctcctccgtgtgaagacatccaacatccacgtgacttttccagctccatttttgaacagtgactgagattctagaaaaactggctgctaactggcctgagccaggcaacactgattccaatccctcctccttttttaagttatttgatggaagactcacctaatttgtgacctgagactgttgaagaaatagagaggagggggcccgttgattacagagagcatttgggattttgtttggtttggagatgatgcctaggttactgggtttggggggattgttttcttttgggggccttccccttttactccttttcttccagagatcaagagcttctcttgcatcttcttccactgggctctggattaatcaattacccaaaggctgcacctgccgtgttgtctgggcttgcatcccagatgtgttggagtatgcatggatgtagtgctttttagaggagccactgggcaaggccaccaagaacaaatgcatgacattttatagccaaggacgcctcgctaaagtcttatgggcgtcccctggggttgggggggcacaaggttttggaggaagaagacaacttccctcattccatcatcaccatctctttctcactaggttctttctagttttcaagcaatagttctagcctgccttggacaagggggccccagttaaacaaactacccatccatgagctgccaggcagtcaaaaacagaagcttccccgacttgtgagtccctgagatgtgctcttgttgtttggcatttggggtgacagggagtgacccagaggccaccactgcttttcatgcaggagttacagacactggtttcttggaaaatggagagaagcgcactttgcacagacgtcgtcaattaagtcccaatttgccacttggtattgagtacactggaccctgaccactggctcttgggcaaacgtccttcctcacggggcgcctccgccaagccggcccagctgcacccctcccttcctggagggatggccagggaaggagaaaacagagaactgacacctttgaaaccacagaatgtgttacatgcagactcgctcaagggcataagttattgtgaacgtttttgccaatcactgctcaacagccctgctagattttgtatgatgctgaattattatgcagactaattccacccagttgagacacaccatgcttgttcacttgtatttattgaaactgtggattcttgcccgtgctgtcccttgtatttactttaagcactgatcacttatcattcattcggtatggttttccctgtcccttgtacacattctggtatgaatttgtaaaaataacctgctacaaattggttgaatgtttctgtctgtggtgcgaaccagcattaacggatggggcacgtgcccaactgaggaacaggagaagaaatcaccaatttgggctctcagagctaagacacacttattgattctgttgcacattttgcactggtttatggcgattgttttcttggacggatagtgtaaaataaacttctctgttctctatc

SEQ ID NO: 19377 - DNA, 4417 bp, Homo sapiens
  source 1..4417: mol_type = unassigned DNA
gggcccgcagatctctctggttcccctctctgccccgtctccagcttttttgcagggcacaaaacagcttctgctagcaaacgtgtcctgccagacacgtggagaaatagaaagttgatggccccagtgaatgggacacagacagccaagaactgcacagatcctgcgattcacgagttccccacagatctgttctccaataaggagcgacagcacggagccgtcctgctgcacatccttggtgctctgtatatgttctatgccttggccatagtgtgcgatgacttctttgttccgtctctagagaagatctgtgagagactccatctgagcgaagatgtggctggagccaccttcatggctgcaggaagctcaacgccagagctgtttgcgtctgttattggggtgttcatcacccatggggacgtcggggtgggcaccatcgtgggctctgctgtgttcaacatcctgtgcataattggagtgtgcggactgtttgctggccaggtggtccgtctgacgtggtgggccgtgtgccgagactccgtgtactacaccatctctgtcatcgtgctcatcgtgttcatatatgatgaacaaattgtgtggtgggaaggcctggtgctcatcatcttgtatgtgttttatattctgatcatgaagtacaatgtgaagatgcaagcctttttcacagtcaaacaaaagagcattgcaaacggtaacccggtcaacagtgagctggaggctggtaatgatttctatgacggtagctatgatgacccttccgtgccattgctggggcaagtgaaggagaagccacagtatggcaagaaccccgtggtgatggtggacgagattatgagctccagccctcccaagttcaccttccctgaagcaggcttacgaatcatgatcaccaataagtttggacccaggacccgactacggatggccagcaggatcatcattaatgagcggcagagactgatcaactcggccaatggtgtgagcagtaagccgcttcaaaacgggaggcacgagaacattgagaacgggaatgttcctgtggaaaaccccgaagaccctcagcagaatcaggagcagcagccgccgccacagccaccaccgccagagccagagccggtggaggctgacttcctgtcccccttctccgtgccggaggccagaggggacaaggtcaagtgggtgttcacctggcccctcatcttcctcctgtgcgtcaccattcccaactgcagcaagccccgctgggagaagttcttcatggtcaccttcatcaccgccacgctgtggatcgctgtgttctcctacatcatggtgtggctggtgactattatcggatacacacttgggatcccggatgtcatcatgggcattactttcctggcagcagggacaagtgttccagactgcatggccagcctaattgtggcgagacaaggccttggggacatggcagtctccaacaccataggaagcaacgtgtttgacatcctggtaggacttggtgtaccgtggggcctgcagaccatggttgttaattatggatcaacagtgaagatcaacagccgggggctggtctattccgtggtcctgttgctgggctctgtcgctctcaccgtcctcggcatccacctaaacaagtggcgactggaccggaagctgggtgtctacgtgctggttctctacgccatcttcttgtgcttctccataatgatagagtttaacgtctttaccttcgtcaacttgccgatgtgccgggaagacgattagcgctgagtcgcggcccctgggagctgatctggacaccctgtgacactggcgttctcctctcccctccttcccccaccacaggtctctcctgcataggcagccactgtccgttctttcacacactggaaggaagagccatcgtggtctttgtctggccacaggccaggctgctgggcatcctcctcctccttggagttccgcccctgcaaggctggatttgggggccattatctgagcagcttcaaagacccctgagctgccaaccacggagatgtgccaagcatctcatctctcctgcacactttagtcagaaggacttctgcatgcagtttgtctttctgttctgcaggcagcttcagaattgaggtcatttgtgagcacaagatctcatagggcaggtgcaaaataggaatgttgttctcaagtgtcacctccagcccagaggtggttccttaggcagcatgtgctcctgggagcctctgacttttgctggaagcagccacagtttggaaggggcaagacctcaacctgttggggtttagggcccatgatggcagacattctaccccttttcctggaaaaactggaagaatgaaaataatttttttctgtggaagagagaaaatgagtgaatattcttctcacttttattgatgcattcagagaataagcaatgaaatattaaaaaatgaaacatcatataggtcatcatacttgaaaattatcattccatatgaaaggatcatgatacacaccaaaaaagtaatgatcgtaaagacacaaatcctctgtatgccatcttgcattggcactgaggtgtttggtttggaatagggaaaaaggtaagagactaacgtggaaaggtgctaactcagagactggagattatagtttacagctgtactttccagatcttctatgtgacacaatgcactgtccttgtgggtttgtcatttattggttaatgctctagtttcaaaaccaccctgttgaaagttccagttatttatatgcccaacaaatttcatagcctgctgaactgaactgagtgtgtcagaagtgctggttaatgacgagaagagattgcctgaaaaacaacaaactgctttctggttagctgaaggcaagtgtgaaaatcagaatttagaatatttagagctaagcttctggaaccacgtagtttctacacgtggcaggccaagaatgggaggctgactcaaaactagatagaaaaatataaaataatcttcgaccacttgatagctctcaaatatatatttaaaagatttatgaatacaaaccatttatggtttatgatttctaaaaagaaagcacaattaattttatagagaggttttttatttttttaatatttctattgcaaaagtctatccgatttgatgcactttgaatattgagatattttgcacggatgaatgtatgggaactacccatgatgatgtaagaggaaagaacatttttttgtgattcaccagacatcactttaaacttggtgatgagtttaaatccagtagctaatcccttcctgagactcaaagatcgtgacgctggttggaatttctgactgtgccctttagggcctcctgagtttcaaaaggaggaagtgttcgtgcttgtgtccctgaagttccctgttgcatgagcctgcgacaggacctcacccccaccaccaggcttctatttgggattcacatcagtattagtatcgtagctacaccaagttcaggcttctctttttgtttttttacctagaaattgggctcagtggtcttcaacttgaggacgagggtgattttcctaagaaatcagcaaagagggaaggcagggcccctgtagattcaccagtataaacttcagctgcagggattccagagccctcgggaccactctgtcaccttaatagccaagttctcctggttcctccgatcttacaggctcatccaggttccaaagtgcttctgtctctgttttgattctccaaactgctctgtgatgtatgtagggattattctccccacttaacagaaagtagtgtcttggagaggtcaagggtctctagttcaatggccagtcatagcagaagggaggccaagcaccagtccatcacccctcccaggccagcctctgtaagttggccacacttggggagtgagtgtgggtatgactttaccctcctggttggttcttactgtttgagtcaaaacctcatcaatatatcattgactcctgggttcctcaggtcatttcctaatatctgtccctatccaatgcctctattttatcttgaaaaaaggaccaaaaattatttttagctatggcaaggcacaggccacatggcccctgatggcgtccctgctggttttcaattctctgaagccttgtgtagctttcagagcacacgtatcctaattaccctcctcttcctcagcagaacccatttgagattctaaatgaatactcttagtctctaaagttgcagttagaaactaaaataatgttttttaatatgtaatatgctcctcttggctaattttcttttgactttaatgtgccaatgtaacttcctttaaaggatctatgcatttattaaatctggaaaact

SEQ ID NO: 19378 - DNA, 4531 bp, Homo sapiens
  source 1..4531: mol_type = unassigned DNA
agagagaaagttcccggggagagctcgcccctgggagggccgacgtcgagcctgctcgccgcgagggtctcagagacggcacccaggcgctccgggatggcgctccgcgggaccctccggccgctcaaagttcgcaggaggcgagagatgctgccgcagcaagtcggcttcgtgtgcgcggtgctggccctggtgtgctgtgcgtccggcctcttcggcagcttggggcacaaaacagcttctgctagcaaacgtgtcctgccagacacgtggagaaatagaaagttgatggccccagtgaatgggacacagacagccaagaactgcacagatcctgcgattcacgagttccccacagatctgttctccaataaggagcgacagcacggagccgtcctgctgcacatccttggtgctctgtatatgttctatgccttggccatagtgtgcgatgacttctttgttccgtctctagagaagatctgtgagagactccatctgagcgaagatgtggctggagccaccttcatggctgcaggaagctcaacgccagagctgtttgcgtctgttattggggtgttcatcacccatggggacgtcggggtgggcaccatcgtgggctctgctgtgttcaacatcctgtgcataattggagtgtgcggactgtttgctggccaggtggtccgtctgacgtggtgggccgtgtgccgagactccgtgtactacaccatctctgtcatcgtgctcatcgtgttcatatatgatgaacaaattgtgtggtgggaaggcctggtgctcatcatcttgtatgtgttttatattctgatcatgaagtacaatgtgaagatgcaagcctttttcacagtcaaacaaaagagcattgcaaacggtaacccggtcaacagtgagctggaggctgtgaaggagaagccacagtatggcaagaaccccgtggtgatggtggacgagattatgagctccagccctcccaagttcaccttccctgaagcaggcttacgaatcatgatcaccaataagtttggacccaggacccgactacggatggccagcaggatcatcattaatgagcggcagagactgatcaactcggccaatggtgtgagcagtaagccgcttcaaaacgggaggcacgagaacattgagaacgggaatgttcctgtggaaaaccccgaagaccctcagcagaatcaggagcagcagccgccgccacagccaccaccgccagagccagagccggtggaggctgacttcctgtcccccttctccgtgccggaggccagaggggacaaggtcaagtgggtgttcacctggcccctcatcttcctcctgtgcgtcaccattcccaactgcagcaagccccgctgggagaagttcttcatggtcaccttcatcaccgccacgctgtggatcgctgtgttctcctacatcatggtgtggctggtgactattatcggatacacacttgggatcccggatgtcatcatgggcattactttcctggcagcagggacaagtgttccagactgcatggccagcctaattgtggcgagacaaggccttggggacatggcagtctccaacaccataggaagcaacgtgtttgacatcctggtaggacttggtgtaccgtggggcctgcagaccatggttgttaattatggatcaacagtgaagatcaacagccgggggctggtctattccgtggtcctgttgctgggctctgtcgctctcaccgtcctcggcatccacctaaacaagtggcgactggaccggaagctgggtgtctacgtgctggttctctacgccatcttcttgtgcttctccataatgatagagtttaacgtctttaccttcgtcaacttgccgatgtgccgggaagacgattagcgctgagtcgcggcccctgggagctgatctggacaccctgtgacactggcgttctcctctcccctccttcccccaccacaggtctctcctgcataggcagccactgtccgttctttcacacactggaaggaagagccatcgtggtctttgtctggccacaggccaggctgctgggcatcctcctcctccttggagttccgcccctgcaaggctggatttgggggccattatctgagcagcttcaaagacccctgagctgccaaccacggagatgtgccaagcatctcatctctcctgcacactttagtcagaaggacttctgcatgcagtttgtctttctgttctgcaggcagcttcagaattgaggtcatttgtgagcacaagatctcatagggcaggtgcaaaataggaatgttgttctcaagtgtcacctccagcccagaggtggttccttaggcagcatgtgctcctgggagcctctgacttttgctggaagcagccacagtttggaaggggcaagacctcaacctgttggggtttagggcccatgatggcagacattctaccccttttcctggaaaaactggaagaatgaaaataatttttttctgtggaagagagaaaatgagtgaatattcttctcacttttattgatgcattcagagaataagcaatgaaatattaaaaaatgaaacatcatataggtcatcatacttgaaaattatcattccatatgaaaggatcatgatacacaccaaaaaagtaatgatcgtaaagacacaaatcctctgtatgccatcttgcattggcactgaggtgtttggtttggaatagggaaaaaggtaagagactaacgtggaaaggtgctaactcagagactggagattatagtttacagctgtactttccagatcttctatgtgacacaatgcactgtccttgtgggtttgtcatttattggttaatgctctagtttcaaaaccaccctgttgaaagttccagttatttatatgcccaacaaatttcatagcctgctgaactgaactgagtgtgtcagaagtgctggttaatgacgagaagagattgcctgaaaaacaacaaactgctttctggttagctgaaggcaagtgtgaaaatcagaatttagaatatttagagctaagcttctggaaccacgtagtttctacacgtggcaggccaagaatgggaggctgactcaaaactagatagaaaaatataaaataatcttcgaccacttgatagctctcaaatatatatttaaaagatttatgaatacaaaccatttatggtttatgatttctaaaaagaaagcacaattaattttatagagaggttttttatttttttaatatttctattgcaaaagtctatccgatttgatgcactttgaatattgagatattttgcacggatgaatgtatgggaactacccatgatgatgtaagaggaaagaacatttttttgtgattcaccagacatcactttaaacttggtgatgagtttaaatccagtagctaatcccttcctgagactcaaagatcgtgacgctggttggaatttctgactgtgccctttagggcctcctgagtttcaaaaggaggaagtgttcgtgcttgtgtccctgaagttccctgttgcatgagcctgcgacaggacctcacccccaccaccaggcttctatttgggattcacatcagtattagtatcgtagctacaccaagttcaggcttctctttttgtttttttacctagaaattgggctcagtggtcttcaacttgaggacgagggtgattttcctaagaaatcagcaaagagggaaggcagggcccctgtagattcaccagtataaacttcagctgcagggattccagagccctcgggaccactctgtcaccttaatagccaagttctcctggttcctccgatcttacaggctcatccaggttccaaagtgcttctgtctctgttttgattctccaaactgctctgtgatgtatgtagggattattctccccacttaacagaaagtagtgtcttggagaggtcaagggtctctagttcaatggccagtcatagcagaagggaggccaagcaccagtccatcacccctcccaggccagcctctgtaagttggccacacttggggagtgagtgtgggtatgactttaccctcctggttggttcttactgtttgagtcaaaacctcatcaatatatcattgactcctgggttcctcaggtcatttcctaatatctgtccctatccaatgcctctattttatcttgaaaaaaggaccaaaaattatttttagctatggcaaggcacaggccacatggcccctgatggcgtccctgctggttttcaattctctgaagccttgtgtagctttcagagcacacgtatcctaattaccctcctcttcctcagcagaacccatttgagattctaaatgaatactcttagtctctaaagttgcagttagaaactaaaataatgttttttaatatgtaatatgctcctcttggctaattttcttttgactttaatgtgccaatgtaacttcctttaaaggatctatgcatttattaaatctggaaaact

SEQ ID NO: 19379 - DNA, 9950 bp, Homo sapiens
  source 1..9950: mol_type = unassigned DNA
gcacgcggcgcgcgggactctgagctccggccgcgtcgcgcgtccccaccttcccaaggggctcccccgccgacctcgccctcgggccatgaggctttggcccggagctcctcgcctctgagtcgcgcaccgcctgctccagccccagcgccgctcggccactgattgcactctggccgctgaagctccccatcctctcccagagacggcacccaggcgctccgggatggcgctccgcgggaccctccggccgctcaaagttcgcaggaggcgagagatgctgccgcagcaagtcggcttcgtgtgcgcggtgctggccctggtgtgctgtgcgtccggcctcttcggcagcttggggcacaaaacagcttctgctagcaaacgtgtcctgccagacacgtggagaaatagaaagttgatggccccagtgaatgggacacagacagccaagaactgcacagatcctgcgattcacgagttccccacagatctgttctccaataaggagcgacagcacggagccgtcctgctgcacatccttggtgctctgtatatgttctatgccttggccatagtgtgcgatgacttctttgttccgtctctagagaagatctgtgagagactccatctgagcgaagatgtggctggagccaccttcatggctgcaggaagctcaacgccagagctgtttgcgtctgttattggggtgttcatcacccatggggacgtcggggtgggcaccatcgtgggctctgctgtgttcaacatcctgtgcataattggagtgtgcggactgtttgctggccaggtggtccgtctgacgtggtgggccgtgtgccgagactccgtgtactacaccatctctgtcatcgtgctcatcgtgttcatatatgatgaacaaattgtgtggtgggaaggcctggtgctcatcatcttgtatgtgttttatattctgatcatgaagtacaatgtgaagatgcaagcctttttcacagtcaaacaaaagagcattgcaaacggtaacccggtcaacagtgagctggaggctggtaatgatttctatgacggtagctatgatgacccttccgtgccattgctggggcaagtgaaggagaagccacagtatggcaagaaccccgtggtgatggtggacgagattatgagctccagccctcccaagttcaccttccctgaagcaggcttacgaatcatgatcaccaataagtttggacccaggacccgactacggatggccagcaggatcatcattaatgagcggcagagactgatcaactcggccaatggtgtgagcagtaagccgcttcaaaacgggaggcacgagaacattgagaacgggaatgttcctgtggaaaaccccgaagaccctcagcagaatcaggagcagcagccgccgccacagccaccaccgccagagccagagccggtggaggctgacttcctgtcccccttctccgtgccggaggccagaggggacaaggtcaagtgggtgttcacctggcccctcatcttcctcctgtgcgtcaccattcccaactgcagcaagccccgctgggagaagttcttcatggtcaccttcatcaccgccacgctgtggatcgctgtgttctcctacatcatggtgtggctggtgactattatcggatacacacttgggatcccggatgtcatcatgggcattactttcctggcagcagggacaagtgttccagactgcatggccagcctaattgtggcgagacaaggccttggggacatggcagtctccaacaccataggaagcaacgtgtttgacatcctggtaggacttggtgtaccgtggggcctgcagaccatggttgttaattatggatcaacagtgaagatcaacagccgggggctggtctattccgtggtcctgttgctgggctctgtcgctctcaccgtcctcggcatccacctaaacaagtggcgactggaccggaagctgggtgtctacgtgctggttctctacgccatcttcttgtgcttctccataatgatagagtttaacgtctttaccttcgtcaacttgccgatgtgccgggaagacgattagcgctgagtcgcggcccctgggagctgatctggacaccctgtgacactggcgttctcctctcccctccttcccccaccacaggtctctcctgcataggcagccactgtccgttctttcacacactggaaggaagagccatcgtggtctttgtctggccacaggccaggctgctgggcatcctcctcctccttggagttccgcccctgcaaggctggatttgggggccattatctgagcagcttcaaagacccctgagctgccaaccacggagatgtgccaagcatctcatctctcctgcacactttagtcagaaggacttctgcatgcagtttgtctttctgttctgcaggcagcttcagaattgaggtcatttgtgagcacaagatctcatagggcaggtgcaaaataggaatgttgttctcaagtgtcacctccagcccagaggtggttccttaggcagcatgtgctcctgggagcctctgacttttgctggaagcagccacagtttggaaggggcaagacctcaacctgttggggtttagggcccatgatggcagacattctaccccttttcctggaaaaactggaagaatgaaaataatttttttctgtggaagagagaaaatgagtgaatattcttctcacttttattgatgcattcagagaataagcaatgaaatattaaaaaatgaaacatcatataggtcatcatacttgaaaattatcattccatatgaaaggatcatgatacacaccaaaaaagtaatgatcgtaaagacacaaatcctctgtatgccatcttgcattggcactgaggtgtttggtttggaatagggaaaaaggtaagagactaacgtggaaaggtgctaactcagagactggagattatagtttacagctgtactttccagatcttctatgtgacacaatgcactgtccttgtgggtttgtcatttattggttaatgctctagtttcaaaaccaccctgttgaaagttccagttatttatatgcccaacaaatttcatagcctgctgaactgaactgagtgtgtcagaagtgctggttaatgacgagaagagattgcctgaaaaacaacaaactgctttctggttagctgaaggcaagtgtgaaaatcagaatttagaatatttagagctaagcttctggaaccacgtagtttctacacgtggcaggccaagaatgggaggctgactcaaaactagatagaaaaatataaaataatcttcgaccacttgatagctctcaaatatatatttaaaagatttatgaatacaaaccatttatggtttatgatttctaaaaagaaagcacaattaattttatagagaggttttttatttttttaatatttctattgcaaaagtctatccgatttgatgcactttgaatattgagatattttgcacggatgaatgtatgggaactacccatgatgatgtaagaggaaagaacatttttttgtgattcaccagacatcactttaaacttggtgatgagtttaaatccagtagctaatcccttcctgagactcaaagatcgtgacgctggttggaatttctgactgtgccctttagggcctcctgagtttcaaaaggaggaagtgttcgtgcttgtgtccctgaagttccctgttgcatgagcctgcgacaggacctcacccccaccaccaggcttctatttgggattcacatcagtattagtatcgtagctacaccaagttcaggcttctctttttgtttttttacctagaaattgggctcagtggtcttcaacttgaggacgagggtgattttcctaagaaatcagcaaagagggaaggcagggcccctgtagattcaccagtataaacttcagctgcagggattccagagccctcgggaccactctgtcaccttaatagccaagttctcctggttcctccgatcttacaggctcatccaggttccaaagtgcttctgtctctgttttgattctccaaactgctctgtgatgtatgtagggattattctccccacttaacagaaagtagtgtcttggagaggtcaagggtctctagttcaatggccagtcatagcagaagggaggccaagcaccagtccatcacccctcccaggccagcctctgtaagttggccacacttggggagtgagtgtgggtatgactttaccctcctggttggttcttactgtttgagtcaaaacctcatcaatatatcattgactcctgggttcctcaggtcatttcctaatatctgtccctatccaatgcctctattttatcttgaaaaaaggaccaaaaattatttttagctatggcaaggcacaggccacatggcccctgatggcgtccctgctggttttcaattctctgaagccttgtgtagctttcagagcacacgtatcctaattaccctcctcttcctcagcagaacccatttgagattctaaatgaatactcttagtctctaaagttgcagttagaaactaaaataatgttttttaatatgtaatatgctcctcttggctaattttcttttgactttaatgtgccaatgtaacttcctttaaaggatctatgcatttattaaatctggaaaactatatgtacactgtaggtggaaaattctcttttttaactaaatatttttccatcacaaatttaaagaattgcatgattaattaggctttcatttttaaattacgctttcatcactacgcaggattactttattttattcccaaagctcattagcatgggataattactctgctacagaaataggcaatttaaaaaaatgaatttagctcttctcattgggggcagaaaagaaaaaaaaaaccattgcactcagatggaaaatgcctatagacacaggagcaggtggttcctgtggacttctggtttggaattttgcctcaccaggtcaagcgtggttagggtggaaggtgtccagtatcttgaaaacctggccctggaggaaggttctgggtcagctgcaatgagagactggtgattaagggcaccgtgggcaggacacagtcctcgccttacccaccccatccttcctgttacccacagtctgctggcctccatgcctcttccccttgtcacttgtgtctcctccttatgcacagagctgcctgcctttatgaattttcttttcttttttttttgagacagcgtcttgctgtgtcacccaggctggagtgcagtggtgccatcttggctcactgcaacctccgcctcccaggttcaagcaattcttgtgcctcagcctcctgaggattacaggcgtgcgccaccacacccagctaatttttgtatttttagtagagacgggttttcaccatgttggccaggctggtctcaaactcctgacctcaggtgatccacccacctcggtttcccaaagtgctgggattacaggtgtgagccaccacgcccagcctgcccttgtgaattttcacctgctccttacccctcacctgttaggactgtttcttgcttttgcccctgtcggtcccctgccttaacagacctaagcagctgataatgcaccaagcttccctgaccaggtggggtgtgtctatcacccaagggcagtcctacagaccctgaccaaaggccgttcctgggcggcccaaggtccaggtttcttccacctgctcttccctgtttatggggatttgcaagcctaattgcatcagcaggagcccatctctcagagaacccggactccccaagcagactgggattttgggaagggtgtggggggtgtcattgctggatacccgtctttctgcctgtcctttctcctctctgaatcctggggcccctctccctccttaaagctggagtggacagagggacaggagaggatcagagttcatcccccctgggaaagagcaagagcgaatgaatcccagcgccagcggctgaggctgccttccgtgccttccctccatgggcgacgggtgagtggggcttaggaaactggaacagggaaggttctgttaccacactttggaactttccccctgggattcagcagttgagaagcagagacctttctgccctgggtgaatgggtccttgggggaggggttggtcttttgtctcgcatccccatctttcctttccttctgggccatgctcctccctggctggaaaaaggtggctgtgctgtccctgtgatccactctcagcaaatgcgtgtggctcaaataaacaaagaacttacctgttagagtgaaaatcctcaggagattgtacccaaatgccatgctctaaatattcatggtctctctaatgccctcaagacgtgatttccatgggaaccatcctcccctgggggcagttagcaggagtacgtggggcacgtgaggtggtcctcctttcagcacaccgtgcccatagaaacttctagaaatttctgaaaatgctctgtgggcagctcttgggtggcagtaagtccatcaacccccatctaccccgggcctgaagcgctgcgcttgctctctttatgtgtgtgcacccgaaggatttcctggtctctgtagctgatcctgtgagcccctcaagcatgaagcctcccttggggcttctcaaagcatggagaggggcccttcctgtcctttgggaaaatcttccccactgtgtcagttatatgggaacaagagtgatggggtctttctctaggcctgtgccacaggacagagaacacgggattctgctgttcgctttgagccacagcctttaccagcccggcttgtgtggggggccccttcgccttgctgcaaagagctgttccccaaagggcatatccacagggtacaggttttaaaaaggcttttttttttttttttgagacagggtctcgctctgtcgcctagactcagtgcagtggcgccatgttggctggttgcaacctccacctcctgggttcaagtgattctcccacctcagcctctctggtagctgggactacaggcacgcgccaccatgcccagctaatttttggatttttagtagagaaggagtttcaccatgctgaccaggctggtttcgaactcctgacctcaagtgatccgcccgcctgggcctcccagagtgctgagattacaggcgtgagccaccgcacctggccaaaaaaaggcattttgatttaggttgctgtgtttgcttgttgataaagaaaactcaatcgggacactagttttgtgctcagctttaggccgggtagctaatgggaggatgtccagcctgtcactgtgctcccagcgcaaggaaatgggtgcccacctggaatcaggagaagaggcttttccctcctgttctgcaaccagggtggagctatctttccagggaagccagctgagaggttttagggctttggttattttatgggggttttaaacctcctaacttttcaatgacaaatggctcccaggtgccatagtctctgttaaatcctcaaacattcacaagcacacactgccaggggcacgggttgtctttcacctgcatgtttctaaggctctttattcaatctcacggtgtcagtgtccagttgtcaaagttatgaatcttcctcctgcttctaaacagggctgacagtatactctcgtctagtctaggaacatgtctgctgctgggataccctggtaccaggatttgagggccacgggtggcatctctgagagctgaaaatccacagagtgcctgtgggaaagccaagcccttggctgtgtggcttttctatcccttggatttacaggtctgggaattggctgcttcttagttataaccccagtgacaaatgctggcttaagccacacctgttcccactgttgctagaattcaaacagttgctttttttttttctttttgagaaagggcctcactctgttgcccaggctggagtgcagtggcttgatcacagctcacgaaagcctcaaactcctaggctcaagtgatcctcctgaaaagtaggtaggactacaggcacatgccaccacatacagctaatttgttttcattttttttttttttagagacaggatctcgctgtgttccccaggtaggtcttgaactcctggcctcaagtgatcctcctgccttgacctcccaaagtgctggattacaagcgtgagcccctgcacccggcccaagcagttgcttctttttttctctttttttttttttttgagatggagcctcactctgttgcccaggctggagtgcagtggcgcgatctccactcactgcaagctccgcctcccgggttcatgccattctcctgcctcagcctcccgagtagctgggactacaggcgcctgccaccacacccagctaattttttgtatttttggtacagacagggtttcaccgtgttagccaggatggtcttgatctcctgatctcgtgatccgcccaccccggcctcccaaagtgctggattacaagcgtgagccaccgcgccccgccaagcagttgcttcttatgcaacatgttggttgggacttgtccacgggccaggccaataaaattcttaatcctgcagagagtcagtaccctcatcaccccatcactggaaaacaaatgttttaagctatcaagagagggaatgtgcagcttttggtttctagatgcatggtttggtgtgatctacctttgtgcctaaagggaatgtcccaaacaacagagccttctttgctgtcactccagaattctctacacagaatttcccaagtccattcaggacagacgcgcagtcctctttcaatggaagaagagaggacttttcccctcctgaaaaatgactggagtgtgaacaaggcagctctgtttttctaaataagttgttcttgtgagttttttctggccactgggcatctctgccctcacttttcatccctgccctctaagctgcagaccccatgaccacactgtctgcttccttgagcttcccgcacgaggcttggacctgggggacctggagaccctgcggacagaactgtggctgagccactgtggccaactcttggggagctccacagtgggggttgctggtctgtgaggctgagtctccatttcagagcacacactccctggcagggcgcctctgcctgtgtctcctgcccagcagccgccagcagggaatagttgctggtgtctgagcacaaagagagctttgattacctagagaggaaaaaggctgtcagccagatgcagccaggcccaggggtagatacaggagttgctaaggaaggggccgagccaggagaggccaggcagatccacaaagcccaaggggatgcaggctgggtgtggtttctgagggaacctaccaaatagcaggtagatggaatcagaggactcttgtgtcctgaaagaacctccttaaaaacaactaaaacgaagaacttctggggctgttcacacattgttcaagtcaccccaagatcgttctggcacgctgagctgaacaccaccatctttgttcattctctctctaatgggcaaagcaggatcatcgagttgaaaagttgtaaataatgaggatatttatcccgctatttattttttcaataactgtgacctcctgcactgtgaatgctctgtgacatgagattcttagtttaataaaactgtcattaaatttgaatgaattgatattattggttactgaacactggcatgagtttatttttattgtgaagaaaaaaatctacagcaatctaaactaaacctttctaagaaatctagcagtcagtattgtaatgcaatatatcaaaatctgtacactgtcaataaaataaatgagcacaagt

SEQ ID NO: 19380 - DNA, 334 bp, Homo sapiens
  source 1..334: mol_type = unassigned DNA
aataagtgcctgtgtgttggcaactgcagctaaagctctcctatctctgcaaacatcgattcacgagttccccacagatctgttctccaataaggagcgacagcacggagccgtcctgctgcacatccttggtgctctgtatatgttctatgccttggccatagtgtgcgatgacttctttgttccgtctctagagaagatctgtgagagactccatctgagcgaagatgtggctggagccaccttcatggctgcaggaagctcaacgccagagctgtttgcgtctgttattggggtgttcatcacccatggggacgtcggggtgggcaccatc

SEQ ID NO: 19381 - DNA, 4187 bp, Homo sapiens
  source 1..4187: mol_type = unassigned DNA
agtgtgcgatgacttctttgttccgtctctagagaagatctgtgagagactccatctgagcgaagatgtggctggagccaccttcatggctgcaggaagctcaacgccagagctgtttgcgtctgttattggggtgttcatcacccatggggacgtcggggtgggcaccatcgtgggctctgctgtgttcaacatcctgtgcataattggagtgtgcggactgtttgctggccaggtggtccgtctgacgtggtgggccgtgtgccgagactccgtgtactacaccatctctgtcatcgtgctcatcgtgttcatatatgatgaacaaattgtgtggtgggaaggcctggtgctcatcatcttgtatgtgttttatattctgatcatgaagtacaatgtgaagatgcaagcctttttcacagtcaaacaaaagagcattgcaaacggtaacccggtcaacagtgagctggaggctgtgaaggagaagccacagtatggcaagaaccccgtggtgatggtggacgagattatgagctccagccctcccaagttcaccttccctgaagcaggcttacgaatcatgatcaccaataagtttggacccaggacccgactacggatggccagcaggatcatcattaatgagcggcagagactgatcaactcggccaatggtgtgagcagtaagccgcttcaaaacgggaggcacgagaacattgagaacgggaatgttcctgtggaaaaccccgaagaccctcagcagaatcaggagcagcagccgccgccacagccaccaccgccagagccagagccggtggaggctgacttcctgtcccccttctccgtgccggaggccagaggggacaaggtcaagtgggtgttcacctggcccctcatcttcctcctgtgcgtcaccattcccaactgcagcaagccccgctgggagaagttcttcatggtcaccttcatcaccgccacgctgtggatcgctgtgttctcctacatcatggtgtggctggtgactattatcggatacacacttgggatcccggatgtcatcatgggcattactttcctggcagcagggacaagtgttccagactgcatggccagcctaattgtggcgagacaaggccttggggacatggcagtctccaacaccataggaagcaacgtgtttgacatcctggtaggacttggtgtaccgtggggcctgcagaccatggttgttaattatggatcaacagtgaagatcaacagccgggggctggtctattccgtggtcctgttgctgggctctgtcgctctcacctgctccagtgaggttcctgggatccagccccaggaagccttgatcgagggacaaggaggaaggcagtggaaggaaagatagaaggatcagggaggaatgtcctcggcatccacctaaacaagtggcgactggaccggaagctgggtgtctacgtgctggttctctacgccatcttcttgtgcttctccataatgatagagtttaacgtctttaccttcgtcaacttgccgatgtgccgggaagacgattagcgctgagtcgcggcccctgggagctgatctggacaccctgtgacactggcgttctcctctcccctccttcccccaccacaggtctctcctgcataggcagccactgtccgttctttcacacactggaaggaagagccatcgtggtctttgtctggccacaggccaggctgctgggcatcctcctcctccttggagttccgcccctgcaaggctggatttgggggccattatctgagcagcttcaaagacccctgagctgccaaccacggagatgtgccaagcatctcatctctcctgcacactttagtcagaaggacttctgcatgcagtttgtctttctgttctgcaggcagcttcagaattgaggtcatttgtgagcacaagatctcatagggcaggtgcaaaataggaatgttgttctcaagtgtcacctccagcccagaggtggttccttaggcagcatgtgctcctgggagcctctgacttttgctggaagcagccacagtttggaaggggcaagacctcaacctgttggggtttagggcccatgatggcagacattctaccccttttcctggaaaaactggaagaatgaaaataatttttttctgtggaagagagaaaatgagtgaatattcttctcacttttattgatgcattcagagaataagcaatgaaatattaaaaaatgaaacatcatataggtcatcatacttgaaaattatcattccatatgaaaggatcatgatacacaccaaaaaagtaatgatcgtaaagacacaaatcctctgtatgccatcttgcattggcactgaggtgtttggtttggaatagggaaaaaggtaagagactaacgtggaaaggtgctaactcagagactggagattatagtttacagctgtactttccagatcttctatgtgacacaatgcactgtccttgtgggtttgtcatttattggttaatgctctagtttcaaaaccaccctgttgaaagttccagttatttatatgcccaacaaatttcatagcctgctgaactgaactgagtgtgtcagaagtgctggttaatgacgagaagagattgcctgaaaaacaacaaactgctttctggttagctgaaggcaagtgtgaaaatcagaatttagaatatttagagctaagcttctggaaccacgtagtttctacacgtggcaggccaagaatgggaggctgactcaaaactagatagaaaaatataaaataatcttcgaccacttgatagctctcaaatatatatttaaaagatttatgaatacaaaccatttatggtttatgatttctaaaaagaaagcacaattaattttatagagaggttttttatttttttaatatttctattgcaaaagtctatccgatttgatgcactttgaatattgagatattttgcacggatgaatgtatgggaactacccatgatgatgtaagaggaaagaacatttttttgtgattcaccagacatcactttaaacttggtgatgagtttaaatccagtagctaatcccttcctgagactcaaagatcgtgacgctggttggaatttctgactgtgccctttagggcctcctgagtttcaaaaggaggaagtgttcgtgcttgtgtccctgaagttccctgttgcatgagcctgcgacaggacctcacccccaccaccaggcttctatttgggattcacatcagtattagtatcgtagctacaccaagttcaggcttctctttttgtttttttacctagaaattgggctcagtggtcttcaacttgaggacgagggtgattttcctaagaaatcagcaaagagggaaggcagggcccctgtagattcaccagtataaacttcagctgcagggattccagagccctcgggaccactctgtcaccttaatagccaagttctcctggttcctccgatcttacaggctcatccaggttccaaagtgcttctgtctctgttttgattctccaaactgctctgtgatgtatgtagggattattctccccacttaacagaaagtagtgtcttggagaggtcaagggtctctagttcaatggccagtcatagcagaagggaggccaagcaccagtccatcacccctcccaggccagcctctgtaagttggccacacttggggagtgagtgtgggtatgactttaccctcctggttggttcttactgtttgagtcaaaacctcatcaatatatcattgactcctgggttcctcaggtcatttcctaatatctgtccctatccaatgcctctattttatcttgaaaaaaggaccaaaaattatttttagctatggcaaggcacaggccacatggcccctgatggcgtccctgctggttttcaattctctgaagccttgtgtagctttcagagcacacgtatcctaattaccctcctcttcctcagcagaacccatttgagattctaaatgaatactcttagtctctaaagttgcagttagaaactaaaataatgttttttaatatgtaatatgctcctcttggctaattttcttttgactttaatgtgccaatgtaacttcctttaaaggatctatgcatttattaaatctggaaaacta

SEQ ID NO: 19382 - DNA, 1616 bp, Homo sapiens
  source 1..1616: mol_type = unassigned DNA
gctcatagcagccaacgacggggctctgctggcaggtggtccgtctgacgtggtgggccgtgtgccgagactccgtgtactacaccatctctgtcatcgtgctcatcgtgttcatatatgatgaacaaattgtgtggtgggaaggcctggtgctcatcatcttgtatgtgttttatattctgatcatgaagtacaatgtgaagatgcaagcctttttcacagtcaaacaaaagagcattgcaaacggtaacccggtcaacagtgagctggaggctggtaatgatttctatgacggtagctatgatgacccttccgtgccattgctggggcaagtgaaggagaagccacagtatggcaagaaccccgtggtgatggtggacgagattatgagctccagccctcccaagttcaccttccctgaagcaggcttacgaatcatgatcaccaataagtttggacccaggacccgactacggatggccagcaggatcatcattaatgagcggcagagactgatcaactcggccaatggtgtgagcagtaagccgcttcaaaacgggaggcacgagaacattgagaacgggaatgttcctgtggaaaaccccgaagaccctcagcagaatcaggagcagcagccgccgccacagccaccaccgccagagccagagccggtggaggctgacttcctgtcccccttctccgtgccggaggccagaggggacaaggtcaagtgggtgttcacctggcccctcatcttcctcctgtgcgtcaccattcccaactgcagcaagccccgctgggagaagttcttcatggtcaccttcatcaccgccacgctgtggatcgctgtgttctcctacatcatggtgtggctggtgactattatcggatacacacttgggatcccggatgtcatcatgggcattactttcctggcagcagggacaagtgttccagactgcatggccagcctaattgtggcgagacaaggccttggggacatggcagtctccaacaccataggaagcaacgtgtttgacatcctggtaggacttggtgtaccgtggggcctgcagaccatggttgttaattatggatcaacagtgaagatcaacagccgggggctggtctattccgtggtcctgttgctgggctctgtcgctctcaccgtcctcggcatccacctaaacaagtggcgactggaccggaagctgggtgtctacgtgctggttctctacgccatcttcttgtgcttctccataatgatagagtttaacgtctttaccttcgtcaacttgccgatgtgccgggaagacgattagcgctgagtcgcggcccctgggagctgatctggacaccctgtgacactggcgttctcctctcccctccttcccccaccacaggtctctcctgcataggcagccactgtccgttctttcacacactggaaggaagagccatcgtggtctttgtctggccacaggccaggctgctgggcatcctcctcctccttggagttccgcccctgcaaggctggatttgggggccattatctgagcagcttcaaagacccctgagctgccaaccacggagatgtgccaagcatctcatctctc

SEQ ID NO: 19383 - DNA, 3386 bp, Homo sapiens
  source 1..3386: mol_type = unassigned DNA
gggatggagtggtctcagatgtgtctgggacatctggggtgcagaatctgtatttctgggccccctctccagtcatcatcctggagccgatgaaggcaggggcttcctcccatgtgcattttgggagtctgttctgccctgtctcaggtaacccccaagagggaggagtctctccgtatagaaggaggaaacctgccagggtggcggggtgcggtccaggccacagcctggctgctgaggcccacccacaaaggacagagctgaggagctgatgggcatggagtttgattcgtgtgtcgtgtttcataaatgctgagcagactaccccaggggaagcccgtttccaggacaacctcagaaggggaaggagccatgagggcggctgtgtcggattttagctctatggacgcagtggccccgagacggtccccacacacagcctggtccccacacacaggctggcaggacagaggctggttgctgccctgtcgtatatatggtgcttctgggtcctctgggccttcatggtgaagaagagaagtattgtgtgctgagtcactcaggccagtggcagatgcccatccaagagccacccaccacctgtgccaacccaggagacctcccaggaccctgcaggaaacattcctcattcacagcatgggggcctcagctcctcaccttcccagagcaacccaggctcccagaggcccccgcctacacagtgccttttctggcactgctgtgactgtctccatcactctgtgcctgtgacagtagcacttccttgcaagtttattttctcccaaatctctttaagtccaggacattttctggaaaactggaagactggacacaggactgcccccaagcactggggaaggagggagaatcccatcttcctgcagcttttatcagagggaatgcatttagataagggccaagggagaaaacagtcctcagaaagtgtggagggaagtggggtacaggcctggacgcctggaattggagaaaggggagacctggagaggcagacgtggggatttcttcaccccacttttactgcccctatcataagaggctcccagagggccatgtgtgagtcactgttctgcactgtcccctgcgtagactcgactgaagcaggaggaaggagcccccggtaacaccctgggtgggactggggaggccagggctttggggcttttcctttcctaagggcggtgccatggaatcttttggctggagatgacattggggtttctttccctgtgcccagctccaagcaggtcgctgtgtggccaccccacccaaaggaatgcacgggttgctggctgggagattcttcaagagcacacactctcaggcccgatcgagctgttctcagtttttgggtttcccatagaaaacccaaagttttatcttccagcttcttgacaggaaaagtgggcagaaagccttttccccaccacactgataaaaggcgtttgagtactgaaacgttcttaaaggctgtgtggcttggctcaccaaagcagcctcctggtgcttctcaggtggccttgaacacagcctgggccacttgcctgccggcctcgcccaggaggcacactgtggacccttccaggctgccctggccctgggcacagccttggtttggagtggggagagttgggggtgatgcctggcctggggctggactgctgggagaatgtgctgtcattgagttcttttcccggcagccactccgggcatgggcacacacccttgttctgtcattggtcaggggacaccaggacaagctgtcccgggaggcaggcatcctggggaaggaaggagaattccatcttcctgtagcttttatcagagtgaatgcatttagataagggccaagagagaatactacctagagagtgtggaaggaagtgggggtgcaggcctgtactcctggaattagagaagggggaggcctggctcttgtctcacagactccaggctctctccttctgagcccagttgttcctccagcagtacctggcatggggttggttctgtaggatggagcctgaagctgcgttttctgtgggttccgtcttcctctgggatggaggcttctgagcagggagggatttgagctttcatgcagcagtgaggggctgagggcatgagctgtggagggggctcctgctcctcagagtggaagcagagccatcgaatcagccaggacaggagtcatcccaaaggccagaggccccaagtgttgatgctccccatagaaggagcccgctaataacactctccagcacataacccctggcatcttcgccaccaccaagagtgctgccccagactctcggcacccaccgcacgctaatcatctctggcagtttctgttggcctttgtctccttaactctcctcctcttctaaatttgaaggagaagccacagtatggcaagaaccccgtggtgatggtggacgagattatgagctccagccctcccaagttcaccttccctgaagcaggcttacgaatcatgatcaccaataagtttggacccaggacccgactacggatggccagcaggatcatcattaatgagcggcagagactgatcaactcggccaatggtgtgagcagtaagccgcttcaaaacgggaggcacgagaacattgagaacgggaatgttcctgtggaaaaccccgaagaccctcagcagaatcaggagcagcagccgccgccacagccaccaccgccagagccagagccggtggaggctgacttcctgtcccccttctccgtgccggccacagcggcctcctcactgtcattcctagaacacactgtcattcctagaactgcgcacctgccccaggacctttgcacctgccttttgctggaatgcagtttccccagctccacaaagcaggtacttttgtctactgcatttatctgcatccccagtacccaggactggccacatagtaggggcttgctgtgaataccctcaagatctggtccagccgggagcagagtcccaaagcaccagcccagagctgtcatgaagccagcacatggccttaggctggagtgtagtggcatgatctccgctgactgcaacctccgcttcccgggttcaagagattctcctgcctcagcctcccgagtagctgggagtacagacacataccatcacgcctggctaatttttgtatttgtagtagggacaaggtttcatcatgttgaccaggctggtctcgaactcctgacctcaagtgatccacccacctcggcctcccaaagtgctgggattataggcatgagccaccatgcccagccgagacagggtgctttatacacattaagtcattaaacccattaaaacccta

SEQ ID NO: 19384 - DNA, 4747 bp, Homo sapiens
  source 1..4747: mol_type = unassigned DNA
aatgcatgttctcctggctttgttttctaacccacacgcctcctgtctgctgagccttgctgcctgtttggtgaggagtgtgtgtgtctggtgtgcttttgtgctattaactcttacacgggtttgctctccggacctattcgctggttaccctaaaacccgtaaaggacacaccaggagctggtaaccagtgcagagggacagtcctatccatttttatagccctttggaggggaacactctgcctgcttctgcatgctgtgttcatgagcagttttgtaactagaccctcctagggatctggagtcaaatgtgaaattcccaaggataccggcccagtgcaggtttatgaagatggcaagaaagaggtctggggacagggagttttgttcctccccattgtgaggggaaggaaagggtcagagagaccagcctccctccggagggtgtcagggtttatagtcactgggctcagccagcggctcaccgtgcaccctcaaacaagcaggctcctctcctgggtcttagttgcctgtctaggtcccatgatctaaatctttgacctcactacttgcccttataaagaacaaagttacaagcattctgtcctgcagacagagcaggtggcctcgtaggaagttcagagccagtgcccactgctctgcaacattttccaccccggggacccttgtcaatttgcaaaatttcatctgagcctctgtacgtgggggaaagaaaggtcccctcatagtcatgggtgaaaagtggtaggcccccgtgtgtattgtaggttggctgccctggtaaggcttagataacgaactgaaagacccttgtaattagccaagactgggccccagaagagaggcgaaaagagcatcaattgcccacgagtggtcctggagcaaggggacacactgggcttcacacactaggtcagcaggtgtttcaaagctagtgacccactttgcctgacatgaggagttgaagccaggcatccagacttcccggtggctgccagctgccaggaccacagcctagggcagctcacaaggtgaggggaagtcagtggccccagcacttgggtgttgtcctcagagagatcagcactaatcacggtgttgcgctcaacagtgaaggagaagccacagtatggcaagaaccccgtggtgatggtggacgagattatgagctccagccctcccaagttcaccttccctgaagcaggcttacgaatcatgatcaccaataagtttggacccaggacccgactacggatggccagcaggatcatcattaatgagcggcagagactgatcaactcggccaatggtgtgagcagtaagccgcttcaaaacgggaggcacgagaacattgagaacgggaatgttcctgtggaaaaccccgaagaccctcagcagaatcaggagcagcagccgccgccacagccaccaccgccagagccagagccggtggaggctgacttcctgtcccccttctccgtgccggaggccagaggggacaaggtcaagtgggtgttcacctggcccctcatcttcctcctgtgcgtcaccattcccaactgcagcaagccccgctgggagaagttcttcatggtcaccttcatcaccgccacgctgtggatcgctgtgttctcctacatcatggtgtggctggtgactattatcggatacacacttgggatcccggatgtcatcatgggcattactttcctggcagcagggacaagtgttccagactgcatggccagcctaattgtggcgagacaaggccttggggacatggcagtctccaacaccataggaagcaacgtgtttgacatcctggtaggacttggtgtaccgtggggcctgcagaccatggttgttaattatggatcaacagtgaagatcaacagccgggggctggtctattccgtggtcctgttgctgggctctgtcgctctcaccgtcctcggcatccacctaaacaagtggcgactggaccggaagctgggtgtctacgtgctggttctctacgccatcttcttgtgcttctccataatgatagagtttaacgtctttaccttcgtcaacttgccgatgtgccgggaagacgattagcgctgagtcgcggcccctgggagctgatctggacaccctgtgacactggcgttctcctctcccctccttcccccaccacaggtctctcctgcataggcagccactgtccgttctttcacacactggaaggaagagccatcgtggtctttgtctggccacaggccaggctgctgggcatcctcctcctccttggagttccgcccctgcaaggctggatttgggggccattatctgagcagcttcaaagacccctgagctgccaaccacggagatgtgccaagcatctcatctctcctgcacactttagtcagaaggacttctgcatgcagtttgtctttctgttctgcaggcagcttcagaattgaggtcatttgtgagcacaagatctcatagggcaggtgcaaaataggaatgttgttctcaagtgtcacctccagcccagaggtggttccttaggcagcatgtgctcctgggagcctctgacttttgctggaagcagccacagtttggaaggggcaagacctcaacctgttggggtttagggcccatgatggcagacattctaccccttttcctggaaaaactggaagaatgaaaataatttttttctgtggaagagagaaaatgagtgaatattcttctcacttttattgatgcattcagagaataagcaatgaaatattaaaaaatgaaacatcatataggtcatcatacttgaaaattatcattccatatgaaaggatcatgatacacaccaaaaaagtaatgatcgtaaagacacaaatcctctgtatgccatcttgcattggcactgaggtgtttggtttggaatagggaaaaaggtaagagactaacgtggaaaggtgctaactcagagactggagattatagtttacagctgtactttccagatcttctatgtgacacaatgcactgtccttgtgggtttgtcatttattggttaatgctctagtttcaaaaccaccctgttgaaagttccagttatttatatgcccaacaaatttcatagcctgctgaactgaactgagtgtgtcagaagtgctggttaatgacgagaagagattgcctgaaaaacaacaaactgctttctggttagctgaaggcaagtgtgaaaatcagaatttagaatatttagagctaagcttctggaaccacgtagtttctacacgtggcaggccaagaatgggaggctgactcaaaactagatagaaaaatataaaataatcttcgaccacttgatagctctcaaatatatatttaaaagatttatgaatacaaaccatttatggtttatgatttctaaaaagaaagcacaattaattttatagagaggttttttatttttttaatatttctattgcaaaagtctatccgatttgatgcactttgaatattgagatattttgcacggatgaatgtatgggaactacccatgatgatgtaagaggaaagaacatttttttgtgattcaccagacatcactttaaacttggtgatgagtttaaatccagtagctaatcccttcctgagactcaaagatcgtgacgctggttggaatttctgactgtgccctttagggcctcctgagtttcaaaaggaggaagtgttcgtgcttgtgtccctgaagttccctgttgcatgagcctgcgacaggacctcacccccaccaccaggcttctatttgggattcacatcagtattagtatcgtagctacaccaagttcaggcttctctttttgtttttttacctagaaattgggctcagtggtcttcaacttgaggacgagggtgattttcctaagaaatcagcaaagagggaaggcagggcccctgtagattcaccagtataaacttcagctgcagggattccagagccctcgggaccactctgtcaccttaatagccaagttctcctggttcctccgatcttacaggctcatccaggttccaaagtgcttctgtctctgttttgattctccaaactgctctgtgatgtatgtagggattattctccccacttaacagaaagtagtgtcttggagaggtcaagggtctctagttcaatggccagtcatagcagaagggaggccaagcaccagtccatcacccctcccaggccagcctctgtaagttggccacacttggggagtgagtgtgggtatgactttaccctcctggttggttcttactgtttgagtcaaaacctcatcaatatatcattgactcctgggttcctcaggtcatttcctaatatctgtccctatccaatgcctctattttatcttgaaaaaaggaccaaaaattatttttagctatggcaaggcacaggccacatggcccctgatggcgtccctgctggttttcaattctctgaagccttgtgtagctttcagagcacacgtatcctaattaccctcctcttcctcagcagaacccatttgagattctaaatgaatactcttagtctctaaagttgcagttagaaactaaaataatgttttttaatatgtaatatgctcctcttggctaattttcttttgactttaatgtgccaatgtaacttcctttaaaggatctatgcatttattaaatctggaaaacta

SEQ ID NO: 19385 - DNA, 2244 bp, Homo sapiens
  source 1..2244: mol_type = unassigned DNA
gagactcctgcaggttcgagaaagcatgacatgctcccagaatcctggatttggacttcattctggacagcatatgacaaggacgaggacccctattctagccagttaaagctggacagaatttttaaaagcaatgaagccagttccttggatatatccacgggctttgctttgagaaggaactgagtaggcagtgagaagagtcgagtgaagcctggcccgtgagtgcctcaacaactgagatgaacgtcgactcgcttgcaggcaagttgtcactcagcagcgatctgaactatatcctgggttccagaaaaggcagaggttcttaccgaaagcaggggaggaagccgcagcccaaggaggtcgtcacttgccgggaaggtggctcgggccaggctgcactcaaaacccgtgctctgtccacactgctacggggccagagccaaggaagcttccacttcttcccccagacagccccaacagcggctaccccaaggagccagcagccttgtgtcctgggatccccagcccctgcagaatgacccaccaggatctgagcatcacagccaaactcatcaatggaggtgtagcagggctcgtgggggtgacctgcgtgttccccatcgacttggccaagactcgcctgcagaaccagcatgggaaagccatgtacaaaggaatgatcgactgcctgatgaagacggctcgggcggagggcttcttcggcatgtaccgaggggctgcagtgaacctcactctggtcactccagagaaggccatcaagctggcggccaacgactttttccggcggctgctcatggaagatgggatgcagcggaacctgaagatggagatgcttgccgggtgtggggctgggatgtgccaggtcgtggtgacctgtcccatggaaatgctcaagattcagctgcaggatgctggacgcctggccgtccatcatcagggctcggcctcagcaccctccacctccaggtcctacacaactggttcggcttccacccacaggcgcccctctgccaccctcattgcctgggagctgctccgcactcagggcctggctgggctctacaggggcctgggtgccactctcctcagagacattcctttctccatcatctacttcccactgtttgccaaccttaacaacctggggttcaacgagctcgccggtaaggcgtcctttgcacattccttcgtgtcaggctgtgtggcaggttccatagctgcggtcgcagtgacgcctctagatgttctgaaaactcgaatccaaaccctcaagaaaggcctgggcgaggacatgtacagtgggatcaccgactgtgccaggaaactctggattcaggagggaccatctgccttcatgaaaggcgctggctgccgggcactggtcatagcacctctctttgggattgctcaaggggtctattttattgggattggagagcgcatcttaaagtgttttgactagacagagctggaggtcaagtccctgcgcttgccgccctctctctagctgtttcacttagcctagagggggcaagggcaggtggggccactctggcctgcctggtcctctgcgttgtagtgctacctcaatctcgggagaaacagccctatattctaacaagttgagcacagccttcttccccttcgtgtctacactcgttttcctttgtgggcacagctaccaggggcttttggaagcccctaaccacctacttttcaacaaaaatggtactttcgttgtattaattgcaggaccttaacaggtagtcacaatagaagggttgtttctgtattttaacatttctatttcacagtcaaactcggcattcttcagtcagcttgaggatttagcattgttaatcttggactccataacttatgagtcctagcactgattttgaggaaaaggaggatcagaagttcaagggaccgtgaaagccctcagagtcagcacctagtttgagaccaagcaccctttcgaatccctggatggctgagggggctgaggccggctctgactgggcagctcagcccctcccccagagcccagggtcttgcacacccctccctgtaaccaaggaacactctgaaataaaggtgaatggctaaaatctcatctgttcatcagtgggtacagcagataggctgcagtgaatgctatcaccatctacttttctacgtccatttcaaaaccaaacattaaaaagggcatagaagcag

SEQ ID NO: 19386 - DNA, 2057 bp, Homo sapiens
  source 1..2057: mol_type = unassigned DNA
aggttcgagaaagcatgacatgctcccagaatcctggatttggacttcattctggacagcatatgacaaggacgaggacccctattctagccagttaaagctggacagaatttttaaaagcaatgaagccagttccttggatatatccacgggctttgctttgagaaggaactgagtaggcagtgagaagagtcgagtgaagcctggcccgtgagtgcctcaacaactgagatgaacgtcgactcgcttgcaggcaagttgtcagggaggaagccgcagcccaaggaggtcgtcacttgccgggaaggtggctcgggccaggctgcactcaaaacccgtgctctgtccacactgctacggggccagagccaaggaagcttccacttcttcccccagacagccccaacagcggctaccccaaggagccagcagccttgtgtcctgggatccccagcccctgcagaatgacccaccaggatctgagcatcacagccaaactcatcaatggaggtgtagcagggctcgtgggggtgacctgcgtgttccccatcgacttggccaagactcgcctgcagaaccagcatgggaaagccatgtacaaaggaatgatcgactgcctgatgaagacggctcgggcggagggcttcttcggcatgtaccgaggggctgcagtgaacctcactctggtcactccagagaaggccatcaagctggcggccaacgactttttccggcggctgctcatggaagatgggatgcagcggaacctgaagatggagatgcttgccgggtgtggggctgggatgtgccaggtcgtggtgacctgtcccatggaaatgctcaagattcagctgcaggatgctggacgcctggccgtccatcatcagggctcggcctcagcaccctccacctccaggtcctacacaactggttcggcttccacccacaggcgcccctctgccaccctcattgcctgggagctgctccgcactcagggcctggctgggctctacaggggcctgggtgccactctcctcagagacattcctttctccatcatctacttcccactgtttgccaaccttaacaacctggggttcaacgagctcgccggtaaggcgtcctttgcacattccttcgtgtcaggctgtgtggcaggttccatagctgcggtcgcagtgacgcctctagatgttctgaaaactcgaatccaaaccctcaagaaaggcctgggcgaggacatgtacagtgggatcaccgactgtgccaggaaactctggattcaggagggaccatctgccttcatgaaaggcgctggctgccgggcactggtcatagcacctctctttgggattgctcaaggggtctattttattgggattggagagcgcatcttaaagtgttttgactagacagagctggaggtcaagtccctgcgcttgccgccctctctctagctgtttcacttagcctagagggggcaagggcaggtggggccactctggcctgcctggtcctctgcgttgtagtgctacctcaatctcgggagaaacagccctatattctaacaagttgagcacagccttcttccccttcgtgtctacactcgttttcctttgtgggcacagctaccaggggcttttggaagcccctaaccacctacttttcaacaaaaatggtactttcgttgtattaattgcaggaccttaacaggtagtcacaatagaagggttgtttctgtattttaacatttctatttcacagtcaaactcggcattcttcagtcagcttgaggatttagcattgttaatcttggactccataacttatgagtcctagcactgattttgaggaaaaggaggatcagaagttcaagggaccgtgaaagccctcagagtcagcacctagtttgagaccaagcaccctttcgaatccctggatggctgagggggctgaggccggctctgactgggcagctcagcccctcccccagagcccagggtcttgcacacccctccctgtaaccaaggaacactctgaaataaaggtgaatggct

SEQ ID NO: 19387 - DNA, 583 bp, Homo sapiens
  source 1..583: mol_type = unassigned DNA
atgacatgctcccagaatcctggatttggacttcattctggacagcatatgacaaggacgaggacccctattctagccagttaaagctggacagaatttttaaaagcaatgaagccagttccttggatatatccacgggctttgctttgagaaggaactgagtaggcagtgagaagagtcgagtgaagcctggcccgtgagtgcctcaacaactgagatgaacgtcgactcgcttgcaggcaagttgtcactcagcagcgatctgaactatatcctgggttccagaaaaggcagaggttcttaccgaaagcaggtaagtgtcttgtctgtctgcatcaagctcagagttggtaggaaaagactcttctagcaaataaaccattgggggaaaggggaagagcagccagtgggacagggacactcatcccatttgttggatagagtcagaaggggtgggcacgaggaagtggccgcccctgaccatggggtatcccaggcaacatccaagccaggaagcaagtgattttcttggcaataagtcaagaactggctcctggctactagtgtgaggggctcattcctg

SEQ ID NO: 19388 - DNA, 2454 bp, Homo sapiens
  source 1..2454: mol_type = unassigned DNA
gatatatccacgggctttgctttgagaaggaactgagtaggcagtgagaagagtcgagtgaagcctggcccgtgagtgcctcaacaactgagatgaacgtcgactcgcttgcaggcaagttgtcactcagcagcgatctgaactatatcctgggttccagaaaaggcagaggttcttaccgaaagcaggggaggaagccgcagcccaaggaggtcgtcacttgccgggaaggtggctcgggccaggctgcactcaaaacccgtgctctgtccacactgctacggggccagagccaaggaagcttccacttcttcccccagacagccccaacagcggctaccccaaggagccagcagccttgtgtcctgggatccccagcccctgcagaatgacccaccaggatctgaggtgagctcggctggggcagcctgaggccctgggccctgggcctggcggagagtcgctgtggtgatagcacatccaggtttctgaagaacaagctgagtcctagggaagagcaagacccctgtcccccatataacatatacactacatctactgtggcaaatacgtacacacaagcatctgtgcacatatatgttattgttcaacatagtttaattgtttgggttcatcttctctaactacaaaattaagtttacagttctctttatcgtcccaagtttcttcctttgtgaaaggcccactatcatctactcttaccacttccaggtaaatccatctccaaatattttgttcacagtctgcctcccgcctgaaagataagaaaagttgagtgggttccaaggagtctgagaaagctttgttttctatttcccgtcttccaaagctcctatacccagcagggtggggggccatgttatctaaactgtggctttacttttggctggaactaggtcacctcaagggctgaccgacttgaagccttcactgtgggaagtgcctgctctcttattatgaacaatagctggcattcccccccaggcacggtttccatagtcctcagcaaccctggagtgagttcgacgggaatgcaggcccagagaggagaggtcacagtcaggatgcaaactcagttctgcctgaccttcagtccgtttgtgtgagaactgcacacgtggctccaggcctgcggaggagccagaggacgggccggggaagcttggggcagagcggtgccctggtggcggcccatgggggcagagctgggctcctcccagaagcccctgcaggtcccagctccagggacttcccgggttgcagcaagatgcctcacccgggtgagtgcggctgtcctgtctggaccagacctgggccagggaggctgaagagggtctctggacacctgtggggctggggttccccactgtctgtgcccctgcccattcctggctgcatccgctccctaacctgcccctccctctgcctctctcctccccctgtcctccccctgtcctagcatcacagccaaactcatcaatggaggtgtagcagggctcgtgggggtgacctgcgtgttccccatcgacttggccaagactcgcctgcagaaccagcatgggaaagccatgtacaaaggaatgatcgactgcctgatgaagacggctcgggcggagggcttcttcggcatgtaccgaggtgggcttctcaggtcccctgggaggctgggcagcaggtgtgagcgtatgggacatggggaactggtgttccttccgttgctgcggggatggggccagggctgccagggggtccttcctgatgagcctctgtgctcttgggtggagacagaggcagctctgggtcctggtaaggcttccggagacccacagagcacaccccccgccaccgcctcagtaagagcaggcgagccctccctacctgcctgcctctctctgcctggctagaagcgaagagagagaggctgaaagggactgagggacggggcctgagctcctggcaaggagttctgggtggctcctccccagctcggtccagcgttgctgcggtccctgcggggtccccagccaggaggtaccttggacaatggatcccaagctggagttgagccggagctcgtatgcttgtgccgccgagaagcaaaacacaaaccctagacagccccgagctagcagccaatgggactggcttgtgcggcacagaggagcggaaccccagtccctgcgcctggcgcctgtcactggaactgctgttttatcatcagcgaccccaccagcagcaacaaaaataaaatggcttcctgataaccaaactgaggagtccgtaagaaaaaaatacgtaaaaaggggagaatgtggggccgggcgcggtggctcacgcctgtaatcccagcactttgggaggccgaggcgggcggatcacgaggtcaggagatcgagaccatcctggctaacacggtgaaaccccgtctctact

SEQ ID NO: 19389 - DNA, 845 bp, Homo sapiens
  source 1..845: mol_type = unassigned DNA
gtaaacagcaacctacttgccacctggggaggtgcagcgtggcttgactggatagtagcctctttgggttttgcttcaaacccaacctatttgaaggtgcagtgtgcggtgagagtctggaaccctgcagtggtgatgagggggaggcagagggagggaaactgaccacagaagggaaaaccagtccaagctggctgacactgaaagccacctctccctgcagctcagcagcgatctgaactatatcctgggttccagaaaaggcagaggttcttaccgaaagcaggggaggaagccgcagcccaaggaggtcgtcacttgccgggaaggtggctcgggccaggctgcactcaaaacccgtgctctgtccacactgctacggggccagagccaaggaagcttccacttcttcccccagacagccccaacagcggctaccccaaggagccagcagccttgtgtcctgggatccccagcccctgcagaatgacccaccaggatctgagcatcacagccaaactcatcaatggaggtgtagcagggctcgtgggggtgacctgcgtgttccccatcgacttggccaagactcgcctgcagaaccagcatgggaaagccatgtacaaaggaatgatcgactgcctgatgaagacggctcgggcggagggcttcttcggcatgtaccgaggggctgcagtgaacctcactctggtcactccagagaaggccatcaagctggcggccaacgactttttccggcggctgctcatggaagatgggatgcagcggaacctgaagatggagatgcttgccgggtgtggggctgggatgtgccaggtcgtggtgac

SEQ ID NO: 19390 - DNA, 560 bp, Homo sapiens
  source 1..560: mol_type = unassigned DNA
agcaacctacttgccacctggggaggtgcagcgtggcttgactggatagtagcctctttgggttttgcttcaaacccaacctatttgaagctcagcagcgatctgaactatatcctgggttccagaaaaggcagaggttcttaccgaaagcaggtaagtgtcttgtctgtctgcatcaagctcagagttggtaggaaaagactcttctagcaaataaaccattgggggaaaggggaagagcagccagtgggacagggacactcatcccatttgttggatagagtcagaaggggtgggcacgaggaagtggccgcccctgaccatggggtatcccaggcaacatccaagccaggaagcaagtgattttcttggcaataagtcaagaactggctcctggctactagtgtgaggggctcattcctgggaacactcacccttgctctgctaataagaggaagtaggcggggacgtggtcatcaccctgaggcccccaacccagctcctcacagtgggaataaatgagcacagctctacagtggagccagcagtctcgtgacaag

SEQ ID NO: 19391 - DNA, 2385 bp, Homo sapiens
  source 1..2385: mol_type = unassigned DNA
cactcggcgcccccacccgggccctgccggcaggcacgaggggcggggcgcgcggcccgaggtgagggaccgcgggccggaggggatccagcgagtcagctgccgccgagggaccagcgcgggtctagctgctgccgccatccccaccatccctgaccgcgcctgcccgggctccgcgccaggaggagcggccaggcccagccccggcaccgcgcgctcggggaccccgacggcgcccagcccggcgaggggcctcagggggaggacgaggaggaaaggcggcctcgccggggacccggccatggcgctggacttcttggctggatgcgcggggggtgtggcaggcgtgcttgtgggacacccgtttgacacggtcaaggtacggcttcaggtccagagcgtggagaagcctcagtaccgcgggacgttgcactgcttcaagtccatcatcaagcaagagagcgtgctgggcctgtacaagggcctgggctcgccgctcatggggctcaccttcatcaacgcgctggtgttcggggtgcagggcaacaccctccgggccctgggccacgactcgcccctcaaccagttcctggcaggtgcggcggcgggcgccatccagtgcgtcatctgctgccccatggagctggccaagacgcggctgcagctgcaggacgcgggcccagcgcgcacctacaagggctcgctggactgcctcgcgcagatctacgggcacgagggtctgcgtggcgtcaaccggggcatggtgtccacgttgctgcgtgagacgcccagcttcggcgtctacttcctcacctatgacgctctcacgcgggcgctgggctgcgagccgggcgaccgcctgctggtgcccaagctgctgttggcgggcggtacgtcaggcatcgtgtcctggctctctacctatcctgtggacgtggtcaagtcgcggctgcaggcggacggactgcggggcgccccgcgctaccgcggcatcctggactgcgtgcaccagagctaccgcgccgagggctggcgcgtcttcacacgggggctggcgtccacgctgctgcgcgccttccccgtcaacgctgccaccttcgccaccgtcacggtggtgctcacctacgcgcgcggcgaggaggccgggcccgagggcgaggctgtgcccgccgcccctgcggggcctgccctggcgcagccctccagcctgtgacgctcaccccgccctccttccccagggctccttctcagaaacctgggacataaattggcccctgagtcgattgccctgcttcctgctgggatgctgcgagctgtggagtctatcagacgtgggctgaattttgctgatcagctgggtagttttggccgagaactgcacttgcctcagtgttctcatctatgaaataaggaccctcatgcccacactgtagagtcacgaagctcagagattattcccagcagcagccagcacctggcctggctgaggccattgcaccgttatcctggaaactgaggcagacactccagcccctttctgggatcctggccacgtcattgtgctcctgccctgcaggctggctcccgggggtctctgatggccaaccaaggggccacccagggacctctaactccacacatcctccacccgggggggtggtgggccacccctctggtctgtgttagggacagaggaaaacttggtgtgcctcctggtgtcacagaactggatcctctgcataccccagcttctccacatgccactgctaggggtaccccagctgctgccactcctgctggagggtgaactggggaccctgcaccctccgggaagccatggagtctgctggaggcaccatatcagcctgcgggactagggtggggagcaaacaggccagcggtggaggtctggacagttcaagtgtgatgcagctgtggcaaggagaaatccttccgcctctgggcctcaggctgcctgtccataaaatggggacatggccagctgacggacaactgagtctccggcccacctaccaccgccagccaggatcccccaaagtgtgcagagggctcagcagagaacagtatgggaccccctcaccaggcctggaacacctccagccacaaagaagccaaaggtcagtccctctgctccccagcaaacggtgcctcccaggcattctcagtgccagggcttcatccctgtgaaggcacagggcctgctagtgggcacaggggtggctagttggggcctggggcagaggagggctgcaccaggcgtcctggggaatgtgctcagtgaagacgacactgggctttgcacagcctggtgtcgctgtacagaaactgtcaagggaataaagtgttctttgttttttaagtggc

SEQ ID NO: 19392 - DNA, 5169 bp, Homo sapiens
  source 1..5169: mol_type = unassigned DNA
ctgccacccaggagaaacagaacatggccagccctctggaagtcttccctcctgctcctatcaactcctccctccccttctgaggcttccactggcctaacttcctcctttttttttgagacacggtcttgctctgtcaccctaggtggagtgcagtggtgcaatcatagcccactgcagccttgatttcccaggctcaagcaatcctcccaccgcagcctctcaagtagctgaaactacaggcacacaccaccatgcctagctcatgttttttttgaagttattagtagagatggggtcttgatatgttgcccagctggtctcaaactactgggctcaagtgatcctcctgccttggcctcccaaagtgctgggatgacaggcctggcccactgtcctcacttccaacaccacgggtcccttttgcctggttgaatataattgcagctgtaccctaggatcatcaggggccacccgagtctgtgtcagtccgtactgtcacatggccacagactatctcatggctgggacagtcacagtttattcccccaggcccttgggactgaaagaatccaagatctggatctcctctatagcgcccagaaccacagccaccgtcctgaagcacacggccttcacacgtttctacacgaagggagttttctgtcctgcttccttggacacagcaataatcagggagcagttgtcttgacctatgatgagggggtgaccggccatccctgggcatgggatggggagtgtgggtgggggctggctgtgggggctccgcgcctggatgtgatgttgaaattttgtgttgctttaaccgcctttactttctgagctaggggctgtctccatccatagcaaaagtgtaactttgttgtagatgggcgtaagcctcaccctggagagcgctagtaagtacagaccaggtgaaccagatcccagcctggaccccaccctgtcatgcccatctccccaaccccagagttccctccgtagcaggggacagggagggtgtgaggcaagcttgggctcagcacaggtcctggggtgggggctcgggctggccaaaaaaaatcagccccctctggattgggggtcctcatgtgggggtctctcggccctatggggagctgggagcttcctaaacttgtgtccaaatgactagtttcccaggggtgggtccgttcccatcaatcctcaaaggagagcctggcaccccaagattttaagagcctgagctataaatgacaagacttgggacactgggccacagttcctctcccagagagcaagggctcgtcacagactgaggggtactgaggggtcagaaacaaagtggggagaggcctctgcccacattggtgggagaagctgagttgacctaagcctgacattccccagccggctggacttgggcattcaccagtgtctgtgatctgcaaagacttcacaacactacccaggtggcactgagtatccaacctgggaagggacagctccatgtcacatcagttctactcacacagccctcttagtgccagtgttggggctgcaggaggaacagagatccccccagaggccccagaacattgaagggagagcagcaaacctcgcatcaaggtgttggccaagaactgggcctccagggtgggagggtgcttcgggccaatcttgaagcattggcttccagctgttgaggtcctgggggtactgagatggtacttgtttcctaacaaaacattttttataagtgcattcaccaatagagggcccacctattctggtggagagaattggaaaaggttccagaatccgggcagaagcctggctgttcccggtgagggctctcccttgctagcactccctcccaccctcactctgagcaacacagctgctcatgtccctggagaggacagctttggccaagttgttaaacatctctgagcctgtcttcccatcttggaaatgggggcagttgtcccaatgccgagataattgagtgtgaagccctcccctgtcccatgctgcctagtaccgaaggcacttgctctgtggccctggctgtaagaatgatcatttctgagtcagacctagggaaccagcccctgagaatgtgacttgacctagtttactcccaccgcccgctctgcaactctgagcctcctattgagcaaagataagctcataggcaacaaagagcactttgacatggaagaggttctgggccactgggctcggaggcagcggggcctgaccagcgccccaggccccagagctgctgacgtgggtccccaaggaggttgttggctgttctcttgccaccactctattaactcataactgctgttctcacgagaggctactggcagagaccaggcaggagctcctggagccaaggtcattgcttttatttttatttatttatttattgagatggaatgttcctttctcgcccaggctggagtgcagtggcatgacctcactgcatcctctgcctcacgggttcaagcaattctcccacctcagcctcctgagtagcagggattacaggcgtatgccaccacactaggctaattttttttacagacacgatttcgccacgttggccaggctggtcttgaactcctgacctcaagtgatccacccacctcagcctcccaaagtgttgggattacaggcgtgagccactgcacctggccaggctcatcactttttgcgcctattgcctcgaagccagtctctgatgggacattagggcaggggcccttcagcctagtctgggacatgggccgctcactcagcagtatgacaagcatcacctggagaacgggccagtctcaggaggtcgttcatgccccactggcagtgcactgtgcagccatagtgtaaacaagaggcttaacctgaattggtctgagatcttggggaccccctaccctgtctccagcagcctgtccctttagctgtttgcctactggcaccccatcctgagaaggcatagatacccggcccaccctgccctggaattacaaaagtcttagactgtgcctgagtgcccggcctccttgggagaccctcctaggcagcctaagcaccagacccgggagctgggtgctctggtcctgcctgcctgcctctcactggaccctctccttccaggtacggcttcaggtccagagcgtggagaagcctcagtaccgcgggacgttgcactgcttcaagtccatcatcaagcaagagagcgtgctgggcctgtacaagggcctgggctcgccgctcatggggctcaccttcatcaacgcgctggtgttcggggtgcagggcaacaccctccgggccctgggccacgactcgcccctcaaccagttcctggcaggtgcggcggcgggcgccatccagtgcgtcatctgctgccccatggagctggccaagacgcggctgcagctgcaggacgcgggcccagcgcgcacctacaagggctcgctggactgcctcgcgcagatctacgggcacgagggtctgcgtggcgtcaaccggggcatggtgtccacgttgctgcgtgagacgcccagcttcggcgtctacttcctcacctatgacgctctcacgcgggcgctgggctgcgagccgggcgaccgcctgctggtgcccaagctgctgttggcgggcggtacgtcaggcatcgtgtcctggctctctacctatcctgtggacgtggtcaagtcgcggctgcaggcggacggactgcggggcgccccgcgctaccgcggcatcctggactgcgtgcaccagagctaccgcgccgagggctggcgcgtcttcacacgggggctggcgtccacgctgctgcgcgccttccccgtcaacgctgccaccttcgccaccgtcacggtggtgctcacctacgcgcgcggcgaggaggccgggcccgagggcgaggctgtgcccgccgcccctgcggggcctgccctggcgcagccctccagcctgtgacgctcaccccgccctccttccccagggctccttctcagaaacctgggacataaattggcccctgagtcgattgccctgcttcctgctgggatgctgcgagctgtggagtctatcagacgtgggctgaattttgctgatcagctgggtagttttggccgagaactgcacttgcctcagtgttctcatctatgaaataaggaccctcatgcccacactgtagagtcacgaagctcagagattattcccagcagcagccagcacctggcctggctgaggccattgcaccgttatcctggaaactgaggcagacactccagcccctttctgggatcctggccacgtcattgtgctcctgccctgcaggctggctcccgggggtctctgatggccaaccaaggggccacccagggacctctaactccacacatcctccacccgggggggtggtgggccacccctctggtctgtgttagggacagaggaaaacttggtgtgcctcctggtgtcacagaactggatcctctgcataccccagcttctccacatgccactgctaggggtaccccagctgctgccactcctgctggagggtgaactggggaccctgcaccctccgggaagccatggagtctgctggaggcaccatatcagcctgcgggactagggtggggagcaaacaggccagcggtggaggtctggacagttcaagtgtgatgcagctgtggcaaggagaaatccttccgcctctgggcctcaggctgcctgtccataaaatggggacatggccagctgacggacaactgagtctccggcccacctaccaccgccagccaggatcccccaaagtgtgcagagggctcagcagagaacagtatgggaccccctcaccaggcctggaacacctccagccacaaagaagccaaaggtcagtccctctgctccccagcaaacggtgcctcccaggcattctcagtgccagggcttcatccctgtgaaggcacagggcctgctagtgggcacaggggtggctagttggggcctggggcagaggagggctgcaccaggcgtcctggggaatgtgctcagtgaagacgacactgggctttgcacagcctggtgtcgctgtacagaaactgtcaagggaataaagtgttctttgttttttaa

SEQ ID NO: 19393 - DNA, 2242 bp, Homo sapiens
  source 1..2242: mol_type = unassigned DNA
gagtcagctgccgccgagggaccagcgcgggtctagctgctgccgccatccccaccatccctgaccgcgcctgcccgggctccgcgccaggaggagcggccaggcccagccccggcaccgcgcgctcggggaccccgacggcgcccagcccggcgaggggcctcagggggaggacgaggaggaaaggcggcctcgccggggacccggccatggcgctggacttcttggctggatgcgcggggggtacggcttcaggtccagagcgtggagaagcctcagtaccgcgggacgttgcactgcttcaagtccatcatcaagcaagagagcgtgctgggcctgtacaagggcctgggctcgccgctcatggggctcaccttcatcaacgcgctggtgttcggggtgcagggcaacaccctccgggccctgggccacgactcgcccctcaaccagttcctggcaggtgcggcggcgggcgccatccagtgcgtcatctgctgccccatggagctggccaagacgcggctgcagctgcaggacgcgggcccagcgcgcacctacaagggctcgctggactgcctcgcgcagatctacgggcacgagggtctgcgtggcgtcaaccggggcatggtgtccacgttgctgcgtgagacgcccagcttcggcgtctacttcctcacctatgacgctctcacgcgggcgctgggctgcgagccgggcgaccgcctgctggtgcccaagctgctgttggcgggcggtacgtcaggcatcgtgtcctggctctctacctatcctgtggacgtggtcaagtcgcggctgcaggcggacggactgcggggcgccccgcgctaccgcggcatcctggactgcgtgcaccagagctaccgcgccgagggctggcgcgtcttcacacgggggctggcgtccacgctgctgcgcgccttccccgtcaacgctgccaccttcgccaccgtcacggtggtgctcacctacgcgcgcggcgaggaggccgggcccgagggcgaggctgtgcccgccgcccctgcggggcctgccctggcgcagccctccagcctgtgacgctcaccccgccctccttccccagggctccttctcagaaacctgggacataaattggcccctgagtcgattgccctgcttcctgctgggatgctgcgagctgtggagtctatcagacgtgggctgaattttgctgatcagctgggtagttttggccgagaactgcacttgcctcagtgttctcatctatgaaataaggaccctcatgcccacactgtagagtcacgaagctcagagattattcccagcagcagccagcacctggcctggctgaggccattgcaccgttatcctggaaactgaggcagacactccagcccctttctgggatcctggccacgtcattgtgctcctgccctgcaggctggctcccgggggtctctgatggccaaccaaggggccacccagggacctctaactccacacatcctccacccgggggggtggtgggccacccctctggtctgtgttagggacagaggaaaacttggtgtgcctcctggtgtcacagaactggatcctctgcataccccagcttctccacatgccactgctaggggtaccccagctgctgccactcctgctggagggtgaactggggaccctgcaccctccgggaagccatggagtctgctggaggcaccatatcagcctgcgggactagggtggggagcaaacaggccagcggtggaggtctggacagttcaagtgtgatgcagctgtggcaaggagaaatccttccgcctctgggcctcaggctgcctgtccataaaatggggacatggccagctgacggacaactgagtctccggcccacctaccaccgccagccaggatcccccaaagtgtgcagagggctcagcagagaacagtatgggaccccctcaccaggcctggaacacctccagccacaaagaagccaaaggtcagtccctctgctccccagcaaacggtgcctcccaggcattctcagtgccagggcttcatccctgtgaaggcacagggcctgctagtgggcacaggggtggctagttggggcctggggcagaggagggctgcaccaggcgtcctggggaatgtgctcagtgaagacgacactgggctttgcacagcctggtgtcgctgtacagaaactgtcaagggaataaagtgttctttgtttttt

SEQ ID NO: 19394 - DNA, 1540 bp, Homo sapiens
  source 1..1540: mol_type = unassigned DNA
tttgtgttgctttaaccgcctttactttctgagctaggggctgtctccatccatagcaaaagtgtaactttgttgtagatgggcgtaagcctcaccctggagagcgctagtacggcttcaggtccagagcgtggagaagcctcagtaccgcgggacgttgcactgcttcaagtccatcatcaagcaagagagcgtgctgggcctgtacaagggcctgggctcgccgctcatggggctcaccttcatcaacgcgctggtgttcggggtgcagggcaacaccctccgggccctgggccacgactcgcccctcaaccagttcctggcaggtgcggcggcgggcgccatccagtgcgtcatctgctgccccatggagctggccaagacgcggctgcagctgcaggacgcgggcccagcgcgcacctacaagggctcgctggactgcctcgcgcagatctacgggcacgagggtctgcgtggcgtcaaccggggcatggtgtccacgttgctgcgtgagacgcccagcttcggcgtctacttcctcacctatgacgctctcacgcgggcgctgggctgcgagccgggcgaccgcctgctggtgcccaagctgctgttggcgggcggtacgtcaggcatcgtgtcctggctctctacctatcctgtggacgtggtcaagtcgcggctgcaggcggacggactgcggggcgccccgcgctaccgcggcatcctggactgcgtgcaccagagctaccgcgccgagggctggcgcgtcttcacacgggggctggcgtccacgctgctgcgcgccttccccgtcaacgctgccaccttcgccaccgtcacggtggtgctcacctacgcgcgcggcgaggaggccgggcccgagggcgaggctgtgcccgccgcccctgcggggcctgccctggcgcagccctccagcctgtgacgctcaccccgccctccttccccagggctccttctcagaaacctgggacataaattggcccctgagtcgattgccctgcttcctgctgggatgctgcgagctgtggagtctatcagacgtgggctgaattttgctgatcagctgggtagttttggccgagaactgcacttgcctcagtgttctcatctatgaaataaggaccctcatgcccacactgtagagtcacgaagctcagagattattcccagcagcagccagcacctggcctggctgaggccattgcaccgttatcctggaaactgaggcagacactccagcccctttctgggatcctggccacgtcattgtgctcctgccctgcaggctggctcccgggggtctctgatggccaaccaaggggccacccagggacctctaactccacacatcctccacccgggggggtggtgggccacccctctggtctgtgttagggacagaggaaaacttggtgtgcctcctggtgtcacagaactggatcctctgcataccccagcttctccacatgccactgctaggggtaccccagctgctgccactcctgctggagggtgaact

SEQ ID NO: 19395 - DNA, 960 bp, Homo sapiens
  source 1..960: mol_type = unassigned DNA
agcaataatcagggagcagttgtcttgacctatgatgaggggatgggcgtaagcctcaccctggagagcgctagtacggcttcaggtccagagcgtggagaagcctcagtaccgcgggacgttgcactgcttcaagtccatcatcaagcaagagagcgtgctgggcctgtacaagggcctgggctcgccgctcatggggctcaccttcatcaacgcgctggtgttcggggtgcagggcaacaccctccgggccctgggccacgactcgcccctcaaccagttcctggcaggtgcggcggcgggcgccatccagtgcgtcatctgctgccccatggagctggccaagacgcggctgcagctgcaggacgcgggcccagcgcgcacctacaagggctcgctggactgcctcgcgcagatctacgggcacgagggtctgcgtggcgtcaaccggggcatggtgtccacgttgctgcgtgagacgcccagcttcggcgtctacttcctcacctatgacgctctcacgcgggcgctgggctgcgagccgggcgaccgcctgctggtgcccaagctgctgttggcgggcggtacgtcaggcatcgtgtcctggctctctacctatcctgtggacgtggtcaagtcgcggctgcaggcggacggactgcggggcgccccgcgctaccgcggcatcctggactgcgtgcaccagagctaccgcgccgagggctggcgcgtcttcacacgggggctggcgtccacgctgctgcgcgccttccccgtcaacgctgccaccttcgccaccgtcacggtggtgctcacctacgcgcgcggcgaggaggccgggcccgagggcgaggctgtgcccgccgcccctgcggggcctgccctggcgcagccctccagcctgtgacgctcaccccgccctccttccccagggctccttctcagaaacctgggacataa

SEQ ID NO: 19396 - DNA, 1124 bp, Homo sapiens
  source 1..1124: mol_type = unassigned DNA
ccgcccattggcctcactcggcgcccccacccgggccctgccggcaggcacgaggggcggggcgcgcggcccgaggtgagggaccgcgggccggaggggatccagcgagtcagctgccgccgagggaccagcgcgggtctagctgctgccgccatccccaccatccctgaccgcgcctgcccgggctccgcgccaggaggagcggccaggcccagccccggcaccgcgcgctcggggaccccgacggcgcccagcccggcgaggggcctcagggggaggacgaggaggaaaggcggcctcgccggggacccggccatggcgctggacttcttggctggatgcgcggggggtgtggcaggcgtgcttgtgggacacccgtttgacacggtcaaggggctgtctccatccatagcaaaagtgtaactttgttgtagatgggcgtaagcctcaccctggagagcgctagtacggcttcaggtccagagcgtggagaagcctcagtaccgcgggacgttgcactgcttcaagtccatcatcaagcaagagagcgtgctgggcctgtacaagggcctgggctcgccgctcatggggctcaccttcatcaacgcgctggtgttcggggtgcagggcaacaccctccgggccctgggccacgactcgcccctcaaccagttcctggcaggtgcggcggcgggcgccatccagtgcgtcatctgctgccccatggagctggccaagacgcggctgcagctgcaggacgcgggcccagcgcgcacctacaagggctcgctggactgcctcgcgcagatctacgggcacgagggtctgcgtggcgtcaaccggggcatggtgtccacgttgctgcgtgagacgcccagcttcggcgtctacttcctcacctatgacgctctcacgcgggcgctgggctgcgagccgggcgaccgcctgctggtgcccaagctgctgttggcgggcggtacgtcaggcatcgtgtcctggctctctacctatcctgtggacgtggtcaagtcgcggctgcaggcggacggactgcggggcgccccgcgctaccgcggcatcctggactgcgtgcaccagagctaccgcgccgagggctggcgcgt

SEQ ID NO: 19397 - DNA, 1025 bp, Homo sapiens
  source 1..1025: mol_type = unassigned DNA
gggccctgccggcaggcacgaggggcggggcgcgcggcccgaggtgagggaccgcgggccggaggggatccagcgagtcagctgccgccgagggaccagcgcgggtctagctgctgccgccatccccaccatccctgaccgcgcctgcccgggctccgcgccaggaggagcggccaggcccagccccggcaccgcgcgctcggggaccccgacggcgcccagcccggcgaggggcctcagggggaggacgaggaggaaaggcggcctcgccggggacccggccatggcgctggacttcttggctggatgcgcggggggtgtggcaggcgtgcttgtgggacacccgtttgacacggtcaaggggctgtctccatccatagcaaaagtgtaactttgttgtagatgggcgtaagcctcaccctggagagcgctagtacggcttcaggtccagagcgtggagaagcctcagtaccgcgggacgttgcactgcttcaagtccatcatcaagcaagagagcgtgctgggcctgtacaagggcctgggctcgccgctcatggggctcaccttcatcaacgcgctggtgttcggggtgcagggcaacaccctccgggccctgggccacgactcgcccctcaaccagttcctggcaggtgcggcggcgggcgccatccagtgcgtcatctgctgccccatggagctggccaagacgcggctgcagctgcaggacgcgggcccagcgcgcacctacaagggctcgctggactgcctcgcgcagatctacgggcacgagggtctgcgtggcgtcaaccggggcatggtgtccacgttgctgcgtgagacgcccagcttcggcgtctacttcctcacctatgacgctctcacgcgggcgctgggctgcgagccgggcgaccgcctgctggtgcccaagctgctgttggcgggcggtacgtcaggcatcgtgtcctggctctctacctatcctgtggacgtggtcaagtcgcggctgcaggcggacggactgcggg

SEQ ID NO: 19398 - DNA, 569 bp, Homo sapiens
  source 1..569: mol_type = unassigned DNA
taactgctgttctcacgagaggctactggcagagaccaggcaggagctcctggagccaaggtacggcttcaggtccagagcgtggagaagcctcagtaccgcgggacgttgcactgcttcaagtccatcatcaagcaagagagcgtgctgggcctgtacaagggcctgggctcgccgctcatggggctcaccttcatcaacgcgctggtgttcggggtgcagggcaacaccctccgggccctgggccacgactcgcccctcaaccagttcctggcaggtgcggcggcgggcgccatccagtgcgtcatctgctgccccatggagctggccaagacgcggctgcagctgcaggacgcgggcccagcgcgcacctacaagggctcgctggactgcctcgcgcagatctacgggcacgagggtctgcgtggcgtcaaccggggcatggtgtccacgttgctgcgtgagacgcccagcttcggcgtctacttcctcacctatgacgctctcacgcgggcgctgggctgcgagccgggcgaccgcctgctggtgcccaagctgctgttggcggg

SEQ ID NO: 19399 - DNA, 674 bp, Homo sapiens
  source 1..674: mol_type = unassigned DNA
cggggcgcgcggcccgaggtgagggaccgcgggccggaggggatccagcgagtcagctgccgccgagggaccagcgcgggtctagctgctgccgccatccccaccatccctgaccgcgcctgcccgggctccgcgccaggaggagcggccaggcccagccccggcaccgcgcgctcggggaccccgacggcgcccagcccggcgaggggcctcagggggaggacgaggaggaaaggcggcctcgccggggacccggccatggcgctggacttcttggctggatgcgcggggggtacggcttcaggtccagagcgtggagaagcctcagtaccgcgggacgttgcactgcttcaagtccatcatcaagcaagagagcgtgctgggcctgtacaagggcctgggctcgccgctcatggggctcaccttcatcaacgcgctggtgttcggggtgcagggcaacaccctccgggccctgggccacgactcgcccctcaaccagttcctggcaggtgcggcggcgggcgccatccagtgcgtcatctgctgccccatggagctggccaagacgcggctgcagctgcaggacgcgggcccagcgcgcacctacaagggctcgctggactgcctcgcgcagatctacgggcacgagggtctgcgtggcgtcaaccggggca

SEQ ID NO: 19400 - DNA, 1067 bp, Homo sapiens
  source 1..1067: mol_type = unassigned DNA
ccgggccctgccggcaggcacgaggggcggggcgcgcggcccgaggtgagggaccgcgggccggaggggatccagcgagtcagctgccgccgagggaccagcgcgggtctagctgctgccgccatccccaccatccctgaccgcgcctgcccgggctccgcgccaggaggagcggccaggcccagccccggcaccgcgcgctcggggaccccgacggcgcccagcccggcgaggggcctcagggggaggacgaggaggaaaggcggcctcgccggggacccggccatggcgctggacttcttggctggatgcgcggggggtgtggcaggcgtgcttgtgggacacccgtttgacacggtcaaggcccttgggactgaaagaatccaagatctggatctcctctatagcgcccagaaccacagccaccgtcctgaagcacacggccttcacacgtttctacacgaagggagttttctgtcctgcttccttggacacagcaataatcagggagcagttgtcttgacctatgatgagggggtgaccggccatccctgggcatgggatggggagtgtgggtgggggctggctgtgggggctccgcgcctggatgtgatgttgaaattttgtgttgctttaaccgcctttactttctgagctaggggctgtctccatccatagcaaaagtgtaactttgttgtagatgggcgtaagcctcaccctggagagcgctagtacggcttcaggtccagagcgtggagaagcctcagtaccgcgggacgttgcactgcttcaagtccatcatcaagcaagagagcgtgctgggcctgtacaagggcctgggctcgccgctcatggggctcaccttcatcaacgcgctggtgttcggggtgcagggcaacaccctccgggccctgggccacgactcgcccctcaaccagttcctggcaggtgcggcggcgggcgccatccagtgcgtcatctgctgccccatggagctggccaagacgcggctgcagctgcaggacgcgggcccagcgcgcacctacaagggctcgctggactgcctc

SEQ ID NO: 19401 - DNA, 675 bp, Homo sapiens
  source 1..675: mol_type = unassigned DNA
gcaactctgagcctcctattgagcaaagataagctcataggcaacaaagagcactttgacatggaagaggttctgggccactgggctcggaggcagcggggcctgaccagcgccccaggccccagagctgctgacgtgggtccccaaggaggttgttggctgttctcttgccaccactctattaactcataactgctgttctcacgagaggctactggcagagaccaggcaggagctcctggagccaaggtcattgcttttatttttatttatttatttattgagatggaatgttcctttctcgcccaggctggagtgcagtggcatgacctcactgcatcctctgcctcacgggttcaagcaattctcccacctcagcctcctgagtagcagggattacaggcgtgagccactgcacctggccaggctcatcactttttgcgcctattgcctcgaagccagtctctgatgggacattagggcaggggcccttcagcctagtctgggacatgggccgctcactcagcagtatgacaagcatcacctggagaacgggccagtctcaggaggtcgttcatgccccactggcagtgcactgtgcagccatagtgtaaacaagaggcttaacctgaattggtctgagatcttggggaccccctaccctgtctccagcag

SEQ ID NO: 19402 - DNA, 797 bp, Homo sapiens
  source 1..797: mol_type = unassigned DNA
cactcggcgcccccacccgggccctgccggcaggcacgaggggcggggcgcgcggcccgaggtgagggaccgcgggccggaggggatccagcgagtcagctgccgccgagggaccagcgcgggtctagctgctgccgccatccccaccatccctgaccgcgcctgcccgggctccgcgccaggaggagcggccaggcccagccccggcaccgcgcgctcggggaccccgacggcgcccagcccggcgaggggcctcagggggaggacgaggaggaaaggcggcctcgccggggacccggccatggcgctggacttcttggctggatgcgcgggggccatccagcggggttggggctacggagccgaccccctactcggctggccttggagggcactgaaccactctggcgccgagtcacgccttggaacgccgccccttcctacgcggttttgtgtggcaggcgtgcttgtgggacacccgtttgacacggtcaaggcccttgggactgaaagaatccaagatctggatctcctctatagcgcccagaaccacagccaccgtcctgaagcacacggccttcacacgtttctacacgaagggagttttctgtcctgcttccttggacacagcaataatcagggagcagttgtcttgacctatgatgagggggtgaccggccatccctgggcatgggatggggagtgtgggtgggggctggctgtgggggctccgcgcctggatgtgatgttgaaattttgtgttgctttaaccgcctttactttctgagctaggggct

SEQ ID NO: 19403 - DNA, 569 bp, Homo sapiens
  source 1..569: mol_type = unassigned DNA
ataccctcccagtggacgtgaggattccaggggctcatgggatctgcctgctgcacccacaggtgtggcaggcgtgcttgtgggacacccgtttgacacggtcaagggcaagctgtgagtggcaggcaccagaccagccttgtgcttgctggcagcgctacacgtggccgctcttcccactgagcaaaggcacagctgacggcaaggcaggatgcgcaccctgagctgggtttgcgggagacttccagtctccttttctggtgagcctaggcccttgggactgaaagaatccaagatctggatctcctctatagcgcccagaaccacagccaccgtcctgaagcacacggccttcacacgtttctacacgaagggagttttctgtcctgcttccttggacacagcaataatcagggagcagttgtcttgacctatgatgagggggtgaccggccatccctgggcatgggatggggagtgtgggtgggggctggctgtgggggctccgcgcctggatgtgatgttgaaattttgtgttgctttaaccgcctttactttctgagctagggg

SEQ ID NO: 19404 - DNA, 323 bp, Homo sapiens
  source 1..323: mol_type = unassigned DNA
tgtgtgttctgaaagtagcccagcggggcccttccttgctctttttccttggccccagggcaagctgtgagtggcaggcaccagaccagccttgtgcttgctggcagcgctacacgtggccgctcttcccactgagcaaaggcacagctgacggcaaggcaggatgcgcaccctgagctgggtttgcgggagacttccagtctccttttctggtgagcctaggcccttgggactgaaagaatccaagatctggatctcctctatagcgcccagaaccacagccaccgtcctgaagcacacggccttcacacgtttctacacga

SEQ ID NO: 19405 - DNA, 371 bp, Homo sapiens
  source 1..371: mol_type = unassigned DNA
aggtgtttggattaatgggatatcccagaaatagtgtgtgcagcctcccaggggacaacttctgctgtcagccacccagaccagtcagccgcggagagcagcagcctgcagatgggacaccagtgctgagtgggacaggtgctggcttggccttgggatgtcacatgcataccctcccagtggacgtgaggattccaggggctcatgggatctgcctgctgcacccacaggtgtggcaggcgtgcttgtgggacacccgtttgacacggtcaaggcccttgggactgaaagaatccaagatctggatctcctctatagcgcccagaaccacagccaccgtcctgaagcacacggccttcacacgtttctac

SEQ ID NO: 19406 - DNA, 550 bp, Homo sapiens
  source 1..550: mol_type = unassigned DNA
actcggcgcccccacccgggccctgccggcaggcacgaggggcggggcgcgcggcccgaggtgagggaccgcgggccggaggggatccagcgagtcagctgccgccgagggaccagcgcgggtctagctgctgccgccatccccaccatccctgaccgcgcctgcccgggctccgcgccaggaggagcggccaggcccagccccggcaccgcgcgctcggggaccccgacggcgcccagcccggcgaggggcctcagggggaggacgaggaggaaaggcggcctcgccggggacccggccatggcgctggacttcttggctggatgcgcggggggtgtggcaggcgtgcttgtgggacacccgtttgacacggtcaagggcaagctgtgagtggcaggcaccagaccagccttgtgcttgctggcagcgctacacgtggccgctcttcccactgagcaaaggcacagctgacggcaaggcaggatgcgcaccctgagctgggtttgcgggagacttccagtctccttttctggtgagcctaggtgtgtgt

SEQ ID NO: 19407 - DNA, 534 bp, Homo sapiens
  source 1..534: mol_type = unassigned DNA
agcgagtcagctgccgccgagggaccagcgcgggtctagctgctgccgccatccccaccatccctgaccgcgcctgcccgggctccgcgccaggaggagcggccaggcccagccccggcaccgcgcgctcggggaccccgacggcgcccagcccggcgaggggcctcagggggaggacgaggaggaaaggcggcctcgccggggacccggccatggcgctggacttcttggctggatgcgcggggggtgtggcaggcgtgcttgtgggacacccgtttgacacggtcaaggtgagtctcatcgctgcttttttttcctcggcgcgtacattggagagaggctcacagggttggggtggctggaagcctgtttccgtgtacagccccaggtgggcagctgcttttacaccaggccgggttgaaccttcctcactgctttgtcctggcatctcccagctggggctgatccacatgctgggttcatggccaagtccatcctgggcttggccagctggaaccgaggtgctgaggtttt

SEQ ID NO: 19408 - DNA, 756 bp, Homo sapiens
  source 1..756: mol_type = unassigned DNA
gctgtctccctgggctcaaggtggctcccactgagggaaggggacggaggtatcagccagtgcatcaggacctggggtcgtcactcccaaggggccattaccctgttcagtctccgtggccactctgggggagggaggtaaacctttacaggtaaggcccagagtgaggcccagagacagagtcatttgtgagcacgccaggctgatgagcggcagggggaaaattcaaatctggggagggtctgaccccaaagtccaacatctctggagcctcctgcccatgtcaggtgtttggattaatgggatatcccagaaatagtgtgtgcagcctcccaggggacaacttctgctgtcagccacccagaccagtcagccgcggagagcagcagcctgcagatgggacaccagtgctgagtgggacaggtgctggcttggccttgggatgtcacatgcataccctcccagtggacgtgaggattccaggggctcatgggatctgcctgctgcacccacaggtgtggcaggcgtgcttgtgggacacccgtttgacacggtcaaggtgagtctcatcgctgcttttttttcctcggcgcgtacattggagagaggctcacagggttggggtggctggaagcctgtttccgtgtacagccccaggtgggcagctgcttttacaccaggccgggttgaaccttcctcactgctttgtcctggcatctcccagctggggctgatccacatgctgggttcatggcc

SEQ ID NO: 19409 - DNA, 563 bp, Homo sapiens
  source 1..563: mol_type = unassigned DNA
atttcgggactgactccaccccgtcccgcgcagccatccagcggggttggggctacggagccgaccccctactcggctggccttggagggcactgaaccactctggcgccgagtcacgccttggaacgccgccccttcctacgcggttttcacctgcccttgttcaccgcctcttcatctacttggatttggctcgaataaaccctcagctcccggccagcgctgagagccctggcggaagagtgggtagcggtggccttaagtattaaatctgtggcgtcggagcctgcttcttgggggagagactcgttgaaaagggagtgtgttggggaggtgttgtgcgctgaggggagttagaacttcccggtcggttacccagtgggaagctgcggggcacaaagcccagaatttgctgctaatcgctgggtgccctggagacagagggggcgtgtcctctgcggattccattctcaccttcccctcccgcttctgatctcgctgtttgctccacccttgctccccacccactatcagctccagcgggtgggggtgaagggctgtcc

SEQ ID NO: 19410 - DNA, 1050 bp, Homo sapiens
  source 1..1050: mol_type = unassigned DNA
gggaccagcgcgggtctagctgctgccgccatccccaccatccctgaccgcgcctgcccgggctccgcgccaggaggagcggccaggcccagccccggcaccgcgcgctcggggaccccgacggcgcccagcccggcgaggggcctcagggggaggacgaggaggaaaggcggcctcgccggggacccggccatggcgctggacttcttggctggatgcgcgggggccatccagcggggttggggctacggagccgaccccctactcggctggccttggagggcactgaaccactctggcgccgagtcacgccttggaacgccgccccttcctacgcggttttgtgagctgttgggggcggaaggggggtggtgggtgggtcgggcgagccggtgtggggcaccttctccgaggcgcggtcgcggctctggggttcctcccatgcagttgtccccgggagggcccgggcgggcgtgcagtccaggctctcccatgccccgaccgtgggcgtcgggcacggcacttccctgttgggcctctggcttctctgcttttaccttgagggttaatttattcaccaggatttagatgtcgggggcgggggagggtggttggcggcgggagttgctgagagggccggccgcttatccctgtttggtcccacttttctcccagcacctgcccttgttcaccgcctcttcatctacttggatttggctcgaataaaccctcagctcccggccagcgctgagagccctggcggaagagtgggtagcggtggccttaagtattaaatctgtggcgtcggagcctgcttcttgggggagagactcgttgaaaagggagtgtgttggggaggtgttgtgcgctgaggggagttagaacttcccggtcggttacccagtgggaagctgcggggcacaaagcccagaatttgctgctaatcgctgggtgccctggagacagagggggcgtgtcctctgcggattccattctcaccttcccctcccgcttctgatctcgctgtttgctccacccttgctccccacc

SEQ ID NO: 19411 - DNA, 6087 bp, Homo sapiens
  source 1..6087: mol_type = unassigned DNA
accaatgggcgacgcgtacttgcagtggcgcgctgtgtgcgtcacgccgacgacgcgcgaagggcacacatcttaggacccggaggacgtccggcctctgtgagccgcaacctttccaagggagtggttgtgtgatcgccatcttagggaatgttctcgtccgtggcgcacctggcgcgggcgaaccccttcaacacgccacatctgcagctggtgcacgatggtctcggggacctccgcagcagctccccagggcccacgggccagccccgccgccctcgcaacctggcagccgccgccgtggaagagtacagttgtgaatttggctccgcgaagtattatgcactgtgtggctttggtggggtcttaagttgtggtctgacacacactgctgtggttcccctggatttagtgaaatgccgtatgcaggtggacccccaaaagtacaagggcatatttaacggattctcagttacacttaaagaggatggtgttcgtggtttggctaaaggatgggctccgactttccttggctactccatgcagggactctgcaagtttggcttttatgaagtctttaaagtcttgtatagcaatatgcttggagaggagaatacttatctctggcgcacatcactatatttggctgcctctgccagtgctgaattctttgctgacattgccctggctcctatggaagctgctaaggttcgaattcaaacccagccaggttatgccaacactttgagggatgcagctcccaaaatgtataaggaagaaggcctaaaagcattctacaagggggttgctcctctctggatgagacagataccatacaccatgatgaagttcgcctgctttgaacgtactgttgaagcactgtacaagtttgtggttcctaagccccgcagtgaatgttcaaagccagagcagctggttgtaacatttgtagcaggttacatagctggagtcttttgtgcaattgtttctcaccctgctgattctgtggtatctgtgttgaataaagaaaaaggtagcagtgcttctctggtcctcaagagacttggatttaaaggtgtatggaagggactgtttgcccgtatcatcatgattggtaccctgactgcactacagtggtttatctatgactccgtgaaggtctacttcagacttcctcgccctcctccacccgagatgccagagtctctgaagaagaagcttgggttaactcagtagttagatcaaagcaaatgtggactgaatctgcttgttgatcagtgttgaagaaagtgcaaaaggaacttttatatatttgacagtgtaggaaattgtctattcctgatataattactgtagtactcttgcttaaggcaagagtttcagatttactgttgaaataaacccaactcttcatgatttgcctgtgacttatttttaaaacttttttaaaaaagatttagctttaaaatagttggaaagaatgaagtatataagttaaggaaaaaatacaaaactgaccatgaccattgttggttgaatattccagttgctattcagaaattgtcatatgtctcaagttttatcacacaaagttcctgtatttctagggaagcagactttaaatttctaaaaacttgatttaattatagttaaatatgtgtagtcatttgtggttattttggcaagtaaatgtcagtgtatacttacatttttgcagcatgtactacaccttttttatgttggtgagtttgctaatccttatttgtaagacaaggtaaaccaaattaggctgattcttagaatgacagtaaaggaccaaagtgattgacagctgaaaacaattttcaggtacactaattctctttacacagatctgactttttttttttttgagacggagtttcactcttgttgcccagacgagtgtagtgtcgcgatctcgcctcacggcaacctctgcctcccaggttcaagcgattgttctgcctcagcctcccaagtagctgggatttcaggcatgtgccaccacgcccagctaattttgtatttttagtagagacggggtttccctgtgttggtcaggctggtctcgaacttccaacctcaggtgatccgcccgcctcagcctcccaaactgctgggattataggcatgagccaccgtgcccggctctgactttttacagaaaattgaactattttcagtctggtattttaagaaaggtactgcttgacagctgaactatatgaatgccactggggaaaaagcattccatcatacttagatacgagattggattgtaggtttaagcccatttttaaagagctcctagaaagtgaattagtttttgtgtttagattccccttaagtttgattaggaagtgtataaaagttcaatcttttgtaatgacagcccaccactggaaaaaaaacgaaaaacctagtgtaatatataacatgctgtttttcaaacactagattttacctagagtccttatgtgtaatacgtgggttggttaacagtccctacgtaaagcgtacagatggcctggagagaaaaactttttcagagattggagagaaatgttactacaaactcatggtaaggtcagtgaactcaatttagaagccagtgcagctagttgcatgttaacttctttatatcatcattgcctgaacttgttaaaggttccaacattttacctgtgctgcaggaaaaaaggaaaagttgtaggtacaaatttggaccaaactttaaaaaggtaaagtaggatgtcttctgaacccaaccaagtggtggctgtggtgcttagcagtatcaactgtatattatttcttgctatgttagcaaagcatccaaagatcaatggtgtatgataagcttttctgtgggtgaagaactcgggagtatcagactcttctggttctgagtctcatgaagcttttcacttctgagctgaaaggatgctctttgtgcttttcactattagtggtatagtctttcccgaaaatctctagcatggtggcttcagggcagctggacttaggtggtattttggggctccaggagagcttggcagagttggctttttaggacttatccttcaatgtcacataacatcacttttaccatgctcttggttacaacagtgatgtctcagaaaccaagtcccagattgaggaaaaaaggaacatagtctctacctcttcctgagaggaaagtcagtcaacgtgtaagaggagcagtagaaacgcattagtccagccaacgtgaaagtggaccgtagatctaaaacattttgggtatgcagttcagccagcccttactgaggcagttctgccaatcaggattcaagttttatttcctaagagttataataggttttatttgtgggcattgatacaaaatacgctgtgttcaagctatggagcctgccactgtagttactagagttacggttcaaagctatttctgagagaaagccacttcatcctcaaaacccaagaggcccacttaaagtgatgcgaattctcatttcaggtttttaaattatactaaaagattctagtaagaaaattttaatatgtatgtattggtgttctttttacatttcatttaatgaaatgtctactgtcaatacgataaagcagaacccagtggagtaagaatacacgaaactgccaggcacagtgggtcatgcctgtaaacccagcattctgggaggccgaggcgggtggatcacctgaggtcgggagttcaagaccagcctgaccaacatggagaaaccctgtctctactaaaaatacaaaattagctgcggtggtggtgcgtgcctgtaatcccagctactcaggaggctgaggcaggagaatcgcttgaacccgggaggcggaggttgtggtgagccaagattgcgccattgcactccagcctgggcaacaacagcgaaactctgtctcaaaaaaaaaaaatatatatatatatatatatatatgaagctgatagttgaattatgttgattcagggacaagatagcattgcatagtaacttccagtaggatcaaatattttgagagtggttaaaacgccaaggaatcctgattttatgaaattatgccttctgataggtgcaacaaaattgaacagaagagtaacagcttaactaaacctccattgtgtgaaagttttatgaaatgttttgacttttttttttttttccctagagaacagggttcttgctttgtcgcccaggctggagtacagccttgaactcctgggctcaagcgatcctcctgcctcagcctcccagttagctgacacaattgggatgtgccactacttgctcctgttttttcatagacgggtcctgctgttgctcaggctggtctcggattcctggcctcaagcaactttcctgccccagctcctaaagcggccagggttacaggtagccgccttgtctgtcccgtttcgaccatattttatttttgagaaggtcttgctctgtcgccagactggagtgcagtggcacgatgatagctcactgcagcctcgatctcccaagctcaagtgatcctcccacctcagcctcttgaataactgggactgcaagtgtggaccaccatgtctggctaatgttttttatttttagcagaaatgaggtcttgctatgttgccaaggctagtcttgaactcctgagctcaagcgagccttctgccttggccttccaaagggctgggattagagggctgagccaccacacttggccaaccatattttattttttatatttttattttatttgatccttgttctgaaaccataaagtgagtttaacatttctggctgggcacagtggctcatgcctgtaattctaacactttaggagaccaaggcaggaggatgccttgagcccaggagtttgagaccatcctggacaacataatgagaaaagaaaatacaaaaattaaggggtgtggtgacacatgcctgtagtctcaactatttgggaggctgaggcaggaggattgcttgagcccgagaggttgaggctacagtgagccatgtttacgccattgcagtccagcctgggcgacagagtgaaaccctgtctcaaaaaaaaagtaacatttctatatgatttttgggatcgacatgtccataatgttaatgaagcgcatagcagtcactagtaaattaggagttatacattgcttctatagcatcagaaattgtatatcaggccaggtgcaaaagctcactcctgaaatccaagcactttgggaggctgaggtgggcggattgcttgaggtcaggagttcaagaacagcctggccaacatgatgaaaccccaggtctctactaaaaatacaaaaattggtcaggcatggtggtgcatgcctgtaattccagctactcgggaggctgaggcaggagaattgcttgaacccgggaggcagaggttgcagtgagccaagattgtgccactgcactccagcctgggcgacagagccagactgtctgaggaagaaattgtatatcaggctgggcacagtggctcatacccgtaatcccagcactttgggaggcccaggctgggtatcacttgagcccaggagttggagaccagcctgggcaacaaagtgagacccctctctctacaaaaaataaattagccaggcatggtggcacgtgcctgtaatctcagctacttaggaagctgaaggaggatcgtctgagcccaggagtttgaggctgcaatgagctacaatcacacccctgcactccggcctgggcgacagagtgataacctgtctaaaaaaataaaaataaattgtataatcatattgcaattttctttgcattactgatgaggaaaaatctcaaagtaattgtaaaaaatcctggatatcacatagttgagaaacaaagttattttaaacttacaggactctgtagttcacagttgaacactgtggcttcctgaaatatcaaagaataatgtacattaataagccagctactatcggcatcttgtaaaaattaaaaaattaaacataaataaaagttcaaactatgtgttgaa

SEQ ID NO: 19412 - DNA, 1909 bp, Homo sapiens
  source 1..1909: mol_type = unassigned DNA
gtgtgcgtcacgccgacgacgcgcgaagggcacacatcttaggacccggaggacgtccggcctctgtgagccgcaacctttccaagggagtggttgtgtgatcgccatcttagggagtgagtgtggccgggccttctcctgtggcgggtgtggggagcggagcccagagctcctgtggggccgctgctttggcggtgggcccagccgggagcagcctctttcgaaggccgccgtgacctcttcaagggcgtggagacgggaaggaaaaggccccggttggggttccagggcgccggtaacgttaaccggcgccttgcctgtcctctaaccgtcgctccctcctcccctagaaagatgttctcgtccgtggcgcacctggcgcgggcgaaccccttcaacacgccacatctgcagctggtgcacgatggtctcggggacctccgcagcagctccccagggcccacgggccagccccgccgccctcgcaacctggcagccgccgccgtggaagagtacagttgtgaatttggctccgcgaagtattatgcactgtgtggctttggtggggtcttaagttgtggtctgacacacactgctgtggttcccctggatttagtgaaatgccgtatgcaggtggacccccaaaagtacaagggcatatttaacggattctcagttacacttaaagaggatggtgttcgtggtttggctaaaggatgggctccgactttccttggctactccatgcagggactctgcaagtttggcttttatgaagtctttaaagtcttgtatagcaatatgcttggagaggagaatacttatctctggcgcacatcactatatttggctgcctctgccagtgctgaattctttgctgacattgccctggctcctatggaagctgctaaggttcgaattcaaacccagccaggttatgccaacactttgagggatgcagctcccaaaatgtataaggaagaaggcctaaaagcattctacaagggggttgctcctctctggatgagacagataccatacaccatgatgaagttcgcctgctttgaacgtactgttgaagcactgtacaagtttgtggttcctaagccccgcagtgaatgttcaaagccagagcagctggttgtaacatttgtagcaggttacatagctggagtcttttgtgcaattgtttctcaccctgctgattctgtggtatctgtgttgaataaagaaaaaggtagcagtgcttctctggtcctcaagagacttggatttaaaggtgtatggaagggactgtttgcccgtatcatcatgattggtaccctgactgcactacagtggtttatctatgactccgtgaaggtctacttcagacttcctcgccctcctccacccgagatgccagagtctctgaagaagaagcttgggttaactcagtagttagatcaaagcaaatgtggactgaatctgcttgttgatcagtgttgaagaaagtgcaaaaggaacttttatatatttgacagtgtaggaaattgtctattcctgatataattactgtagtactcttgcttaaggcaagagtttcagatttactgttgaaataaacccaactcttcatgatttgcctgtgacttatttttaaaacttttttaaaaaagatttagctttaaaatagttggaaagaatgaagtatataagttaaggaaaaaatacaaaactgaccatgaccattgttggttgaatattccagttgctattcagaaattgtcatatgtctcaagttttatcacacaaagttcctgtatttctagggaagcagactttaaatttctaaaaacttgatttaattatagttaaatatgtgtagtcatttgtggttattttggcaagtaaatgtcagtgtatactt

SEQ ID NO: 19413 - DNA, 1359 bp, Homo sapiens
  source 1..1359: mol_type = unassigned DNA
aagggcacacatcttaggacccggaggacgtccggcctctgtgagccgcaacctttccaagggagtggttgtgtgatcgccatcttagggaatgttctcgtccgtggcgcacctggcgcgggcgaaccccttcaacacgccacatctgcagctggtgcacgatggtctcggggacctccgcagcagctccccagggcccacgggccagccccgccgccctcgcaacctggcagccgccgccgtggaagagcagtatagctgtgactatggatctggcagattctttatcctttgtggacttggaggaattattagctgtggcacaacacatacagcattggttcctctagatctggttaaatgcagaatgcaggtggacccccaaaagtacaagggcatatttaacggattctcagttacacttaaagaggatggtgttcgtggtttggctaaaggatgggctccgactttccttggctactccatgcagggactctgcaagtttggcttttatgaagtctttaaagtcttgtatagcaatatgcttggagaggagaatacttatctctggcgcacatcactatatttggctgcctctgccagtgctgaattctttgctgacattgccctggctcctatggaagctgctaaggttcgaattcaaacccagccaggttatgccaacactttgagggatgcagctcccaaaatgtataaggaagaaggcctaaaagcattctacaagggggttgctcctctctggatgagacagataccatacaccatgatgaagttcgcctgctttgaacgtactgttgaagcactgtacaagtttgtggttcctaagccccgcagtgaatgttcaaagccagagcagctggttgtaacatttgtagcaggttacatagctggagtcttttgtgcaattgtttctcaccctgctgattctgtggtatctgtgttgaataaagaaaaaggtagcagtgcttctctggtcctcaagagacttggatttaaaggtgtatggaagggactgtttgcccgtatcatcatgattggtaccctgactgcactacagtggtttatctatgactccgtgaaggtctacttcagacttcctcgccctcctccacccgagatgccagagtctctgaagaagaagcttgggttaactcagtagttagatcaaagcaaatgtggactgaatctgcttgttgatcagtgttgaagaaagtgcaaaaggaacttttatatatttgacagtgtaggaaattgtctattcctgatataattactgtagtactcttgcttaaggcaagagtttcagatttactgttgaaataaacccaactcttcatg

SEQ ID NO: 19414 - DNA, 3236 bp, Homo sapiens
  source 1..3236: mol_type = unassigned DNA
cacacatcttaggacccggaggacgtccggcctctgtgagccgcaacctttccaagggagtggttgtgtgatcgccatcttagggaaaagatgttctcgtccgtggcgcacctggcgcgggcgaaccccttcaacacgccacatctgcagctggtgcacgatggtctcggggacctccgcagcagctccccagggcccacgggccagccccgccgccctcgcaacctggcagccgccgccgtggaaggtgagatcagaccctgcccaatacagtcgtgtggtctacttgtgggccgcccagcctttgaggcctggacccggcttggaggacagggaaggacgagtccagcccgctgcaccgtaggacggcgcccagttgcttgccctggggtatcggccttttccaccataggcgggtgtcagatccttggccttccctcaagggcgtggaagcgctgaggccctgtgtcccttcgtgacctccgtgtgcccgagggaagagaggccgtgactagctctttctccgccgtgagctcgcttggtcagcaaactaagtactgggtaaactctcctcccgaaactactgaccacccacagttctactaactatattacctgtcctttgatttgcccttagttttcttaaaaatagtcctttcctaagttttatatttgtcgacgccaggtcagtcatttttgcacttaattgtatatgagataactagatgtcctgttttcgtgcgactggaggaggcagcttgcagccctacataggcaatagaaaggagataattggtgggcgtccctttggtgtgattatctcttgggattcttggtggttgggcccagctttaacttagttgtgtgtgttttaaatcctagtgaagtatgtacatacagagaaacctgaaaaccgaattgtaggagtcctaagaatgttatctaccttgtgcctgtaaaatcgaaagatttttttctttaaatcattcatgtgcttctgttgtctttagtatggatagagtccttatttacactatctgtcgttcagtttaaaagttaaagctaacattatttgtgtattaaatgtatttgactgcaggaatttgtgcgtatccgtttttatgttacaggagttcttaagtggggatagtattggttagtggctgggataaactttgaagttgtttgcaagccttttacatgtcgagtgatctttctgagtttcgtttgtactctgaagtgtgctcttaccagtggttaataatttgaagtttgactttaattgtaaaagccgttaatgtagaaaacttttaaaaaaattaatatggcagaatacgagctattaatagtatcagatacagaaccctcataatttttaaatgatctgaatttggcagtgaatttttttttaagccacttaattgtggccaaagctattcagctgtgataatagtatctcacagggaaacattttctttcattccagtggccttagtcatctctgaagaaatacttacttgatttttttttttccaatcaaacagagcagtatagctgtgactatggatctggcagattctttatcctttgtggacttggaggaattattagctgtggcacaacacatacagcattggttcctctagatctggttaaatgcagaatgcaggtttgttttgcatgctggactagagcatattgaagcatgactgactgttaagttataagatatagtcatctaacaagctgtgtggaaacctaactgtccaggaggtaagtttatgaccagtaacatgagttttatattaaaatgcatggtgtgtcttctcttactacagagtacagttgtgaatttggctccgcgaagtattatgcactgtgtggctttggtggggtcttaagttgtggtctgacacacactgctgtggttcccctggatttagtgaaatgccgtatgcaggtggacccccaaaagtacaagggcatatttaacggattctcagttacacttaaagaggatggtgttcgtggtttggctaaaggatgggctccgactttccttggctactccatgcagggactctgcaagtttggcttttatgaagtctttaaagtcttgtatagcaatatgcttggagaggagaatacttatctctggcgcacatcactatatttggctgcctctgccagtgctgaattctttgctgacattgccctggctcctatggaagctgctaaggttcgaattcaaacccagccaggttatgccaacactttgagggatgcagctcccaaaatgtataaggaagaaggcctaaaagcattctacaagggggttgctcctctctggatgagacagataccatacaccatgatgaagttcgcctgctttgaacgtactgttgaagcactgtacaagtttgtggttcctaagccccgcagtgaatgttcaaagccagagcagctggttgtaacatttgtagcaggttacatagctggagtcttttgtgcaattgtttctcaccctgctgattctgtggtatctgtgttgaataaagaaaaaggtagcagtgcttctctggtcctcaagagacttggatttaaaggtgtatggaagggactgtttgcccgtatcatcatgattggtaccctgactgcactacagtggtttatctatgactccgtgaaggtctacttcagacttcctcgccctcctccacccgagatgccagagtctctgaagaagaagcttgggttaactcagtagttagatcaaagcaaatgtggactgaatctgcttgttgatcagtgttgaagaaagtgcaaaaggaacttttatatatttgacagtgtaggaaattgtctattcctgatataattactgtagtactcttgcttaaggcaagagtttcagatttactgttgaaataaacccaactcttcatgatttgcctgtgacttatttttaaaacttttttaaaaaagatttagctttaaaatagttggaaagaatgaagtatataagttaaggaaaaaatacaaaactgaccatgaccattgttggttgaatattccagttgctattcagaaattgtcatatgtctcaagttttatcacacaaagttcctgtatttctagggaagcagactttaaatttctaaaaacttgatttaattatagttaaatatgtgtagtcatttgtggttattttggcaagtaaatgtcagtgtatactt

SEQ ID NO: 19415 - DNA, 550 bp, Homo sapiens
  source 1..550: mol_type = unassigned DNA
acacatcttaggacccggaggacgtccggcctctgtgagccgcaacctttccaagggagtggttgtgtgatcgccatcttagggaaaagatgttctcgtccgtggcgcacctggcgcgggcgaaccccttcaacacgccacatctgcagctggtgcacgatggtctcggggacctccgcagcagctccccagggcccacgggccagccccgccgccctcgcaacctggcagccgccgccgtggaagagcagtatagctgtgactatggatctggcagattctttatcctttgtggacttggaggaattattagctgtggcacaacacatacagcattggttcctctagatctggttaaatgcagaatgcaggtggacccccaaaagtacaagggcatatttaacggattctcagttacacttaaagaggatggtgttcgtggtttggctaaaggatgggctccgactttccttggctactccatgcagggactctgcaagtttggcttttatgaagtctttaaagtcttgtatagcaatatgcttggaga

SEQ ID NO: 19416 - DNA, 1351 bp, Homo sapiens
  source 1..1351: mol_type = unassigned DNA
atcttaggacccggaggacgtccggcctctgtgagccgcaacctttccaagggagtggttgtgtgatcgccatcttagggaaaagatgttctcgtccgtggcgcacctggcgcgggcgaaccccttcaacacgccacatctgcagctggtgcacgatggtctcggggacctccgcagcagctccccagggcccacgggccagccccgccgccctcgcaacctggcagccgccgccgtggaagagtacagttgtgaatttggctccgcgaagtattatgcactgtgtggctttggtggggtcttaagttgtggtctgacacacactgctgtggttcccctggatttagtgaaatgccgtatgcaggtggacccccaaaagtacaagggcatatttaacggattctcagttacacttaaagaggatggtgttcgtggtttggctaaaggatgggctccgactttccttggctactccatgcagggactctgcaagtttggcttttatgaagtctttaaagtcttgtatagcaatatgcttggagaggagaatacttatctctggcgcacatcactatatttggctgcctctgccagtgctgaattctttgctgacattgccctggctcctatggaagctgctaaggttcgaattcaaacccagccaggttatgccaacactttgagggatgcagctcccaaaatgtataaggaagaaggcctaaaagcattctacaagggggttgctcctctctggatgagacagataccatacaccatgatgaagttcgcctgctttgaacgtactgttgaagcactgtacaagtttgtggttcctaagccccgcagtgaatgttcaaagccagagcagctggttgtaacatttgtagcaggttacatagctggagtcttttgtgcaattgtttctcaccctgctgattctgtggtatctgtgttgaataaagaaaaaggtagcagtgcttctctggtcctcaagagacttggatttaaaggtgtatggaagggactgtttgcccgtatcatcatgattggtaccctgactgcactacagtggtttatctatgactccgtgaaggtctacttcagacttcctcgccctcctccacccgagatgccagagtctctgaagaagaagcttgggttaactcagtagttagatcaaagcaaatgtggactgaatctgcttgttgatcagtgttgaagaaagtgcaaaaggaacttttatatatttgacagtgtaggaaattgtctattcctgatataattactgtagtactcttgcttaaggcaagagtttcagatttactgttgaaataaacccaactcttcatga

SEQ ID NO: 19417 - DNA, 580 bp, Homo sapiens
  source 1..580: mol_type = unassigned DNA
ctctgtgagccgcaacctttccaagggagtggttgtgtgatcgccatcttagggaatgttctcgtccgtggcgcacctggcgcgggcgaaccccttcaacacgccacatctgcagctggtgcacgatggtctcggggacctccgcagcagctccccagggcccacgggccagccccgccgccctcgcaacctggcagccgccgccgtggaaggtgagatcagaccctgcccaatacagtcgtgtggtctacttgtgggccgcccagcctttgaggcctggacccggcttggaggacagggaaggacgagtccagcccgctgcaccgtaggacggcgcccagttgcttgccctggggtatcggccttttccaccataggcgggtgtcagatccttggccttccctcaagggcgtggaagcgctgaggccctgtgtcccttcgtgacctccgtgtgcccgagggaagagaggccgtgactagctctttctccgccgtgagctcgcttggtcagcaaactaagtactgggtaaactctcctcccgaaactactgaccacccacagttctactaactatattac

SEQ ID NO: 19418 - DNA, 756 bp, Homo sapiens
  source 1..756: mol_type = unassigned DNA
ctctgtgagccgcaacctttccaagggagtggttgtgtgatcgccatcttagggagtgagtgtggccgggccttctcctgtggcgggtgtggggagcggagcccagagctcctgtggggccgctgctttggcggtgggcccagccgggagcagcctctttcgaaggccgccgtgacctcttcaagggcgtggagacgggaaggaaaaggccccggttggggttccagggcgccggtaacgttaaccggcgccttgcctgtcctctaaccgtcgctccctcctcccctagaaagatgttctcgtccgtggcgcacctggcgcgggcgaaccccttcaacacgccacatctgcagctggtgcacgatggtctcggggacctccgcagcagctccccagggcccacgggccagccccgccgccctcgcaacctggcagccgccgccgtggaagagcagtatagctgtgactatggatctggcagattctttatcctttgtggacttggaggaattattagctgtggcacaacacatacagcattggttcctctagatctggttaaatgcagaatgcaggtggacccccaaaagtacaagggcatatttaacggattctcagttacacttaaagaggatggtgttcgtggtttggctaaaggatgggctccgactttccttggctactccatgcagggactctgcaagtttggcttttatgaagtctttaaagtcttgtatagcaatatgcttggagagg

SEQ ID NO: 19419 - DNA, 556 bp, Homo sapiens
  source 1..556: mol_type = unassigned DNA
ctctgtgagccgcaacctttccaagggagtggttgtgtgatcgccatcttagggaaaagatgttctcgtccgtggcgcacctggcgcgggcgaaccccttcaacacgccacatctgcagctggtgcacgatggtctcggggacctccgcagcagctccccagggcccacgggccagccccgccgccctcgcaacctggcagccgccgccgtggaagagtacagttgtgaatttggctccgcgaagtattatgcactgtgtggctttggtggggtcttaagttgtggtctgacacacactgctgtggttcccctggatttagtgaaatgccgtatgcaggtggacccccaaaagtacaagggcatatttaacggattctcagttacacttaaagaggatggtgttcgtggtttggctaaaggatgggctccgactttccttggctactccatgcagggactctgcaagtttggcttttatgaagtctttaaagtcttgtatagcaatatgcttggagaggtatgtaattaactttaaaattgaatgttccgagtgtt

SEQ ID NO: 19420 - DNA, 1285 bp, Homo sapiens
  source 1..1285: mol_type = unassigned DNA
cgcaacctttccaagggagtggttgtgtgatcgccatcttagggagtgaaaagatgttctcgtccgtggcgcacctggcgcgggcgaaccccttcaacacgccacatctgcagctggtgcacgatggtctcggggacctccgcagcagctccccagggcccacgggccagccccgccgccctcgcaacctggcagccgccgccgtggaagagtacagttgtgaatttggctccgcgaagtattatgcactgtgtggctttggtggggtcttaagttgtggtctgacacacactgctgtggttcccctggatttagtgaaatgccgtatgcaggtggacccccaaaagtacaagggcatatttaacggattctcagttacacttaaagaggatggtgttcgtggtttggctaaaggatgggctccgactttccttggctactccatgcagggactctgcaagtttggcttttatgaagtctttaaagtcttgtatagcaatatgcttggagaggagaatacttatctctggcgcacatcactatatttggctgcctctgccagtgctgaattctttgctgacattgccctggctcctatggaagctgctaaggttcgaattcaaacccagccaggttatgccaacactttgagggatgcagctcccaaaatgtataaggaagaaggcctaaaagcattctacaagggggttgctcctctctggatgagacagataccatacaccatgatgaagttcgcctgctttgaacgtactgttgaagcactgtacaagtttgtggttcctaagccccgcagtgaatgttcaaagccagagcagctggttgtaacatttgtagcaggttacatagctggagtcttttgtgcaattgtttctcaccctgctgattctgtggtatctgtgttgaataaagaaaaaggtagcagtgcttctctggtcctcaagagacttggatttaaaggtgtatggaagggactgtttgcccgtatcatcatgattggtaccctgactgcactacagtggtttatctatgactccgtgaaggtctacttcagacttcctcgccctcctccacccgagatgccagagtctctgaagaagaagcttgggttaactcagtagttagatcaaagcaaatgtggactgaatctgcttgttgatcagtgttgaagaaagtgcaaaaggaacttttatatatttgacagtgtaggaaattgtctattcctgatataattactgtagtactcttgcttaaggcaagagtttca

SEQ ID NO: 19421 - DNA, 1417 bp, Homo sapiens
  source 1..1417: mol_type = unassigned DNA
cgcaacctttccaagggagtggttgtgtgatcgccatcttagggaatgttctcgtccgtggcgcacctggcgcgggcgaaccccttcaacacgccacatctgcagctggtgcacgatggtctcggggacctccgcagcagctccccagggcccacgggccagccccgccgccctcgcaacctggcagccgccgccgtggaagagcagtatagctgtgactatggatctggcagattctttatcctttgtggacttggaggaattattagctgtggcacaacacatacagcattggttcctctagatctggttaaatgcagaatgcaggtttgttttgcatgctggactagagcatattgaagcatgactgactgttaagttataagatatagtcatctaacaagctgtgtggaaacctaactgtccaggaggtggacccccaaaagtacaagggcatatttaacggattctcagttacacttaaagaggatggtgttcgtggtttggctaaaggatgggctccgactttccttggctactccatgcagggactctgcaagtttggcttttatgaagtctttaaagtcttgtatagcaatatgcttggagaggagaatacttatctctggcgcacatcactatatttggctgcctctgccagtgctgaattctttgctgacattgccctggctcctatggaagctgctaaggttcgaattcaaacccagccaggttatgccaacactttgagggatgcagctcccaaaatgtataaggaagaaggcctaaaagcattctacaagggggttgctcctctctggatgagacagataccatacaccatgatgaagttcgcctgctttgaacgtactgttgaagcactgtacaagtttgtggttcctaagccccgcagtgaatgttcaaagccagagcagctggttgtaacatttgtagcaggttacatagctggagtcttttgtgcaattgtttctcaccctgctgattctgtggtatctgtgttgaataaagaaaaaggtagcagtgcttctctggtcctcaagagacttggatttaaaggtgtatggaagggactgtttgcccgtatcatcatgattggtaccctgactgcactacagtggtttatctatgactccgtgaaggtctacttcagacttcctcgccctcctccacccgagatgccagagtctctgaagaagaagcttgggttaactcagtagttagatcaaagcaaatgtggactgaatctgcttgttgatcagtgttgaagaaagtgcaaaaggaacttttatatatttgacagtgtaggaaattgtctattcctgatataattactgtagtactcttgcttaaggcaagagtttcagatttactgttgaaataaacccaactcttcatg

SEQ ID NO: 19422 - DNA, 1369 bp, Homo sapiens
  source 1..1369: mol_type = unassigned DNA
atcgccatcttagggagtgagtgtggccgggccttctcctgtggcgggtgtggggagcggagcccagagctcctgtggggccgctgctttggcggtgggcccagccgggagcagcctctttcgaaggccgccgtgacctcttcaagggcgtggagacgggaaggaaaaggccccggttggggttccagggcgccggtaacgttaaccggcgccttgcctgtcctctaaccgtcgctccctcctcccctagaaagatgttctcgtccgtggcgcacctggcgcgggcgaaccccttcaacacgccacatctgcagctggtgcacgatggtctcggggacctccgcagcagctccccagggcccacgggccagccccgccgccctcgcaacctggcagccgccgccgtggaagagtacagttgtgaatttggctccgcgaagtattatgcactgtgtggctttggtggggtcttaagttgtggtctgacacacactgctgtggttcccctggatttagtgaaatgccgtatgcaggtggacccccaaaagtacaagggcatatttaacggattctcagttacacttaaagaggatggtgttcgtggtttggctaaaggatgggctccgactttccttggctactccatgcagggactctgcaagtttggcttttatgaagtctttaaagtcttgtatagcaatatgcttggagaggagaatacttatctctggcgcacatcactatatttggctgcctctgccagtgctgaattctttgctgacattgccctggctcctatggaagctgctaaggttcgaattcaaacccagccaggttatgccaacactttgagggatgcagctcccaaaatgtataaggaagaaggcctaaaagcattctacaagggggttgctcctctctggatgagacagataccatacaccatgatgaagttcgcctgctttgaacgtactgttgaagcactgtacaagtttgtggttcctaagccccgcagtgaatgttcaaagccagagcagctggttgtaacatttgtagcaggttacataggtgtatggaagggactgtttgcccgtatcatcatgattggtaccctgactgcactacagtggtttatctatgactccgtgaaggtctacttcagacttcctcgccctcctccacccgagatgccagagtctctgaagaagaagcttgggttaactcagtagttagatcaaagcaaatgtggactgaatctgcttgttgatcagtgttgaagaaagtgcaaaaggaacttttatatatttgacagtgtaggaaattgtctattcctgatataattactgtagtactcttgcttaaggcaaga

SEQ ID NO: 19423 - DNA, 893 bp, Homo sapiens
  source 1..893: mol_type = unassigned DNA
aagtttatgaccagtaacatgagttttatattaaaatgcatggtgtgtcttctcttactacagagtacagttgtgaatttggctccgcgaagtattatgcactgtgtggctttggtggggtcttaagttgtggtctgacacacactgctgtggttcccctggatttagtgaaatgccgtatgcaggtggacccccaaaagtacaagggcatatttaacggattctcagttacacttaaagaggatggtgttcgtggtttggctaaaggatgggctccgactttccttggctactccatgcagggactctgcaagtttggcttttatgaagtctttaaagtcttgtatagcaatatgcttggagaggtatgtaattaactttaaaattgaatgttccgagtgtttaagactttccgagtgttcttagatttttgtctgtcttgccttattttagcactgaagaaaatggtcctacaaagtgagcaacttgttttaaatcgtatgcctgtgtcagcagagacaggttgataaatgtatttcattaaattacaattctccttttaatatactatcttgttttctaagtaagttggattttgagttttttagagaagggctctgggactcctttgcgtagttccggggcatggcatctagatattttttgaatattcatgttgttcacatagttacgtgttttgttaatgaggttatgagaccacatatatattccatatcatcgtgtgttactttataaaatgtctgaagcttagttgttttctagaactgtcacttcaattgaaaaccaacacaacagcaattcacatcccttccttgtgttttggattttaggagaatacttatctctggcgcacatcactatatttggctgcc

SEQ ID NO: 19424 - DNA, 517 bp, Homo sapiens
  source 1..517: mol_type = unassigned DNA
aggtgcacgccaccatgcccgtccaattttttgtattttagtagagatggggtttcactgtgttgcccaggctggtcttgaactcctgagctcaggtaatccacctgcctcagcctcccaaagtgctgggattacagatgtgagccaccgtgcctggcaggaattactgtagttaccttttgtgtagttgctgaaatttattatggaacccaaacaaaaataatcatgagattaaatttttatgttagctgtttggtgcatttaattttttttttcttgttttaaataaaggtggacccccaaaagtacaagggcatatttaacggattctcagttacacttaaagaggatggtgttcgtggtttggctaaaggatgggctccgactttccttggctactccatgcagggactctgcaagtttggcttttatgaagtctttaaagtcttgtatagcaatatgcttggagaggagaatacttatctctggcgcacatcactatatttggctgcctctg

SEQ ID NO: 19425 - DNA, 722 bp, Homo sapiens
  source 1..722: mol_type = unassigned DNA
caggactcgactcgtgtgcggacatttctgttaataatgacagtctctgatagatgagtgtatgcaactgtgtaaaacaagtctcttgatttcctagattctacaagggggttgctcctctctggatgagacagataccatacaccatgatgaagttcgcctgctttgaacgtactgttgaagcactgtacaagtttgtggttcctaagccccgcagtgaatgttcaaagccagagcagctggttgtaacatttgtagcaggttacatagctggagtcttttgtgcaattgtttctcaccctgctgattctgtggtatctgtgttgaataaagaaaaaggtagcagtgcttctctggtcctcaagagacttggatttaaaggtgtatggaagggactgtttgcccgtatcatcatgattggtaccctgactgcactacagtggtttatctatgactccgtgaaggtctacttcagacttcctcgccctcctccacccgagatgccagagtctctgaagaagaagcttgggttaactcagtagttagatcaaagcaaatgtggactgaatctgcttgttgatcagtgttgaagaaagtgcaaaaggaacttttatatatttgacagtgtaggaaattgtctattcctgatataattactgtagtactcttgcttaaggcaagagtttcagatttactgttgaaataaacccaactcttcatga

SEQ ID NO: 19426 - DNA, 1018 bp, Homo sapiens
  source 1..1018: mol_type = unassigned DNA
attttagaactagaaaaatattattttaaaatcataaaaatgattattggctctgtgaagttttgtttttaactggcactgtatgggatcctttatcttttttcagctggagtcttttgtgcaattgtttctcaccctgctgattctgtggtatctgtgttgaataaagaaaaaggtagcagtgcttctctggtcctcaagagacttggatttaaaggtgtatggaagggactgtttgcccgtatcatcatgattggtaccctgactgcactacagtggtttatctatgactccgtgaaggtctacttcagacttcctcgccctcctccacccgagatgccagagtctctgaagaagaagcttgggttaactcagtagttagatcaaagcaaatgtggactgaatctgcttgttgatcagtgttgaagaaagtgcaaaaggaacttttatatatttgacagtgtaggaaattgtctattcctgatataattactgtagtactcttgcttaaggcaagagtttcagatttactgttgaaataaacccaactcttcatgatttgcctgtgacttatttttaaaacttttttaaaaaagatttagctttaaaatagttggaaagaatgaagtatataagttaaggaaaaaatacaaaactgaccatgaccattgttggttgaatattccagttgctattcagaaattgtcatatgtctcaagttttatcacacaaagttcctgtatttctagggaagcagactttaaatttctaaaaacttgatttaattatagttaaatatgtgtagtcatttgtggttattttggcaagtaaatgtcagtgtatacttacatttttgcagcatgtactacaccttttttatgttggtgagtttgctaatccttatttgtaagacaaggtaaaccaaattaggctgattcttagaatgacagtaaaggaccaaagtgattgacagctgaaaacaattttcaggtacactaattctctttacacagatctg

SEQ ID NO: 19427 - DNA, 1678 bp, Homo sapiens
  source 1..1678: mol_type = unassigned DNA
gtgtgcgtcacgccgacgacgcgcgaagggcacacatcttaggacccggaggacgtccggcctctgtgagccgcaacctttccaagggagtggttgtgtgatcgccatcttagggaaaagatgttctcgtccgtggcgcacctggcgcgggcgaaccccttcaacacgccacatctgcagctggtgcacgatggtctcggggacctccgcagcagctccccagggcccacgggccagccccgccgccctcgcaacctggcagccgccgccgtggaagagcagtatagctgtgactatggatctggcagattctttatcctttgtggacttggaggaattattagctgtggcacaacacatacagcattggttcctctagatctggttaaatgcagaatgcaggtggacccccaaaagtacaagggcatatttaacggattctcagttacacttaaagaggatggtgttcgtggtttggctaaaggatgggctccgactttccttggctactccatgcagggactctgcaagtttggcttttatgaagtctttaaagtcttgtatagcaatatgcttggagaggagaatacttatctctggcgcacatcactatatttggctgcctctgccagtgctgaattctttgctgacattgccctggctcctatggaagctgctaaggttcgaattcaaacccagccaggttatgccaacactttgagggatgcagctcccaaaatgtataaggaagaaggcctaaaagcattctacaagggggttgctcctctctggatgagacagataccatacaccatgatgaagttcgcctgctttgaacgtactgttgaagcactgtacaagtttgtggttcctaagccccgcagtgaatgttcaaagccagagcagctggttgtaacatttgtagcaggttacatagctggagtcttttgtgcaattgtttctcaccctgctgattctgtggtatctgtgttgaataaagaaaaaggtagcagtgcttctctggtcctcaagagacttggatttaaaggtgtatggaagggactgtttgcccgtatcatcatgattggtaccctgactgcactacagtggtttatctatgactccgtgaaggtctacttcagacttcctcgccctcctccacccgagatgccagagtctctgaagaagaagcttgggttaactcagtagttagatcaaagcaaatgtggactgaatctgcttgttgatcagtgttgaagaaagtgcaaaaggaacttttatatatttgacagtgtaggaaattgtctattcctgatataattactgtagtactcttgcttaaggcaagagtttcagatttactgttgaaataaacccaactcttcatgatttgcctgtgacttatttttaaaacttttttaaaaaagatttagctttaaaatagttggaaagaatgaagtatataagttaaggaaaaaatacaaaactgaccatgaccattgttggttgaatattccagttgctattcagaaattgtcatatgtctcaagttttatcacacaaagttcctgtatttctagggaagcagactttaaatttctaaaaacttgatttaattatagttaaatatgtgtagtcatttgtggttattttggcaagtaaatgtcagtgtatactt

SEQ ID NO: 19428 - DNA, 3854 bp, Homo sapiens
  source 1..3854: mol_type = unassigned DNA
gcgccgcagaggccggtgaggcgccggcggccacgccgcggaaggcgcgggccgagcagagccgggcgttggagcccgcgcgcgcatggaggcgttgccggcagccccctgagggcagcggggagacaagacccggcgacctcgcgcatccctcgagccgccacgcgctctcgccaccgggcggcgacgggccgcggagccggcgcggccatggcgacgggcggccagcagaaggagaacacgctgcttcacctcttcgccggcgggtgtggaggcacagttggtgctattttcacttgtccactagaagtcattaagacacggttgcagtcttcaagattagctctccggacagtctactatcctcaggttcatctggggaccattagtggagctggaatggtgagaccaacatccgtgacacctggactctttcaggttctgaagtcgatcttggagaaagagggaccaaagtcactttttagaggcttgggtccaaatttggttggagttgcaccatcaagggctgtatactttgcatgttactccaaagccaaagagcaatttaatggcattttcgtgcctaacagcaatattgtgcatattttctcagctggctctgcagcttttatcacaaattccttaatgaatcctatatggatggttaaaacccgaatgcagctagaacagaaagtgaggggctctaagcagatgaatacactccagtgtgctcgttacgtttaccagaccgaaggcattcgtggcttctatagaggattaactgcctcgtatgctggaatttccgaaactataatctgctttgctatttatgaaagtttaaagaagtatctgaaagaagctccattagcctcttctgcaaatgggactgagaaaaattccacaagtttttttggacttatggcagctgctgctctttctaagggctgtgcctcctgcattgcttatccacacgaagtcataaggacgaggctccgggaagagggcaccaagtacaagtcttttgtccagacggcgcgcctggtgttccgggaagaaggctaccttgccttttatagaggactgtttgcccagcttatccggcagatcccaaatactgccattgtgttgtctacttatgagttaattgtgtacctgttagaagaccgtactcagtaacaggccggaaaattgtgctctagaagaataaaactgaaaaactctagagaattttttttccccattgatgtttagaaagtttgagactgaaacaggaaaggccataaaatatctggttcatatcacctgttggacatttccttttggattcatgctttctggaaggtttaaattcattaacgttaatagttaattataactttttttttaacttaagaggattcagggttaagcaccaactaaattaaatcatgctatttaatttaagtatacatttggcttgtgtcctcttttatgctcactatactatgaaggacttaagtaattcagataaacctgccctagaactgcagagaaaaatgataaagtgagaatacaacttgttttataatctgactttaagatcttgcactgctagacagggaagaagtgtcgcattttggctgggcactgtggctcacgcccgtaatcccagcactttgggaggccgaggcagatggatcacgtgaagtcaggagttccagaccagcctggccaacatggcgaaaccctgtctctactaaaaatacaaaaattagccggacgtgtgcctgtaatcccagctacttgggaggctgaggcaggagaatcacttgaaacccagggggcagaggttgcagcgagctgagatcacgtcacttcactccagcctggtcgacagagtgagactccatctcaaaaaaaaaaaaattgtgtcacattttggtggtggtgtgtggaccaggacaaacttcccagcaatttttcttctttgtacatttccaattacttgcagattgatcatctaagcgttcagactgctgagatgaatatatataactttctgagactcaatattttaagctataaaaaacttcctgaagttatccttttctccctactttgaaccaaaggcaagaatttttaaagaactgttttatcaatggcctggctcctggatatagttccggaagttaagaccagttgccttgttaagtgtgttgacagcacagctaccctgtttggctgtgaatccagaatgtgatgaagaacagtcattcccactgaggtctttagccctgttcttggacctctgctcttgcagaaaaggagcacaacgtaggactatggctcacccgtcagagagctcacattctgatagaaagcactgggattgtttaaatatcctagttcaacattaaaaaaaaaaaaaatttaatcccagcactttgggaggccaaggcgggcagatcacgaggtcaggagatcgagaccatcctggctaacacggtgaaaccccgtctctactaaaaaaatacaaaaaaattggccatgcgtggtggcgggcacccatagtcccagctactcgggaggctgaggcaggagaatggcgtgaacctgggaggcggagcttgcagtgagctgagatggcgccactgcactccagcctgggccacagagtgcgactccatctcaaaaaaaaaaaaaaaaccaggatgttacccccttggttttaaagcaaatttaataagggaacaaaaagatgatactaagaagaaggcaagtaaaacccctagtcttccattagctctttcactggaatttgagtatattgtacatgaaggttggttttcaatttgaacgtctagaaagatactcatttctaatacctatgcactgtagtttcaggtttacttgcagacaccctggtagggttaagaggaggatatttccaagttattttaaattgagtttacttttaactggggttcttgactctagtgtaattgctccaacaactacgtagaagtcaaaatgagtgactttagtgaagcttctgtactttacaatacatgacagtaatgctattccagaagttttgttttgttttgttttgagatggagtctcgctctgtctctcccaggctggagtgcagtggcacaatctcggctcactacagcctccacctcccggtttcaagcaattctcctgtcttagcctcctgagtagctgggactacaggcatgcgccaccacacctggctaattttgtatttttagtagagatggggtttcaccatgttggccaggctggtctcaaactcttgacctcaggtgatctacccgcctcggcctcccaaagtactgggattacaggagggagccaccatacctggcccgcgccgccccttcctttgttgttattgttgttttgagacaaggtatcactcgatcactgaagctggatacagtggcaagatcatagctcactgtaacctcaaactcctgggcacaagggatcctcgcatctcagcctcccaagtagcttggaccacaggaaagtaccaccatgcccagctaatgttttttcattttttgtgcagacgaggttttgctatgttgtccaggctggtctcagactactggccagaagcgatcttacctcctcagcctcccaaagcactggaattacagagtaacatctaattttaatattcacattcctattttaatattcatattcgatgatggcacttagcaacatcctcctatatccatattaaaacctgttttccaagattgtgtctaatatgaaggtgtaaaattgctttgttttcactccttcttgaatgaataaatttgatagtaaccaattataa

SEQ ID NO: 19429 - DNA, 2062 bp, Homo sapiens
  source 1..2062: mol_type = unassigned DNA
gcagcgggactgagccgcgcccacgtggaagccgccgcaggcttcgcgcggggccccccgggtgcacgcgggcaggggccggggtctcccgacgcacgaccccggagagtgttgaaagggtcggagctgcccggaggtcaagggtcaagggtcgggggtcggggcaccacatgtcgcacatcccggcggggtcgccgcggcctccgggagaaagcggacgacgcactcggagcgaactgggcatcagggtgggcttctgactccgcagctgccctcccgcccgctcgggtactggcagcggcctgaccttcacaaggtcaaggctgccgcggaacccccagcggcccctacggcgcatgggcggggcctggctcccggcatacctaggggtgcggggcgggacgtctccggggagcgcagccaatgggcgcggttcgctggagtgcggggcgggacgcagcgggattcccggcagccctcagaggcgaggcacgcaggctggtgtggggcggggcctggcggcgcagccaatgagcgcggcgcgaggaggcgcgggggcggagagtgggcgtggcgtcggcgtcttagcggctgcgcggtggctgctccgtcctttcggtccaggcggcggcagggctgagccagcgacgccctccattcactctccgcgcccgttctccggctgtcctcccgttccgctgcccgccctgccaccatgacggaacaggccatctccttcgccaaagacttcttggccggaggcatcgccgccgccatctccaagacggccgtggctccgatcgagcgggtcaagctgctgctgcaggtccagcacgccagcaagcagatcgccgccgacaagcagtacaagggcatcgtggactgcattgtccgcatccccaaggagcagggcgtgctgtccttctggaggggcaaccttgccaacgtcattcgctacttccccactcaagccctcaacttcgccttcaaggataagtacaagcagatcttcctggggggcgtggacaagcacacgcagttctggaggtactttgcgggcaacctggcctccggcggtgcggccggcgcgacctccctctgcttcgtgtacccgctggatttcgccagaacccgcctggcagcggacgtgggaaagtcaggcacagagcgcgagttccgaggcctgggagactgcctggtgaagatcaccaagtccgacggcatccggggcctgtaccagggcttcagtgtctccgtgcagggcatcatcatctaccgggcggcctacttcggcgtgtacgatacggccaagggcatgctccccgaccccaagaacacgcacatcgtggtgagctggatgatcgcgcagaccgtgacggccgtggccggcgtggtgtcctaccccttcgacacggtgcggcggcgcatgatgatgcagtccgggcgcaaaggagctgacatcatgtacacgggcaccgtcgactgttggaggaagatcttcagagatgaggggggcaaggccttcttcaagggtgcgtggtccaacgtcctgcggggcatggggggcgccttcgtgctggtcctgtacgacgagctcaagaaggtgatctaagggccgcggcctcctccacacacacacacacaccaggggaaccaagagaaccacgtagaatcctcaaccgtgcggaccatcaaccttcgagaaattccagttgtctttttcccagccgcatcctgcctgtagatggccggggaaggctctagaaaaggggcgcattgcgatccaaccatcggcagccgattccgtgtcttgatcacggggtgggagggaaccgtggcgtccctgcgtggggcccatgggtgagacactccagtactgagacctagagtccagatgcttgtaggagccaagtcgtgttctaagtatttatttaaaacaaaagaatcacgttttcccatttgtacttcagcgctagcccctgttttgcacagccgagtactggcgagtatgttctatgttgggcctcctgctgcaaaacaataaacagaggacgcagaggtc

SEQ ID NO: 19430 - DNA, 900 bp, Homo sapiens
  source 1..900: mol_type = unassigned DNA
caggcggcggcagggctgagccagcgacgccctccattcactctccgcgcccgttctccggctgtcctcccgttccgctgcccgccctgccaccatgacggaacaggccatctccttcgccaaagacttcttggccggaggcatcgccgccgccatctccaagacggccgtggctccgatcgagcgggtcaagctgctgctgcagggcgggatgtcccagcgcttcaagaggcccagggaggatcacctgagctcaggagtttgagagcagcttggtcatcgtagcaagactccatctctaaaagtccagcacgccagcaagcagatcgccgccgacaagcagtacaagggcatcgtggactgcattgtccgcatccccaaggagcagggcgtgctgtccttctggaggggcaaccttgccaacgtcattcgctacttccccactcaagccctcaacttcgccttcaaggataagtacaagcagatcttcctggggggcgtggacaagcacacgcagttctggaggtactttgcgggcaacctggcctccggcggtgcggccggcgcgacctccctctgcttcgtgtacccgctggatttcgccagaacccgcctggcagcggacgtgggaaagtcaggcacagagcgcgagttccgaggcctgggagactgcctggtgaagatcaccaagtccgacggcatccggggcctgtaccagggcttcagtgtctccgtgcagggcatcatcatctaccgggcggcctacttcggcgtgtacgatacggccaagggcatgctccccgaccccaagaacacgcacatcgtggtgagctggatgatcgcgcagaccgtgacggccgtggccggcgtggtgtcctaccccttcgacacggtgcggcg

SEQ ID NO: 19431 - DNA, 854 bp, Homo sapiens
  source 1..854: mol_type = unassigned DNA
ctgagccagcgacgccctccattcactctccgcgcccgttctccggctgtcctcccgttccgctgcccgccctgccaccatgacggaacaggccatctccttcgccaaagacttcttggccggaggcatcgccgccgccatctccaagacggccgtggctccgatcgagcgggtcaagctgctgctgcagcagggcgggatgtcccagcgcttcaagaggcccagggaggatcacctgagctcaggagtttgagagcagcttggtcatcgtagcaagactccatctctaaaagtccagcacgccagcaagcagatcgccgccgacaagcagtacaagggcatcgtggactgcattgtccgcatccccaaggagcagggcgtgctgtccttctggaggggcaaccttgccaacgtcattcgctacttccccactcaagccctcaacttcgccttcaaggataagtacaagcagatcttcctggggggcgtggacaagcacacgcagttctggaggtactttgcgggcaacctggcctccggcggtgcggccggcgcgacctccctctgcttcgtgtacccgctggatttcgccagaacccgcctggcagcggacgtgggaaagtcaggcacagagcgcgagttccgaggcctgggagactgcctggtgaagatcaccaagtccgacggcatccggggcctgtaccagggcttcagtgtctccgtgcagggcatcatcatctaccgggcggcctacttcggcgtgtacgatacggccaagggcatgctccccgaccccaagaacacgcacatcgtggtgagctggatgatcgcgcagaccgtgacggccgtggccg

SEQ ID NO: 19432 - DNA, 2602 bp, Homo sapiens
  source 1..2602: mol_type = unassigned DNA
gcacacagagcctgtagacctgagtggatggacactgcctcttagaactagaacttagaactttatcttgaaaatgtaccactgttgcagaagctcctcacagagtatgtgtcaggcatttttaacctgctaaaggcaagaagaagtgttcaccacatagttgcaaaggtcttcaacttgccacagccaacagaaaaatcaaaatgattgaaccctttgggaatcagtatattgtggccaggccagtgtattctacaaatgcttttgaggaaaatcataaaaagacaggaagacatcataagacatttctggatcatctcaaagtgtgttgtagcatcttggttgccagcataccggcttaaagaatggttgctcagtgatattgtttctggtatcagcacagggattgtggccgtactacaaggtttagcatttgctctgctggtcgacattcccccagtctatgggttgtatgcatcctttttcccagccataatctaccttttcttcggcacttccagacacatatccgtgggtccgtttccgattctgagtatgatggtgggactagcagtttcaggagcagtttcaaaagcagtcccagatcgcaatgcaactactttgggattgcctaacaactcgaataattcttcactactggatgacgagagggtgagggtggcggcggcggcatcagtcacagtgctttctggaatcatccagttggcttttgggattctgcggattggatttgtagtgatatacctgtctgagtccctcatcagtggcttcactactgctgctgctgttcatgttttggtttcccaactcaaattcatttttcagttgacagtcccgtcacacactgatccagtttcaattttcaaagtactatactctgtattctcacaaatagagaagactaatattgcagacctggtgacagctctgattgtccttttggttgtatccattgttaaagaaataaatcagcgcttcaaagacaaacttccagtgcccattccaatcgaattcattatgaccgtgattgcagcaggtgtatcctacggctgtgactttaaaaacaggtttaaagtggctgtggttggggacatgaatcctggatttcagccccctattacacctgacgtggagactttccaaaacaccgtaggagattgcttcggcatcgcaatggttgcatttgcagtggccttttcagttgccagcgtctattccctcaaatacgattatccacttgatggcaatcaggagttaatagccttgggactgggtaacatagtctgtggagtattcagaggatttgctgggagtactgccctctccagatcagcagttcaggagagcacaggaggcaaaacacagattgctgggcttattggtgccatcatcgtgctgattgtcgttctagccattggatttctcctggcgcctctacaaaagtccgtcctggcagctttagcattgggaaacttaaagggaatgctgatgcagtttgctgaaataggcagattgtggcgaaaggacaaatatgattgtttaatttggatcatgaccttcatcttcaccattgtcctgggactcgggttaggcctggcagctagtgtggcatttcaactgctaaccatcgtgttcaggacccaatttccaaaatgcagcacgctggctaatattggaagaaccaacatctataagaataaaaaagattattatgatatgtatgagccagaaggagtgaaaattttcagatgtccatctcctatctactttgcaaacattggtttctttaggcggaaacttatcgatgctgttggctttagtccacttcgaattctacgcaagcgcaacaaagctttgaggaaaatccgaaaactgcagaagcaaggcttgctacaagtgacaccaattttgcaagaatttatcaggatcaaggtagatgtgtatatcgttggaactgatgatgacttcattgagaagcttaaccggtatgaattttttgatggtgaagtgaaaagctcaatatttttcttaacaatccatgatgctgttttgcatattttgatgaagaaagattacagtacttcaaagtttaatcccagtcaggaaaaagatggaaaaattgattttaccataaatacaaatggaggattacgtaatcgggtatatgaggtgccagttgaaacaaaattctaatcaacatataattcagaaggatcttcatctgactatgacataaaaacaactttatacccagaaagttattgataagttcatacattgtacgaagagtatttttgacagaatatgtttcaaactttggaacaagatggttctagcatggcatatttttcacatatctagtatgaaattatataagtattctaaattttatatcttgtagctttatcaaagggtgaaaattattttgttcatacatatttttgtagcactgacagatttccatcctagtcactaccttcatgcataggtttagcagtatagtggcgccactgttttgaatctcataatttatacaggtcatattaatatatttccattaaaaaatcagttgtacagtgga

SEQ ID NO: 19433 - DNA, 2863 bp, Homo sapiens
  source 1..2863: mol_type = unassigned DNA
cctgagtggatggacactgcctcttagaactagaacttagaactttatcttgaaaatgtaccactgttgcagaagctcctcacagagtatgtgtcaggcatttttaacctgctaaaggcaagaagaagtgttcaccacatagttgcaaaggtcttcaacttgccacagccaacagaaaaatcaaaatgattgaaccctttgggaatcagtatattgtggccaggccagtgtattctacaaatgcttttgaggaaaatcataaaaagacaggaagacatcataagacatttctggatcatctcaaagtgtgttgtagctgttccccacaaaaggccaagagaattgtcctctctttgttccccatagcatcttggttgccagcataccggcttaaagaatggttgctcagtgatattgtttctggtatcagcacagggattgtggccgtactacaaggtttagcatttgctctgctggtcgacattcccccagtctatgggttgtatgcatcctttttcccagccataatctaccttttcttcggcacttccagacacatatccgtgggtccgtttccgattctgagtatgatggtgggactagcagtttcaggagcagtttcaaaagcagtcccagatcgcaatgcaactactttgggattgcctaacaactcgaataattcttcactactggatgacgagagggtgagggtggcggcggcggcatcagtcacagtgctttctggaatcatccagttggcttttgggattctgcggattggatttgtagtgatatacctgtctgagtccctcatcagtggcttcactactgctgctgctgttcatgttttggtttcccaactcaaattcatttttcagttgacagtcccgtcacacactgatccagtttcaattttcaaagtactatactctgtattctcacaaatagagaagactaatattgcagacctggtgacagctctgattgtccttttggttgtatccattgttaaagaaataaatcagcgcttcaaagacaaacttccagtgcccattccaatcgaattcattatgaccgtgattgcagcaggtgtatcctacggctgtgactttaaaaacaggtttaaagtggctgtggttggggacatgaatcctggatttcagccccctattacacctgacgtggagactttccaaaacaccgtaggagattgcttcggcatcgcaatggttgcatttgcagtggccttttcagttgccagcgtctattccctcaaatacgattatccacttgatggcaatcaggagttaatagccttgggactgggtaacatagtctgtggagtattcagaggatttgctgggagtactgccctctccagatcagcagttcaggagagcacaggaggcaaaacacagattgctgggcttattggtgccatcatcgtgctgattgtcgttctagccattggatttctcctggcgcctctacaaaagtccgtcctggcagctttagcattgggaaacttaaagggaatgctgatgcagtttgctgaaataggcagattgtggcgaaaggacaaatatgattgtttaatttggatcatgaccttcatcttcaccattgtcctgggactcgggttaggcctggcagctagtgtggcatttcaactgctaaccatcgtgttcaggacccaatttccaaaatgcagcacgctggctaatattggaagaaccaacatctataagaataaaaaagattattatgatatgtatgagccagaaggagtgaaaattttcagatgtccatctcctatctactttgcaaacattggtttctttaggcggaaacttatcgatgctgttggctttagtccacttcgaattctacgcaagcgcaacaaagctttgaggaaaatccgaaaactgcagaagcaaggcttgctacaagtgacaccaaaaggatttatatgtactgttgacaccataaaagattctgacgaagagctggacaacaatcagatagaagtactggaccagccaatcaataccacagacctgcctttccacattgactggaatgatgatcttcctctcaacattgaggtccccaaaatcagcctccacagcctcattcttgacttttcagcagtgtcctttcttgatgtttcttcagtgaggggccttaaatcgattttgcaagaatttatcaggatcaaggtagatgtgtatatcgttggaactgatgatgacttcattgagaagcttaaccggtatgaattttttgatggtgaagtgaaaagctcaatatttttcttaacaatccatgatgctgttttgcatattttgatgaagaaagattacagtacttcaaagtttaatcccagtcaggaaaaagatggaaaaattgattttaccataaatacaaatggaggattacgtaatcgggtatatgaggtgccagttgaaacaaaattctaatcaacatataattcagaaggatcttcatctgactatgacataaaaacaactttatacccagaaagttattgataagttcatacattgtacgaagagtatttttgacagaatatgtttcaaactttggaacaagatggttctagcatggcatatttttcacatatctagtatgaaattatataagtattctaaattttatatcttgtagctttatcaaagggtgaaaattattttgttcatacatatttttgtagcactgacagatttccatcctagtcactaccttcatgcataggtttagcagtatagtggcgccactgttttgaatctcataatttatacaggtcatattaatatatttccattaaaaaatcagttgtaca

SEQ ID NO: 19434 - DNA, 646 bp, Homo sapiens
  source 1..646: mol_type = unassigned DNA
taacaaacatacatgaatgatttacttggtgtttttctccctacagtccaaaatgcagcacgctggctaatattggaagaaccaacatctataagaataaaaaagattattatgatatgtatgagccagaaggagtgaaaattttcagatgtccatctcctatctactttgcaaacattggtttctttaggcggaaacttatcgatgctgtaaggtttggggttatttaatttttttccttgtaatcttactgaattctgggaatgtcattgttctgtaaggtcattgttgagactgggttgtgtcacatatgttgaggtggggttgtgtcagtattttttgtcccacgtcccagaacagatgaaactaccttatggggagtttgttaataggttgggaaataagcctcttcagatgacatctaatatagaagaatccttttctcaaattctgatgtagagtaaaagaaatttaccaagttttgggctgctagcttttagtagatgtcatcctacagattttctttgggcatcaacttcagaaacaatgaaggagcatttaatatttgaccacatcctcaaagagattcagtataacagttgtaaatgaatagttaatactgaataacaatacatactgagtgtcc

SEQ ID NO: 19435 - DNA, 556 bp, Homo sapiens
  source 1..556: mol_type = unassigned DNA
tttataattgtaggtactatactctgtattctcacaaatagagaagactaatattgcagacctggtgacagctctgattgtccttttggttgtatccattgttaaagaaataaatcagcgcttcaaagacaaacttccagtgcccattccaatcgaattcattatgaccgtgattgcagcaggtgtatcctacggctgtgactttaaaaacaggtttaaagtggctgtggttggggacatgaatcctggatttcagccccctattacacctgacgtggagactttccaaaacaccgtaggagattgcttcggcatcgcaatggttgcatttgcagtggccttttcagttgccagcgtctattccctcaaatacgattatccacttgatggcaatcaggagttaatagccttgggactgggtaacatagtctgtggagtattcagaggatttgctgggagtactgccctctccagatcagcagttcaggagagcacaggaggcaaaacacagattgctgggcttattggtgccatcatcgtgctgattgtcgttcta

SEQ ID NO: 19436 - DNA, 552 bp, Homo sapiens
  source 1..552: mol_type = unassigned DNA
gcacacagagcctgtagacctgagtggatggacactgcctcttagaactagaacttagaactttatcttgaaaatgtaccactgttgcagaagctcctcacagagcatttttaacctgctaaaggcaagaagaagtgttcaccacatagttgcaaaggtcttcaacttgccacagccaacagaaaaatcaaaatgattgaaccctttgggaatcagtatattgtggccaggccagtgtattctacaaatgcttttgaggaaaatcataaaaagacaggaagacatcataagacatttctggatcatctcaaagtgtgttgtagctgttccccacaaaaggccaagagaattgtcctctctttgttccccatagcatcttggttgccagcataccggcttaaagaatggttgctcagtgatattgtttctggtatcagcacagggattgtggccgtactacaaggtttagcatttgctctgctggtcgacattcccccagtctatgggttgtatgcatcctttttcccagccataatctaccttttcttcggc

SEQ ID NO: 19437 - DNA, 2474 bp, Homo sapiens
  source 1..2474: mol_type = unassigned DNA
aggcagcggctgtggagcgcggcggggcggctccgcccagggcagcccgggctgggccaaggagcgagctctcccttctcctgctctcagcctcagtgatcaaggcttcagtgaactgcactggagctcccagcgggggatcttgtcccctgtcccgacttttgtgctgcacattggatctggtgacactcaggaaatgcttgtctccggctgttaaggaataatttcagagtactatggatcatgctgaagaaaatgaaatccttgcagcaacccagaggtactatgtggaaaggcctatctttagtcatccggtcctccaggaaagactacacacaaaggacaaggttcctgattccattgcggataagctgaaacaggcattcacatgtactcctaaaaaaataagaaatatcatttatatgttcctacccataactaaatggctgccagcatacaaattcaaggaatatgtgttgggtgacttggtctcaggcataagcacaggggtgcttcagcttcctcaaggcttagcctttgcaatgctggcagctgtgcctccaatatttggcctgtactcttcattttaccctgttatcatgtattgttttcttggaacctccagacacatatccataggtccttttgctgttattagcctgatgattggtggtgtagctgttcgattagtaccagatgatatagtcattccaggaggagtaaatgcaaccaatggcacagaggccagagatgccttgagagtgaaagtcgccatgtctgtgaccttactttcaggaatcattcagttttgcctaggtgtctgtaggtttggatttgtggccatatatctcacagagcctctggtccgtgggtttaccaccgcagcagctgtgcatgtcttcacctccatgttaaaatatctgtttggagttaaaacaaagcggtacagtggaatcttttccgtggtgtatagtacagttgctgtgttgcagaatgttaaaaacctcaacgtgtgttccctaggcgtcgggctgatggtttttggtttgctgttgggtggcaaggagtttaatgagagatttaaagagaaattgccggcgcctattcctttagagttctttgcggtcgtaatgggaactggcatttcagctgggtttaacttgaaagaatcatacaatgtggatgtcgttggaacacttcctctagggctgctacctccagccaatccggacaccagcctcttccaccttgtgtacgtagatgccattgccatagccatcgttggattttcagtgaccatctccatggccaagaccttagcaaataaacatggctaccaggttgacggcaatcaggagctcattgccctgggactgtgcaattccattggctcactcttccagaccttttcaatttcatgctccttgtctcgaagccttgttcaggagggaaccggtgggaagacacagcttgcaggttgtttggcctcattaatgattctgctggtcatattagcaactggattcctctttgaatcattgccccaggctgtgctgtcggccattgtgattgtcaacctgaagggaatgtttatgcagttctcagatctcccctttttctggagaaccagcaaaatagagctgaccatctggcttaccacttttgtgtcctccttgttcctgggattggactatggtttgatcactgctgtgatcattgctctgctgactgtgatttacagaacacagagtccaagctacaaagtccttggaaagcttcctgaaactgatgtgtatattgatatagacgcatatgaggaggtgaaagaaattcctggaataaaaatatttcaaataaatgcaccaatttactatgcaaatagcgacttgtatagcaatgcattaaaacgaaagactggagtgaacccagcagtcatcatgggagcaaggagaaaggccatgcggaagtacgctaaggaagtcggaaatgcaaatatggccaacgcaactgttgtcaaagcagatgcagaagtagatggagaggatgctaccaagcctgaagaagaggatggtgaagtaaaatatcccccaatagtgatcaaaagcacatttcctgaggaaatgcaaagatttatgcccccaggggataacgtccacactgtcattttggatttcactcaagtcaattttattgattctgttggagtgaaaactctggcagggattgtaaaagaatatggagacgtcggtatatatgtatacttagcaggatgcagtgctttcatacagagatgaccagaagatggagaccgtaggggaaatgccgtgtaatccaagcagttcaggctttggggccaggtggacagggtttgaatgccagctctggaatctgttagtggggtgacctcagccaagtcacttaacacttctgaactttgttttctcttttgtgaaataaagaaaaaatgaatctac

SEQ ID NO: 19438 - DNA, 1404 bp, Homo sapiens
  source 1..1404: mol_type = unassigned DNA
aggcagcggctgtggagcgcggcggggcggctccgcccagggcagcccgggctgggccaaggagcgagctctcccttctcctgctctcagcctcagtgatcaaggcttcagtgaactgcactggagctcccagcgggggatcttgtcccctgtcccgacttttgtgctgcacattggatctggtgacactcaggaaatgcttgtctccggctgttaaggaataatttcagagtactatggatcatgctgaagaaaatgaaatccttgcagcaacccagaggtactatgtggaaaggcctatctttagtcatccggtcctccaggaaagactacacacaaaggacaaggttcctgattccattgcggataagctgaaacaggcattcacatgtactcctaaaaaaataagaaatatcatttatatgttcctacccataactaaatggctgccagcatacaaattcaaggaatatgtgttgggtgacttggtctcaggcataagcacaggggtgcttcagcttcctcaaggcttagcctttgcaatgctggcagctgtgcctccaatatttggcctgtactcttcattttaccctgttatcatgtattgttttcttggaacctccagacacatatccataggtccttttgctgttattagcctgatgattggtggtgtagctgttcgattagtaccagatgatatagtcattccaggaggagtaaatgcaaccaatggcacagaggccagagatgccttgagagtgaaagtcgccatgtctgtgaccttactttcaggaatcattcagttttgcctaggtgtctgtaggtttggatttgtggccatatatctcacagagcctctggtccgtgggtttaccaccgcagcagctgtgcatgtcttcacctccatgttaaaatatctgtttggagttaaaacaaagcggtacagtggaatcttttccgtggtgtatagtacagttgctgtgttgcagaatgttaaaaacctcaacgtgtgttccctaggcgtcgggctgatggtttttggtttgctgttgggtggcaaggagtttaatgagagatttaaagagaaattgccggcgcctattcctttagagttctttgcggtcgtaatgggaactggcatttcagctgggtttaacttgaaagaatcatacaatgtggatgtcgttggaacacttcctctaggctttcatacagagatgaccagaagatggagaccgtaggggaaatgccgtgtaatccaagcagttcaggctttggggccaggtggacagggtttgaatgccagctctggaatctgttagtggggtgacctcagccaagtcacttaacacttctgaactttgttttctcttttgtgaaataaagaaaaaatgaatctac

SEQ ID NO: 19439 - DNA, 1947 bp, Homo sapiens
  source 1..1947: mol_type = unassigned DNA
aggcagcggctgtggagcgcggcggggcggctccgcccagggcagcccgggctgggccaaggagcgagctctcccttctcctgctctcagcctcagtgatcaaggcttcagtgaactgcactggagctcccagcgggggatcttgtcccctgtcccgacttttgtgctgcacattggatctggtgacactcaggaaatgcttgtctccggctgttaaggaataatttcagagtactatggatcatgctgaagaaaatgaaatccttgcagcaacccagaggtactatgtggaaaggcctatctttagtcatccggtcctccaggaaagactacacacaaaggacaaggttcctgattccattgcggataagctgaaacaggcattcacatgtactcctaaaaaaataagaaatatcatttatatgttcctacccataactaaatggctgccagcatacaaattcaaggaatatgtgttgggtgacttggtctcaggcataagcacaggggtgcttcagcttcctcaaggcttagcctttgcaatgctggcagctgtgcctccaatatttggcctgtactcttcattttaccctgttatcatgtattgttttcttggaacctccagacacatatccataggtccttttgctgttattagcctgatgattggtggtgtagctgttcgattagtaccagatgatatagtcattccaggaggagtaaatgcaaccaatggcacagaggccagagatgccttgagagtgaaagtcgccatgtctgtgaccttactttcaggaatcattcagttttgcctaggtgtctgtaggtttggatttgtggccatatatctcacagagcctctggtccgtgggtttaccaccgcagcagctgtgcatgtcttcacctccatgttaaaatatctgtttggagttaaaacaaagcggtacagtggaatcttttccgtggtgtatagtacagttgctgtgttgcagaatgttaaaaacctcaacgtgtgttccctaggcgtcgggctgatggtttttggtttgctgttgggtggcaaggagtttaatgagagatttaaagagaaattgccggcgcctattcctttagagttctttgcggtcgtaatgggaactggcatttcagctgggtttaacttgaaagaatcatacaatgtggatgtcgttggaacacttcctctagggctgctacctccagccaatccggacaccagcctcttccaccttgtgtacgtagatgccattgccatagccatcgttggattttcagtgaccatctccatggccaagaccttagcaaataaacatggctaccaggttgacggcaatcaggagctcattgccctgggactgtgcaattccattggctcactcttccagaccttttcaatttcatgctccttgtctcgaagccttgttcaggagggaaccggtgggaagacacagcttgcaggttgtttggcctcattaatgattctgctggtcatattagcaactggattcctctttgaatcattgccccaggctgtgctgtcggccattgtgattgtcaacctgaagggaatgtttatgcagttctcagatctcccctttttctggagaaccagcaaaatagagctgaccatctggcttaccacttttgtgtcctccttgttcctgggattggactatggtttgatcactgctgtgatcattgctctgctgactgtgatttacagaacacagagctttcatacagagatgaccagaagatggagaccgtaggggaaatgccgtgtaatccaagcagttcaggctttggggccaggtggacagggtttgaatgccagctctggaatctgttagtggggtgacctcagccaagtcacttaacacttctgaactttgttttctcttttgtgaaataaagaaaaaatgaatctac

SEQ ID NO: 19440 - DNA, 2324 bp, Homo sapiens
  source 1..2324: mol_type = unassigned DNA
tctcccttctcctgctctcagcctcagtgatcaaggcttcagtgaactgcactggagctcccagcgggggatcttgtcccctgtcccgacttttgtgctgcacattggatctggtgacactcaggaaatgcttgtctccggctgttaaggaataatttcagagtactatggatcatgctgaagaaaatgaaatccttgcagcaacccagaggtactatgtggaaaggcctatctttagtcatccggtcctccaggaaagactacacacaaaggacaaggttcctgattccattgcggataagctgaaacaggcattcacatgtactcctaaaaaaataagaaatatcatttatatgttcctacccataactaaatggctgccagcatacaaattcaaggaatatgtgttgggtgacttggtctcaggcataagcacaggggtgcttcagcttcctcaaggcttagcctttgcaatgctggcagctgtgcctccaatatttggcctgtactcttcattttaccctgttatcatgtattgttttcttggaacctccagacacatatccataggtccttttgctgttattagcctgatgattggtggtgtagctgttcgattagtaccagatgatatagtcattccaggaggagtaaatgcaaccaatggcacagaggccagagatgccttgagagtgaaagtcgccatgtctgtgaccttactttcaggaatcattcagttttgcctaggtgtctgtaggtttggatttgtggccatatatctcacagagcctctggtccgtgggtttaccaccgcagcagctgtgcatgtcttcacctccatgttaaaatatctgtttggagttaaaacaaagcggtacagtggaatcttttccgtggtgtatgcgtcgggctgatggtttttggtttgctgttgggtggcaaggagtttaatgagagatttaaagagaaattgccggcgcctattcctttagagttctttgcggtcgtaatgggaactggcatttcagctgggtttaacttgaaagaatcatacaatgtggatgtcgttggaacacttcctctagggagctcattgccctgggactgtgcaattccattggctcactcttccagaccttttcaatttcatgctccttgtctcgaagccttgttcaggagggaaccggtgggaagacacagcttgcaggttgtttggcctcattaatgattctgctggtcatattagcaactggattcctctttgaatcattgccccaggctgtgctgtcggccattgtgattgtcaacctgaagggaatgtttatgcagttctcagatctcccctttttctggagaaccagcaaaatagagctgaccatctggcttaccacttttgtgtcctccttgttcctgggattggactatggtttgatcactgctgtgatcattgctctgctgactgtgatttacagaacacagaggtgaaagaaattcctggaataaaaatatttcaaataaatgcaccaatttactatgcaaatagcgacttgtatagcaatgcattaaaacgaaagactggagtgaacccagcagtcatcatgggagcaaggagaaaggccatgcggaagtacgctaaggaagtcggaaatgcaaatatggccaacgcaactgttgtcaaagcagatgcagaagtagatggagaggatgctaccaagcctgaagaagaggatggtgaagtaaaatatcccccaatagtgatcaaaagcacatttcctgaggaaatgcaaagatttatgcccccaggggataacgtccacactgtcattttggatttcactcaagtcaattttattgattctgttggagtgaaaactctggcagggattgtaaaagaatatggagacgtcggtatatatgtatacttagcaggatgcagtgcacaagttgtgaatgacctcactcggaatagattttttgaaaatcctgccctatgggagctgctgttccacagcattcatgatgcagttttaggcagccaacttagagaggcacttgctgaacaggaagcctcggctcccccttcccaggaggacttggagcccaatgccactcctgccactcctgaggcatagatgaggacctcaccctaggatggggttataagcctctcatgaagttcataatttacacgttttaaatactagacgctagatttttttttctaagggtgaatactagtagtccaggcttgatttggagggtgaatgacgcctagcaagatgtattgtacttgtgtttttttaattgaatacttcaaagataaa

SEQ ID NO: 19441 - DNA, 2242 bp, Homo sapiens
  source 1..2242: mol_type = unassigned DNA
tctcccttctcctgctctcagcctcagtgatcaaggcttcagtgaactgcactggagctcccagcgggggatcttgtcccctgtcccgacttttgtgctgcacattggatctggtgacactcaggaaatgcttgtctccggctgttaaggaataatttcagagtactatggatcatgctgaagaaaatgaaatccttgcagcaacccagaggtactatgtggaaaggcctatctttagtcatccggtcctccaggaaagactacacacaaaggacaaggttcctgattccattgcggataagctgaaacaggcattcacatgtactcctaaaaaaataagaaatatcatttatatgttcctacccataactaaatggctgccagcatacaaattcaaggaatatgtgttgggtgacttggtctcaggcataagcacaggggtgcttcagcttcctcaaggcttagcctttgcaatgctggcagctgtgcctccaatatttggcctgtactcttcattttaccctgttatcatgtattgttttcttggaacctccagacacatatccataggtccttttgctgttattagcctgatgattggtggtgtagctgttcgattagtaccagatgatatagtcattccaggaggagtaaatgcaaccaatggcacagaggccagagatgccttgagagtgaaagtcgccatgtctgtgaccttactttcaggaatcattcagttttgcctaggtgtctgtaggtttggatttgtggccatatatctcacagagcctctggtccgtgggtttaccaccgcagcagctgtgcatgtcttcacctccatgttaaaatatctgtttggagttaaaacaaagcggtacagtggaatcttttccgtggtgtatagtacagttgctgtgttgcagaatgttaaaaacctcaacgtgtgttccctaggcgtcgggctgatggtttttggtttgctgttgggtggcaaggagtttaatgagagatttaaagagaaattgccggcgcctattcctttagagttctttgcggtcgtaatgggaactggcatttcagctgggtttaacttgaaagaatcatacaatgtggatgtcgttggaacacttcctctagggctgctacctccagccaatccggacaccagcctcttccaccttgtgtacgtagatgccattgccatagccatcgttggattttcagtgaccatctccatggccaagaccttagcaaataaacatggctaccaggttgacggcaatcaggagctcattgccctgggactgtgcaattccattggctcactcttccagaccttttcaatttcatgctccttgtctcgaagccttgttcaggagggaaccggtgggaagacacagaccatctggcttaccacttttgtgtcctccttgttcctgggattggactatggtttgatcactgctgtgatcattgctctgctgactgtgatttacagaacacagaggtgaaagaaattcctggaataaaaatatttcaaataaatgcaccaatttactatgcaaatagcgacttgtatagcaatgcattaaaacgaaaggatgcagaagtagatggagaggatgctaccaagcctgaagaagaggatggtgaagtaaaatatcccccaatagtgatcaaaagcacatttcctgaggaaatgcaaagatttatgcccccaggggataacgtccacactgtcattttggatttcactcaagtcaattttattgattctgttggagtgaaaactctggcagggattgtaaaagaatatggagacgtcggtatatatgtatacttagcaggatgcagtgcacaagttgtgaatgacctcactcggaatagattttttgaaaatcctgccctatgggagctgctgttccacagcattcatgatgcagttttaggcagccaacttagagaggcacttgctgaacaggaagcctcggctcccccttcccaggaggacttggagcccaatgccactcctgccactcctgaggcatagatgaggacctcaccctaggatggggttataagcctctcatgaagttcataatttacacgttttaaatactagacgctagatttttttttctaagggtgaatactagtagtccaggcttgatttggagggtgaatgacgcctagcaagatgtattgtacttgtgtttttttaattgaatacttcaaagataaa

SEQ ID NO: 19442 - DNA, 2498 bp, Homo sapiens
  source 1..2498: mol_type = unassigned DNA
tctcccttctcctgctctcagcctcagtgatcaaggcttcagtgaactgcactggagctcccagcgggggatcttgtcccctgtcccgacttttgtgctgcacattggatctggtgacactcaggaaatgcttgtctccggctgttaaggaataatttcagagtactatggatcatgctgaagaaaatgaaatccttgcagcaacccagaggtactatgtggaaaggcctatctttagtcatccggtcctccaggaaagactacacacaaaggacaaggttcctgattccattgcggataagctgaaacaggcattcacatgtactcctaaaaaaataagaaatatcatttatatgttcctacccataactaaatggctgccagcatacaaattcaaggaatatgtgttgggtgacttggtctcaggcataagcacaggggtgcttcagcttcctcaaggcttagcctttgcaatgctggcagctgtgcctccaatatttggcctgtactcttcattttaccctgttatcatgtattgttttcttggaacctccagacacatatccataggtccttttgctgttattagcctgatgattggtggtgtagctgttcgattagtaccagatgatatagtcattccaggaggagtaaatgcaaccaatggcacagaggccagagatgccttgagagtgaaagtcgccatgtctgtgaccttactttcaggaatcattcagttttgcctaggtgtctgtaggtttggatttgtggccatatatctcacagagcctctggtccgtgggtttaccaccgcagcagctgtgcatgtcttcacctccatgttaaaatatctgtttggagttaaaacaaagcggtacagtggaatcttttccgtggtgtatagtacagttgctgtgttgcagaatgttaaaaacctcaacgtgtgttccctaggcgtcgggctgatggtttttggtttgctgttgggtggcaaggagtttaatgagagatttaaagagaaattgccggcgcctattcctttagagttctttgcggtcgtaatgggaactggcatttcagctgggtttaacttgaaagaatcatacaatgtggatgtcgttggaacacttcctctagggctgctacctccagccaatccggacaccagcctcttccaccttgtgtacgtagatgccattgccatagccatcgttggattttcagtgaccatctccatggccaagaccttagcaaataaacatggctaccaggttgacggcaatcaggagctcattgccctgggactgtgcaattccattggctcactcttccagaccttttcaatttcatgctccttgtctcgaagccttgttcaggagggaaccggtgggaagacacagcttgcaggttgtttggcctcattaatgattctgctggtcatattagcaactggattcctctttgaatcattgccccagaccatctggcttaccacttttgtgtcctccttgttcctgggattggactatggtttgatcactgctgtgatcattgctctgctgactgtgatttacagaacacagagtccaagctacaaagtccttggaaagcttcctgaaactgatgtgtatattgatatagacgcatatgaggaggtgaaagaaattcctggaataaaaatatttcaaataaatgcaccaatttactatgcaaatagcgacttgtatagcaatgcattaaaacgaaagactggagtgaacccagcagtcatcatgggagcaaggagaaaggccatgcggaagtacgctaaggaagtcggaaatgcaaatatggccaacgcaactgttgtcaaagcagatgcagaagtagatggagaggatgctaccaagcctgaagaagaggatggtgaagtaaaatatcccccaatagtgatcaaaagcacatttcctgaggaaatgcaaagatttatgcccccaggggataacgtccacactgtcattttggatttcactcaagtcaattttattgattctgttggagtgaaaactctggcagggattgtaaaagaatatggagacgtcggtatatatgtatacttagcaggatgcagtgcacaagttgtgaatgacctcactcggaatagattttttgaaaatcctgccctatgggagctgctgttccacagcattcatgatgcagttttaggcagccaacttagagaggcacttgctgaacaggaagcctcggctcccccttcccaggaggacttggagcccaatgccactcctgccactcctgaggcatagatgaggacctcaccctaggatggggttataagcctctcatgaagttcataatttacacgttttaaatactagacgctagatttttttttctaagggtgaatactagtagtccaggcttgatttggagggtgaatgacgcctagcaagatgtattgtacttgtgtttttttaattgaatacttcaaagataaa

SEQ ID NO: 19443 - DNA, 2689 bp, Homo sapiens
  source 1..2689: mol_type = unassigned DNA
acctggaggcagcgcgcgcgtcgaagaggcagcggctgtggagcgcggcggggcggctccgcccagggcagcccgggctgggccaaggagcgagctctcccttctcctgctctcagcctcagtgatcaaggcttcagtgaactgcactggagctcccagcgggggatcttgtcccctgtcccgacttttgtgctgcacattggatctggtgacactcaggaaatgcttgtctccggctgttaaggaataatttcagagtactatggatcatgctgaagaaaatgaaatccttgcagcaacccagaggtactatgtggaaaggcctatctttagtcatccggtcctccaggaaagactacacacaaaggacaaggttcctgattccattgcggataagctgaaacaggcattcacatgtactcctaaaaaaataagaaatatcatttatatgttcctacccataactaaatggctgccagcatacaaattcaaggaatatgtgttgggtgacttggtctcaggcataagcacaggggtgcttcagcttcctcaaggcttagcctttgcaatgctggcagctgtgcctccaatatttggcctgtactcttcattttaccctgttatcatgtattgttttcttggaacctccagacacatatccataggtccttttgctgttattagcctgatgattggtggtgtagctgttcgattagtaccagatgatatagtcattccaggaggagtaaatgcaaccaatggcacagaggccagagatgccttgagagtgaaagtcgccatgtctgtgaccttactttcaggaatcattcagttttgcctaggtgtctgtaggtttggatttgtggccatatatctcacagagcctctggtccgtgggtttaccaccgcagcagctgtgcatgtcttcacctccatgttaaaatatctgtttggagttaaaacaaagcggtacagtggaatcttttccgtggtgtatagtacagttgctgtgttgcagaatgttaaaaacctcaacgtgtgttccctaggcgtcgggctgatggtttttggtttgctgttgggtggcaaggagtttaatgagagatttaaagagaaattgccggcgcctattcctttagagttctttgcggtcgtaatgggaactggcatttcagctgggtttaacttgaaagaatcatacaatgtggatgtcgttggaacacttcctctagggctgctacctccagccaatccggacaccagcctcttccaccttgtgtacgtagatgccattgccatagccatcgttggattttcagtgaccatctccatggccaagaccttagcaaataaacatggctaccaggttgacggcaatcaggagctcattgccctgggactgtgcaattccattggctcactcttccagaccttttcaatttcatgctccttgtctcgaagccttgttcaggagggaaccggtgggaagacacagcttgcaggttgtttggcctcattaatgattctgctggtcatattagcaactggattcctctttgaatcattgccccaggctgtgctgtcggccattgtgattgtcaacctgaagggaatgtttatgcagttctcagatctcccctttttctggagaaccagcaaaatagagctgaccatctggcttaccacttttgtgtcctccttgttcctgggattggactatggtttgatcactgctgtgatcattgctctgctgactgtgatttacagaacacagagtccaagctacaaagtccttggaaagcttcctgaaactgatgtgtatattgatatagacgcatatgaggaggtgaaagaaattcctggaataaaaatatttcaaataaatgcaccaatttactatgcaaatagcgacttgtatagcaatgcattaaaacgaaagactggagtgaacccagcagtcatcatgggagcaaggagaaaggccatgcggaagtacgctaaggaagtcggaaatgcaaatatggccaacgcaactgttgtcaaagcagatgcagaagtagatggagaggatgctaccaagcctgaagaagaggatggtgaagtaaaatatcccccaatagtgatcaaaagcacatttcctgaggaaatgcaaagatttatgcccccaggggataacgtccacactgtcattttggatttcactcaagtcaattttattgattctgttggagtgaaaactctggcagggattgtaaaagaatatggagacgtcggtatatatgtatacttagcaggatgcagtgcacaagttgtgaatgacctcactcggaatagattttttgaaaatcctgccctatgggagctgctgttccacagcattcatgatgcagttttaggcagccaacttagagaggcacttgctgaacaggaagcctcggctcccccttcccaggaggacttggagcccaatgccactcctgccactcctgaggcatagatgaggacctcaccctaggatggggttataagcctctcatgaagttcataatttacacgttttaaatactagacgctagatttttttttctaagggtgaatactagtagtccaggcttgatttggagggtgaatgacgcctagcaagatgtattgtacttgtgtttttttaattgaatacttcaaagataaa

SEQ ID NO: 19444 - DNA, 2374 bp, Homo sapiens
  source 1..2374: mol_type = unassigned DNA
tctcccttctcctgctctcagcctcagtgatcaaggcttcagtgaactgcactggagctcccagcgggggatcttgtcccctgtcccgacttttgtgctgcacattggatctggtgacactcaggaaatgcttgtctccggctgttaaggaataatttcagagtactatggatcatgctgaagaaaatgaaatccttgcagcaacccagaggtactatgtggaaaggcctatctttagtcatccggtcctccaggaaagactacacacaaaggacaaggttcctgattccattgcggataagctgaaacaggcattcacatgtactcctaaaaaaataagaaatatcatttatatgttcctacccataactaaatggctgccagcatacaaattcaaggaatatgtgttgggtgacttggtctcaggcataagcacaggggtgcttcagcttcctcaaggcttagcctttgcaatgctggcagctgtgcctccaatatttggcctgtactcttcattttaccctgttatcatgtattgttttcttggaacctccagacacatatccataggtccttttgctgttattagcctgatgattggtggtgtagctgttcgattagtaccagatgatatagtcattccaggaggagtaaatgcaaccaatggcacagaggccagagatgccttgagagtgaaagtcgccatgtctgtgaccttactttcaggaatcattcagttttgcctaggtgtctgtaggtttggatttgtggccatatatctcacagagcctctggtccgtgggtttaccaccgcagcagctgtgcatgtcttcacctccatgttaaaatatctgtttggagttaaaacaaagcggtacagtggaatcttttccgtggtgtatagtacagttgctgtgttgcagaatgttaaaaacctcaacgtgtgttccctaggcgtcgggctgatggtttttggtttgctgttgggtggcaaggagtttaatgagagatttaaagagaaattgccggcgcctattcctttagagttctttgcggtcgtaatgggaactggcatttcagctgggtttaacttgaaagaatcatacaatgtggatgtcgttggaacacttcctctagggctgctacctccagccaatccggacaccagcctcttccaccttgtgtacgtagatgccattgccatagccatcgttggattttcagtgaccatctccatggccaagaccttagcaaataaacatggctaccaggttgacggcaatcaggagctcattgccctgggactgtgcaattccattggctcactcttccagaccttttcaatttcatgctccttgtctcgaagccttgttcaggagggaaccggtgggaagacacagcttgcaggttgtttggcctcattaatgattctgctggtcatattagcaactggattcctctttgaatcattgccccagaccatctggcttaccacttttgtgtcctccttgttcctgggattggactatggtttgatcactgctgtgatcattgctctgctgactgtgatttacagaacacagaggtgaaagaaattcctggaataaaaatatttcaaataaatgcaccaatttactatgcaaatagcgacttgtatagcaatgcattaaaacgaaagactggagtgaacccagcagtcatcatgggagcaaggagaaaggccatgcggaagtacgctaaggaagtcggaaatgcaaatatggccaacgcaactgttgtcaaagcagatgcagaagtagatggagaggatgctaccaagcctgaagaagaggatggtgaagtaaaatatcccccaatagtgatcaaaagcacatttcctgaggaaatgcaaagatttatgcccccaggggataacgtccacactgtcattttggatttcactcaagtcaattttattgattctgttggagtgaaaactctggcagggattgtaaaagaatatggagacgtcggtatatatgtatacttagcaggatgcagtgcacaagttgtgaatgacctcactcggaatagattttttgaaaatcctgccctatgggagctgctgttccacagcattcatgatgcagttttaggcagccaacttagagaggcacttgctgaacaggaagcctcggctcccccttcccaggaggacttggagcccaatgccactcctgccactcctgaggcatagatgaggacctcaccctaggatggggttataagcctctcatgaagttcataatttacacgttttaaatactagacgctagatttttttttctaagggtgaatactagtagtccaggcttgatttggagggtgaatgacg

SEQ ID NO: 19445 - DNA, 2370 bp, Homo sapiens
  source 1..2370: mol_type = unassigned DNA
tcccttctcctgctctcagcctcagtgatcaaggcttcagtgaactgcactggagctcccagcgggggatcttgtcccctgtcccgacttttgtgctgcacattggatctggtgacactcaggaaatgcttgtctccggctgttaaggaataatttcagagtactatggatcatgctgaagaaaatgaaatccttgcagcaacccagaggtactatgtggaaaggcctatctttagtcatccggtcctccaggaaagactacacacaaaggacaaggttcctgattccattgcggataagctgaaacaggcattcacatgtactcctaaaaaaataagaaatatcatttatatgttcctacccataactaaatggctgccagcatacaaattcaaggaatatgtgttgggtgacttggtctcaggcataagcacaggggtgcttcagcttcctcaaggtccttttgctgttattagcctgatgattggtggtgtagctgttcgattagtaccagatgatatagtcattccaggaggagtaaatgcaaccaatggcacagaggccagagatgccttgagagtgaaagtcgccatgtctgtgaccttactttcaggaatcattcagttttgcctaggtgtctgtaggtttggatttgtggccatatatctcacagagcctctggtccgtgggtttaccaccgcagcagctgtgcatgtcttcacctccatgttaaaatatctgtttggagttaaaacaaagcggtacagtggaatcttttccgtggtgtatgcgtcgggctgatggtttttggtttgctgttgggtggcaaggagtttaatgagagatttaaagagaaattgccggcgcctattcctttagagttctttgcggtcgtaatgggaactggcatttcagctgggtttaacttgaaagaatcatacaatgtggatgtcgttggaacacttcctctagggctgctacctccagccaatccggacaccagcctcttccaccttgtgtacgtagatgccattgccatagccatcgttggattttcagtgaccatctccatggccaagaccttagcaaataaacatggctaccaggttgacggcaatcaggagctcattgccctgggactgtgcaattccattggctcactcttccagaccttttcaatttcatgctccttgtctcgaagccttgttcaggagggaaccggtgggaagacacagcttgcaggttgtttggcctcattaatgattctgctggtcatattagcaactggattcctctttgaatcattgccccaggctgtgctgtcggccattgtgattgtcaacctgaagggaatgtttatgcagttctcagatctcccctttttctggagaaccagcaaaatagagctgaccatctggcttaccacttttgtgtcctccttgttcctgggattggactatggtttgatcactgctgtgatcattgctctgctgactgtgatttacagaacacagagtccaagctacaaagtccttggaaagcttcctgaaactgatgtgtatattgatatagacgcatatgaggaggtgaaagaaattcctggaataaaaatatttcaaataaatgcaccaatttactatgcaaatagcgacttgtatagcaatgcattaaaacgaaagactggagtgaacccagcagtcatcatgggagcaaggagaaaggccatgcggaagtacgctaaggaagtcggaaatgcaaatatggccaacgcaactgttgtcaaagcagatgcagaagtagatggagaggatgctaccaagcctgaagaagaggatggtgaagtaaaatatcccccaatagtgatcaaaagcacatttcctgaggaaatgcaaagatttatgcccccaggggataacgtccacactgtcattttggatttcactcaagtcaattttattgattctgttggagtgaaaactctggcagggattgtaaaagaatatggagacgtcggtatatatgtatacttagcaggatgcagtgcacaagttgtgaatgacctcactcggaatagattttttgaaaatcctgccctatgggagctgctgttccacagcattcatgatgcagttttaggcagccaacttagagaggcacttgctgaacaggaagcctcggctcccccttcccaggaggacttggagcccaatgccactcctgccactcctgaggcatagatgaggacctcaccctaggatggggttataagcctctcatgaagttcataatttacacgttttaaatactagacgctagatttttttttctaagggtgaatactagtagtccaggcttgatttggagggtgaa

SEQ ID NO: 19446 - DNA, 2422 bp, Homo sapiens
  source 1..2422: mol_type = unassigned DNA
tcccttctcctgctctcagcctcagtgatcaaggcttcagtgaactgcactggagctcccagcgggggatcttgtcccctgtcccgacttttgtgctgcacattggatctggtgacactcaggaaatgcttgtctccggctgttaaggaataatttcagagtactatggatcatgctgaagaaaatgaaatccttgcagcaacccagaggtactatgtggaaaggcctatctttagtcatccggtcctccaggaaagactacacacaaaggacaaggttcctgattccattgcggataagctgaaacaggcattcacatgtactcctaaaaaaataagaaatatcatttatatgttcctacccataactaaatggctgccagcatacaaattcaaggaatatgtgttgggtgacttggtctcaggcataagcacaggggtgcttcagcttcctcaaggtccttttgctgttattagcctgatgattggtggtgtagctgttcgattagtaccagatgatatagtcattccaggaggagtaaatgcaaccaatggcacagaggccagagatgccttgagagtgaaagtcgccatgtctgtgaccttactttcaggaatcattcagttttgcctaggtgtctgtaggtttggatttgtggccatatatctcacagagcctctggtccgtgggtttaccaccgcagcagctgtgcatgtcttcacctccatgttaaaatatctgtttggagttaaaacaaagcggtacagtggaatcttttccgtggtgtatagtacagttgctgtgttgcagaatgttaaaaacctcaacgtgtgttccctaggcgtcgggctgatggtttttggtttgctgttgggtggcaaggagtttaatgagagatttaaagagaaattgccggcgcctattcctttagagttctttgcggtcgtaatgggaactggcatttcagctgggtttaacttgaaagaatcatacaatgtggatgtcgttggaacacttcctctagggctgctacctccagccaatccggacaccagcctcttccaccttgtgtacgtagatgccattgccatagccatcgttggattttcagtgaccatctccatggccaagaccttagcaaataaacatggctaccaggttgacggcaatcaggagctcattgccctgggactgtgcaattccattggctcactcttccagaccttttcaatttcatgctccttgtctcgaagccttgttcaggagggaaccggtgggaagacacagcttgcaggttgtttggcctcattaatgattctgctggtcatattagcaactggattcctctttgaatcattgccccaggctgtgctgtcggccattgtgattgtcaacctgaagggaatgtttatgcagttctcagatctcccctttttctggagaaccagcaaaatagagctgaccatctggcttaccacttttgtgtcctccttgttcctgggattggactatggtttgatcactgctgtgatcattgctctgctgactgtgatttacagaacacagagtccaagctacaaagtccttggaaagcttcctgaaactgatgtgtatattgatatagacgcatatgaggaggtgaaagaaattcctggaataaaaatatttcaaataaatgcaccaatttactatgcaaatagcgacttgtatagcaatgcattaaaacgaaagactggagtgaacccagcagtcatcatgggagcaaggagaaaggccatgcggaagtacgctaaggaagtcggaaatgcaaatatggccaacgcaactgttgtcaaagcagatgcagaagtagatggagaggatgctaccaagcctgaagaagaggatggtgaagtaaaatatcccccaatagtgatcaaaagcacatttcctgaggaaatgcaaagatttatgcccccaggggataacgtccacactgtcattttggatttcactcaagtcaattttattgattctgttggagtgaaaactctggcagggattgtaaaagaatatggagacgtcggtatatatgtatacttagcaggatgcagtgcacaagttgtgaatgacctcactcggaatagattttttgaaaatcctgccctatgggagctgctgttccacagcattcatgatgcagttttaggcagccaacttagagaggcacttgctgaacaggaagcctcggctcccccttcccaggaggacttggagcccaatgccactcctgccactcctgaggcatagatgaggacctcaccctaggatggggttataagcctctcatgaagttcataatttacacgttttaaatactagacgctagatttttttttctaagggtgaatactagtagtccaggcttgatttggagggtgaa

SEQ ID NO: 19447 - DNA, 2270 bp, Homo sapiens
  source 1..2270: mol_type = unassigned DNA
agagtactatggatcatgctgaagaaaatgaaatccttgcagcaacccagaggtactatgtggaaaggcctatctttagtcatccggtcctccaggaaagactacacacaaaggacaaggttcctgattccattgcggataagctgaaacaggcattcacatgtactcctaaaaaaataagaaatatcatttatatgttcctacccataactaaatggctgccagcatacaaattcaaggaatatgtgttgggtgacttggtctcaggcataagcacaggggtgcttcagcttcctcaaggcttagcctttgcaatgctggcagctgtgcctccaatatttggcctgtactcttcattttaccctgttatcatgtattgttttcttggaacctccagacacatatccataggtccttttgctgttattagcctgatgattggtggtgtagctgttcgattagtaccagatgatatagtcattccaggaggagtaaatgcaaccaatggcacagaggccagagatgccttgagagtgaaagtcgccatgtctgtgaccttactttcaggaatcattcagttttgcctaggtgtctgtaggtttggatttgtggccatatatctcacagagcctctggtccgtgggtttaccaccgcagcagctgtgcatgtcttcacctccatgttaaaatatctgtttggagttaaaacaaagcggtacagtggaatcttttccgtggtgtatagtacagttgctgtgttgcagaatgttaaaaacctcaacgtgtgttccctaggcgtcgggctgatggtttttggtttgctgttgggtggcaaggagtttaatgagagatttaaagagaaattgccggcgcctattcctttagagttctttgcggtcgtaatgggaactggcatttcagctgggtttaacttgaaagaatcatacaatgtggatgtcgttggaacacttcctctagggctgctacctccagccaatccggacaccagcctcttccaccttgtgtacgtagatgccattgccatagccatcgttggattttcagtgaccatctccatggccaagaccttagcaaataaacatggctaccaggttgacggcaatcaggagctcattgccctgggactgtgcaattccattggctcactcttccagaccttttcaatttcatgctccttgtctcgaagccttgttcaggagggaaccggtgggaagacacagcttgcaggttgtttggcctcattaatgattctgctggtcatattagcaactggattcctctttgaatcattgccccaggctgtgctgtcggccattgtgattgtcaacctgaagggaatgtttatgcagttctcagatctcccctttttctggagaaccagcaaaatagagctgaccatctggcttaccacttttgtgtcctccttgttcctgggattggactatggtttgatcactgctgtgatcattgctctgctgactgtgatttacagaacacagagtccaagctacaaagtccttggaaagcttcctgaaactgatgtgtatattgatatagacgcatatgaggaggtgaaagaaattcctggaataaaaatatttcaaataaatgcaccaatttactatgcaaatagcgacttgtatagcaatgcattaaaacgaaagactggagtgaacccagcagtcatcatgggagcaaggagaaaggccatgcggaagtacgctaaggaagtcggaaatgcaaatatggccaacgcaactgttgtcaaagcaacacaggatgcagaagtagatggagaggatgctaccaagcctgaagaagaggatggtgaagtaaaatatcccccaatagtgatcaaaagcacatttcctgaggaaatgcaaagatttatgcccccaggggataacgtccacactgtcattttggatttcactcaagtcaattttattgattctgttggagtgaaaactctggcagggattgtaaaagaatatggagacgtcggtatatatgtatacttagcaggatgcagtgcacaagttgtgaatgacctcactcggaatagattttttgaaaatcctgccctatgggagctgctgttccacagcattcatgatgcagttttaggcagccaacttagagaggcacttgctgaacaggaagcctcggctcccccttcccaggaggacttggagcccaatgccactcctgccactcctgaggcatagatgaggacctcaccctaggat

SEQ ID NO: 19448 - DNA, 2174 bp, Homo sapiens
  source 1..2174: mol_type = unassigned DNA
agagtactatggatcatgctgaagaaaatgaaatccttgcagcaacccagaggtactatgtggaaaggcctatctttagtcatccggtcctccaggaaagactacacacaaaggacaaggttcctgattccattgcggataagctgaaacaggcattcacatgtactcctaaaaaaataagaaatatcatttatatgttcctacccataactaaatggctgccagcatacaaattcaaggaatatgtgttgggtgacttggtctcaggcataagcacaggggtgcttcagcttcctcaaggcttagcctttgcaatgctggcagctgtgcctccaatatttggcctgtactcttcattttaccctgttatcatgtattgttttcttggaacctccagacacatatccataggtccttttgctgttattagcctgatgattggtggtgtagctgttcgattagtaccagatgatatagtcattccaggaggagtaaatgcaaccaatggcacagaggccagagatgccttgagagtgaaagtcgccatgtctgtgaccttactttcaggaatcattcagttttgcctaggtgtctgtaggtttggatttgtggccatatatctcacagagcctctggtccgtgggtttaccaccgcagcagctgtgcatgtcttcacctccatgttaaaatatctgtttggagttaaaacaaagcggtacagtggaatcttttccgtggtgtatagtacagttgctgtgttgcagaatgttaaaaacctcaacgtgtgttccctaggcgtcgggctgatggtttttggtttgctgttgggtggcaaggagtttaatgagagatttaaagagaaattgccggcgcctattcctttagagttctttgcggtcgtaatgggaactggcatttcagctgggtttaacttgaaagaatcatacaatgtggatgtcgttggaacacttcctctagggctgctacctccagccaatccggacaccagcctcttccaccttgtgtacgtagatgccattgccatagccatcgttggattttcagtgaccatctccatggccaagaccttagcaaataaacatggctaccaggttgacggcaatcaggagctcattgccctgggactgtgcaattccattggctcactcttccagaccttttcaatttcatgctccttgtctcgaagccttgttcaggagggaaccggtgggaagacacagcttgcaggttgtttggcctcattaatgattctgctggtcatattagcaactggattcctctttgaatcattgccccagaccatctggcttaccacttttgtgtcctccttgttcctgggattggactatggtttgatcactgctgtgatcattgctctgctgactgtgatttacagaacacagagtccaagctacaaagtccttggaaagcttcctgaaactgatgtgtatattgatatagacgcatatgaggaggtgaaagaaattcctggaataaaaatatttcaaataaatgcaccaatttactatgcaaatagcgacttgtatagcaatgcattaaaacgaaagactggagtgaacccagcagtcatcatgggagcaaggagaaaggccatgcggaagtacgctaaggaagtcggaaatgcaaatatggccaacgcaactgttgtcaaagcaacacaggatgcagaagtagatggagaggatgctaccaagcctgaagaagaggatggtgaagtaaaatatcccccaatagtgatcaaaagcacatttcctgaggaaatgcaaagatttatgcccccaggggataacgtccacactgtcattttggatttcactcaagtcaattttattgattctgttggagtgaaaactctggcagggattgtaaaagaatatggagacgtcggtatatatgtatacttagcaggatgcagtgcacaagttgtgaatgacctcactcggaatagattttttgaaaatcctgccctatgggagctgctgttccacagcattcatgatgcagttttaggcagccaacttagagaggcacttgctgaacaggaagcctcggctcccccttcccaggaggacttggagcccaatgccactcctgccactcctgaggcatagatgaggacctcaccctaggat

SEQ ID NO: 19449 - DNA, 2098 bp, Homo sapiens
  source 1..2098: mol_type = unassigned DNA
acctggaggcagcgcgcgcgtcgaagaggcagcggctgtggagcgcggcggggcggctccgcccagggcagcccgggctgggccaaggagcgagctctcccttctcctgctctcagcctcagtgatcaaggcttcagtgaactgcactggagctcccagcgggggatcttgtcccctgtcccgacttttgtgctgcacattggatctggtgacactcaggaaatgcttgtctccggctgttaaggaataatttcagagtactatggatcatgctgaagaaaatgaaatccttgcagcaacccagaggtactatgtggaaaggcctatctttagtcatccggtcctccaggaaagactacacacaaaggacaaggttcctgattccattgcggataagctgaaacaggcattcacatgtactcctaaaaaaataagaaatatcatttatatgttcctacccataactaaatggctgccagcatacaaattcaaggaatatgtgttgggtgacttggtctcaggcataagcacaggggtgcttcagcttcctcaaggtccttttgctgttattagcctgatgattggtggtgtagctgttcgattagtaccagatgatatagtcattccaggaggagtaaatgcaaccaatggcacagaggccagagatgccttgagagtgaaagtcgccatgtctgtgaccttactttcaggaatcattcagttttgcctaggtgtctgtaggtttggatttgtggccatatatctcacagagcctctggtccgtgggtttaccaccgcagcagctgtgcatgtcttcacctccatgttaaaatatctgtttggagttaaaacaaagcggtacagtggaatcttttccgtggtgtatgcgtcgggctgatggtttttggtttgctgttgggtggcaaggagtttaatgagagatttaaagagaaattgccggcgcctattcctttagagttctttgcggtcgtaatgggaactggcatttcagctgggtttaacttgaaagaatcatacaatgtggatgtcgttggaacacttcctctagggctgctacctccagccaatccggacaccagcctcttccaccttgtgtacgtagatgccattgccatagccatcgttggattttcagtgaccatctccatggccaagaccttagcaaataaacatggctaccaggttgacggcaatcaggagctcattgccctgggactgtgcaattccattggctcactcttccagaccttttcaatttcatgctccttgtctcgaagccttgttcaggagggaaccggtgggaagacacagcttgcaggttgtttggcctcattaatgattctgctggtcatattagcaactggattcctctttgaatcattgccccaggctgtgctgtcggccattgtgattgtcaacctgaagggaatgtttatgcagttctcagatctcccctttttctggagaaccagcaaaatagagctgaccatctggcttaccacttttgtgtcctccttgttcctgggattggactatggtttgatcactgctgtgatcattgctctgctgactgtgatttacagaacacagaggtgagtgcccagattggaatgggtgtgaatgtcccggcagagatgacaatgttgactttaggtgtagaccaaagtttaagttggtagaagtggagccctttgatgatttctagttagcgtgagagggagctataacactcatgtagcctgttgactagatgaacaaaatgccaatttaaaaattccatataattttgccaaatgctcttctatgtcacaatttatgctcccatcaatggttatgttaaaagagcctaatttccatcattgtttctgccattcctggtctagtgctatgctggtttatttatcctcttgtgatttgttttggcaccaagtactgacatgagtttcaatgacatgaagcaaactctgacaccaagttatcgtatgcattccttccactgtcatttcctccaccctgaaccactttcccttgttatctcttctccctagtaggaagctgagcccactagggaaagtat

SEQ ID NO: 19450 - DNA, 2588 bp, Homo sapiens
  source 1..2588: mol_type = unassigned DNA
acctggaggcagcgcgcgcgtcgaagaggcagcggctgtggagcgcggcggggcggctccgcccagggcagcccgggctgggccaaggagcgagctctcccttctcctgctctcagcctcagtgatcaaggcttcagtgaactgcactggagctcccagcgggggatcttgtcccctgtcccgacttttgtgctgcacattggatctggtgacactcaggaaatgcttgtctccggctgttaaggaataatttcagagtactatggatcatgctgaagaaaatgaaatccttgcagcaacccagaggtactatgtggaaaggcctatctttagtcatccggtcctccaggaaagactacacacaaaggacaaggttcctgattccattgcggataagctgaaacaggcattcacatgtactcctaaaaaaataagaaatatcatttatatgttcctacccataactaaatggctgccagcatacaaattcaaggaatatgtgttgggtgacttggtctcaggcataagcacaggggtgcttcagcttcctcaaggcttagcctttgcaatgctggcagctgtgcctccaatatttggcctgtactcttcattttaccctgttatcatgtattgttttcttggaacctccagacacatatccataggtccttttgctgttattagcctgatgattggtggtgtagctgttcgattagtaccagatgatatagtcattccaggaggagtaaatgcaaccaatggcacagaggccagagatgccttgagagtgaaagtcgccatgtctgtgaccttactttcaggaatcattcagttttgcctaggtgtctgtaggtttggatttgtggccatatatctcacagagcctctggtccgtgggtttaccaccgcagcagctgtgcatgtcttcacctccatgttaaaatatctgtttggagttaaaacaaagcggtacagtggaatcttttccgtggtgtatagtacagttgctgtgttgcagaatgttaaaaacctcaacgtgtgttccctaggcgtcgggctgatggtttttggtttgctgttgggtggcaaggagtttaatgagagatttaaagagaaattgccggcgcctattcctttagagttctttgcggtcgtaatgggaactggcatttcagctgggtttaacttgaaagaatcatacaatgtggatgtcgttggaacacttcctctagggctgctacctccagccaatccggacaccagcctcttccaccttgtgtacgtagatgccattgccatagccatcgttggattttcagtgaccatctccatggccaagaccttagcaaataaacatggctaccaggttgacggcaatcaggagctcattgccctgggactgtgcaattccattggctcactcttccagaccttttcaatttcatgctccttgtctcgaagccttgttcaggagggaaccggtgggaagacacagcttgcaggttgtttggcctcattaatgattctgctggtcatattagcaactggattcctctttgaatcattgccccagaccatctggcttaccacttttgtgtcctccttgttcctgggattggactatggtttgatcactgctgtgatcattgctctgctgactgtgatttacagaacacagagtccaagctacaaagtccttggaaagcttcctgaaactgatgtgtatattgatatagacgcatatgaggaggtgaaagaaattcctggaataaaaatatttcaaataaatgcaccaatttactatgcaaatagcgacttgtatagcaatgcattaaaacgaaagactggagtgaacccagcagtcatcatgggagcaaggagaaaggccatgcggaagtacgctaaggaagtcggaaatgcaaatatggccaacgcaactgttgtcaaagcagatgcagaagtagatggagaggatgctaccaagcctgaagaagaggatggtgaagtaaaatatcccccaatagtgatcaaaagcacatttcctgaggaaatgcaaagatttatgcccccaggggataacgtccacactgtcattttggatttcactcaagtcaattttattgattctgttggagtgaaaactctggcagggattgtaaaagaatatggagacgtcggtatatatgtatacttagcaggatgcagtgcacaagttgtgaatgacctcactcggaatagattttttgaaaatcctgccctatgggagctgctgttccacagcattcatgatgcagttttaggcagccaacttagagaggcacttgctgaacaggaagcctcggctcccccttcccaggaggacttggagcccaatgccactcctgccactcctgaggcatagatgaggacctcaccctaggatggggttataagcctctcatgaagttcataatttacacgttttaaatactagacgctagatttttttttctaagggtgaatactagtagtccaggcttgatttggagggtgaatgacgcctagcaagatgtattgtacttgtgtttttttaattgaatacttcaaag

SEQ ID NO: 19451 - DNA, 2686 bp, Homo sapiens
  source 1..2686: mol_type = unassigned DNA
acctggaggcagcgcgcgcgtcgaagaggcagcggctgtggagcgcggcggggcggctccgcccagggcagcccgggctgggccaaggagcgagctctcccttctcctgctctcagcctcagtgatcaaggcttcagtgaactgcactggagctcccagcgggggatcttgtcccctgtcccgacttttgtgctgcacattggatctggtgacactcaggaaatgcttgtctccggctgttaaggaataatttcagagtactatggatcatgctgaagaaaatgaaatccttgcagcaacccagaggtactatgtggaaaggcctatctttagtcatccggtcctccaggaaagactacacacaaaggacaaggttcctgattccattgcggataagctgaaacaggcattcacatgtactcctaaaaaaataagaaatatcatttatatgttcctacccataactaaatggctgccagcatacaaattcaaggaatatgtgttgggtgacttggtctcaggcataagcacaggggtgcttcagcttcctcaaggcttagcctttgcaatgctggcagctgtgcctccaatatttggcctgtactcttcattttaccctgttatcatgtattgttttcttggaacctccagacacatatccataggtccttttgctgttattagcctgatgattggtggtgtagctgttcgattagtaccagatgatatagtcattccaggaggagtaaatgcaaccaatggcacagaggccagagatgccttgagagtgaaagtcgccatgtctgtgaccttactttcaggaatcattcagttttgcctaggtgtctgtaggtttggatttgtggccatatatctcacagagcctctggtccgtgggtttaccaccgcagcagctgtgcatgtcttcacctccatgttaaaatatctgtttggagttaaaacaaagcggtacagtggaatcttttccgtggtgtatagtacagttgctgtgttgcagaatgttaaaaacctcaacgtgtgttccctaggcgtcgggctgatggtttttggtttgctgttgggtggcaaggagtttaatgagagatttaaagagaaattgccggcgcctattcctttagagttctttgcggtcgtaatgggaactggcatttcagctgggtttaacttgaaagaatcatacaatgtggatgtcgttggaacacttcctctagggctgctacctccagccaatccggacaccagcctcttccaccttgtgtacgtagatgccattgccatagccatcgttggattttcagtgaccatctccatggccaagaccttagcaaataaacatggctaccaggttgacggcaatcaggagctcattgccctgggactgtgcaattccattggctcactcttccagaccttttcaatttcatgctccttgtctcgaagccttgttcaggagggaaccggtgggaagacacagcttgcaggttgtttggcctcattaatgattctgctggtcatattagcaactggattcctctttgaatcattgccccaggctgtgctgtcggccattgtgattgtcaacctgaagggaatgtttatgcagttctcagatctcccctttttctggagaaccagcaaaatagagctgaccatctggcttaccacttttgtgtcctccttgttcctgggattggactatggtttgatcactgctgtgatcattgctctgctgactgtgatttacagaacacagagtccaagctacaaagtccttggaaagcttcctgaaactgatgtgtatattgatatagacgcatatgaggaggtgaaagaaattcctggaataaaaatatttcaaataaatgcaccaatttactatgcaaatagcgacttgtatagcaatgcattaaaacgaaagactggagtgaacccagcagtcatcatgggagcaaggagaaaggccatgcggaagtacgctaaggaagtcggaaatgcaaatatggccaacgcaactgttgtcaaagcaacacaggatgcagaagtagatggagaggatgctaccaagcctgaagaagaggatggtgaagtaaaatatcccccaatagtgatcaaaagcacatttcctgaggaaatgcaaagatttatgcccccaggggataacgtccacactgtcattttggatttcactcaagtcaattttattgattctgttggagtgaaaactctggcagggattgtaaaagaatatggagacgtcggtatatatgtatacttagcaggatgcagtgcacaagttgtgaatgacctcactcggaatagattttttgaaaatcctgccctatgggagctgctgttccacagcattcatgatgcagttttaggcagccaacttagagaggcacttgctgaacaggaagcctcggctcccccttcccaggaggacttggagcccaatgccactcctgccactcctgaggcatagatgaggacctcaccctaggatggggttataagcctctcatgaagttcataatttacacgttttaaatactagacgctagatttttttttctaagggtgaatactagtagtccaggcttgatttggagggtgaatgacgcctagcaagatgtattgtacttgtgtttttttaattgaatacttc

SEQ ID NO: 19452 - DNA, 3653 bp, Homo sapiens
  source 1..3653: mol_type = unassigned DNA
tgttcaggacacgaggcctggcaccaaataggccctcgatcaagaatagcaaaacctcggagagagaaggagccttggtatacaggtttaccaaataccaaggggatcccacgactcaggtatgaggagggcgacccaggtaccactttcctggctccctagcccagctgctcatgctcctcttcctcgtcccctcccccactctcatctcctcagcccgcccggaacgcccgcgggctaggccacaacggctcgggaaccgccgccggtatccgcgtccgcagcgccgccagccaggcgagagccgtgtgggatcccagcgcccgcactcccgcccccgccaaggagccaggaatggcacaactagagaggagcgccatctctggcttcagctctaagtccaggcgaaactcattcgcatatgatgttaagcgtgaagtatacaatgaggagacctttcaacaggaacacaaaaggaaggcctcctcttctgggaacatgaacatcaacatcaccaccttcagacaccacgtccagtgccgctgctcatggcacaggttcctacgatgcgtgcttacaatctttcccttcctagaatggatgtgtatgtatcgattaaaggattggcttctgggagacttacttgctggtataagtgttggccttgtgcaagttccccaaggcctgacacttagtttgctggcaaggcaactgattcctcctctcaacatcgcttatgcagctttctgttcttcggtaatctatgtaatttttggatcgtgtcatcaaatgtccattggttccttcttcctggtgagtgctctgctgatcaacgttctgaaagtgagcccattcaacaacggtcaactggtcatgggatctttcgtcaagaatgagttttcggccccctcctaccttatgggctataataaatccttgagtgtggtggcaaccacaacttttctgactgggattattcagctaataatgggcgtattgggtttgggcttcattgccacttaccttccggagtctgcaatgagtgcttacctggctgctgtggcacttcatatcatgctgtcccagctgactttcatctttgggattatgattagtttccatgccggtcccatctccttcttctatgacataattaattactgtgtagctctcccaaaagcgaattccaccagcattctagtatttctaactgttgttgttgctctgcgaatcaacaaatgtatcagaatttctttcaatcagtatcccattgagtttcccatggaattatttctgattattggcttcactgtgattgcaaacaagataagcatggccacagaaaccagccagacgcttattgacatgattccttatagctttctgcttcctgtaacaccagatttcagccttcttcccaagataattttacaagccttctccttatctttggtgagctcctttctgctcatatttctgggcaagaagattgccagtcttcacaattacagtgtcaattccaaccaggatttaatagccatcggcctttgcaatgtcgtcagttcatttttcagatcttgtgtgtttactggtgctattgctaggactattatccaggataaatctggaggaagacaacagtttgcatctctggtaggcgcaggtgtgatgctgctcctgatggtgaagatgggacactttttctacacactgccaaatgctgtgctggctggtattattctgagcaacgtcattccctaccttgaaaccatttctaacctacccagcctgtggaggcaggaccaatatgactgtgctctttggatgatgacattctcatcttcaattttcctgggactggacattggactaattatctcagtagtttctgctttcttcatcaccactgttcgttcacacagagctaagattcttctcctgggtcaaatccctaacaccaacatttatagaagcatcaatgattatcgggagatcatcaccattcctggggtgaaaatcttccagtgctgcagctcaattacatttgtaaatgtttactacctaaagcataagctgttaaaagaggttgatatggtaaaggtgcctcttaaagaagaagaaattttcagcttgtttaattcaagtgacaccaatctacaaggaggaaagatttgcaggtgtttctgcaactgtgatgatctggagccgctgcccaggattctttacacagagcgatttgaaaataaactggatcccgaagcatcctccattaacctgattcactgctcacattttgagagcatgaacacaagccaaactgcatccgaagaccaagtgccatacacagtatcgtccgtgtctcagaaaaatcaagggcaacagtatgaggaggtggaggaagtttggcttcctaataactcatcaagaaacagctcaccaggactgcctgatgtggcggaaagccaggggaggagatcactcatcccttactcagatgcgtctctactgcccagtgtccacaccatcatcctggatttctccatggtacactacgtggattcacgggggttagtcgtattaagacagatatgcaatgcctttcaaaacgccaacattttgatactcattgcagggtgtcactcttccatagtcagggcatttgagaggaatgatttctttgacgctggcatcaccaagacccagctgttcctcagcgttcacgacgccgtgctgtttgccttgtcaaggaaggtcataggctcctctgagttaagcatcgatgaatccgagacagtgatacgggaaacctactcagaaacagacaagaatgacaattcaagatataaaatgagcagcagttttctaggaagccaaaaaaatgtaagtccaggcttcatcaagatccaacagcctgtagaagaggagtcggagttggatttggagctggaatcagaacaagaggctgggctgggtctggacctagacctggatcgggagctggagcctgaaatggagcccaaggctgagaccgagaccaagacccagaccgagatggagccccagcctgagactgagcctgagatggagcccaaccccaaatctaggccaagagctcacacttttcctcagcagcgttactggcctatgtatcatccgtctatggcttccacccagtctcagactcagactcggacatggtcagtggagaggagacgccatcctatggattcatactcaccagagggcaacagcaatgaagatgtctaggagatgaactagaaataaggggtcagataatgctggcaaatcctcctacccaaaaaggggtcaattgtccagagacctagactggatacgaactagcagtacttccttcctgactgtgactcctactacctgccagccttcttccttgctctgcgctgggatcatactcccaaatcacattactaaatgccaacaattatctctgaattccctatccaggctcccctcatttcaccttcagcatatattctagtcatgaatttccttcttcacacaccccacatctctgggctttgtgccagaccatctctaacttaatcctctcatccctgttcccctttctccaaagagatgaagctcaaataaaatgtataactctagtaaca

SEQ ID NO: 19453 - DNA, 2876 bp, Homo sapiens
  source 1..2876: mol_type = unassigned DNA
ctttctttctttttgatggcactggagcagagagaaactaaagcaggaaaatgggaagtgattatctttgtgttttttaagatgaagctccactgaagctgctagatgggcagttacccaagcagcaaacaggagagtgaggggtgggaaatttacttacatgggaagtagggctgacactgaggagctactagggcttttctttccttatatttattttttttttgagatggagtctcactctgtcgccaggctggagtgcagtggcgtgatcttggctcactgcaatctccgtctcccgggttcaagcgattctcctctctcagcctcccaagtagctggaattacaggcacacaccaccaagcccagctaatttttgtatttttagtagagacggggtttcaccatgttggccaggatggtctccatcttttgaccttgtgatctgccggcctcagcctcccaatgtgctaggattacaggtgtgagccaccgcacccggccaactacggcttttctaaattgtgcaaggagaggttaaacttaggaggagatgcaaatcagattttaggagaattcagattcatagcacagagcagtggcagtaaagattcaaatgcccaggacaacgtggagcttttcagggagcatctttccattcatttagggagtatttattgagtacctagtatgtgtttagcactttgataagacttgaaaatgtcagttcaacaaaaatacacttggactgaactcaactccttttaagaaaaattgacatgcttctcaccaagcagaaggcctcagttgcagacagggaccaatacgttcctgatggtttctctccaactggctctgtctcctcagtttgcatctctggtaggcgcaggtgtgatgctgctcctgatggtgaagatgggacactttttctacacactgccaaatgctgtgctggctggtattattctgagcaacgtcattccctaccttgaaaccatttctaacctacccagcctgtggaggcaggaccaatatgactgtgctctttggatgatgacattctcatcttcaattttcctgggactggacattggactaattatctcagtagtttctgctttcttcatcaccactgttcgttcacacagagctaagattcttctcctgggtcaaatccctaacaccaacatttatagaagcatcaatgattatcgggagatcatcaccattcctggggtgaaaatcttccagtgctgcagctcaattacatttgtaaatgtttactacctaaagcataagctgttaaaagaggttgatatggtaaaggtgcctcttaaagaagaagaaattttcagcttgtttaattcaagtgacaccaatctacaaggaggaaagatttgcaggtgtttctgcaactgtgatgatctggagccgctgcccaggattctttacacagagcgatttgaaaataaactggatcccgaagcatcctccattaacctgattcactgctcacattttgagagcatgaacacaagccaaactgcatccgaagaccaagtgccatacacagtatcgtccgtgtctcagaaaaatcaagggcaacagtatgaggaggtggaggaagtttggcttcctaataactcatcaagaaacagctcaccaggactgcctgatgtggcggaaagccaggggaggagatcactcatcccttactcagatgcgtctctactgcccagtgtccacaccatcatcctggatttctccatggtacactacgtggattcacgggggttagtcgtattaagacagatatgcaatgcctttcaaaacgccaacattttgatactcattgcagggtgtcactcttccatagtcagggcatttgagaggaatgatttctttgacgctggcatcaccaagacccagctgttcctcagcgttcacgacgccgtgctgtttgccttgtcaaggaaggtcataggctcctctgagttaagcatcgatgaatccgagacagtgatacgggaaacctactcagaaacagacaagaatgacaattcaagatataaaatgagcagcagttttctaggaagccaaaaaaatgtaagtccaggcttcatcaagatccaacagcctgtagaagaggagtcggagttggatttggagctggaatcagaacaagaggctgggctgggtctggacctagacctggatcgggagctggagcctgaaatggagcccaaggctgagaccgagaccaagacccagaccgagatggagccccagcctgagactgagcctgagatggagcccaaccccaaatctaggccaagagctcacacttttcctcagcagcgttactggcctatgtatcatccgtctatggcttccacccagtctcagactcagactcggacatggtcagtggagaggagacgccatcctatggattcatactcaccagagggcaacagcaatgaagatgtctaggagatgaactagaaataaggggtcagataatgctggcaaatcctcctacccaaaaaggggtcaattgtccagagacctagactggatacgaactagcagtacttccttcctgactgtgactcctactacctgccagccttcttccttgctctgcgctgggatcatactcccaaatcacattactaaatgccaacaattatctctgaattccctatccaggctcccctcatttcaccttcagcatatattctagtcatgaatttccttcttcacacaccccacatctctgggctttgtgccagaccatctctaacttaatcctctcatccctgttcccctttctccaaagagatgaagctcaaataaaatgtataactctagt

SEQ ID NO: 19454 - DNA, 3144 bp, Homo sapiens
  source 1..3144: mol_type = unassigned DNA
gctgggagacgcctgggcgccgggggctgcaggtcccagggcgggggctgcgtccgtcaccggcaggtacccaggtatgccgcagagccaggcacgccgtgggcactcagtcagtatctgtggaatgaatgaatgatggtcgtccctgggagcttatctctgaggaatggcacaactagagaggagcgccatctctggcttcagctctaagtccaggcgaaactcattcgcatatgatgttaagcgtgaagtatacaatgaggagacctttcaacaggaacacaaaaggaaggcctcctcttctgggaacatgaacatcaacatcaccaccttcagacaccacgtccagtgccgctgctcatggcacaggttcctacgatgcgtgcttacaatctttcccttcctagaatggatgtgtatgtatcgattaaaggattggcttctgggagacttacttgctggtataagtgttggccttgtgcaagttccccaaggcctgacacttagtttgctggcaaggcaactgattcctcctctcaacatcgcttatgcagctttctgttcttcggtaatctatgtaatttttggatcgtgtcatcaaatgtccattggttccttcttcctggtgagtgctctgctgatcaacgttctgaaagtgagcccattcaacaacggtcaactggtcatgggatctttcgtcaagaatgagttttcggccccctcctaccttatgggctataataaatccttgagtgtggtggcaaccacaacttttctgactgggattattcagattattggcttcactgtgattgcaaacaagataagcatggccacagaaaccagccagacgcttattgacatgattccttatagctttctgcttcctgtaacaccagatttcagccttcttcccaagataattttacaagccttctccttatctttggtgagctcctttctgctcatatttctgggcaagaagattgccagtcttcacaattacagtgtcaattccaaccaggatttaatagccatcggcctttgcaatgtcgtcagttcatttttcagatcttgtgtgtttactggtgctattgctaggactattatccaggataaatctggaggaagacaacagtttgcatctctggtaggcgcaggtgtgatgctgctcctgatggtgaagatgggacactttttctacacactgccaaatgctgtgctggctggtattattctgagcaacgtcattccctaccttgaaaccatttctaacctacccagcctgtggaggcaggaccaatatgactgtgctctttggatgatgacattctcatcttcaattttcctgggactggacattggactaattatctcagtagtttctgctttcttcatcaccactgttcgttcacacagagctaagattcttctcctgggtcaaatccctaacaccaacatttatagaagcatcaatgattatcgggagatcatcaccattcctggggtgaaaatcttccagtgctgcagctcaattacatttgtaaatgtttactacctaaagcataagctgttaaaagaggttgatatggtaaaggtgcctcttaaagaagaagaaattttcagcttgtttaattcaagtgacaccaatctacaaggaggaaagatttgcaggtgtttctgcaactgtgatgatctggagccgctgcccaggattctttacacagagcgatttgaaaataaactggatcccgaagcatcctccattaacctgattcactgctcacattttgagagcatgaacacaagccaaactgcatccgaagaccaagtgccatacacagtatcgtccgtgtctcagaaaaatcaagggcaacagtatgaggaggtggaggaagtttggcttcctaataactcatcaagaaacagctcaccaggactgcctgatgtggcggaaagccaggggaggagatcactcatcccttactcagatgcgtctctactgcccagtgtccacaccatcatcctggatttctccatggtacactacgtggattcacgggggttagtcgtattaagacagatatgcaatgcctttcaaaacgccaacattttgatactcattgcagggtgtcactcttccatagtcagggcatttgagaggaatgatttctttgacgctggcatcaccaagacccagctgttcctcagcgttcacgacgccgtgctgtttgccttgtcaaggaaggtcataggctcctctgagttaagcatcgatgaatccgagacagtgatacgggaaacctactcagaaacagacaagaatgacaattcaagatataaaatgagcagcagttttctaggaagccaaaaaaatgtaagtccaggcttcatcaagatccaacagcctgtagaagaggagtcggagttggatttggagctggaatcagaacaagaggctgggctgggtctggacctagacctggatcgggagctggagcctgaaatggagcccaaggctgagaccgagaccaagacccagaccgagatggagccccagcctgagactgagcctgagatggagcccaaccccaaatctaggccaagagctcacacttttcctcagcagcgttactggcctatgtatcatccgtctatggcttccacccagtctcagactcagactcggacatggtcagtggagaggagacgccatcctatggattcatactcaccagagggcaacagcaatgaagatgtctaggagatgaactagaaataaggggtcagataatgctggcaaatcctcctacccaaaaaggggtcaattgtccagagacctagactggatacgaactagcagtacttccttcctgactgtgactcctactacctgccagccttcttccttgctctgcgctgggatcatactcccaaatcacattactaaatgccaacaattatctctgaattccctatccaggctcccctcatttcaccttcagcatatattctagtcatgaatttccttcttcacacaccccacatctctgggctttgtgccagaccatctctaacttaatcctctcatccctgttcccctttctccaaagagatgaagctcaaataaaatgtataactcta

SEQ ID NO: 19455 - DNA, 3463 bp, Homo sapiens
  source 1..3463: mol_type = unassigned DNA
ggtatccgcgtccgcagcgccgccagccaggcgagagccgtgtgggatcccagcgcccgcactcccgcccccgccaaggagccaggtgagccgctgctgggagacgcctgggcgccgggggctgcaggtcccagggcgggggctgcgtccgtcaccggcaggtacccaggaatggcacaactagagaggagcgccatctctggcttcagctctaagtccaggcgaaactcattcgcatatgatgttaagcgtgaagtatacaatgaggagacctttcaacaggaacacaaaaggaaggcctcctcttctgggaacatgaacatcaacatcaccaccttcagacaccacgtccagtgccgctgctcatggcacaggttcctacgatgcgtgcttacaatctttcccttcctagaatggatgtgtatgtatcgattaaaggattggcttctgggagacttacttgctggtataagtgttggccttgtgcaagttccccaaggcctgacacttagtttgctggcaaggcaactgattcctcctctcaacatcgcttatgcagctttctgttcttcggtaatctatgtaatttttggatcgtgtcatcaaatgtccattggttccttcttcctggtgagtgctctgctgatcaacgttctgaaagtgagcccattcaacaacggtcaactggtcatgggatctttcgtcaagaatgagttttcggccccctcctaccttatgggctataataaatccttgagtgtggtggcaaccacaacttttctgactgggattattcagctaataatgggcgtattgggtttgggcttcattgccacttaccttccggagtctgcaatgagtgcttacctggctgctgtggcacttcatatcatgctgtcccagctgactttcatctttgggattatgattagtttccatgccggtcccatctccttcttctatgacataattaattactgtgtagctctcccaaaagcgaattccaccagcattctagtatttctaactgttgttgttgctctgcgaatcaacaaatgtatcagaatttctttcaatcagtatcccattgagtttcccatggaattatttctgattattggcttcactgtgattgcaaacaagataagcatggccacagaaaccagccagacgcttattgacatgattccttatagctttctgcttcctgtaacaccagatttcagccttcttcccaagataattttacaagccttctccttatctttggtgagctcctttctgctcatatttctgggcaagaagattgccagtcttcacaattacagtgtcaattccaaccaggatttaatagccatcggcctttgcaatgtcgtcagttcatttttcagatcttgtgtgtttactggtgctattgctaggactattatccaggataaatctggaggaagacaacagtttgcatctctggtaggcgcaggtgtgatgctgctcctgatggtgaagatgggacactttttctacacactgccaaatgctgtgctggctggtattattctgagcaacgtcattccctaccttgaaaccatttctaacctacccagcctgtggaggcaggaccaatatgactgtgctctttggatgatgacattctcatcttcaattttcctgggactggacattggactaattatctcagtagtttctgctttcttcatcaccactgttcgttcacacagagctaagattcttctcctgggtcaaatccctaacaccaacatttatagaagcatcaatgattatcgggagatcatcaccattcctggggtgaaaatcttccagtgctgcagctcaattacatttgtaaatgtttactacctaaagcataagctgttaaaagaggttgatatggtaaaggtgcctcttaaagaagaagaaattttcagcttgtttaattcaagtgacaccaatctacaaggaggaaagatttgcaggtgtttctgcaactgtgatgatctggagccgctgcccaggattctttacacagagcgatttgaaaataaactggatcccgaagcatcctccattaacctgattcactgctcacattttgagagcatgaacacaagccaaactgcatccgaagaccaagtgccatacacagtatcgtccgtgtctcagaaaaatcaagggcaacagtatgaggaggtggaggaagtttggcttcctaataactcatcaagaaacagctcaccaggactgcctgatgtggcggaaagccaggggaggagatcactcatcccttactcagatgcgtctctactgcccagtgtccacaccatcatcctggatttctccatggtacactacgtggattcacgggggttagtcgtattaagacagatatgcaatgcctttcaaaacgccaacattttgatactcattgcagggtgtcactcttccatagtcagggcatttgagaggaatgatttctttgacgctggcatcaccaagacccagctgttcctcagcgttcacgacgccgtgctgtttgccttgtcaaggaaggtcataggctcctctgagttaagcatcgatgaatccgagacagtgatacgggaaacctactcagaaacagacaagaatgacaattcaagatataaaatgagcagcagttttctaggaagccaaaaaaatgtaagtccaggcttcatcaagatccaacagcctgtagaagaggagtcggagttggatttggagctggaatcagaacaagaggctgggctgggtctggacctagacctggatcgggagctggagcctgaaatggagcccaaggctgagaccgagaccaagacccagaccgagatggagccccagcctgagactgagcctgagatggagcccaaccccaaatctaggccaagagctcacacttttcctcagcagcgttactggcctatgtatcatccgtctatggcttccacccagtctcagactcagactcggacatggtcagtggagaggagacgccatcctatggattcatactcaccagagggcaacagcaatgaagatgtctaggagatgaactagaaataaggggtcagataatgctggcaaatcctcctacccaaaaaggggtcaattgtccagagacctagactggatacgaactagcagtacttccttcctgactgtgactcctactacctgccagccttcttccttgctctgcgctgggatcatactcccaaatcacattactaaatgccaacaattatctctgaattccctatccaggctcccctcatttcaccttcagcatatattctagtcatgaatttccttcttcacacaccccacatctctgggctttgtgccagaccatctctaacttaatcctctcatccctgttcccctttctccaaagagatgaagctcaaataaaatgtataactct

SEQ ID NO: 19456 - DNA, 2104 bp, Homo sapiens
  source 1..2104: mol_type = unassigned DNA
tttctacacactgccaaatgctgtgctggctggtattattctgagcaacgtcattccctaccttgaaaccatttctaacctacccagcctgtggaggcaggaccaatatgactgtgctctttggatgatgacattctcatcttcaattttcctgggactggacattggactaattatctcagtagtttctgctttcttcatcaccactgttcgttcacacagagctaagattcttctcctgggtcaaatccctaacaccaacatttatagaagcatcaatgattatcgggagatcatcaccattcctggggtgaaaatcttccagtgctgcagctcaattacatttgtaaatgtttactacctaaagcataagctgttaaaagaggttgatatggtaaaggtgcctcttaaagaagaagaaattttcagcttgtttaattcaagtgacaccaatctacaaggaggaaagatttgcaggtgtttctgcaactgtgatgatctggagccgctgcccaggattctttacacagagcgatttgaaaataaactggatcccgaagcatcctccattaacctgattcactgctcacattttgagagcatgaacacaagccaaactgcatccgaagaccaagtgccatacacagtatcgtccgtgtctcagaaaaatcaagggcaacagtatgaggaggtggaggaagtttggcttcctaataactcatcaagaaacagctcaccaggactgcctgatgtggcggaaagccaggggaggagatcactcatcccttactcagatgcgtctctactgcccagtgtccacaccatcatcctggatttctccatggtacactacgtggattcacgggggttagtcgtattaagacaggtaagtactgaggaggccttggcaggagctctgatccccctcctaccatcccaaccccaccctgatcctgattgaattctgttagtcactgatcagctgctatgagactgctaggccaccagagccttggacaccaaaggcagtacaatataaggtcaatcaaaataaaaagagaatgaaccaattcttttttcttttttcttttttgagatggagcctcactctgttgcccaggctggagtgcagtggcacaatcttggctcactgcaacctccacctcccaggttcaagagattctcctgcctcagcctcctgaatagctggaactacagatatgcaatgcctttcaaaacgccaacattttgatactcattgcagggtgtcactcttccatagtcagggcatttgagaggaatgatttctttgacgctggcatcaccaagacccagctgttcctcagcgttcacgacgccgtgctgtttgccttgtcaaggaaggtcataggctcctctgagttaagcatcgatgaatccgagacagtgatacgggaaacctactcagaaacagacaagaatgacaattcaagatataaaatgagcagcagttttctaggaagccaaaaaaatgtaagtccaggcttcatcaagatccaacagcctgtagaagaggagtcggagttggatttggagctggaatcagaacaagaggctgggctgggtctggacctagacctggatcgggagctggagcctgaaatggagcccaaggctgagaccgagaccaagacccagaccgagatggagccccagcctgagactgagcctgagatggagcccaaccccaaatctaggccaagagctcacacttttcctcagcagcgttactggcctatgtatcatccgtctatggcttccacccagtctcagactcagactcggacatggtcagtggagaggagacgccatcctatggattcatactcaccagagggcaacagcaatgaagatgtctaggagatgaactagaaataaggggtcagataatgctggcaaatcctcctacccaaaaaggggtcaattgtccagagacctagactggatacgaactagcagtacttccttcctgactgtgactcctactacctgccagccttcttccttgctctgcgctgggatcatactcccaaatcacattactaaatgccaacaattatctctg

SEQ ID NO: 19457 - DNA, 2989 bp, Homo sapiens
  source 1..2989: mol_type = unassigned DNA
atgttcaggacacgaggcctggcaccaaataggccctcgatcaagaatagcaaaacctcggagagagaaggagccttggtatacaggtttaccaaataccaaggggatcccacgactcaggtatgaggagggcgacccaggtaccactttcctggctccctagcccagctgctcatgctcctcttcctcgtcccctcccccactctcatctcctcagcccgcccggaacgcccgcgggctaggccacaacggctcgggaaccgccgccggtatccgcgtccgcagcgccgccagccaggcgagagccgtgtgggatcccagcgcccgcactcccgcccccgccaaggagccaggaatggcacaactagagaggagcgccatctctggcttcagctctaagtccaggcgaaactcattcgcatatgatgttaagcgtgaagtatacaatgaggagacctttcaacaggaacacaaaaggaaggcctcctcttctgggaacatgaacatcaacatcaccaccttcagacaccacgtccagtgccgctgctcatggcacaggttcctacgatgcgtgcttacaatctttcccttcctagaatggatgtgtatgtatcgattaaaggattggcttctgggagacttacttgctggtataagtgttggccttgtgcaagttccccaaggcctgacacttagtttgctggcaaggcaactgattcctcctctcaacatcgcttatgcagctttctgttcttcggtaatctatgtaatttttggatcgtgtcatcaaatgtccattggttccttcttcctggtgagtgctctgctgatcaacgttctgaaagtgagcccattcaacaacggtcaactggtcatgggatctttcgtcaagaatgagttttcggccccctcctaccttatgggctataataaatccttgagtgtggtggcaaccacaacttttctgactgggattattcagctaataatgggcgtattgggtttgggcttcattgccacttaccttccggagtctgcaatgagtgcttacctggctgctgtggcacttcatatcatgctgtcccagctgactttcatctttgggattatgattagtttccatgccggtcccatctccttcttctatgacataattaattactgtgtagctctcccaaaagcgaattccaccagcattctagtatttctaactgttgttgttgctctgcgaatcaacaaatgtatcagaatttctttcaatcagtatcccattgagtttcccatggaattatttctgattattggcttcactgtgattgcaaacaagataagcatggccacagaaaccagccagacgcttattgacatgattccttatagctttctgcttcctgtaacaccagatttcagccttcttcccaagataattttacaagccttctccttatctttggtgagctcctttctgctcatatttctgggcaagaagattgccagtcttcacaattacagtgtcaattccaaccaggatttaatagccatcggcctttgcaatgtcgtcagttcatttttcagatcttgtgtgtttactggtgctattgctaggactattatccaggataaatctggaggaagacaacagtttgcatctctggtaggcgcaggtgtgatgctgctcctgatggtgaagatgggacactttttctacacactgccaaatgctgtgctggctggtattattctgagcaacgtcattccctaccttgaaaccatttctaacctacccagcctgtggaggcaggaccaatatgactgtgctctttggatgatgacattctcatcttcaattttcctgggactggacattggactaattatctcagtagtttctgctttcttcatcaccactgttcgttcacacaggtactttgtctcaggtaataggaggttaacaaggcaaggtaagccaactctgacctaaaggcaagtgcatttcctttcagagctaagattcttctcctgggtcaaatccctaacaccaacatttatagaagcatcaatgattatcgggaggtaagaatccaaatgggtcccatttctctgcctaagggatagagtgggccccacctcatgcttagtttttctacaaaatcccttgccattgtttcctgcactgcagatacacatttacaaaggagggggatgtgatgtacactggtagagatgggttctttgtttttatttttttttttggagacagagtcttgctctgtcacccaagctggacagtacagtgcagtggcttgatcttggcttactgcaacctccacctgccaggttcaagcaattctcctgcctcagcctccccagtagctgggattacaggcgtgccccatcatacctggctaattttttgtattttagtaaagacagggtctcaccatgttgcccaggctggtcttggactcctgagctcagtcaatctgcttgcctcagccttctagagtgctaggattacaggcatgactcaacacacccagccaagacgggttcttaagtagctaaattcttatagtattgcagccagttaaagatcatttgtaaatgtactttaaggagagtttggccaagaaaaaggaaatgaagggagaaagaagacagcaggaaaagcagagggtgaaaatgggaggaaataattttctagttcttgtctctaataaagaagaatacaggctgggtgtgttggctcacacctgtaattccagcactttgggaggccaggcatttgagaccagcgtggccaacatggtgaaaccccgtatctactaaaaatacaaaaattagcagggcgtgatggcaggtgcctgtaatcccagctactcaagaggctgaggcaggagaattgcttgaacccgagaggcggaggttgcagtgagccaagatcgcgccattgcactccagcctgggcaacagagtgagactctgtctc

SEQ ID NO: 19458 - DNA, 740 bp, Homo sapiens
  source 1..740: mol_type = unassigned DNA
tggtatacaggtttaccaaataccaaggggatcccacgactcagcccgcccggaacgcccgcgggctaggccacaacggctcgggaaccgccgccggtatccgcgtccgcagcgccgccagccaggcgagagccgtgtgggatcccagcgcccgcactcccgcccccgccaaggagccaggtgagccgctgctgggagacgcctgggcgccgggggctgcaggtcccagggcgggggctgcgtccgtcaccggcaggtacccaggaatggcacaactagagaggagcgccatctctggcttcagctctaagtccaggcgaaactcattcgcatatgatgttaagcgtgaagtatacaatgaggagacctttcaacaggaacacaaaaggaaggcctcctcttctgggaacatgaacatcaacatcaccaccttcagacaccacgtccagtgccgaatggatgtgtatgtatcgattaaaggattggcttctgggagacttacttgctggtataagtgttggccttgtgcaagttccccaaggcctgacacttagtttgctggcaaggcaactgattcctcctctcaacatcgcttatgcagctttctgttcttcggtaatctatgtaatttttggatcgtgtcatcaaatgtccattggttccttcttcctggtgagtgctctgctgatcaacgttctgaaagtgagcccattcaacaacggtcaactggtcatgggatc

SEQ ID NO: 19459 - DNA, 582 bp, Homo sapiens
  source 1..582: mol_type = unassigned DNA
gtgcactgctgtatgttcaggacacgaggcctggcaccaaataggccctcgatcaagaatagcaaaacctcggagagagaaggagccttggtatacaggtttaccaaataccaaggggatcccacgactcagcccgcccggaacgcccgcgggctaggccacaacggctcgggaaccgccgccggtatccgcgtccgcagcgccgccagccaggcgagagccgtgtgggatcccagcgcccgcactcccgcccccgccaaggagccaggaatggcacaactagagaggagcgccatctctggcttcagctctaagtccaggcgaaactcattcgcatatgatgttaagcgtgaagtatacaatgaggagacctttcaacaggaacacaaaaggaaggcctcctcttctgggaacatgaacatcaacatcaccaccttcagacaccacgtccagtgccgctgctcatggcacaggttcctacgatgcgtgcttacaatctttcccttcctagaatggatgtgtatgtatcgattaaaggattggcttctgggagacttacttgctggtataagtgttggcctt

SEQ ID NO: 19460 - DNA, 811 bp, Homo sapiens
  source 1..811: mol_type = unassigned DNA
ccgtgcgctccgaagacggatattggaaagctgcaaaagtcaccagaaagaaacagggctgccttagtaaagtacagaggtgaagtggagcaagatggcagaatagcaagctcctttgatggccatccgcacaaatgtctacacagaaaaagcaccttcacaagaaccaaaaatcagcctgttttgtgcaacttccaagtcaagattatgaacattttcagactttttgcaagacagaattcaatggattaacaatcagccttatttgcttggaacggtagaagaaatccttccaagcctctcagaaaatatcagtgtttgggggatgaaagattctgttccacaaggtgtaatttcactcaaagaaaaactgagcacctcacctgatgagcccgtgccacgcagccaccatgttgtctcactcctcaagtctacttgtctttacatttttacctctggaacaacaggtctaccaaaagcagctgtgattagtcagctgcaggttttaaggggttctgctgtcctgtgggcttttggttgtactgctcatgacattgtttatataacccttcctctgtatcatagttcagcagctatcctgggaatttctggatgtgttgagttgggtgccacttgtgtgttaaagaagaaattttcagcaagccagttttggagtgactgcaagaagtatgatgtgactgtgtttcagtatattggagaactttgtcgctacctttgcaaacaatctaagagagaaggagaaaaggatcataaggtgcgtttggcaattggaaatggcatacggagtgat

SEQ ID NO: 19461 - DNA, 3219 bp, Homo sapiens
  source 1..3219: mol_type = unassigned DNA
gggcctcctccctggggtgtgagcaggtcggcgcgccacacttctctaggtggccggacgcgcgcccagggaggagctggcggcggggcccaggctgttccggctgcggcacgccaggggatgtggttagccctgagcctggaggccgaaggtgggcaggcaacactcccaccatgtttcggaggagaatacactaggctagcctaacgacactcggagtgcgagctgcggctggggtaggggcacccctttccagcgggcgcgtgggtcaccaaggagcagttctccgggacccgttgcgtcagagggactgggcggggctgggcggggcaggacgggggcggcgctcaggaaccctggaacccgctggccctgaggccacggaccgagacgtggtgctgagcccctgcgcggtttctggtgcgtagagactgtaaatcgctgcgcttctcagtcatcatcatcccagcttttcccggctcgaattcagcctccaactcaagctcgcgggaaagactacctgagaggagaaaagcttctgtccctggaccttcttctgagggtggtgaggtttgtttagggtcgcagaagcagggaggactgactcagccctcacagagaagaggtctggaaagtcctggggaactcgcagggcacgggccgctgtcgcggttgggaggcgagggcgcagcgctggggttgtagattccaagacccctgagggtggctgtgttggtttctcgcaggagtcggaggctccctgctttccagccgcccagtgacccaagcttaatcttcagcaccacttggggcgaccttttcggtgcaaacctacgattctgtttctcaggattcctccccatcccgcttcgccccggaaaagctgacaagaacttcaggtgtaagccctgagtagtgaggatctgcggtctccgtggagagctgtgcctggaagagaaggacgctggtgggggctgagatcagagctgtcttctggcccagttgcccccatgcttctgtcatggctaacagttctaggggctggaatggtcgtcctgcacttcttgcagaaactcctgttcccttacttttgggatgacttctggttcgtgttgaaggtggtgctcattataattcggctgaagaagtatgaaaagagaggggagctggtgactgtgctggataaattcttgagtcatgccaaaagacaacctcggaaacctttcatcatctatgagggagacatctacacctatcaggatgtagacaaaaggagcagcagagtggcccatgtcttcctgaaccattcctctctgaaaaagggggacacggtggctctgctgatgagcaatgagccggacttcgttcacgtgtggttcggcctcgccaagctgggctgcgtggtggcctttctcaacaccaacattcgctccaactccctcctgaattgcatccgcgcctgtgggcccagagccctagtggtgggcgcagatttgcttggaacggtagaagaaatccttccaagcctctcagaaaatatcagtgtttgggggatgaaagattctgttccacaaggtgtaatttcactcaaagaaaaactgagcacctcacctgatgagcccgtgccacgcagccaccatgttgtctcactcctcaagtctacttgtctttacatttttacctctggaacaacaggtctaccaaaagcagctgtgattagtcagctgcaggttttaaggggttctgctgtcctgtgggcttttggttgtactgctcatgacattgtttatataacccttcctctgtatcatagttcagcagctatcctgggaatttctggatgtgttgagttgggtgccacttgtgtgttaaagaagaaattttcagcaagccagttttggagtgactgcaagaagtatgatgtgactgtgtttcagtatattggagaactttgtcgctacctttgcaaacaatctaagagagaaggagaaaaggatcataaggtgcgtttggcaattggaaatggcatacggagtgatgtatggagagaatttttagacagatttggaaatataaaggtgtgtgaactttatgcagctaccgaatcaagcatatctttcatgaactacactgggagaattggagcaattgggagaacaaatttgttttacaaacttctttccacttttgacttaataaagtatgactttcagaaagatgaacccatgagaaatgagcagggttggtgtattcatgtgaaaaaaggagaacctggacttctcatttctcgagtgaatgcaaaaaatcccttctttggctatgctgggccttataagcacacaaaagacaaattgctttgtgatgtttttaagaagggagatgtttaccttaatactggagacttaatagtccaggatcaggacaatttcctttatttttgggaccgtactggagacactttcagatggaaaggagaaaatgtcgcaaccactgaggttgctgatgttattggaatgttggatttcatacaggaagcaaacgtctatggtgtggctatatcaggttatgaaggaagagcaggaatggcttctattattttaaaaccaaatacatctttagatttggaaaaagtttatgaacaagttgtaacatttctaccagcttatgcttgtccacgatttttaagaattcaggaaaaaatggaagcaacaggaacattcaaactattgaagcatcagttggtggaagatggatttaatccactgaaaatttctgaaccactttacttcatggataacttgaaaaagtcttatgttctactgaccagggaactttatgatcaaataatgttaggggaaataaaactttaagatttttatatctagaactttcatatgctttcttaggaagagtgagaggggggtatatgattctttatgaaatggggaaagggagctaacattaattatgcatgtactatatttccttaatatgagagataattttttaattgcataagaattttaatttcttttaattgatataaacagtagttgattattctttttatctatttggagattcagtgcataactaagtattttccttaatactaaagattttaaataataaatagtggctagcggtttggacaatcactaaaaatgtactttctaataagtaaaatttctaattttgaataaaagattaaattttact

SEQ ID NO: 19462 - DNA, 2616 bp, Homo sapiens
  source 1..2616: mol_type = unassigned DNA
gacgtggtgctgagcccctgcgcggtttctggtgcgtagagactgtaaatcgctgcgcttctcagtcatcatcatcccagcttttcccggctcgaattcagcctccaactcaagctcgcgggaaagactacctgagaggagaaaagcttctgtccctggaccttcttctgagggtggtgaggtttgtttagggtcgcagaagcagggaggactgactcagccctcacagagaagaggattcctccccatcccgcttcgccccggaaaagctgacaagaacttcaggtgtaagccctgagtagtgaggatctgcggtctccgtggagagctgtgcctggaagagaaggacgctggtgggggctgagatcagagctgtcttctggcccagttgcccccatgcttctgtcatggctaacagttctaggggctggaatggtcgtcctgcacttcttgcagaaactcctgttcccttacttttgggatgacttctggttcgtgttgaaggtggtgctcattataattcggctgaagaagtatgaaaagagaggggagctggtgactgtgctggataaattcttgagtcatgccaaaagacaacctcggaaacctttcatcatctatgagggagacatctacacctatcaggatgtagacaaaaggagcagcagagtggcccatgtcttcctgaaccattcctctctgaaaaagggggacacggtggctctgctgatgagcaatgagccggacttcgttcacgtgtggttcggcctcgccaagctgggctgcgtggtggcctttctcaacaccaacattcgctccaactccctcctgaattgcatccgcgcctgtgggcccagagccctagtggtgggcgcagatttgcttggaacggtagaagaaatccttccaagcctctcagaaaatatcagtgtttgggggatgaaagattctgttccacaaggtgtaatttcactcaaagaaaaactgagcacctcacctgatgagcccgtgccacgcagccaccatgttgtctcactcctcaagtctacttgtctttacatttttacctctggaacaacaggtctaccaaaagcagctgtgattagtcagctgcaggttttaaggggttctgctgtcctgtgggcttttggttgtactgctcatgacattgtttatataacccttcctctgtatcatagttcagcagctatcctgggaatttctggatgtgttgagttgggtgccacttgtgtgttaaagaagaaattttcagcaagccagttttggagtgactgcaagaagtatgatgtgactgtgtttcagtatattggagaactttgtcgctacctttgcaaacaatctaagagagaaggagaaaaggatcataaggtgcgtttggcaattggaaatggcatacggagtgatgtatggagagaatttttagacagatttggaaatataaaggtgtgtgaactttatgcagctaccgaatcaagcatatctttcatgaactacactgggagaattggagcaattgggagaacaaatttgttttacaaacttctttccacttttgacttaataaagtatgactttcagaaagatgaacccatgagaaatgagcagggttggtgtattcatgtgaaaaaaggagaacctggacttctcatttctcgagtgaatgcaaaaaatcccttctttggctatgctgggccttataagcacacaaaagacaaattgctttgtgatgtttttaagaagggagatgtttaccttaatactggagacttaatagtccaggatcaggacaatttcctttatttttgggaccgtactggagacactttcagatggaaaggagaaaatgtcgcaaccactgaggttgctgatgttattggaatgttggatttcatacaggaagcaaacgtctatggtgtggctatatcaggttatgaaggaagagcaggaatggcttctattattttaaaaccaaatacatctttagatttggaaaaagtttatgaacaagttgtaacatttctaccagcttatgcttgtccacgatttttaagaattcaggaaaaaatggaagcaacaggaacattcaaactattgaagcatcagttggtggaagatggatttaatccactgaaaatttctgaaccactttacttcatggataacttgaaaaagtcttatgttctactgaccagggaactttatgatcaaataatgttaggggaaataaaactttaagatttttatatctagaactttcatatgctttcttaggaagagtgagaggggggtatatgattctttatgaaatggggaaagggagctaacattaattatgcatgtactatatttccttaatatgagagataattttttaattgcataagaattttaatttcttttaattgatataaacagtagttgattattctttttatctatttggagattcagtgcataactaagtattttccttaatactaaagattttaaataataaatagtggctagcggtttggacaatcactaaaaatgtactttctaataagtaaaatttctaattttgaataaaagattaaattttactgaaatatttta

SEQ ID NO: 19463 - DNA, 2294 bp, Homo sapiens
  source 1..2294: mol_type = unassigned DNA
gagcccctgcgcggtttctggtgcgtagagactgtaaatcgctgcgcttctcagtcatcatcatcccagcttttcccggctcgaattcagcctccaactcaagctcgcgggaaagactacctgagaggagaaaagcttctgtccctggaccttcttctgagggtggtgaggagtcggaggctccctgctttccagccgcccagtgacccaagcttaatcttcagcaccacttggggcgaccttttcggtgcaaacctacgattctgtttctcaggattcctccccatcccgcttcgccccggaaaagctgacaagaacttcaggtgtaagccctgagtagtgaggatctgcggtctccgtggagagctgtgcctggaagagaaggacgctggtgggggctgagatcagagctgtcttctggcccagttgcccccatgcttctgtcatggctaacagttctaggggctggaatggtcgtcctgcacttcttgcagaaactcctgttcccttacttttgggatgacttctggttcgtgttgaaggtggtgctcattataattcggctgaagaagtatgaaaagagaggggagctggtgactgtgctggataaattcttgagtcatgccaaaagacaacctcggaaacctttcatcatctatgagggagacatctacacctatcaggatgtagacaaaaggagcagcagagtggcccatgtcttcctgaaccattcctctctgaaaaagggggacacggtggctctgctgatgagcaatgagccggacttcgttcacgtgtggttcggcctcgccaagctgggctgcgtggtggcctttctcaacaccaacattcgctccaactccctcctgaattgcatccgcgcctgtgggcccagagccctagtggtgggcgcagatttgcttggaacggtagaagaaatccttccaagcctctcagaaaatatcagtgtttgggggatgaaagattctgttccacaaggtgtaatttcactcaaagaaaaactgagcacctcacctgatgagcccgtgccacgcagccaccatgttgtctcactcctcaagtctacttgtctttacatttttacctctggaacaacaggtctaccaaaagcagctgtgattagtcagctgcaggttttaaggggttctgctgtcctgtgggcttttggttgtactgctcatgacattgtttatataacccttcctctgtatcatagttcagcagctatcctgggaatttctggatgtgttgagttgggtgccacttgtgtgttaaagaagaaattttcagcaagccagttttggagtgactgcaagaagtatgatgtgactgtgtttcagtatattggagaactttgtcgctacctttgcaaacaatctaagagagaaggagaaaaggatcataaggtgcgtttggcaattggaaatggcatacggagtgatgtatggagagaatttttagacagatttggaaatataaaggtgtgtgaactttatgcagctaccgaatcaagcatatctttcatgaactacactgggagaattggagcaattgggagaacaaatttgttttacaaacttctttccacttttgacttaataaagtatgactttcagaaagatgaacccatgagaaatgagcagggttggtgtattcatgtgaaaaaaggagaacctggacttctcatttctcgagtgaatgcaaaaaatcccttctttggctatgctgggccttataagcacacaaaagacaaattgctttgtgatgtttttaagaagggagatgtttaccttaatactggagacttaatagtccaggatcaggacaatttcctttatttttgggaccgtactggagacactttcagatggaaaggagaaaatgtcgcaaccactgaggttgctgatgttattggaatgttggatttcatacaggaagcaaacgtctatggtgtggctatatcaggttatgaaggaagagcaggaatggcttctattattttaaaaccaaatacatctttagatttggaaaaagtttatgaacaagttgtaacatttctaccagcttatgcttgtccacgatttttaagaattcaggaaaaaatggaagcaacaggaacattcaaactattgaagcatcagttggtggaagatggatttaatccactgaaaatttctgaaccactttacttcatggataacttgaaaaagtcttatgttctactgaccagggaactttatgatcaaataatgttaggggaaataaaactttaa

SEQ ID NO: 19464 - DNA, 4389 bp, Homo sapiens
  source 1..4389: mol_type = unassigned DNA
ggagggggtccttgccaggcctggggcggccgggggcggtcctgggctcccctccgtcccgcctccaggcctcggggcctggctggccgacgtggcgttggcggcgctgcgcgcgggagggcagggcaggagggacagaggcgggggcgggccggaaagtttgtccggcggcagcggcgttggggactccggcgggggatgcgcgcccggcccctcagcgcccccagcacgccgccgagtcccgctcgccatgggccactccccacctgtcctgcctttgtgtgcctctgtgtctttgctgggtggcctgacctttggttatgaactggcagtcatatcaggtgccctgctgccactgcagcttgactttgggctaagctgcttggagcaggagttcctggtgggcagcctgctcctgggggctctcctcgcctccctggttggtggcttcctcattgactgctatggcaggaagcaagccatcctcgggagcaacttggtgctgctggcaggcagcctgaccctgggcctggctggttccctggcctggctggtcctgggccgcgctgtggttggcttcgccatttccctctcctccatggcttgctgtatctacgtgtcagagctggtggggccacggcagcggggagtgctggtgtccctctatgaggcaggcatcaccgtgggcatcctgctctcctatgccctcaactatgcactggctggtaccccctggggatggaggcacatgttcggctgggccactgcacctgctgtcctgcaatccctcagcctcctcttcctccctgctggtacagatgagactgcaacacacaaggacctcatcccactccagggaggtgaggcccccaagctgggcccggggaggccacggtactcctttctggacctcttcagggcacgcgataacatgcgaggccggaccacagtgggcctggggctggtgctcttccagcaactaacagggcagcccaacgtgctgtgctatgcctccaccatcttcagctccgttggtttccatgggggatcctcagccgtgctggcctctgtggggcttggcgcagtgaaggtggcagctaccctgaccgccatggggctggtggaccgtgcaggccgcagggctctgttgctagctggctgtgccctcatggccctgtccgtcagtggcataggcctcgtcagctttgccgtgcccatggactcaggcccaagctgtctggctgtgcccaatgccaccgggcagacaggcctccctggagactctggcctgctgcaggactcctctctacctcccattccaaggaccaatgaggaccaaagggagccaatcttgtccactgctaagaaaaccaagccccatcccagatctggagacccctcagcccctcctcggctggccctgagctctgccctccctgggccccctctgcccgctcgggggcatgcactgctgcgctggaccgcactgctgtgcctgatggtctttgtcagtgccttctcctttgggtttgggccagtgacctggcttgtcctcagcgagatctaccctgtggagatacgaggaagagccttcgccttctgcaacagcttcaactgggcggccaacctcttcatcagcctctccttcctcgatctcattggcaccatcggcttgtcctggaccttcctgctctacggactgaccgctgtcctcggcctgggcttcatctatttatttgttcctgaaacaaaaggccagtcgttggcagagatagaccagcagttccagaagagacggttcaccctgagctttggccacaggcagaactccactggcatcccgtacagccgcatcgagatctctgcggcctcctgaggaatccgtctgcctggaaattctggaactgtggctttggcagaccatctccagcatcctgcttcctaggccccagagcacaagttccagctggtcttttgggagtggcccctgcccccaaaggtggtctgcttttgctggggtaaaaaggatgaaagtctgagaatgcccaactcttcattttgagtctcaggccctgaaggttcctgaggatctagcttcatgcctcagtttccccattgacttgcacatctctgcagtatttataagaagaatattctatgaagtctttgttgcaccatggacttttctcaaagaatctcaagggtaccaatcctggcaggaagtctctcccgatatcacccctaaatccaaatgaggatatcatcttttctaatctcttttttcaactggctgggacattttcggaagggggaagtctctttttttactcttatcattttttttttttgaggtggagtctcattctgttgcccaggctggcctgatcttggctcactgcaacctccacctcctgagttcaagcgattcttgtgcctcagcctcctaagcagctgggactacaggcgcatgcaaccatacccagctaatttatttttagcagagatggggtttcactgtgttggccaggctggtcgtgaactcctgagctcaagtgatccacccacctcagcctcccagagtgctaggattacaggccttttgactcttttatctgagttttattgacccctctaattctcttacccagaatatttatccttcaccagcaactctgactctttgacgggaggcctcagttctagtccttggtctgctggtgtcattgctgtaggaatgaccacgggcctcagtttccccatttgtataatgggaagcctgtaccaggtcattcttaagatttctcctgactccagtgagctggaattctaaatgctggtctaggagctgtctccaggatggtgcaggatggctttgcggaaaggagatgggtttggaggccaacaaacctgcttgtcaatattgcctttgcctcttggcagcccttgaacttgagtaaataacaactccctgaacctcagtttcctcatctgcagaatggggataattatgtcccaggggtatatttagaccctgtttcctttcaggagggtccccagctggtccagggcctgggaaatttctacttatcctcattacccaggtccctcctttggaccctgtaaagggtcagggtgaatcagatgggggactgagcaagtagctatgactgcagatcatgtaaggaagggactgacaagaagctcccagatgctggggagaatgaagagctaaaatagatcctaggtgctggatgctttgtcatccatgcgtgcacatatgggtgctggcagagcccccaaggactctggcctctcgagttctcctatcttctccattctagatgcttcccttgtatccagtgatgtgctggagctggctttgccaagcttgtgagagctggttgctacattttcaggatttttacaagttggtaaacacagccattataaaaaattaaatgatttaaatttataattaagtaaattacattaaaacaaaaaaattatactcaaaattcattacttaattttactacctgttactattatctgtgcttttgaggctatttctacatagtaactcttatggagacctaggggagacaccgcgcatctcttcctgattccccactcaatgacatcatgttagtctttggttgcttaactggctgtggggagtgtttttgtatcacaaagattagagaggactacacatcagggcttgatttattgtttgttgattttctagacttcagaacatgctggataaaatgtcagtaatgcaaattaaactttaaagtatgtcttgtttgtagccaatacatggtgtatagcaccaaaaaatggagggattattcttccagtagttgaacactgtcatccgtttcagctgacagctgctcaaatcatttaagaaggagttctgacattcattttcattgttttacttttgtcttcctcactagtgtaaacaaaaatttcaaccagcattcatgccgaacctatacccattcttcagtgcctagctgtacagttatcagggatttttatttgtagtctaattttgtcaaatcatggccaaatcgcagtgatagttgactttggatacaaggtttggcaaaaaaaaaaatattaacaaaatattctgtaagaatcaattgtctatatggaatttaggataaagaatatttacaataaagaatatttacaataaagagtttattattatttgtaagttgtgtgcaacaaacataccctttatctctgtaaaatttatacacacaaaaattaacaaaagattctgtaagaattaattggctatatggaatttaggatagaatatttacaataaagagtatttacaataaagagtttgttattatttgtaaa

SEQ ID NO: 19465 - DNA, 497 bp, Homo sapiens
  source 1..497: mol_type = unassigned DNA
cctcagcgcccccagcacgccgccgagtcccgctcgccatggcgcccactcgggcccaggcactctcccgggcgccctgatccgacagccccaggcaagtgcagctgttcctggtctgcagatgaagaaatggaggctccgaaagaagcaaagcagttcatcgattcgctgagcgcggttgtgccccaggcgctgttgtgggcctggggacgctgtcgcgaacgaaactgcgaacaaaacagacgaaccccctcctctggacgtgattctgcagagaggggacagagaaggagattctaacacagcattggggtgggacgcgtggggaatggctttgttgccactcgggactagggctctatttttctctctgcattcagaagcctcgaaggatcagtcgttgattcttgagtgagcacctactacgtgccagacattgatataggggttagagcttcagcaatgaacaaaatagacaataaacctctctctcatgg

SEQ ID NO: 19466 - DNA, 586 bp, Homo sapiens
  source 1..586: mol_type = unassigned DNA
agatgtgtatacctggaggctccttggggaggtggcacaggacctgggactgaagagggagagtagaggaacaaggggaccctttccttggggaacaaggacagtgcacgtaggaggcccagcacgtgcagtggtggagcggcatgaaagcatacagccactccccacctgtcctgcctttgtgtgcctctgtgtctttgctgggtggcctgacctttggttatgaactggcagtcatatcaggtgccctgctgccactgcagcttgactttgggctaagctgcttggagcaggagttcctggtgggcagcctgctcctgggggctctcctcgcctccctggttggtggcttcctcattgactgctatggcaggaagcaagccatcctcgggagcaacttggtgctgctggcaggcagcctgaccctgggcctggctggttccctggcctggctggtcctgggccgcgctgtggttggcttcgccatttccctctcctccatggcttgctgtatctacgtgtcagagctggtggggccacggcagcggggagtgctggtgtccctctatgaggcaggcatcaccgt

SEQ ID NO: 19467 - DNA, 7003 bp, Homo sapiens
  source 1..7003: mol_type = unassigned DNA
ctgccggcccgcggagccgcgtccccccgggcagccccgggcccctgccctatgtcccgcaaggcaagcgagaatgtggagtacacgctgcggagcctgagcagcctgatgggcgagcggcgcaggaagcagccggagccggacgcggcgagcgcggccggggagtgcagcctcctggctgccgccgaatcgagcaccagcctgcagagcgcgggcgcgggcggcggcggcgtcggggacctggagcgcgcggcgcggcggcagttccagcaggacgagacccccgccttcgtgtacgtggtggccgtcttctccgcgctgggcggcttcctgtttggctatgacaccggggtggtgtcaggggccatgctgctgctcaagcggcagctcagtctggacgcgctgtggcaggagctgctggtgtccagcacggtgggggcggctgccgtctcggcgctggccggaggcgccctcaacggcgtcttcggccgccgcgctgccatcctcctggccagtgccctcttcaccgccggctccgcggtgctggctgcggccaacaacaaggagacactgctcgccggccgcctggtcgtgggactcggcatcggcattgcttctatgacagtgccagtgtacattgcggaggtctcaccacccaatttaagaggccgattagtcaccattaataccctcttcatcacaggagggcagttctttgcaagtgttgttgatggagccttcagttatctccagaaggatggatggaggtacatgttgggacttgcagcagttccggcggttatacagttttttggctttctctttttgcctgaaagccctcgatggcttattcagaaaggacagactcagaaggcccgtagaattttatctcagatgcgtggtaaccagaccattgatgaggaatatgatagcatcaaaaacaacattgaagaggaggaaaaagaggttggctcagctggacctgtgatctgcagaatgctgagttatcccccaactcgccgagctttaattgtgggttgtggcctacaaatgttccagcagctctcaggcattaacaccatcatgtactacagtgcaaccattctgcagatgtctggtgttgaagatgatagacttgcaatatggctggcttcagttacagccttcacaaatttcattttcacacttgtgggagtctggcttgttgagaaggtgggccgcagaaagcttacctttggtagtttagcaggtaccaccgtagcactcattattcttgccttgggatttgtgctatcagcccaagtttccccacgcatcacttttaagccaatagctccgtcaggtcagaacgccacttgcacaagatacagttactgtaatgaatgtatgttggatccagactgcggtttctgctacaagatgaacaaatcaactgtcattgactcctcctgtgttccagttaataaagcatctacaaatgaggcagcctggggcaggtgtgaaaatgaaaccaagttcaaaacagaagatatattttgggcttacaatttctgccctactccatactcctggactgcacttctgggccttattttatatcttgtcttctttgcacctggaatgggaccaatgccttggactgtgaattctgaaatatatcccctttgggcaagaagtacaggaaatgcatgttcatctggaataaactggattttcaatgtcctggtttcactaacatttttacacacagcagagtatcttacatactatggagctttcttcctctatgctggatttgctgctgtgggactccttttcatctatggctgtcttcctgagaccaaaggcaaaaaattagaggaaattgaatcactctttgacaacaggctatgtacatgtggcacttcagattctgatgaagggagatatattgaatatattcgggtaaagggaagtaactatcatctttctgacaatgatgcttctgatgtggaataattttcagctgctcatatatttagttatttaaacaaactggggggagaagaacagcaattggtgacttcactgccctgcttctaatctggttctttccacagcctagttttgattgacttcatattctagaatacttgattaggaggaagatacaaccatgatgactttttttttccacaaggaacaatattttaaaaaatatttacagagattttaatctaataattcttaagcaaatgtgtgtaatgccttcctgaaatagtctaaaatgaatattgtacccagtgacttcagtggtatccttttttcctaagaccatttataattattagtggcaacagagtcagtgctaatctagccaaattacatatgtataatatatttataaaggattctgggagatggtccaagggtgttctgtgtcaaaagatggcctattggccctcagttttcctacagagtagtggcttatctctgatcagctgttacaaactaaattccatgtaagctttcatcaacaaattccaaagtgcctcctacaagggcacagctgtccgtatctcctttggattccatatttttgtttctctccaattcagatattgggagttcttcagatactgactctgcacactatcttttgaacattatgaaaatataatctgtcgggttgttttcatacttcttttttttgcatcagtgataaggcatacatttgcgcagatgagctaggaagttttgagaagtaccttttatgttcagaaagtaacagattaaaggtttttatgggttccaaattggttagtcacttaggtatgcaattataaatgcaaaatagtgccagatctttaactgtatatcagggtcagtttttgttcatgcccaaatcactacaccttcctcattggccttggagtcctactatttcgtgccttcatttgtgttacatacatagctgcaagcaaaccatttttcccctttcttttattcaaacaataatttttgaaacaaaaaagaggaaggaaatcagtggcagaaataatcctgctgttattggtgtttgtttaataaaaataatgggacttttttcttaactttttattagctcttcctaagggaaatgtcacatattattatttaattgtacttgtctttttttactttaagagcataaactcgtttttattttgcacacttttctcattttcctgagaatttaccagaaaaaaaaaagatacatagatttgtctctgtgtttttcttattcttggcttagtttttccttcttgtgtaaaaattgagattgcctattggaacagataattggttctaatatagcacgtctataagaaatgcaggcttaattatatttccacaatgtctttccaaggtattcattggtttttatggtaattcatcactgaactcttaatttttgcttttctattaagaactatatagtatgtacaaaattacttgatcacaaaattacttgctagttccaggaaaaatatgaatgaatcttctgtggccagttaggaatacatcagtttgatgcatttttaaatggctctaaacatctaataaggtactgtatttggagagaaaaggtggctatctccatattcaaaatatttcttccagtctccaagatactctattcttttaatgtctggcttgttcctatcacagttatcaagctgagaatacagctgaggaagttcattctctaagtcaccagaggtataatatgtgcttaaactgtcaatttagtgccctaaaaatccattaaccaaaaacaaaaacgttttctccctttggtcatttcatataataaaaaaaattaatattttatagaggttttttccttgaattaggtgctttaacaattgatttccaagggaatattagtattgattttttcctcagaaaagcagatatgatttaatagggaaaattattattctattgatatttcttatctcataagaaatttcttatctaatattttacacaggtaaattgaagtgaaaaataagctactatatggtacaatcaaaatataataaggagaaaaagtagaccaataaagtgctctctaaaaatttattttttggacttaatcaaaataattgcctcaatccttctctttattgtatatgtagccttaactaactatatacttataaactcagctgggctgatgcacagtaactttattaaaggagaaactggactcttgttatttcctaaagcagaacatggcctgttctccctgatataagaaaacaatgttttcaactttataaccataaatgcacataataacagggaaaattagccacagttctcctcccctactcccctgagcccctactttaaaggactatttgttatttatatagtgttaaagataatattccatatctttgaagtataagacagagaggcacagtataagaattatttataactttttagaaacaattacttgaaaaggaaccttatacaattagggtattatttttagatttggtgaacatttatagtatattaaaaattaaatgtttaaattttgcaggtttttttatattaggcaccttttaagttcccagcatatttggctaccactatcaacttggaaacattccatttgtagtatcatcaaatatatattttgtaggacaatttatatatgatgtgatttgacctaccatattaaagcagacacagattacgtatcatgctttcaaccaaaattacagacttcctttgaaacatgctgcagatttgatagaggtatattatgtcttaggaaaatacaatgaagaaggtccaaatccctattgaggctggatgtctgatctgcactagacttaagaggatatatcatttcatctgcatataaacacatagggctgaatgtgatgtcaaaagggtttgccgttaataattttcttcaatgtaaacattcctaataattttgattgttgctccttagtcaatcatttcccaaaacatgattatttttaatatatgtaaaatatttaaataataaataataaaaggtaatgtgtccattttaaattttgttcccagccatacacagtagttccctgatacaaaatgctatgagaataccgactattttttcataatttaattttaccactgaacctgattttagtacataagagtctaaatattaagttattcactctaaaaggggaaatcagtaaaagcaaggaatttatgaaatttttgctgtaatttcagtatctgttatacaggggaagaatgatcaggaaaaatataagctgacaacttacccttttgctttttaacaacaaaataatattgaaaatatattagaataactcacagatccagaagttggtggaaatggaagaatgttttagaaaataccatccatatgtttatctaagaaagtctcagaatttagtgacactaatacagttcataaatactgtaatacagtggagagagttggaatgttattttggttttatttcatcagcacaattattaaaaacaacaaaattaatgagacgttttgttataatcagatttttttttaccatattgcaagttataaaatgtcaacttatactaagtacctaacaactgacttttattcacttgttgtgacaagtttttaattaccaaattaagaccttttcagtatctatgagtaaaagaaatagatgattatatcagaccaggagcagagaatttataatatgtgctttatagcaaaatgtattaaattgtggttaaaatttatagctcatatgtagctgctgccaataagaaggctcagaattgttctgtggattaatttttacatcctgttttctgtcacttttaccaatcttcttggcctcatgtacaataatgtaaagccaatttgatgaaatggttcaggttgtagcagtctataaattgtcggtacattcagctcttctaggtgagcaatactgctgctatttttctagaaatagcaatcatttaaaaatgccaaatagctaactgctaccaactctttcttgtatcttgtctctttagagaaggaaatttttgtgtgccagtaatcatcaaagaggtgttttataagagtgttgatgttcagaagttcatgaaagtattttatccgtataatttgctagtgagctaaaacaatataatttatgtaaatctttatatgtacaaaatatatagtctgttgtacttgagtaatttggtctatggaattttaaatgccttcatttagcagtaatattcacatttttattttagacagttaagttcatgtgtttgattttgtcatgtcagcataaatgagaaaaagaagtggatcatgcagctaatgagtaaccaacattttgtaaagttttaaagttttagcaaacaacattattccatctcatttaaaggttaaaaaagaagagacaactctagccaaagtagaaatttatattctacacgtccaaactgtctcctagcagcttttggactatatatcacttgatgttaaagtatcttttatttgtaataaatattcaaatttctatttagaagctctaatgtatacctagattaaatcaaatcacagttttatgcttttaaaatatatgtatttcaaactgtatattttaatttctgagtgcatgttatatagtatttaatacttcagatgtcttggcaaattcaatataagtatttattcccacaagcgatatatgggatatctcttaaaaattatgaatatgtaccatttccttcaaagtcatcctagcctatgctgtatcaaaagtattgtatattttatggagatttagtgatatacatgtaaatgttttttaagttattttattgaagttcaatctttacataaaattaaaatctttttttaaaaaaagtgtcagtgccagaactgtaaatgaaaataatcaaataaaagttaaaataattcattactcattaa

SEQ ID NO: 19468 - DNA, 1026 bp, Homo sapiens
  source 1..1026: mol_type = unassigned DNA
tcacaaatttcattttcacacttgtgggagtctggcttgttgagaaggtgggccgcagaaagcttacctttggtagtttagcaggtaccaccgtagcactcattattcttgccttgggatttgtgctatcagcccaagtttccccacgcatcacttttaagccaatagctccgtcaggtcagaacgccacttgcacaagatacagttactgtaatgaatgtatgttggatccagactgcggtttctgctacaagatgaacaaatcaactgtcattgactcctcctgtgttccagttaataaagcatctacaaatgaggcagcctggggcaggtatatcactcattttaccatacgaatatataataatatttcaaaacgaggcttatgtttaagttttcagagtgcttgcacttatagcagttcttttaaactggccttcataactacattactttgcagcatatactggtgatagtggatgcaaagcattgcaattgtgtgtttcacacagagtagaaagcactcaggcctagacttttggagacccagatttctctaataaggtataggagtttggatctttagttttaggcagctattcacaaatactgccaaggcaatttctcccactgcatattgtttaattgcactgtatttccaaactcccaagcttttaaatgaaagaaaactgtaaagtcaaaatgaattactatcacgttaggttgggcacagtgcatcacgactgtaatcccagcactttgggaggctgaggcaggcagatcacttgaggtcaggagttcgagaccaccctggccaacatggtgaaaccccacctctacaaaaatacaaaaattagctgagagtggtggcacatgcctgtaatcccagctgctcaggaggctgaggcaggagaaaggagaatcacttgaacctgggagatagagattgcagtgagctgagatcaaaccactgcactccagcctagacaacagagcaagactctgcctcaaaaaaaagaaaaaaaa

SEQ ID NO: 19469 - DNA, 436 bp, Homo sapiens
  source 1..436: mol_type = unassigned DNA
gtgcattggttaattcaataaatatatattggtgatccaccctgcagggggctgcatgctgttctacagatacagagttgtctctcagatccaagcctccttcagctcaaagtgacttccaaagttgctgtggccaaaagagggagaaatcgaagagaccagccagctctcacctggctcagcgcatgtcactttccttggccaaaacaagtcccaaggccccaagcttactgcacaagagagtggaaaatgcagagaagcacatggaatccagtatatggtgagcaccagttgtctctgccaacatgacggtaactcttttcatttttcagttactgtaatgaatgtatgttggatccagactgcggtttctgctacaagatgaacaaatcaactgtcattgactcctcctgtgttccagttaataaagcatcta

SEQ ID NO: 19470 - DNA, 3082 bp, Homo sapiens
  source 1..3082: mol_type = unassigned DNA
cgcctcccgcccgctccgcagcgccagctcggcaggcgcggggcgtgagtgtggagtgagacccgccgggctccaactccgcagcgtcggagcgcggcgggcagcaactttctccccggagcggccgtggcggcggctgctgccgtggcagccggagcggaagccgggaggaagaaagcggcggcagcggcggttgctcccgccggctcgggctgtctagctcgccgagactgccggcccgcggagccgcgtccccccgggcagccccgggcccctgccctatgtcccgcaaggcaagcgagaatgtggagtacacgctgcggagcctgagcagcctgatgggcgagcggcgcaggaagcagccggagccggacgcggcgagcgcggccggggagtgcagcctcctggctgccgccgaatcgagcaccagcctgcagagcgcgggcgcgggcggcggcggcgtcggggacctggagcgcgcggcgcggcggcagttccagcaggacgagacccccgccttcgtgtacgtggtggccgtcttctccgcgctgggcggcttcctgtttggctatgacaccggggtggtgtcaggggccatgctgctgctcaagcggcagctcagtctggacgcgctgtggcaggagctgctggtgtccagcacggtgggggcggctgccgtctcggcgctggccggaggcgccctcaacggcgtcttcggccgccgcgctgccatcctcctggccagtgccctcttcaccgccggctccgcggtgctggctgcggccaacaacaaggagacactgctcgccggccgcctggtcgtgggactcggcatcggcattgcttctatgacagtgccagtgtacattgcggaggtctcaccacccaatttaagaggccgattagtcaccattaataccctcttcatcacaggagggcagttctttgcaagtgttgttgatggagccttcagttatctccagaaggatggatggaggtacatgttgggacttgcagcagttccggcggttatacagttttttggctttctctttttgcctgaaagccctcgatggcttattcagaaaggacagactcagaaggcccgtagaattttatctcagatgcgtggtaaccagaccattgatgaggaatatgatagcatcaaaaacaacattgaagaggaggaaaaagaggttggctcagctggacctgtgatctgcagaatgctgagttatcccccaactcgccgagctttaattgtgggttgtggcctacaaatgttccagcagctctcaggcattaacaccatcatgtatgtatttctttctggctttttactgaaaagattgtgaaaggattattttatgtgaaatagtgaaaagtatttcatgtaaatactagactcagtgatttgttctgattaaatgtatgaattctccttttgggagatactgactttacaattttttaattccagtaatttgttactagataaaggtgatttattttgtttgttatatgattggctttatttgattccataaaatttctcttttacgccatccaatacctccttgtattctgagcttaaatgtgtcattttttctaagccatttcttgatgctggttggaaagcaaaatagaaggaaatcacctggcattgccagagattatgggcacacagataactaattcatttctttttggtgcagtctactacagtgcaatgtgataaggacattagtagaagtacgtttattataaccagagtatggtagaggggagattgagtgggaaggagagtgaggaatacagaaaaattccctgttctctaattttaagagtaattcccaaagctgtatgtgtgctgagggtgggaaggactaaatattaagggctctactaggtttccctcattcagtattaaacccatttttgagggcctctgttgcactagacctacagcagtaactaaaatagacctgggtcttgtcctcatggatgtacaggctggtagaggaagcacacattaaataaactcacagttaaatataagatttcaaactatgataagggccatacaggactctctcaattctctacagagtagacttttaagatcctaaatcataaaatacagtttagagaaggttatgtgctttcccagggcacatattgttagattaaaagctgccacatcttagaagtcctccccactccctgcctattgattgaatttttttcattaagaaaatacaaattatgtaaaattaaattttctttggtaaaccatttgtatttgagactcttgattttttttaattacttgagatatgatgagttatttagtgactgtttgagaagagtgaattgattaaaatatttttaaaaaagaaggattaggacccaatgagccagtatattaaatcaagatttgttgagaaactccattttctatacattcacacactttgtggatttgactttaatcataatccctgttgaacttcaactttcgagactacatgttcaatattttgttctctcctgcttctctctgacattaactttcattttttctcacctttaccagctctattaaggcccatctgttggtctagtgccaggcacgtttgattgcttgttctctgaatttggcacatcatgacttgttctgagatgtgtccaccttctgcagtctggtggaagtatagaattgcagctaggctaggaccaagcatcaaataattaaatccattaataatcctatgtgaattcgttagttgaccaacctaatatttgttctggttttgaaaatatgttttgtttgttatgctttttttcctaagcatttaaacttgacaagtataaaagcatagaaagtgaaggatttttcttgtactttttttgttttcacttaaaactggtatcacaaacagagccaactctagtttatgggtagtgactggggccagtgtattcctagtttgaaatgactgtcataatccattagcagtagctagtgtaaattgagctgattgatgctgtcaaattttaataaaacattcatttctccaaa

SEQ ID NO: 19471 - DNA, 3915 bp, Homo sapiens
  source 1..3915: mol_type = unassigned DNA
gtggggtggggtggggctgggggcttgtcgccctttcaggctccaccctttgcggagattataaatagtcatgatcccagcgagacccagagatgctgtaatggtaagactttggatccttcctgaggacgtggagaaaacttgctgctgagaaggacattttgaaggttttgttggctgaaaaagctgtttctggaatcacccctagatctttcttgaagacttgaattagattacagcgatggggacacagaaggtcaccccagctctgatatttgccatcacagttgctacaatcggctctttccaatttggctacaacactggggtcatcaatgctcctgagaagatcataaaggaatttatcaataaaactttgacggacaagggaaatgccccaccctctgaggtgctgctcacgtctctctggtccttgtctgtggccatattttccgtcgggggtatgatcggctccttttccgtcggactcttcgtcaaccgctttggcaggcgcaattcaatgctgattgtcaacctgttggctgtcactggtggctgctttatgggactgtgtaaagtagctaagtcggttgaaatgctgatcctgggtcgcttggttattggcctcttctgcggactctgcacaggttttgtgcccatgtacattggagagatctcgcctactgccctgcggggtgcctttggcactctcaaccagctgggcatcgttgttggaattctggtggcccagatctttggtctggaattcatccttgggtctgaagagctatggccgctgctactgggttttaccatccttcctgctatcctacaaagtgcagcccttccattttgccctgaaagtcccagatttttgctcattaacagaaaagaagaggagaatgctaagcagatcctccagcggttgtggggcacccaggatgtatcccaagacatccaggagatgaaagatgagagtgcaaggatgtcacaagaaaagcaagtcaccgtgctagagctctttagagtgtccagctaccgacagcccatcatcatttccattgtgctccagctctctcagcagctctctgggatcaatgctgtgttctattactcaacaggaatcttcaaggatgcaggtgttcaagagcccatctatgccaccatcggcgcgggtgtggttaatactatcttcactgtagtttctctatttctggtggaaagggcaggaagaaggactctgcatatgataggccttggagggatggctttttgttccacgctcatgactgtttctttgttattaaaggataactataatgggatgagctttgtctgtattggggctatcttggtctttgtagccttctttgaaattggaccaggccccattccctggtttattgtggccgaactcttcagccagggcccccgcccagctgcgatggcagtggccggctgctccaactggacctccaacttcctagtcggattgctcttcccctccgctgctcactatttaggagcctacgtttttattatcttcaccggcttcctcattaccttcttggcttttaccttcttcaaagtccctgagacccgtggcaggacttttgaggatatcacacgggcctttgaagggcaggcacacggtgcagatagatctggaaaggacggcgtcatggagatgaacagcatcgagcctgctaaggagaccaccaccaatgtctaagtcgtgcctccttccacctccctcccggcatgggaaagccacctctccctcaacaagggagagacctcatcaggatgaacccaggacgcttctgaatgctgctacttaattcctttctcatcccacgcactccatgagcaccccaaggctgcggtttgttggatcttcaatggctttttaaattttatttcctggacatcctcttctgcttaggagagaccgagtgaacctaccttcatttcaggagggattggccgcttggcacatgacaactttgccagcttttcctcccttgggttctgatattgccgcactaggggatataggagaggaaaagtaaggtgcagttcccccaacctcagacttaccaggaagcagatacatatgagtgtggaagccggagggtgtttatgtaagagcaccttcctcacttccatacagctctacgtggcaaattaacttgagttttatttattttatcctctggtttaattacataattttttttttttaactttaagtttcaggatacatgtgccgaatgtgcaggtttgttacataggtatatatatgccatgatggaaatatttatttttttaagcgtaattttgccaaataataaaaacagaaggaaattgagattagagggaggtgtttaaagagaggttatagagtagaagatttgatgctggagaggttaaggtgcaataagaatttagggagaaatgttgttcattattggagggtaaatgatgtggtgcctgaggtctgtacgttacctcttaacaatttctgtccttcagatggaaactctttaacttctcgtaaaagtcatatacctatataataaagctactgatttcctttggagcttttttctttaagataatagtttacatgtagtagtacttgaaatctaggattattaactaatatgggcattgtagttaatgatggttgatgggttctaattttggatggagtccagggaagagaaagtgatttctagaaagcctgttcccctcactggatgaaataactccttcttgtagtagtctcattacttttgaagtaatcccgccacctatctcgtgggagagccatccaaataagaaacctaaaataattggttcttggtagagattcattatttttccactttgttctttaggagattttaggtgttgattttctgttgtattttaactcatacctttaaaggaattccccaaagaatgtttatagcaaacttggaatttgtaacctcagctctgggagaggatttttttctgagcgattattatctaaagtgtgttgttgctttaggctcacggcacgcttgcgtatgtctgttaccatgtcactgtggtcctatgccgaatgccctcaggggacttgaatctttccaataaaccaggtttagacagtatgagtcaatgtgcagtgtagcccacacttgagaggatgaatgtatgtgcactgtcactttgctctgggtggaagtacgttattgttgacttattttctctgtgtttgttcctacagcccctttttcatatgttgctcagtctccctttcccttcttggtgcttacacatctcagaccctttagccaaacccttgtcagtgacagtattttggttcttagttctcactgttccctctgctcctggagcctttgaataaaaatgcacgtagctgaggccggatgcggtggctcacgcctgtaatcccagcactttgggaggcctaggcgggcggtcaggggttcgagaccagtctggccaacatcgtgaaaccctgtctctactaaaaatgcaaaaattagccgggcgtggtggcgggcgcctgtaatcccagctacttgggaagctgaggcgggagaatcatgtgaacccgggacgcaggggttgcagtgagcggagatcgcatcattgcactctagcctgggccacagggcgagactccgtctcaaaaaaaaaaaaatgcacatagctatcaagtgtgctttagcttgaaaaggtgaccttgcaacttcatgtcaacttctggctcctcaaacagtaggttggcagtaaggcagggtcccatttctcactgagaagattgtgaatatttccatatggattttctattgttactctggttctttgttttaaaataaaaattctgaatgtacacga

SEQ ID NO: 19472 - DNA, 383 bp, Homo sapiens
  source 1..383: mol_type = unassigned DNA
tctgctcctggagcctttgaataaaaatgcacgtagctgaggccggatgcggtggctcacgcctgtaatcccagcactttgggagaatcatgtgaacccgggacgcaggggttgcagtgagcggagatcgcatcattgcactctagcctgggccacagggcgagactccgtctcaaaaaaaaaaaaatgcacatagctatcaagtgtgctttagcttgaaaaggtgaccttgcaacttcatgtcaacttctggctcctcaaacagtaggttggcagtaaggcagggtcccatttctcactgagaagattgtgaatatttccatatggattttctattgttactctggttctttgttttaaaataaaaattctgaatgtacacg

SEQ ID NO: 19473 - DNA, 4414 bp, Homo sapiens
  source 1..4414: mol_type = unassigned DNA
actttggatccttcctgaggacgtggagaaaacttgctgctgagaaggacattttgaaggttttgttggctgaaaaagctgtttctggaatcacccctagatctttcttgaagacttgaattagattacagcgatggggacacagaaggtcaccccagctctgatatttgccatcacagttgctacaatcggctctttccaatttggctacaacactggggtcatcaatgctcctgagaagatcataaaggaatttatcaataaaactttgacggacaagggaaatgccccaccctctgaggtgctgctcacgtctctctggtccttgtctgtggccatattttccgtcgggggtatgatcggctccttttccgtcggactcttcgtcaaccgctttggcaggcgcaattcaatgctgattgtcaacctgttggctgtcactggtggctgctttatgggactgtgtaaagtagctaagtcggttgaaatgctgatcctgggtcgcttggttattggcctcttctgcggactctgcacaggttttgtgcccatgtacattggagagatctcgcctactgccctgcggggtgcctttggcactctcaaccagctgggcatcgttgttggaattctggtggcccagatctttggtctggaattcatccttgggtctgaagagctatggccgctgctactgggttttaccatccttcctgctatcctacaaagtgcagcccttccattttgccctgaaagtcccagatttttgctcattaacagaaaagaagaggagaatgctaagcagagtgagtatccttcacaccttactacatgaattatatggttgtggtttgttttagggatgattgtactggacctactttctgttacactctttccctgcctctcagaatccaagtgaggagggttctgattactcctgagtaaaattttcagcccctaaagaatgaggtgaaaaggcgggtttaggaatggatgctatcaggcagggtgtgatggctcatgcctgtaatccagcattataagaggccgaggcgggtcacctgaggtcaggagttcaagacctgcctgaaacaacatggagaaaccctgtctctactaaaaatacaaaattagccgggcatgggggcgcatgcctgtaatcccagctacttgggaggctgaggcaggagaatcgtgtgaacccgggaagtggaggttgcagggagctgagatcatgccattgcactccagcctgggcaacaaaagtgaaactctgtctcaaaaaaaaaaaaaggaatggatgctacccatcacctcacctcgtgcggccctttcctggctgccttacaggaagaatgaatttggggcagcacattctcttttatcctttcctctttcttcttttcaccagtcctccagcggttgtggggcacccaggatgtatcccaagacatccaggagatgaaagatgagagtgcaaggatgtcacaagaaaagcaagtcaccgtgctagagctctttagagtgtccagctaccgacagcccatcatcatttccattgtgctccagctctctcagcagctctctgggatcaatgctgtgttctattactcaacaggaatcttcaaggatgcaggtgttcaagagcccatctatgccaccatcggcgcgggtgtggttaatactatcttcactgtagtttctctatttctggtggaaagggcaggaagaaggactctgcatatgataggccttggagggatggctttttgttccacgctcatgactgtttctttgttattaaaggataactataatgggatgagctttgtctgtattggggctatcttggtctttgtagccttctttgaaattggaccaggccccattccctggtttattgtggccgaactcttcagccagggcccccgcccagctgcgatggcagtggccggctgctccaactggacctccaacttcctagtcggattgctcttcccctccgctgctcactatttaggagcctacgtttttattatcttcaccggcttcctcattaccttcttggcttttaccttcttcaaagtccctgagacccgtggcaggacttttgaggatatcacacgggcctttgaagggcaggcacacggtgcagatagatctggaaaggacggcgtcatggagatgaacagcatcgagcctgctaaggagaccaccaccaatgtctaagtcgtgcctccttccacctccctcccggcatgggaaagccacctctccctcaacaagggagagacctcatcaggatgaacccaggacgcttctgaatgctgctacttaattcctttctcatcccacgcactccatgagcaccccaaggctgcggtttgttggatcttcaatggctttttaaattttatttcctggacatcctcttctgcttaggagagaccgagtgaacctaccttcatttcaggagggattggccgcttggcacatgacaactttgccagcttttcctcccttgggttctgatattgccgcactaggggatataggagaggaaaagtaaggtgcagttcccccaacctcagacttaccaggaagcagatacatatgagtgtggaagccggagggtgtttatgtaagagcaccttcctcacttccatacagctctacgtggcaaattaacttgagttttatttattttatcctctggtttaattacataattttttttttttaactttaagtttcaggatacatgtgccgaatgtgcaggtttgttacataggtatatatatgccatgatggaaatatttatttttttaagcgtaattttgccaaataataaaaacagaaggaaattgagattagagggaggtgtttaaagagaggttatagagtagaagatttgatgctggagaggttaaggtgcaataagaatttagggagaaatgttgttcattattggagggtaaatgatgtggtgcctgaggtctgtacgttacctcttaacaatttctgtccttcagatggaaactctttaacttctcgtaaaagtcatatacctatataataaagctactgatttcctttggagcttttttctttaagataatagtttacatgtagtagtacttgaaatctaggattattaactaatatgggcattgtagttaatgatggttgatgggttctaattttggatggagtccagggaagagaaagtgatttctagaaagcctgttcccctcactggatgaaataactccttcttgtagtagtctcattacttttgaagtaatcccgccacctatctcgtgggagagccatccaaataagaaacctaaaataattggttcttggtagagattcattatttttccactttgttctttaggagattttaggtgttgattttctgttgtattttaactcatacctttaaaggaattccccaaagaatgtttatagcaaacttggaatttgtaacctcagctctgggagaggatttttttctgagcgattattatctaaagtgtgttgttgctttaggctcacggcacgcttgcgtatgtctgttaccatgtcactgtggtcctatgccgaatgccctcaggggacttgaatctttccaataaaccaggtttagacagtatgagtcaatgtgcagtgtagcccacacttgagaggatgaatgtatgtgcactgtcactttgctctgggtggaagtacgttattgttgacttattttctctgtgtttgttcctacagcccctttttcatatgttgctcagtctccctttcccttcttggtgcttacacatctcagaccctttagccaaacccttgtcagtgacagtattttggttcttagttctcactgttccctctgctcctggagcctttgaataaaaatgcacgtagctgaggccggatgcggtggctcacgcctgtaatcccagcactttgggaggcctaggcgggcggtcaggggttcgagaccagtctggccaacatcgtgaaaccctgtctctactaaaaatgcaaaaattagccgggcgtggtggcgggcgcctgtaatcccagctacttgggaagctgaggcgggagaatcatgtgaacccgggacgcaggggttgcagtgagcggagatcgcatcattgcactctagcctgggccacagggcgagactccgtctcaaaaaaaaaaaaatgcacatagctatcaagtgtgctttagcttgaaaaggtgaccttgcaacttcatgtcaacttctggctcctcaaacagtaggttggcagtaaggcagggtcccatttctcactgagaagattgtgaatatttccatatggattttctattgttactctggttctttgttttaaaataaaaattctgaatgtacacg

SEQ ID NO: 19474 - DNA, 1030 bp, Homo sapiens
  source 1..1030: mol_type = unassigned DNA
ggctgaggtgggaggattgcttatgcccaggagatcgatgatgcagtgagctattgtagtgccactgccctccagcatgggcaacagagtaagaccctgtctcaaaaaataaaaataaaaataaatccaagccttttgactccacagccactctttgtattgtacgtcagggacaggaggagcttgccgttaattgcttctgggaacctagatactaggttacactgtctttaaatttaattttctctgttccttgctcttacaggataactataatgggatgagctttgtctgtattggggctatcttggtctttgtagccttctttgaaattggaccaggccccattccctggtttattgtggccgaactcttcagccagggcccccgcccagctgcgatggcagtggccggctgctccaactggacctccaacttcctagtcggattgctcttcccctccgctgctcactatttaggagcctacgtttttattatcttcaccggcttcctcattaccttcttggcttttaccttcttcaaagtccctgagacccgtggcaggacttttgaggatatcacacgggcctttgaagggcaggcacacggtgcagatagatctggaaaggacggcgtcatggagatgaacagcatcgagcctgctaaggagaccaccaccaatgtctaagtcgtgcctccttccacctccctcccggcatgggaaagccacctctccctcaacaagggagagacctcatcaggatgaacccaggacgcttctgaatgctgctacttaattcctttctcatcccacgcactccatgagcaccccaaggctgcggtttgttggatcttcaatggctttttaaattttatttcctggacatcctcttctgcttaggagagaccgagtgaacctaccttcatttcaggagggattggccgcttggcacatgacaactttgccagcttttcctcccttgggttctgatattgccgcactaggggatataggagaggaaaagtaagg

SEQ ID NO: 19475 - DNA, 870 bp, Homo sapiens
  source 1..870: mol_type = unassigned DNA
tgagatcatgccattgcactccagcctgggcaacaaaagtgaaactctgtctcaaaaaaaaaaaaaggaatggatgctacccatcacctcacctcgtgcggccctttcctggctgccttacaggaagaatgaatttggggcagcacattctcttttatcctttcctctttcttcttttcaccagtcctccagcggttgtggggcacccaggatgtatcccaagacatccaggagatgaaagatgagagtgcaaggatgtcacaagaaaagcaagtcaccgtgctagagctctttagagtgtccagctaccgacagcccatcatcatttccattgtgctccagctctctcagcagctctctgggatcaatgctgtgttctattactcaacaggaatcttcaaggatgcaggtgttcaagagcccatctatgccaccatcggcgcgggtgtggttaatactatcttcactgtagtttctctatttctggtggaaagggcaggaagaaggactctgcatatgataggccttggagggatggctttttgttccacgctcatgactgtttctttgttattaaaggataactataatgggatgagctttgtctgtattggggctatcttggtctttgtagccttctttgaaattggaccaggccccattccctggtttattgtggccgaactcttcagccagggcccccgcccagctgcgatggcagtggccggctgctccaactggacctccaacttcctagtcggattgctcttcccctccgctgctcactatttaggagcctacgtttttattatcttcaccggcttcctcattaccttcttggcttttaccttcttcaaagtccctgagacc

SEQ ID NO: 19476 - DNA, 943 bp, Homo sapiens
  source 1..943: mol_type = unassigned DNA
ccagcctgggcaacaaaagtgaaactctgtctcaaaaaaaaaaaaaggaatggatgctacccatcacctcacctcgtgcggccctttcctggctgccttacaggaagaatgaatttggggcagcacattctcttttatcctttcctctttcttcttttcaccagtcctccagcggttgtggggcacccaggatgtatcccaagacatccaggagatgaaagatgagagtgcaaggatgtcacaagaaaagcaagtcaccgtgctagagctctttagagtgtccagctaccgacagcccatcatcatttccattgtgctccagctctctcagcagctctctgggatcaatgctgtgttctattactcaacaggaatcttcaaggatgcaggtgttcaagagcccatctatgccaccatcggcgcgggtgtggttaatactatcttcactgtagtttctgtaagttggatggtttggtaattttgaggggagaaaagaatccttgctacagatgttcaaagatggattgcatgaccctaccatcatttagttacctttttgttgcttaattttcctttgggaaaaagagataaatttaatgttggatgtagtcttcactcttcaagcaaatatgggatggatgggaaaggagggagtatagaagggactatatagtatgctttgaacttggaattggaggaaaggtgcttggaaaaactctcaagctctgttactccactgtttttacactaaaacaacaataatcaacagaagttatctgtgatccccagaatatgtgagaatttttccccgtgaggtgtgcaatcagttccgtagtggacaccatctaggtgtcctgcgattttttaattatgacactgtctacctggagatagcatcagatctcacaggttggtggcccagttcccaagactgccccccact

SEQ ID NO: 19477 - DNA, 1784 bp, Homo sapiens
  source 1..1784: mol_type = unassigned DNA
agactttggatccttcctgaggacgtggagaaaacttgctgctgagaaggacattttgaaggttttgttggctgaaaaagctgtttctggaatcacccctagatctttcttgaagacttgaattagattacagcgatggggacacagaaggtcaccccagctctgatatttgccatcacagttgctacaatcggctctttccaatttggctacaacactggggtcatcaatgctcctgagaagatcataaaggaatttatcaataaaactttgacggacaagggaaatgccccaccctctgaggtgctgctcacgtctctctggtccttgtctgtggccatattttccgtcgggggtatgatcggctccttttccgtcggactcttcgtcaaccgctttggcaggcgcaattcaatgctgattgtcaacctgttggctgtcactggtggctgctttatgggactgtgtaaagtagctaagtcggttgaaatgctgatcctgggtcgcttggttattggcctcttctgcggactctgcacaggttttgtgcccatgtacattggagagatctcgcctactgccctgcggggtgcctttggcactctcaaccagctgggcatcgttgttggaattctggtggcccagatctttggtctggaattcatccttgggtctgaagagctatggccgctgctactgggttttaccatccttcctgctatcctacaaagtgcagcccttccattttgccctgaaagtcccagatttttgctcattaacagaaaagaagaggagaatgctaagcagagtgagtatccttcacaccttactacatgaattatatggttgtggtttgttttagggatgattgtactggacctactttctgttacactctttccctgcctctcagaatccaagtgaggagggttctgattactcctgagtaaaattttcagcccctaaagaatgaggtgaaaaggcgggtttaggaatggatgctatcaggcagggtgtgatggctcatgcctgtaatccagcattataagaggccgaggcgggtcacctgaggtcaggagttcaagacctgcctgaaacaacatggagaaaccctgtctctactaaaaatacaaaattagccgggcatgggggcgcatgcctgtaatcccagctacttgggaggctgaggcaggagaatcgtgtgaacccgggaagtggaggttgcagggagctgagatcatgccattgcactccagcctgggcaacaaaagtgaaactctgtctcaaaaaaaaaaaaaggaatggatgctacccatcacctcacctcgtgcggccctttcctggctgccttacaggaagaatgaatttggggcagcacattctcttttatcctttcctctttcttcttttcaccagtcctccagcggttgtggggcacccaggatgtatcccaagacatccaggagatgaaagatgagagtgcaaggatgtcacaagaaaagcaagtcaccgtgctagagctctttagagtgtccagctaccgacagcccatcatcatttccattgtgctccagctctctcagcagctctctgggatcaatgctgtgagtgtgatactttagggtcaaacgtgtcttaaagtatttcacttaaaatgccgggcatggtggcggtgtgcctctgtagtcccagctactcaggaggctgaggtaagaggatcacttgagctcaggagtttcaggttgcagtgagctataattatgccactgcattccagcctggga

SEQ ID NO: 19478 - DNA, 577 bp, Homo sapiens
  source 1..577: mol_type = unassigned DNA
gagatgctgtaatggtaagactttggatccttcctgaggacgtggagaaaacttgctgctgagaaggacattttgaaggttttgttggctgaaaaagctgtttctggaatcacccctagatctttcttgaagacttgaattagattacagcgatggggacacagaagatcataaaggaatttatcaataaaactttgacggacaagggaaatgccccaccctctgaggtgctgctcacgtctctctggtccttgtctgtggccatattttccgtcgggggtatgatcggctccttttccgtcggactcttcgtcaaccgctttggcaggcgcaattcaatgctgattgtcaacctgttggctgtcactggtggctgctttatgggactgtgtaaagtagctaagtcggttgaaatgctgatcctgggtcgcttggttattggcctcttctgcggactctgcacaggttttgtgcccatgtacattggagagatctcgcctactgccctgcggggtgcctttggcactctcaaccagctgggcatcgttgttggaattctggtggcccagatctttgg

SEQ ID NO: 19479 - DNA, 589 bp, Homo sapiens
  source 1..589: mol_type = unassigned DNA
agagatgctgtaatggtaagactttggatccttcctgaggacgtggagaaaacttgctgctgagaaggacattttgaaggttttgttggctgaaaaagctgtttctggaatcacccctagatctttcttgaagacttgaattagattacagcgatggggacacagaaggtcaccccagctctgatatttgccatcacagttgctacaatcggctctttccaatttggctacaacactggggtcatcaatgctcctgagaagtctgttcttccaccaacccttttattttgcagatcataaaggaatttatcaataaaactttgacggacaagggaaatgccccaccctctgaggtgctgctcacgtctctctggtccttgtctgtggccatattttccgtcgggggtatgatcggctccttttccgtcggactcttcgtcaaccgctttggcaggcgcaattcaatgctgattgtcaacctgttggctgtcactggtggctgctttatgggactgtgtaaagtagctaagtcggttgaaatgctgatcctgggtcgcttggttattggcctcttctgcggactctgcac

SEQ ID NO: 19480 - DNA, 763 bp, Homo sapiens
  source 1..763: mol_type = unassigned DNA
agagatgctgtaatggtaagactttggatccttcctgaggacgtggagaaaacttgctgctgagaaggacattttgaaggttttgttggctgaaaaagctgtttctggaatcacccctagatctttcttgaagacttgaattagattacagcgatggggacacagaaggtcaccccagctctgatatttgccatcacagttgctacaatcggctctttccaatttggctacaacactggggtcatcaatgctcctgagaagatcataaaggaatttatcaataaaactttgacggacaagggaaatgccccaccctctgaggtgctgctcacgtctctctggtccttgtctgtggccatattttccgtcgggggtatgatcggctccttttccgtcggactcttcgtcaaccgctttggcaggtattgactagaaactgggcaaggaagtgggctctaccagccacattgaggacaagtgtggagagttagggcagggaggtgatgatgcctttgaataagaacaccttgaattctaatcaagggaaacctagtccaactggccccgaatatgactgcccttgcttggagctctactaccctggagagctcccacccagctgtgcaagagatgaactgtgagtgattggcctttgcagtccagctagggatagttcagaattattccctagtaaactcaactatggggtttctagaaacatacttaatttacaaggtccgaagttgtttacttgtattataaa

SEQ ID NO: 19481 - DNA, 590 bp, Homo sapiens
  source 1..590: mol_type = unassigned DNA
gatgctgtaatggtaagactttggatccttcctgaggacgtggagaaaacttgctgctgagaaggacattttgaaggttttgttggctgaaaaagctgtttctggaatcacccctagatctttcttgaagacttgaattagattacagcgatggggacacagaaggtcaccccagctctgatatttgccatcacagttgctacaatcggctctttccaatttggctacaacactggggtcatcaatgctcctgagaaggtgagtgccaggccacaataattagaatttagaatagggaagttattcctttaagtagggtttcaggaattcagaatttaaggccaggcatggtggcatctgcctggagtcccagctactcctgaggctgaggcttaaagatcacttgagtccaggagttaaacaccatcctgagcaacacagttagtgagggtccctccccaaactaggggattttaagacaaactttgtatctatcctgtccaagactgaagatggagacaatattggtggggaaaattagtggggtcatctaatcgaagcacaaagctcacttactcccggaacgctgg

SEQ ID NO: 19482 - DNA, 3426 bp, Homo sapiens
  source 1..3426: mol_type = unassigned DNA
gtgaagggcgtggcccgcgggggcaggagcgaggtggcgggggcttctcgcgtcttttcccccagccccgctccaccagatccgcgggagccccactgctctccgggtccttggcttgtggctgtgggtcccatcgggcccgccctcgcacgtcactccgggacccccgcggcctccgcaggttctgcgctccaggccggagtcagagactccaggatcggttctttcatcttcgccgcccctgcgcgtccagctcttctaagacgagatgccgtcgggcttccaacagataggctccgaagatggggaaccccctcagcagcgagtgactgggaccctggtccttgctgtgttctctgcggtgcttggctccctgcagtttgggtacaacattggggtcatcaatgcccctcagaaggtgattgaacagagctacaatgagacgtggctggggaggcaggggcctgagggacccagctccatccctccaggcaccctcaccaccctctgggccctctccgtggccatcttttccgtgggcggcatgatttcctccttcctcattggtatcatctctcagtggcttggaaggaaaagggccatgctggtcaacaatgtcctggcggtgctggggggcagcctcatgggcctggccaatgctgctgcctcctatgaaatgctcatccttggacgattcctcattggcgcctactcagggctgacatcagggctggtgcccatgtacgtgggggagattgctcccactcacctgcggggcgccctggggacgctcaaccaactggccattgttatcggcattctgatcgcccaggtgctgggcttggagtccctcctgggcactgccagcctgtggccactgctcctgggcctcacagtgctacctgccctcctgcagctggtcctgctgcccttctgtcccgagagcccccgctacctctacatcatccagaatctcgaggggcctgccagaaagagtctgaagcgcctgacaggctgggccgatgtttctggagtgctggctgagctgaaggatgagaagcggaagctggagcgtgagcggccactgtccctgctccagctcctgggcagccgtacccaccggcagcccctgatcattgcggtcgtgctgcagctgagccagcagctctctggcatcaatgctgttttctattattcgaccagcatcttcgagacagcaggggtaggccagcctgcctatgccaccataggagctggtgtggtcaacacagtcttcaccttggtctcggtgttgttggtggagcgggcggggcgccggacgctccatctcctgggcctggcgggcatgtgtggctgtgccatcctgatgactgtggctctgctcctgctggagcgagttccagccatgagctacgtctccattgtggccatctttggcttcgtggcattttttgagattggccctggccccattccttggttcatcgtggccgagctcttcagccagggaccccgcccggcagccatggctgtggctggtttctccaactggacgagcaacttcatcattggcatgggtttccagtatgttgcggaggctatggggccctacgtcttccttctatttgcggtcctcctgctgggcttcttcatcttcaccttcttaagagtacctgaaactcgaggccggacgtttgaccagatctcagctgccttccaccggacaccctctcttttagagcaggaggtgaaacccagcacagaacttgagtatttagggccagatgagaacgactgaggggccaggcaggggtgggagagccagctctctctacccggcccagagaccccttcctttcctctgcagcactttaaccctctcttccctattatttccgggtggaaaagaatccctgcagcctggtagaattgggaagctgggggaagggtggtctgagcaccccctcattcccctcgtgtgactctcttggattatttatgtgttgtggtttggccgtggccatcagggtgggccactctcccctccctcttccttcccccatcccctttcctccccaccttccccagactcagctccagaataccttcttcgctgctagagaagggggattggagggaagacaggtctagactttctcagtgggacaaaccagagcagagagcaggacaggagacaagaaatccagtttcccaccaccttggactcctcccacaatctgggactttcactgaattcttgccacgcagactctgggcaaaggggtttttttttttttttttttttttttttttgagacagtctcgctctgtcgcccaggctcgagtgcagtggcgtgatcttgcttcactgcaagctgtctcccaggttcacgccattctcctgcctcagcctccggagtagctgggactacaggcgcatgccaccacacctggctaatttattttgtatttttagtatatacgcggtttcaccatgttagccagaatggtctcgatctcctgacctcgtgatctgcctgcctcagcctcccaaagtgctgggattacaggcgtgagccaccgcgcctggcgaagggagttctctcttgacccctgcagggaaaaggactcacctccctcactgcaggctcagccttccagggcaagagggaacaggaaagtatgtgcccatgtgtggcaagatggaaggacggcaggctcccgcctctaggcttggggctctaccccgatggtttcccaaggctgccaagaaggagccctaactttcttcctctcccttcctggaagggtgctgcatccacaggcttttgaccaactaaggcaaagaggggatttgaaaggctgcctggaaacactgggctgggaggagcctttggatatttttatatacgtttgaaaaggggattgagagaagaaaccaaaggtcggttgtactaaatgtatatatatagatacttctataaagtcactgctgaagacaagcatcctattgtggaggtacttgaggatgggctgagacagggaccataactcttcacccctcttcctccctctgtcctgcctcagctcaaggcctcagaatcttctggatgccattgctcatgcccctactcacatttctactcgttgctttattaatagtaaatgctcaataaattgtagctgccagtgccgggcattgctcttggcatttgcagaatactcactctgtgagggaggtgtcagcccatgtcacagatgggcagtgaaacccatgataggggcactcttcaccagggacacagctggagacatggcagcaaggatgccaggccctgcccacggccccacatcccctcctccccaccttcaacagtgagttactagcgattctccaaaacagaagagatggagaccaagaccaca

SEQ ID NO: 19483 - DNA, 2995 bp, Homo sapiens
  source 1..2995: mol_type = unassigned DNA
cgctccaccagatccgcgggagccccactgctctccgggtccttggcttgtggctgtgggtcccatcgggcccgccctcgcacgtcactccgggacccccgcggcctccgcaggttctgcgctccaggccggagtcagagactccaggatcggttctttcatcttcgccgcccctgcgcgtccagctcttctaagacgagatgccgtcgggcttccaacagataggctccgaagatggggaaccccctcagcagcgagtgactgggaccctggtccttgctgtgttctctgcggtgcttggctccctgcagtttgggtacaacattggggtcatcaatgcccctcagaaggtgattgaacagagctacaatgagacgtggctggggaggcaggggcctgagggacccagctccatccctccaggcaccctcaccaccctctgggccctctccgtggccatcttttccgtgggcggcatgatttcctccttcctcattggtatcatctctcagtggcttggaaggaaaagggccatgctggtcaacaatgtcctggcggtgctggggggcagcctcatgggcctggccaatgctgctgcctcctatgaaatgctcatccttggacgattcctcattggcgcctactcagggctgacatcagggctggtgcccatgtacgtgggggagattgctcccactcacctgcggggcgccctggggacgctcaaccaactggccattgttatcggcattctgatcgcccaggtgctgggcttggagtccctcctgggcactgccagcctgtggccactgctcctgggcctcacagtgctacctgccctcctgcagctggtcctgctgcccttctgtcccgagagcccccgctacctctacatcatccagaatctcgaggggcctgccagaaagagtctgaagcgcctgacaggctgggccgatgtttctggagtgctggctgagctgaaggatgagaagcggaagctggagcgtgagcggccactgtccctgctccagctcctgggcagccgtacccaccggcagcccctgatcattgcggtcgtgctgcagctgagccagcagctctctggcatcaatgctgttttctattattcgaccagcatcttcgagacagcaggggtaggccagcctgcctatgccaccataggagctggtgtggtcaacacagtcttcaccttggtctcggtaactgctcacctctggaatggcccgagccactggcttcacctccctgggtgtcccggaggtgttgttggtggagcgggcggggcgccggacgctccatctcctgggcctggcgggcatgtgtggctgtgccatcctgatgactgtggctctgctcctgctggagcgagttccagccatgagctacgtctccattgtggccatctttggcttcgtggcattttttgagattggccctggccccattccttggttcatcgtggccgagctcttcagccagggaccccgcccggcagccatggctgtggctggtttctccaactggacgagcaacttcatcattggcatgggtttccagtatgttgcggaggctatggggccctacgtcttccttctatttgcggtcctcctgctgggcttcttcatcttcaccttcttaagagtacctgaaactcgaggccggacgtttgaccagatctcagctgccttccaccggacaccctctcttttagagcaggaggtgaaacccagcacagaacttgagtatttagggccagatgagaacgactgaggggccaggcaggggtgggagagccagctctctctacccggcccagagaccccttcctttcctctgcagcactttaaccctctcttccctattatttccgggtggaaaagaatccctgcagcctggtagaattgggaagctgggggaagggtggtctgagcaccccctcattcccctcgtgtgactctcttggattatttatgtgttgtggtttggccgtggccatcagggtgggccactctcccctccctcttccttcccccatcccctttcctccccaccttccccagactcagctccagaataccttcttcgctgctagagaagggggattggagggaagacaggtctagactttctcagtgggacaaaccagagcagagagcaggacaggagacaagaaatccagtttcccaccaccttggactcctcccacaatctgggactttcactgaattcttgccacgcagactctgggcaaaggggtttttttttttttttttttttttttttttgagacagtctcgctctgtcgcccaggctcgagtgcagtggcgtgatcttgcttcactgcaagctgtctcccaggttcacgccattctcctgcctcagcctccggagtagctgggactacaggcgcatgccaccacacctggctaatttattttgtatttttagtatatacgcggtttcaccatgttagccagaatggtctcgatctcctgacctcgtgatctgcctgcctcagcctcccaaagtgctgggattacaggcgtgagccaccgcgcctggcgaagggagttctctcttgacccctgcagggaaaaggactcacctccctcactgcaggctcagccttccagggcaagagggaacaggaaagtatgtgcccatgtgtggcaagatggaaggacggcaggctcccgcctctaggcttggggctctaccccgatggtttcccaaggctgccaagaaggagccctaactttcttcctctcccttcctggaagggtgctgcatccacaggcttttgaccaactaaggcaaagaggggatttgaaaggctgcctggaaacactgggctgggaggagcctttggatatttttatatacgtttgaaaaggggattgagagaagaaaccaaaggtcggttgtactaaatgtatatatatagatacttctataaagtcactgctgaagacaa

SEQ ID NO: 19484 - DNA, 1768 bp, Homo sapiens
  source 1..1768: mol_type = unassigned DNA
gctccaccagatccgcgggagccccactgctctccgggtccttggcttgtggctgtgggtcccatcgggcccgccctcgcacgtcactccgggacccccgcggcctccgcaggttctgcgctccaggccggagtcagagactccaggatcggttctttcatcttcgccgcccctgcgcgtccagctcttctaagacgagatgccgtcgggcttccaacagataggctccgaagatggggaaccccctcagcagcgagtgactgggaccctggtccttgctgtgttctctgcggtgcttggctccctgcagtttgggtacaacattggggtcatcaatgcccctcagaaggtgattgaacagagctacaatgagacgtggctggggaggcaggggcctgagggacccagctccatccctccaggcaccctcaccaccctctgggccctctccgtggccatcttttccgtgggcggcatgatttcctccttcctcattggtatcatctctcagtggcttggaaggaaaagggccatgctggtcaacaatgtcctggcggtgctggggggcagcctcatgggcctggccaatgctgctgcctcctatgaaatgctcatccttggacgattcctcattggcgcctactcagggctgacatcagggctggtgcccatgtacgtgggggagattgctcccactcacctgcggggcgccctggggacgctcaaccaactggccattgttatcggcattctgatcgcccaggtgctgggcttggagtccctcctgggcactgccagcctgtggccactgctcctgggcctcacagtgctacctgccctcctgcagctggtcctgctgcccttctgtcccgagagcccccgctacctctacatcatccagaatctcgaggggcctgccagaaagagtctgaagcgcctgacaggctgggccgatgtttctggagtgctggctgagctgaaggatgagaagcggaagctggagcgtgagcggccactgtccctgctccagctcctgggcagccgtacccaccggcagcccctgatcattgcggtcgtgctgcagctgagccagcagctctctggcatcaatgctgttttctattattcgaccagcatcttcgagacagcaggggtaggccagcctgcctatgccaccataggagctggtgtggtcaacacagtcttcaccttggtctcggtgttgttggtggagcgggcggggcgccggacgctccatctcctgggcctggcgggcatgtgtggctgtgccatcctgatgactgtggctctgctcctgctggagcgagttccagccatgagctacgtctccattgtggccatctttggcttcgtggcattttttgagattggccctggccccattccttggttcatcgtggccgagctcttcagccagggaccccgcccggcagccatggctgtggctggtttctccaactggacgagcaacttcatcattggcatgggtttccagtatgttgcggtaggtccccccgccccagcctcccacaccgtaggccagaggtgggcatcacacagctagcccacctgcttccccgtcagggactcctccagccacagaccatgggtctttgggtcagtttggtggaccacctgctccacagaatcaaagcaaggaagggagctgacctagattggatagtaactgaggtgtctgaaacgcaccagtggcataacttaccttactccaagaataaaatgatac

SEQ ID NO: 19485 - DNA, 1813 bp, Homo sapiens
  source 1..1813: mol_type = unassigned DNA
gccctcgcacgtcactccgggacccccgcggcctccgcaggttctgcgctccaggccggagtcagagactccaggatcggttctttcatcttcgccgcccctgcgcgtccagctcttctaagacgagatgccgtcgggcttccaacagataggctccgaagatggggaaccccctcagcagcgagtgactgggaccctggtccttgctgtgttctctgcggtgcttggctccctgcagtttgggtacaacattggggtcatcaatgcccctcagaaggtgattgaacagagctacaatgagacgtggctggggaggcaggggcctgagggacccagctccatccctccaggcaccctcaccaccctctgggccctctccgtggccatcttttccgtgggcggcatgatttcctccttcctcattggtatcatctctcagtggcttggaaggaaaagggccatgctggtcaacaatgtcctggcggtgctggggggcagcctcatgggcctggccaatgctgctgcctcctatgaaatgctcatccttggacgattcctcattggcgcctactcaggtgctgggcttggagtccctcctgggcactgccagcctgtggccactgctcctgggcctcacagtgctacctgccctcctgcagctggtcctgctgcccttctgtcccgagagcccccgctacctctacatcatccagaatctcgaggggcctgccagaaagagtctgaagcgcctgacaggctgggccgatgtttctggagtgctggctgagctgaaggatgagaagcggaagctggagcgtgagcggccactgtccctgctccagctcctgggcagccgtacccaccggcagcccctgatcattgcggtcgtgctgcagctgagccagcagctctctggcatcaatgctgttttctattattcgaccagcatcttcgagacagcaggggtaggccagcctgcctatgccaccataggagctggtgtggtcaacacagtcttcaccttggtctcggtgttgttggtggagcgggcggggcgccggacgctccatctcctgggcctggcgggcatgtgtggctgtgccatcctgatgactgtggctctgctcctgctggagcgagttccagccatgagctacgtctccattgtggccatctttggcttcgtggcattttttgagattggccctggccccattccttggttcatcgtggccgagctcttcagccagggaccccgcccggcagccatggctgtggctggtttctccaactggacgagcaacttcatcattggcatgggtttccagtatgttgcggaggctatggggccctacgtcttccttctatttgcggtcctcctgctgggcttcttcatcttcaccttcttaagagtacctgaaactcgaggccggacgtttgaccagatctcagctgccttccaccggacaccctctcttttagagcaggaggtgaaacccagcacagaacttgagtatttagggccagatgagaacgactgaggggccaggcaggggtgggagagccagctctctctacccggcccagagaccccttcctttcctctgcagcactttaaccctctcttccctattatttccgggtggaaaagaatccctgcagcctggtagaattgggaagctgggggaagggtggtctgagcaccccctcattcccctcgtgtgactctcttggattatttatgtgttgtggtttggccgtggccatcagggtgggccactctcccctccctcttccttcccccatccccttt

SEQ ID NO: 19486 - DNA, 1852 bp, Homo sapiens
  source 1..1852: mol_type = unassigned DNA
gattccaatcctaccaaaaggcagagtgggtctggagggcctttcggggcacaggcagcaagtggattctgcgagccagggttcacccccttgcctagtaggcggcgcggcgctccggaatcggggacaccctgccctcgatccgactcgggaaagcagatccaggcgggtcttgccctccgggagctgtccgtccgtcttcgctcacgggcagtgtttcgaggaccggaggctctccgtgggcccccacccccactcctggccgccctccaggacgctgaactttcccttggccccatggatggggaaccccctcagcagcgagtgactgggaccctggtccttgctgtgttctctgcggtgcttggctccctgcagtttgggtacaacattggggtcatcaatgcccctcagaaggtgattgaacagagctacaatgagacgtggctggggaggcaggggcctgagggacccagctccatccctccaggcaccctcaccaccctctgggccctctccgtggccatcttttccgtgggcggcatgatttcctccttcctcattggtatcatctctcagtggcttggaaggaaaagggccatgctggtcaacaatgtcctggcggtgctggggggcagcctcatgggcctggccaatgctgctgcctcctatgaaatgctcatccttggacgattcctcattggcgcctactcagggctgacatcagggctggtgcccatgtacgtgggggagattgctcccactcacctgcggggcgccctggggacgctcaaccaactggccattgttatcggcattctgatcgcccaggtgctgggcttggagtccctcctgggcactgccagcctgtggccactgctcctgggcctcacagtgctacctgccctcctgcagctggtcctgctgcccttctgtcccgagagcccccgctacctctacatcatccagaatctcgaggggcctgccagaaagagtctgaagcgcctgacaggctgggccgatgtttctggagtgctggctgagctgaaggatgagaagcggaagctggagcgtgagcggccactgtccctgctccagctcctgggcagccgtacccaccggcagcccctgatcattgcggtcgtgctgcagctgagccagcagctctctggcatcaatgctgttttctattattcgaccagcatcttcgagacagcaggggtaggccagcctgcctatgccaccataggagctggtgtggtcaacacagtcttcaccttggtctcggtgttgttggtggagcgggcggggcgccggacgctccatctcctgggcctggcgggcatgtgtggctgtgccatcctgatgactgtggctctgctcctgctggagcgagttccagccatgagctacgtctccattgtggccatctttggcttcgtggcattttttgagattggccctggccccattccttggttcatcgtggccgagctcttcagccagggaccccgcccggcagccatggctgtggctggtttctccaactggacgagcaacttcatcattggcatgggtttccagtatgttgcggtaggtccccccgccccagcctcccacaccgtaggccagaggtgggcatcacacagctagcccacctgcttccccgtcagggactcctccagccacagaccatgggtctttgggtcagtttggtggaccacctgctccacagaatcaaagcaaggaagggagctgacctagattggatagtaactgaggtgtctgaaacgcaccagtggcataacttaccttactccaagaataaaatgatacactttgcattaatact

SEQ ID NO: 19487 - DNA, 3448 bp, Homo sapiens
  source 1..3448: mol_type = unassigned DNA
aaagggaattccagccgaggtccggggccagtaggtcagggctgacttcttttaaaaaccctattttcttgttattaaaataaatcattgtagaaaataaaatacagatgaatgaaaaaaataacataacagtagttaattatacctgtagtcccatcacctgagaaaaccccaaatcacatttttggtgtatatcccccaatttattttccatgcctatacacactacatgatattttctaaatggaagcagactccatcatttcaccctggcaggcgggtatctggcacacagcctggccatcatgaccgatgcagcccacttgctggcggatgtgggcagcatgatgggcagcctcttctccctctggctctccacccgtccagccacccgcaccatgacctttggctggcaccgttcaggtaaggcccctgcatggcccagtgactctccaatcttgccagagggcacccgtcagggtcccaagcaggtctctgacagcttgtctccccccccacccgcagagactctgggggctttggcctctgtggtctccctctggatggtcactggcatcctcctgtacctggccttcgtccgcctgctgcacagcgactaccacatcgaggggggtgccatgctgctgaccgccagcatcgcagtctgtgccaacctgttgtacgtcccagtatggagcaggcaccttgtggggcccagggcgaggggtcttcctccaggatgggagagctggctctctcctccccaccagacacacagacacgcacacacagctctccatgggctgccctgcgtgtgcctgagaagggtctgggatagagacctaaaattcagtcagcagatctctgtcaagggcctgccatgggccagccactctgatgagggctttcatcaacatgattgcatttaaacctcacagccaccccatgaggtaggtagcattacccctagtttaccattaatgcagtcaatcccaacaggtgacttgcccaagtcacatatctatttaagtaacagggccagcttccgaatccacatgtgtggcaccaagtctggtattctttcccccaggctgcattgtttatctctcttgcaaaatgctgttttcttccaggggctgggaaagggctactggggaggtgagacatggagatgggggtataggaggccaggagcagggccctaggctgaggtgctctgcttacccctcagaatggcctttgtgctgcaccaggctgggcccccccacagccacgggtctaggggagcagagtatgcaccgctggaggaggggcctgaagagcccctgcccctggggaacaccagcgtccgggcggcatttgtgcacgtgctgggggacctcctgcagagctttggggtactggctgcctccatcctcatctacttcaagcctcaatacaaggcagccgaccccatcagcaccttcctcttctccatctgtgcccttggatccaccgctcccaccctccgagacgttcttcgaatcctcatggaaggtaccccccgcaatgtggggttcgaacctgtgcgggatacgctgttgtcggtgccaggagtccgggcaacccatgagctgcacctgtgggcccttacgctcacttaccatgttgcctctgcacacctggccatcgactccaccgctgaccctgaagccgtcctggctgaagcctcatcccggctctactcccggtttggattctccagctgcaccctgcaggtcgagcagtatcagccggagatggcccagtgcctgcgctgccaggaacccccccaagcctgagccatggccctgccctcaccccactgccaggccgaggctcagccccagactctcagcatctgctgccctgatcacagagacgggaccgagccaggtccataccccttcctctctccctcctaccacctgccagtttccccagcctcagccccagccccagccccagtgggcaagaccaaagtgtggcggggagtggggtgggagtcaggggaatagatgtgactagttcaggggcggggactcccaggcctcagtgtggcagggtgtgttgaaggcctgtggtgccatctccccatggttcatgtggagccacgaacatcctttccctgcagtccatttgtctgtgtggcaggctggctggctgggggcatctgcctgtctatgtgctgttggtgtgcctatgcctgggggaggtcagtaggggccccctccccacatggccctcgctctgtctatgcaggggccccaaagcccgcactttgtccgtgtgtcttagccctgtggttttgtctgtgtgtgtgtgtgtgtgtgtgtgtgtgtgtgtgtgtgtgttcttggtgctgtggcctgtgtgtctctgtgcctatgtggctgtgctatggtttctatgagtctgctccatccatgtgtctgtttgggggtctatctctccatccctctgttggtgctgtgcccttggctatccctgaaagagggaggactccgctgcagctccaccaataaacttgtgtctcactgcatctttcagcctgtgtgctgactcctcaggagggggaagtcaaataggtcacttgagaacaacagaatccctcctgtcccttcccagcctctggagtgacctcccacagacctcctgtcccttcccagcccctccaccctcagatggagggtaaaagccaccagtctctttactccccttcccctggctcacagcatgcctgggtccttggctcagggacagtcccatgtgccctgggcttggttgcaggagaatgctggaaggtaaggagccaaggaatccctgggagtcagtcgttctcagaggtccctgcatgccagtgggcctcaggctggctggagggaggctgggtccctttgagggagaatggctagaccatagcactgatgtgggcttggttctcaggccatctaaggtgtccagcggtagggacccctcaaccctgatagcagccaaccctgagtccaggtttaggctgtgaacaccaaggacctcttttacacctattccccctttgtcttaagaactgcatattttgacacattaagtcttaaaatcaggctcattaagggattgttgattttctctttaaaaaaaatcaaactcaagctggacatagtggcctgtgcctgtaatctcagccctttggaggctgaggcaggaggattgtttgagcccaggagttcaagaccagcctgggcaacctagggaaacccctgtctctacaaataatttaaaaattagctgggtgtggtggtgcatacctgtagtcccagctattcaggaggctgaggcaggaggattgcctgagcccaggaggtcaaggcagcagtcagccatgatcatgccactgcacttcagcctgggcaacagagcaagaccttgtctc

SEQ ID NO: 19488 - DNA, 3447 bp, Homo sapiens
  source 1..3447: mol_type = unassigned DNA
ccaccagacacacagacacgcacacacagctctccatgggctgccctgcgtgtgcctgagaagggtctgggatagagacctaaaattcagtcagcagatctctgtcaagggcctgccatgggccagccactctgatgagggctttcatcaacatgattgcatttaaacctcacagccaccccatgaggtaggtagcattacccctagtttaccattaatgcagtcaatcccaacaggtgacttgcccaagtcacatatctatttaagtaacagggccagcttccgaatccacatgtgtggcaccaagtctggtattctttcccccaggctgcattgtttatctctcttgcaaaatgctgttttcttccaggggctgggaaagggctactggggaggtgagacatggagatgggggtataggaggccaggagcagggccctaggctgaggtgctctgcttacccctcagaatggcctttgtgctgcaccaggctgggcccccccacagccacgggtctaggggagcagagtatgcaccgctggaggaggggcctgaagagcccctgcccctggggaacaccagcgtccgggcggcatttgtgcacgtgctgggggacctcctgcagagctttggggtactggctgcctccatcctcatctacttcaagcctcaatacaaggcagccgaccccatcagcaccttcctcttctccatctgtgcccttggatccaccgctcccaccctccgagacgttcttcgaatcctcatggaaggtaccccccgcaatgtggggttcgaacctgtgcgggatacgctgttgtcggtgccaggagtccgggcaacccatgagctgcacctgtgggcccttacgctcacttaccatgttgcctctgcacacctggccatcggtgagtcacactggccccagctagttactacctggaacataccccaccccaaacatgggaccatagcttgagttactggaattgtttcagtcttttttgatctgtctctgtttctctgtgtctctctctctcacatagacacatacacacacacacacatgcacgtgcgctcgtgcatgttggagacaaggagtctccatccactggatgcagtgttctgggggcagtttcaccctctttgaagtagcacagggaaccaacaaccctttaaaagatcattagtacctacaggtctagtgatggggcacagttaggtaaattacagcacctccaccctgaggtatcacataactgttaaaaatgatgcttgtgaagactgtacagcaactatgaaaaatgtttatggtataatgctgagaaaaaagctgaatataaaattgcatctacattatgattcaactattaaaaatatatatggtgagtcatgagctgacaaaggatttttgagtttcttccagatgcaagaagcaatcagagtcatgcaatttgtatgccaaaaatattataatttgtgggatatttgatggaaactctagagggacaatgagacagatatttaacaactggattgtcctgggaaatcgggtggtatggctgctgaaatgttgagctgtatgttgacacttaatgacaggagagaataggagactggaaagagtttagtgtgttagcatggttgattggggtgagtctctccaacatttgatttgacacttttatgctgttcatacaatacagaaagaaaagcaggcttccattcacgcctggctttaatgctgtgcagcccctttccctgtccttatctcagtccctgcctgttctttctcccccgggatggatgccgcctcttatcactctcccacagactccaccgctgaccctgaagccgtcctggctgaagcctcatcccggctctactcccggtttggattctccagctgcaccctgcaggtcgagcagtatcagccggagatggcccagtgcctgcgctgccaggaacccccccaagcctgagccatggccctgccctcaccccactgccaggccgaggctcagccccagactctcagcatctgctgccctgatcacagagacgggaccgagccaggtccataccccttcctctctccctcctaccacctgccagtttccccagcctcagccccagccccagccccagtgggcaagaccaaagtgtggcggggagtggggtgggagtcaggggaatagatgtgactagttcaggggcggggactcccaggcctcagtgtggcagggtgtgttgaaggcctgtggtgccatctccccatggttcatgtggagccacgaacatcctttccctgcagtccatttgtctgtgtggcaggctggctggctgggggcatctgcctgtctatgtgctgttggtgtgcctatgcctgggggaggtcagtaggggccccctccccacatggccctcgctctgtctatgcaggggccccaaagcccgcactttgtccgtgtgtcttagccctgtggttttgtctgtgtgtgtgtgtgtgtgtgtgtgtgtgtgtgtgtgtgtgttcttggtgctgtggcctgtgtgtctctgtgcctatgtggctgtgctatggtttctatgagtctgctccatccatgtgtctgtttgggggtctatctctccatccctctgttggtgctgtgcccttggctatccctgaaagagggaggactccgctgcagctccaccaataaacttgtgtctcactgcatctttcagcctgtgtgctgactcctcaggagggggaagtcaaataggtcacttgagaacaacagaatccctcctgtcccttcccagcctctggagtgacctcccacagacctcctgtcccttcccagcccctccaccctcagatggagggtaaaagccaccagtctctttactccccttcccctggctcacagcatgcctgggtccttggctcagggacagtcccatgtgccctgggcttggttgcaggagaatgctggaaggtaaggagccaaggaatccctgggagtcagtcgttctcagaggtccctgcatgccagtgggcctcaggctggctggagggaggctgggtccctttgagggagaatggctagaccatagcactgatgtgggcttggttctcaggccatctaaggtgtccagcggtagggacccctcaaccctgatagcagccaaccctgagtccaggtttaggctgtgaacaccaaggacctcttttacacctattccccctttgtcttaagaactgcatattttgacacattaagtcttaaaatcaggctcattaagggattgttgattttctctttaaaaaaaatcaaactcaagctggacatagtggcctgtgcctgtaatctcagccctttggaggctgaggcaggaggattgtttgagcccaggagttcaagaccagcctgggcaacctagggaaacccctgtctctac

SEQ ID NO: 19489 - DNA, 2260 bp, Homo sapiens
  source 1..2260: mol_type = unassigned DNA
gggacggggctgtggagatgaggagttctccagaactcgggtggcggggcgctcccgggctctggcgcggggaaatggggctttggcagtgggggcggggcttaagggtggggagaggccggggagcctggaggcggagcttggggagctcgccccacgcggggcggggctccggcggcagcgggatctgcagttcggactccgcgcgccacagtcgctgcagttcgctccactctggtggccccgccgccctgcggggatcccgggggtcggcgggctgctcggacttggcgcggggccggcccggcctctctcttcctcggtggggcctagacggtcggggcaccgggaacatggagccctctccagccgctgggggcttggagaccactcgcctggtgagcccccgggaccgcggtggcgccggaggcagcctgcgtttgaagagtctcttcacagagccctcagagcccctccctgaggagtccaaacctgtggagatgcccttccaccactgccacagggacccccttccgccgccgggccttacccctgagaggctgcatgcacggaggcagctatatgctgcctgtgccgtttgctttgtcttcatggctggggaggtggtcggcgggtatctggcacacagcctggccatcatgaccgatgcagcccacttgctggcggatgtgggcagcatgatgggcagcctcttctccctctggctctccacccgtccagccacccgcaccatgacctttggctggcaccgttcagagactctgggggctttggcctctgtggtctccctctggatggtcactggcatcctcctgtacctggccttcgtccgcctgctgcacagcgactaccacatcgaggggggtgccatgctgctgaccgccagcatcgcagtctgtgccaacctgttaatggcctttgtgctgcaccaggctgggcccccccacagccacgggtctaggggagcagagtatgcaccgctggaggaggggcctgaagagcccctgcccctggggaacaccagcgtccgggcggcatttgtgcacgtgctgggggacctcctgcagagctttggggtactggctgcctccatcctcatctacttcaagcctcaatacaaggcagccgaccccatcagcaccttcctcttctccatctgtgcccttggatccaccgctcccaccctccgagacgttcttcgaatcctcatggaaggtaccccccgcaatgtggggttcgaacctgtgcgggatacgctgttgtcggtgccaggagtccgggcaacccatgagctgcacctgtgggcccttacgctcacttaccatgttgcctctgcacacctggccatcgactccaccgctgaccctgaagccgtcctggctgaagcctcatcccggctctactcccggtttggattctccagctgcaccctgcaggtcgagcagtatcagccggagatggcccagtgcctgcgctgccaggaacccccccaagcctgagccatggccctgccctcaccccactgccaggccgaggctcagccccagactctcagcatctgctgccctgatcacagagacgggaccgagccaggtccataccccttcctctctccctcctaccacctgccagtttccccagcctcagccccagccccagccccagtgggcaagaccaaagtgtggcggggagtggggtgggagtcaggggaatagatgtgactagttcaggggcggggactcccaggcctcagtgtggcagggtgtgttgaaggcctgtggtgccatctccccatggttcatgtggagccacgaacatcctttccctgcagtccatttgtctgtgtggcaggctggctggctgggggcatctgcctgtctatgtgctgttggtgtgcctatgcctgggggaggtcagtaggggccccctccccacatggccctcgctctgtctatgcaggggccccaaagcccgcactttgtccgtgtgtcttagccctgtggttttgtctgtgtgtgtgtgtgtgtgtgtgtgtgtgtgtgtgtgtgtgttcttggtgctgtggcctgtgtgtctctgtgcctatgtggctgtgctatggtttctatgagtctgctccatccatgtgtctgtttgggggtctatctctccatccctctgttggtgctgtgcccttggctatccctgaaagagggaggactccgctgcagctccaccaataaacttgtgtctcactgca

SEQ ID NO: 19490 - DNA, 904 bp, Homo sapiens
  source 1..904: mol_type = unassigned DNA
cactcgcctggtgagcccccgggaccgcggtggcgccggaggcagcctgcgtttgaagagtctcttcacagagccctcagagcccctccctgaggagtccaaacctgtggagatgcccttccaccactgccacagggacccccttccgccgccgggccttacccctgagaggctgcatgcacggaggcagctatatgctgcctgtgccgtttgctttgtcttcatggctggggaggtggtcggcgggtatctggcacacagcctggccatcatgaccgatgcagcccacttgctggcggatgtgggcagcatgatgggcagcctcttctccctctggctctccacccgtccagccacccgcaccatgacctttggctggcaccgttcagaatggcctttgtgctgcaccaggctgggcccccccacagccacgggtctaggggagcagagtatgcaccgctggaggaggggcctgaagagcccctgcccctggggaacaccagcgtccgggcggcatttgtgcacgtgctgggggacctcctgcagagctttggggtactggctgcctccatcctcatctacttcaagcctcaatacaaggcagccgaccccatcagcaccttcctcttctccatctgtgcccttggatccaccgctcccaccctccgagacgttcttcgaatcctcatggaaggtaccccccgcaatgtggggttcgaacctgtgcgggatacgctgttgtcggtgccaggagtccgggcaacccatgagctgcacctgtgggcccttacgctcacttaccatgttgcctctgcacacctggccatcgactccaccgctgaccctgaagccgtcctggctgaagcctcatcccggctctactcccggtttggattctccagct

SEQ ID NO: 19491 - DNA, 899 bp, Homo sapiens
  source 1..899: mol_type = unassigned DNA
gactgtcacagcttcgagtgcacaatcctcttcccaccccctcccattctacagtggcggcaggtgcgaggggagagaacattgagcatttgaagcttcgacttgaggctcggccaccgactttgcttctcttcacagagccctcagagcccctccctgaggagtccaaacctgtggagatgcccttccaccactgccacagggacccccttccgccgccgggccttacccctgagaggctgcatgcacggaggcagctatatgctgcctgtgccgtttgctttgtcttcatggctggggaggtggtcggcgggtatctggcacacagcctggccatcatgaccgatgcagcccacttgctggcggatgtgggcagcatgatgggcagcctcttctccctctggctctccacccgtccagccacccgcaccatgacctttggctggcaccgttcagagactctgggggctttggcctctgtggtctccctctggatggtcactggcatcctcctgtacctggccttcgtccgcctgctgcacagcgactaccacatcgaggggggtgccatgctgctgaccgccagcatcgcagtctgtgccaacctgttaatggcctttgtgctgcaccaggctgggcccccccacagccacgggtctaggggagcagagtatgcaccgctggaggaggggcctgaagagcccctgcccctggggaacaccagcgtccgggcggcatttgtgcacgtgctgggggacctcctgcagagctttggggtactggctgcctccatcctcatctacttcaagcctcaatacaaggcagccgaccccatcagcaccttcctcttctccatctgtgcccttggatccaccgctcccaccctccgagacgttctt

SEQ ID NO: 19492 - DNA, 997 bp, Homo sapiens
  source 1..997: mol_type = unassigned DNA
ctgctctcaaaccaccccacttctgtccctcagaggtgggacagtggggagaggaggaagaggactcagaggctggagaaggaagagaaaaggcgttgctgtgggaaagacctggcaaggaaaaggcagcggaaccccagagagcagggtagacgcctgcggcccaggagaaccgagcaaggcaaggagctcaaagggagagctctgagtgtgcagggcacctctggccctgtgccgactcctcacctgggtctggccctttacctgggagtcgttctcttaagccaggagggcaccacccatcttgatggcccaactcactccaggaaacacaatgggtttgctgaccgtggcggatgagagtctcttcacagagccctcagagcccctccctgaggagtccaaacctgtggagatgcccttccaccactgccacagggacccccttccgccgccgggccttacccctgagaggctgcatgcacggaggcagctatatgctgcctgtgccgtttgctttgtcttcatggctggggaggtggtcggcgggtatctggcacacagcctggccatcatgaccgatgcagcccacttgctggcggatgtgggcagcatgatgggcagcctcttctccctctggctctccacccgtccagccacccgcaccatgacctttggctggcaccgttcagagactctgggggctttggcctctgtggtctccctctggatggtcactggcatcctcctgtacctggccttcgtccgcctgctgcacagcgactaccacatcgaggggggtgccatgctgctgaccgccagcatcgcagtctgtgccaacctgttaatggcctttgtgctgcaccaggctgggcccccccacagccacgggtctaggggagcagagtatgcaccgctggaggaggggcctgaagagcccctgcccctggggaacaccagcgtccgggcggcatttgtgcacgtgctgggggacctc

SEQ ID NO: 19493 - DNA, 834 bp, Homo sapiens
  source 1..834: mol_type = unassigned DNA
gcttagcaggcctgcggcccaaggcagcgtaggagcgttgctgccaggccttggggcagggattcccaccgagcccctcttccccagcaggagggcaccacccatcttgatggcccaactcactccaggaaacacaatgggtttgctgaccgtggcggatgagagtggcggcaggtgcgaggggagagaacattgagcatttgaagcttcgacttgaggctcggccaccgactttgctgtaatgggtccgctcctgtttctgcctccgcgtgagggttgcggccacagggtgacggcgtggtgggcgacacccccgcgcaggcatgcacagagtggtggtcgttgggcgaagtctcttcacagagccctcagagcccctccctgaggagtccaaacctgtggagatgcccttccaccactgccacagggacccccttccgccgccgggccttacccctgagaggctgcatgcacggaggcagctatatgctgcctgtgccgtttgctttgtcttcatggctggggaggtggtcggcgggtatctggcacacagcctggccatcatgaccgatgcagcccacttgctggcggatgtgggcagcatgatgggcagcctcttctccctctggctctccacccgtccagccacccgcaccatgacctttggctggcaccgttcagagactctgggggctttggcctctgtggtctccctctggatggtcactggcatcctcctgtacctggccttcgtccgcctgctgcacagcgactaccacatcgaggggggtgccatgctgctgaccgccagcatcgcagtctgtgccaacctgt

SEQ ID NO: 19494 - DNA, 501 bp, Homo sapiens
  source 1..501: mol_type = unassigned DNA
ggcctggggaaggagatggtctgatgaggccagcactggggactaaggacgtggagtgagcaggccagcctgtgggccaggcccaggttgaaccatgttgcttgcctcagtctcttcacagagccctcagagcccctccctgaggagtccaaacctgtggagatgcccttccaccactgccacagggacccccttccgccgccgggccttacccctgagaggctgcatgcacggaggcagctatatgctgcctgtgccgtttgctttgtcttcatggctggggaggtggtcggcgggtatctggcacacagcctggccatcatgaccgatgcagcccacttgctggcggatgtgggcagcatgatgggcagcctcttctccctctggctctccacccgtccagccacccgcaccatgacctttggctggcaccgttcagagactctgggggctttggcctctgtggtctccctctggatggtcactggcatcctcctgtac

SEQ ID NO: 19495 - DNA, 540 bp, Homo sapiens
  source 1..540: mol_type = unassigned DNA
acagcgggccgggggtggcaggagaaccgccaacgcgccccgccggcccccgcgcctgccgccaccgtccacctgcccctctgagcggccgtccgacctccctgcccacccccgtgggccatcttgtctgtcggctgaccgtccgtttgtctccggaatttggcaggagccctcagagcccctccctgaggagtccaaacctgtggagatgcccttccaccactgccacagggacccccttccgccgccgggccttacccctgagaggctgcatgcacggaggcagctatatgctgcctgtgccgtttgctttgtcttcatggctggggaggtggtcggcgggtatctggcacacagcctggccatcatgaccgatgcagcccacttgctggcggatgtgggcagcatgatgggcagcctcttctccctctggctctccacccgtccagccacccgcaccatgacctttggctggcaccgttcagagactctgggggctttggcctctgtggtctccctctggatggtcactggcatcct

SEQ ID NO: 19496 - DNA, 590 bp, Homo sapiens
  source 1..590: mol_type = unassigned DNA
gagggcttagcaggcctgcggcccaaggcagcgtaggagcgttgctgccaggccttggggcagggattcccaccgagcccctcttccccagcaggagggcaccacccatcttgatggcccaactcactccaggaaacacaatgggtttgctgaccgtggcggatgagagtggcggcaggtgcgaggggagagaacattgagcatttgaagcttcgacttgaggctcggccaccgactttgcttctcttcacagagccctcagagcccctccctgaggagtccaaacctgtggagatgcccttccaccactgccacagggacccccttccgccgccgggccttacccctgagaggctgcatgcacggaggcagctatatgctgcctgtgccgtttgctttgtcttcatggctggggaggtggtcggcgggtatctggcacacagcctggccatcatgaccgatgcagcccacttgctggcggatgtgggcagcatgatgggcagcctcttctccctctggctctccacccgtccagccacccgcaccatgacctttggctggcaccgttcagagactctgggggctttggc

SEQ ID NO: 19497 - DNA, 1785 bp, Homo sapiens
  source 1..1785: mol_type = unassigned DNA
ctcgcccggaccacgtgatccgtgcggccagggtagctatcgcggcggcggcggcggcggcggttgaactgactcggagcgaggagacccgagcgagcagacgcggccctggcgcccgccctgcgcactcaccatggcgatgcatttcatcttctcagatacagcggtgcttctgtttgatttctggagtgtccacagtcctgctggcatggccctttcggtgttggtgctcctgcttctggctgtactgtatgaaggcatcaaggttggcaaagccaagctgctcaaccaggtactggtgaacctgccaacctccatcagccagcagaccatcgcagagacagacggggactctgcaggctcagattcattccctgttggcagaacccaccacaggtggtatttgtgtcactttggccagtctctaatccatgtcatccaggtggtcatcggctacttcatcatgctggccgtaatgtcctacaacacctggattttccttggtgtggtcttgggctctgctgtgggctactacctagcttacccacttctcagcacagcttagctggtgaggaacgtgcaggcactgaggctggagggacatggagccccctcttccagacactatacttccaactgccctttcttctgatggctattcctccaccttattcccagcccctggaaactttgagctgaagccagcacttgctccctggagttcggaagccattgcagcaaccttccttctcagccagcctacgtagggcccaggcatggtcttgtgtcttaagacagctgctgtgaccaaagggagaatggagataacaggggtggcagggttactgagcccatgacaatgcttctctgtgactcaaaccaggaatttccaaagatttcaagccagggagaagggttcttggtgatgcagggcatggaacctggacaccctcagctctcctgctttgtgccttatctacaggagcatcgcccattggacttcctgacctcttctgtctttgagggacagagaccaagctagatcctttttctcacctttctgcctttggaacacatgaagatcatctcgtctatggatcatgttgacaaactaagttttttttatttttcccattgaactcctagttggcaattttgcacattcatacaaaaaaatttttaatgaaatgatttcattgattcatgatggatggcagaaactgctgagacctatttccctttcttggggagagaataagtgacagctgattaaaggcagagacacaggactgctttcaggctcctggtttattctctgatagactgagctccttccaccagaaggcactgcctgcaggaagaagatgatctgatggccgtgggtgtctgggaagctcttcgtggcctcaatgccctcctttatcctcatctttcttctatgcagaacaaaaagctgcatctaataatgttcaatacttaatattctctatttattacttactgcttactcgtaatgatctagtggggaaacatgattcattcacttaaaatactgattaagccatgggcaggtactgactgaagatgcaatccaaccaaagccattacattttttgagttagatgggactctctggatagttgaacctcttcactttataaaaaaggaaagagagaaaatcactgctgtatactaaatacctcacagattagatgaaaagatggttgtaagctttgggaattaaaaacaaacaaatacattttagtaaatatatatttttaaata

SEQ ID NO: 19498 - DNA, 771 bp, Homo sapiens
  source 1..771: mol_type = unassigned DNA
agctatcgcggcggcggcggcggcggcggttgaactgactcggagcgaggagacccgagcgagcagacgcggccctggcgcccgccctgcgcactcaccatggcgggttcacctgggctggagagaacgacagcttgcaagactcgttcgtctttgaagaagtcatatcattttcttcatcccatgaagaatgtcatagaatttaagatacaggaagctcagcctgggcaacatagctagaccccgtctctacaaaaattagccacaagtggtggcaggcgcctgtaatcccagctactcggaggctgaggcaggatgaggaggattgcttgagcccagaagttccaggctgcagtgagccatgaccttcggcctgggcaacagaacaagacgtcctcaaacaaacaaaacaaaaaaaaaaagatataggaagtgtatgtaggccatttagtgaaatgatcagccgtcctttaaaaagggaaatagatggaaagcacttgcaaaagttccccagccagtcagcctagcaactgggaccttcatctccttcccaacccttgtttacaaataaggaagcttttctcaaagtgtaagtaaccccaaatgaagaaatatagaagaaaacaagttccagggattgctccctccttcaccacagccccaccctgaaaaaagcacaaatcagttaaactttcagaggccaagattcatcccaagtaggaaaacaagattggggccctgccccttgcctatctgaccacaaagcccttt

SEQ ID NO: 19499 - DNA, 1750 bp, Homo sapiens
  source 1..1750: mol_type = unassigned DNA
ccgagcgagcagacgcggccctggcgcccgccctgcgcactcaccatggcgatgcatttcatcttctcagatacagcggtgcttctgtttgatttctggagtgtccacagtcctgctgggcaagaaactaaagcccagagacaggaagagagactcgtgcagggtcacacagcatggccctttcggtgttggtgctcctgcttctggctgtactgtatgaaggcatcaaggttggcaaagccaagctgctcaaccaggtactggtgaacctgccaacctccatcagccagcagaccatcgcagagacagacggggactctgcaggctcagattcattccctgttggcagaacccaccacaggtggtatttgtgtcactttggccagtctctaatccatgtcatccaggtggtcatcggctacttcatcatgctggccgtaatgtcctacaacacctggattttccttggtgtggtcttgggctctgctgtgggctactacctagcttacccacttctcagcacagcttagctggtgaggaacgtgcaggcactgaggctggagggacatggagccccctcttccagacactatacttccaactgccctttcttctgatggctattcctccaccttattcccagcccctggaaactttgagctgaagccagcacttgctccctggagttcggaagccattgcagcaaccttccttctcagccagcctacgtagggcccaggcatggtcttgtgtcttaagacagctgctgtgaccaaagggagaatggagataacaggggtggcagggttactgagcccatgacaatgcttctctgtgactcaaaccaggaatttccaaagatttcaagccagggagaagggttcttggtgatgcagggcatggaacctggacaccctcagctctcctgctttgtgccttatctacaggagcatcgcccattggacttcctgacctcttctgtctttgagggacagagaccaagctagatcctttttctcacctttctgcctttggaacacatgaagatcatctcgtctatggatcatgttgacaaactaagttttttttatttttcccattgaactcctagttggcaattttgcacattcatacaaaaaaatttttaatgaaatgatttcattgattcatgatggatggcagaaactgctgagacctatttccctttcttggggagagaataagtgacagctgattaaaggcagagacacaggactgctttcaggctcctggtttattctctgatagactgagctccttccaccagaaggcactgcctgcaggaagaagatgatctgatggccgtgggtgtctgggaagctcttcgtggcctcaatgccctcctttatcctcatctttcttctatgcagaacaaaaagctgcatctaataatgttcaatacttaatattctctatttattacttactgcttactcgtaatgatctagtggggaaacatgattcattcacttaaaatactgattaagccatgggcaggtactgactgaagatgcaatccaaccaaagccattacattttttgagttagatgggactctctggatagttgaacctcttcactttataaaaaaggaaagagagaaaatcactgctgtatactaaatacctcacagattagatgaaaagatggttgtaagctttgggaattaaaaacaaacaaatacattttagtaaatatatatttttaaata

SEQ ID NO: 19500 - DNA, 2574 bp, Homo sapiens
  source 1..2574: mol_type = unassigned DNA
gctcgcgccccgcggcagctccgcagtgcactagccaccaccgccgccgccgccgctccgccagacctgctgccagcttgcccggtccagccctgagagagcctcgaacgccagctgcgagggtcatgagccagagagccccggggcgccgcgcggagagcaagcggagatagcgactttgcgccccccagccctcgccttcttgcatcgcgttccccgcatcctcgggtccttctgtcctttccgctgtccccaccgccgccatggccaccttgctccgcagcaagctgtccaacgtggccacgtccgtgtccaacaagtcccaggccaagatgagcggcatgttcgccaggatgggttttcaggcggccacggatgaggaggcggtgggcttcgcgcattgcgacgacctcgactttgagcaccgccagggcctgcagatggacatcctgaaagccgagggagagccctgcggggacgagggcgctgaagcgcccgtcgagggagacatccattatcagcgaggcagcggagctcctctgccgccctccggctccaaggaccaggtgggaggtggtggcgaattcgggggccacgacaagcccaaaatcacggcgtgggaggcaggctggaacgtgaccaacgccatccagggcatgttcgtgctgggcctaccctacgccatcctgcacggcggctacctggggttgtttctcatcatcttcgccgccgttgtgtgctgctacaccggcaagatcctcatcgcgtgcctgtacgaggagaatgaagacggcgaggtggtgcgcgtgcgggactcgtacgtggccatagccaacgcctgctgcgccccgcgcttcccaacgctgggcggccgagtggtgaacgtagcgcagatcatcgagctggtgatgacgtgcatcctgtacgtggtggtgagtggcaacctcatgtacaacagcttcccggggctgcccgtgtcgcagaagtcctggtccattatcgccacggccgtgctgctgccttgcgccttccttaagaacctcaaggccgtgtccaagttcagtctgctgtgcactctggcccacttcgtcatcaatatcctggtcatagcctactgtctatcgcgggcgcgcgactgggcctgggagaaggtcaagttctacatcgacgtcaagaagttccccatctccattggcatcatcgtgttcagctacacgtctcagatcttcctgccttcgctggagggcaatatgcagcagcccagcgagttccactgcatgatgaactggacgcacatcgcagcctgcgtgctcaagggcctcttcgcgctcgtcgcctacctcacctgggccgacgagaccaaggaggtcatcacggataacctgcccggctccatccgcgccgtggtcaacatctttctggtggccaaggcgctgttgtcctatcctctgccattctttgccgctgtcgaggtgctggagaagtcgctcttccaggaaggcagccgcgcctttttcccggcctgctacagcggcgacgggcgcctgaagtcctgggggctgacgctgcgctgcgcgctcgtcgtcttcacgctgctcatggccatttatgtgccgcacttcgcgctgctcatgggcctcaccggcagcctcacgggcgccggcctctgtttcttgctgcccagcctctttcacctgcgcctgctctggcgcaagctgctgtggcaccaagtcttcttcgacgtcgccatcttcgtcatcggcggcatctgcagcgtgtccggcttcgtgcactccctcgagggcctcatcgaagcctaccgaaccaacgcggaggactagggcgcaagggcgagcccccgccgcgcttctgcgctctctcccttctcccctcaccccgcccccaccagcccagtgcgccctgccgccgcgcttgggaggccaagctttaaacatctctggttcctagtttctgattattcggggatgggggggatgggaggggacagggattcacgatccatcgcgtctgcgtttctgttgtcctttcttttccacaacaccctggttttggggggaggcggggtgcatttgcgggcagggttctctgtccttccaagtggggccccgacactttggttccagtcatcgagggggttgggaagggagggagagggggcgcagctcgcaggcgtggcaacttgaccttgggggaatatttcacatccatccagagctcggaatctacagcgtccagccatttccagcaagagcgcttcccattccggagacgtttcaaccctgcagcgggaaaggctgactgggaaatccattttgggtgggcaatttccttcaacgaagccggaaggcgagaagccgcggcggggccagcttgcctgccggttttcaggaatctaaactctcatcttgtgcaatttatcaggtgtggaactgttctactgtgcgtgtggtgtgctcgtggtgaataagatgaaatgtatatcagaaaaaaatctatctctaatttagagtgcggtacataattatatccgcaaataaagaagagacaaaggct

SEQ ID NO: 19501 - DNA, 6162 bp, Homo sapiens
  source 1..6162: mol_type = unassigned DNA
ccaactcctggagtcccctgggagctgccgctgcaggcccccgagccgctaggccccgccgccaggccaccgctgctgcggcagccatggcggaagttcatagacgtcagcatgctcgggttaaaggagaagcccccgcgaaatcctccacactccgagatgaggaggagctggggatggcgtcggccgaaacgctgaccgtgtttctgaagctgctggccgccggcttttacggcgtgagctccttcctgatcgtggtggtgaataagagcgtgctcaccaattacagatttccctcctcactatgtgttggacttggccagatggtggccacagtggcagttctctgggtgggaaaggcgctcagagtagtcaagtttcctgaccttgacagaaatgtacctcgaaagacgtttccactacctctactatattttgggaaccaaatcacgggactgttcagcacaaagaaactgaacttgccaatgtttacagttctgagaaggttctccatcctgtttacaatgtttgctgaaggagttttactcaagaagactttttcttggggtattaaaatgactgtatttgcaatgattattggagcctttgtagctgccagctctgacttggcatttgatctggaaggatatgcttttattctgataaacgatgtcctaacagcagcaaatggtgcatacgtaaaacaaaaattagattcaaaagagctgggaaaatatggactgctctattacaatgcactgttcatgattctgcccaccctggccattgcgtatttcacaggagatgcacaaaaggctgtggagtttgaaggctgggctgacaccctctttcttctgcagttcaccctctcctgtgtgatggggtttatcttaatgtacgccacagtactctgcacgcagtataattctgctcttacaactacaatagttggctgtattaagaatatattaataacttatattggaatggtctttggtggagattatattttcacgtggacaaacttcattggtttaaatatcagcattgctgggagcctggtatattcctatatcactttcactgaagagcagctgagcaaacagtcagaggctaataacaagctggacattaaggggaaaggagcagtgtgaccagaggattgcttcatctgatacgtaggcctaagtttttaatcaactcagaacactggcagttcctacagagacactgaggtgtcttgattatggaggaaataaccattcctttgcacttgtacaatctgaggattgattgctgccttttaaaattttatgaagagagaaacttataattgactctattttaaatatgttgtttgaattaatttatatcagactggaaaaggtactgggctttttaatttatttttcttatatgccgacagtgaaacatcagtgttttgaaagtattttatttcataatttgatatccaggtgtccctgagagctgcatatgtaatgtttgccaactggagcttcatcattcaaattgttgctgcatctggaggcagtttagcctttcctctgctggaaatgcagacgaatatgtgaaatttctcttctttgaatcttatttcttatgattgcattgtcttcatcatatcatcattccatttgccaaggaaaacaactttggcactataaaaatatgtggggctttgaagtgtattgctatctatgttggcttccctgactttcataggatgagcagagtgcattccttgaaaacatgttctttttttgttgtgtagaatggggataatgaagggggtgagaaagtaggccttttactaatttttcatctatttgacttattgattcaactaaaatgttttaagtatatgtgccaggcattgtgctaaatgctggggatacagagatgtttgcagaggtagttgaaacatctcactcctgccatagtgactcaggtaaggttgagaatttagctctgttaatctattcagaagatgtcactaagagtaagttgtttcagcactcaaaagccgcaaatctgtaaattggattaagaacacctgccctacctacccggcaatagtgtgaatccaaatgctgcaatgtgagatgaggtacaagtaaagagctgtgttttgtaaaccagtgcagctcagcattgactccctctctaagtgaaaattgcagacaggcaagtctgttttcccttgccaccttcctttgggtttggttgctctttggatgaatatgatgaggtcccacatttctgaatttattggtttgaggggaaaggctggttagacgtctttgtattgtcaatggttggtttttctctggcagtgtcagtgttagagctatcatcttccttcttaaatggcatgagcaatgagcaaacttccctcctttcaacattctcacctacatcatgtgccccttggctcacctactgagcttgccaacttctctcaaaaccaatgctgcattttgggagagcagctgtgaatgggcactgcctaaattgcctcttggggtaatctggagggtggaggtgttaactcaaacataaccctatgacttgactcagagatatccattgactttgaggattagtgtgtttgctcaggccagttgtacagccagtgtgcaagagatttggtacctttgcactaatgcacacaccagtgtctatttcattgggtttggaatccactggactctgttgacctaaacagttagggttttgattttttttgatatgcaaatttatattgagatcattttcatattcctgtcttttggtttgtctttactaaagcttggctggtggtgctgtgtccctagaattatccctgcaaccaactcccaagttacaagcttcattaagagccttagactcacttttttctagcatcttctgacctgagaaaattccactgggagtaaaggatagtatcttgtgtcatatgggtcttactctccctattttaccaatgagaaaacaaaactcagagaaagatgacttgctaatacatcaaacccatgtcctttttattgaactatgctgccatttaattaaccgcccttcccctctgagggagtaaggaaacagatcctgagttcacttgagcactttcaaaaaagcaagcagttgattgaatttggtgtcagagaggagcatactttgcaaatcaggaagagtgacagcttaccctgtcctggaacccttatcccacttccaggctgactttagttgataatgcacttctggctgtaaatgttgccaacacttcctggttttgcttaggtacagtgaaagggcatagtgagagctatttttagtgattctgttctttctgtcagcaacatgaaggagggacgtttgaataatttttgttgtagaatatttcttcatgaaaggcttttgggtgtctttaacaggtgttgggctagagccccaccaggagttgaactgcctcttgggggtcaggttccctaggagatctgtcacctcttcaggagtatttgagaacattgtgtagttacagcttcactaaatgcacgtgacaggcttctgtgccttgggagccctggcttatgctgaaacttctggctgaccagagcagtacagcaactttgccctgtctgtgttctgcttcctggatgcatccttcagccactaaccagcattgcaagatggagcagggtgaacaagctggagactgaatagtcttttggagtttgcgttttgattattgcaggcgtgttacaatatactggtgatttacctggtactgtggcacctcccagaaagtctggtttttgccccatgtttgatatttactaggcagaaattctttgtcctgttaactgcctcctgggagaaaaagaggcaatacagagttaaatccttaatttgcccactgagacagatgagctgtggtattccaaaagacaaattctatgactagtgtctcctgttcaatgtaagtgagaccctctttggccaatctgcttctagtcaaggctaaatggattggaataaccctagttggccaggctacacattgccagcatgtcccgttgagttttaattgcctcatgtggctgtggactttatgagtcaatcatttgtaggctccagtttgcacctagtttttttttttaaaaagtgcatttacacgcttttggtagtcctgttttatcaagaatccatggagggttttggtcagtacagctggtgcaggatcctcacggagaaacagtggagtttcacattgagttggtttgaaatggcaccccaggactttgggcctgccttacttgatagcctcgttcagtgagcaaagacttagtgagcagctcttgtatgccaagtattttgctaagctctggaaaaaagataaacaagacatggttcttgctttcaaggagtgtgtaattctttagccagatatggaaacctggaccctgagtgggagaaaggagacagatgaaaggagtccgtgattttgtaaccaagagctgcctgcatggttatgagtatcactgattttagggacgccccacagagctaaagcatttttttaatccgagaggacttttgtaactcatattagttaatcttctagctctgagatagcaacacagctcttagaattctgtaagtagcttgaggcctcctcctctactgtacatgttcttgctttcccaaaattgtaagtttggtttttcctatgaacaagactgtaattgatttttctctccctgaggaaaaaagttcggaataaatgagacatggatatgaaactacttagcacaatgcctggtacatattaggccctcagcaaatgtggctaccgtgtcattatttcatggtgagactcaaggcaaaacaagattcttaatttatgctccgtaaatgctagaggcttgggcaatacggtctgtcctgaaaaacaggactctgtgtctcattgcctctagaatccttaggtagcagtttctgttcactgtcttttcttttttaaaaatatctgctggacacaattacggccattacatgatgcaggtgattctacctattttttaaaaagaacaaaatttcttttatattgtgacagtacattttaataaaggaaaattattttcttccccctactccccctccttttttttaaaaaaaaaaaaaaaaaagaaagaaggtcttgctctgtcgccagccaggctggagtgtaatggcgtaatcatagcagctcaccacagtctcaaactcctaggctcaagtgatcctcctgccttagcctgctaagtagctacgactataggcatgtgccattacgcctggctcgtttcttcctttttttttttttttctggtaaagacagggtctcactctgttgccagactggtctcaaactcctggcctcaagtaacccttctgtctcagcctcccaaagtgctgggattacaggtgtgtgccacatgtccggccaggaaaattattttctatcttaaagaaacatagttacattttagaatgtcaattcagttaaatctttctcagtttttacctttagatggctcctggaaaggccagcgttccttttcccctctctgaattgaaagcacttgaccccatgctgcccctgcttccaggcctgtctcagttgtcatatattgtgagtccctggcaccattactgttttctaagccagtcttctaggtcttactttcaggatgctgcttcatggcatgaggatatagtttacagtgttgtagtttttttttttttaaagctttgttctttaaaaatactttttaaaaagaaatctactggttagatttattgtctcacaaaaatgtttttagagattatttttttcacaaatgttttctttctcatgctgatgatcaactgatttttgtctacaggtgttagcttctcacagtattttttcattttagagtctatttaccaaatgaccatttttagtgttaaaaggtactgaggaattgaggtatgtaaatcaggtgacataaacatgaaaattatgtgcctaaatatttttgtaatggtgtaaaataaatactttttcctgaaaacaagtattaaaattcctttgtaactgcatacagagactaatccaga

SEQ ID NO: 19502 - DNA, 4852 bp, Homo sapiens
  source 1..4852: mol_type = unassigned DNA
gggactggagaggagtgagtggcgggctgggcggcggcggccgtagccgcgggtgcctccccgcctcaccgcttcgcaggcagcaccgcctcccgggccgcggccgcccggccgggtcctctgcgcgttcccgggcccggaaccggcacacgatgcacccggctgcgttctgatcgccgccgcgcctcagcctctgccgcgatgatcccccctgagcagccgcagcagcagctgcagccgccgtcgccagccccgccgaaccatgtggtgaccaccatcgagaacctgccggccgagggcagcggcggcggcgggagcctgtccgcctcctcccgggctggcgtgcgccagaggatccgcaaagtgctgaacagggagatgttaatctctgtggccctaggccaggtgttatccctccttatttgtggaattggcttgactagcaagtatctgtcagaagatttccacgccaacacaccagtcttccagagtttcctcaattacattcttctcttcttggtctataccaccacactagccgtcagacaaggagaagaaaacctcctggcaattttacgacgaagatggtggaagtacatgattttgggactcatagacctggaagcaaattatctggtggtcaaggcttaccaatacacaactctgaccagtatccagctcctggactgttttgtgatcccagtcgtgattttgctctcctggttcttcctgctgatccggtacaaggctgtgcatttcatcggcatcgttgtctgcatcctgggaatgggctgcatggtgggagcagatgtgcttgtgggaagacatcagggagcaggggaaaataagctggtaggggaccttctggtcttaggaggagccacactctatggtatttctaacgtctgggaagaatacatcatccgaactctgagccgagtggaattcctgggaatgattggtctctttggagcatttttcagtggaattcaattagctataatggagcataaggaactgttgaaggtgccctgggactggcaaataggactgctctacgttggctttagtgcctgcatgtttggtctctacagctttatgccagtcgtcataaagaaaaccagtgccacttcagtcaacctctccttgctcacagcagacttgtacagcctgttctgtggattgtttctcttccactacaagttttcaggactttatctcctgtctttcttcaccatcctcattgggctggtgctctactcctccacctccacctacatagcccaggacccccgagtgtataagcagttccgcaatccttcaggacctgttgtggacttaccgaccacagctcaggtggaaccctcagtcacctacaccagcctgggccaggagaccgaagaggagcctcatgttcgtgtggcctagggtgaggcccgccctgccaactgaggccaactcattggccatgtttttgcccatcatctctgtattgtacatagagaaaggtatttactaggtgcagtttacacaggtggactgcaaggtagcaaatcctccaaaagcttgtgaaaggaacaagctcaacatcactggagacacaggctctaatccacctgacttggaaggatgcctagctaacgtgtatcctgatcacaactcccctgcattcattactgtgaaaatttttgaatcaaaagcaagtattattgttattatgatttgtattattattattgctgttactgttattacaccaactttcaggaggatgttttgtactcctgatggaaactattgccagacccacatgtagtcaacataaaccccacttttctatggcaattcactttttaagagtcatactttatttttttgcacagactatatgagtgatgcatgccacaggagctccacccctgagaagtttccttttcctagggacctggtggttaatggtttcctctgttacctgttggattgcctgctcaataagtattttgtgctgtgacctttgtggggaggggcaactgaccatatacttctctattctaggaatagatataaaagaaacattttagcctttttatatttcgatctctgattactccaggccattgcctttctgttgtgccacgtgattctgctaatcaagtccctgtaataacaggataaggactgttccattactgtggcttttgggagcccccagaaataatatcatttgtgtttaggacaatatataattataaaatctttctgctcctccctgtagcctctcttcaaaaactatcttttattttttttccagatttccttagtgataatatggaaattaatcaaggcactggaaaaagccatggtcctctgcccttttaattctgtgacacctttttaaaaatacaccagcatggaaattacctttattgtggaaaatcattggttgtgccacctcctaacaaagtcaaggtgctgatgtggagcagtctttgaaaatggcttaattgatttggccactttgcagtggtaacaatgtcatcattgaaaaagtctggcattttggtcatatttggcatccattcaataacagatatattgacacgacattcttttttttttttttttttttttttgagacggagtctcactctgtcgcccaggctggagtgcggtggcacgatctcagctcactgcaacctccgcctccgggattcacaccattctcctgcctcagcctcccgagtagctgggactacaggcacctgccacgacgcccagctaattttttgtatttttagtagagatggggtttcaccgtgttagccaggatggtctcgatctcctgacctcgtgatccgcccaccttggcctcccgaagtgctgggattacaggcgtgagccactgcgcccggccgacacgacattcttatggacccagagaatactgcaggatcctgataagaccttgagtgatatgtcactagtctaatctgttgcccttaaaatagcccttttttcaaacacaggaaattaagaaacaccacagacctctattatttagaatagattctatgtgtcagtatgtgatgtactcttttagtttgactgacttcaataccattcaaaaagatcctcaatggagttacagggtttataggggaaaaatacatgtttatgagacattgggcaattcaaatcaacatgtgttacataagcaagcaaagcaaaacaccagtggggtctctggaaagtaaaaggacagactacagtagaaggactgatcccagagtgcctgtacaaggcctaaatctggcaggcaaaagcatcccacactgtctgtcagcacccacatggcctttttgcctgccttctataacgggtaagtggacctacccttggagatagagaagaaaaattatcttctctgatattcggatgtaatggtcatctcagttcagccccctaggaaacatgttttattttccatggggaaaatatcagcgttaaagctctatcaaatcaaaacaactttgccaacatcttctctctgctaccttttaaaccaattaaatacctttctctgaatattttgtccattcagatccgaagacctttaaagactgtggttttatttttgtgtttacattcctttggtttgaataatttgcttgatttattgcatttttagtatttattttaagccagatgttttcatctttgattcatttttatgacattaatttgtagacacttagtaaagtcttatgagaagcaagtggatgaaattatctccaagtccactcagtagactggagttttttaaaaatataaatttccaaaaagtttgcaatcaacagatggctaaaggttgccatctgaattattttataggatattttaattgactccattgtatggaaaccaagtgtgaatgttaagatgaatttgccgtataccctttatcattcggtgtccttgtactcagactttcatgtccctgggtgacctcaatgtgttggtttgtctccatttagaaaggttgataatatattgaattgttcaagatcaggagttccagactgaccctccaggaaaaaaaaaatcgcaaagaacaaattctttttctgtgtaaaaaacactgatcctttgggaatggggcgggaaatgggagtaggacaacattaactttagctgttttagtttctgagatttcataacctcagtagacaccagcaaaattttcagtttctaactccaccaccaatctctcctcaatgaataagactttagcaatttatatagaatttgatcaggtaagagcgaaccacaattctcctgaaccctgctagagattaagtggtggttctcacttcctcaatgaaaacttgcactggggacagcgcttgccttggtcagaccttcccacatctacatactctcaaatacatgaccaggtgatcaagcaatggaaaaatttgcaccaccgtgtcccatgaaattgtttcaatgtttagtttagatattgctaacttgtgctattaaccttttgacaagcgtgtagtattgtttgttttgggtttctttttgatttataactatttagtagtccccagctagctaccagtacagattttaccccatgggtaggattctattgttaagccacataacaaagcacactaattctgacaacactgcaaatggaaaatacgaaccaaaaaaaagttacaccgataagttcaacaaactgtccatttttgatatttgcatgctcccctatggactggctgtggcaatgtaatgcctgtataatgttttcaaataaaaataaatgctttatgaaagcaccgaa

SEQ ID NO: 19503 - DNA, 4481 bp, Homo sapiens
  source 1..4481: mol_type = unassigned DNA
cagggagatgttaatctctgtggccctaggccaggtgttatccctccttatttgtggaattggcttgactagcaagtatctgtcagaagatttccacgccaacacaccagtcttccagagtttcctcaattacattcttctcttcttggtctataccaccacactagccgtcagacaaggagaagaaaacctcctggcaattttacgacgaagatggtggaagtacatgattttgggactcatagacctggaagcaaattatctggtggtcaaggcttaccaatacacaactctgaccagtatccagctcctggactgttttgtgatcccagtcgtgattttgctctcctggttcttcctgctgatccggtacaaggctgtgcatttcatcggcatcgttgtctgcatcctgggaatgggctgcatggtgggagcagatgtgcttgtgggaagacatcagggagcaggggaaaataagctggtaggggaccttctggtcttaggaggagccacactctatggtatttctaacgtctgggaagaatacatcatccgaactctgagccgagtggaattcctgggaatgattggtctctttggagcatttttcagtggaattcaattagctataatggagcataaggaactgttgaaggtgccctgggactggcaaataggactgctctacgttggctttagtgcctgcatgtttggtctctacagctttatgccagtcgtcataaagaaaaccagtgccacttcagtcaacctctccttgctcacagcagacttgtacagcctgttctgtggattgtttctcttccactacaagttttcaggactttatctcctgtctttcttcaccatcctcattgggctggtgctctactcctccacctccacctacatagcccaggacccccgagtgtataagcagttccgcaatccttcaggacctgttgtggacttaccgaccacagctcaggtggaaccctcagtcacctacaccagcctgggccaggagaccgaagaggagcctcatgttcgtgtggcctagggtgaggcccgccctgccaactgaggccaactcattggccatgtttttgcccatcatctctgtattgtacatagagaaaggtatttactaggtgcagtttacacaggtggactgcaaggtagcaaatcctccaaaagcttgtgaaaggaacaagctcaacatcactggagacacaggctctaatccacctgacttggaaggatgcctagctaacgtgtatcctgatcacaactcccctgcattcattactgtgaaaatttttgaatcaaaagcaagtattattgttattatgatttgtattattattattgctgttactgttattacaccaactttcaggaggatgttttgtactcctgatggaaactattgccagacccacatgtagtcaacataaaccccacttttctatggcaattcactttttaagagtcatactttatttttttgcacagactatatgagtgatgcatgccacaggagctccacccctgagaagtttccttttcctagggacctggtggttaatggtttcctctgttacctgttggattgcctgctcaataagtattttgtgctgtgacctttgtggggaggggcaactgaccatatacttctctattctaggaatagatataaaagaaacattttagcctttttatatttcgatctctgattactccaggccattgcctttctgttgtgccacgtgattctgctaatcaagtccctgtaataacaggataaggactgttccattactgtggcttttgggagcccccagaaataatatcatttgtgtttaggacaatatataattataaaatctttctgctcctccctgtagcctctcttcaaaaactatcttttattttttttccagatttccttagtgataatatggaaattaatcaaggcactggaaaaagccatggtcctctgcccttttaattctgtgacacctttttaaaaatacaccagcatggaaattacctttattgtggaaaatcattggttgtgccacctcctaacaaagtcaaggtgctgatgtggagcagtctttgaaaatggcttaattgatttggccactttgcagtggtaacaatgtcatcattgaaaaagtctggcattttggtcatatttggcatccattcaataacagatatattgacacgacattcttttttttttttttttttttttttgagacggagtctcactctgtcgcccaggctggagtgcggtggcacgatctcagctcactgcaacctccgcctccgggattcacaccattctcctgcctcagcctcccgagtagctgggactacaggcacctgccacgacgcccagctaattttttgtatttttagtagagatggggtttcaccgtgttagccaggatggtctcgatctcctgacctcgtgatccgcccaccttggcctcccgaagtgctgggattacaggcgtgagccactgcgcccggccgacacgacattcttatggacccagagaatactgcaggatcctgataagaccttgagtgatatgtcactagtctaatctgttgcccttaaaatagcccttttttcaaacacaggaaattaagaaacaccacagacctctattatttagaatagattctatgtgtcagtatgtgatgtactcttttagtttgactgacttcaataccattcaaaaagatcctcaatggagttacagggtttataggggaaaaatacatgtttatgagacattgggcaattcaaatcaacatgtgttacataagcaagcaaagcaaaacaccagtggggtctctggaaagtaaaaggacagactacagtagaaggactgatcccagagtgcctgtacaaggcctaaatctggcaggcaaaagcatcccacactgtctgtcagcacccacatggcctttttgcctgccttctataacgggtaagtggacctacccttggagatagagaagaaaaattatcttctctgatattcggatgtaatggtcatctcagttcagccccctaggaaacatgttttattttccatggggaaaatatcagcgttaaagctctatcaaatcaaaacaactttgccaacatcttctctctgctaccttttaaaccaattaaatacctttctctgaatattttgtccattcagatccgaagacctttaaagactgtggttttatttttgtgtttacattcctttggtttgaataatttgcttgatttattgcatttttagtatttattttaagccagatgttttcatctttgattcatttttatgacattaatttgtagacacttagtaaagtcttatgagaagcaagtggatgaaattatctccaagtccactcagtagactggagttttttaaaaatataaatttccaaaaagtttgcaatcaacagatggctaaaggttgccatctgaattattttataggatattttaattgactccattgtatggaaaccaagtgtgaatgttaagatgaatttgccgtataccctttatcattcggtgtccttgtactcagactttcatgtccctgggtgacctcaatgtgttggtttgtctccatttagaaaggttgataatatattgaattgttcaagatcaggagttccagactgaccctccaggaaaaaaaaaatcgcaaagaacaaattctttttctgtgtaaaaaacactgatcctttgggaatggggcgggaaatgggagtaggacaacattaactttagctgttttagtttctgagatttcataacctcagtagacaccagcaaaattttcagtttctaactccaccaccaatctctcctcaatgaataagactttagcaatttatatagaatttgatcaggtaagagcgaaccacaattctcctgaaccctgctagagattaagtggtggttctcacttcctcaatgaaaacttgcactggggacagcgcttgccttggtcagaccttcccacatctacatactctcaaatacatgaccaggtgatcaagcaatggaaaaatttgcaccaccgtgtcccatgaaattgtttcaatgtttagtttagatattgctaacttgtgctattaaccttttgacaagcgtgtagtattgtttgttttgggtttctttttgatttataactatttagtagtccccagctagctaccagtacagattttaccccatgggtaggattctattgttaagccacataacaaagcacactaattctgacaacactgcaaatggaaaatacgaaccaaaaaaaagttacaccgataagttcaacaaactgtccatttttgatatttgcatgctcccctatggactggctgtggcaatgtaatgcctgtataatgttttcaaataaaaataaatgctttatgaaagcaccgaa

SEQ ID NO: 19504 - DNA, 1908 bp, Homo sapiens
  source 1..1908: mol_type = unassigned DNA
gggagagctgccaggctgacggagaggccggcccgagtgggggccgctccgccgccgccgccgccgccgccgctgtgatgcggagccggtgctgcgccgggcggtggagtcagagcccgggcgcgggagcaggagctgcaagatcagcaccagcggctccggcacctgcaccagctcccgggccccgcgctgcgctctccgccccgccgcactcggggccgtcgccccgcgctctctatggatgtcaaggcggcccccaacggggtggccactatcgaggaccggatcctgcggatcaccggctactatggctattatccaggttactccagccagaaaagtacctccagatcatcagtcactagatgtaaaccaggagccaactgccccagttcacacagtggcatcagtagacaactgtccccactgtctgtcaccgaagattcctctgctcctattcttgaacttcaaaaccaaggatcctcaggagtttgtggacacagagttgagagacagaacagatcagcagacgatgggacacagactcattctgagaacagcagccaagaaaacagaatcaaggctcgctgcctgtcctgcacgtccatggttctgaagggcatctggggactcttgatcatcttgtcagtatcatcatcttgggttggaactacacagattgtaaaaattacttataagaacttctattgcccatttttcatgacttggttttcaacaaactggaacattatgtttttcccagtctattattctggtcatctagccactgctcaagaaaagcaatctccaatgaaaaaattcagggaatgcagtcggatttttggtgaagatggtctgacgctgaaactctttcttaaaagaactgctcccttttctattctatggactttgactaattacctttatttactggctttaaagaagctgacggccacggatgtctccgctctgttctgttgtaacaaagcctttgtcttcttgctgtcatggattgtgctgaaagacaggttcatgggagtgaggatagttgctgcaataatggcaattaccggcattgtcatgatggcatatgcagataatttccacgctgattccatcataggagtggcatttgcggtgggctcagcctctacatctgcattatataaggtcttgtttaaaatgtttcttggaagtgccaactttggggaagctgcacactttgtctccaccttgggtttcttcaatttgatcttcatctccttcaccccagtcatcttgtatttcaccaaggtggagcactggtcctcttttgctgctctgccatggggctgtctctgtgggatggcagggctgtggctggccttcaacatcctggtgaatgttggggtggtgctgacatacccaatcctaatctccattgggacagtgctcagcgttcctggaaatgcagctgtggatctcctaaagcaggaggtgatattcaatgttgtccgcctggctgctaccatcatcatctgcattgggtttctgctgatgctgttgcctgaggaatgggatgaaatcaccctgaggttcatcaacagcctgaaggaaaagaagagtgaggagcatgtggatgatgtgactgatcccagcatacacctgcggggcagaggcagagccaatgggacagtgtctataccactggcttagagagggacatattttgaatgcacgtgtatgtatattctgtgaatataacaaaattttctcactacctgtacactcaaacgacagtattaactctgaatttggataaatcatatgtgaaataatgccaacaataaaagtttacatttatatgcttatcaaggaattggtgtaaataatcataatggatttttttattaaaacacatttgtcctt

SEQ ID NO: 19505 - DNA, 1608 bp, Homo sapiens
  source 1..1608: mol_type = unassigned DNA
atggatgaactactcttggatctcttccacaaactgaccagtgggaggcagctggcagcaggcaatgggctttgcggtatatcacataaggaacaggaggtacctccagatcatcagtcactagatgtaaaccaggagccaactgccccagttcacacagtggcatcagtagacaactgtccccactgtctgtcaccgaagattcctctgctcctattcttgaacttcaaaaccaaggatcctcaggagtttgtggacacagagttgagagacagaacagatcagacgatgggacacagactcattctgagaacagcagccaagaaaacagaatcaaggctcgctgcctgtcctgcacgtccatggttctgaagggcatctggggactcttgatcatcttgtcagtatcatcatcttgggttggaactacacagattgtaaaaattacttataagaacttctattgcccatttttcatgacttggttttcaacaaactggaacattatgtttttcccagtctattattctggtcatctagccactgctcaagaaaagcaatctccaatgaaaaaattcagggaatgcagtcggatttttggtgaagatggtctgacgctgaaactctttcttaaaagaactgctcccttttctattctatggactttgactaattacctttatttactggctttaaagaagctgacggccacggatgtctccgctctgttctgttgtaacaaagcctttgtcttcttgctgtcatggattgtgctgaaagacaggttcatgggagtgaggatagttgctgcaataatggcaattaccggcattgtcatgatggcatatgcagataatttccacgctgattccatcataggagtggcatttgcggtgggctcagcctctacatctgcattatataaggtcttgtttaaaatgtttcttggaagtgccaactttggggaagctgcacactttgtctccaccttgggtttcttcaatttgatcttcatctccttcaccccagtcatcttgtatttcaccaaggtggagcactggtcctcttttgctgctctgccatggggctgtctctgtgggatggcagggctgtggctggccttcaacatcctggtgaatgttggggtggtgctgacatacccaatcctaatctccattgggacagtgctcagcgttcctggaaatgcagctgtggatctcctaaagcaggaggtgatattcaatgttgtccgcctggctgctaccatcatcatctgcattgggtttctgctgatgctgttgcctgaggaatgggatgaaatcaccctgaggttcatcaacagcctgaaggaaaagaagagtgaggagcatgtggatgatgtgactgatcccagcatacacctgcggggcagaggcagagccaatgggacagtgtctataccactggcttagagagggacatattttgaatgcacgtgtatgtatattctgtgaatataacaaaattttctcactacctgtacactcaaacgacagtattaactctgaatttggataaatcatatgtgaaataatgccaacaataaaagtttacatttatatgcttatc

SEQ ID NO: 19506 - DNA, 2700 bp, Homo sapiens
  source 1..2700: mol_type = unassigned DNA
atggatgaactactcttggatctcttccacaaactgaccagtgggaggcagctggcagcaggcaatgggctttgcggtatatcacataaggaacaggaggtatggaagccaggacataatattttagtgaaaatgagaaaggaagataaatcactggtgtggcttatacattcaacacttgctcgctacacacaagttaccaactttttaggtaactatggacaatatttgatctcaatcccatcccaacttgctacccagcctatttctagactttctccttttgatgtataattgccaagggattggaaatggaatattgggaaaatgaaacccaatattaccctgagaaaagaggagaaggcataccttataaaaataaatttcaaaagataaattttaaaagactcttggagtatctgagcatcagccactcttgaagaacaggaataattgtgagttcactgaatttcagacagtccgtttttatcgaacttgaattgtccaattagaaacatagctgtacaaggtataataaacattctgaatatgtaaaataagaaccctgggtatttttgatgctcttataataacaatagtaacatagcattaatttaagtgtagcagtcagtatataatgcttctgttaactttctgagtaactgtaaatttttaattttctaaatccaagattacatagtacattttattttatttgtatgggtgcatagtaggtatatatatttacaggtacaggagatatttttatacagacataccatgtgtaacatgtcatctatcacctcaagcatttatcatttctttgtgttacaaacatttcaattatgatcttagttattttacaatctacaatcaattattgttgactgtagtcaccctcttgtgctttcaaatattagatcttactcattctaactatatgtttgtactcattaactgtccccactccctccaccctcaacccactatccatcctaggttctggcaaccatcattccaaagaaatagaagaaatagaaatgcttggagaagtgattaatttcaggagtggggcagggaaactataagacaagcccagggcatcttgcagtgccagaaagtaaggaagagctcaaacgcaaaagaatggggacaaatcaaaggtacctccagatcatcagtcactagatgtaaaccaggagccaactgccccagttcacacagtggcatcagtagacaactgtccccactgtctgtcaccgaagattcctctgctcctattcttgaacttcaaaaccaaggatcctcaggagtttgtggacacagagttgagagacagaacagatcagcagacgatgggacacagactcattctgagaacagcagccaagaaaacagaatcaaggctcgctgcctgtcctgcacgtccatggttctgaagggcatctggggactcttgatcatcttgtcagtatcatcatcttgggttggaactacacagattgtaaaaattacttataagaacttctattgcccatttttcatgacttggttttcaacaaactggaacattatgtttttcccagtctattattctggtcatctagccactgctcaagaaaagcaatctccaatgaaaaaattcagggaatgcagtcggatttttggtgaagatggtctgacgctgaaactctttcttaaaagaactgctcccttttctattctatggactttgactaattacctttatttactggctttaaagaagctgacggccacggatgtctccgctctgttctgttgtaacaaagcctttgtcttcttgctgtcatggattgtgctgaaagacaggttcatgggagtgaggattgctgggaagccctgaagatttaaggagccagatctcattcatataatccggcatgccactatgatgaacatattgagacaacacttctttagaaggagatataccagcaataaaatccgttgtattaaagcaaatgagcacatttaactcatggacctcactgatgcaagaggttacgtccaaaaagttgctgcaataatggcaattaccggcattgtcatgatggcatatgcagataatttccacgctgattccatcataggagtggcatttgcggtgggctcagcctctacatctgcattatataaggtcttgtttaaaatgtttcttggaagtgccaactttggggaagctgcacactttgtctccaccttgggtttcttcaatttgatcttcatctccttcaccccagtcatcttgtatttcaccaaggtggagcactggtcctcttttgctgctctgccatggggctgtctctgtgggatggcagggctgtggctggccttcaacatcctggtgaatgttggggtggtgctgacatacccaatcctaatctccattgggacagtgctcagcgttcctggaaatgcagctgtggatctcctaaagcaggaggtgatattcaatgttgtccgcctggctgctaccatcatcatctgcattgggtttctgctgatgctgttgcctgaggaatgggatgaaatcaccctgaggttcatcaacagcctgaaggaaaagaagagtgaggagcatgtggatgatgtgactgatcccagcatacacctgcggggcagaggcagagccaatgggacagtgtctataccactggc

SEQ ID NO: 19507 - DNA, 467 bp, Homo sapiens
  source 1..467: mol_type = unassigned DNA
tttatttactggctttaaagaagctgacggccacggatgtctccgctctgttctgttgtaacaaagcctttgtcttcttgctgtcatggattgtgctgaaagacaggttcatgggagtgaggattgctgggaagccctgaagatttaaggagccagatctcattcatataatccggcatgccactatgatgaacatattgagacaacacttctttagaaggagatagttgctgcaataatggcaattaccggcattgtcatgatggcatatgcagataatttccacgctgattccatcataggagtggcatttgcggtgggctcagcctctacatctgcattatataaggtcttgtttaaaatgtttcttggaagtgccaactttggggaagctgcacactttgtctccaccttgggtttcttcaatttgatcttcatctccttcaccccagtcatcttgtatttca

SEQ ID NO: 19508 - DNA, 535 bp, Homo sapiens
  source 1..535: mol_type = unassigned DNA
agaacgatgctgtgtggctccctggattcagcccccttcctagggatatgtacagacggatctgccacctcgctgggaatcccggggccagaacagaaccatcaagactagccttttcactgtatagaaatgaatctccacttgctgttggcgttatcacagtgaccggagtgatacagaagagaagtgatgttggtgcatctaagagattctctctaccctcagttgggaatcaaccagctctcttacacgagaaaacttgccaccaggtgctcatcagtggtaacagccagctacactgtcttaaagcatgtgaatgctgagatcctagccagagaaaagaaagattctactgcaatacaaatttcaaaaggagacattccagctccccttcaagactacattttggattaacaacttccaaatagttatcttccccctaggttctctctgtagtacctccagatcatcagtcactagatgtaaaccaggagccaactgccccagttcacacagtggcatcagtagacaactg

SEQ ID NO: 19509 - DNA, 530 bp, Homo sapiens
  source 1..530: mol_type = unassigned DNA
actcatagctaaaaaatctgccctttaaaatgtctcctcacgaagtaggaagcgccacttttgaccgtgtctgctgacatggtttttgatctgggaaagggggtgaggagccgactggaagcatcactttctgggatgtcagagtctccttggaagagtcctaattaaggactcagaatgattgacaggtggtggaagctcaagaaagcacacttgatatgcagcagaagacagtctgtgagttgcaaaaaacctggcaattggagaccttgaaaaacttttaaccatcaagactagccttttcactgtatagaaatgaatctccacttgctgttggcgttatcacagtgaccggagtgatacagaagagaagtgatgttggtgcatctaagagattctctctaccctcagttgggaatcaaccagctctcttacacgagaaaacttgccaccaggtgctcatcagtggtaacagccagctacactgtcttaaaggtgcctaccattgggcttttacagggaagctagtg

SEQ ID NO: 19510 - DNA, 358 bp, Homo sapiens
  source 1..358: mol_type = unassigned DNA
tgggatgtcagagtctccttggaagagtcctaattaaggactcagaatgattgacaggtggtggaagctcaagaaagcacacttgatatgcagcagaagacagtctgtgagttgcaaaaaacctggcaattggagaccttgaaaaacttttgtgtaattggtattgatgttatccatatggtggacaaatgtgatgtctgcagaatgtcaagacaatcaaagtctctgcagactctactgtgagagagaaccctcagataagacataatgaatgcatactgctttcctttccatgaaaaatgtgaacctcttttgatcttccttactgataaaggttgagaagtatgtacttgctaga

SEQ ID NO: 19511 - DNA, 1779 bp, Homo sapiens
  source 1..1779: mol_type = unassigned DNA
atggatgaactactcttggatctcttccacaaactgaccagtgggaggcagctggcagcaggcaatgggctttgcggtatatcacataaggaacaggaggtatggaagccaggacataatattttagtgaaaatgagaaaggaagataaatcactggtgtggcttatacattcaacacttgctcgctacacacaagttaccaactttttaggtacctccagatcatcagtcactagatgtaaaccaggagccaactgccccagttcacacagtggcatcagtagacaactgtccccactgtctgtcaccgaagattcctctgctcctattcttgaacttcaaaaccaaggatcctcaggagtttgtggacacagagttgagagacagaacagatcagcagacgatgggacacagactcattctgagaacagcagccaagaaaacagaatcaaggctcgctgcctgtcctgcacgtccatggttctgaagggcatctggggactcttgatcatcttgtcagtatcatcatcttgggttggaactacacagattgtaaaaattacttataagaacttctattgcccatttttcatgacttggttttcaacaaactggaacattatgtttttcccagtctattattctggtcatctagccactgctcaagaaaagcaatctccaatgaaaaaattcagggaatgcagtcggatttttggtgaagatggtctgacgctgaaactctttcttaaaagaactgctcccttttctattctatggactttgactaattacctttatttactggctttaaagaagctgacggccacggatgtctccgctctgttctgttgtaacaaagcctttgtcttcttgctgtcatggattgtgctgaaagacaggttcatgggagtgaggatagttgctgcaataatggcaattaccggcattgtcatgatggcatatgcagataatttccacgctgattccatcataggagtggcatttgcggtgggctcagcctctacatctgcattatataaggtcttgtttaaaatgtttcttggaagtgccaactttggggaagctgcacactttgtctccaccttgggtttcttcaatttgatcttcatctccttcaccccagtcatcttgtatttcaccaaggtggagcactggtcctcttttgctgctctgccatggggctgtctctgtgggatggcagggctgtggctggccttcaacatcctggtgaatgttggggtggtgctgacatacccaatcctaatctccattgggacagtgctcagcgttcctggaaatgcagctgtggatctcctaaagcaggaggtgatattcaatgttgtccgcctggctgctaccatcatcatctgcattgggtttctgctgatgctgttgcctgaggaatgggatgaaatcaccctgaggttcatcaacagcctgaaggaaaagaagagtgaggagcatgtggatgatgtgactgatcccagcatacacctgcggggcagaggcagagccaatgggacagtgtctataccactggcttagagagggacatattttgaatgcacgtgtatgtatattctgtgaatataacaaaattttctcactacctgtacactcaaacgacagtattaactctgaatttggataaatcatatgtgaaataatgccaacaataaaagtttacatttatatgcttatcaaggaattggtgtaaataatcataatggatttttttattaaaacacatttgtcctt

SEQ ID NO: 19512 - DNA, 8066 bp, Homo sapiens
  source 1..8066: mol_type = unassigned DNA
gcacaggaggggaggagaccgcgcgcgggacggggaggaatggcctgtccgcgttaaaccatcacaagccatggttgcggaagggccacgcgtcccccagtaggagaatgactccgattcgtgaccctcagcgccggtgcatgtcgatgtaagtgcgaggccggcgagcagagtgtgagtgggggttggtggtgaggggagattctgatgcaatcggcccggaaaggaggagagccaggcgagcgcggactggggcggccacgccactccgccagaaggtcgccaggagcctccgcccttcaccttcctccgaaatccgccaggccacgccaagctccctgcccaacccttactgacgggggccacattttcccggcctccgcagccagaccttgacacaaaggacatcaaactgccgagggtaaaaaccccggaagggcggacacctccacatcgccttttgccacctttccctttatttccggagatatttattgagtgtctactgtgtgccaggcactatatctatgtgcatagaaaaaccctggaaggccatacaacaatatatatagagtgatcgtctctgcttgctgagctaacaggggtgtcaagcttccattttggtatctacttctaaatacactcagaacaggagaaatttggactaattttcaaactacagacactttctaatcatgatgcatttcaaaagtggactcgaattaactgagttgcaaaacatgacagtgcccgaggatgataacattagcaatgactccaatgatttcaccgaagtagaaaatggtcagataaatagcaagtttatttctgatcgtgaaagtagaagaagtctcacaaacagccatttggaaaaaaagaagtgtgatgagtatattccaggtacaacctccttaggcatgtctgtttttaacctaagcaacgccattatgggcagtgggattttgggactcgcctttgccctggcaaacactggaatcctactttttctggtacttttgacttcagtgacattgctgtctatatattcaataaacctcctattgatctgttcaaaagaaacaggctgcatggtgtatgaaaagctgggggaacaagtctttggcaccacagggaagttcgtaatctttggagccacctctctacagaacactggagcaatgctgagctacctcttcatcgtaaaaaatgaactaccctctgccataaagtttctaatgggaaaggaagagacattttcagcctggtacgtggatggccgcgttctggtggtgatagttacctttggcataattctccctctgtgtctcttgaagaacttagggtatcttggctatactagtggattttccttgagctgtatggtttttttcctaattgtggttatttacaagaaatttcaaattccctgcattgttccagagctaaattcaacaataagtgctaattcaacaaatgctgacacgtgtacgccaaaatatgttaccttcaattcaaagaccgtgtatgctttacccaccattgcatttgcatttgtttgccacccgtcagtcctgccaatttacagtgagcttaaagaccgatcacagaaaaaaatgcagatggtttcaaacatctcctttttcgccatgtttgttatgtacttcttgactgccatttttggctacttgacattctatgacaacgtgcagtccgacctccttcacaaatatcagagtaaagatgacattctcatcctgacagtgcggctggctgtcattgttgctgtgatcctcacagtgccggtgttatttttcacggttcgttcatctttatttgaactggctaagaaaacaaagtttaatttatgtcgtcataccgtggttacctgcatactcttggttgttatcaacttgttggtgatcttcataccctccatgaaggatatttttggagtcgtaggagttacatctgctaacatgcttattttcattcttccttcatctctttatttaaaaatcacagaccaggatggagataaaggaactcaaagaatttgggctgcccttttcttgggcctgggggtgttgttctccttggtcagcattcccttggtcatctatgactgggcctgctcatcgagtagtgacgaaggccactgaaacccgccgagaaaaagaaacatccctgttgtctgctcagtcaagtccccacacatcagcaatctctcaccacttcttttgcaagtttacagaagcaaacagaaatgtacaggatacttaaaatggaataactttttggttgcaaaacagagacatggttctataatgcttcatgtccctccaagatttgagatcaatttagggattgtgaaatttttttttcaaatttcatacaatcatatttcccagtacttttcacaatcattttttacccatctaactctatgttttgtggcttcccggtctcttagaactttgaaaacatgatatacaataatgtttatttattatacatccagattctgaaataattttcctactgatgttcagctcacactatctgtacctttttagaagagaaaagaatcttgaattgtatatatttattttgctttacagaaaaaaatggtttcgtaaataatttgcctattttggttaacatagcacatggagataatcatctgaaagttatagggcactgccactgctgaatcagagcatgcccaatatttgaggtggctctgatttcctggcagctgaactcgggtagtccagtggcctagctggtaccacatctattcccatccagagacattctctggcaagtgttctcagctgaaaagtggttggggatgattcttaccttggtaattaaatgaagctacacatttgggtaatctagcaaatgaagtattttttccctcttggcaacttgtgtcagagttactctggtctgagtcaactttcgctggggaaaacctatggaacctactgcaaaaagattgtccaaaatgcctaagaaaatactcctctgatgcatttagccttcaaccctacctgtcttgctgaagggagaaaaatgttttagtacattataggcccagcagcttttattcatgtccaccagctagttgcacagagaatcatgtgtacctaactaaggatgatctaggataagtaactcctgttttatattgagtattttagggaagtctttaaaagacttgttttatatctataaatctaggttattacaaatacaagaattttgtaccttaaataagcctcatttctatttcttcttcattaattctccatctagtcttgtgaaaaaaaaaaaaaaaaaaccctcagagatagtctttgtgaagagcttctgacagaatcactgagtaccttccttcccccagatgaggaagacaagggggtctcagtgtctgtgctgtctcctcttctcttccccaaccaaggactgtgccattactgcccgtctcaactgtccatgcaggaggacagagttgcctggtactcttacccttgtccctctcctaaagggagcacaaggaaactgaagagactgaaaaagaagagagtttgtagctgaaaaagaatagggatagcaaggaaacccagaactgcattcccctaagtggggccatcccatgtgattgaattgtccatagcttgcctatggtgagaaatgtgcatgctccgtgagctggtctcttgaaacaggacttatgcttcctctatattctggttaaattttccaaacacataagttcactgagcacagatttcttatccagagacaagtagaatctaaccgcagactgttggcagagtttccaggcacttagccatgttcccttcctgactcaaatccccaaaggccttcactctcactgagaatcacactactgtcccatagataaggcaggcattgaagcacctgtcgtgatcctctaggggggagaatgaaaggttatttcctgcattgcatcatcatagcttttaatataatgctacagaatcatatccacattaggttagagttcagatatttggatatgaatacctaacctagccatatccatggccatctctgttcttttcagcaatgttttccatattatattagcaatgacagaaacagaacaagccaagatccagtcagttcttgggagcttgtctagagcaccaagtaatgaaatagccaggtagtgggatgactgtacctttaaaaatacataatttagtttgcaagctatattatgctactttctattttccttgttactttatagcaattcattttaccctcacaaagtcaatttagaaccttatcattaactgggatgtgtagtgatatttttgggcctctgggtttcatgtgtcaatacaaggaatatttatttaaaatagatttatttagaggaggcacagtgttgttgatctgtgtgacaccacccatatttttaaaaacctttgtatgtttctctaaatttgttgttgactgaatataatagaccctaccataattcgtcaaatatcactgattagttacatcctttgtgtgagattagctgtaaagtatactgctcttattcttattcagaatagttaattggtagccaaaaatacatgtatcacagatgttaggtcgaatttaaacagcacagtcaagtgctatggaagtttttctgctaaattagtagattaaagaatactataccctaggcatggggagcagcacgttttcctttggtaggtaggatctctatactagtgaacagtgccagttccacactttggacttagaactgttctctagttattgtaacacagaatactgtcaatccctaatttacttaatgttacttattggaagtggggctgatgaaatacgcacaggagggaaatctactgtgtttaggcacaggcagccccagtgtataaggagatcatattccaaaaggttgtcagttggttgtttgcaacctggaatgtattttcctttagagaccaggttatccatggtggttaggcccctagagcagctggaaaagatgatcaaaccaataggttagctgacatcgaataatgtaataggtttgctaaagaatctaaccatcaaatataatattgtttccagggagggtgtttgttcagagttgcctgttagtagaatctggactgtccatcccagccacatcccacctactggacagtaggggtagagatgccaccagactacaggtgaccagattggcctgaaacatggtgtccagtaaaaacggggaggaataagtccatgactgctggagagcttggtggtaggaggagggtgaaggagggtgagggggcctctcatgggtcagaaacctccagggacatccctcagctggtaactctgctgttgtccggagggttcaggcttggtgtgccttcttctgtttgtctgacttttggctcctatggttcatctcctgccctgcccaccacagaaaaggatgctgctgcatagcttctccaatgtaccagtcattgaggccagcgcgcagcacttttaatgtttttagtgctagtaactgtgttttaactctccaggaataagctgggaggttagaaaacaagaaaaaagggggaaaaaaaaacctctccacccactttccttttttacagttacagaccctgttgagaaaaagaagcacccagatgggtgatggtgatagggcttgtggtggacacagggttgtggtaagattcctcagtgcttcggcgagcacctaagactattaccctggaactgactgctttctagagcttgattcatgcctctaagccagtggttctcaaagtgtggcccctagaccagtagcatcagcatcatcggggacctcattagaatgcagattctcagccccctcccagacatggtgaagtcagaagctctcagggagggactcagcaaatgattctaaagcgcatcaagtttgagaaccaccctaagccaatgagtctcccttttacttcccattagtcctccctcaccagatgattcctaggactcatggtgcaacatacaggagccaggctttagggaggggaggaaaggagcctggcggcaggggtctctgcaatggcaagaaagtgagtgaatccagcgctgccacctggttatccccttctcgttgaaaatagcagcgcaggtgcaaattcctaaacacaggctgcctgcactcggtgttacctcgggctgaggcatgataatattttattttttaaagctgtgaggaaatgaaagtgaggctttggttggggcgaggcagttgtgaaagaaattaaaataaaagaccctttgtaaatgcagacttagaagaaatactgaatttgtgtcagaagttctccagtgtttgtgttaatcgtgtggtgataatcctgtcctccttttaaagcgaattctctactgaaaggtctgctctgcttaaggagctacaaactgctctcaaaagaatgaaatactgagttccaattcagtgaggcacagtgttggactatggcacatttagttggagtcggggggaggtcaggaatatgatcagataatggattttataccttagagcaaaatctattagtctctctcagtttatcaatttaaatggctttaggcttatagggggtgtaaactttaagaatataattctcccattcaagtttacagcaaacatctagccaccttcaaaacaaagaatatacagaccatcatttagcaatactaatacatgattttccttggggatggcaggtttgagaatcctttagcaacaggacatacttcccctaaattacagtgaattatttataacgagataaagctttcaggtacaagctgaaggtggggtgtctaacaactaaaaactatcactaaatctcaaagagaaagttcttgcaaaatatgtaaagttcacaaggtgcagacattttccttctttaggcttttatctaaggaagggctatgaaactgggcccatctgtatacaggctcaaatttacgtttttaaaggaagaatctatgcagctgaggcttattgcaggaaatacttcatttgtatgtaaatattattgtaaataaataggaggctgtatatttttgaagttgttgatctgcactgaaatagaagtctctaggatctgcatataaacaataaatgtttcctagaaattagtggttttgtttgggaattagaaaaatttacattctctcccaggtaacatagttctctcaatgtaaacttggaacctgaaaccctacttaatttagagaaagaaatgtctgagaaatagttcccttgatttcttatgctggcattaagatcaattatttaacagatagtcctctgagatacaagtaaggaatatttagacacaaatccttgtcctatagaaacagatatacccaaatgacaaattgtttcttcataatgatcttccatttttaacactgataccactacacagtacatatgaaaacagaagctggggagaagaatgtttttttcacaattgaattgctgcatttctcaaactttgggatctatgaaagcggggagagggaacctgaatattaattatgagcacaaatttgaaggaaagaaaacaaagaaccattatctaatcaagctttgaaagtcctgcatgtttgccttttattttagtgttgacgccaacatagactgtctaaggtatttttttccccaaacacttgaatcttggtcgttggtatgtaatccactctctagagtccagtgtactttagacttcatctgagtccaatacatgtaccacactactgttttattaatgtaaaaaccttgtaaatgaatttcagatgggtgatttaagtgagtcacaagtcacaaaactttgctattcatagttaatcaaatagaactgggttttttttttcagagtgtggtgtaaataaagaaatataagaagttctgttctataactgctctgttaacatagtttttaaacattaaaaaatgtgaactaaaagta

SEQ ID NO: 19513 - DNA, 3196 bp, Homo sapiens
  source 1..3196: mol_type = unassigned DNA
accgcgcgcgggacggggaggaatggcctgtccgcgttaaaccatcacaagccatggttgcggaagggccacgcgtcccccagtaggagaatgactccgattcgtgaccctcagcgccggtgcatgtcgatgtaagtgcgaggccggcgagcagagtgtgagtgggggttggtggtgaggggagattctgatgcaatcggcccggaaaggaggagagccaggcgagcgcggactggggcggccacgccactccgccagaaggtcgccaggagcctccgcccttcaccttcctccgaaatccgccaggccacgccaagctccctgcccaacccttactgacgggggccacattttcccggcctccgcagccagaccttgacacaaaggacatcaaactgccgagggtaaaaaccccggaagggcggacacctccacatcgccttttgccacctttccctttatttccggaggggtgtcaagcttccattttggtatctacttctaaatacactcagaacaggagaaatttggactaattttcaaactacagacactttctaatcatgatgcatttcaaaagtggactcgaattaactgagttgcaaaacatgacagtgcccgaggatgataacattagcaatgactccaatgatttcaccgaagtagaaaatggtcagataaatagcaagtttatttctgatcgtgaaagtagaagaagtctcacaaacagccatttggaaaaaaagaagtgtgatgagtatattccaggtacaacctccttaggcatgtctgtttttaacctaagcaacgccattatgggcagtgggattttgggactcgcctttgccctggcaaacactggaatcctactttttctggtacttttgacttcagtgacattgctgtctatatattcaataaacctcctattgatctgttcaaaagaaacaggctgcatggtgtatgaaaagctgggggaacaagtctttggcaccacagggaagttcgtaatctttggagccacctctctacagaacactggagcaatgctgagctacctcttcatcgtaaaaaatgaactaccctctgccataaagtttctaatgggaaaggaagagacattttcagcctggtacgtggatggccgcgttctggtggtgatagttacctttggcataattctccctctgtgtctcttgaagaacttagggtatcttggctatactagtggattttccttgagctgtatggtttttttcctaattgtggttatttacaagaaatttcaaattccctgcattgttccagagctaaattcaacaataagtgctaattcaacaaatgctgacacgtgtacgccaaaatatgttaccttcaattcaaagaccgtgtatgctttacccaccattgcatttgcatttgtttgccacccgtcagtcctgccaatttacagtgagcttaaagaccgatcacagaaaaaaatgcagatggtttcaaacatctcctttttcgccatgtttgttatgtacttcttgactgccatttttggctacttgacattctatgacaacgtgcagtccgacctccttcacaaatatcagagtaaagatgacattctcatcctgacagtgcggctggctgtcattgttgctgtgatcctcacagtgccggtgttatttttcacggttcgttcatctttatttgaactggctaagaaaacaaagtttaatttatgtcgtcataccgtggttacctgcatactcttggttgttatcaacttgttggtgatcttcataccctccatgaaggatatttttggagtcgtaggagttacatctgctaacatgcttattttcattcttccttcatctctttatttaaaaatcacagaccaggatggagataaaggaactcaaagaatttgggctgcccttttcttgggcctgggggtgttgttctccttggtcagcattcccttggtcatctatgactgggcctgctcatcgagtagtgacgaaggccactgaaacccgccgagaaaaagaaacatccctgttgtctgctcagtcaagtccccacacatcagcaatctctcaccacttcttttgcaagtttacagaagcaaacagaaatgtacaggatacttaaaatggaataactttttggttgcaaaacagagacatggttctataatgcttcatgtccctccaagatttgagatcaatttagggattgtgaaatttttttttcaaatttcatacaatcatatttcccagtacttttcacaatcattttttacccatctaactctatgttttgtggcttcccggtctcttagaactttgaaaacatgatatacaataatgtttatttattatacatccagattctgaaataattttcctactgatgttcagctcacactatctgtacctttttagaagagaaaagaatcttgaattgtatatatttattttgctttacagaaaaaaatggtttcgtaaataatttgcctattttggttaacatagcacatggagataatcatctgaaagttatagggcactgccactgctgaatcagagcatgcccaatatttgaggtggctctgatttcctggcagctgaactcgggtagtccagtggcctagctggtaccacatctattcccatccagagacattctctggcaagtgttctcagctgaaaagtggttggggatgattcttaccttggtaattaaatgaagctacacatttgggtaatctagcaaatgaagtattttttccctcttggcaacttgtgtcagagttactctggtctgagtcaactttcgctggggaaaacctatggaacctactgcaaaaagattgtccaaaatgcctaagaaaatactcctctgatgcatttagccttcaaccctacctgtcttgctgaagggagaaaaatgttttagtacattataggcccagcagcttttattcatgtccaccagctagttgcacagagaatcatgtgtacctaactaaggatgatctaggataagtaactcctgttttatattgagtattttagggaagtctttaaaagacttgttttatatctataaatctaggttattacaaatacaagaattttgtaccttaaataagcctcatttctatttcttcttcattaattctccatctagtcttgtg

SEQ ID NO: 19514 - DNA, 3436 bp, Homo sapiens
  source 1..3436: mol_type = unassigned DNA
agaccgcgcgcgggacggggaggaatggcctgtccgcgttaaaccatcacaagccatggttgcggaagggccacgcgtcccccagtaggagaatgactccgattcgtgaccctcagcgccggtgcatgtcgatgtaagtgcgaggccggcgagcagagtgtgagtgggggttggtggtgaggggagattctgatgcaatcggcccggaaaggaggagagccaggcgagcgcggactggggcggccacgccactccgccagaaggtcgccaggagcctccgcccttcaccttcctccgaaatccgccaggccacgccaagctccctgcccaacccttactgacgggggccacattttcccggcctccgcagccagaccttgacacaaaggacatcaaactgccgagggtaaaaaccccggaagggcggacacctccacatcgccttttgccacctttccctttatttccggagagtcaaggaaacttttgagctatttacagcttgtagcaattatgtaaagtatactcctctgaacaaaatttggagcatgtttgtttctctctacctgatttccccagaatctggaaactatctatatttattgagtgtctactgtgtgccaggcactatatctatgtgcatagaaaaaccctggaaggccatacaacaatatatatagagtgatcgtctctgcttgctgagctaacaggggtgtcaagcttccattttggtatctacttctaaatacactcagaacaggagaaatttggactaattttcaaactacagacactttctaatcatgatgcatttcaaaagtggactcgaattaactgagttgcaaaacatgacagtgcccgaggatgataacattagcaatgactccaatgatttcaccgaagtagaaaatggtcagataaatagcaagtttatttctgatcgtgaaagtagaagaagtctcacaaacagccatttggaaaaaaagaagtgtgatgagtatattccaggtacaacctccttaggcatgtctgtttttaacctaagcaacgccattatgggcagtgggattttgggactcgcctttgccctggcaaacactggaatcctactttttctggtacttttgacttcagtgacattgctgtctatatattcaataaacctcctattgatctgttcaaaagaaacaggctgcatggtgtatgaaaagctgggggaacaagtctttggcaccacagggaagttcgtaatctttggagccacctctctacagaacactggagcaatgctgagctacctcttcatcgtaaaaaatgaactaccctctgccataaagtttctaatgggaaaggaagagacattttcagcctggtacgtggatggccgcgttctggtggtgatagttacctttggcataattctccctctgtgtctcttgaagaacttagggtatcttggctatactagtggattttccttgagctgtatggtttttttcctaattgtggttatttacaagaaatttcaaattccctgcattgttccagagctaaattcaacaataagtgctaattcaacaaatgctgacacgtgtacgccaaaatatgttaccttcaattcaaagaccgtgtatgctttacccaccattgcatttgcatttgtttgccacccgtcagtcctgccaatttacagtgagcttaaagaccgatcacagaaaaaaatgcagatggtttcaaacatctcctttttcgccatgtttgttatgtacttcttgactgccatttttggctacttgacattctatgacaacgtgcagtccgacctccttcacaaatatcagagtaaagatgacattctcatcctgacagtgcggctggctgtcattgttgctgtgatcctcacagtgccggtgttatttttcacggttcgttcatctttatttgaactggctaagaaaacaaagtttaatttatgtcgtcataccgtggttacctgcatactcttggttgttatcaacttgttggtgatcttcataccctccatgaaggatatttttggagtcgtaggagttacatctgctaacatgcttattttcattcttccttcatctctttatttaaaaatcacagaccaggatggagataaaggaactcaaagaatttgggctgcccttttcttgggcctgggggtgttgttctccttggtcagcattcccttggtcatctatgactgggcctgctcatcgagtagtgacgaaggccactgaaacccgccgagaaaaagaaacatccctgttgtctgctcagtcaagtccccacacatcagcaatctctcaccacttcttttgcaagtttacagaagcaaacagaaatgtacaggatacttaaaatggaataactttttggttgcaaaacagagacatggttctataatgcttcatgtccctccaagatttgagatcaatttagggattgtgaaatttttttttcaaatttcatacaatcatatttcccagtacttttcacaatcattttttacccatctaactctatgttttgtggcttcccggtctcttagaactttgaaaacatgatatacaataatgtttatttattatacatccagattctgaaataattttcctactgatgttcagctcacactatctgtacctttttagaagagaaaagaatcttgaattgtatatatttattttgctttacagaaaaaaatggtttcgtaaataatttgcctattttggttaacatagcacatggagataatcatctgaaagttatagggcactgccactgctgaatcagagcatgcccaatatttgaggtggctctgatttcctggcagctgaactcgggtagtccagtggcctagctggtaccacatctattcccatccagagacattctctggcaagtgttctcagctgaaaagtggttggggatgattcttaccttggtaattaaatgaagctacacatttgggtaatctagcaaatgaagtattttttccctcttggcaacttgtgtcagagttactctggtctgagtcaactttcgctggggaaaacctatggaacctactgcaaaaagattgtccaaaatgcctaagaaaatactcctctgatgcatttagccttcaaccctacctgtcttgctgaagggagaaaaatgttttagtacattataggcccagcagcttttattcatgtccaccagctagttgcacagagaatcatgtgtacctaactaaggatgatctaggataagtaactcctgttttatattgagtattttagggaagtctttaaaagacttgttttatatctataaatctaggttattacaaatacaagaattttgtaccttaaataagcctcatttctatttcttcttcattaattctccatctagtcttgtg

SEQ ID NO: 19515 - DNA, 2332 bp, Homo sapiens
  source 1..2332: mol_type = unassigned DNA
gcatcgtcagagagctgcaagagggaggcagcaaggtgcggccgccagcagtgacaccatgtgaccggcacggctcactgacacgcagctttggttaaagagcgggcgcacaggaggggaggagaccgcgcgcgggacggggaggaatggcctgtccgcgttaaaccatcacaagccatggttgcggaagggccacgcgtcccccagtaggagaatgactccgattcgtgaccctcagcgccggtgcatgtcgatatatttattgagtgtctactgtgtgccaggcactatatctatgtgcatagaaaaaccctggaaggccatacaacaatatatatagagtgatcgtctctgcttgctgagctaacaggggtgtcaagcttccattttggtatctacttctaaatacactcagaacaggagaaatttggactaattttcaaactacagacactttctaatcatgatgcatttcaaaagtggactcgaattaactgagttgcaaaacatgacagtgcccgaggatgataacattagcaatgactccaatgatttcaccgaagtagaaaatggtcagataaatagcaagtttatttctgatcgtgaaagtagaagaagtctcacaaacagccatttggaaaaaaagaagtgtgatgagtatattccaggtacaacctccttaggcatgtctgtttttaacctaagcaacgccattatgggcagtgggattttgggactcgcctttgccctggcaaacactggaatcctactttttctggtacttttgacttcagtgacattgctgtctatatattcaataaacctcctattgatctgttcaaaagaaacaggctgcatggtgtatgaaaagctgggggaacaagtctttggcaccacagggaagttcgtaatctttggagccacctctctacagaacactggagcaatgctgagctacctcttcatcgtaaaaaatgaactaccctctgccataaagtttctaatgggaaaggaagagacattttcagcctggtacgtggatggccgcgttctggtggtgatagttacctttggcataattctccctctgtgtctcttgaagaacttagggtatcttggctatactagtggattttccttgagctgtatggtttttttcctaattgtggttatttacaagaaatttcaaattccctgcattgttccagagctaaattcaacaataagtgctaattcaacaaatgctgacacgtgtacgccaaaatatgttaccttcaattcaaagaccgtgtatgctttacccaccattgcatttgcatttgtttgccacccgtcagtcctgccaatttacagtgagcttaaagaccgatcacagaaaaaaatgcagatggtttcaaacatctcctttttcgccatgtttgttatgtacttcttgactgccatttttggctacttgacattctatgacaacgtgcagtccgacctccttcacaaatatcagagtaaagatgacattctcatcctgacagtgcggctggctgtcattgttgctgtgatcctcacagtgccggtgttatttttcacggttcgttcatctttatttgaactggctaagaaaacaaagtttaatttatgtcgtcataccgtggttacctgcatactcttggttgttatcaacttgttggtgatcttcataccctccatgaaggatatttttggagtcgtaggagttacatctgctaacatgcttattttcattcttccttcatctctttatttaaaaatcacagaccaggatggagataaaggaactcaaagaatttgggctgcccttttcttgggcctgggggtgttgttctccttggtcagcattcccttggtcatctatgactgggcctgctcatcgagtagtgacgaaggccactgaaacccgccgagaaaaagaaacatccctgttgtctgctcagtcaagtccccacacatcagcaatctctcaccacttcttttgcaagtttacagaagcaaacagaaatgtacaggatacttaaaatggaataactttttggttgcaaaacagagacatggttctataatgcttcatgtccctccaagatttgagatcaatttagggattgtgaaatttttttttcaaatttcatacaatcatatttcccagtacttttcacaatcattttttacccatctaactctatgttttgtggcttcccggtctcttagaactttgaaaacatgatatacaataatgtttatttattatacatccagattctgaaataattttcctactgatgttcagctcacactatctgta

SEQ ID NO: 19516 - DNA, 2599 bp, Homo sapiens
  source 1..2599: mol_type = unassigned DNA
gttgccgcagaggcctttaaacgcgtgggtcggtgccgggaggagagcgcatcttcgcccttgtgcgagccccttgccccctaaattatccacctcctggcgcatggggctccccagcacccactgggacccagtaggttacccggctgcctgggcaccgtttgcctgccaaatcgcccgcctgaggtttgtgctgaactgtagttagagaaggcacaagtgcatatggcagcaaaaggaatttcgcggtacccgcgtcacgccgctcccagtgcctttcacaggctgccttgggctggggaaggtggtgctacaattcagagtcctttgtcttgctctgcggcgcggacccggggtttgtacaaaccctcgttctctgttagaaacctaactgccgccaggatcacgtactttctcggacgaatccgcggtgatgtgtgtagcaaaagtgaaaaaagacgcctctgctagaaaacgatatttattgagtgtctactgtgtgccaggcactatatctatgtgcatagaaaaaccctggaaggccatacaacaatatatatagagtgatcgtctctgcttgctgagctaacaggggtgtcaagcttccattttggtatctacttctaaatacactcagaacaggagaaatttggactaattttcaaactacagacactttctaatcatgatgcatttcaaaagtggactcgaattaactgagttgcaaaacatgacagtgcccgaggatgataacattagcaatgactccaatgatttcaccgaagtagaaaatggtcagataaatagcaagtttatttctgatcgtgaaagtagaagaagtctcacaaacagccatttggaaaaaaagaagtgtgatgagtatattccaggtacaacctccttaggcatgtctgtttttaacctaagcaacgccattatgggcagtgggattttgggactcgcctttgccctggcaaacactggaatcctactttttctggtacttttgacttcagtgacattgctgtctatatattcaataaacctcctattgatctgttcaaaagaaacaggctgcatggtgtatgaaaagctgggggaacaagtctttggcaccacagggaagttcgtaatctttggagccacctctctacagaacactggagcaatgctgagctacctcttcatcgtaaaaaatgaactaccctctgccataaagtttctaatgggaaaggaagagacattttcagcctggtacgtggatggccgcgttctggtggtgatagttacctttggcataattctccctctgtgtctcttgaagaacttagggtatcttggctatactagtggattttccttgagctgtatggtttttttcctaattgtggttatttacaagaaatttcaaattccctgcattgttccagagctaaattcaacaataagtgctaattcaacaaatgctgacacgtgtacgccaaaatatgttaccttcaattcaaagaccgtgtatgctttacccaccattgcatttgcatttgtttgccacccgtcagtcctgccaatttacagtgagcttaaagaccgatcacagaaaaaaatgcagatggtttcaaacatctcctttttcgccatgtttgttatgtacttcttgactgccatttttggctacttgacattctatgacaacgtgcagtccgacctccttcacaaatatcagagtaaagatgacattctcatcctgacagtgcggctggctgtcattgttgctgtgatcctcacagtgccggtgttatttttcacggttcgttcatctttatttgaactggctaagaaaacaaagtttaatttatgtcgtcataccgtggttacctgcatactcttggttgttatcaacttgttggtgatcttcataccctccatgaaggatatttttggagtcgtaggagttacatctgctaacatgcttattttcattcttccttcatctctttatttaaaaatcacagaccaggatggagataaaggaactcaaagaatttggctctttctcttcctccagtttccagtccagccctgttggctctcagaatgcatcatccttctccctgcagcgctctcactgaacatgctcaagcgcaaggaacttataatcttgtgttctctggattctggatttagtaatctgtattagtctgttctcacactgctaataaagaaatacctgaggttgcttccaagatagccaaataggaacagctctggtctgcagctcccagcaagatcgatgtagaagatgggtgatttctgcatttccaactgaggtacctggttcatctcactgggactggttggacagtgggtgcagcccatggaaggtgagctgaagcaaggtggggcgtcacctcacccaggaagcacaaggggtcaggggatttacctttcccagccaagggaagccatgacagactgtaactggagaaacggtacactcctgaccaaatactgcacttttcccacagtcttagcaactggcagaccaggtaataccctcccgtgcctggctcagtgggttccatgccaacggagccttgct

SEQ ID NO: 19517 - DNA, 543 bp, Homo sapiens
  source 1..543: mol_type = unassigned DNA
tttaatttatgtcgtcataccgtggttacctgcatactcttggttgttatcaacttgttggtgatcttcataccctccatgaaggatatttttggagtcgtaggagttacatctgctaacatgcttattttcattcttccttcatctctttatttaaaaatcacagaccaggatggagataaaggaactcaaagaatttgggtatgtctcttgccagccactctaacttttctgattagttttccatttaaatttacaaaataaatagtccacctctctatcaagactactttcagttgccttgaaaggaggcagaagccctgtagctttgctacttgggagatatttaaaatatcatatcagaatcttctcccatccctccaaatatcttttctggttttactctttttttttgagatggagtctcactctgtcgcccaggctggagtgcagtggccagatctcagctcactgtaagctccgcctcccgggttcatgccattcttctgcctcagagagtagctgggactacaggcgcccgcc

SEQ ID NO: 19518 - DNA, 1076 bp, Homo sapiens
  source 1..1076: mol_type = unassigned DNA
actgacacgcagctttggttaaagagcgggcgcacaggaggggaggagaccgcgcgcgggacggggaggaatggcctgtccgcgttaaaccatcacaagccatggttgcggaagggccacgcgtcccccagtaggagaatgactccgattcgtgaccctcagcgccggtgcatgtcgatcaagtttatttctgatcgtgaaagtagaagaagtctcacaaacagccatttggaaaaaaagaagtgtgatgagtatattccaggtacaacctccttaggcatgtctgtttttaacctaagcaacgccattatgggcagtgggattttgggactcgcctttgccctggcaaacactggaatcctactttttctggtacttttgacttcagtgacattgctgtctatatattcaataaacctcctattgatctgttcaaaagaaacaggctgcatggtgtatgaaaagctgggggaacaagtctttggcaccacagggaagttcgtaatctttggagccacctctctacagaacactggagcaatgctgagctacctcttcatcgtaaaaaatgaactaccctctgccataaagtttctaatgggaaaggaagagacattttcagcctggtacgtggatggccgcgttctggtggtgatagttacctttggcataattctccctctgtgtctcttgaagaacttagggtatcttggctatactagtggattttccttgagctgtatggtttttttcctaattgtggttatttacaagaaatttcaaattccctgcattgttccagagctaaattcaacaataagtgctaattcaacaaatgctgacacgtgtacgccaaaatatgttaccttcaattcaaagaccgtgtatgctttacccaccattgcatttgcatttgtttgccacccgtcagtcctgccaatttacagtgagcttaaagaccgatcacagaaaaaaatgcagatggtttcaaacatctcctttttcgccatgtttgttatgtacttcttgactgccatttttggctacttgacattctatgacaacgtgcagtccga

SEQ ID NO: 19519 - DNA, 586 bp, Homo sapiens
  source 1..586: mol_type = unassigned DNA
gatgcaatcggcccggaaaggaggagagccaggcgagcgcggactggggcggccacgccactccgccagaaggtcgccaggagcctccgcccttcaccttcctccgaaatccgccaggccacgccaagctccctgcccaacccttactgacgggggccacattttcccggcctccgcagccagaccttgacacaaaggacatcaaactgccgagggtaaaaaccccggaagggcggacacctccacatcgccttttgccacctttccctttatttccggagcaagtttatttctgatcgtgaaagtagaagaagtctcacaaacagccatttggaaaaaaagaagtgtgatgagtatattccaggtacaacctccttaggcatgtctgtttttaacctaagcaacgccattatgggcagtgggattttgggactcgcctttgccctggcaaacactggaatcctactttttctggtacttttgacttcagtgacattgctgtctatatattcaataaacctcctattgatctgttcaaaagaaacaggctgcatggtgtatgaaaagctgggggaacaagtctttg

SEQ ID NO: 19520 - DNA, 891 bp, Homo sapiens
  source 1..891: mol_type = unassigned DNA
agttgcccctgctcccctccatgccgctccctcgtcccccggacttggagcgccccagctccgttaacctggacgcaccaggtccttcggtcgggaccacgtggggtctccaggccctccaagagctggcccccggctctttgcgcctaggccggtgctttctcggtgctcagcaaatccttctggttcacctcacacccagtccccaaagcagagctccacagggcagatctcaggaagggctgaccaggtctgcgggtgctggatccggaagaggggaggtgcctcccgcttcagccgcggtcgctgcatcgtcagagagctgcaagagggaggcagcaaggtgcggccgccagcagtgacaccatgtgaccggcacggctcactgacacgcagctttggttaaagagcgggcgcacaggaggggaggagaccgcgcgcgggacggggaggaatggcctgtccgcgttaaaccatcacaagccatggttgcggaagggccacgcgtcccccagtaggagaatgactccgattcgtgaccctcagcgccggtgcatgtcgatgggtgtcaagcttccattttggtatctacttctaaatacactcagaacaggagaaatttggactaattttcaaactacagacactttctaatcatgatgcatttcaaaagtggactcgaattaactgagttgcaaaacatgacagtgcccgaggatgataacattagcaatgactccaatgatttcaccgaagtagaaaatggtcagataaatagcaagtttatttctgatcgtgaaagtagaagaagtctcacaaacagccatttggaaaaaaagaagtgtgatgagtatattccaggtacaacctccttaggcatgtctgttttta

SEQ ID NO: 19521 - DNA, 309 bp, Homo sapiens
  source 1..309: mol_type = unassigned DNA
gcccagccagtgaaagggggctgtgtctgaaacaaagaccgcggtcgctgcatcgtcagagagctgcaagagggaggcagcaaggtgcggccgccagcagtgacaccatgtgaccggcacggctcactgacacgcagctttggttaaagagcgggcgcacaggaggggaggagaccgcgcgcgggacggggaggaatggcctgtccgcgttaaaccatcacaagccatggttgcggaagggccacgcgtcccccagtaggagaatgactccgattcgtgaccctcagcgccggtgcatgtcgatgtaag

SEQ ID NO: 19522 - DNA, 1607 bp, Homo sapiens
  source 1..1607: mol_type = unassigned DNA
aggggtgtcaagcttccattttggtatctacttctaaatacactcagaacaggagaaatttggactaattttcaaactacagacactttctaatcatgatgcatttcaaaagtggactcgaattaactgagttgcaaaacatgacagtgcccgaggatgataacattagcaatgactccaatgatttcaccgaagtagaaaatggtcagataaatagcaagtttatttctgatcgtgaaagtagaagaagtctcacaaacagccatttggaaaaaaagaagtgtgatgagtatattccaggtacaacctccttaggcatgtctgtttttaacctaagcaacgccattatgggcagtgggattttgggactcgcctttgccctggcaaacactggaatcctactttttctggtacttttgacttcagtgacattgctgtctatatattcaataaacctcctattgatctgttcaaaagaaacaggctgcatggtgtatgaaaagctgggggaacaagtctttggcaccacagggaagttcgtaatctttggagccacctctctacagaacactggagcaatgctgagctacctcttcatcgtaaaaaatgaactaccctctgccataaagtttctaatgggaaaggaagagacattttcagcctggtacgtggatggccgcgttctggtggtgatagttacctttggcataattctccctctgtgtctcttgaagaacttagggtatcttggctatactagtggattttccttgagctgtatggtttttttcctaattgtggttatttacaagaaatttcaaattccctgcattgttccagagctaaattcaacaataagtgctaattcaacaaatgctgacacgtgtacgccaaaatatgttaccttcaattcaaagaccgtgtatgctttacccaccattgcatttgcatttgtttgccacccgtcagtcctgccaatttacagtgagcttaaagaccgatcacagaaaaaaatgcagatggtttcaaacatctcctttttcgccatgtttgttatgtacttcttgactgccatttttggctacttgacattctatgacaacgtgcagtccgacctccttcacaaatatcagagtaaagatgacattctcatcctgacagtgcggctggctgtcattgttgctgtgatcctcacagtgccggtgttatttttcacggttcgttcatctttatttgaactggctaagaaaacaaagtttaatttatgtcgtcataccgtggttacctgcatactcttggttgttatcaacttgttggtgatcttcataccctccatgaaggatatttttggagtcgtaggagttacatctgctaacatgcttattttcattcttccttcatctctttatttaaaaatcacagaccaggatggagataaaggaactcaaagaatttggctctttctcttcctccagtttccagtccagccctgttggctctcagaatgcatcatccttctccctgcagcgctctcactgaacatgctcaagcgcaaggaacttataatcttgtgttctctggattctggatttagtaatctgtattag

SEQ ID NO: 19523 - DNA, 4300 bp, Homo sapiens
  source 1..4300: mol_type = unassigned DNA
aagtgtgagcgccgcggcggcagctgagttgggctgaggtgtccctagctggctctgcggctcttccgggtctgggctcggagattcacaggcggcccgcgaggccgagcgagggacgcatggccctgaggcggccgcagggcttggcggggtccggaggttgacctcgcccccgcagccggccttcgaggctgcctcctccaggcagcctctggggcccgcgcccgcgcctgctcaggctcccgtgttcaggctgcccatcccctccccaccggcgtcccggacgttgggacctgtgaccgtggcctcgggctgggcttccaaagccggccgcagcccggcgacccccgaggcctctcgccccgggcccctagacctctcactatgaccgcggccgccgcctccaactgggggctgatcacgaacatcgtgaacagcatcgtaggggtcagtgtcctcaccatgcccttctgcttcaaacagtgcggcatcgtcctgggggcgctgctcttggtcttctgctcatggatgacgcaccagtcgtgcatgttcttggtgaagtcggccagcctgagcaagcggaggacctacgccggcctggcattccacgcctacgggaaggcaggcaagatgctggtggagaccagcatgatcgggctgatgctgggcacctgcatcgccttctacgtcgtgatcggcgacttggggtccaacttctttgcccggctgttcgggtttcaggtgggcggcaccttccgcatgttcctgctgttcgccgtgtcgctgtgcatcgtgctcccgctcagcctgcagcggaacatgatggcctccatccagtccttcagcgccatggccctcctcttctacaccgtgttcatgttcgtgatcgtgctctcctctctcaagcacggcctcttcagtgggcagtggctgcggcgggtcagctacgtccgctgggagggcgtcttccgctgcatccccatcttcggcatgtccttcgcctgccagtcccaggtgctgcccacctacgacagcctggatgagccgtcagtgaaaaccatgagctccatatttgcttcctcccttaatgtggtcaccaccttctacgtcatggtggggtttttcggctacgtcagcttcaccgaggccacggccggcaacgtgctcatgcactttccctccaacctggtgacggagatgctccgtgtgggcttcatgatgtcagtggctgtgggcttccccatgatgatcctgccatgcaggcaggccctgagcacgctgctgtgtgagcagcagcaaaaagatggcacctttgcagcagggggctacatgccccctctccggtttaaagcacttaccctctctgtggtgtttggaaccatggttggtggcatccttatccccaacgtggagaccatcctgggcctcacaggagcgaccatgggaagcctcatctgcttcatctgcccggcgctgatctacaagaaaatccacaagaacgcactttcctcccaggtggtgctgtgggtcggcctgggcgtcctggtggtgagcactgtcaccacactgtctgtgagcgaggaggtccccgaggacttggcagaggaagcccctggcggccggcttggagaggccgagggtttgatgaaggtggaggcagcgcggctctcagcccaggatccggttgtggccgtggctgaggatggccgggagaagccgaagctgccgaaggagagagaggagctggagcaggcccagatcaaggggcccgtggatgtgcctggacgggaagatggcaaggaggcaccggaggaggcacagctcgatcgccctgggcaagggattgctgtgcctgtgggcgaggcccaccgccacgagcctcctgttcctcacgacaaggtggtggtagatgaaggccaagaccgagaggtgccagaagagaacaaacctccatccagacacgcgggcggaaaggctccaggggtccagggccagatggcgccgcctctgcccgactcagaaagagagaaacaagagccggagcagggagaggttgggaagaggcctggacaggcccaggccttggaggaggcgggtgatcttcctgaagatccccagaaagttccagaagcagatggtcagccagctgtccagcctgcaaaggaggacctggggccaggagacaggggcctgcatcctcggccccaggcagtgctgtctgagcagcagaacggcctggcggtgggtggaggggaaaaggccaaggggggaccgccgccaggcaacgccgccggggacacagggcagcccgcagaggacagcgaccacggtgggaagcctcccctcccagcggagaagccggctccagggcctgggctgccgcccgagcctcgcgagcagagggacgtggagcgagcgggtggaaaccaggcggccagccagctggaggaagctggcagggcggagatgctggaccacgccgtcctgcttcaggtgatcaaagaacagcaggtgcagcaaaagcgcttgctggaccagcaggagaagctgctggcggtgatcgaggagcagcacaaggagatccaccagcagaggcaggaggacgaggaggataaacccaggcaggtggaggtgcatcaagagcccggggcagcggtgcccagaggccaggaggcccctgaaggcaaggccagggagacggtggagaatctgcctcccctgcctttggaccctgtcctcagagctcctgggggccgccctgctccatcccaggaccttaaccagcgctccctggagcactctgaggggcctgtgggcagagaccctgctggccctcctgacggcggccctgacacagagcctcgggcagcccaggccaagctgagagatggccagaaggatgccgcccccagggcagctggcactgtgaaggagctccccaagggcccggagcaggtgcccgtgccagaccccgccagggaagccgggggcccagaggagcgcctcgcagaggaattccctgggcaaagtcaggacgttactggcggttcccaagacaggaaaaaacctgggaaggaggtggcagccactggcaccagcattctgaaggaagccaactggctcgtggcagggccaggagcagagacgggggaccctcgcatgaagcccaagcaagtgagccgagacctgggccttgcagcggacctgcccggtggggcggaaggagcagctgcacagccccaggctgtgttacgccagccggaactgcgggtcatctctgatggcgagcagggtggacagcagggccaccggctggaccatggcggtcacctggagatgagaaaggcccgcgggggggaccatgtgcctgtgtcccacgagcagccgagaggcggggaggacgctgctgtccaggagcccaggcagaggccagagccagagctggggctcaaacgagctgtcccggggggccagaggccggacaatgccaagcccaaccgggacctgaaactgcaggctggctccgacctccggaggcgacggcgggaccttggccctcatgcagagggtcagctggccccgagggatggggtcatcattggccttaaccccctgcctgatgtccaggtgaacgacctccgtggcgccctggatgcccagctccgccaggctgcggggggagctctgcaggtggtccacagccggcagcttagacaggcgcctgggcctccagaggagtcctagcacctgctggccatgagggccacgccagccactgccctcctcggccagcagcaggtctgtctcagccgcatcccagccaaactctggaggtcacactcgcctctccccagggtttcatgtctgaggccctcaccaagtgtgagtgacagtataaaagattcactgtggcatcgtttccagaatgttcttgctgtcgttctgttgcagctcttagtctgaggtcctctgacctctagactctgagctcactccagcctgtgaggagaaacggcctccgctgcgagctggctggtgcactcccaggctcaggctggggagctgctgcgtctgtggtcaggcctcctgctcctgccagggagcacgcgtggtcttcgggttgagctcggccgtgcgtggaggtgcgcatggctgctcatggtcccaacacaggctactgtgagagccagcatccaaccccacgcttgcagtgactcagaatgataattattatgactgtttatcgatgcttcccacagtgtggtagaaagtcttgaataaacacttttgccttcaccca

SEQ ID NO: 19524 - DNA, 1988 bp, Homo sapiens
  source 1..1988: mol_type = unassigned DNA
caggctggtctctaactcctgggctcaagcgatctgcctgcctccgcctcccaaattgctgggattacaggcgtgagccgccgtgcccaggcttattttcttacgtgcttgtcctagaacaactgaatgtgtaaagtggaaaaaacaaaaacaaaaccccacccagcccagataaccatctctgacattctggcacattccttttgactgttgctctggacactcacttccatgggcaacgagcaggcttgctggggtcctgccgggtgcgcctggggcacagccagtgggagaactgatgcggcacagtggctggctgtgcgggagaggccatcccgggtgggcttccaggggcagtcagggcgcagcctctcccgggccctcaggcctgcgtgcatcactgagctgtccgggcttcacggtcacagtcatgatgggtgtcaccagtggccagtgttcgggcacactccctgcaggtgacctgtgcgttgccttgctgtgggccgcgccgtccctggcccagcacggtgcatgagcagcccgggcactctgactgtgtgctttccaaacccagaagctggcagggcggagatgctggaccacgccgtcctgcttcaggtgatcaaagaacagcaggtgcagcaaaagcgcttgctggaccagcaggagaagctgctggcggtgatcgaggagcagcacaaggagatccaccagcagaggcaggaggacgaggaggataaacccaggcagggaaaaaacctgggaaggaggtggcagccactggcaccagcattctgaaggaagccaactggctcgtggcagggccaggagcagagacgggggaccctcgcatgaagcccaagcaagtgagccgagacctgggccttgcagcggacctgcccggtggggcggaaggagcagctgcacagccccaggctgtgttacgccagccggaactgcgggtcatctctgatggcgagcagggtggacagcagggccaccggctggaccatggcggtcacctggagatgagaaaggcccgcgggggggaccatgtgcctgtgtcccacgagcagccgagaggcggggaggacgctgctgtccaggagcccaggcagaggccagagccagagctggggctcaaacgagctgtcccggggggccagaggccggacaatgccaagcccaaccgggacctgaaactgcaggctggctccgacctccggaggcgacggcgggaccttggccctcatgcagagggtcagctggccccgagggatggggtcatcattggccttaaccccctgcctgatgtccaggtgaacgacctccgtggcgccctggatgcccagctccgccaggctgcggggggagctctgcaggtggtccacagccggcagcttagacaggcgcctgggcctccagaggagtcctagcacctgctggccatgagggccacgccagccactgccctcctcggccagcagcaggtctgtctcagccgcatcccagccaaactctggaggtcacactcgcctctccccagggtttcatgtctgaggccctcaccaagtgtgagtgacagtataaaagattcactgtggcatcgtttccagaatgttcttgctgtcgttctgttgcagctcttagtctgaggtcctctgacctctagactctgagctcactccagcctgtgaggagaaacggcctccgctgcgagctggctggtgcactcccaggctcaggctggggagctgctgcgtctgtggtcaggcctcctgctcctgccagggagcacgcgtggtcttcgggttgagctcggccgtgcgtggaggtgcgcatggctgctcatggtcccaacacaggctactgtgagagccagcatccaaccccacgcttgcagtgactcagaatgataattattatgactgtttatcgatgcttcccacagtgtggtagaaagtcttgaataaacacttttgccttca

SEQ ID NO: 19525 - DNA, 896 bp, Homo sapiens
  source 1..896: mol_type = unassigned DNA
ggggaaaaggccaaggggggaccgccgccaggcaacgccgccggggacacagggcagcccgcagaggacagcgaccacggtgggaagcctcccctcccagcggagaagccggctccagggcctgggctgccgcccgagcctcgcgagcagagggacgtggagcgagcgggtggaaaccaggcggccagccagctggaggctgaaattaaaaagatagtagcagaagctggcagggcggagatgctggaccacgccgtcctgcttcaggtgatcaaagaacagcaggtgcagcaaaagcgcttgctggaccagcaggagaagctgctggcggtgatcgaggagcagcacaaggagatccaccagcagaggcaggaggacgaggaggataaacccaggcaggtggaggtgcatcaagagcccggggcagcggtgcccagaggccaggaggcccctgaaggcaaggccagggagacggtggagaatctgcctcccctgcctttggaccctgtcctcagagctcctgggggccgccctgctccatcccaggaccttaaccagcgctccctggagcactctgaggggcctgtgggcagagaccctgctggccctcctgacggcggccctgacacagagcctcgggcagcccaggccaagctgagagatggccagaaggatgccgcccccagggcagctggcactgtgaaggagctccccaagggcccggagcaggtgcccgtgccagaccccgccagggaagccgggggcccagaggagcgcctcgcagaggaattccctgggcaaagtcaggacgttactggcggttcccaagacaggaaaaaacctgggaaggaggtggcagccactggcaccagcattctgaaggaagccaactggct

SEQ ID NO: 19526 - DNA, 774 bp, Homo sapiens
  source 1..774: mol_type = unassigned DNA
gggaaaaggccaaggggggaccgccgccaggcaacgccgccggggacacagggcagcccgcagaggacagcgaccacggtgggaagcctcccctcccagcggagaagccggctccagggcctgggctgccgcccgagcctcgcgagcagagggacgtggagcgagcgggtggaaaccaggcggccagccagctggaggctggcagggcggagatgctggaccacgccgtcctgcttcaggtgatcaaagaacagcaggtgcagcaaaagcgcttgctggaccagcaggagaagctgctggcggtgatcgaggagcagcacaaggagatccaccagcagaggcaggaggacgaggaggataaacccaggcaggtggaggtgcatcaagagcccggggcagcggtgcccagaggccaggaggcccctgaaggcaaggccagggagacggtggagaatctgcctcccctgcctttggaccctgtcctcagagctcctgggggccgccctgctccatcccaggaccttaaccagcgctccctggagcactctgaggggcctgtgggcagagaccctgctggccctcctgacggcggccctgacacagagcctcgggcagcccaggccaagctgagagatggccagaaggatgccgcccccagggcagctggcactgtgaaggagctccccaagggcccggagcaggtgcccgtgccagaccccgccagggaagccgggggcccagaggagcgcctcgcagaggaattccctgggcaaa

SEQ ID NO: 19527 - DNA, 2903 bp, Homo sapiens
  source 1..2903: mol_type = unassigned DNA
acatgcaccgcatctctgggtgcgccttggagccgggacttccctttgcccttctccggctgggccgtgggggaagcgcgggggtcaccagatgaccgctcggggcctgggagggaccctgctgagtcagcgccgtttctcatctgctgcagagaatcccgcggtcagggcggagagaatggcggctccttccgcattcggccgccccgtcgggaacgcatgctcctcatcggcaaggctcctcattagctgtccacgtggacaccacaagcccagggctctcgtcccctcccttcctgaagcaccatgctcgaaaggagtctccatttgtttctataaatcccaaccaaagggtgaaaatgaaagccctccgtcagagtccctctggtgcaggctgtggcgctcgggtacctgggaccggcactgaaccctctggggacctgcaagctctggccagcagcacggggttcggccgtgctgggctgtgggatgctgtttccagccggcccccagtggtcaccgggtgggaggactgcatcgcagggacttgtctctttgtctgttaaaaaatctgattgagtgaaagaagaacctgcctcctgtccttcccttgctctgtctttgtttcttgtagtttcatttgcagacagtagatccaaaaataacctggcagccagaatttgaaatacccctcatgccccggagaatctgggcccgtgggtttctgtgaaatcgcccttgacagcttggctcagtacctttgttctggacgagcttctcacgctgttggattgagtgttcctttttcttttgcactagcattccacgcctacgggaaggcaggcaagatgctggtggagaccagcatgatcgggctgatgctgggcacctgcatcgccttctacgtcgtgatcggcgacttggggtccaacttctttgcccggctgttcgggtttcaggtgggcggcaccttccgcatgttcctgctgttcgccgtgtcgctgtgcatcgtgctcccgctcagcctgcagcggaacatgatggcctccatccagtccttcagcgccatggccctcctcttctacaccgtgttcatgttcgtgatcgtgctctcctctctcaagcacggcctcttcagtgggcagtggctgcggcgggtcagctacgtccgctgggagggcgtcttccgctgcatccccatcttcggcatgtccttcgcctgccagtcccaggtgctgcccacctacgacagcctggatgagccgtcagtgaaaaccatgagctccatatttgcttcctcccttaatgtggtcaccaccttctacgtcatggtggggtttttcggctacgtcagcttcaccgaggccacggccggcaacgtgctcatgcactttccctccaacctggtgacggagatgctccgtgtgggcttcatgatgtcagtggctgtgggcttccccatgatgatcctgccatgcaggcaggccctgagcacgctgctgtgtgagcagcagcaaaaagatggcacctttgcagcagggggctacatgccccctctccggtttaaagcacttaccctctctgtggtgtttggaaccatggttggtggcatccttatccccaacgtggagaccatcctgggcctcacaggagcgaccatgggaagcctcatctgcttcatctgcccggcgctgatctacaagaaaatccacaagaacgcactttcctcccaggtggtgctgtgggtcggcctgggcgtcctggtggtgagcactgtcaccacactgtctgtgagcgaggaggtccccgaggacttggcagaggaagcccctggcggccggcttggagaggccgagggtttgatgaaggtggaggcagcgcggctctcagcccaggatccggttgtggccgtggctgaggatggccgggagaagccgaagctgccgaaggagagagaggagctggagcaggcccagatcaaggggcccgtggatgtgcctggacgggaagatggcaaggaggcaccggaggaggcacagctcgatcgccctgggcaagggattgctgtgcctgtgggcgaggcccaccgccacgagcctcctgttcctcacgacaaggtggtggtagatgaaggccaagaccgagaggtgccagaagagaacaaacctccatccagacacgcgggcggaaaggctccaggggtccagggccagatggcgccgcctctgcccgactcagaaagagagaaacaagagccggagcagggagaggttgggaagaggcctggacaggcccaggccttggaggaggcgggtgatcttcctgaagatccccagaaagttccagaagcagatggtcagccagctgtccagcctgcaaaggaggacctggggccaggagacaggggcctgcatcctcggccccaggcagtgctgtctgagcagcagaacggcctggcggtgggtggaggggaaaaggccaaggggggaccgccgccaggcaacgccgccggggacacagggcagcccgcagaggacagcgaccacggtgggaagcctcccctcccagcggagaagccggctccagggcctgggctgccgcccgagcctcgcgagcagagggacgtggagcgagcgggtggaaaccaggcggccagccagctggaggaagctggcagggcggagatgctggaccacgccgtcctgcttcaggtgatcaaagaacagcaggtgcagcaaaagcgcttgctggaccagcaggagaagctgctggcggtgatcgaggagcagcacaaggagatccaccagcagaggcaggaggacgaggaggataaacccaggcaggtggaggtgcatcaagagcccggggcagcggtgcccagaggccaggaggcccctgaaggc

SEQ ID NO: 19528 - DNA, 1627 bp, Homo sapiens
  source 1..1627: mol_type = unassigned DNA
aaagagagaaacaagagccggagcagggagaggttgggaagaggcctggacaggcccaggccttggaggaggcgggtgatcttcctgaagatccccagaaagttccagaagcagatggtcagccagctgtccagcctgcaaaggaggacctggggccaggagacaggggcctgcatcctcggccccaggcagtgctgtctgagcagcagaacggcctggcggtgggtggaggggaaaaggccaaggggggaccgccgccaggcaacgccgccggggacacagggcagcccgcagaggacagcgaccacggtgggtgtcagcctgggctcgtgtcggaagacactcccctcttgggctggggaggctgggcaggggcagcagaatcgatggttcctccctcagtccccagtctctctccctgcaccagattagcatgcaaatggagcgggccccggcagctggtggggacaggaagaggctggtggctgacagctactgtaatatctgtcacacagttgtttgccagaccactaaatgtcaggtgccgcgctgtgctcgtgtgtctgggcgcacacggggggcggcgcggggggcgcctgacaggtaacacgttgttaagtgcccgtctaagagctgcttaggacagttcttgcattttaattgcgaaggcagttaccattggctcattgccacaagcctatgaggttgttaaatatttttttattgcttcgctagtaatcatcaggttgaatataaactgtgctgacgggggtgtcactttagaaacatctgccacttccttttgtcccgcccttgccttctgtcccccaaccccccaaaccctcccttgactttcctgcaaaaccttctgagtcttcaccgtgtgtgcaggtgggaagcctcccctcccagcggagaagccggctccagggcctgggctgccgcccgagcctcgcgagcagagggacgtggagcgagcgggtggaaaccaggcggccagccagctggagggtaaggcctccgccctacagccgcctgcctcaggcccagggagcggcagccccctcccccagccctggggtgatgcccaggtcatcctcgggagccctgccaggccccccttctctttccagccgcctgctgagcagacccctcggagagctttctgctcccttcccatcagcagcttgctttctgggaaccttttatctgccttactcccctttaaacacctgcggcatcgtcacatggcttgtgattaccgttttatctcccttgctcccctttaaaacacctgcggcattgtcacttggcttgtgattaccatttcgtctttaaagcaggtttgttaacagttttaacactcggagtatttaaagccagccaggtgtgggcgtgcctgcacccagatgtggaggtttattttaaggctgtgccccaaggggacccagtttgggggtggctgtgcccgccctggtcctagcatagccctggcccagagcactgctcccacaccctcgggcctcggagctcggctgtgttcatctacagggatctgtcacctgtccctccaggaaagctccttacgcctttgctctcctgagaataaaacttgctctgaatcctc

SEQ ID NO: 19529 - DNA, 2708 bp, Homo sapiens
  source 1..2708: mol_type = unassigned DNA
gtgtccctagctggctctgcggctcttccgggtctgggctcggagattcacaggcggcccgcgaggccgagcgagggacgcatggccctgaggcggccgcagggcttggcggggtccggaggttgacctcgcccccgcagccggccttcgaggctgcctcctccaggcagcctctggggcccgcgcccgcgcctgctcaggctcccgtgttcaggctgcccatcccctccccaccggcgtcccggacgttgggacctgtgaccgtggcctcgggctgggcttccaaagccggccgcagcccggcgacccccgaggcctctcgccccgggcccctagacctctcactatgaccgcggccgccgcctccaactgggggctgatcacgaacatcgtgaacagcatcgtaggggtcagtgtcctcaccatgcccttctgcttcaaacagtgcggcatcgtcctgggggcgctgctcttggtcttctgctcatggatgacgcaccagtcgtgcatgttcttggtgaagtcggccagcctgagcaagcggaggacctacgccggcctggcattccacgcctacgggaaggcaggcaagatgctggtggagaccagcatgatcgggctgatgctgggcacctgcatcgccttctacgtcgtgatcggcgacttggggtccaacttctttgcccggctgttcgggtttcaggtgggcggcaccttccgcatgttcctgctgttcgccgtgtcgctgtgcatcgtgctcccgctcagcctgcagcggaacatgatggcctccatccagtccttcagcgccatggccctcctcttctacaccgtgttcatgttcgtgatcgtgctctcctctctcaagcacggcctcttcagtgggcagtggctgcggcgggtcagctacgtccgctgggagggcgtcttccgctgcatccccatcttcggcatgtccttcgcctgccagtcccaggtgctgcccacctacgacagcctggatgagccgtcagtgaaaaccatgagctccatatttgcttcctcccttaatgtggtcaccaccttctacgtcatggtggggtttttcggctacgtcagcttcaccgaggccacggccggcaacgtgctcatgcactttccctccaacctggtgacggagatgctccgtgtgggcttcatgatgtcagtggctgtgggcttccccatgatgatcctgccatgcaggcaggccctgagcacgctgctgtgtgagcagcagcaaaaagatggcacctttgcagcagggggctacatgccccctctccggtttaaagcacttaccctctctgtggtgtttggaaccatggttggtggcatccttatccccaacgtggagaccatcctgggcctcacaggagcgaccatgggaagcctcatctgcttcatctgcccggcgctgatctacaagaaaatccacaagaacgcactttcctcccaggtggtgctgtgggtcggcctgggcgtcctggtggtgagcactgtcaccacactgtctgtgagcgaggaggtccccgaggacttggcagaggaagcccctggcggccggcttggagaggccgagggtttgatgaaggtggaggcagcgcggctctcagcccaggatccggttgtggccgtggctgaggatggccgggagaagccgaagctgccgaaggagagagaggagctggagcaggcccagatcaaggggcccgtggatgtgcctggacgggaagatggcaaggaggcaccggaggaggcacagctcgatcgccctgggcaagggattgctgtgcctgtgggcgaggcccaccgccacgagcctcctgttcctcacgacaaggtggtggtagatgaaggccaagaccgagaggtgccagaagagaacaaacctccatccagacacgcgggcggaaaggctccaggggtccagggccagatggcgccgcctctgcccgactcagaaagagagaaacaagagccggagcagggagaggttgggaagaggcctggacaggcccaggccttggaggaggcgggtgatcttcctgaagatccccagaaagttccagaagcagatggtcagccagctgtccagcctgcaaaggaggacctggggccaggagacaggggcctgcatcctcggccccaggcagtgctgtctgagcagcagaacggcctggcggtgggtggaggggaaaaggccaaggggggaccgccgccaggcaacgccgccggggacacagggcagcccgcagaggacagcgaccacggtgggaagcctcccctcccagcggagaagccggctccagggcctgggctgccgcccgagcctcgcgagcagagggacgtggagcgagcgggtggaaaccaggcggccagccagctggagggtaaggcctccgccctacagccgcctgcctcaggcccagggagcggcagccccctcccccagccctggggtgatgcccaggtcatcctcgggagccctgccaggccccccttctctttccagccgcctgctgagcagacccctcggagagctttctgctcccttcccatcagcagcttgctttctgggaaccttttatctgccttactcccctttaaacacctgcggcatcgtcacatggcttgtgattaccgttttatctcccttgctcccctttaaaacacctgcggcattgtca

SEQ ID NO: 19530 - DNA, 580 bp, Homo sapiens
  source 1..580: mol_type = unassigned DNA
cctcttctacaccgtgttcatgttcgtgatcgtgctctcctctctcaagcacggcctcttcagtgggcagtggctgcggcgggtcagctacgtccgctgggagggcgtcttccgctgcatccccatcttcggcatgtccttcgcctgccagtcccaggtgctgcccacctacgacagcctggatgagccgtcagtgaaaaccatgagctccatatttgcttcctcccttaatgtggtcaccaccttctacgtcatggtggggtttttcggctacgtcagcttcaccgaggccacggccggcaacgtgctcatgcactttccctccaacctggtgacggagatgctccgtgtgggcttcatgatgtcagtggctgtgggcttccccatgatgatcctgccatgcaggcaggccctgagcacgctgctgtgtgagcagcagtggagaccatcctgggcctcacaggagcgaccatgggaagcctcatctgcttcatctgcccggcgctgatctacaagaaaatccacaagaacgcactttcctcccaggtggtgctgtgggtcggcctgggcgtcctggtgg

SEQ ID NO: 19531 - DNA, 663 bp, Homo sapiens
  source 1..663: mol_type = unassigned DNA
gcagcggaacatgatggcctccatccagtccttcagcgccatggccctcctcttctacaccgtgttcatgttcgtgatcgtgctctcctctctcaagcacggcctcttcagtgggcagtggctgcggcgggtcagctacgtccgctgggagggcgtcttccgctgcatccccatcttcggcatgtccttcgcctgccagtcggctctgtaaatgtggatcgggctcttccataattccagcagcattaccttctccaccaaaatgacaagagcgagtgattcgtgcccggttggaacatggtaaccggctgaaaagagaggcgtaaatccggcgcagacgggaaaagaccatcggcatgcggggggctggcagagcggcccctgtagcgttagtgggcatgcattgagccaatcgtaaactaatgtgacagatgaaatttgttcataccgctgtgtttacacccacatgcgagatccaaatcgtcatttcccacttagcgtctctcttggcagctccatctccaccagaacgcgccccagtcttgctgtttaatatcccattatgatcggtgacagaagccgcattcttccgccacgtacctagttaccagttgccctttgtgtctgcgtgtttgcatatttagaaataaatctgcagctggg

SEQ ID NO: 19532 - DNA, 528 bp, Homo sapiens
  source 1..528: mol_type = unassigned DNA
cgcgactgcccatccaaaccgaggcctcgcggggcgagtcccttgtcctccagctcgttgaactggggccccgggcacaggtcggctggaccagcttggcgaaccggacagctgcgagaccctcagtgcggcatcgtcctgggggcgctgctcttggtcttctgctcatggatgacgcaccagtcgtgcatgttcttggtgaagtcggccagcctgagcaagcggaggacctacgccggcctggcattccacgcctacgggaaggcaggcaagatgctggtggagaccagcatgatcgggctgatgctgggcacctgcatcgccttctacgtcgtgatcggcgacttggggtccaacttctttgcccggctgttcgggtttcaggtgggcggcaccttccgcatgttcctgctgttcgccgtgtcgctgtgcatcgtgctcccgctcagcctgcagcggaacatgatggcctccatccagtccttcagcgccatggccctcctcttctacaccgtgttcatgttcgtg

SEQ ID NO: 19533 - DNA, 423 bp, Homo sapiens
  source 1..423: mol_type = unassigned DNA
cggccgccgcctccaactgggggctgatcacgaacatcgtgaacagcatcgtaggggtcagtgtcctcaccatgcccttctgcttcaaacagtgcggcatcgtcctgggggcgctgctcttggtcttctgctcatggatgacgcaccagtcgtgcatgttcttggtgaagtcggccagcctgagcaagcggaggacctacgccggcctgggtccacacaagcttcctcttctaaactcagaccaagacagccgtcctcaccgtgctggtgcagacctgctctctctgtgtctctcctggacaccagatgccttcctgcggagctgcctgcagagagccttgctgttctccccaactcggaattccatggaggaagctcctcaggcctgggctgttgctggagttcagtggctcctctcccagt

SEQ ID NO: 19534 - DNA, 2659 bp, Homo sapiens
  source 1..2659: mol_type = unassigned DNA
gcctggaatagcctggctactacccctgcacctgttcccctgctgtccccaggcctctctgcctgaatctgcctctctctgcctcttttctcctgtccctccaggagtctctctgcctcaaccactctctctgccccttcatctctctgagctggtgtgtctggtcctaccctctgtttggggagctgtctggctctgtcccccacctcttggccagcctgtgtctcctgtctatgactgagcccaattgcctgttgcctttctgcaggtgtttccacgagcctatccctacccacctgtttgtttctgagtctgcctgtgtgtccctttctccctgtctctgcctgtcttccaagctcccctagcatcccctcctcccgcccatctgtctttctgtcccttctgtggtctgtctgttcctgtgctgtttctcatgcctgctttctttgtaacttcagttctcctactctctctctgtctcctctctgcacctttttctgccatccatcccatcctgctgtccgtctgctctgtgagtccatcccctctgtctgcctgtcactctctctagctgtgggtctacaccctcaatctttcaggccatttcccccaccatcaacacacaaacaaaccgctgtctccctccaagtgggtccagatagggggcgccccttctccacctcttcccccgcccagggccagaaggagggaaacgaaattaaaattaacatttcttctcaggaaaaaaaaaaaagtaccgctccagagcaggagcctaggcagccgagagggtgcccgaacctgagtctgagttgcggccacttcaggagctgagaggagcaggatggaactgcaggatccaaagatgaatggagccctcccttcggatgctgtgggctacaggcaagaacgtgagggcttcctgcccagtcgtggtcctgctcctgggagcaagccggtccagttcatggatttcgaggggaagacatcgtttggaatgtcagtgttcaacctcagcaacgccatcatgggcagcggcatcctggggctggcctatgccatggcccacacgggggtcatcttcttcctggccctgctgctgtgcattgcgcttctgtcgtcctactccatccacctcctgctgacctgtgctggtattgcaggcatccgagcctatgagcagctgggacagagggcattcgggcctgcggggaaggtagtggtggccacagtcatctgtctgcacaatgttggggccatgtccagttacctgttcatcatcaaatctgagctccccctggttatcggcaccttcctgtacatggaccccgagggggactggttcttgaagggaaacctcctcatcatcatcgtcagtgtgttaatcatcctgcccctcgccctcatgaaacacttgggctacctggggtacaccagtggtctctctctgacctgcatgctgtttttccttgtttcggtcatctacaagaagttccaacttggctgtgctataggccacaatgaaacagcaatggagagtgaagctctcgtgggactccccagccaaggactcaacagcagctgtgaggcccagatgttcacagttgactcacagatgtcctacacagtgcccattatggcttttgcttttgtctgccaccctgaggtgctgcccatctatacggagctctgccggccctccaagcgcaggatgcaggccgtggccaacgtgtccattggggccatgttctgcatgtatgggctcacagcaacctttggatacctcaccttctacagcagtgtgaaggcggagatgctgcacatgtacagccagaaggacccgctcatcctctgtgtgcgcctggccgtgctgctcgcggtgaccctcactgtgccagtcgtgctgttccctatccgccgggccctgcagcagctgcttttcccaggcaaggccttcagctggccacgacatgtggccatagctctgatcctgcttgttttggtcaatgtccttgtcatctgtgtgccaaccatccgggatatctttggagttatcgggtccacctcagcccccagcctcatcttcatcctccccagcatcttctacctccgcattgtaccctctgaggtggagcctttcttatcctggcccaagatccaggccctgtgctttggagtcctgggagtcctcttcatggccgtcagtctaggctttatgtttgccaactgggccacaggccagagccgcatgtctggacactgatcaggccctgctggcccaggtccctgtgcgcatgcacatggaggggtcagggccgctccctagggtccctcctgcccaacatgtggaggtggctggttcccatgaacgtggttgtcagaggcgggggacagcagaggctgcagactggcccacttccctcctccccagggatgccaagcttggatcatggccctaatcccaaccccaaccccatgggaggaggaggaggaggaagaagaggaggaggaggaggaggaggaggaggaggaggaggccaggtcctggtggagcctttgcccagcccagtcctctctgcctcctcctggctgaagctgtttgtcaggattaccctcgggctaaagaggaaaaataaagatgttgagctaccactctgga

SEQ ID NO: 19535 - DNA, 2100 bp, Homo sapiens
  source 1..2100: mol_type = unassigned DNA
ccgctcttcggcccagtgactgccctccctggctgctcccctcccggcctgcctttctcctccagctgttcttcctcctccagcactccccatcctcagcctatccccacccgcagcgtctcccctccccagctgttttacctctggtggctgcttcaccctcccccggtcctctccacttccagctgctccctccaaagtttgtcctagtttcccccttcccagctctccccattcgcagcctcttccatcttcaactcttcttccctgctagcctcttccctcctccgatggtctctccttggcttctctccaccccgcttgcttcttctctagtctttccctggccctggcattagtctccttaccctgtgccctgtcccaatgtgtgcccgggctttgctccttgcgtgcagttcgaggggaagacatcgtttggaatgtcagtgttcaacctcagcaacgccatcatgggcagcggcatcctggggctggcctatgccatggcccacacgggggtcatcttcttcctggccctgctgctgtgcattgcgcttctgtcgtcctactccatccacctcctgctgacctgtgctggtattgcaggcatccgagcctatgagcagctgggacagagggcattcgggcctgcggggaaggtagtggtggccacagtcatctgtctgcacaatgttggggccatgtccagttacctgttcatcatcaaatctgagctccccctggttatcggcaccttcctgtacatggaccccgagggggactggttcttgaagggaaacctcctcatcatcatcgtcagtgtgttaatcatcctgcccctcgccctcatgaaacacttgggctacctggggtacaccagtggtctctctctgacctgcatgctgtttttccttgtttcggtcatctacaagaagttccaacttggctgtgctataggccacaatgaaacagcaatggagagtgaagctctcgtgggactccccagccaaggactcaacagcagctgtgaggcccagatgttcacagttgactcacagatgtcctacacagtgcccattatggcttttgcttttgtctgccaccctgaggtgctgcccatctatacggagctctgccggccctccaagcgcaggatgcaggccgtggccaacgtgtccattggggccatgttctgcatgtatgggctcacagcaacctttggatacctcaccttctacagcagtgtgaaggcggagatgctgcacatgtacagccagaaggacccgctcatcctctgtgtgcgcctggccgtgctgctcgcggtgaccctcactgtgccagtcgtgctgttccctatccgccgggccctgcagcagctgcttttcccaggcaaggccttcagctggccacgacatgtggccatagctctgatcctgcttgttttggtcaatgtccttgtcatctgtgtgccaaccatccgggatatctttggagttatcgggtccacctcagcccccagcctcatcttcatcctccccagcatcttctacctccgcattgtaccctctgaggtggagcctttcttatcctggcccaagatccaggccctgtgctttggagtcctgggagtcctcttcatggccgtcagtctaggctttatgtttgccaactgggccacaggccagagccgcatgtctggacactgatcaggccctgctggcccaggtccctgtgcgcatgcacatggaggggtcagggccgctccctagggtccctcctgcccaacatgtggaggtggctggttcccatgaacgtggttgtcagaggcgggggacagcagaggctgcagactggcccacttccctcctccccagggatgccaagcttggatcatggccctaatcccaaccccaaccccatgggaggaggaggaggaggaagaagaggaggaggaggaggaggaggaggaggaggaggaggccaggtcctggtggagcctttgcccagcccagtcctctctgcctcctcctggctgaagctgtttgtcaggattaccctcgggctaaagaggaaaaataaagatgttgagctaccactctg

SEQ ID NO: 19536 - DNA, 493 bp, Homo sapiens
  source 1..493: mol_type = unassigned DNA
gtttggaatgtcagtgttcaacctcagcaacgccatcatgggcagcggcatcctggggctggcctatgccatggcccacacgggggtcatcttcttcctggccctgctgctgtgcattgcgcttctgtcgtcctactccatccacctcctgctgacctgtgctggtattgcaggcatccgagcctatgagcagctgggacagagggcattcgggcctgcggggaaggtagtggtggccacagtcatctgtctgcacaatgttggggccatgtccagttacctgttcatcatcaaatctgagctccccctggttatcggcaccttcctgtacatggaccccgaggggaggaggaggaggaggaggaggaggaggaggaggccaggtcctggtggagcctttgcccagcccagtcctctctgcctcctcctggctgaagctgtttgtcaggattaccctcgggctaaagaggaaaaataaagatgttgagctacc

SEQ ID NO: 19537 - DNA, 797 bp, Homo sapiens
  source 1..797: mol_type = unassigned DNA
tcactgtgcatgtatgtatgggtttctggggcattggtcctggtgctctctccacatcctgcatcccgtaccctctgtctcatggcccaggcagtgtgaaggcggagatgctgcacatgtacagccagaaggacccgctcatcctctgtgtgcgcctggccgtgctgctcgcggtgaccctcactgtgccagtcgtgctgttccctatccgccgggccctgcagcagctgcttttcccaggcaaggccttcagctggccacgacatgtggccatagctctgatcctgcttgttttggtcaatgtccttgtcatctgtgtgccaaccatccgggatatctttggagttatcgggtccacctcagcccccagcctcatcttcatcctccccagcatcttctacctccgcattgtaccctctgaggtggagcctttcttatcctggcccaagatccaggccctgtgctttggagtcctgggagtcctcttcatggccgtcagtctaggctttatgtttgccaactgggccacaggccagagccgcatgtctggacactgatcaggccctgctggcccaggtccctgtgcgcatgcacatggaggggtcagggccgctccctagggtccctcctgcccaacatgtggaggtggctggttcccatgaacgtggttgtcagaggcgggggacagcagaggctgcagactggcccacttccctcctccccagggatgccaagcttggatcatggccctaatcccaaccccaaccccatgggaggaggaggaggaggaagaagag

SEQ ID NO: 19538 - DNA, 894 bp, Homo sapiens
  source 1..894: mol_type = unassigned DNA
ggctggggctagggctggggggagggggaaggcctggggcaggagcctctgagctctttccttctgtgaccacggacctgtcagtttccaaacagaaggtgtgcctcacttgtgtggattttgtcactgtgcatgtatgtatgggtttctggggcattggtcctggtgctctctccacatcctgcatcccgtaccctctgtctcatggcccaggcagtgtgaaggcggagatgctgcacatgtacagccagaaggacccgctcatcctctgtgtgcgcctggccgtgctgctcgcggtgaccctcactgtgccagtcgtgctgttccctatccgccgggccctgcagcagctgcttttcccaggcaaggccttcagctggccacgacatgtggccatagctctgatcctgcttgttttggtcaatgtccttgtcatctgtgtgccaaccatccgggatatctttggagttatcgggtccacctcagcccccagcctcatcttcatcctccccagcatcttctacctccgcattgtaccctctgaggtggagcctttcttatcctggcccaagatccaggtaagcattccagggcagagctagggagagagggagcactccaaggagggagtgctcactccaggatggctggaggtgaaagggacatgcataggagggggctgggagagcatctgaaagaatggtctggaagaatgaaggtgattgtctaggaaggggcagaggagacagagcaccagcagggtccaggaagacagggagcactcaaacagaggctggcatagagggagcattctccagacagatggaaagagcactattgggaagagagctggaagcactttgaagaaggaggatggaggaacgtattctgtca

SEQ ID NO: 19539 - DNA, 525 bp, Homo sapiens
  source 1..525: mol_type = unassigned DNA
ggccctgctgctgtgcattgcgcttctgtcgtcctactccatccacctcctgctgacctgtgctggtattgcagggactggttcttgaagggaaacctcctcatcatcatcgtcagtgtgttaatcatcctgcccctcgccctcatgaaacacttgggctacctggggtacaccagtggtctctctctgacctgcatgctgtttttccttgtttcggtcatctacaagaagttccaacttggctgtgctataggccacaatgaaacagcaatggagagtgaagctctcgtgggactccccagccaaggactcaacagcagctgtgaggcccagatgttcacagttgactcacagatgtcctacacagtgcccattatggcttttgcttttgtctgccaccctgaggtgctgcccatctatacggagctctgccgcgcaggatgcaggccgtggccaacgtgtccattggggccatgttctgcatgtatgggctcacagcaacctttggatacctcaccttctaca

SEQ ID NO: 19540 - DNA, 910 bp, Homo sapiens
  source 1..910: mol_type = unassigned DNA
agacagcgtgagtctggggtctgggaggagaggctatcccttctccacgtggtcggctcatctgcgctggggatggaactgcaggatccaaagatgaatggagccctcccttcggatgctgtgggctacaggcaagaacgtgagggcttcctgcccagtcgtggtcctgctcctgggagcaagccggtccagttcatggatttcgaggggaagacatcgtttggaatgtcagtgttcaacctcagcaacgccatcatgggcagcggcatcctggggctggcctatgccatggcccacacgggggtcatcttcttcctggccctgctgctgtgcattgcgcttctgtcgtcctactccatccacctcctgctgacctgtgctggtattgcaggcatccgagcctatgagcagctgggacagagggcattcgggcctgcggggaaggtagtggtggccacagtcatctgtctgcacaatgttggggccatgtccagttacctgttcatcatcaaatctgagctccccctggttatcggcaccttcctgtacatggaccccgagggggactggttcttgaagggaaacctcctcatcatcatcgtcagtgtgttaatcatcctgcccctcgccctcatgaaacacttgggctacctggggtacaccagtggtctctctctgacctgcatgctgtttttccttgtttcggtcatctacaagaagttccaacttggctgtgctataggccacaatgaaacagcaatggagagtgaagctctcgtgggactccccagccaaggactcaacagcagctgtgaggcccagatgttcacagttgactcacagatgtcctacacagtgcccattatggcttttgcttttgtctgccaccctgaggtgctgcccatctata

SEQ ID NO: 19541 - DNA, 871 bp, Homo sapiens
  source 1..871: mol_type = unassigned DNA
cgtctggggcaggggtctccgagtctgtccccaaccctcagctcactcaacaggatggaactgcaggatccaaagatgaatggagccctcccttcggatgctgtgggctacaggcaagaacgtgagggcttcctgcccagtcgtggtcctgctcctgggagcaagccggtccagttcatggatttcgaggggaagacatcgtttggaatgtcagtgttcaacctcagcaacgccatcatgggcagcggcatcctggggctggcctatgccatggcccacacgggggtcatcttcttcctggccctgctgctgtgcattgcgcttctgtcgtcctactccatccacctcctgctgacctgtgctggtattgcaggcatccgagcctatgagcagctgggacagagggcattcgggcctgcggggaaggtagtggtggccacagtcatctgtctgcacaatgttggggccatgtccagttacctgttcatcatcaaatctgagctccccctggttatcggcaccttcctgtacatggaccccgagggggactggttcttgaagggaaacctcctcatcatcatcgtcagtgtgttaatcatcctgcccctcgccctcatgaaacacttgggctacctggggtacaccagtggtctctctctgacctgcatgctgtttttccttgtttcggtcatctacaagaagttccaacttggctgtgctataggccacaatgaaacagcaatggagagtgaagctctcgtgggactccccagccaaggactcaacagcagctgtgaggcccagatgttcacagttgactcacagatgtcctacacagtgcccattatggcttttgcttttgtctgccacc

SEQ ID NO: 19542 - DNA, 741 bp, Homo sapiens
  source 1..741: mol_type = unassigned DNA
ggccacgcggtgagggtggagggaaggagagggggtggcgcgggggaccggggaatgaaagacacagatggcaagagagacagcgatggaactgcaggatccaaagatgaatggagccctcccttcggatgctgtgggctacaggcaagaacgtgagggcttcctgcccagtcgtggtcctgctcctgggagcaagccggtccagttcatggatttcgaggggaagacatcgtttggaatgtcagtgttcaacctcagcaacgccatcatgggcagcggcatcctggggctggcctatgccatggcccacacgggggtcatcttcttcctggccctgctgctgtgcattgcgcttctgtcgtcctactccatccacctcctgctgacctgtgctggtattgcaggcatccgagcctatgagcagctgggacagagggcattcgggcctgcggggaaggtagtggtggccacagtcatctgtctgcacaatgttggggccatgtccagttacctgttcatcatcaaatctgagctccccctggttatcggcaccttcctgtacatggaccccgagggggactggttcttgaagggaaacctcctcatcatcatcgtcagtgtgttaatcatcctgcccctcgccctcatgaaacacttgggctacctggggtacaccagtggtctctctctgacctgcatgctgtttttccttgtttcggtcatctacaagaagttccaact

SEQ ID NO: 19543 - DNA, 708 bp, Homo sapiens
  source 1..708: mol_type = unassigned DNA
tttctgagatacctccttcccaaggagtaagcgcgggagggagctggggtttcttcagagacgctgtacctacaagacaggggctccaggctcgggtggggattgcagagacacccccaccccaggaaactcggatggaactgcaggatccaaagatgaatggagccctcccttcggatgctgtgggctacaggcaagaacgtgagggcttcctgcccagtcgtggtcctgctcctgggagcaagccggtccagttcatggatttcgaggggaagacatcgtttggaatgtcagtgttcaacctcagcaacgccatcatgggcagcggcatcctggggctggcctatgccatggcccacacgggggtcatcttcttcctggccctgctgctgtgcattgcgcttctgtcgtcctactccatccacctcctgctgacctgtgctggtattgcaggcatccgagcctatgagcagctgggacagagggcattcgggcctgcggggaaggtagtggtggccacagtcatctgtctgcacaatgttggggccatgtccagttacctgttcatcatcaaatctgagctccccctggttatcggcaccttcctgtacatggaccccgagggggactggttcttgaagggaaacctcctcatcatcatcgtcagtgtgttaatcatcctgcccctcgccctcatgaaacacttgg

SEQ ID NO: 19544 - DNA, 622 bp, Homo sapiens
  source 1..622: mol_type = unassigned DNA
acacaaacaaaccgctgtctccctccaagaaaaaaaaaaaagtaccgctccagagcaggagcctaggcagccgagagggtgcccgaacctgagtctgagttgcggccacttcaggagctgagaggagcaggatggaactgcaggatccaaagatgaatggagccctcccttcggatgctgtgggctacaggcaagaacgtgagggcttcctgcccagtcgtggtcctgctcctgggagcaagccggtccagttcatggatttcgaggggaagacatcgtttggaatgtcagtgttcaacctcagcaacgccatcatgggcagcggcatcctggggctggcctatgccatggcccacacgggggtcatcttcttcctggccctgctgctgtgcattgcgcttctgtcgtcctactccatccacctcctgctgacctgtgctggtattgcaggcatccgagcctatgagcagctgggacagagggcattcgggcctgcggggaaggtagtggtggccacagtcatctgtctgcacaatgttggggccatgtccagttacctgttcatcatcaaatctgagctccccctggttatcggcaccttcctgtacatggaccccgaggg

SEQ ID NO: 19545 - DNA, 656 bp, Homo sapiens
  source 1..656: mol_type = unassigned DNA
ctgcctccctctgggggcccccaagatctagggtcctctcgtgcctaggctgtctgcctgaggaaaaaaaaaaaagtaccgctccagagcaggagcctaggcagccgagagggtgcccgaacctgagtctgagttgcggccacttcaggagctgagaggagcaggatggaactgcaggatccaaagatgaatggagccctcccttcggatgctgtgggctacaggcaagaacgtgagggcttcctgcccagtcgtggtcctgctcctgggagcaagccggtccagttcatggatttcgaggggaagacatcgtttggaatgtcagtgttcaacctcagcaacgccatcatgggcagcggcatcctggggctggcctatgccatggcccacacgggggtcatcttcttcctggccctgctgctgtgcattgcgcttctgtcgtcctactccatccacctcctgctgacctgtgctggtattgcaggcatccgagcctatgagcagctgggacagagggcattcgggcctgcggggaaggtagtggtggccacagtcatctgtctgcacaatgttggggccatgtccagttacctgttcatcatcaaatctgagctccccctggttatcggcaccttcctgtacatggaccccgaggg

SEQ ID NO: 19546 - DNA, 1993 bp, Homo sapiens
  source 1..1993: mol_type = unassigned DNA
acaaatgccctccctgcctccctctgggggcccccaagatctagggtcctctcgtgcctaggctgtctgcctgaggaaaaaaaaaaaagtaccgctccagagcaggagcctaggcagccgagagggtgcccgaacctgagtctgagttgcggccacttcaggagctgagaggagcaggatggaactgcaggatccaaagatgaatggagccctcccttcggatgctgtgggctacaggcaagaacgtgagggcttcctgcccagtcgtggtcctgctcctgggagcaagccggtccagttcatggatttcgaggggaagacatcgtttggaatgtcagtgttcaacctcagcaacgccatcatgggcagcggcatcctggggctggcctatgccatggcccacacgggggtcatcttcttcctggccctgctgctgtgcattgcgcttctgtcgtcctactccatccacctcctgctgacctgtgctggtattgcaggcatccgagcctatgagcagctgggacagagggcattcgggcctgcggggaaggtagtggtggccacagtcatctgtctgcacaatgttggggccatgtccagttacctgttcatcatcaaatctgagctccccctggttatcggcaccttcctgtacatggaccccgagggggactggttcttgaagggaaacctcctcatcatcatcgtcagtgtgttaatcatcctgcccctcgccctcatgaaacacttgggctacctggggtacaccagtggtctctctctgacctgcatgctgtttttccttgtttcggtcatctacaagaagttccaacttggctgtgctataggccacaatgaaacagcaatggagagtgaagctctcgtgggactccccagccaaggactcaacagcagctgtgaggcccagatgttcacagttgactcacagatgtcctacacagtgcccattatggcttttgcttttgtctgccaccctgaggtgctgcccatctatacggagctctgccggccctccaagcgcaggatgcaggccgtggccaacgtgtccattggggccatgttctgcatgtatgggctcacagcaacctttggatacctcaccttctacagcagtgtgaaggcggagatgctgcacatgtacagccagaaggacccgctcatcctctgtgtgcgcctggccgtgctgctcgcggtgaccctcactgtgccagtcgtgctgttccctatccgccgggccctgcagcagctgcttttcccaggcaaggccttcagctggccacgacatgtggccatagctctgatcctgcttgttttggtcaatgtccttgtcatctgtgtgccaaccatccgggatatctttggagttatcgggtccacctcagcccccagcctcatcttcatcctccccagcatcttctacctccgcattgtaccctctgaggtggagcctttcttatcctggcccaagatccaggccctgtgctttggagtcctgggagtcctcttcatggccgtcagtctaggctttatgtttgccaactgggccacaggccagagccgcatgtctggacactgatcaggccctgctggcccaggtccctgtgcgcatgcacatggaggggtcagggccgctccctagggtccctcctgcccaacatgtggaggtggctggttcccatgaacgtggttgtcagaggcgggggacagcagaggctgcagactggcccacttccctcctccccagggatgccaagcttggatcatggccctaatcccaaccccaaccccatgggaggaggaggaggaggaagaagaggaggaggaggaggaggaggaggaggaggaggaggccaggtcctggtggagcctttgcccagcccagtcctctctgcctcctcctggctgaagctgtttgtcaggattaccctcgggctaaagaggaaaaataaagatgttgagctaccactctgga

SEQ ID NO: 19547 - DNA, 2100 bp, Homo sapiens
  source 1..2100: mol_type = unassigned DNA
ccgctcttcggcccagtgactgccctccctggctgctcccctcccggcctgcctttctcctccagctgttcttcctcctccagcactccccatcctcagcctatccccacccgcagcgtctcccctccccagctgttttacctctggtggctgcttcaccctcccccggtcctctccacttccagctgctccctccaaagtttgtcctagtttcccccttcccagctctccccattcgcagcctcttccatcttcaactcttcttccctgctagcctcttccctcctccgatggtctctccttggcttctctccaccccgcttgcttcttctctagtctttccctggccctggcattagtctccttaccctgtgccctgtcccaatgtgtgcccgggctttgctccttgcgtgcagttcgaggggaagacatcgtttggaatgtcagtgttcaacctcagcaacgccatcatgggcagcggcatcctggggctggcctatgccatggcccacacgggggtcatcttcttcctggccctgctgctgtgcattgcgcttctgtcgtcctactccatccacctcctgctgacctgtgctggtattgcaggcatccgagcctatgagcagctgggacagagggcattcgggcctgcggggaaggtagtggtggccacagtcatctgtctgcacaatgttggggccatgtccagttacctgttcatcatcaaatctgagctccccctggttatcggcaccttcctgtacatggaccccgaggggggactggttcttgaagggaaacctcctcatcatcatcgtcagtgtgttaatcatcctgcccctcgccctcatgaaacacttgggctacctggggtacaccagtggtctctctctgacctgcatgctgtttttccttgtttcggtcatctacaagaagttccaacttggctgtgctataggccacaatgaaacagcaatggagagtgaagctctcgtgggactccccagccaaggactcaacagcagctgtgaggcccagatgttcacagttgactcacagatgtcctacacagtgcccattatggcttttgcttttgtctgccaccctgaggtgctgcccatctatacggagctctgccggccctccaagcgcaggatgcaggccgtggccaacgtgtccattggggccatgttctgcatgtatgggctcacagcaacctttggatacctcaccttctacagcagtgtgaaggcggagatgctgcacatgtacagccagaaggacccgctcatcctctgtgtgcgcctggccgtgctgctcgcggtgaccctcactgtgccagtcgtgctgttccctatccgccgggccctgcagcagctgcttttcccaggcaaggccttcagctggccacgacatgtggccatagctctgatcctgcttgttttggtcaatgtccttgtcatctgtgtgccaaccatccgggatatctttggagttatcgggtccacctcagcccccagcctcatcttcatcctccccagcatcttctacctccgcattgtaccctctgaggtggagcctttcttatcctggcccaagatccaggccctgtgctttggagtcctgggagtcctcttcatggccgtcagtctaggctttatgtttgccaactgggccacaggcagagccgcatgtctggacactgatcaggccctgctggcccaggtccctgtgcgcatgcacatggaggggtcagggccgctccctagggtccctcctgcccaacatgtggaggtggctggttcccatgaacgtggttgtcagaggcgggggacagcagaggctgcagactggcccacttccctcctccccagggatgccaagcttggatcatggccctaatcccaaccccaaccccatgggaggaggaggaggaggaagaagaggaggaggaggaggaggaggaggaggaggaggaggccaggtcctggtggagcctttgcccagcccagtcctctctgcctcctcctggctgaagctgtttgtcaggattaccctcgggctaaagaggaaaaataaagatgttgagctaccactctg

SEQ ID NO: 19548 - DNA, 4549 bp, Homo sapiens
  source 1..4549: mol_type = unassigned DNA
ccccaaggtaggtggccggagacaggctctggagggtggaagtgttagatccccgaggtctgtggagcccctcagtccccgccaccgcggaaaagctcagaccctttccctgcaggggtccagatcctggcgtcctcgccccacgcccgtccctctgttgcgccagctctgccgcgcctttacccagccagagggtctccacccagtcctaggccgggatcgggtcccggagctcctccccaggttaccccacagtagcccacccttctcgctccaggcctgggaatcgccccgccccggcctcctggcccgggtgcgccctggctcacctcacaaagcctcacctcacaaagcagcccaccctttctatctcagggctccaaccccaggctggactgggagcacactccagttgggatctgaggggcctacatcgctggcctgagcatgtgggcatcaggcttctattctggctctgccagctacccactgtgaccttagtctaacctctccctcctgggcctgttttcctatctgtcctgaagctccatttcatgagtaagcgtgagagccgctcagtttcctccagctctgctgaagccagcacagaagtagcccaaactcttccctctgctgacagcaaattttaggcaaagtcttgagaaagaagaaattgggtccagaaagggaagtgaggagaatcagatcccagacctttggggagaaggagcaaccgcctctggcacagcccatcagggagaaagagcaggttgagaagagtcctaagctaacagccccaaacaggtgggtgttgctcagctccctgaggcatgtggttgtaaggcagaacccacagaccttgcaggaagaaggctctcggggccatggcccaggtcagcatcaacaatgactacagcgagtgggacttgagcacggatgccggggagcgggctcggctgctgcagagtccctgtgtggacacagcccccaagagtgagtgggaagcctctcctgggggtctggacagaggcaccacttccacacttggggccatcttcatcgtcgtcaacgcgtgcctgggtgcagggttactcaacttcccagcagccttcagcactgcggggggcgtggcagcaggcatcgcactgcagatgggtatgctggttttcatcatcagtggccttgtcatcctggcctactgctcccaggccagcaatgagaggacctaccaggaggtggtatgggctgtgtgtggcaagctgacaggtgtgctatgtgaggtggccatcgctgtctacacctttggcacctgcattgccttcctaatcatcattggcgaccagcaggacaagattatagctgtgatggcgaaagagccggagggggccagcggcccttggtacacagaccgcaagttcaccatcagcctcactgccttcctcttcatcctgcccctctccatccccagggagattggtttccagaaatatgccagcttcctgagcgtcgtgggtacctggtacgtcacagccatcgttatcatcaagtacatctggccagataaagagatgaccccagggaacatcctgaccaggccggcttcctggatggctgtgttcaatgccatgcccaccatctgcttcggatttcagtgccacgtcagcagtgtgcccgtcttcaacagcatgcagcagcctgaagtgaagacctggggtggagtggtgacagctgccatggtcatagccctcgctgtctacatggggacaggcatctgtggcttcctgacctttggagctgctgtggatcctgacgtgctcctgtcctatccctcggaggacatggccgtggccgttgcccgagccttcatcatcctgagcgtgctcacctcctaccctatcctgcacttctgtgggcgggcggtggtggaaggcctgtggctgcgctaccagggggtgccagtggaggaggacgtggggcgggagcggcggcggcgagtgctgcagacgctggtctggttcctgctcaccctgctgctggcgctcttcatccctgacatcggcaaggtgatctcagtcattggaggcctggccgcctgcttcatcttcgtcttcccagggctgtgcctcattcaagccaaactctctgagatggaagaggtcaaaccagccagctggtgggtgctggtcagctacggagtcctcttggtcaccctgggagccttcatcttcggccagaccacagccaacgccatctttgtggatctcttggcataaccactgcctcccagggaacacaaggcctttgccattggtcgcaggaacccatctcttagagctatggggccattcttagtccacgatcattccaactggtgggatgacatccggacatcctcttccagggactggggcaaactcaggccccacacctctggacagctcaaatccagtccccttcctgctccccagtcctggcagtgccgtggatggcggcaggaagtctcacatcatagaggacccctcctcctctcccagttctcaacttctccatgcctggaatccacgggtgaagagagtcggtagatctcataagaaagaatccagtctgacttccctctggagaatgactatggacagaaggccaccatcctccacagagcaccctgtcctgagtaggggttgtgctcattaccccaggccagtggtagcttcctcaggagcctggccacttccaacggtagcactgaagtcatgcaaatgcatagtcaggtagattcagaccttgtccacaccttcctgggcaacccccaccatgaacctgtcagcctctttcccatagctaatagacatttcccaggccttgaggggccccaccctgtctctttcatcaaacctgatggtccaggctgggcatccctctcctcctccatccccagacatcaccaggtctaatgtttacaaacggtgccagcccggctctgaagccaagggccgtcccgtgccacggtgctgtgagtattcctccgttagctttccccataaggttgggagtatctgcttttgtgtctgagatgggcccctcttttcagaggccgcagggtgggtgatggagaaggctgagaacctttcagaccctctgtgtgggctgggctggtcagaatcagggtgtacctccccgacaccttctttttcagtgatgttttctcttcttcctgcctttcctctgcctcctcccctgccagccctagcgtgactacccagagacaaaaaaaaaaaaaaaaaaaaaaggcagggctgggcgcagtggctcacgcctgtaatcccagcactttgggaggccaaggcgggcagatgacttgaggtcaggagttcgagaccagcctggccaacacggcaaaaccccatctctactaaaaatacaaaaaattaaccgggcatggtggcgggcacctgtaatcccagctacttgggaggctgaggcagcagagccgcttaaacccaggaggcagagactgcaatgagctgagatcgtgccattgcactccagcttgggcaacaagagtgaaacttcatctcaaaaaaacagaaacaaacaaaaaggcagctgggttgtcactgatgggcagcatttgagcctgccacactggcctggaagtttcccttccagtctggattttgtctgctccttccttccccctcaccccgttacctcttcacctcccatctcacttcactgtgtagctcagtctctcccacgcacataattggggacagtgggggctctcttaccagcctcctcagcaacgcacgtccatcaggcctggcctcagtggccagccacattgatgtcacactggaattgttaccccagagagggcgaagagataggctatctccccacctcccaccctactccccactatattcccgttttgaccacctcagcccctcagctgccccctctcactttggccaatcccaggcaccaatcagacttcctcctccacctggagcccctagcatttccttgtcccctcttccccaaaacctctgtaaagggtacgagagggaccccctgccgagccgcccgccactcagggcagtccgatctaagaagcagaagctggttggaggctggctgggcctctgtccagtccccagatggataaactgccttttctcacatcccctcttggtgcctgatcttctctgcccccggggccagacccactgtgctgttttctgtcagtctgtggcacagcaccaagctctgccagcaccagtccctgacagggctaggaggacagcctggtcagcagggctgcagtcccccagtgccgtgtttcgggggtcaagggatgtaagtggagtcattgcacagagacagaccagtcaggagaaggagctggaatctggcctcttgtcctaacctcaggagccccctcccatcctctccccaccctccctatcggggtacttcactgtttcttttctacttgtgtatactcgagaaagggaagatggttaataaaagggatttgtgctgctga

SEQ ID NO: 19549 - DNA, 4392 bp, Homo sapiens
  source 1..4392: mol_type = unassigned DNA
ctgattaaaaaaaaactccagtgctctggccatgggcgtgaaggcaaggacagagaccgggaggataatgaggccaaacagctttggcccaccgccaccgggactggcaaagaggccagacctcctaatgctcttccttggaggaaggagcagtgtttgatttggtcaagaggccaagactaaaagtaagaggataaacacgagctggctggacgcgaggctggctcagggcagtgctgtcgggctgaggattcagggagctggtgttgtccaagcttcacatttgcggaaactacaactcccagcgtgtcccgcggccgcccgagcgggcgtcatgtgatgcatgctcacgtgtctccgcagccggctcgggaaagaatcccccaagctccatttcatgagtaagcgtgagagccgctcagtttcctccagctctgctgaagccagcacagaagtagcccaaactcttccctctgctgacagcaaattttaggcaaagtcttgagaaagaagaaattgggtccagaaagggaagtgaggagaatcagatcccagacctttggggagaaggagcaaccgcctctggcacagcccatcagggagaaagagcaggttgagaagagtcctaagctaacagccccaaacaggtgggtgttgctcagctccctgaggcatgtggttgtaaggcagaacccacagaccttgcaggaagaaggctctcggggccatggcccaggtcagcatcaacaatgactacagcgagtgggacttgagcacggatgccggggagcgggctcggctgctgcagagtccctgtgtggacacagcccccaagagtgagtgggaagcctctcctgggggtctggacagaggcaccacttccacacttggggccatcttcatcgtcgtcaacgcgtgcctgggtgcagggttactcaacttcccagcagccttcagcactgcggggggcgtggcagcaggcatcgcactgcagatgggtatgctggttttcatcatcagtggccttgtcatcctggcctactgctcccaggccagcaatgagaggacctaccaggaggtggtatgggctgtgtgtggcaagctgacaggtgtgctatgtgaggtggccatcgctgtctacacctttggcacctgcattgccttcctaatcatcattggcgaccagcaggacaagattatagctgtgatggcgaaagagccggagggggccagcggcccttggtacacagaccgcaagttcaccatcagcctcactgccttcctcttcatcctgcccctctccatccccagggagattggtttccagaaatatgccagcttcctgagcgtcgtgggtacctggtacgtcacagccatcgttatcatcaagtacatctggccagataaagagatgaccccagggaacatcctgaccaggccggcttcctggatggctgtgttcaatgccatgcccaccatctgcttcggatttcagtgccacgtcagcagtgtgcccgtcttcaacagcatgcagcagcctgaagtgaagacctggggtggagtggtgacagctgccatggtcatagccctcgctgtctacatggggacaggcatctgtggcttcctgacctttggagctgctgtggatcctgacgtgctcctgtcctatccctcggaggacatggccgtggccgttgcccgagccttcatcatcctgagcgtgctcacctcctaccctatcctgcacttctgtgggcgggcggtggtggaaggcctgtggctgcgctaccagggggtgccagtggaggaggacgtggggcgggagcggcggcggcgagtgctgcagacgctggtctggttcctgctcaccctgctgctggcgctcttcatccctgacatcggcaaggtgatctcagtcattggaggcctggccgcctgcttcatcttcgtcttcccagggctgtgcctcattcaagccaaactctctgagatggaagaggtcaaaccagccagctggtgggtgctggtcagctacggagtcctcttggtcaccctgggagccttcatcttcggccagaccacagccaacgccatctttgtggatctcttggcataaccactgcctcccagggaacacaaggcctttgccattggtcgcaggaacccatctcttagagctatggggccattcttagtccacgatcattccaactggtgggatgacatccggacatcctcttccagggactggggcaaactcaggccccacacctctggacagctcaaatccagtccccttcctgctccccagtcctggcagtgccgtggatggcggcaggaagtctcacatcatagaggacccctcctcctctcccagttctcaacttctccatgcctggaatccacgggtgaagagagtcggtagatctcataagaaagaatccagtctgacttccctctggagaatgactatggacagaaggccaccatcctccacagagcaccctgtcctgagtaggggttgtgctcattaccccaggccagtggtagcttcctcaggagcctggccacttccaacggtagcactgaagtcatgcaaatgcatagtcaggtagattcagaccttgtccacaccttcctgggcaacccccaccatgaacctgtcagcctctttcccatagctaatagacatttcccaggccttgaggggccccaccctgtctctttcatcaaacctgatggtccaggctgggcatccctctcctcctccatccccagacatcaccaggtctaatgtttacaaacggtgccagcccggctctgaagccaagggccgtcccgtgccacggtgctgtgagtattcctccgttagctttccccataaggttgggagtatctgcttttgtgtctgagatgggcccctcttttcagaggccgcagggtgggtgatggagaaggctgagaacctttcagaccctctgtgtgggctgggctggtcagaatcagggtgtacctccccgacaccttctttttcagtgatgttttctcttcttcctgcctttcctctgcctcctcccctgccagccctagcgtgactacccagagacaaaaaaaaaaaaaaaaaaaaaaggcagggctgggcgcagtggctcacgcctgtaatcccagcactttgggaggccaaggcgggcagatgacttgaggtcaggagttcgagaccagcctggccaacacggcaaaaccccatctctactaaaaatacaaaaaattaaccgggcatggtggcgggcacctgtaatcccagctacttgggaggctgaggcagcagagccgcttaaacccaggaggcagagactgcaatgagctgagatcgtgccattgcactccagcttgggcaacaagagtgaaacttcatctcaaaaaaacagaaacaaacaaaaaggcagctgggttgtcactgatgggcagcatttgagcctgccacactggcctggaagtttcccttccagtctggattttgtctgctccttccttccccctcaccccgttacctcttcacctcccatctcacttcactgtgtagctcagtctctcccacgcacataattggggacagtgggggctctcttaccagcctcctcagcaacgcacgtccatcaggcctggcctcagtggccagccacattgatgtcacactggaattgttaccccagagagggcgaagagataggctatctccccacctcccaccctactccccactatattcccgttttgaccacctcagcccctcagctgccccctctcactttggccaatcccaggcaccaatcagacttcctcctccacctggagcccctagcatttccttgtcccctcttccccaaaacctctgtaaagggtacgagagggaccccctgccgagccgcccgccactcagggcagtccgatctaagaagcagaagctggttggaggctggctgggcctctgtccagtccccagatggataaactgccttttctcacatcccctcttggtgcctgatcttctctgcccccggggccagacccactgtgctgttttctgtcagtctgtggcacagcaccaagctctgccagcaccagtccctgacagggctaggaggacagcctggtcagcagggctgcagtcccccagtgccgtgtttcgggggtcaagggatgtaagtggagtcattgcacagagacagaccagtcaggagaaggagctggaatctggcctcttgtcctaacctcaggagccccctcccatcctctccccaccctccctatcggggtacttcactgtttcttttctacttgtgtatactcgagaaagggaagatggttaataaaagggatttgtgctgctga

SEQ ID NO: 19550 - DNA, 2867 bp, Homo sapiens
  source 1..2867: mol_type = unassigned DNA
cggagacaggctctggagggtggaagtgttagatccccgaggtctgtggagcccctcagtccccgccaccgcggaaaagctcagaccctttccctgcaggggtccagatcctggcgtcctcgccccacgcccgtccctctgttgcgccagctctgccgcgcctttacccagccagagggtctccacccagtcctaggccgggatcgggtcccggagctcctccccaggttaccccacagtagcccacccttctcgctccaggcctgggaatcgccccgccccggcctcctggcccgggtgcgccctggctcacctcacaaagcctcacctcacaaagcagcccaccctttctatctcagggctccaaccccaggctggactgggagcacactccagttgggatctgaggggcctacatcgctggcctgagcatgtgggcatcaggcttctattctggctctgccagctacccactgtgaccttagtctaacctctccctcctgggcctgttttcctatctgtcctgaagctccatttcatgagtaagcgtgagagccgctcagtttcctccagctctgctgaagccagcacagaagtagcccaaactcttccctctgctgacagcaaattttaggcaaagtcttgagaaagaagaaattgggtccagaaagggaagtgaggagaatcagatcccagacctttggggagaaggagcaaccgcctctggcacagcccatcagggagaaagagcaggttgagaagagtcctaagctaacagccccaaacaggtgggtgttgctcagctccctgaggcatgtggttgtaaggcagaacccacagaccttgcaggaagaaggctctcggggccatggcccaggtcagcatcaacaatgactacagcgagtgggacttgagcacggatgccggggagcgggctcggctgctgcagagtccctgtgtggacacagcccccaagagtgagtgggaagcctctcctgggggtctggacagaggcaccacttccacacttggggccatcttcatcgtcgtcaacgcgtgcctgggtgcagggttactcaacttcccagcagccttcagcactgcggggggcgtggcagcaggcatcgcactgcagatgggtatgctggttttcatcatcagtggccttgtcatcctggcctactgctcccaggccagcaatgagaggacctaccaggaggtggtatgggctgtgtgtggcaagctgacaggtgtgctatgtgaggtggccatcgctgtctacacctttggcacctgcattgccttcctaatcatcattggcgaccagcaggacaagattatagctgtgatggcgaaagagccggagggggccagcggcccttggtacacagaccgcaagttcaccatcagcctcactgccttcctcttcatcctgcccctctccatccccagggagattggtttccagaaatatgccagcttcctgagcgtcgtgggtacctggtacgtcacagccatcgttatcatcaagtacatctggccagataaagagatgaccccagggaacatcctgaccaggccggcttcctggatggctgtgttcaatgccatgcccaccatctgcttcggatttcagtgccacgtcagcagtgtgcccgtcttcaacagcatgcagcagcctgaagtgaagacctggggtggagtggtgacagctgccatggtcatagccctcgctgtctacatggggacagctggtgggtgctggtcagctacggagtcctcttggtcaccctgggagccttcatcttcggccagaccacagccaacgccatctttgtggatctcttggcataaccactgcctcccagggaacacaaggcctttgccattggtcgcaggaacccatctcttagagctatggggccattcttagtccacgatcattccaactggtgggatgacatccggacatcctcttccagggactggggcaaactcaggccccacacctctggacagctcaaatccagtccccttcctgctccccagtcctggcagtgccgtggatggcggcaggaagtctcacatcatagaggacccctcctcctctcccagttctcaacttctccatgcctggaatccacgggtgaagagagtcggtagatctcataagaaagaatccagtctgacttccctctggagaatgactatggacagaaggccaccatcctccacagagcaccctgtcctgagtaggggttgtgctcattaccccaggccagtggtagcttcctcaggagcctggccacttccaacggtagcactgaagtcatgcaaatgcatagtcaggtagattcagaccttgtccacaccttcctgggcaacccccaccatgaacctgtcagcctctttcccatagctaatagacatttcccaggccttgaggggccccaccctgtctctttcatcaaacctgatggtccaggctgggcatccctctcctcctccatccccagacatcaccaggtctaatgtttacaaacggtgccagcccggctctgaagccaagggccgtcccgtgccacggtgctgtgagtattcctccgttagctttccccataaggttgggagtatctgcttttgtgtctgagatgggcccctcttttcagaggccgcagggtgggtgatggagaaggctgagaacctttcagaccctctgtgtgggctgggctggtcagaatcagggtgtacctccccgacaccttctttttcagtgatgttttctcttcttcctgcctttcctctgcctcctcccctgccagccctagcgtgactacccagagacaaaaaaaaaaaaaaaaaaaaaa

SEQ ID NO: 19551 - DNA, 1806 bp, Homo sapiens
  source 1..1806: mol_type = unassigned DNA
aagctccatttcatgagtaagcgtgagagccgctcagtttcctccagctctgctgaagccagcacagaagtagcccaaactcttccctctgctgacagcaaattttaggcaaagtcttgagaaagaagaaattgggtccagaaagggaagtgaggagaatcagatcccagacctttggggagaaggagcaaccgcctctggcacagcccatcagggagaaagagcaggttgagaagagtcctaagctaacagccccaaacaggtgggtgttgctcagctccctgaggcatgtggttgtaaggcagaacccacagaccttgcaggaagaaggctctcggggccatggcccaggtcagcatcaacaatgactacagcgagtgggacttgagcacggatgccggggagcgggctcggctgctgcagagtccctgtgtggacacagcccccaagagtgagtgggaagcctctcctgggggtctggacagaggcaccacttccacacttggggccatcttcatcgtcgtcaacgcgtgcctgggtgcagggttactcaacttcccagcagccttcagcactgcggggggcgtggcagcaggcatcgcactgcagatgggtatgctggttttcatcatcagtggccttgtcatcctggcctactgctcccaggccagcaatgagaggacctaccaggaggtggtatgggctgtgtgtggcaagctgacaggtgtgctatgtgaggtggccatcgctgtctacacctttggcacctgcattgccttcctaatcatcattggcgaccagcaggacaagattatagctgtgatggcgaaagagccggagggggccagcggcccttggtacacagaccgcaagttcaccatcagcctcactgccttcctcttcatcctgcccctctccatccccagggagattggtttccagaaatatgccagcttcctgagcgtcgtgggtacctggtacgtcacagccatcgttatcatcaagtacatctggccagataaagagatgaccccagggaacatcctgaccaggccggcttcctggatggctgtgttcaatgccatgcccaccatctgcttcggatttcagcatgcagcagcctgaagtgaagacctggggtggagtggtgacagctgccatggtcatagccctcgctgtctacatggggacaggcatctgtggcttcctgacctttggagctgctgtggatcctgacgtgctcctgtcctatccctcggaggacatggccgtggccgttgcccgagccttcatcatcctgagcgtgctcacctcctaccctatcctgcacttctgtgggcgggcggtggtggaaggcctgtggctgcgctaccagggggtgccagtggaggaggacgtggggcgggagcggcggcggcgagtgctgcagacgctggtctggttcctgctcaccctgctgctggcgctcttcatccctgacatcggcaaggtgatctcagtcattggaggcctggccgcctgcttcatcttcgtcttcccagggctgtgcctcattcaagccaaactctctgagatggaagaggtcaaaccagccagctggtgggtgctggtcagctacggagtcctcttggtcaccctgggagccttcatcttcggccagaccacagccaacgccatctttgtggatctcttggcataaccactgcctcccagggaacacaaggcctttgccattggtcgcaggaacccatctcttagagctatggggccattcttagtccacgatcattccaactggtgggatga

SEQ ID NO: 19552 - DNA, 1437 bp, Homo sapiens
  source 1..1437: mol_type = unassigned DNA
atgtgatgcatgctcacgtgtctccgcagccggctcgggaaagaatcccccaagctccatttcatgagtaagcgtgagagccgctcagtttcctccagctctgctgaagccagcacagaagtagcccaaactcttccctctgctgacagcaaattttaggcaaagtcttgagaaagaagaaattgggtccagaaagggaagtgaggagaatcagatcccagacctttggggagaaggagcaaccgcctctggcacagcccatcagggagaaagagcaggcatcgcactgcagatgggtatgctggttttcatcatcagtggccttgtcatcctggcctactgctcccaggccagcaatgagaggacctaccaggaggtggtatgggctgtgtgtggcaagctgacaggtgtgctatgtgaggtggccatcgctgtctacacctttggcacctgcattgccttcctaatcatcattggcgaccagcaggacaagattatagctgtgatggcgaaagagccggagggggccagcggcccttggtacacagaccgcaagttcaccatcagcctcactgccttcctcttcatcctgcccctctccatccccagggagattggtttccagaaatatgccagcttcctgagcgtcgtgggtacctggtacgtcacagccatcgttatcatcaagtacatctggccagataaagagatgaccccagggaacatcctgaccaggccggcttcctggatggctgtgttcaatgccatgcccaccatctgcttcggatttcagtgccacgtcagcagtgtgcccgtcttcaacagcatgcagcagcctgaagtgaagacctggggtggagtggtgacagctgccatggtcatagccctcgctgtctacatggggacaggcatctgtggcttcctgacctttggagctgctgtggatcctgacgtgctcctgtcctatccctcggaggacatggccgtggccgttgcccgagccttcatcatcctgagcgtgctcacctcctaccctatcctgcacttctgtgggcgggcggtggtggaaggcctgtggctgcgctaccagggggtgccagtggaggaggacgtggggcgggagcggcggcggcgagtgctgcagacgctggtctggttcctgctcaccctgctgctggcgctcttcatccctgacatcggcaaggtgatctcagtcattggaggcctggccgcctgcttcatcttcgtcttcccagggctgtgcctcattcaagccaaactctctgagatggaagaggtcaaaccagccagctggtgggtgctggtcagctacggagtcctcttggtcaccctgggagccttcatcttcggccagaccacagccaacgccatctttgtggatctcttggcataaccactgcctcccagggaacacaa

SEQ ID NO: 19553 - DNA, 646 bp, Homo sapiens
  source 1..646: mol_type = unassigned DNA
agcccaaactcttccctctgctgacagcaaattttaggcaaagtcttgagaaagaagaaattgggtccagaaagggaagtgaggagaatcagatcccagacctttggggagaaggagcaaccgcctctggcacagcccatcagggagaaagagcaggtaccttcctctggaaactggggttgaggtcatttccccaccatgacggtgcccttcacctggacagtgccacgtcagcagtgtgcccgtcttcaacagcatgcagcagcctgaagtgaagacctggggtggagtggtgacagctgccatggtcatagccctcgctgtctacatggggacaggcatctgtggcttcctgacctttggagctgctgtggatcctgacgtgctcctgtcctatccctcggaggacatggccgtggccgttgcccgagccttcatcatcctgagcgtgctcacctcctaccctatcctgcacttctgtgggcgggctgtgcctcattcaagccaaactctctgagatggaagaggtcaaaccagccagctggtgggtgctggtcagctacggagtcctcttggtcaccctgggagccttcatcttcggccagaccacagccaacgccatctttgtggatctcttggcataacc

SEQ ID NO: 19554 - DNA, 1921 bp, Homo sapiens
  source 1..1921: mol_type = unassigned DNA
agccggctcgggaaagaatcccccaagctccatttcatgagtaagcgtgagagccgctcagtttcctccagctctgctgaagccagcacagaagtagcccaaactcttccctctgctgacagcaaattttaggcaaagtcttgagaaagaagaaattgggtccagaaagggaagtgaggagaatcagatcccagacctttggggagaaggagcaaccgcctctggcacagcccatcagggagaaagagcaggttgagaagagtcctaagctaacagccccaaacaggtgggtgttgctcagctccctgaggcatgtggttgtaaggcagaacccacagaccttgcaggaagaaggctctcggggccatggcccaggtcagcatcaacaatgactacagcgagtgggacttgagcacggatgccggggagcgggctcggctgctgcagagtccctgtgtggacacagcccccaagagtgagtgggaagcctctcctgggggtctggacagaggcaccacttccacacttggggccatcttcatcgtcgtcaacgcgtgcctgggtgcagggttactcaacttcccagcagccttcagcactgcggggggcgtggcagcaggcatcgcactgcagatgggtatgctggttttcatcatcagtggccttgtcatcctggcctactgctcccaggccagcaatgagaggacctaccaggaggtggtatgggctgtgtgtggcaagctgacaggtgtgctatgtgaggtggccatcgctgtctacacctttggcacctgcattgccttcctaatcatcattggcgaccagcaggacaagattatagctgtgatggcgaaagagccggagggggccagcggcccttggtacacagaccgcaagttcaccatcagcctcactgccttcctcttcatcctgcccctctccatccccagggagattggtttccagaaatatgccagcttcctgagcgtcgtgggtacctggtacgtcacagccatcgttatcatcaagtacatctggccagataaagagatgaccccagggaacatcctgaccaggccggcttcctggatggctgtgttcaatgccatgcccaccatctgcttcggatttcagtgccacgtcagcagtgtgcccgtcttcaacagcatgcagcagcctgaagtgaagacctggggtggagtggtgacagctgccatggtcatagccctcgctgtctacatggggacaggcatctgtggcttcctgacctttggagctgctgtggatcctgacgtgctcctgtcctatccctcggaggacatggccgtggccgttgcccgagccttcatcatcctgagcgtgctcacctcctaccctatcctgcacttctgtgggcggtgagcccccttccactccccagggcccctcctagcccctgtgagcgcttccaacatggtcctttggccttgtgtggaccccatcctgtagaaggagaaactgaagcctgtagaaaagagtcggtgcctaggatgggtccctacatatcccaggccaggtgtcagaagcgccctttgtcctggggtcaccagaacattccgtgagtcctgtaagaatctctatccatggcatggcacggtggctcacgtctctaaacccagcactttgggaggctgaggcagaaggatcgcttgagcctgggagttcaagaccacctgggcaacctagtgagaccccatctctacacaaaataaaataaatagccaggtgtggtgggatgcacctgtggtcccagctactcagccacttgggaggctgaggcagaaggatggctggagcccaggagttcaaggctgcagtgagccaagattgcaccactgcactccagcctgggtgagagagccagaccctgtctcaaaaaaac

SEQ ID NO: 19555 - DNA, 873 bp, Homo sapiens
  source 1..873: mol_type = unassigned DNA
acttctcaggcgtttcctgagtctgcttggcatagtctccggttcattcagtggacacttgtggtcgctagagctgaaggtggatgtccctaggggtggaatcagataagaggcagctggggatgaggacacttagtctctccttcccggcagcttcctgagcgtcgtgggtacctggtacgtcacagccatcgttatcatcaagtacatctggccagataaagagatgaccccagggaacatcctgaccaggccggcttcctggatggctgtgttcaatgccatgcccaccatctgcttcggatttcaggtgccagtgccagttgcaaggtccctgctgtccccttagatcaccccaccctgggatggaacccagcaaggaggaggaacccaggcagaatggaggaaatcctggggggaaggatggaacaggggcctcaggacttgccccttgttcctggggtctttgttcccaaggtaccttcctctggaaactggggttgaggtcatttccccaccatgacggtgcccttcacctggacagtgccacgtcagcagtgtgcccgtcttcaacagcatgcagcagcctgaagtgaagacctggggtggagtggtgacagctgccatggtcatagccctcgctgtctacatggggacaggcatctgtggcttcctgacctttggagctgctgtggatcctgacgtgctcctgtcctatccctcggaggacatggccgtggccgttgcccgagccttcatcatcctgagcgtgctcacctcctaccctatcctgcacttctgtgggcggtgagcccccttccactccccagggcccctcctagcccctgtgagcgcttccaacatggtcctttg

SEQ ID NO: 19556 - DNA, 760 bp, Homo sapiens
  source 1..760: mol_type = unassigned DNA
catcgctgtctacacctttggcacctgcattgccttcctaatcatcattggcgaccagcaggacaagattatagctgtgatggcgaaagagccggagggggccagcggcccttggtacacagaccgcaagttcaccatcagcctcactgccttcctcttcatcctgcccctctccatccccagggagattggtttccagaaatatgccagcttcctgagcgtcgtgggtacctggtacgtcacagccatcgttatcatcaagtacatctggccagataaagagatgaccccagggaacatcctgaccaggccggcttcctggatggctgtgttcaatgccatgcccaccatctgcttcggatttcagtgccacgtcagcagtgtgcccgtcttcaacagcatgcagcagcctgaagtgaagacctggggtggagtggtgacagctgccatggtcatagccctcgctgtctacatggggacagcagagacaaggtctcactatgttgcctagcctggtcttgaattcctgggctcaagcaattctcctgcctcggcctcccaaagtgctggggttacaggcatgagccaccaacccagcctaaaatggggaaggcatctgtggcttcctgacctttggagctgctgtggatcctgacgtgctcctgtcctatccctcggaggacatggccgtggccgttgcccgagccttcatcatcctgagcgtgctcacctcctaccctatcctgcacttctgtgggcg

SEQ ID NO: 19557 - DNA, 546 bp, Homo sapiens
  source 1..546: mol_type = unassigned DNA
atgtgatgcatgctcacgtgtctccgcagccggctcgggaaagaatcccccaagctccatttcatgagtaagcgtgagagccgctcagtttcctccagctctgctgaagccagcacagaagtagcccaaactcttccctctgctgacagcaaattttaggcaaagtcttgagaaagaagaaattgggtccagaaagggaagtgaggagaatcagatcccagacctttggggagaaggagcaaccgcctctggcacagcccatcagggagaaagagcagcttcctgagcgtcgtgggtacctggtacgtcacagccatcgttatcatcaagtacatctggccagataaagagatgaccccagggaacatcctgaccaggccggcttcctggatggctgtgttcaatgccatgcccaccatctgcttcggatttcagtgccacgtcagcagtgtgcccgtcttcaacagcatgcagcagcctgaagtgaagacctggggtggagtggtgacagctgccatggtcatagccctcgctgtctacatgggg

SEQ ID NO: 19558 - DNA, 564 bp, Homo sapiens
  source 1..564: mol_type = unassigned DNA
agccggctcgggaaagaatcccccaaggttgagaagagtcctaagctaacagccccaaacaggtgggtgttgctcagctccctgaggcatgtggttgtaaggcagaacccacagaccttgcaggaagaaggctctcggggccatggcccaggtcagcatcaacaatgactacagcgagtgggacttgagcacggatgccggggagcgggctcggctgctgcagagtccctgtgtggacacagcccccaagagtgagtgggaagcctctcctgggggtctggacagaggcaccacttccacacttggggccatcttcatcgtcgtcaacgcgtgcctgggtgcagggttactcaacttcccagcagccttcagcactgcggggggcgtggcagcaggcatcgcactgcagatgggtatgctggttttcatcatcagtggccttgtcatcctggcctactgctcccaggccagcaatgagaggacctaccaggaggtggtatgggctgtgtgtggcaagctgacaggtgtgctatgtgaggtggccatcgctgtctacacctttgg

SEQ ID NO: 19559 - DNA, 582 bp, Homo sapiens
  source 1..582: mol_type = unassigned DNA
atgtgatgcatgctcacgtgtctccgcagccggctcgggaaagaatcccccaagcaaattttaggcaaagtcttgagaaagaagaaattgggtccagaaagggaagtgaggagaatcagatcccagacctttggggagaaggagcaaccgcctctggcacagcccatcagggagaaagagcaggttgagaagagtcctaagctaacagccccaaacaggtgggtgttgctcagctccctgaggcatgtggttgtaaggcagaacccacagaccttgcaggaagaaggctctcggggccatggcccaggtcagcatcaacaatgactacagcgagtgggacttgagcacggatgccggggagcgggctcggctgctgcagagtccctgtgtggacacagcccccaagagtgagtgggaagcctctcctgggggtctggacagaggcaccacttccacacttggggccatcttcatcgtcgtcaacgcgtgcctgggtgcagggttactcaacttcccagcagccttcagcactgcggggggcgtggcagcaggcatcgcactgcagatgggtatgctggtttt

SEQ ID NO: 19560 - DNA, 731 bp, Homo sapiens
  source 1..731: mol_type = unassigned DNA
aaattgggtccagaaagggaagtgaggagaatcagatcccagacctttggggagaaggagcaaccgcctctggcacagcccatcagggagaaagagcaggttgagaagagtcctaagctaacagccccaaacaggtgggtgttgctcagctccctgaggcatgtggttgtaaggcagaacccacagaccttgcaggaagaaggctctcggggccatggcccaggtcagcatcaacaatgactacagcgagtgggacttgagcacggatgccggggagcgggctcggctgctgcagagtccctgtgtggacacagcccccaagagtgagtgggaagcctctcctgggggtctggacagaggcaccacttccacacttggggccatcttcatcgtcgtcaacgcgtgcctgggtgcagggttactcaacttcccagcagccttcagcactgcggggggcgtggcagcaggcatcgcactgcagatggtgagtgcactggccgggagggcagaggtgcagttcagttgggcgctttgcctcaaaagggaggcttcgggtcagggatggccagtaagtgatacacgcactgctctcccctccctcacacatggcagacatgactaatctattctagtattctttcctgtgacccaaatgaggcttcagaagccttccaacaatcagagaaatttgaacatcaattacatctctaattttttaggtgtaacattga

SEQ ID NO: 19561 - DNA, 581 bp, Homo sapiens
  source 1..581: mol_type = unassigned DNA
atgtgatgcatgctcacgtgtctccgcagccggctcgggaaagaatcccccaagctccatttcatgagtaagcgtgagagccgctcagtttcctccagctctggttttgatcagtgttctgctccctgcttgcttagggctggagagtctcaggcatggtggtggtgggcaacatgggaaggggcatctgcagaaataacagcagcagtgaccatttattgagtcttaaacccttactgatattaacacacgacccacaggaacatatgatgtaaaggcctaaaggggcgaagtgacttgcccagggtcacacagataggcagcggaggagtcagcattctgacggcagaacctactcggagacccagatcacagccctgcccagggctgctcttgatctgggggtggacttgatgctttaggaccatcatttctctgcgggtctcaggctatgagctgaaccttgagaacactgaagatcctttttcagggctgggctcctcagagcctctcgagattcttggaagaaaaaaaactgcatctcaattgtgtttatccagagagcaaagagaatcagtcag

SEQ ID NO: 19562 - DNA, 562 bp, Homo sapiens
  source 1..562: mol_type = unassigned DNA
agcacactccagttgggatctgaggggcctacatcgctggcctgagcatgtgggcatcaggcttctattctggctctgccagctacccactgtgaccttagtctaacctctccctcctgggcctgttttcctatctgtcctgaagctccatttcatgagtaagcgtgagagccgctcagtttcctccagctctgctgaagccagcacagaagtagcccaaactcttccctctgctgacagcaaattttaggcaaagtcttgagaaagaagaaattgggtccagaaagggaagtgaggagaatcagatcccagacctttggggagaaggagcaaccgcctctggcacagcccatcagggagaaagagcaggaacatatgatgtaaaggcctaaaggggcgaagtgacttgcccagggtcacacagataggcagcggaggagtcagcattctgacggcagaacctactcggagacccagatcacagccctgcccagggctgctcttgatctgggggtggacttgatgctttaggaccatcatttctctgcgggtctcaggctat

SEQ ID NO: 19563 - DNA, 567 bp, Homo sapiens
  source 1..567: mol_type = unassigned DNA
atgtgatgcatgctcacgtgtctccgcagccggctcgggaaagaatcccccaagctccatttcatgagtaagcgtgagagccgctcagtttcctccagctctgctgaagccagcacagaagtagcccaaactcttccctctgctgacagcaaattttaggcaaagtcttgagaaagaagaaattgggtccagaaagggaagtgaggagaatcagatcccagacctttggggagaaggagcaaccgcctctggcacagcccatcagggagaaagagcaggtaaggtgcaacaatgagctgagtaatttgccagtgagcagtgggggtgccgagaggtcttaaccaaggcagagaatctgcaagaggtgggacccccagcttctgagttccacgaggaccccagcctgcactctcatgtgggtggcaggagaggctggaggatggtgcaggactcgggcaggggtgcccaagggaaacattttggttggagagtcaggaagccgcaccaagccttgtgaccttggacgaatcactctgtagacctctgtctctgtgacgtgagcagcgg

SEQ ID NO: 19564 - DNA, 2639 bp, Homo sapiens
  source 1..2639: mol_type = unassigned DNA
aaataatcctctctagctcccagtgcacagtcaaagaattttaaaaacagggaactttgtaactgtgaaatactctccaggatttaaaaggctgtggagctccagataaagaatcgtttatctttcttctgaagaaattcctttggttacaagtttaccccataaacggcaacacactcacctccatccaagacagactcaaggtggaggaagcgtggaaatgtgcttccggacaaagctctcagtatcctgggtgccattgtttcttctactcagccgtgttttttctactgagacagacaaaccctcagcccaggatagcagaagccgtgggagttcaggccaaccggcagacctgctacaggttctctctgctggtgaccacccaccccacaaccactcaagaagcctcatcaaaacattgttggagaaaactgggtgcccacggaggagaaacggaatgcaaggagattgcaatctgtgctttgaaccagatgcactattactaatagctggaggaaattttgaagatcagcttagagaagaagtggtccagagagtttctcttctccttctctattacattattcatcaggaagagatctgttcttcaaagctcaacatgagtaataaagagtataaattttacctacacagcctactgagcctcaggcaggatgaagattcctctttcctttcacagaatgagacagaagatatcttggctttcaccaggcagtactttgacacttctcaaagccagtgtatggaaaccaaaacgctgcagaaaaaatctggaatagtgagcagtgaaggtgctaatgaaagtacgcttcctcagttggcagccatgatcattactttgtccctccagggtgtttgtctgggacaaggaaacttgccttccccagactactttacagaatatattttcagttccttgaatcgtacgaataccctccgcctatcagaactagaccaactcctcaacactctctggaccagaagtacttgtatcaaaaatgagaaaatccatcaatttcaaaggaaacaaaacaacataataacccatgatcaggactattctaatttctcttcatccatggaaaaagagtctgaggatggtccagtttcctgggatcagacctgcttctctgctaggcagctggtggagatatttctacagaagggcctctcactcatttctaaggaggactttaagcaaatgagtccagggatcatccagcagctcctcagctgctcctgccacttacccaaggaccaacaagcaaagctgccacctaccactctggagaaatacggctacagcacggtggctgtcacccttctcacactgggctccatgctggggacagcgctggtccttttccatagctgtgaggagaactacaggcttatcttacagctgtttgtgggcttggccgtcgggacactgtctggggacgctctgctccaccttatccctcaggttcttggtttacataagcaggaagccccagaatttgggcatttccatgaaagcaaaggtcatatttggaaactgatgggattaattggaggcatccatggatttttcttgatagaaaaatgttttattcttcttgtatcaccaaatgacaagaaaagcccagaagattcacaggcagctgaaatgcctataggcagtatgacagcctccaacagaaaatgtaaagccattagcttgttagcaatcatgattctggttggggacagcctgcataattttgcagatggcctagccataggagcagccttctcatcatcatccgagtcaggagtgaccactacgattgctatcttgtgtcatgaaatcccacatgaaatgggagactttgccgtgctcttaagctctggactttctatgaagactgccatcctgatgaattttataagctccctaactgccttcatgggattatacattggcctttccgtgtcagctgatccatgtgttcaagactggatcttcacagtcactgctgggatgttcttatatttatccttggttgaaatgcttcctgaaatgactcatgttcaaacacaacgaccctggatgatgtttctcctgcaaaactttggattgatcctaggttggctttctctcctgctcttggctatatatgagcaaaatattaaaatataagtgaggatcttcaacatctttcaaaaatgcatttatatagtcttactttgtttctttcattgcactctataatgatttttaaattaagaattttttatcttaggcaaagtgtgtctctttcaattcattaacttattaattttataatgcagttttatttttggaaacatataaatatcagactgtccttaattgaaattttgtctttggtttccaacaccatgatgaagctcttgctttttaaaaagtagttagtaaattctgcatgaattttagtaaactttaaaaaatagattttttccctaagaaagaatgtttgtagaatttaaagtggacagatgcctgttggagtaaaatcaactgcaactttttgatgttaatttttttccctgtgcaattataaactataagcaagttaagtgacaagcaaatgtaataaagactagttttaata

SEQ ID NO: 19565 - DNA, 2725 bp, Homo sapiens
  source 1..2725: mol_type = unassigned DNA
gtgcacagtcaaagaattttaaaaacagggaactttgtaactgtgaaatactctccaggatttaaaaggctgtggagctccagataaagaatcgtttatctttcttctgaagaaattcctttggttacaagtttaccccataaacggcaacacactcacctccatccaagacagactcaaggtggaggaagcgtggaaatgtgcttccggacaaagctctcagtatcctgggtgccattgtttcttctactcagccgtgttttttctactgagacagacaaaccctcagcccaggatagcagaagccgtgggagttcaggccaaccggcagacctgctacaggttctctctgctggtgaccacccaccccacaaccactcaagaagcctcatcaaaacattgttggagaaaactgggtgcccacggaggagaaacggaatgcaaggagattgcaatctgtgctttgaaccagatgcactattactaatagctggaggaaattttgaagatcagcttagagaagaagtggtccagagagtttctcttctccttctctattacattattcatcaggaagagatctgttcttcaaagctcaacatgagtaataaagagtataaattttacctacacagcctactgagcctcaggcaggatgaagattcctctttcctttcacagaatgagacagaagatatcttggctttcaccaggcagtactttgacacttctcaaagccagtgtatggaaaccaaaacgctgcagaaaaaatctggaatagtgagcagtgaaggtgctaatgaaagtacgcttcctcagttggcagccatgatcattactttgtccctccagggtgtttgtctgggacaaggaaacttgccttccccagactactttacagaatatattttcagttccttgaatcgtacgaataccctccgcctatcagaactagaccaactcctcaacactctctggaccagaagtacttgtatcaaaaatgagaaaatccatcaatttcaaaggaaacaaaacaacataataacccatgatcaggactattctaatttctcttcatccatggaaaaagagtctgaggatggtccagtttcctgggatcagacctgcttctctgctaggcagctggtggagatatttctacagaagggcctctcactcatttctaaggaggactttaagcaaatgagtccagggatcatccagcagctcctcagctgctcctgccacttacccaaggaccaacaagcaaagctgccacctaccactctggagaaatacggctacagcacggtggctgtcacccttctcacactgggctccatgctggggacagcgctggtccttttccatagctgtgaggagaactacaggcttatcttacagctgtttgtgggcttggccgtcgggacactgtctggggacgctctgctccaccttatccctcaggttcttggtttacataagcaggaagccccagaatttgggcatttccatgaaagcaaaggtcatatttggaaactgatgggattaattggaggcatccatggatttttcttgatagaaaaatgttttattcttcttgtatcaccaaatgacaagggcctgtcattggttaatgggcacgtgggtcattcccaccatcttgcactcaactctgaattaagtgaccaggcaggcagaggcaaatctgcttcaactatccagttgaaaagcccagaagattcacaggcagctgaaatgcctataggcagtatgacagcctccaacagaaaatgtaaagccattagcttgttagcaatcatgattctggttggggacagcctgcataattttgcagatggcctagccataggagcagccttctcatcatcatccgagtcaggagtgaccactacgattgctatcttgtgtcatgaaatcccacatgaaatgggagactttgccgtgctcttaagctctggactttctatgaagactgccatcctgatgaattttataagctccctaactgccttcatgggattatacattggcctttccgtgtcagctgatccatgtgttcaagactggatcttcacagtcactgctgggatgttcttatatttatccttggttgaaatgcttcctgaaatgactcatgttcaaacacaacgaccctggatgatgtttctcctgcaaaactttggattgatcctaggttggctttctctcctgctcttggctatatatgagcaaaatattaaaatataagtgaggatcttcaacatctttcaaaaatgcatttatatagtcttactttgtttctttcattgcactctataatgatttttaaattaagaattttttatcttaggcaaagtgtgtctctttcaattcattaacttattaattttataatgcagttttatttttggaaacatataaatatcagactgtccttaattgaaattttgtctttggtttccaacaccatgatgaagctcttgctttttaaaaagtagttagtaaattctgcatgaattttagtaaactttaaaaaatagattttttccctaagaaagaatgtttgtagaatttaaagtggacagatgcctgttggagtaaaatcaactgcaactttttgatgttaatttttttccctgtgcaattataaactataagcaagttaagtgacaagcaaatgtaataaagactagttttaata

SEQ ID NO: 19566 - DNA, 2461 bp, Homo sapiens
  source 1..2461: mol_type = unassigned DNA
ttgttaccttcagagcagctctctccatagcaactgaaaacttttctgggctgaaataatcctctctagctcccagtgcacagtcaaagaattttaaaaacagggaactttgtaactgtgaaatactctccaggatttaaaaggctgtggagctccagataaagaatcgtttatctttcttctgaagtgctttgaaccagatgcactattactaatagctggaggaaattttgaagatcagcttagagaagaagtggtccagagagtttctcttctccttctctattacattattcatcaggaagagatctgttcttcaaagctcaacatgagtaataaagagtataaattttacctacacagcctactgagcctcaggcaggatgaagattcctctttcctttcacagaatgagacagaagatatcttggctttcaccaggcagtactttgacacttctcaaagccagtgtatggaaaccaaaacgctgcagaaaaaatctggaatagtgagcagtgaaggtgctaatgaaagtacgcttcctcagttggcagccatgatcattactttgtccctccagggtgtttgtctgggacaaggaaacttgccttccccagactactttacagaatatattttcagttccttgaatcgtacgaataccctccgcctatcagaactagaccaactcctcaacactctctggaccagaagtacttgtatcaaaaatgagaaaatccatcaatttcaaaggaaacaaaacaacataataacccatgatcaggactattctaatttctcttcatccatggaaaaagagtctgaggatggtccagtttcctgggatcagacctgcttctctgctaggcagctggtggagatatttctacagaagggcctctcactcatttctaaggaggactttaagcaaatgagtccagggatcatccagcagctcctcagctgctcctgccacttacccaaggaccaacaagcaaagctgccacctaccactctggagaaatacggctacagcacggtggctgtcacccttctcacactgggctccatgctggggacagcgctggtccttttccatagctgtgaggagaactacaggcttatcttacagctgtttgtgggcttggccgtcgggacactgtctggggacgctctgctccaccttatccctcaggttcttggtttacataagcaggaagccccagaatttgggcatttccatgaaagcaaaggtcatatttggaaactgatgggattaattggaggcatccatggatttttcttgatagaaaaatgttttattcttcttgtatcaccaaatgacaagcagggcctgtcattggttaatgggcacgtgggtcattcccaccatcttgcactcaactctgaattaagtgaccaggcaggcagaggcaaatctgcttcaactatccagttgaaaagcccagaagattcacaggcagctgaaatgcctataggcagtatgacagcctccaacagaaaatgtaaagccattagcttgttagcaatcatgattctggttggggacagcctgcataattttgcagatggcctagccataggagcagccttctcatcatcatccgagtcaggagtgaccactacgattgctatcttgtgtcatgaaatcccacatgaaatgggagactttgccgtgctcttaagctctggactttctatgaagactgccatcctgatgaattttataagctccctaactgccttcatgggattatacattggcctttccgtgtcagctgatccatgtgttcaagactggatcttcacagtcactgctgggatgttcttatatttatccttggttgaaatgcttcctgaaatgactcatgttcaaacacaacgaccctggatgatgtttctcctgcaaaactttggattgatcctaggttggctttctctcctgctcttggctatatatgagcaaaatattaaaatataagtgaggatcttcaacatctttcaaaaatgcatttatatagtcttactttgtttctttcattgcactctataatgatttttaaattaagaattttttatcttaggcaaagtgtgtctctttcaattcattaacttattaattttataatgcagttttatttttggaaacatataaatatcagactgtccttaattgaaattttgtctttggtttccaacaccatgatgaagctcttgctttttaaaaagtagttagtaaattctgcatgaattttagtaaactttaaaaaatagattttttccctaagaaagaatgtttgtagaatttaaagtggacagatgcctgttggagtaaaatcaactgcaactttttgatgttaatttttttccctgtgcaattataaactataagcaagttaagtgacaagcaaatgtaataaagactagttttaatatggtg

SEQ ID NO: 19567 - DNA, 2808 bp, Homo sapiens
  source 1..2808: mol_type = unassigned DNA
ttgttaccttcagagcagctctctccatagcaactgaaaacttttctgggctgaaataatcctctctagctcccagtgcacagtcaaagaattttaaaaacagggaactttgtaactgtgaaatactctccaggatttaaaaggctgtggagctccagataaagaatcgtttatctttcttctgaagaaattcctttggttacaagtttaccccataaacggcaacacactcacctccatccaagacagactcaaggtggaggaagcgtggaaatgtgcttccggacaaagctctcagtatcctgggtgccattgtttcttctactcagccgtgttttttctactgagacagacaaaccctcagcccaggatagcagaagccgtgggagttcaggccaaccggcagacctgctacaggttctctctgctggtgaccacccaccccacaaccactcaagaagcctcatcaaaacattgttggagaaaactgggtgcccacggaggagaaacggaatgcaaggagattgcaatctgtgctttgaaccagatgcactattactaatagctggaggaaattttgaagatcagcttagagaagaagtggtccagagagtttctcttctccttctctattacattattcatcaggaagagatctgttcttcaaagctcaacatgagtaataaagagtataaattttacctacacagcctactgagcctcaggcaggatgaagattcctctttcctttcacagaatgagacagaagatatcttggctttcaccaggcagtactttgacacttctcaaagccagtgtatggaaaccaaaacgctgcagaaaaaatctggaatagtgagcagtgaaggtgctaatgaaagtacgcttcctcagttggcagccatgatcattactttgtccctccagggtgtttgtctgggacaaggaaacttgccttccccagactactttacagaatatattttcagttccttgaatcgtacgaataccctccgcctatcagaactagaccaactcctcaacactctctggaccagaagtacttgtatcaaaaatgagaaaatccatcaatttcaaaggaaacaaaacaacataataacccatgatcaggactattctaatttctcttcatccatggaaaaagagtctgaggatggtccagtttcctgggatcagacctgcttctctgctaggcagctggtggagatatttctacagaagggcctctcactcatttctaaggaggactttaagcaaatgagtccagggatcatccagcagctcctcagctgctcctgccacttacccaaggaccaacaagcaaagctgccacctaccactctggagaaatacggctacagcacggtggctgtcacccttctcacactgggctccatgctggggacagcgctggtccttttccatagctgtgaggagaactacaggcttatcttacagctgtttgtgggcttggccgtcgggacactgtctggggacgctctgctccaccttatccctcaggttcttggtttacataagcaggaagccccagaatttgggcatttccatgaaagcaaaggtcatatttggaaactgatgggattaattggaggcatccatggatttttcttgatagaaaaatgttttattcttcttgtatcaccaaatgacaagcagggcctgtcattggttaatgggcacgtgggtcattcccaccatcttgcactcaactctgaattaagtgaccaggcaggcagaggcaaatctgcttcaactatccagttgaaaagcccagaagattcacaggcagctgaaatgcctataggcagtatgacagcctccaacagaaaatgtaaagccattagcttgttagcaatcatgattctggttggggacagcctgcataattttgcagatggcctagccataggagcagccttctcatcatcatccgagtcaggagtgaccactacgattgctatcttgtgtcatgaaatcccacatgaaatgggagactttgccgtgctcttaagctctggactttctatgaagactgccatcctgatgaattttataagctccctaactgccttcatgggattatacattggcctttccgtgtcagctgatccatgtgttcaagactggatcttcacagtcactgctgggatgttcttatatttatccttggttgaaatgcttcctgaaatgactcatgttcaaacacaacgaccctggatgatgtttctcctgcaaaactttggattgatcctaggttggctttctctcctgctcttggctatatatgagcaaaatattaaaatataagtgaggatcttcaacatctttcaaaaatgcatttatatagtcttactttgtttctttcattgcactctataatgatttttaaattaagaattttttatcttaggcaaagtgtgtctctttcaattcattaacttattaattttataatgcagttttatttttggaaacatataaatatcagactgtccttaattgaaattttgtctttggtttccaacaccatgatgaagctcttgctttttaaaaagtagttagtaaattctgcatgaattttagtaaactttaaaaaatagattttttccctaagaaagaatgtttgtagaatttaaagtggacagatgcctgttggagtaaaatcaactgcaactttttgatgttaatttttttccctgtgcaattataaactataagcaagttaagtgacaagcaaatgtaataaagactagttttaatatggtg

SEQ ID NO: 19568 - DNA, 4997 bp, Homo sapiens
  source 1..4997: mol_type = unassigned DNA
ccaccggcagccaaccagttgggcccgagtccgcgggcaagaagcgattgggggcgcgtgagctcggctccccggtcccccgtccgggtgcccccccgccgggcccgaagcgatatatcctgccctccccggccacctcccccgcgtggaagcggagcggcggcctcgctgtaacgcagaagcgaaatgtagcgagccgggtgtcgcggctggacgctcgccttggctgggggtgtgggggggcacgccgggggccaaggaggactgtcgaggaggagtgatgagaagagggggtgccctgcaccccccgagaccacgggccacgctgccacttgccaggcgccccccttcctcccaggcgaggggcaggtgttccacactgattctcgtgactttaaggaccagggatttgaagaggtattagctcttcccaggaagggaggaagtttctggaagagaagggaaagacggcagacgctgcgctgggaccagcagagcctgaggagctgtgggaagctgacagagcccagccaaaggagcgggaaggagccgcagccccaggctggcactgtgttctgaaagatttgaactcaagctgctttttacggaagaggggccacttcagagggcaccccagaatttggttgagctcttctactctggatgccccctgctctgaggagcctgccactgagaaccaaagaagataagaggacagatactttttcttcaagcacagagctggtgggttggagtcaggcatctgcacccctagtggctgtctggtgaggaatttcttgtttcttcccagcttgcggcttcagtgcttgatggggctgcctgttggtggatcagtttttgcagtgcctggtaggagtggagagccgtgggaagaggtcctgcggcgcccaagcctgggttcaccccaagactaagttctttcccaagttagagaagaagagagaaagcaaaaagaagagaggaaagttctcccttcccctcctccgtgcctgtcatgtcctctaagccagagccgaaggacgtccaccaactgaacgggactggcccttctgcctctccctgctcttcagatggcccagggagagagcccttggctgggacctcagagttcctggggcctgatggggctggggtagaggtggtgattgagtctcgggccaacgccaagggggttcgggaggaggacgccctgctggagaacgggagccagagcaacgaaagtgacgacgtcagcacagaccgtggccctgcgccaccttccccgctcaaggagacctccttttccatcgggctgcaagtactgtttccattcctcctggcaggctttgggaccgtggctgctggcatggtgttggacatcgtgcagcactgggaagtcttccagaaggtgacagaggtcttcatcctagtgcctgcgctgctggggctcaaagggaacctggaaatgaccctggcatcaaggctttccactgcagccaacattggacacatggacacacccaaggagctctggcggatgatcactgggaacatggccctcatccaggtgcaggccacggtggtgggcttcctggcgtccatcgcagccgtcgtctttggctggatccctgatggccacttcagtattccgcacgccttcctgctctgtgctagcagcgtggccacagccttcattgcctccctggtactgggtatgatcatgattggagtcatcattggctctcgcaagattgggatcaacccagacaacgtggccacacccattgctgccagcctgggcgacctcatcaccttggcgctgctctcaggcatcagctggggactctacctggaactgaatcactggcgatacatctacccactggtgtgtgctttctttgtggccctgctgcctgtctgggtggtgctggcccgacgaagtccagccacaagggaggtgttgtactcgggctgggagcctgttatcattgccatggccatcagcagtgtgggaggcctcatcttggacaagactgtctcagaccccaactttgctgggatggctgtcttcacgcctgtgattaatggtgttgggggcaatctggtggcagtgcaggccagccgcatctccaccttcctgcacatgaatggaatgcccggagagaactctgagcaagctcctcgccgctgtcccagtccttgtaccaccttcttcagccctgatgtgaattctcgctcagcccgggtcctcttcctcctcgtggtcccaggacacctggtgttcctctacaccatcagctgtatgcagggcgggcacaccaccctcacactcatcttcatcatcttctatatgacagctgcactgctccaggtgctgattctcctgtacatcgcagactggatggtgcactggatgtggggccggggcctggacccggacaacttctccatcccatacttgactgctctgggggacctgcttggcactgggctcctagcactcagcttccatgttctctggctcataggggaccgagacacggatgtcggggactagcttggtcactcaacattttccccatccctctgcactttctatttgaaatttttcttttgttcccctgtccctcctccaccccacactcccacctctttctaggacttcactttgataccaaattctcattattttcaatgggaatttttatacattgagccaagtttgtatagcaagaatttgggaaacacagatggcctgagataagcagtacaagtaggtttttgagacaatcaccaagtgcagtttcatggtgggtgcctccaggtgatgtggactggagcaggggagttttgtctggaatctggggacatggggtttggctttagcaacctgtcttggccctaatgagaaaccctttgtaagtgggctctggatttttggttttgttttctttttatctgttttgttttatttttggttttggttgaacagagggacagaagaataagtaacactcccaaacacagacatacttttgtagaagtggaccaacttcaaagctctggacaggagacacctgctccaggcccctgtgatcccagttctgttctcttgccctctggacctaagcgttcccactcgcagaaagagtaaggtggactgacttttcaatttgtgcacatgcctcttgttcaatggcctggtcaacatcaacaacccctccctctgatcatttccagttgattgtcatatccaggaaaaaatggaacagtgcactcttctccctgttgacccatgtccacctattggttccccaaaatccacattctccctgggcccaaatgactttgtctccctgggcccagattctttgtctctcttcaaccttcatctcaaattgtctctaagcactaccttccccagagcttgccaggttgggttttgagattagggtcaggtcatgggtatgtggagaatggtttggaggttgaggacaaccacaggtgtctcattgctgccatttctcctgaggacataatcacttggtcaccttggaccctgtcacttcctaaaattactcgttctgtcatgccatagaggtcagttttcctctttcttggcttctacccacaaacattcaccaatcatttattcgttcatttagcaaatatgcagcctccgcaagatgagctctcctgcagacaagcatggtctgaaacattctttgagcaatatttattgagtgcctactatgtgttaggtactgtgccaggcactgataagccagtggtaagggaaacacagctctaacctcacctcattctccaggttacaaaggccatgtgcccctttgaatctggcagagaaagtttcctcgttgtaagtatttgcatctacttcaagccagattcttctgcctctttctcctttccagacccctactctgtgcagtgctgaccacagctagagccaccgccccattgctcaaccagtatttatttccctaaacgacccttcctcacattcccttccctccacctctccttaccaagcacccaaaagaggatttagaactagcagggtggacatcatctggttgtttctacttttctctgcctagcacaaaattgggagaaaactggagcctccatccgcagtcacacgtgtacagatctggggatttggatgtaggctttttctaacttctctctcagaagcttctacagaaacccttccatctgtagcctcaagggcccacctccaagggaaggcttaggcaatgatcctgtttctaccaacactgcaccttatcccaggaacctgccctagacctccagagaccatattttctctccctccatttctacccagacctccaggcctccttctggaatcatagaaccgtagaattggaaggaattttagaggttttctagttggagttgtgtccaacagaattcattaacaccagcctgggcttgtttttcctcctccctctggacttttttcatcttttcctccacctcaaaaaatacttacacacagattcttcttgtacaggcatcaaaaccaactcctctgcccctaaggctgtgtccctgtggtctccagccacccctaccccagtcactcgccccttcctcatctctggaatttggccaggcagtcccagaagactctggagtgacctcctttgcctaaaaagcagacagataggcatgccccaggccctgagtgagcagaggaggactgtagggtgagagggaaagaaaatgaaggtgactttcatggaagtttcatttcttttccccgattgtaccaactgcatgtacttttggcctggctgcaaggagcaatattggtttactctcgtatccttaaaaagttacagaactgtgtcttaagagaattatttatagttactataactgaattgacaaatgtcaacttaactgataaattatatttggtaaaataaagaggacgtttatttaga

SEQ ID NO: 19569 - DNA, 3777 bp, Homo sapiens
  source 1..3777: mol_type = unassigned DNA
ctcttcacagctgagacaacagagaaactggactgaaggcaaaggggccagggattgcaatttgaggggggattgcaaaggatttctggggtgtcaggcagcccagggcagctcagctgtgtgggtccccattacccttccccacccacctccaggaaaacagaaaagcactgggaagtcttccagaaggtgacagaggtcttcatcctagtgcctgcgctgctggggctcaaagggaacctggaaatgaccctggcatcaaggctttccactgcagccaacattggacacatggacacacccaaggagctctggcggatgatcactgggaacatggccctcatccaggtgcaggccacggtggtgggcttcctggcgtccatcgcagccgtcgtctttggctggatccctgatggccacttcagtattccgcacgccttcctgctctgtgctagcagcgtggccacagccttcattgcctccctggtactgggtatgatcatgattggagtcatcattggctctcgcaagattgggatcaacccagacaacgtggccacacccattgctgccagcctgggcgacctcatcaccttggcgctgctctcaggcatcagctggggactctacctggaactgaatcactggcgatacatctacccactggtgtgtgctttctttgtggccctgctgcctgtctgggtggtgctggcccgacgaagtccagccacaagggaggtgttgtactcgggctgggagcctgttatcattgccatggccatcagcagtgtgggaggcctcatcttggacaagactgtctcagaccccaactttgctgggatggctgtcttcacgcctgtgattaatggtgttgggggcaatctggtggcagtgcaggccagccgcatctccaccttcctgcacatgaatggaatgcccggagagaactctgagcaagctcctcgccgctgtcccagtccttgtaccaccttcttcagccctgatgtgaattctcgctcagcccgggtcctcttcctcctcgtggtcccaggacacctggtgttcctctacaccatcagctgtatgcagggcgggcacaccaccctcacactcatcttcatcatcttctatatgacagctgcactgctccaggtgctgattctcctgtacatcgcagactggatggtgcactggatgtggggccggggcctggacccggacaacttctccatcccatacttgactgctctgggggacctgcttggcactgggctcctagcactcagcttccatgttctctggctcataggggaccgagacacggatgtcggggactagcttggtcactcaacattttccccatccctctgcactttctatttgaaatttttcttttgttcccctgtccctcctccaccccacactcccacctctttctaggacttcactttgataccaaattctcattattttcaatgggaatttttatacattgagccaagtttgtatagcaagaatttgggaaacacagatggcctgagataagcagtacaagtaggtttttgagacaatcaccaagtgcagtttcatggtgggtgcctccaggtgatgtggactggagcaggggagttttgtctggaatctggggacatggggtttggctttagcaacctgtcttggccctaatgagaaaccctttgtaagtgggctctggatttttggttttgttttctttttatctgttttgttttatttttggttttggttgaacagagggacagaagaataagtaacactcccaaacacagacatacttttgtagaagtggaccaacttcaaagctctggacaggagacacctgctccaggcccctgtgatcccagttctgttctcttgccctctggacctaagcgttcccactcgcagaaagagtaaggtggactgacttttcaatttgtgcacatgcctcttgttcaatggcctggtcaacatcaacaacccctccctctgatcatttccagttgattgtcatatccaggaaaaaatggaacagtgcactcttctccctgttgacccatgtccacctattggttccccaaaatccacattctccctgggcccaaatgactttgtctccctgggcccagattctttgtctctcttcaaccttcatctcaaattgtctctaagcactaccttccccagagcttgccaggttgggttttgagattagggtcaggtcatgggtatgtggagaatggtttggaggttgaggacaaccacaggtgtctcattgctgccatttctcctgaggacataatcacttggtcaccttggaccctgtcacttcctaaaattactcgttctgtcatgccatagaggtcagttttcctctttcttggcttctacccacaaacattcaccaatcatttattcgttcatttagcaaatatgcagcctccgcaagatgagctctcctgcagacaagcatggtctgaaacattctttgagcaatatttattgagtgcctactatgtgttaggtactgtgccaggcactgataagccagtggtaagggaaacacagctctaacctcacctcattctccaggttacaaaggccatgtgcccctttgaatctggcagagaaagtttcctcgttgtaagtatttgcatctacttcaagccagattcttctgcctctttctcctttccagacccctactctgtgcagtgctgaccacagctagagccaccgccccattgctcaaccagtatttatttccctaaacgacccttcctcacattcccttccctccacctctccttaccaagcacccaaaagaggatttagaactagcagggtggacatcatctggttgtttctacttttctctgcctagcacaaaattgggagaaaactggagcctccatccgcagtcacacgtgtacagatctggggatttggatgtaggctttttctaacttctctctcagaagcttctacagaaacccttccatctgtagcctcaagggcccacctccaagggaaggcttaggcaatgatcctgtttctaccaacactgcaccttatcccaggaacctgccctagacctccagagaccatattttctctccctccatttctacccagacctccaggcctccttctggaatcatagaaccgtagaattggaaggaattttagaggttttctagttggagttgtgtccaacagaattcattaacaccagcctgggcttgtttttcctcctccctctggacttttttcatcttttcctccacctcaaaaaatacttacacacagattcttcttgtacaggcatcaaaaccaactcctctgcccctaaggctgtgtccctgtggtctccagccacccctaccccagtcactcgccccttcctcatctctggaatttggccaggcagtcccagaagactctggagtgacctcctttgcctaaaaagcagacagataggcatgccccaggccctgagtgagcagaggaggactgtagggtgagagggaaagaaaatgaaggtgactttcatggaagtttcatttcttttccccgattgtaccaactgcatgtacttttggcctggctgcaaggagcaatattggtttactctcgtatccttaaaaagttacagaactgtgtcttaagagaattatttatagttactataactgaattgacaaatgtcaacttaactgataaattatatttggtaaaataaagaggacgtttatttag

SEQ ID NO: 19570 - DNA, 2221 bp, Homo sapiens
  source 1..2221: mol_type = unassigned DNA
aacgaaaagaagtttatttagctcacagttctggaagctgggaagttcaagattgagcagctgcttctagtgagggcctcatgctgcatccaaacatccaaatggagaaacagaaggaaaactgggcatgtgcaaaatgggcaaaacaagagaggcaaacctcgctttatgacaacccactctcatgggaactatacctttcccaagaaagacattaatccatcttaataacctattcactcttaaaggcaccacctcccaccaccacatttggggaccaagccacaacatgagttttgttggggacaaactatattcaaaccatagtaacgagggaatagcattataggagtccagtgaaagctctgtctttgcccccaacatggggaagccaatgctgaaaagcagggagggattgggaaagaaatacctgatctctctctccacctgccctctggttgcctgctgttgcctcccactgaacaaacagtggaagcagccagcaagggagactgggtaatgcagtctgtggagaccagtcccccagagctcagagcaaggctgagaagagcagggagcaggttgggatgtgagggcaacagagaaatcagcacaggtcctggcggagataccagattccagagtttggagctcaaacctgatccttgaaactggttaccagaatcagcatatgaccataggatgcctgggtctgctcagagcattggagaggaggtgaggcggtgaggcaaggcagggcttcatcccctcagctgtgtaggaaggcaggtgcccatgctctactggtggagaagtcaggctctctgagtctgcagatctgcacgtatcctttccggcactgtcacagctttgccaggggaacatggaactgctgcatctccatagaggggaggatgggggaggctggaagatgcactggaagcaggggtctttgtcttccttcttagtgccttactcttcttttggggactggtgaatgggtgatgcccacatagaccctaaattaagacagaggacagtgcctctatagatagaagacaaagagtgagaagatcattttgttcccactcctccctctgacctctgtctgtgtctaagcccgtatgtgtctctgcaggtgttgggggcaatctggtggcagtgcaggccagccgcatctccaccttcctgcacatgaatggaatgcccggagagaactctgagcaagctcctcgccgctgtcccagtccttgtaccaccttcttcagccctgatgtgaattctcgctcagcccgggtcctcttcctcctcgtggtcccaggacacctggtgttcctctacaccatcagctgtatgcagggcgggcacaccaccctcacactcatcttcatcatcttctatatgacagctgcactgctccaggtgctgattctcctgtacatcgcagactggatggtgcactggatgtggggccggggcctggacccggacaacttctccatcccatacttgactgctctgggggacctgcttggcactgggctcctagcactcagcttccatgttctctggctcataggggaccgagacacggatgtcggggactagcttggtcactcaacattttccccatccctctgcactttctatttgaaatttttcttttgttcccctgtccctcctccaccccacactcccacctctttctaggacttcactttgataccaaattctcattattttcaatgggaatttttatacattgagccaagtttgtatagcaagaatttgggaaacacagatggcctgagataagcagtacaagtaggtttttgagacaatcaccaagtgcagtttcatggtgggtgcctccaggtgatgtggactggagcaggggagttttgtctggaatctggggacatggggtttggctttagcaacctgtcttggccctaatgagaaaccctttgtaagtgggctctggatttttggttttgttttctttttatctgttttgttttatttttggttttggttgaacagagggacagaagaataagtaacactcccaaacacagacatacttttgtagaagtggaccaacttcaaagctctggacaggagacacctgctccaggcccctgtgatcccagttctgttctcttgccctctggacctaagcgttcccactcgcagaaagagtaaggtggactgacttttc

SEQ ID NO: 19571 - DNA, 843 bp, Homo sapiens
  source 1..843: mol_type = unassigned DNA
gaacgcggaatctggagggagcctaaagtgacgagccggcgggagaagagcaaggtgttccacactgattctcgtgactttaaggaccagggatttgaagaggtattagctcttcccaggaagggaggaagtttctggaagagaagggaaagacggcagacgctgcgctgggaccagcagagcctgaggagctgtgggaagctgacagagcccagccaaaggagcgggaaggagccgcagccccaggctggcactgtgttctgaaagatttgaactcaagctgctttttacggaagaggggccacttcagagggcaccccagaatttggttgagctcttctactctggatgccccctgctctgaggagcctgccactgagaaccaaagaagataagaggacagatactttttcttcaagcacagagctggtgggttggagtcaggcatctgcacccctagtggctgtctggtgaggaatttcttgtttcttcccagcttgcggcttcagtgcttgatggggctgcctgttggtggatcagtttttgcagtgcctggtaggagtggagagccgtgggaagaggtcctgcggcgcccaagcctgggttcaccccaagactaagttctttcccaagttagagaagaagagagaaagcaaaaagaagagaggaaagttctcccttcccctcctccgtgcctgtcatgtcctctaagccagagccgaaggacgtccaccaactgaacgggactggcccttctgcctctccctgctcttcagatggcccagggagagagcccttggctgggacctcagagttcctggggcctgatggggctggggtaga

SEQ ID NO: 19572 - DNA, 7430 bp, Homo sapiens
  source 1..7430: mol_type = unassigned DNA
agaaaaggcgccgggcgggcccgacacacgccggaggagccgggtggtgcagagccggagccggagccggagccgcgccgcgccgcaccatggcgcccaccctggccactgcccatcggcgccgctggtggatggcctgcacggccgtgctggagaacctcctcttctcggcagtcctcctgggctggggctcgctgctcatcatgctcaagtcagagggcttttactcctacctgtgtaccgagccagagaatgtcaccaatggcacagtgggcggcacagcagagccggggcacgaggaggtgagctggatgaacggctggctcagctgccaggcccaggacgagatgctaaatttggccttcactgtgggctcctttctgctcagtgccatcaccctgcccctgggtatcgtcatggacaagtatggcccgaggaagctcaggctgctgggcagcgcctgcttcgcggtttcctgcttgctgattgcgtacggagcaagtaaaccaaacgctctctccgtgctcatcttcatcgccctggctctgaatggctttggtgggatgtgtatgaccttcacctcattaacactgcccaacatgttcggcgaccttcggtccacgtttattgccttgatgattgggtcctacgcctcctcggcagtcacctttccaggaatcaagctcatctatgatgctggtgtctccttcatcgtcgtcctcgtggtctgggccggctgctccgggctggttttcctcaactgcttctttaactggccccttgagcccttcccggggccggaggacatggactactcggtgaagatcaagttcagctggctgggctttgaccacaagatcacagggaagcagttctacaagcaggtgaccacggtgggccggcgcctgagtgtgggcagctccatgaggagtgccaaggagcaggtggcgctgcaggagggccacaagctgtgcctgtccaccgtcgacctggaggtgaagtgccagccggatgccgcagtggccccctccttcatgcacagcgtgttcagccccatcctgctgctcagcctggtcaccatgtgcgtcacgcagctgcggctcatcttctacatgggggctatgaacaacatcctcaagttcctggtcagcggcgaccagaagacagttggcctctacacctccatcttcggcgtgctccagctgctgtgcctgctgacggcccccgtcattggctacatcatggactggaggctgaaggagtgtgaagacgcctccgaggagcccgaggagaaagacgccaaccaaggcgagaagaaaaagaagaagcgggaccggcagatccagaagatcactaatgccatgcgggccttcgccttcaccaacctgctgctcgtgggctttggggtgacctgcctcattcccaacctgcctctccagatcctctccttcatcctgcacacaatcgtgcgaggattcatccactccgctgtcgggggcctgtacgctgccgtgtacccctccacccagttcggcagcctcacgggactgcagtctctgatcagcgcgctcttcgcccttctgcagcagccgctgtttctggccatgatgggtcctctccagggagaccctctgtgggtgaacgtggggctgctccttctcagcctgctgggcttctgcctcccgctctacctgatctgctaccggcgccagctggagcggcagctgcagcagaggcaggaggatgacaaactcttcctcaaaatcaacggctcgtccaaccaggaggccttcgtgtagtggctgccgcctcggaactgcggtctcctgcctgtgcttcagtgactgacccctgtcctgcccctccagagtaccccacgcacccccaggaccttcgccgtctccgtgccagcgttcacgctccctcccggggccctgcctcggagctctgtggtggaaggacgggagagggccccggacacgcgcgttttctcctgccgaacgcaggggctgccctgactttgctctgccgccccccggggacccggggcctggggtctctgtggtgcctgcagcaggagccaggaacgcccggcaggcaggcgctctcccgccagtgtctggattctgcctcttgccaaagcagagggggctgccatcccctgcctgccacctgcccctcggctgcatgcccacagccgtacctgcctgaggacaaaggcttgcactgtctcgcccgcgcctggcccccaccccctccccggccagcctgaggctgcctgaggaaggaaggacccgcttcctgttgtcggtgctaattcctttgtaattccagccccctgtcgcctgtccagggcctgcccacccgttggaggccggtggagaagccccacctggcttatgccctggagagggtttagcgggctgggtggacccctcgcctcctccccgagggccaatgccgcggacacgttttcactgtcaccctcgttctgtctgccacctgaagggaatttgaggaccgccgccagggcaccccgtacatacacacagctgcttttgtggaggtggacgaaaggctgtggccggcagacgtggaggtccaggccggggtggggacgtgggtgggtccgaggtgtgtgtggggtcggggtgggctctaggagttagcccttatccccactgaccaggcgggagccgccaggcctgcagctgggccagtgcccaggagccatcctggcgtggggccaggagcttgtccaaggccacaggcccacagcaccccctgccggcgggctccgtggggccctggagctgatgacgggggaggcccgtccgcctggcccaccaacccgcccaccttgactgcccccagaagtgtgtcttgagacctcctgggcgtgcttagaggggtgagttgtgtttggatttttagttattttctcttcagttttattagacttcttttttataaagcaataaatccattttcctccgggtaagggatgccccttctggcatatcagttaatagctgcatgtgcctattttgagcttgagaagaaaaggcaggacaagattctctgccaccgaccagctccagccgtgcccagctgctcttcgtctctctgggggactgctgactcgggagggacagtgggccaggaaaagaccttcctccccaacccccaaacaaactgggcttgtgcagacatcttagaagtgtgagccaccctcctctaccgattttcccagccaaacaggcgaatcctggtccctttccatccctacacccttccacaaccctgaagattcccgctgggttcttctgcaggctcagagcagttcaggatgtgggcggcagggagggggatgaaaggagaagaggaaagggcaggtccaggccacattcaagctccacattaacagcttgggcgcctggaacacatatctcctaggctttatttcactcaaatatttaaaaaaagactgggcgtggtggctcacgcctataatcccagcactttgggaggccaaggcaggaggctcacctgaggtcaggagttcgagaccatcctgaccaacatggagaaaccccgtctgtactaaaaataaacattaatcgggcgtggtggcgtgcgcctgtaatcccaactactcgggagcctgaggcaggagaatcgcttgaaccggggagacggagattgccgtgagtcgagatcgcaccattgcactccagcctgggcaacagagcgaggctccgtctcaaaaagaaaaaaaaaaagagaacgagataaacatgcccactcctgagaacactcgttttgtgatgttagtggttattctgattttcaagaaagtattatagtcaagtttgggaaaggctgagttaaaagtcaagcctgtttccttacagccagcactgacagcactttgccaacgctcatgagctccgtggctcctcaggagcgggtgtgctgtgctgccgaggaacggctcgaaccatcagagccaccagcctccacgtgcggctccatgatcacccccagcagaggctcccgggtgctggttccaaatggagactccaggtcttgccgctgaccggtgactctgctgccagcatttgagacccgccatcacacaggagttgcagattcggagaaaccctaactagccagggtgctgccagctgggaaaaggccgcctttttttttttttttttttttttgagttggggtcttgctctgccatccaggctggagtgcagtggtgcaactgatagctcaccacggcctccaactcatgggctcaagggatcctcccacctcggcctcctaagtatctgggactataagtgtgtgccaccatgcctggctaattttttttttctttttcataaagatgaattcttgctattttgcccaggctggtctggaactcctgggctgaagcaattctcccacctcagcctcccaaagtgctgagattacaggcgtgagtcacaatgcctagccaaaaagccagtcttgagatggggaagacgtggcccgtgctgtccccagcagtgcccagtcccagccaaagtgggcagtgctgcctcactctcccacccaccctcagggtgtggcacttactgggaagaagcaggcattgagaaacagaattgagggggggaaacagtccagggccaacagtgcttggggattgaggcctgaaaatgcgagcagggtacagaggctgtggctggccagatgggtcgggtgccccctgcactcccaccccctagtcaggggtcacccatcctactttgccttgtgtggagctgacaggtgacatgttttcctattgttgtccttgacttgataacaatctgggagttaaacacatatgatcatccctgctttacaactgaaaaacgaggcctagagatactatcatcatatacacctgaaaaacgaggcctggagcgatggaggagcttgttcaaggtcagagccagcactcatatatgggtcttaagacactggagcagccaagggcctctagaccaggacattccactcggagcagcagctcaggggccaccaggcctctgtggcagggggacctctgtggcaggggggacctctgtggcggggggggggcctctgtggcaggggggtcacagcccaaggaaggggagcaggcccaggcatggtttccgtttctgggagccaagagccttctcagaagagggggagagagctactgcatggaatcatttgggccctggaggctgatgggtacttgggggagcaatccctggtgaccccaaccagcaagacaagtgccctgtgaaggggaagggactacagctgatcaaaggagcaggcaccagtggccgggcctcccgtctgcccctcatcctccaggctctggcgggaaggagcaggaagggctccctgcccttggggttttgatcagtgaggaggggggcttgggtctgagtctgggtctgggtctgctgccgaaacactgcccccagtccctctcctcactagactctggggtctaggcgtgtctttgtggtcggccttctccaaaccctctaggcctctgtctgcagctgctgctgcctggacctatacacaaggtcccacccctcaccggggccaaagacgtggttgcaggccctggtggatcctttctgttttgctccatccccgtcccctcttgcacccagcatcgtcctggtcagaacttccgtttaaaccttccttgcctgccgtgcactccgaggggggcgtcactttgccataggccccagggctgaaaatggcgggacatccagtattgggctcacgtgcataagactgtcccagacagcagcacaatcacgttcagccaagtggagtttccgacgcacttgtgtggcagccgcgtgaatgtgagccgatatgcagctgggaggggttgtgggcctcctgcggtgaggggctcctgccaggagctctgagaagcctccacagaatcagccgtcgggctccttcagcagcagctccccttatctgtgccaacgactgggggcctaactcaagggtgccagcccgtcttccgccaatacagactgtgggattctgagagttaggagcctggggtcccctggggtggggtggtcagggtgagcaggtgggctctgtgagcctgtttccccatgccctgactcaccccaatccctgggtgaggacagagctcctgaaggccactgaaggaggtgcagcacactccacctgggtggccttccgcagctcagccctcttcctgccagcaggaagcctctgcctgtgctccttaagttagccatcctcaccccctccgggcagctctgagactgagccagggccactagcagcacccagacctcgacccttctcagaccgaggcgccaccaccccaggccgaggaggcaaggagggaagaccaaagtctagaggactgtcttggtggccctgggcgagtcttgaactttggtgccatcatctgcaaaagggaggaaagaatgcctgcgtggtgcagctacgtggatacgcagtgaagacccgcatggtgggacgcctggcacttaacaatggtagcatttggccgggcgcggtggctcacgcctgtaatcccagcactttgggaggccgaggcgggcggatcacgaggtcaggagatcaagaccatcccggctaaaacggtgaaaccccgtctctactaaaaatacaaaaaattagccgggcgtagtggcgggcgcctgtagtcccagctacttgggaggctgaggcaggagaatggtgtgaacccgggaggcggagcttgcagtgagccgagatcccgccactgcactccagcctgggcgacagagcgagactccgtctcaaaaaaaaaaaaaaaaacaatggtagcatcgttttcagtgcccaggaagaaggcagctgggacagggaaagggccaccacaccacacccaagcccatacaacaggagagccactttcagcagctctgagcaggacagacttgtggccaagtcaagaaagtaaggtctggtcccagcgaggtggctcatccctgtaatcccagtgctttgggaggccgaagcgggggcggggtggatcacttgaggtcaggggtttgagaccagcctgaccaacatggtgaaacctcaactctactaaaaatacaaaaattagggccgggcgcagtggctcacgcctgtaatcccagcactttgggaggctgaggcgggcggatcacaaggtcaggagatcgagaccaacgtggctaacacagtgaaaccccatctctactaaaaatacgaaaaaaaaaaattagctgggcgtggtggtgggtacctgtagtcccagctacttgggaggctgaggcaggagaatggcatgaacccgggaggtg

SEQ ID NO: 19573 - DNA, 3261 bp, Homo sapiens
  source 1..3261: mol_type = unassigned DNA
gtcagggtccctgggagaggcagccctcggatctgcccctgcccacctcacgctgcgttccatgctggccccaggcgatgtcagtcctgctgcaggccaggactagttccacggccctgagcatgcgttagccccttcttgcctccatgcctcagtttacctcggagtgagctgcgggagacgtctccctgcctggccggggcggctctgtcgtagcggagggcagcggtacgagccggccgcgggctcggggtgtcccaggtggtgcagagccggagccggagccggagccgcgccgcgccgcaccatggcgcccaccctggccactgcccatcggcgccgctggtggatggcctgcacggccgtgctggagaacctcctcttctcggcagtcctcctgggctggggctcgctgctcatcatgctcaagtcagagggcttttactcctacctgtgtaccgagccagagaatgtcaccaatggcacagtgggcggcacagcagagccggggcacgaggaggtgagctggatgaacggctggctcagctgccaggcccaggacgagatgctaaatttggccttcactgtgggctcctttctgctcagtgccatcaccctgcccctgggtatcgtcatggacaagtatggcccgaggaagctcaggctgctgggcagcgcctgcttcgcggtttcctgcttgctgattgcgtacggagcaagtaaaccaaacgctctctccgtgctcatcttcatcgccctggctctgaatggctttggtgggatgtgtatgaccttcacctcattaacactgcccaacatgttcggcgaccttcggtccacgtttattgccttgatgattgggtcctacgcctcctcggcagtcacctttccaggaatcaagctcatctatgatgctggtgtctccttcatcgtcgtcctcgtggtctgggccggctgctccgggctggttttcctcaactgcttctttaactggccccttgagcccttcccggggccggaggacatggactactcggtgaagatcaagttcagctggctgggctttgaccacaagatcacagggaagcagttctacaagcaggtgaccacggtgggccggcgcctgagtgtgggcagctccatgaggagtgccaaggagcaggtggcgctgcaggagggccacaagctgtgcctgtccaccgtcgacctggaggtgaagtgccagccggatgccgcagtggccccctccttcatgcacagcgtgttcagccccatcctgctgctcagcctggtcaccatgtgcgtcacgcagctgcggctcatcttctacatgggggctatgaacaacatcctcaagttcctggtcagcggcgaccagaagacagtgatggccacggttggcctctacacctccatcttcggcgtgctccagctgctgtgcctgctgacggcccccgtcattggctacatcatggactggaggctgaaggagtgtgaagacgcctccgaggagcccgaggagaaagacgccaaccaaggcgagaagaaaaagaagaagcgggaccggcagatccagaagatcactaatgccatgcgggccttcgccttcaccaacctgctgctcgtgggctttggggtgacctgcctcattcccaacctgcctctccagatcctctccttcatcctgcacacaatcgtgcgaggattcatccactccgctgtcgggggcctgtacgctgccgtgtacccctccacccagttcggcagcctcacgggactgcagtctctgatcagcgcgctcttcgcccttctgcagcagccgctgtttctggccatgatgggtcctctccagggagaccctctgtgggtgaacgtggggctgctccttctcagcctgctgggcttctgcctcccgctctacctgatctgctaccggcgccagctggagcggcagctgcagcagaggcaggaggatgacaaactcttcctcaaaatcaacggctcgtccaaccaggaggccttcgtgtagtggctgccgcctcggaactgcggtctcctgcctgtgcttcagtgactgacccctgtcctgcccctccagagtaccccacgcacccccaggaccttcgccgtctccgtgccagcgttcacgctccctcccggggccctgcctcggagctctgtggtggaaggacgggagagggccccggacacgcgcgttttctcctgccgaacgcaggggctgccctgactttgctctgccgccccccggggacccggggcctggggtctctgtggtgcctgcagcaggagccaggaacgcccggcaggcaggcgctctcccgccagtgtctggattctgcctcttgccaaagcagagggggctgccatcccctgcctgccacctgcccctcggctgcatgcccacagccgtacctgcctgaggacaaaggcttgcactgtctcgcccgcgcctggcccccaccccctccccggccagcctgaggctgcctgaggaaggaaggacccgcttcctgttgtcggtgctaattcctttgtaattccagccccctgtcgcctgtccagggcctgcccacccgttggaggccggtggagaagccccacctggcttatgccctggagagggtttagcgggctgggtggacccctcgcctcctccccgagggccaatgccgcggacacgttttcactgtcaccctcgttctgtctgccacctgaagggaatttgaggaccgccgccagggcaccccgtacatacacacagctgcttttgtggaggtggacgaaaggctgtggccggcagacgtggaggtccaggccggggtggggacgtgggtgggtccgaggtgtgtgtggggtcggggtgggctctaggagttagcccttatccccactgaccaggcgggagccgccaggcctgcagctgggccagtgcccaggagccatcctggcgtggggccaggagcttgtccaaggccacaggcccacagcaccccctgccggcgggctccgtggggccctggagctgatgacgggggaggcccgtccgcctggcccaccaacccgcccaccttgactgcccccagaagtgtgtcttgagacctcctgggcgtgcttagaggggtgagttgtgtttggatttttagttattttctcttcagttttattagacttcttttttataaagcaataaatccattttcctccgggtaagggatgccccttctggcatatcagttaata

SEQ ID NO: 19574 - DNA, 1658 bp, Homo sapiens
  source 1..1658: mol_type = unassigned DNA
acctgtgagtgtggtggtgagtcaggaaacagctccggcttcctgcttggcagcaaagctggtccttcccctcctggggtccttcccctccgccagccctcgaggcccgcgctagggcgctctgctcagcgctcagccctcactccggcaccgcggcttcgaacagccattatgcgcagctgagaccggtggaggcagggaagctggggacggagtgagcgagagggggaatgtggggagtgacccagatgtcaggatgacctacgggagtccacaggcaaatgcaagcccatccgatgctgtggcgctggaccatggggaggtcagccgaaggcaacagcaggagctgcccaacatgttcggcgaccttcggtccacgtttattgccttgatgattgggtcctacgcctcctcggcagtcacctttccaggaatcaagctcatctatgatgctggtgtctccttcatcgtcgtcctcgtggtctgggccggctgctccgggctggttttcctcaactgcttctttaactggccccttgagcccttcccggggccggaggacatggactactcggtgaagatcaagttcagctggctgggctttgaccacaagatcacagggaagcagttctacaagcaggtgaccacggtgggccggcgcctgagtgtgggcagctccatgaggagtgccaaggagcaggtggcgctgcaggagggccacaagctgtgcctgtccaccgtcgacctggaggtgaagtgccagccggatgccgcagtggccccctccttcatgcacagcgtgttcagccccatcctgctgctcagcctggtcaccatgtgcgtcacgcagctgcggctcatcttctacatgggggctatgaacaacatcctcaagttcctggtcagcggcgaccagaagacagttggcctctacacctccatcttcggcgtgctccagctgctgtgcctgctgacggcccccgtcattggctacatcatggactggaggctgaaggagtgtgaagacgcctccgaggagcccgaggagaaagacgccaaccaaggcgagaagaaaaagaagaagcgggaccggcagatccagaagatcactaatgccatgcgggccttcgccttcaccaacctgctgctcgtgggctttggggtgacctgcctcattcccaacctgcctctccagatcctctccttcatcctgcacacaatcgtgcgaggattcatccactccgctgtcgggggcctgtacgctgccgtgtacccctccacccagttcggcagcctcacgggactgcagtctctgatcagcgcgctcttcgcccttctgcagcagccgctgtttctggccatgatgggtcctctccagggagaccctctgtgggtgaacgtggggctgctccttctcagcctgctgggcttctgcctcccgctctacctgatctgctaccggcgccagctggagcggcagctgcagcagaggcaggaggatgacaaactcttcctcaaaatcaacggctcgtccaaccaggaggccttcgtgtagtggctgccgcctcggaactgcggtctcctgcctgtgcttcagtgactgacccctgtcctgcccctccagagtaccccacgcacccccaggaccttcgccgtct

SEQ ID NO: 19575 - DNA, 574 bp, Homo sapiens
  source 1..574: mol_type = unassigned DNA
aaatacaaaaattagccgggcatggtggcgtgggcctgtaatcctagctactccgaaggctgaggcaggagaattgcttgaatccaggaggcgaagcttgcagtgagccaagatcacgccactgcactccagcctgggcgacaaagcaagacttcttctcaaacaaaacaaaaaacaaaacaaacaaacaaacaaaaaatgactgtgttaacgactggcttgcaaaatttctgaaaattcacaattggctccggaggatggggttgatccaactccaggctgacactgcccctggggtgagggcccccaggaattggagggcgggggctgaggggacggtcccttaaggccttatgcccacagtcgccttttcctcccccagatcctctccttcatcctgcacacaatcgtgcgaggattcatccactccgctgtcgggggcctgtacgctgccgtgtacccctccacccagttcggcagcctcacgggactgcagtctctgatcagcgcgctcttcgcccttctgcagcagccgctgtttctggccatgatgggtcctctccagggagaccct

SEQ ID NO: 19576 - DNA, 565 bp, Homo sapiens
  source 1..565: mol_type = unassigned DNA
aagatttgggtgaacttgaagccagtggtgaagtgaggctttgccatgtgccagctcaggcacacgctgctacttctctccccgtcgtcttagctcagccttcacagagcactgcagcatatggatggccatcttcttgtacccgagaccccctccgagagtcacactcagcttgccactgagaagggccggggagtgtccgtagtgctggtccagccccgacacagtccctaaaacgtgcctgggtggcttctgagtcttgcgtcagtttacctgctgcgacgcttgaggcctgacttctcaggagcacccggcttcctccggggagccctcccacccctgcacgttctgtgtctccacagaggcgagaagaaaaagaagaagcgggaccggcagatccagaagatcactaatgccatgcgggccttcgccttcaccaacctgctgctcgtgggctttggggtgacctgcctcattcccaacctgcctctccagatcctctccttcatcctgcacacaatcgtgcgaggattcatccactccgctgtcgggggcctgtacgctg

SEQ ID NO: 19577 - DNA, 2074 bp, Homo sapiens
  source 1..2074: mol_type = unassigned DNA
gcaggccaggactagttccacggccctgagcatgcgttagccccttcttgcctccatgcctcagtttacctcggagtgagctgcgggagacgtctccctgcctggccggggcggctctgtcgtagcggagggcagcggtggtgcagagccggagccggagccggagccgcgccgcgccgcaccatggcgcccaccctggccactgcccatcggcgccgctggtggatggcctgcacggccgtgctggagaacctcctcttctcggcagtcctcctgggctggggctcgctgctcatcatgctcaagtcagagggcttttactcctacctgtgtaccgagccagagaatgtcaccaatggcacagtgggcggcacagcagagccggggcacgaggaggtgagctggatgaacggctggctcagctgccaggcccaggacgagatgctaaatttggccttcactgtgggctcctttctgctcagtgccatcaccctgcccctgggtatcgtcatggacaagtatggcccgaggaagctcaggctgctgggcagcgcctgcttcgcggtttcctgcttgctgattgcgtacggagcaagtaaaccaaacgctctctccgtgctcatcttcatcgccctggctctgaatggctttggtgggatgtgtatgaccttcacctcattaacactgcccaacatgttcggcgaccttcggtccacgtttattgccttgatgattgggtcctacgcctcctcggcagtcacctttccaggaatcaagctcatctatgatgctggtgtctccttcatcgtcgtcctcgtggtctgggccggctgctccgggctggttttcctcaactgcttctttaactggccccttgagcccttcccggggccggaggacatggactactcggtgaagatcaagttcagctggctgggctttgaccacaagatcacagggaagcagttctacaagcaggtgaccacggtgggccggcgcctgagtgtgggcagctccatgaggagtgccaaggagcaggtggcgctgcaggagggccacaagctgtgcctgtccaccgtcgacctggaggtgaagtgccagccggatgccgcagtggccccctccttcatgcacagcgtgttcagccccatcctgctgctcagcctggtcaccatgtgcgtcacgcagctgcggctcatcttctacatgggggctatgaacaacatcctcaagttcctggtcagcggcgaccagaagacagttggcctctacacctccatcttcggcgtgctccagctgctgtgcctgctgacggcccccgtcattggctacatcatggactggaggctgaaggagtgtgaagacgcctccgaggagcccgaggagaaagacgccaaccagtgcgtaggcagggccggtgccccggctcccagcccgcagcccctgcagaaagaccccagagctgcatgtcaggcacagggtgggtgggacagagggagagagcaatgcactccagctgctcccggagcccttagagagactcactcattcagctcagcatgcgtttcaactgctcccctctttatggaaattgtttggaatgcaatggaaatgctaaagtttgaggccaggtgcggtgactcatgcctgtaatcccagcactttgaaaggctggggtaggaagatcacttgaggccaggagttggagaccagcctgggaaacatggccagcccccactccccgtctctacaaaaaatttaaaaattggccagggagggtggttcatgcctataataccaacactttggaaggttgaggtgagtgaattgcttgagcccaggagttagtgaccagcctggccaatgtggtaaaacccggtctctactaaaaatacaaaaaattagccaggtgcggtggcggcgcgcgcctgtaatcccagctactcaggaggctgaggcgcgagaattgcttgaacccgggaggtggaggttgcagtgagccgagatcacgccattgcacttccagcctgggcaacagagcaagactgtctcaaaaagaaaaaacaataaagaa

SEQ ID NO: 19578 - DNA, 2030 bp, Homo sapiens
  source 1..2030: mol_type = unassigned DNA
cagtgttttcttcttggggtcggaataaaagggctggaataaaagagggcagaaaaggcgccgggcgggcccgacacacgccggaggagccgggtggtgcagagccggagccggagccggagccgcgccgcgccgcaccatggcgcccaccctggccactgcccatcggcgccgctggtggatggcctgcacggccgtgctggagaacctcctcttctcggcagtcctcctgggctggggctcgctgctcatcatgctcaagtcagagggcttttactcctacctgtgtaccgagccagagaatgtcaccaatggcacagtgggcggcacagcagagccggggcacgaggaggtgagctggatgaacggctggctcagctgccaggcccaggacgagatgctaaatttggccttcactgtgggctcctttctgctcagtgccatcaccctgcccctgggtatcgtcatggacaagtatggcccgaggaagctcaggctgctgggcagcgcctgcttcgcggtttcctgcttgctgattgcgtacggagcaagtaaaccaaacgctctctccgtgctcatcttcatcgccctggctctgaatggctttggtgggatgtgtatgaccttcacctcattaacactgcccaacatgttcggcgaccttcggtccacgtttattgccttgatgattgggtcctacgcctcctcggcagtcacctttccaggaatcaagctcatctatgatgctggtgtctccttcatcgtcgtcctcgtggtctgggccggctgctccgggctggttttcctcaactgcttctttaactggccccttgagcccttcccggggccggaggacatggactactcggtgaagatcaagttcagctggctgggctttgaccacaagatcacagggaagcagttctacaagcaggtgaccacggtgggccggcgcctgagtgtgggcagctccatgaggagtgccaaggagcaggtggcgctgcaggagggccacaagctgtgcctgtccaccgtcgacctggaggtgaagtgccagccggatgccgcagtggccccctccttcatgcacagcgtgttcagccccatcctgctgctcagcctggtcaccatgtgcgtcacgcagctgcggctcatcttctacatgggggctatgaacaacatcctcaagttcctggtcagcggcgaccagaagacagttggcctctacacctccatcttcggcgtgctccagctgctgtgcctgctgacggcccccgtcattggctacatcatggactggaggctgaaggagtgtgaagacgcctccgaggagcccgaggagaaagacgccaaccagtgcgtaggcagggccggtgccccggctcccagcccgcagcccctgcagaaagaccccagagctgcatgtcaggcacagggtgggtgggacagagggagagagcaatgcactccagctgctcccggagcccttagagagactcactcattcagctcagcatgcgtttcaactgctcccctctttatggaaattgtttggaatgcaatggaaatgctaaagtttgaggccaggtgcggtgactcatgcctgtaatcccagcactttgaaaggctggggtaggaagatcacttgaggccaggagttggagaccagcctgggaaacatggccagcccccactccccgtctctacaaaaaatttaaaaattggccagggagggtggttcatgcctataataccaacactttggaaggttgaggtgagtgaattgcttgagcccaggagttagtgaccagcctggccaatgtggtaaaacccggtctctactaaaaatacaaaaaattagccaggtgcggtggcggcgcgcgcctgtaatcccagctactcaggaggctgaggcgcgagaattgcttgaacccgggaggtggaggttgcagtgagccgagatcacgccattgcacttccagcctgggcaacagagcaagactgtctcaaaaagaaaaaacaataaagaa

SEQ ID NO: 19579 - DNA, 915 bp, Homo sapiens
  source 1..915: mol_type = unassigned DNA
gggcagaaaaggcgccgggcgggcccgacacacgccggaggagccgggtggtgcagagccggagccggagccggagccgcgccgcgccgcaccatggcgcccaccctggccactgcccatcggcgccgctggtggatggcctgcacggccgtgctggagaacctcctcttctcggcagtcctcctgggctggggctcgctgctcatcatgctcaagtcagagggcttttactcctacctgtgtaccgagccagcgcctgcttcgcggtttcctgcttgctgattgcgtacggagcaagtaaaccaaacgctctctccgtgctcatcttcatcgccctggctctgaatggctttggtgggatgtgtatgaccttcacctcattaacactgcccaacatgttcggcgaccttcggtccacgtttattgccttgatgattgggtcctacgcctcctcggcagtcacctttccaggaatcaagctcatctatgatgctggtgtctccttcatcgtcgtcctcgtggtctgggccggctgctccgggctggttttcctcaactgcttctttaactggccccttgagcccttcccggggccggaggacatggactactcggtgaagatcaagttcagctggctgggctttgaccacaagatcacagggaagcagttctacaagcaggtgaccacggtgggccggcgcctgagtgtgggcagctccatgaggagtgccaaggagcaggtggcgctgcaggagggccacaagctgtgcctgtccaccgtcgacctggaggtgaagtgccagccggatgccgcagtggccccctccttcatgcacagcgtgttcagccccatcctgctgctcagcctggtcaccatgtgcgtcacgcagctgcggctcatcttctacatggggg

SEQ ID NO: 19580 - DNA, 556 bp, Homo sapiens
  source 1..556: mol_type = unassigned DNA
gtccggcctgtttatgctgcagccagggggctgaaagagagagagtcacgggcttccctgtgtgactgaggctgcgtggaggcactgcccaacatgttcggcgaccttcggtccacgtttattgccttgatgattgggtcctacgcctcctcggcagtcacctttccaggaatcaagctcatctatgatgctggtgtctccttcatcgtcgtcctcgtggtctgggccggctgctccgggctggttttcctcaactgcttctttaactggccccttgagcccttcccggggccggaggacatggactactcggtgaagatcaagttcagctggctgggctttgaccacaagatcacagggaagcagttctacaagcaggtgaccacggtgggccggcgcctgagtgtgggcagctccatgaggagtgccaaggagcaggtggcgctgcaggagggccacaagctgtgcctgtccaccgtcgacctggaggtgaagtgccagccggatgccgcagtggccccctccttcatgcacagcgtgttcagccccatcctgc

SEQ ID NO: 19581 - DNA, 567 bp, Homo sapiens
  source 1..567: mol_type = unassigned DNA
actccggcaccgcggcttcgaacagccattatgcgcagctgagaccggtggaggcagggaagctggggacggagtgagcgagagggggaatgtggggagtgacccagatgtcaggatgacctacgggagtccacaggcaaatgcaagcccatccgatgctgtggcgctggaccatggggaggtcagccgaaggcaacagcaggagagctgtggttcctgccagaggacacttccctcgttggctatgcccaggagcagcttgaccagaagattttccctgttatgaagtcataacacatatcataatactgcccaacatgttcggcgaccttcggtccacgtttattgccttgatgattgggtcctacgcctcctcggcagtcacctttccaggaatcaagctcatctatgatgctggtgtctccttcatcgtcgtcctcgtggtctgggccggctgctccgggctggttttcctcaactgcttctttaactggccccttgagcccttcccggggccggaggacatggactactcggtgaagatcaagttcagctggctgggctttg

SEQ ID NO: 19582 - DNA, 623 bp, Homo sapiens
  source 1..623: mol_type = unassigned DNA
agccggagccggagccggagccgcgccgcgccgcaccatggcgcccaccctggccactgcccatcggcgccgctggtggatggcctgcacggccgtgctggagaacctcctcttctcggcagtcctcctgggctggggctcgctgctcatcatgctcaagtcagagggcttttactcctacctgtgtaccgagccagagaatgtcaccaatggcacagtgggcggcacagcagagccggggcacgaggagtgccatcaccctgcccctgggtatcgtcatggacaagtatggcccgaggaagctcaggctgctgggcagcgcctgcttcgcggtttcctgcttgctgattgcgtacggagcaagtaaaccaaacgctctctccgtgctcatcttcatcgccctggctctgaatggctttggtgggatgtgtatgaccttcacctcattaacactgcccaacatgttcggcgaccttcggtccacgtttattgccttgatgattgggtcctacgcctcctcggcagtcacctttccaggaatcaagctcatctatgatgctggtgtctccttcatcgtcgtcctcgtggtctgggccggctgctccgggctggttttcctcaac

SEQ ID NO: 19583 - DNA, 489 bp, Homo sapiens
  source 1..489: mol_type = unassigned DNA
ttctcggcagtcctcctgggctggggctcgctgctcatcatgctcaagtcagagggcttttactcctacctgtgtaccgagccagagaatgtcaccaatggcacagtgggcggcacagcagagccggggcacgaggaggtgagctggatgaacggctggctcagctgccaggcccaggacgagatgctaaatttggccttcactgtgggctcctttctgctcagtgccatcaccctgcccctgggtatcgtcatggacaagtatggcccgaggaagctcaggctgctgggcaggtcagtgtgggtcccttagggggcagggagtgggcaggtggaccccctgggctgagttccccacagaagggtatcctggtcgtacctgatatcaggtgtactgtggagctccctgaaggccctccagaatggagttcctaccccgtccgccaccgaatcagcaggtactgtggtcctcgccgtgctccagtaccga

SEQ ID NO: 19584 - DNA, 3011 bp, Homo sapiens
  source 1..3011: mol_type = unassigned DNA
agaaaaggcgccgggcgggcccgacacacgccggaggagccgggtggtgcagagccggagccggagccggagccgcgccgcgccgcaccatggcgcccaccctggccactgcccatcggcgccgctggtggatggcctgcacggccgtgctggagaacctcctcttctcggcagtcctcctgggctggggctcgctgctcatcatgctcaagtcagagggcttttactcctacctgtgtaccgagccagagaatgtcaccaatggcacagtgggcggcacagcagagccggggcacgaggaggtgagctggatgaacggctggctcagctgccaggcccaggacgagatgctaaatttggccttcactgtgggctcctttctgctcagtgccatcaccctgcccctgggtatcgtcatggacaagtatggcccgaggaagctcaggctgctgggcagcgcctgcttcgcggtttcctgcttgctgattgcgtacggagcaagtaaaccaaacgctctctccgtgctcatcttcatcgccctggctctgaatggctttggtgggatgtgtatgaccttcacctcattaacactgcccaacatgttcggcgaccttcggtccacgtttattgccttgatgattgggtcctacgcctcctcggcagtcacctttccaggaatcaagctcatctatgatgctggtgtctccttcatcgtcgtcctcgtggtctgggccggctgctccgggctggttttcctcaactgcttctttaactggccccttgagcccttcccggggccggaggacatggactactcggtgaagatcaagttcagctggctgggctttgaccacaagatcacagggaagcagttctacaagcaggtgaccacggtgggccggcgcctgagtgtgggcagctccatgaggagtgccaaggagcaggtggcgctgcaggagggccacaagctgtgcctgtccaccgtcgacctggaggtgaagtgccagccggatgccgcagtggccccctccttcatgcacagcgtgttcagccccatcctgctgctcagcctggtcaccatgtgcgtcacgcagctgcggctcatcttctacatgggggctatgaacaacatcctcaagttcctggtcagcggcgaccagaagacagtgatggccacggttggcctctacacctccatcttcggcgtgctccagctgctgtgcctgctgacggcccccgtcattggctacatcatggactggaggctgaaggagtgtgaagacgcctccgaggagcccgaggagaaagacgccaaccaaggcgagaagaaaaagaagaagcgggaccggcagatccagaagatcactaatgccatgcgggccttcgccttcaccaacctgctgctcgtgggctttggggtgacctgcctcattcccaacctgcctctccagatcctctccttcatcctgcacacaatcgtgcgaggattcatccactccgctgtcgggggcctgtacgctgccgtgtacccctccacccagttcggcagcctcacgggactgcagtctctgatcagcgcgctcttcgcccttctgcagcagccgctgtttctggccatgatgggtcctctccagggagaccctctgtgggtgaacgtggggctgctccttctcagcctgctgggcttctgcctcccgctctacctgatctgctaccggcgccagctggagcggcagctgcagcagaggcaggaggatgacaaactcttcctcaaaatcaacggctcgtccaaccaggaggccttcgtgtagtggctgccgcctcggaactgcggtctcctgcctgtgcttcagtgactgacccctgtcctgcccctccagagtaccccacgcacccccaggaccttcgccgtctccgtgccagcgttcacgctccctcccggggccctgcctcggagctctgtggtggaaggacgggagagggccccggacacgcgcgttttctcctgccgaacgcaggggctgccctgactttgctctgccgccccccggggacccggggcctggggtctctgtggtgcctgcagcaggagccaggaacgcccggcaggcaggcgctctcccgccagtgtctggattctgcctcttgccaaagcagagggggctgccatcccctgcctgccacctgcccctcggctgcatgcccacagccgtacctgcctgaggacaaaggcttgcactgtctcgcccgcgcctggcccccaccccctccccggccagcctgaggctgcctgaggaaggaaggacccgcttcctgttgtcggtgctaattcctttgtaattccagccccctgtcgcctgtccagggcctgcccacccgttggaggccggtggagaagccccacctggcttatgccctggagagggtttagcgggctgggtggacccctcgcctcctccccgagggccaatgccgcggacacgttttcactgtcaccctcgttctgtctgccacctgaagggaatttgaggaccgccgccagggcaccccgtacatacacacagctgcttttgtggaggtggacgaaaggctgtggccggcagacgtggaggtccaggccggggtggggacgtgggtgggtccgaggtgtgtgtggggtcggggtgggctctaggagttagcccttatccccactgaccaggcgggagccgccaggcctgcagctgggccagtgcccaggagccatcctggcgtggggccaggagcttgtccaaggccacaggcccacagcaccccctgccggcgggctccgtggggccctggagctgatgacgggggaggcccgtccgcctggcccaccaacccgcccaccttgactgcccccagaagtgtgtcttgagacctcctgggcgtgcttagaggggtgagttgtgtttggatttttagttattttctcttcagttttattagacttcttttttataaagcaataaatccattttcctccgggt

SEQ ID NO: 19585 - DNA, 8136 bp, Homo sapiens
  source 1..8136: mol_type = unassigned DNA
agaaaaggcgccgggcgggcccgacacacgccggaggagccgggtggtgcagagccggagccggagccggagccgcgccgcgccgcaccatggcgcccaccctggccactgcccatcggcgccgctggtggatggcctgcacggccgtgctggagaacctcctcttctcggcagtcctcctgggctggggctcgctgctcatcatgctcaagtcagagggcttttactcctacctgtgtaccgagccagagaatgtcaccaatggcacagtgggcggcacagcagagccggggcacgaggaggtgagctggatgaacggctggctcagctgccaggcccaggacgagatgctaaatttggccttcactgtgggctcctttctgctcagtgccatcaccctgcccctgggtatcgtcatggacaagtatggcccgaggaagctcaggctgctgggcagcgcctgcttcgcggtttcctgcttgctgattgcgtacggagcaagtaaaccaaacgctctctccgtgctcatcttcatcgccctggctctgaatggctttggtgggatgtgtatgaccttcacctcattaacactgcccaacatgttcggcgaccttcggtccacgtttattgccttgatgattgggtcctacgcctcctcggcagtcacctttccaggaatcaagctcatctatgatgctggtgtctccttcatcgtcgtcctcgtggtctgggccggctgctccgggctggttttcctcaactgcttctttaactggccccttgagcccttcccggggccggaggacatggactactcggtgaagatcaagttcagctggctgggctttgaccacaagatcacagggaagcagttctacaagcaggtgaccacggtgggccggcgcctgagtgtgggcagctccatgaggagtgccaaggagcaggtggcgctgcaggagggccacaagctgtgcctgtccaccgtcgacctggaggtgaagtgccagccggatgccgcagtggccccctccttcatgcacagcgtgttcagccccatcctgctgctcagcctggtcaccatgtgcgtcacgcagctgcggctcatcttctacatgggggctatgaacaacatcctcaagttcctggtcagcggcgaccagaagacagttggcctctacacctccatcttcggcgtgctccagctgctgtgcctgctgacggcccccgtcattggctacatcatggactggaggctgaaggagtgtgaagacgcctccgaggagcccgaggagaaagacgccaaccaaggcgagaagaaaaagaagaagcgggaccggcagatccagaagatcactaatgccatgcgggccttcgccttcaccaacctgctgctcgtgggctttggggtgacctgcctcattcccaacctgcctctccagatcctctccttcatcctgcacacaatcgtgcgaggattcatccactccgctgtcgggggcctgtacgctgccgtgtacccctccacccagttcggcagcctcacgggactgcagtctctgatcagcgcgctcttcgcccttctgcagcagccgctgtttctggccatgatgggtcctctccagggagaccctctgtgggtgaacgtggggctgctccttctcagcctgctgggcttctgcctcccgctctacctgatctgctaccggcgccagctggagcggcagctgcagcagaggcaggaggatgacaaactcttcctcaaaatcaacggctcgtccaaccaggaggccttcgtgtagtggctgccgcctcggaactgcggtctcctgcctgtgcttcagtgactgacccctgtcctgcccctccagagtaccccacgcacccccaggaccttcgccgtctccgtgccagcgttcacgctccctcccggggccctgcctcggagctctgtggtggaaggacgggagagggccccggacacgcgcgttttctcctgccgaacgcaggggctgccctgactttgctctgccgccccccggggacccggggcctggggtctctgtggtgcctgcagcaggagccaggaacgcccggcaggcaggcgctctcccgccagtgtctggattctgcctcttgccaaagcagagggggctgccatcccctgcctgccacctgcccctcggctgcatgcccacagccgtacctgcctgaggacaaaggcttgcactgtctcgcccgcgcctggcccccaccccctccccggccagcctgaggctgcctgaggaaggaaggacccgcttcctgttgtcggtgctaattcctttgtaattccagccccctgtcgcctgtccagggcctgcccacccgttggaggccggtggagaagccccacctggcttatgccctggagagggtttagcgggctgggtggacccctcgcctcctccccgagggccaatgccgcggacacgttttcactgtcaccctcgttctgtctgccacctgaagggaatttgaggaccgccgccagggcaccccgtacatacacacagctgcttttgtggaggtggacgaaaggctgtggccggcagacgtggaggtccaggccggggtggggacgtgggtgggtccgaggtgtgtgtggggtcggggtgggctctaggagttagcccttatccccactgaccaggcgggagccgccaggcctgcagctgggccagtgcccaggagccatcctggcgtggggccaggagcttgtccaaggccacaggcccacagcaccccctgccggcgggctccgtggggccctggagctgatgacgggggaggcccgtccgcctggcccaccaacccgcccaccttgactgcccccagaagtgtgtcttgagacctcctgggcgtgcttagaggggtgagttgtgtttggatttttagttattttctcttcagttttattagacttcttttttataaagcaataaatccattttcctccgggtaagggatgccccttctggcatatcagttaatagctgcatgtgcctattttgagcttgagaagaaaaggcaggacaagattctctgccaccgaccagctccagccgtgcccagctgctcttcgtctctctgggggactgctgactcgggagggacagtgggccaggaaaagaccttcctccccaacccccaaacaaactgggcttgtgcagacatcttagaagtgtgagccaccctcctctaccgattttcccagccaaacaggcgaatcctggtccctttccatccctacacccttccacaaccctgaagattcccgctgggttcttctgcaggctcagagcagttcaggatgtgggcggcagggagggggatgaaaggagaagaggaaagggcaggtccaggccacattcaagctccacattaacagcttgggcgcctggaacacatatctcctaggctttatttcactcaaatatttaaaaaaagactgggcgtggtggctcacgcctataatcccagcactttgggaggccaaggcaggaggctcacctgaggtcaggagttcgagaccatcctgaccaacatggagaaaccccgtctgtactaaaaataaacattaatcgggcgtggtggcgtgcgcctgtaatcccaactactcgggagcctgaggcaggagaatcgcttgaaccggggagacggagattgccgtgagtcgagatcgcaccattgcactccagcctgggcaacagagcgaggctccgtctcaaaaagaaaaaaaaaaagagaacgagataaacatgcccactcctgagaacactcgttttgtgatgttagtggttattctgattttcaagaaagtattatagtcaagtttgggaaaggctgagttaaaagtcaagcctgtttccttacagccagcactgacagcactttgccaacgctcatgagctccgtggctcctcaggagcgggtgtgctgtgctgccgaggaacggctcgaaccatcagagccaccagcctccacgtgcggctccatgatcacccccagcagaggctcccgggtgctggttccaaatggagactccaggtcttgccgctgaccggtgactctgctgccagcatttgagacccgccatcacacaggagttgcagattcggagaaaccctaactagccagggtgctgccagctgggaaaaggccgcctttttttttttttttttttttttgagttggggtcttgctctgccatccaggctggagtgcagtggtgcaactgatagctcaccacggcctccaactcatgggctcaagggatcctcccacctcggcctcctaagtatctgggactataagtgtgtgccaccatgcctggctaattttttttttctttttcataaagatgaattcttgctattttgcccaggctggtctggaactcctgggctgaagcaattctcccacctcagcctcccaaagtgctgagattacaggcgtgagtcacaatgcctagccaaaaagccagtcttgagatggggaagacgtggcccgtgctgtccccagcagtgcccagtcccagccaaagtgggcagtgctgcctcactctcccacccaccctcagggtgtggcacttactgggaagaagcaggcattgagaaacagaattgagggggggaaacagtccagggccaacagtgcttggggattgaggcctgaaaatgcgagcagggtacagaggctgtggctggccagatgggtcgggtgccccctgcactcccaccccctagtcaggggtcacccatcctactttgccttgtgtggagctgacaggtgacatgttttcctattgttgtccttgacttgataacaatctgggagttaaacacatatgatcatccctgctttacaactgaaaaacgaggcctagagatactatcatcatatacacctgaaaaacgaggcctggagcgatggaggagcttgttcaaggtcagagccagcactcatatatgggtcttaagacactggagcagccaagggcctctagaccaggacattccactcggagcagcagctcaggggccaccaggcctctgtggcagggggacctctgtggcaggggggacctctgtggcggggggggggcctctgtggcaggggggtcacagcccaaggaaggggagcaggcccaggcatggtttccgtttctgggagccaagagccttctcagaagagggggagagagctactgcatggaatcatttgggccctggaggctgatgggtacttgggggagcaatccctggtgaccccaaccagcaagacaagtgccctgtgaaggggaagggactacagctgatcaaaggagcaggcaccagtggccgggcctcccgtctgcccctcatcctccaggctctggcgggaaggagcaggaagggctccctgcccttggggttttgatcagtgaggaggggggcttgggtctgagtctgggtctgggtctgctgccgaaacactgcccccagtccctctcctcactagactctggggtctaggcgtgtctttgtggtcggccttctccaaaccctctaggcctctgtctgcagctgctgctgcctggacctatacacaaggtcccacccctcaccggggccaaagacgtggttgcaggccctggtggatcctttctgttttgctccatccccgtcccctcttgcacccagcatcgtcctggtcagaacttccgtttaaaccttccttgcctgccgtgcactccgaggggggcgtcactttgccataggccccagggctgaaaatggcgggacatccagtattgggctcacgtgcataagactgtcccagacagcagcacaatcacgttcagccaagtggagtttccgacgcacttgtgtggcagccgcgtgaatgtgagccgatatgcagctgggaggggttgtgggcctcctgcggtgaggggctcctgccaggagctctgagaagcctccacagaatcagccgtcgggctccttcagcagcagctccccttatctgtgccaacgactgggggcctaactcaagggtgccagcccgtcttccgccaatacagactgtgggattctgagagttaggagcctggggtcccctggggtggggtggtcagggtgagcaggtgggctctgtgagcctgtttccccatgccctgactcaccccaatccctgggtgaggacagagctcctgaaggccactgaaggaggtgcagcacactccacctgggtggccttccgcagctcagccctcttcctgccagcaggaagcctctgcctgtgctccttaagttagccatcctcaccccctccgggcagctctgagactgagccagggccactagcagcacccagacctcgacccttctcagaccgaggcgccaccaccccaggccgaggaggcaaggagggaagaccaaagtctagaggactgtcttggtggccctgggcgagtcttgaactttggtgccatcatctgcaaaagggaggaaagaatgcctgcgtggtgcagctacgtggatacgcagtgaagacccgcatggtgggacgcctggcacttaacaatggtagcatttggccgggcgcggtggctcacgcctgtaatcccagcactttgggaggccgaggcgggcggatcacgaggtcaggagatcaagaccatcccggctaaaacggtgaaaccccgtctctactaaaaatacaaaaaattagccgggcgtagtggcgggcgcctgtagtcccagctacttgggaggctgaggcaggagaatggtgtgaacccgggaggcggagcttgcagtgagccgagatcccgccactgcactccagcctgggcgacagagcgagactccgtctcaaaaaaaaaaaaaaaaacaatggtagcatcgttttcagtgcccaggaagaaggcagctgggacagggaaagggccaccacaccacacccaagcccatacaacaggagagccactttcagcagctctgagcaggacagacttgtggccaagtcaagaaagtaaggtctggtcccagcgaggtggctcatccctgtaatcccagtgctttgggaggccgaagcgggggcggggtggatcacttgaggtcaggggtttgagaccagcctgaccaacatggtgaaacctcaactctactaaaaatacaaaaattagggccgggcgcagtggctcacgcctgtaatcccagcactttgggaggctgaggcgggcggatcacaaggtcaggagatcgagaccaacgtggctaacacagtgaaaccccatctctactaaaaatacgaaaaaaaaaaattagctgggcgtggtggtgggtacctgtagtcccagctacttgggaggctgaggcaggagaatggcatgaacccgggaggtgaagcttgcagtgagccgagattgtgccactgcactccagcctgggcgacagagcaagactccgtctcaaaaaaaaaaaaaaaaaaaaaaaaagtaaggtctgtatctgctgaccccacccttctccgaagccctctccgagcaaagccttaagaaactcttctctcgttcacttttcttttgtggctttcacgttttggtaagacttggccaaatagctgctcgagataatcaatcactggtggacaagtttctgctgagtgaggtttctgctgagtggggcgactcaaggcacggtcacgtaggcagcacctgtacaccgcatcctcatacagctgcgggaccgtgcctctgactgtgtgcgtgtgtgtttatctaagtgtgagatgcatccgggcatgtcagggtgtgtacatgttgggaagactgtgtagatttcttgtgtgccgctctctgaatggaggagaggggaagcgtcttacctcgctgaatccctttccattgctggaaagaacacctgggcaggagcggccccaagaccccgcccaggccctcggaagggagcctgaagggttaatccgtaccctgtattaaccagggtcaacccagcggctgacccgcctcttccctgctcctttgccgtttctagcacctggcttacttcctggcacacagtgagcactcaataaatgtatgctgagaatgac

SEQ ID NO: 19586 - DNA, 3261 bp, Homo sapiens; identical to SEQ ID NO: 19573
  source 1..3261: mol_type = unassigned DNA

SEQ ID NO: 19587 - DNA, 1658 bp, Homo sapiens; identical to SEQ ID NO: 19574
  source 1..1658: mol_type = unassigned DNA

SEQ ID NO: 19588 - DNA, 574 bp, Homo sapiens; identical to SEQ ID NO: 19575
  source 1..574: mol_type = unassigned DNA

SEQ ID NO: 19589 - DNA, 565 bp, Homo sapiens; identical to SEQ ID NO: 19576
  source 1..565: mol_type = unassigned DNA

SEQ ID NO: 19590 - DNA, 2074 bp, Homo sapiens; identical to SEQ ID NO: 19577
  source 1..2074: mol_type = unassigned DNA

SEQ ID NO: 19591 - DNA, 2030 bp, Homo sapiens; identical to SEQ ID NO: 19578
  source 1..2030: mol_type = unassigned DNA

SEQ ID NO: 19592 - DNA, 915 bp, Homo sapiens; identical to SEQ ID NO: 19579
  source 1..915: mol_type = unassigned DNA

SEQ ID NO: 19593 - DNA, 556 bp, Homo sapiens; identical to SEQ ID NO: 19580
  source 1..556: mol_type = unassigned DNA

SEQ ID NO: 19594 - DNA, 567 bp, Homo sapiens; identical to SEQ ID NO: 19581
  source 1..567: mol_type = unassigned DNA

SEQ ID NO: 19595 - DNA, 623 bp, Homo sapiens; identical to SEQ ID NO: 19582
  source 1..623: mol_type = unassigned DNA

SEQ ID NO: 19596 - DNA, 489 bp, Homo sapiens; identical to SEQ ID NO: 19583
  source 1..489: mol_type = unassigned DNA

SEQ ID NO: 19597 - DNA, 1796 bp, Homo sapiens
  source 1..1796: mol_type = unassigned DNA
aggttacttacgtgttcagaggcaccagctaaggagcaaaagtcaactttgaattctgtgttttgactactgcacagctctatttgcctcattttttatttttaaagcagcaaatcttagaataggagtttaaatccatcacttggagaaaagaaagactaaatgttttttgtttttgttttggagacacgatcttgctttgtcacccaggctggagtgcagtggcacaatctcggctcactgcagcctcgatctcctggactcaagcgatcctctcatctcagcctcctgagtagctgacactacaggcatgtgccaccatgccaagcttattttattttatttttttgatagacactggggtttcgctatgttgcctgggctggttttgaattcctggcctcaagcgatccacccgtctctgccttccaaaatgctgtgattacaggcgtgaaccactgtgcatggccaaaagagtaaacttgaaatctgaggcgaatgacttgattgtgacatcaggtgacctagtaatcagctgtgtattctagctggtgcctctaccagcttcccatgtgaccttgaacatgtcattgaatgctcgctaggcctctgtttctttatctgtgaaatgggcttgatattcctcctctaccccaaccgatagtgcagaatgaaaagtaactgaaagtccttcctccagggcaccatagtgtctgggtgaaaagtagaatataaactcggtagacttctggtcccttcattggtcatggaatggaccagtgcttgcttcattgagcaacagttctgttgttcagaattcctggatttcacctcacttctgctctccctgcaggtgaatgtgatgttcatgcttgccattcttctgacattcttccacccctttctggtatatcgggaatgccgtacttggaaagaaagtccctctgcaattgcatagttcagaagccctcacttttcagccccgaggatggttttgttcatcttccaccacctttgaggacctcgtgtcccaaaagactttgcctatcccagcaaaacacacacacacacacacacacacacaaaataaagacacacaaggacgtctgcgcagcaagaaaagaatctcagttgccaagcagattgatatcacacagactcaaagcaaaggcatgtggaacttctttatttcaaaacagaagtgtctccttgcacttagccttggcagacccttgactccaggggagatgacctgggggaggaagtgtgtcaactatttctttaggcctgtttggctccgaagcctatatgtgcctggatcctctgccacgggttaaattttcaggtgaagagtgaggttgtcatggcctcagctatgcttcctggctctccctcaagagtgcagccttggctagagaactcacagctctgggaaaaagaggagcagacagggttccctgggcccagtctcagcccagccactgatgctggatgaccttggcctgaccctggtctggtctcagaatcacttttcccatctgtaaaattgagatgaattttggtgttgaaagttcttcctggagcagatgtcctagaaggttttaggaatagtgacagagtcaggccaccccaagggccatgggagccagctgacctgcttgaccgaaggatttctgacagactatctttggggatgttttcaagaagggatataagttatttactttgggcatttaaaagaaaatttctctcgggaataattttatagaaaaataaagcttctgtgtctaaggcaa

SEQ ID NO: 19598 - DNA, 2619 bp, Homo sapiens
  source 1..2619: mol_type = unassigned DNA
gagcggcccccggaggctttcctggtagaagttgatgcgaggaagggcggcggggaccaggggacggtattcagaattcgagcgcaggagctccgcttctccacctgctcccggggagctattgggatccagagaatcacccgctgatggtttttgcccaggcctgaaacaaccagagagctacgggaaaggaagggcttggcttgccagaggaattttccaagtgctcaaacgccaggcttacggcgcctgtgatccgtccaggaggacaaagtgggatttgaagatccactccacttctgctcatggcgggccagggcctgcccctgcacgtggccacactgctgactgggctgctggaatgcctgggctttgctggcgtcctctttggctggccttcactagtgtttgtcttcaagaatgaagattactttaaggatctgtgtggaccagatgctgggccgattggcaatgccacagggcaggctgactgcaaagcccaggatgagaggttctcactcatcttcaccctggggtccttcatgaacaacttcatgacattccccactggctacatctttgaccggttcaagaccaccgtggcacgcctcatagccatatttttctacaccaccgccacactcatcatagccttcacctctgcaggctcagccgtgctgctcttcctggccatgccaatgctcaccattgggggaatcctgtttctcatcaccaacctgcagattgggaacctatttggccaacaccgttcgaccatcatcactctgtacaatggagcatttgactcttcctcggcagtcttccttattattaagcttctttatgaaaaaggcatcagcctcagggcctccttcatcttcatctctgtctgcagtacctggcatgtagcacgcactttcctcctgatgccccgggggcacatcccatacccactgccccccaactacagctatggcctgtgccctgggaatggcaccacaaaggaagagaaggaaacagctgagcatgaaaacagggagctacagtcaaaggagttcctttcagcgaaggaagagaccccaggggcagggcagaagcaggaactccgctccttctggagctacgctttctctcggcgctttgcctggcacctggtgtggctgtctgtgatacagttgtggcactacctcttcattggcactctcaactccttgctgaccaacatggccggtggggacatggcacgagtcagcacctacacaaatgcctttgccttcactcagttcggagtgctgtgtgccccctggaatggcctgctcatggaccggcttaaacagaagtaccagaaggaagcaagaaagacaggttcctccactttggcggtggccctctgctcgacggtgccttcgctggccctgacatccctgctgtgcctgggcttcgccctctgtgcctcagtccccatcctccctctccagtacctcaccttcatcctgcaagtgatcagccgctccttcctctatgggagcaacgcggccttcctcacccttgctttcccttcagagcactttggcaagctctttgggctggtgatggccttgtcggctgtggtgtctctgctccagttccccatcttcaccctcatcaaaggctcccttcagaatgacccattttacgtgaatgtgatgttcatgcttgccattcttctgacattcttccacccctttctggtatatcgggaatgccgtacttggaaagaaagtccctctgcaattgcatagttcagaagccctcacttttcagccccgaggatggttttgttcatcttccaccacctttgaggacctcgtgtcccaaaagactttgcctatcccagcaaaacacacacacacacacacacacacacaaaataaagacacacaaggacgtctgcgcagcaagaaaagaatctcagttgccaagcagattgatatcacacagactcaaagcaaaggcatgtggaacttctttatttcaaaacagaagtgtctccttgcacttagccttggcagacccttgactccaggggagatgacctgggggaggaagtgtgtcaactatttctttaggcctgtttggctccgaagcctatatgtgcctggatcctctgccacgggttaaattttcaggtgaagagtgaggttgtcatggcctcagctatgcttcctggctctccctcaagagtgcagccttggctagagaactcacagctctgggaaaaagaggagcagacagggttccctgggcccagtctcagcccagccactgatgctggatgaccttggcctgaccctggtctggtctcagaatcacttttcccatctgtaaaattgagatgaattttggtgttgaaagttcttcctggagcagatgtcctagaaggttttaggaatagtgacagagtcaggccaccccaagggccatgggagccagctgacctgcttgaccgaaggatttctgacagactatctttggggatgttttcaagaagggatataagttatttactttgggcatttaaaagaaaatttctctcgggaataattttatagaaaaataaagcttctgtgtctaaggcaa

SEQ ID NO: 19599 - DNA, 2617 bp, Homo sapiens
  source 1..2617: mol_type = unassigned DNA
gcgaatgcgaacctggcccgtgcggaaagggcgcggagagccccggcgcggagcaggcgggggacggtattcagaattcgagcgcaggagctccgcttctccacctgctcccggggagctattgggatccagagaatcacccgctgatggtttttgcccaggcctgaaacaaccagagagctacgggaaaggaagggcttggcttgccagaggaattttccaagtgctcaaacgccaggcttacggcgcctgtgatccgtccaggaggacaaagtgggatttgaagatccactccacttctgctcatggcgggccagggcctgcccctgcacgtggccacactgctgactgggctgctggaatgcctgggctttgctggcgtcctctttggctggccttcactagtgtttgtcttcaagaatgaagattactttaaggatctgtgtggaccagatgctgggccgattggcaatgccacagggcaggctgactgcaaagcccaggatgagaggttctcactcatcttcaccctggggtccttcatgaacaacttcatgacattccccactggctacatctttgaccggttcaagaccaccgtggcacgcctcatagccatatttttctacaccaccgccacactcatcatagccttcacctctgcaggctcagccgtgctgctcttcctggccatgccaatgctcaccattgggggaatcctgtttctcatcaccaacctgcagattgggaacctatttggccaacaccgttcgaccatcatcactctgtacaatggagcatttgactcttcctcggcagtcttccttattattaagcttctttatgaaaaaggcatcagcctcagggcctccttcatcttcatctctgtctgcagtacctggcatgtagcacgcactttcctcctgatgccccgggggcacatcccatacccactgccccccaactacagctatggcctgtgccctgggaatggcaccacaaaggaagagaaggaaacagctgagcatgaaaacagggagctacagtcaaaggagttcctttcagcgaaggaagagaccccaggggcagggcagaagcaggaactccgctccttctggagctacgctttctctcggcgctttgcctggcacctggtgtggctgtctgtgatacagttgtggcactacctcttcattggcactctcaactccttgctgaccaacatggccggtggggacatggcacgagtcagcacctacacaaatgcctttgccttcactcagttcggagtgctgtgtgccccctggaatggcctgctcatggaccggcttaaacagaagtaccagaaggaagcaagaaagacaggttcctccactttggcggtggccctctgctcgacggtgccttcgctggccctgacatccctgctgtgcctgggcttcgccctctgtgcctcagtccccatcctccctctccagtacctcaccttcatcctgcaagtgatcagccgctccttcctctatgggagcaacgcggccttcctcacccttgctttcccttcagagcactttggcaagctctttgggctggtgatggccttgtcggctgtggtgtctctgctccagttccccatcttcaccctcatcaaaggctcccttcagaatgacccattttacgtgaatgtgatgttcatgcttgccattcttctgacattcttccacccctttctggtatatcgggaatgccgtacttggaaagaaagtccctctgcaattgcatagttcagaagccctcacttttcagccccgaggatggttttgttcatcttccaccacctttgaggacctcgtgtcccaaaagactttgcctatcccagcaaaacacacacacacacacacacacacacaaaataaagacacacaaggacgtctgcgcagcaagaaaagaatctcagttgccaagcagattgatatcacacagactcaaagcaaaggcatgtggaacttctttatttcaaaacagaagtgtctccttgcacttagccttggcagacccttgactccaggggagatgacctgggggaggaagtgtgtcaactatttctttaggcctgtttggctccgaagcctatatgtgcctggatcctctgccacgggttaaattttcaggtgaagagtgaggttgtcatggcctcagctatgcttcctggctctccctcaagagtgcagccttggctagagaactcacagctctgggaaaaagaggagcagacagggttccctgggcccagtctcagcccagccactgatgctggatgaccttggcctgaccctggtctggtctcagaatcacttttcccatctgtaaaattgagatgaattttggtgttgaaagttcttcctggagcagatgtcctagaaggttttaggaatagtgacagagtcaggccaccccaagggccatgggagccagctgacctgcttgaccgaaggatttctgacagactatctttggggatgttttcaagaagggatataagttatttactttgggcatttaaaagaaaatttctctcgggaataattttatagaaaaataaagcttctgtgtctaaggc

SEQ ID NO: 19600 - DNA, 2595 bp, Homo sapiens
  source 1..2595: mol_type = unassigned DNA
gctctgggagtgtgaaactgggagagacggttaagctggggacggtattcagaattcgagcgcaggagctccgcttctccacctgctcccggggagctattgggatccagagaatcacccgctgatggtttttgcccaggcctgaaacaaccagagagctacgggaaaggaagggcttggcttgccagaggaattttccaagtgctcaaacgccaggcttacggcgcctgtgatccgtccaggaggacaaagtgggatttgaagatccactccacttctgctcatggcgggccagggcctgcccctgcacgtggccacactgctgactgggctgctggaatgcctgggctttgctggcgtcctctttggctggccttcactagtgtttgtcttcaagaatgaagattactttaaggatctgtgtggaccagatgctgggccgattggcaatgccacagggcaggctgactgcaaagcccaggatgagaggttctcactcatcttcaccctggggtccttcatgaacaacttcatgacattccccactggctacatctttgaccggttcaagaccaccgtggcacgcctcatagccatatttttctacaccaccgccacactcatcatagccttcacctctgcaggctcagccgtgctgctcttcctggccatgccaatgctcaccattgggggaatcctgtttctcatcaccaacctgcagattgggaacctatttggccaacaccgttcgaccatcatcactctgtacaatggagcatttgactcttcctcggcagtcttccttattattaagcttctttatgaaaaaggcatcagcctcagggcctccttcatcttcatctctgtctgcagtacctggcatgtagcacgcactttcctcctgatgccccgggggcacatcccatacccactgccccccaactacagctatggcctgtgccctgggaatggcaccacaaaggaagagaaggaaacagctgagcatgaaaacagggagctacagtcaaaggagttcctttcagcgaaggaagagaccccaggggcagggcagaagcaggaactccgctccttctggagctacgctttctctcggcgctttgcctggcacctggtgtggctgtctgtgatacagttgtggcactacctcttcattggcactctcaactccttgctgaccaacatggccggtggggacatggcacgagtcagcacctacacaaatgcctttgccttcactcagttcggagtgctgtgtgccccctggaatggcctgctcatggaccggcttaaacagaagtaccagaaggaagcaagaaagacaggttcctccactttggcggtggccctctgctcgacggtgccttcgctggccctgacatccctgctgtgcctgggcttcgccctctgtgcctcagtccccatcctccctctccagtacctcaccttcatcctgcaagtgatcagccgctccttcctctatgggagcaacgcggccttcctcacccttgctttcccttcagagcactttggcaagctctttgggctggtgatggccttgtcggctgtggtgtctctgctccagttccccatcttcaccctcatcaaaggctcccttcagaatgacccattttacgtgaatgtgatgttcatgcttgccattcttctgacattcttccacccctttctggtatatcgggaatgccgtacttggaaagaaagtccctctgcaattgcatagttcagaagccctcacttttcagccccgaggatggttttgttcatcttccaccacctttgaggacctcgtgtcccaaaagactttgcctatcccagcaaaacacacacacacacacacacacacacaaaataaagacacacaaggacgtctgcgcagcaagaaaagaatctcagttgccaagcagattgatatcacacagactcaaagcaaaggcatgtggaacttctttatttcaaaacagaagtgtctccttgcacttagccttggcagacccttgactccaggggagatgacctgggggaggaagtgtgtcaactatttctttaggcctgtttggctccgaagcctatatgtgcctggatcctctgccacgggttaaattttcaggtgaagagtgaggttgtcatggcctcagctatgcttcctggctctccctcaagagtgcagccttggctagagaactcacagctctgggaaaaagaggagcagacagggttccctgggcccagtctcagcccagccactgatgctggatgaccttggcctgaccctggtctggtctcagaatcacttttcccatctgtaaaattgagatgaattttggtgttgaaagttcttcctggagcagatgtcctagaaggttttaggaatagtgacagagtcaggccaccccaagggccatgggagccagctgacctgcttgaccgaaggatttctgacagactatctttggggatgttttcaagaagggatataagttatttactttgggcatttaaaagaaaatttctctcgggaataattttatagaaaaataaagcttctgtgtctaaggc

SEQ ID NO: 19601 - DNA, 2207 bp, Homo sapiens
  source 1..2207: mol_type = unassigned DNA
agtaaactgaagataacaccaacttggcagcgggagtttgtgtcttctgtatgaaatctccctgcctctgcacctggttgagttgctgtcattattttaggggacggtattcagaattcgagcgcaggagctccgcttctccacctgctcccggggagctattgggatccagagaatcacccgctgatggtttttgcccaggcctgaaacaaccagagagctacgggaaaggaagggcttggcttgccagaggaattttccaagtgctcaaacgccaggcttacggcgcctgtgatccgtccaggaggacaaagtgggatttgaagatccactccacttctgctcatggcgggccagggcctgcccctgcacgtggccacactgctgactgggctgctggaatgcctgggctttgctggcgtcctctttggctggccttcactagtgtttgtcttcaagaatgaagattactttaaggatctgtgtggaccagatgctgggccgattggcaatgccacagggcaggctgactgcaaagcccaggatgagaggttctcactcatcttcaccctggggtccttcatgaacaacttcatgacattccccactggctacatctttgaccggttcaagaccaccgtggcacgcctcatagccatatttttctacaccaccgccacactcatcatagccttcacctctgcaggctcagccgtgctgctcttcctggccatgccaatgctcaccattgggggaatcctgtttctcatcaccaacctgcagattgggaacctatttggccaacaccgttcgaccatcatcactctgtacaatggagcatttgactcttcctcggcagtcttccttattattaagcttctttatgaaaaaggcatcagcctcagggcctccttcatcttcatctctgtctgcagtacctggcatgtagcacgcactttcctcctgatgccccgggggcacatcccatacccactgccccccaactacagctatggcctgtgccctgggaatggcaccacaaaggaagagaaggaaacagctgagcatgaaaacagggagctacagtcaaaggagttcctttcagcgaaggaagagaccccaggggcagggcagaagcaggaactccgctccttctggagctacgctttctctcggcgctttgcctggcacctggtgtggctgtctgtgatacagttgtggcactacctcttcattggcactctcaactccttgctgaccaacatggccggtggggacatggcacgagtcagcacctacacaaatgcctttgccttcactcagttcggagtgctgtgtgccccctggaatggcctgctcatggaccggcttaaacagaagtaccagaaggaagcaagaaagacaggttcctccactttggcggtggccctctgctcgacggtgccttcgctggccctgacatccctgctgtgcctgggcttcgccctctgtgcctcagtccccatcctccctctccagtacctcaccttcatcctgcaagtgatcagccgctccttcctctatgggagcaacgcggccttcctcacccttgctttcccttcagagcactttggcaagctctttgggctggtgatggccttgtcggctgtggtgtctctgctccagttccccatcttcaccctcatcaaaggctcccttcagaatgacccattttacgtgaatgtgatgttcatgcttgccattcttctgacattcttccacccctttctggtatatcgggaatgccgtacttggaaagaaagtccctctgcaattgcatagttcagaagccctcacttttcagccccgaggatggttttgttcatcttccaccacctttgaggacctcgtgtcccaaaagactttgcctatcccagcaaaacacacacacacacacacacacacacaaaataaagacacacaaggacgtctgcgcagcaagaaaagaatctcagttgccaagcagattgatatcacacagactcaaagcaaaggcatgtggaacttctttatttcaaaacagaagtgtctccttgcacttagccttggcagacccttgactccaggggagatgacctgggggaggaagtgtgtcaactatttctttaggcctgtttggctccgaagcctatatgtgcctggatcctctgccacgggttaaattttca

SEQ ID NO: 19602 - DNA, 862 bp, Homo sapiens
  source 1..862: mol_type = unassigned DNA
gcaccacaaaggaagagaaggaaacagctgagcatgaaaacagggagctacagtcaaaggagttcctttcagcgaaggaagagaccccaggggcagggcagaagcaggaactccgctccttctggagctacgctttctctcggcgctttgcctggcacctggtgtggctgtctgtgatacagttgtggcactacctcttcattggcactctcaactccttgctgaccaacatggccggtggggacatggcacgagtcagcacctacacaaatgcctttgccttcactcagttcggagtgctgtgtgccccctggaatggcctgctcatggaccggcttaaacagaagtaccagaaggaagcaagaaagacagtttcccttcagagcactttggcaagctctttgggctggtgatggccttgtcggctgtggtgtctctgctccagttccccatcttcaccctcatcaaaggctcccttcagaatgacccattttacgtgaatgtgatgttcatgcttgccattcttctgacattcttccacccctttctggtatatcgggaatgccgtacttggaaagaaagtccctctgcaattgcatagttcagaagccctcacttttcagccccgaggatggttttgttcatcttccaccacctttgaggacctcgtgtcccaaaagactttgcctatcccagcaaaacacacacacacacacacacacacacaaaataaagacacacaaggacgtctgcgcagcaagaaaagaatctcagttgccaagcagattgatatcacacagactcaaagcaaaggcatgtggaacttctttatttcaaaacagaagtgtctccttgcacttag

SEQ ID NO: 19603 - DNA, 1879 bp, Homo sapiens
  source 1..1879: mol_type = unassigned DNA
gcgaatgcgaacctggcccgtgcggaaagggcgcggagagccccggcgcggagcaggcgggggacggtattcagaattcgagcgcaggagctccgcttctccacctgctcccggggagctattgggcctcctcttccagcagcctctatctttattctacaggatccagagaatcacccgctgatggtttttgcccaggcctgaaacaaccagagagctacgggaaaggaagggcttggcttgccagaggaattttccaagtgctcaaacgccaggcttacggcgcctgtgatccgtccaggaggacaaagtgggatttgaagatccactccacttctgctcatggcgggccagggcctgcccctgcacgtggccacactgctgactgggctgctggaatgcctgggctttgctggcgtcctctttggctggccttcactagtgtttgtcttcaagaatgaagattactttaaggatctgtgtggaccagatgctgggccgattggcaatgccacagggcaggctggaaggctgggatgcatgggagaccttttttctactccagactgcaaagcccaggatgagaggttctcactcatcttcaccctggggtccttcatgaacaacttcatgacattccccactggctacatctttgaccggttcaagaccaccgtggcacgcctcatagccatatttttctacaccaccgccacactcatcatagccttcacctctgcaggctcagccgtgctgctcttcctggccatgccaatgctcaccattgggggaatcctgtttctcatcaccaacctgcagattgggaacctatttggccaacaccgttcgaccatcatcactctgtacaatggagcatttgactcttcctcggcagtcttccttattattaagcttctttatgaaaaaggcatcagcctcagggcctccttcatcttcatctctgtctgcagtacctggcatgtagcacgcactttcctcctgatgccccgggggcacatcccatacccactgccccccaactacagctatggcctgtgccctgggaatggcaccacaaaggaagagaaggaaacagctgagcatgaaaacagggagctacagtcaaaggagttcctttcagcgaaggaagagaccccaggggcagggcagaagcaggaactccgctccttctggagctacgctttctctcggcgctttgcctggcacctggtgtggctgtctgtgatacagttgtggcactacctcttcattggcactctcaactccttgctgaccaacatggccggtggggacatggcacgagtcagcacctacacaaatgcctttgccttcactcagttcggagtgctgtgtgccccctggaatggcctgctcatggaccggcttaaacagaagtaccagaaggaagcaagaaagacaggttcctccactttggcggtggccctctgctcgacggtgccttcgctggccctgacatccctgctgtgcctgggcttcgccctctgtgcctcagtccccatcctccctctccagtacctcaccttcatcctgcaagtgatcagccgctccttcctctatgggagcaacgcggccttcctcacccttgctttcccttcagagcactttggcaagctctttgggctggtgatggccttgtcggctgtggtgtctctgctccagttccccatcttcaccctcatcaaaggctcccttcagaatgacccattttacgtgaatgtgatgttcatgcttgccattcttctgacattcttccacccctttctggtatatcgggaatgccgtacttggaaagaaagtccctctgcaattgcatagttcagaagccctcacttttcag

SEQ ID NO: 19604 - DNA, 1434 bp, Homo sapiens
  source 1..1434: mol_type = unassigned DNA
tttcgggcgccatggggcgccgagcgcggcctggcccctcgggctcctctgcggggagggcaggccgcaggctggagcggggtgcggaggctggcggggagcggcccccggaggctttcctggtagaagttgatgcgaggaagggcggcggggaccaggggacggtattcagaattcgagcgcaggagctccgcttctccacctgctcccggggagctattgggcctcctcttccagcagcctctatctttattctacaggatccagagaatcacccgctgatggtttttgcccaggcctgaaacaaccagagagctacgggaaaggaagggcttggcttgccagaggaattttccaagtgctcaaacgccaggcttacggcgcctgtgatccgtccaggaggacaaagtgggatttgaagatccactccacttctgctcatggcgggccagggcctgcccctgcacgtggccacactgctgactgggctgctggaatgcctgggctttgctggcgtcctctttggctggccttcactagtgtttgtcttcaagaatgaagattactttaaggatctgtgtggaccagatgctgggccgattggcaatgccacagggcaggctgactgcaaagcccaggatgagaggttctcactcatcttcaccctggggtccttcatgaacaacttcatgacattccccactggctacatctttgaccggttcaagaccaccgtggcacgcctcatagccatatttttctacaccaccgccacactcatcatagccttcacctctgcaggctcagccgtgctgctcttcctggccatgccaatgctcaccattgggggaatcctgtttctcatcaccaacctgcagattgggaacctatttggccaacaccgttcgaccatcatcactctgtacaatggagcatttgactcttcctcggcagtcttccttattattaagcttctttatgaaaaaggcatcagcctcagggcctccttcatcttcatctctgtctgcagtacctggcatgtagcacgcactttcctcctgatgccccgggggcacatcccatacccactgccccccaactacagctatggcctgtgccctgggaatggcaccacaaaggaagagaaggaaacagctgagcatgaaaacagggagctacagtcaaaggagttcctttcagcgaaggaagagaccccaggggcagggcagaagcaggaactccgctccttctggagctacgctttctctcggcgctttgcctggcacctggtgtggctgtctgtgatacagttgtggcactacctcttcattggcactctcaactccttgctgaccaacatggccggtggggacatggcacgagtcagcacctacacaaatgcctttgccttcactcagttcggagtgctgtgtg

SEQ ID NO: 19605 - DNA, 1260 bp, Homo sapiens
  source 1..1260: mol_type = unassigned DNA
attccccacatttgctgccagcggccatgatcatcctgcctcttaatgcacctcacaaataactctagtctacctttccctttcccgcaggcctcctcttccagcagcctctatctttattctacaggatccagagaatcacccgctgatggtttttgcccaggcctgaaacaaccagagagctacgggaaaggaagggcttggcttgccagaggaattttccaagtgctcaaacgccaggcttacggcgcctgtgatccgtccaggaggacaaagtgggatttgaagatccactccacttctgctcatggcgggccagggcctgcccctgcacgtggccacactgctgactgggctgctggaatgcctgggctttgctggcgtcctctttggctggccttcactagtgtttgtcttcaagaatgaagattactttaaggatctgtgtggaccagatgctgggccgattggcaatgccacagggcaggctgactgcaaagcccaggatgagaggttctcactcatcttcaccctggggtccttcatgaacaacttcatgacattccccactggctacatctttgaccggttcaagaccaccgtggcacgcctcatagccatatttttctacaccaccgccacactcatcatagccttcacctctgcaggctcagccgtgctgctcttcctggccatgccaatgctcaccattgggggaatcctgtttctcatcaccaacctgcagattgggaacctatttggccaacaccgttcgaccatcatcactctgtacaatggagcatttgactcttcctcggcagtcttccttattattaagcttctttatgaaaaaggcatcagcctcagggcctccttcatcttcatctctgtctgcagtacctggcatgtagcacgcactttcctcctgatgccccgggggcacatcccatacccactgccccccaactacagctatggcctgtgccctgggaatggcaccacaaaggaagagaaggaaacagctgagcatgaaaacagggagctacagtcaaaggagttcctttcagcgaaggaagatcaggaaggtattactgcaagaagtgtcattgaccaggctgtgagagacagatcggatttcaatagagaagaacacagagggtcatccaaggtggtagggccagcatgacaaagcagggaggtggggatgtgtgagtccgaggcaggtgcagagcacgccgggtgagttctgggagccaaggg

SEQ ID NO: 19606 - DNA, 541 bp, Homo sapiens
  source 1..541: mol_type = unassigned DNA
ttgatctgggaagtgcctgggagggaggcaccagctcctgaggggtaattaggggcagccacatttcaactcagcttaagggacaagtttgcgaccgacaagctgtctgaggtggaggggagcccagcctgtgtgctcatttggcaggaaggctgggatgcatgggagaccttttttctactccagactgcaaagcccaggatgagaggttctcactcatcttcaccctggggtccttcatgaacaacttcatgacattccccactggctacatctttgaccggttcaagaccaccgtggcacgcctcatagccatatttttctacaccaccgccacactcatcatagccttcacctctgcaggctcagccgtgctgctcttcctggccatgccaatgctcaccattgggggaatcctgtttctcatcaccaacctgcagattgggaacctatttggccaacaccgttcgaccatcatcactctgtacaatggagcatttgactcttcctcggcagtcttccttattattaagcttcttta

SEQ ID NO: 19607 - DNA, 801 bp, Homo sapiens
  source 1..801: mol_type = unassigned DNA
acattttccctaggtgggcctgagcgagtaacagcattcaactaacttggggacggtattcagaattcgagcgcaggagctccgcttctccacctgctcccggggagctattgggatccagagaatcacccgctgatggtttttgcccaggcctgaaacaaccagagagctacgggaaaggaagggcttggcttgccagaggaattttccaagtgctcaaacgccaggcttacggcgcctgtgatccgtccaggaggacaaagtgggatttgaagatccactccacttctgctcatggcgggccagggcctgcccctgcacgtggccacactgctgactgggctgctggaatgcctgggctttgctggcgtcctctttggctggccttcactagtgtttgtcttcaagaatgaagattactttaaggatctgtgtggaccagatgctgggccgattggcaatgccacagggcaggctgactgcaaagcccaggatgagaggttctcactcatcttcaccctggggtccttcatgaacaacttcatgacattccccactggctacatctttgaccggttcaagaccaccgtggcacgcctcatagccatatttttctacaccaccgccacactcatcatagccttcacctctgcaggctcagccgtgctgctcttcctggccatgccaatgctcaccattgggggaatcctgtttctcatcaccaacctgcagattgggaacctatttggccaacaccgttcgaccatcatcactctgtacaatggagcatttgactcttcc

SEQ ID NO: 19608 - DNA, 653 bp, Homo sapiens
  source 1..653: mol_type = unassigned DNA
gggacggtattcagaattcgagcgcaggagctccgcttctccacctgctcccggggagctattgggcctgaaacaaccagagagctacgggaaaggaagggcttggcttgccagaggaattttccaagtgctcaaacgccaggcttacggcgcctgtgatccgtccaggaggacaaagtgggatttgaagatccactccacttctgctcatggcgggccagggcctgcccctgcacgtggccacactgctgactgggctgctggaatgcctgggctttgctggcgtcctctttggctggccttcactagtgtttgtcttcaagaatgaagattactttaaggatctgtgtggaccagatgctgggccgattggcaatgccacagggcaggctgactgcaaagcccaggatgagaggttctcactcatcttcaccctggggtccttcatgaacaacttcatgacattccccactggctacatctttgaccggttcaagaccaccgtggcacgcctcatagccatatttttctacaccaccgccacactcatcatagccttcacctctgcaggctcagccgtgctgctcttcctggccatgccaatgctcaccattgggggaatcctgtttctcatcaccaacctgcagattggg

SEQ ID NO: 19609 - DNA, 554 bp, Homo sapiens
  source 1..554: mol_type = unassigned DNA
gcgaatgcgaacctggcccgtgcggaaagggcgcggagagccccggcgcggagcaggcgggggacggtattcagaattcgagcgcaggagctccgcttctccacctgctcccggggagctattgggatccagagaatcacccgctgatggtttttgcccaggcctgaaacaaccagagagctacgggaaaggaagggcttggcttgccagaggaattttccaagtgctcaaacgccaggcttacggcgcctgtgatccgtccaggaggacaaagtgggatttgaagatccactccacttctgctcatggcgggccagggcctgcccctgcacgtggccacactgctgactgggctgctggaatgcctgggctttgctggcgtcctctttggctggccttcactagtgtttgtcttcaagaatgaagattactttaaggatctgtgtggaccagatgctgggccgattggcaatgccacagggcaggctgatttttctacaccaccgccacactcatcatagccttcacctctgcaggctcagccgtgctgctct

SEQ ID NO: 19610 - DNA, 389 bp, Homo sapiens
  source 1..389: mol_type = unassigned DNA
gcctgcccctgcacgtggccacactgctgactgggctgctggaatgcctgggctttgctggcgtcctctttggctggccttcactagtgtttgtcttcaagaatgaagattactttaaggatctgtgtggaccagatgctgggccgattggcaatgccacagggcaggctgactgcaaagcccaggatgagaggttctcactcatcttcaccctggggtccttcatgaacaacttcatgacattccccactggctacatctttgaccggttcaagaccaccgtggcacgcctcatagccatatttttctacaccaccgccacactcatcatagccttcacctctgcaggtgcagtggctcactcctgtaatcccagcactttgggaggc

SEQ ID NO: 19611 - DNA, 648 bp, Homo sapiens
  source 1..648: mol_type = unassigned DNA
gcggaaagggcgcggagagccccggcgcggagcaggcgggggacggtattcagaattcgagcgcaggagctccgcttctccacctgctcccggggagctattgggcctgaaacaaccagagagctacgggaaaggaagggcttggcttgccagaggaattttccaagtgctcaaacgccaggcttacggcgcctgtgatccgtccaggaggacaaagtgggatttgaagatccactccacttctgctcatggcgggccagggcctgcccctgcacgtggccacactgctgactgggctgctggaatgcctgggctttgctggcgtcctctttggctggccttcactagtgtttgtcttcaagaatgaagattactttaaggatctgtgtggaccagatgctgggccgattggcaatgccacagggcaggctggaaggctgggatgcatgggagaccttttttctactccagactgcaaagcccaggatgagaggttctcactcatcttcaccctggggtccttcatgaacaacttcatgacattccccactggctacatctttgaccggttcaagaccaccgtggcacgcctcatagccatatttttctacaccaccgccacactcatcatagccttcacctctgcag

SEQ ID NO: 19612 - DNA, 560 bp, Homo sapiens
  source 1..560: mol_type = unassigned DNA
gaatgcgaacctggcccgtgcggaaagggcgcggagagccccggcgcggagcaggcgggcctgaaacaaccagagagctacgggaaaggaagggcttggcttgccagaggaattttccaagtgctcaaacgccaggcttacggcgcctgtgatccgtccaggaggacaaagtgggatttgaagatccactccacttctgctcatggcgggccagggcctgcccctgcacgtggccacactgctgactgggctgctggaatgcctgggctttgctggcgtcctctttggctggccttcactagtgtttgtcttcaagaatgaagattactttaaggatctgtgtggaccagatgctgggccgattggcaatgccacagggcaggctgactgcaaagcccaggatgagaggttctcactcatcttcaccctggggtccttcatgaacaacttcatgacattccccactggctacatctttgaccggttcaagaccaccgtggcacgcctcatagccatatttttctacaccaccgccacactcatcatagccttcacctctg

SEQ ID NO: 19613 - DNA, 589 bp, Homo sapiens
  source 1..589: mol_type = unassigned DNA
gcgaatgcgaacctggcccgtgcggaaagggcgcggagagccccggcgcggagcaggcggcctctatctttattctacaggatccagagaatcacccgctgatggtttttgcccaggcctgaaacaaccagagagctacgggaaaggaagggcttggcttgccagaggaattttccaagtgctcaaacgccaggcttacggcgcctgtgatccgtccaggaggacaaagtgggatttgaagatccactccacttctgctcatggcgggccagggcctgcccctgcacgtggccacactgctgactgggctgctggaatgcctgggctttgctggcgtcctctttggctggccttcactagtgtttgtcttcaagaatgaagattactttaaggatctgtgtggaccagatgctgggccgattggcaatgccacagggcaggctgactgcaaagcccaggatgagaggttctcactcatcttcaccctggggtccttcatgaacaacttcatgacattccccactggctacatctttgaccggttcaagaccaccgtggcacgcctcatagccatatttttctacaccac

SEQ ID NO: 19614 - DNA, 581 bp, Homo sapiens
  source 1..581: mol_type = unassigned DNA
aaatagagtgtgtgtgtccctatgccctcatgtgctgtctgtgtgtcctctgggtgctgggtgtgacattttccctaggatccagagaatcacccgctgatggtttttgcccaggcctgaaacaaccagagagctacgggaaaggaagggcttggcttgccagaggaattttccaagtgctcaaacgccaggcttacggcgcctgtgatccgtccaggaggacaaagtgggatttgaagatccactccacttctgctcatggcgggccagggcctgcccctgcacgtggccacactgctgactgggctgctggaatgcctgggctttgctggcgtcctctttggctggccttcactagtgtttgtcttcaagaatgaagattactttaaggatctgtgtggaccagatgctgggccgattggcaatgccacagggcaggctgactgcaaagcccaggatgagaggttctcactcatcttcaccctggggtccttcatgaacaacttcatgacattccccactggctacatctttgaccggttcaagaccaccgtggcacgcctcatagccatatttttcta

SEQ ID NO: 19615 - DNA, 539 bp, Homo sapiens
  source 1..539: mol_type = unassigned DNA
gcgaacctggcccgtgcggaaagggcgcggagagccccggcgcggagcaggcgggatccagagaatcacccgctgatggtttttgcccaggcctgaaacaaccagagagctacgggaaaggaagggcttggcttgccagaggaattttccaagtgctcaaacgccaggcttacggcgcctgtgatccgtccaggaggacaaagtgggatttgaagatccactccacttctgctcatggcgggccagggcctgcccctgcacgtggccacactgctgactgggctgctggaatgcctgggctttgctggcgtcctctttggctggccttcactagtgtttgtcttcaagaatgaagattactttaaggatctgtgtggaccagatgctgggccgattggcaatgccacagggcaggctgactgcaaagcccaggatgagaggttctcactcatcttcaccctggggtccttcatgaacaacttcatgacattccccactggctacatctttgaccggttcaagaccaccgtggcacgcct

SEQ ID NO: 19616 - DNA, 587 bp, Homo sapiens
  source 1..587: mol_type = unassigned DNA
atgtgctgtctgtgtgtcctctgggtgctgggtgtgacattttccctaggggacggtattcagaattcgagcgcaggagctccgcttctccacctgctcccggggagctattgggatccagagaatcacccgctgatggtttttgcccaggcctgaaacaaccagagagctacgggaaaggaagggcttggcttgccagaggaattttccaagtgctcaaacgccaggcttacggcgcctgtgatccgtccaggaggacaaagtgggatttgaagatccactccacttctgctcatggcgggccagggcctgcccctgcacgtggccacactgctgactgggctgctggaatgcctgggctttgctggcgtcctctttggctggccttcactagtgtttgtcttcaagaatgaagattactttaaggatctgtgtggaccagatgctgggccgattggcaatgccacagggcaggctgactgcaaagcccaggatgagaggttctcactcatcttcaccctggggtccttcatgaacaacttcatgacattccccactggctacatctttgaccggttcaagaccac

SEQ ID NO: 19617 - DNA, 571 bp, Homo sapiens
  source 1..571: mol_type = unassigned DNA
gcgaacctggcccgtgcggaaagggcgcggagagccccggcgcggagcaggcgggggacggtattcagaattcgagcgcaggagctccgcttctccacctgctcccggggagctattgggcctcctcttccagcagcctctatctttattctacaggatccagagaatcacccgctgatggtttttgcccaggcctgaaacaaccagagagctacgggaaaggaagggcttggcttgccagaggaattttccaagtgctcaaacgccaggcttacggcgcctgtgatccgtccaggaggacaaagtgggatttgaagatccactccacttctgctcatggcgggccagggcctgcccctgcacgtggccacactgctgactgggctgctggaatgcctgggctttgctggcgtcctctttggctggccttcactagtgtttgtcttcaagaatgaagattactttaaggatctgtgtggaccagatgctgggccgattggcaatgccacagggcaggctgactgcaaagcccaggatgagaggttctcactcatcttcaccctggggtcct

SEQ ID NO: 19618 - DNA, 494 bp, Homo sapiens
  source 1..494: mol_type = unassigned DNA
taggggacggtattcagaattcgagcgcaggagctccgcttctccacctgctcccggggagctattgggatccagagaatcacccgctgatggtttttgcccaggcctgaaacaaccagagagctacgggaaaggaagggcttggcttgccagaggaattttccaagtgctcaaacgccaggcttacggcgcctgtgatccgtccaggaggacaaagtgggatttgaagatccactccacttctgctcatggcgggccagggcctgcccctgcacgtggccacactgctgactgggctgctggaatgcctgggctttgctggcgtcctctttggctggccttcactagtgtttgtcttcaagaatgaagattactttaaggatctgtgtggaccagatgctgggccgattggcaatgccacagggcaggctggaaggctgggatgcatgggagaccttttttctactccagactgcaaagcccaggatgagagg

SEQ ID NO: 19619 - DNA, 562 bp, Homo sapiens
  source 1..562: mol_type = unassigned DNA
gcaaaatgcacaaatagagtgtgtgtgtccctatgccctcatgtgctgtctgtgtgtcctctgggtgctgggtgtgacattttccctaggggacggtattcagaattcgagcgcaggagctccgcttctccacctgctcccggggagctattgggcctcctcttccagcagcctctatctttattctacaggatccagagaatcacccgctgatggtttttgcccaggcctgaaacaaccagagagctacgggaaaggaagggcttggcttgccagaggaattttccaagtgctcaaacgccaggcttacggcgcctgtgatccgtccaggaggacaaagtgggatttgaagatccactccacttctgctcatggcgggccagggcctgcccctgcacgtggccacactgctgactgggctgctggaatgcctgggctttgctggcgtcctctttggctggccttcactagtgtttgtcttcaagaatgaagattactttaaggatctgtgtggaccagatgctgggccgattggcaatgccacagggcaggctggaaggct

SEQ ID NO: 19620 - DNA, 573 bp, Homo sapiens
  source 1..573: mol_type = unassigned DNA
gcgaatgcgaacctggcccgtgcggaaagggcgcggagagccccggcgcggagcaggcggtaaactgaagataacaccaacttggcagcgggagtttgtgtcttctgtatgaaatctccctgcctctgcacctggttgagttgctgtcattattttaggggacggtattcagaattcgagcgcaggagctccgcttctccacctgctcccggggagctattgggcctcctcttccagcagcctctatctttattctacaggatccagagaatcacccgctgatggtttttgcccaggcctgaaacaaccagagagctacgggaaaggaagggcttggcttgccagaggaattttccaagtgctcaaacgccaggcttacggcgcctgtgatccgtccaggaggacaaagtgggatttgaagatccactccacttctgctcatggcgggccagggcctgcccctgcacgtggccacactgctgactgggctgctggaatgcctgggctttgctggcgtcctctttggctggccttcactagtgtttgtcttcaagaatgaagattactttaagg

SEQ ID NO: 19621 - DNA, 397 bp, Homo sapiens
  source 1..397: mol_type = unassigned DNA
gggaggctgaaaggcagcgaggagggagggaaagacaccgctggggttctagggggttctagagggagaagtttcaagagggagaggggacggtattcagaattcgagcgcaggagctccgcttctccacctgctcccggggagctattgggatccagagaatcacccgctgatggtttttgcccaggcctgaaacaaccagagagctacgggaaaggaagggcttggcttgccagaggaattttccaagtgctcaaacgccaggcttacggcgcctgtgatccgtccaggaggacaaagtgggatttgaagatccactccacttctgctcatggcgggccagggcctgcccctgcacgtggccacactgctgactgggctgctggaatgcctgggc

SEQ ID NO: 19622 - DNA, 506 bp, Homo sapiens
  source 1..506: mol_type = unassigned DNA
tttcgggcgccatggggcgccgagcgcggcctggcccctcgggctcctctgcggggagggcaggccgcaggctggagcggggtgcggaggctggcggggagcggcccccggaggctttcctggtagaagttgatgcgaggaagggcggcggggaccagtaaactgaagataacaccaacttggcagcgggagtttgtgtcttctgtatgaaatctccctgcctctgcacctggttgagttgctgtcattattttaggggacggtattcagaattcgagcgcaggagctccgcttctccacctgctcccggggagctattgggatccagagaatcacccgctgatggtttttgcccaggcctgaaacaaccagagagctacgggaaaggaagggcttggcttgccagaggaattttccaagtgctcaaacgccaggcttacggcgcctgtgatccgtccaggaggacaaagtgggatttgaagatccactccacttctgctcatggc

SEQ ID NO: 19623 - DNA, 3896 bp, Homo sapiens
  source 1..3896: mol_type = unassigned DNA
acagtagtgaatcgtagcatgttagagttagaaggttcagtgttgatggagttattgaagaaatgatggagtaagagactcttttctaagcaactcaagtttgcagtgattcaggcctacttctgaagagacagccttttatctcaatgaatgacacagaaaaaccagcagatactccctctgaggaagaggactttggtgatccaaggacatatgacccagatttcaaggggcctgttgccaacaggagttgtacagatgttctgtgctgtatgatcttcctactgtgtattattggctacattgttttaggacttgtggcctgggtacatggggaccccagaagagcagcctatcctacagacagccagggccacttttgtggccagaagggcactcccaatgagaacaagaccattttgttttactttaacctgttacgctgtaccagtccctccgtgttgctaaacctacagtgccctaccacacagatctgtgtctccaagtgcccagaaaaatttttaacctatgtggaaatgcaacttttgtacacaaaagacaaaagctactgggaagactaccgtcagttctgtaagaccactgctaagcctgtgaagtctctcacacagcttttactggatgatgattgtccaacagcgatttttcccagcaaaccttttctccagagatgtttccctgacttctctaccaaaaatggcactttaacaataggaagtaagatgatgtttcaagatggaaatggagggacaagaagtgttgtagaactcgggattgctgcaaatggtatcaataaacttcttgatgcaaagtcacttggattgaaagtgtttgaagactatgcaagaacttggtattggattctcattggcctgacgattgccatggtccttagttggatatttttgatacttctgaggttcatagctggatgcctcttctgggtcttcatgattggtgtgattggaattataggttatggaatatggcactgttaccagcagtacaccaatcttcaggaacgcccaagttctgtattaactatctatgacatcgggattcagactaacataagcatgtactttgaactgcaacaaacatggttcacatttatgataatactctgcatcattgaagtgattgtcatcctcatgctgatcttcctcaggaatcgaatccgagtcgccattatcctgctgaaggaaggaagcaaagccattggatatgttcctagtacattagtctatccagctttaactttcattttgctctcaatctgcatttgctactgggtcgtgacagcagttttcttggcgacatcgggggtacctgtatacaaagtcatagctccaggggggcattgtatacatgaaaatcaaacctgtgacccagagatttttaatacaactgaaattgccaaagcttgccctggggctctgtgtaactttgctttctatggtggaaagagcttgtaccatcagtacatccctaccttccatgtatacaacttatttgtctttctctggcttataaacttcgtcattgcattaggtcagtgcgcccttgctggtgcattcgctacttattactgggccatgaaaaaacctgatgacatcccacgatatccactttttactgcatttggacgagccatacgatatcacacaggatccctagcatttggatctttaattattgcattaattcaaatgtttaaaattgtactagaatacttggaccaccgtcttaaacgtacccagaacacattgtctaaattcctacaatgctgcctgagatgctgcttctggtgtttggaaaatgcaataaagtttttaaacagaaatgcctatattatgattgcaatatatggcagaaacttctgcaggtcagcaaaagatgctttcaatctgctgatgagaaatgttttgaaagttgcagttacagatgaagttacatactttgtattattcctggggaaacttctagttgctggaagtataggtgttctggccttcctattcttcacacaaagactgccagtgattgcacaaggaccagcatctttaaattactactgggtacctttgctgacagtcatttttgggtcttacctgattgcacatgggttcttcagcgtctatgcaatgtgtgttgaaacaattttcatctgcttcttggaagatttagaaagaaatgatggttctactgcaagaccttattatgtgagtcaacctttgctgaagattttccaggaggaaaatccacaaactaggaagcagtagaagagcaaactggtcgtcctacagctgtgtgttaccttttctccatctgctgtgtctgtgcaacatttgtttcataagtgctttgtgtttagcaacactgtattcacgaccttgttggcttgcatttgcatgttttataccaaagcttatactgtactatgtgaagccatcagaagtcgcaagggaattgttaataacataaaacatttttatactaagatcatttgttttgtaattcgtttttaaagagtggcttggatgttttgaaaatactactgaatatgttaatattcttttaaatcttagattgaaaaatgatacattacttaaattgatagctcctaatatatttttaaaattacaactaaaagaagacttcttctgcagggaaaattggtcagcaaagtgaaattaaaaattttaaagtttttcccactctcgttggacagtaaatcagtgaaaggactgccccagttgagagtttgctctctttaagtatagaatgtttcctcttaaacaaattgccaatcatccagcctttactacttagccctctgacaaagtgccttactggctatttaatattacccagcttttatgggcaagtttacaaacattgttttttaaaaaattaaaacctgcaatgtttcgtgattaaaacaagtcttattgcatttgtttcactcttagctcactgattggaaaacatttgtcattttgctctgtttgatatcctcactattatggaatacattgtgcagctaaacaatttcccttgcgcctagtggacattcatgaatgtgtactacacgcaagaagaaacaaaccccgaaagaacacttgttggatttctttgtttttttttttactaaaagagaagttttaaaatgaaatgttttctatagtagatctttgaaaatacaataggtataatactgcatttctcagtgttttacaaagatcagaaagagaaacttctaggaattgcaaagggaaactttactcctcgaaagggtgctcacagatgtcatgtactgaatagctcccttttaaatgatcatttattttcatcaaagcctgttctatatatgccacttcattttctaacttttggtatgaaaaaatcagtttacttacagtatgttaattgtattgtactactataaacaggaacataatttccaattcagttttaaataattttaccagtactactaacttttaaggaaattaattcagttggttactcagtgtttgttacagaaagagtccagaaaagtattcaccctaagagaatgtcaatcatataatgataatttgtgaaagctttgagaatcaatcatcagtaagttactatcagtttataaaatattatcacatttgtttaaatgtgactttagatacttttatgccaaaaataaactcacatgagcacatgacagtctgagctctataatcagtgtgcttctgctgtgcagaaatgttagaaacgtattgtctaaatatctttgataattaaaatgtttaatatttaatgaaatttgttgttacttgttttaaatcttttttcttttaataaagatttaaataagaaat

SEQ ID NO: 19624 - DNA, 4406 bp, Homo sapiens
  source 1..4406: mol_type = unassigned DNA
aggttcagtgttgatggagttattgaagaaatgatggagtaagagactcttttctaagcaactcaagtttgcagtgattcaggcctacttctgaagagacagccttttatctcaatgaatgacacagaaaaaccagcagatactccctctgaggaagaggactttggtgatccaaggacatatgacccagatttcaaggggcctgttgccaacaggagttgtacagatgttctgtgctgtatgatcttcctactgtgtattattggctacattgttttaggacttgtggcctgggtacatggggaccccagaagagcagcctatcctacagacagccagggccacttttgtggccagaagggcactcccaatgagaacaagaccattttgttttactttaacctgttacgctgtaccagtccctccgtgttgctaaacctacagtgccctaccacacagatctgtgtctccaagtgcccagaaaaatttttaacctatgtggaaatgcaacttttgtacacaaaagacaaaagctactgggaagactaccgtcagttctgtaagaccactgctaagcctgtgaagtctctcacacagcttttactggatgatgattgtccaacagcgatttttcccagcaaaccttttctccagagatgtttccctgacttctctaccaaaaatggcactttaacaataggaagtaagatgatgtttcaagatggaaatggagggacaagaagtgttgtagaactcgggattgctgcaaatggtatcaataaacttcttgatgcaaagtcacttggattgaaagtgtttgaagactatgcaagaacttggtattggattctcattggcctgacgattgccatggtccttagttggatatttttgatacttctgaggttcatagctggatgcctcttctgggtcttcatgattggtgtgattggaattataggttatggaatatggcactgttaccagcagtacaccaatcttcaggaacgcccaagttctgtattaactatctatgacatcgggattcagactaacataagcatgtactttgaactgcaacaaacatggttcacatttatgataatactctgcatcattgaagtgattgtcatcctcatgctgatcttcctcaggaatcgaatccgagtcgccattatcctgctgaaggaaggaagcaaagccattggatatgttcctagtacattagtctatccagctttaactttcattttgctctcaatctgcatttgctactgggtcgtgacagcagttttcttggcgacatcgggggtacctgtatacaaagtcatagctccaggggggcattgtatacatgaaaatcaaacctgtgacccagagatttttaatacaactgaaattgccaaagcttgccctggggctctgtgtaactttgctttctatggtggaaagagcttgtaccatcagtacatccctaccttccatgtatacaacttatttgtctttctctggcttataaacttcgtcattgcattaggtcagtgcgcccttgctggtgcattcgctacttattactgggccatgaaaaaacctgatgacatcccacgatatccactttttactgcatttggacgagccatacgatatcacacaggatccctagcatttggatctttaattattgcattaattcaaatgtttaaaattgtactagaatacttggaccaccgtcttaaacgtacccagaacacattgtctaaattcctacaatgctgcctgagatgctgcttctggtgtttggaaaatgcaataaagtttttaaacagaaatgcctatattatgattgcaatatatggcagaaacttctgcaggtcagcaaaagatgctttcaatctgctgatgagaaatgttttgaaagttgcagttacagatgaagttacatactttgtattattcctggggaaacttctagttgctggaagtataggtgttctggccttcctattcttcacacaaagactgccagtgattgcacaaggaccagcatctttaaattactactgggtacctttgctgacagtcatttttgggtcttacctgattgcacatgggttcttcagcgtctatgcaatgtgtgttgaaacaattttcatctgcttctgtgaagatctggaaagaaatgatggatctacagaaaaaccctacttcgtaacccctaacctgcatggaattctgatcaagaagcaactagttccccagaagcagaaagagtagaaaagctccaaacagtgtcactcatttttaagtagaagttgtgtaaattaggttgattgtaatttggaaatgttgcttttgagtaatgtgaaatttctgtgcttaattctaagaagtcagcacctggtactacctgaggtgtcaggtatttgatgacattagctgctgtctactttatagacagtggtcccagctaaagatcaaaatgttaatgtcaaacgttttttaaaatctgtagccgagagtgttttaataacttttataactcagcgtgctgtttccattgcagcactttaatagcctttctttttataagtgtatatttgtaaaggatattcaggcaatttttgaaaacactataaatgtgtaattaattagccataaaatattgatttatagttaaccagcatatggtactaaatttgtaaatatggtgctatggttatatttatactgttcaagctggtggacaactctctaaactgtgattaaacttgtattaatggttccctaggaagtatatttcagtgagtcatgtccataacaaacatagatgttaatgttatataggttctacggagagcattactgggtaaaaaatactatggaaccttcagagcccattctgttttagtgaaatcatgtttatattgaagtcgaatctgagttctggagtgtcatttccaacaacatgaacctctgtccatggtgaaaatattctgaacaaaactgaaattgttacataactcatgccttttgtctttaacccaaatttcttattcccactatatagaaaatcaatatgaatttgtttcagaagagtgattatatcttttcatgagtatacctgtatttctagattaaagagattgtgtggctttgttctacagaaggtttgattttgtctcacctttcagtgaggaaagagaaaagaaagacacttcagattttaccctaaggaaatatactgttggcgctccatcatctaatacctttatgaggggcatactgtgggttaggaactctctctctgcagggcttaggaggaaagttgttgccacctgccaccgctggccgcctgaggtttctgatagtcatgtgtaagttttgaatggcagaacaaagcatgaatcagacacacatcttgcctagccatcccctgtgtgcaaatgtgtatgatgtggttaaccatgtaaaaatgcaccccaaaaggagcattgaatcaatttgtattttcttggcttttaccttaaacttgtatataaggattatttatatattgacagaaaggaacatgttgatctgaatatcactcatatatccaagaaaagagtcagaaatgtattgttgtgttatagattgatctaaatacgtattaattatcttcaagtgtagacacctagatttaaactgactctgtggcagattaattaatagcaataagccaatgaatagggaagatttttaatatataatgactaccagcttgttcttggcttacattcttgagattattgtattcaaaagtgtcagttggcttcacattttggcaaagagccttctgcattcttattctccttgaagcataatgcagataatgacaacttatctttctagattagtcttttattattcaacaagacaaaggccacaacaaaggactagtagaatagtgacctctacctgagaatttgttataactatagatgtttgtgctctgcccaagagattctgatatactgtgatttgatgtgagccacgatgtgaattattataaagttctctagttgattctgatacacataaaagttgaaaaattggccatgtgtggtgtctcacgcctgtaatcccagcactttgggagtccaagatggacagatcactggagcctaggagttccagaccagtctaggcaacatggtgaaaccccatctatctttataaaaaatataaaagttagccaagtgtggtggtgcacacctgtagtctcagctacttgggaggctgaaatgtgagggtcacttgagcccaagagatcgaggctgcagtgagccatgatcacaccactgcactccagcctgggtgacagagcaaaaccctgtttaaaaaaaaaaagttgaaaaaatcacttg

SEQ ID NO: 19625 - DNA, 721 bp, Homo sapiens
  source 1..721: mol_type = unassigned DNA
gttagagttagaaggttcagtgttgatggagttattgaagaaatgatggagtaagagactcttttctaagcaactcaagtttgcagtgattcaggcctacttctgaagagacagccttttatctcaatgaatgacacagggtctgagattactgacatgcttcctgctatacccggcactgattccaaatgggactgggtctgcagaaaaaccagcagatactccctctgaggaagaggactttggtgatccaaggacatatgacccagatttcaaggggcctgttgccaacagactaaactgggaactccgtgagagaaagcatctcatctgtgtggttcaccaacgtttcatagcatctgccacagtatccggcacaaaataggagttgtacagatgttctgtgctgtatgatcttcctactgtgtattattggctacattgttttaggacttgtggcctgggtacatggggaccccagaagagcagcctatcctacagacagccagggccacttttgtggccagaagggcactcccaatgagaacaagaccattttgttttactttaacctgttacgctgtaccagtccctccgtgttgctaaacctacagtgccctaccacacagatctgtgtctccaagtgcccagaaaaatttttaacctatgtggaaatgcaacttttgtacacaaaagacaaaagctactgggaagactaccg

SEQ ID NO: 19626 - DNA, 2784 bp, Homo sapiens
  source 1..2784: mol_type = unassigned DNA
tttatacatgaagacacgaaaatgtatttatttcttttaaaatcagaagaaaacggtgagaactgtgaggccggggggacgttttcctccgggatcctggcagatcctgcagaccgcgccgtcgtgcgcgaagcaccgggacgggcctcccgcgggaagggcccaggaggacaccgggctcccctcccgcccgcggggccccagacgcggcgccgctttaaggctccgggccccgcgcggatgcggaggctgcggccgtgacgtcagcgccccgccccgggtgatgctgcagcagccgggaccgcggccgggcaggcagcagcccagcggggacagggatgcctgccgtctccacccacagggacgcccaccagccctccccacgatgatccccgcagccagcagcaccccgccgggagatgccctcttccccagcgtggccccacaggacttctggaggtcccaggtcacgggctactcggggtccgtgacacgacacctcagtcaccgggccaacaacttcaaacgacaccccaagaggaggaagtgcattcgtccctccccacccccgccccccaacaccccgtgcccgcttgagctggtggacttcggggacctgcacccccagaggtccttccgggagctgcttttcaacggctgcattctctttggcatcgagttcagctacgccatggagacggcgtacgtgaccccggtgctcctgcagatgggcctgcccgaccagctctacagcctggtgtggttcatcagccccatcctcggattcctactgcagcctctgttgggtgcttggagtgaccggtgtacctcaaggtttggaaggagacgccctttcattcttgtcctggctataggggcactgctgggcctctcgctcttgctgaatggccgggacattggcatcgccctggctgacgtgaccgggaaccacaagtggggcctgctgctgaccgtgtgcggtgtggtgctgatggactttagcgccgactcggcggacaaccccagccacgcctacatgatggacgtgtgcagccccgcagaccaggaccgaggcctgaacatccacgccctcctggcaggtctcggaggaggctttggatacgtggtcggcggaatccactgggataaaacgggcttcgggagggccctggggggacagctccgagtcatttacctcttcactgcggtcaccctgagcgtcaccaccgtcctgaccctggtcagcatccctgagaggccgctgcggccgccgagtgagaagcgggcagccatgaagagccccagcctcccgctgcccccgtccccacccgtcctgccagaggaaggccctggcgacagcctcccgtcgcacacggccaccaacttctccagccccatctcgccgcccagccccctcacgcccaagtacggcagcttcatcagcagggacagctccctgacgggcatcagcgagttcgcctcatcctttggcacggccaacatagacagcgtcctcattgactgcttcacgggcggccacgacagctacctggccatccctggcagcgtccccaggccgcccatcagcgtcagcttcccccgggcccccgacggcttctaccgccaggaccgtggacttctggagggcagagagggtgccctgacctccggctgtgacggggacattctgagggtgggctccttggacacctctaagccgaggtcatcagggattctgaagagacctcagaccttggccatcccggacgcagccggaggagggggtcccgaaaccagcaggagaaggaatgtgaccttcagtcagcaggtggccaatatcctgctcaacggcgtgaagtatgagagcgagctgacgggctccagcgagcgcgcggagcagcctctgtccgtggggcgcctctgctccaccatctgcaacatgcccaaggcgctacgcaccctctgcgtcaaccacttcctggggtggctctcattcgaggggatgttgctcttctacacagacttcatgggcgaggtggtgtttcagggggaccccaaggccccgcacacatcagaggcgtatcagaagtacaacagcggcgtgaccatgggctgctggggcatgtgtatctacgccttcagtgctgccttctactcagctatcctggagaagctggaggagttcctcagcgtccgcaccctctacttcatcgcctatctcgccttcggcctggggaccgggcttgccaccctctccaggaacctctacgtggtcctgtcgctctgcataacctacgggattttattttccaccctgtgcaccttgccttactcgctgctctgcgattactatcagagtaagaagtttgcagggtccagtgcggacggcacccggcggggcatgggcgtggacatctctctgctgagctgccagtacttcctggctcagattctggtctccctggtcctggggcccctgacctcggccgtgggcagtgccaacggggtgatgtacttctccagcctcgtgtccttcctgggctgcctgtactcctccctgtttgtcatttatgaaattcctcccagcgacgctgcagacgaggagcaccggcccctcctgctgaacgtctgacatcgcggagcctcgactccggacacgcgcctgcacctgggggtctggagcaggccgaccagtgaggaccaaagggccttgttggacagggggactggctgcctactggaatgtaaatatgtgataaaataataaatgacagcggcaaagcc
